(19) United States
(12) Patent Application Publication
(10) Pub. No.: US 2025/0313894 A1
(43) Pub. Date: Oct. 9, 2025

(54) ARRAY OF ASTHMA- AND ALLERGY-ASSOCIATED DIFFERENTIALLY-METHYLATED SITES

(71) Applicant: The University of Chicago, Chicago, IL (US)

(72) Inventors: Carole Ober, Chicago, IL (US); Andreanne Morin, Chicago, IL (US); Britney Helling, Chicago, IL (US); Emma Thompson, Chicago, IL (US)

(21) Appl. No.: 18/865,031

(22) PCT Filed: May 16, 2023
(86) PCT No.: PCT/US2023/067047

§ 371 Date: Nov. 12, 2024

Related U.S. Application Data
(60) Provisional application No. 63/342,463, filed on May 16, 2022.
(60) Provisional application No. 63/502,195, filed on May 15, 2023.

(51) Int. Cl. C12Q 1/6883

(52) U.S. Cl. CPC C12Q 1/6883; C12Q 2600/154

(57) ABSTRACT

Provided herein are DNA methylation arrays displaying oligonucleotides containing human CpG sites that are differentially methylated in subjects suffering from asthma and/or allergies relative to the general population, and methods of use thereof.

### STATEMENT REGARDING RELATED APPLICATIONS

[0001] This application claims priority to U.S. Provisional Patent Application No. 63/342,463, filed May 16, 2022, and to U.S. Provisional Patent Application No. 63/502,195, filed May 15, 2023, the entire contents of which are incorporated herein by reference for all purposes.

### STATEMENT REGARDING FEDERAL FUNDING

[0002] This invention was made with government support under grant number OD023282 awarded by National Institutes of Health. The government has certain rights in the invention.

### TABLE

[0003] The specification of U.S. Provisional Patent Application No. 63/502,195 includes a lengthy table, Table A, which was submitted via EFS-Web in electronic format as follows: File name: TableA_targetCpGs.txt, Date created: May 15, 2023, File size: 582,259 Bytes. The content of Table A is hereby incorporated by reference in its entirety.

### SEQUENCE LISTING

[0004] The computer readable sequence listing filed herewith, titled “UCHI-39941-601_SQL”, created May 13, 2023, having a file size of 49,251,874 bytes, is hereby incorporated by reference in its entirety.

### FIELD

[0005] Provided herein are DNA methylation arrays displaying oligonucleotides containing human CpG sites that are differentially methylated in subjects suffering from asthma and/or allergic disease relative to the general population, and methods of use thereof.

### BACKGROUND

[0006] Epigenetics refers to modifications of DNA molecules that do not alter the DNA sequence but play important roles in regulating gene expression. Environmental exposures can directly modify epigenetic marks in the human genome and epigenetic responses can mediate the effects of exposures on gene expression and disease risk. Thus, the epigenome may contribute directly to disease risk or be sites of gene-environment interactions, providing both complementary and mechanistic information, respectively, to genome-wide association studies (GWAS). The most common epigenetic mark in the human genome is methylated cytosines at CpG dinucleotides, and the availability of high-throughput array-based platforms to measure DNA methylation has led to an explosion of epigenome-wide association studies. However, although the most commonly used commercial array, the Infinity Methylation EPIC Beadchip (Illumina, Inc., San Diego, CA), interrogates up to 850,000 CpGs, this represents <5% of CpGs in the genome. Moreover, the selection of CpGs for this array was agnostic with respect to disease or tissue types. Accordingly, what is needed are arrays to detect CpG sites that contribute to disease risk, including asthma and allergy.

### SUMMARY

[0007] Provided herein are DNA methylation arrays displaying oligonucleotides containing human CpG sites that are differentially methylated in subjects suffering from asthma and/or allergic disease relative to the general population, and methods of use thereof.

[0008] In some embodiments, the arrays described herein are used to detect the methylation of genomic DNA from a human subject.

[0009] In some embodiments, provided herein are compositions comprising 1,000 or more (e.g., >1,000, >2,000, >5,000, >10,000, >15,000, >20,000, >25,000, >30,000, >35,000, >40,000, >45,000, >50,000, >55,000, >60,000, >65,000, >70,000, >75,000, >80,000, >85,000, >90,000) probe oligonucleotides, each of the 1,000 or more (e.g., >1,000, >2,000, >5,000, >10,000, >15,000, >20,000, >25,000, >30,000, >35,000, >40,000, >45,000, >50,000, >55,000, >60,000, >65,000, >70,000, >75,000, >80,000, >85,000, >90,000) probe oligonucleotides, each probe oligonucleotide comprising a distinct sequence capable of hybridizing to a human genomic location identified in Table A.

[0010] In some embodiments, provided herein are compositions comprising 1,000 or more (e.g., >1,000, >2,000, >5,000, >10,000, >15,000, >20,000, >25,000, >30,000, >35,000, >40,000, >45,000, >50,000, >55,000, >60,000, >65,000, >70,000, >75,000, >80,000, >85,000, >90,000) probe oligonucleotides, each of the 1,000 or more (e.g., >1,000, >2,000, >5,000, >10,000, >15,000, >20,000, >25,000, >30,000, >35,000, >40,000, >45,000, >50,000, >55,000, >60,000, >65,000, >70,000, >75,000, >80,000, >85,000, >90,000) probe oligonucleotides comprising a distinct sequence that is complementary to a human genomic location identified in Table A.

[0011] In some embodiments, a probe oligonucleotide comprises a portion (e.g., 10⁻⁵⁰ nucleotides (e.g., 10, 15, 20, 25, 30, 35, 40, 45, 50, or ranges therebetween) of a sequence complementary to a human genomic location identified in Table A, and terminating at a methylation site within the sequence.

[0012] In some embodiments, provided herein are compositions comprising 1,000 or more (e.g., >1,000, >2,000, >5,000, >10,000, >15,000, >20,000, >25,000, >30,000, >35,000, >40,000, >45,000, >50,000, >55,000, >60,000, >65,000, >70,000, >75,000, >80,000, >85,000, >90,000) probe oligonucleotides, each of the 1,000 or more (e.g., >1,000, >2,000, >5,000, >10,000, >15,000, >20,000, >25,000, >30,000, >35,000, >40,000, >45,000, >50,000, >55,000, >60,000, >65,000, >70,000, >75,000, >80,000, >85,000, >90,000) probe oligonucleotides, each probe oligonucleotide comprising a distinct sequence having at least 90% sequence identity to (e.g. at least 90%, at least 91%, at least 92%, at least 93%, at least 94%, at least 95%, at least 96%, at least 97%, at least 98%, at least 99%, or 100% identity to) SEQ ID NO: 1-SEQ ID NO: 53,840. In some embodiments, provided herein are compositions comprising 1,000 or more (e.g., >1,000, >2,000, >5,000, >10,000, >15,000, >20,000, >25,000, >30,000, >35,000, >40,000, >45,000, >50,000, >55,000, >60,000, >65,000, >70,000, >75,000, >80,000, >85,000, >90,000) probe oligonucleotides, each of the 1,000 or more (e.g., >1,000, >2,000, >5,000, >10,000, >15,000, >20,000, >25,000, >30,000, >35,000, >40,000, >45,000, >50,000, >55,000, >60,000, >65,000, >70,000, >75,000, >80,000, >85,000, >90,000) probe oligonucleotides, each probe oligonucleotide comprising a distinct sequence selected from SEQ ID NO: 1-SEQ ID NO: 53,840.

[0013] In some embodiments, provided herein are compositions comprising 1,000 or more (e.g., >1,000, >2,000, >5,000, >10,000, >15,000, >20,000, >25,000, >30,000, >35,000, >40,000, >45,000, >50,000, >55,000, >60,000, >65,000, >70,000, >75,000, >80,000, >85,000, >90,000) type I probe oligonucleotides. A type I probe oligonucleotide refers to a probe oligonucleotide wherein a single probe oligonucleotide is used to detect a target. In contrast, a type II probe oligonucleotide refers to a probe oligonucleotide wherein two probe oligonucleotides are used to detect a target. SEQ ID NO: 1-SEQ ID NO: 37942 correspond to type I probe oligonucleotides. In some embodiments, provided herein are compositions comprising 1,000 or more (e.g., >1,000, >2,000, >5,000, >10,000, >15,000, >20,000, >25,000, >30,000, >35,000, >40,000, >45,000, >50,000, >55,000, >60,000, >65,000, >70,000, >75,000, >80,000, >85,000, >90,000) type II probe oligonucleotides. SEQ ID NO: 37,943-SEQ ID NO: 53,840 correspond to type II probe oligonucleotides. In some embodiments, the composition comprises type I and type II probe oligonucleotides. In some embodiments, the composition comprises type II probe oligonucleotide pairs. A type II probe oligonucleotide pair refers to the two probe oligonucleotides used to detect a given target. Type II probe oligonucleotide pairs are exemplified by two sequential sequences within SEQ ID NO: 37,943-SEQ ID NO: 53,840, starting with a first pair shown in SEQ ID NO: 37,493 and SEQ ID NO: 37,494, a second pair shown in SEQ ID NO: 37,495 and SEQ ID NO: 37,496, a third pair shown in SEQ ID NO: 37,497 and SEQ ID NO: 37,498, and so on.

[0014] In some embodiments, the probe oligonucleotide corresponds to the unmethylated methylation site and terminates in a 3′ CA (complementary to a CpG site modified by bisulfite treatment and amplification). In some embodiments, such a probe oligonucleotide is capable of hybridizing to a sample nucleic acid corresponding to a methylated or unmethylated site (e.g., a differentially-modified oligonucleotide generated from a methylated or unmethylated site) but only allowing single nucleotide extension from a sample nucleic acid corresponding to the unmethylated methylation site.

[0015] In some embodiments, the probe oligonucleotide corresponds to the unmethylated methylation site and terminates in a 3′ CG (complementary to a CpG site unmodified by bisulfite treatment and amplification). In some embodiments, such a probe oligonucleotide is capable of hybridizing to a sample nucleic acid corresponding to a methylated or unmethylated site (e.g., a differentially-modified oligonucleotide generated from a methylated or unmethylated site) but only allowing single nucleotide extension from a sample nucleic acid corresponding to the methylated methylation site.

[0016] In some embodiments, the probe oligonucleotide corresponds to a methylation site and terminates in a 3′ C (complementary to the G of a CpG site). In some embodiments, such a probe oligonucleotide is capable of hybridizing to a sample nucleic acid corresponding to a methylated or unmethylated site (e.g., a differentially-modified oligonucleotide generated from a methylated or unmethylated site) and allowing single nucleotide extension from a sample nucleic acid corresponding to either the methylated or unmethylated methylation site.

[0017] In some embodiments, probe oligonucleotides herein comprise a linker oligonucleotide (e.g., 2-25 nucleotides in length) at the 5′ end of the probe. In some embodiments, the 5′ end of the probe oligonucleotide tenrinates in a functional group capable of attachment to a solid surface.

[0018] In some embodiments, probe oligonucleotides are deoxyribonucleic acid (DNA) oligonucleotides.

[0019] In some embodiments, provided herein are devices (e.g., arrays) comprising the composition of 1,000 or more (e.g., >1,000, >2,000, >5,000, >10,000, >15,000, >20,000, >25,000, >30,000, >35,000, >40,000, >45,000, >50,000, >55,000, >60,000, >65,000, >70,000, >75,000, >80,000, >85,000, >90,000) probe oligonucleotides, each of the 1,000 or more (e.g., >1,000, >2,000, >5,000, >10,000, >15,000, >20,000, >25,000, >30,000, >35,000, >40,000, >45,000, >50,000, >55,000, >60,000, >65,000, >70,000, >75,000, >80,000, >85,000, >90,000) of the probe oligonucleotides described herein, wherein the probe oligonucleotides are displayed on a surface of a substrate. (e.g., a solid surface). In some embodiments, provided herein are devices (e.g. arrays) comprising 1,000 or more (e.g., >1,000, >2,000, >5,000, >10,000, >15,000, >20,000, >25,000, >30,000, >35,000, >40,000, >45,000, >50,000, >55,000, >60,000, >65,000, >70,000, >75,000, >80,000, >85,000, >90,000) probe oligonucleotides, each probe oligonucleotide comprising a distinct sequence having at least 90% sequence identity to (e.g. at least 90%, at least 91%, at least 92%, at least 93%, at least 94%, at least 95%, at least 96%, at least 97%, at least 98%, at least 99%, or 100% identity to) SEQ ID NO: 1-SEQ ID NO: 53,840. In some embodiments, provided herein are devices (e.g. arrays) comprising 1,000 or more (e.g., >1,000, >2,000, >5,000, >10,000, >15,000, >20,000, >25,000, >30,000, >35,000, >40,000, >45,000, >50,000, >55,000, >60,000, >65,000, >70,000, >75,000, >80,000, >85,000, >90,000) probe oligonucleotides, each probe oligonucleotide comprising a distinct sequence selected from SEQ ID NO: 1-SEQ ID NO: 53,840. In some embodiments, the probe oligonucleotides are displayed on the surface of a substrate (e.g. a solid surface). In some embodiments, the array comprises type I and/or type II oligonucleotides, as described herein. In some embodiments, the substrate is selected from a bead, a slide, a plate, well, etc. In some embodiments, the surface comprises plastic, glass, metal, etc. In some embodiments, the oligonucleotides are tethered to the surface of the substrate. In some embodiments, the surface is coated with a material to allow attachment of the probe oligonucleotides. In some embodiments, the substrate comprises one or more array locations and the oligonucleotides are displayed on a surface within the array location. In some embodiments, the substrate is a microtiter plate and the array locations are microtiter wells. In some embodiments, each array location comprises a plurality of discrete sites for attachment of oligonucleotides to the substrate. In some embodiments, each discrete site is a bead well within the surface of the substrate. In some embodiments, the oligonucleotides are tethered to beads and the beads reside within the bead wells on the surface of the substrate. In some embodiments, each of the probe oligonucleotides are tethered to a separate bead. In some embodiments, each of the array locations comprises at least 1,000 discrete sites per cm² (e.g., >1,000 sites/cm², >2,000 sites/cm², >5,000 sites/cm², >10,000 sites/cm², >20,000 sites/cm², >50,000 sites/cm², >100,000 sites/cm², >200,000 sites/cm², >500,000 sites/cm², or >1,000,000 sites/cm²).

[0020] In some embodiments, provided herein are methods of detecting the presence of nucleic acid sequences in a sample, comprising: (a) contacting probe oligonucleotides described herein (e.g., >1,000, >2,000, >5,000, >10,000, >15,000, >20,000, >25,000, >30,000, >35,000, >40,000, >45,000, >50,000, >55,000, >60,000, >65,000, >70,000, >75,000, >80,000, >85,000, >90,000) probe oligonucleotides, each of the 1,000 or more (e.g., >1,000, >2,000, >5,000, >10,000, >15,000, >20,000, >25,000, >30,000, >35,000, >40,000, >45,000, >50,000, >55,000, >60,000, >65,000, >70,000, >75,000, >80,000, >85,000, >90,000) or a device displaying such probe oligonucleotides with a nucleic acid sample; and (b) detecting the binding of one or more nucleic acids comprising the nucleic acid sequences to one or more of the probe oligonucleotides.

[0021] In some embodiments, provided herein are methods of detecting the methylation status of methylation sites in a nucleic acid in a sample, the method comprising: (a) treating the sample to differentially modify the nucleic acid at methylated and unmethylated methylation sites to produce a differentially-modified nucleic acid; (b) amplifying the differentially-modified nucleic acid; (c) fragmenting the differentially-modified nucleic acid into differentially-modified oligonucleotides; (d) contacting a device described herein with the differentially-modified oligonucleotides, and allowing the differentially-modified oligonucleotides to hybridize to the probe oligonucleotides, thereby forming probe/differentially-modified oligonucleotide complexes; (e) labeling the probe/differentially-modified oligonucleotide complexes in a manner that is specific to whether the differentially-modified oligonucleotide of each complex corresponds to a methylated or unmethylated methylation site; (f) detecting the labeled probe/differentially-modified oligonucleotide complexes; and (g) analyzing (1) the type of labeling and (2) the location of the probe/differentially-modified oligonucleotide complexes on the surface.

[0022] In some embodiments, amplifying the differentially-modified nucleic acid comprises PCR amplification.

[0023] In some embodiments, treating the sample to differentially modify the nucleic acid at methylated and unmethylated methylation sites comprises exposing the sample to bisulfite that converts unmethylated cytosine to uracil but methylated cytosines are protected from conversion. In some embodiments, amplifying the differentially-modified nucleic acid converts the uracil generated by bisulfite conversion into thymine. In some embodiments, treating the sample to differentially modify the nucleic acid at methylated and unmethylated methylation sites comprises exposing the sample to bisulfite that converts unmethylated cytosine to uracil but methylated cytosines are protected from conversion.

[0024] In some embodiments, fragmenting the differentially-modified nucleic acid comprises site-specific fragmentation of the differentially-modified nucleic acid. In some embodiments, site-specific fragmentation is by restriction endonuclease. In some embodiments, fragmenting the differentially-modified nucleic acid comprises random fragmentation of the differentially-modified nucleic acid. In some embodiments, random fragmentation comprises chemical, enzymatic, and/or mechanical fragmentation.

[0025] In some embodiments, methods further comprise a step of isolating the differentially-modified nucleic acid and/or differentially-modified oligonucleotides from reagents for amplification and/or fragmentation.

[0026] In some embodiments, labeling the probe/differentially-modified oligonucleotide complexes in a manner that is specific to whether the differentially-modified oligonucleotide of each complex comprises performing a single nucleotide extension reaction with labeled nucleotides. In some embodiments, the labeled nucleotides comprise happens. In some embodiments, methods further comprise contacting probe/differentially-modified oligonucleotide complexes following the single nucleotide extension with antibodies capable of binding to the haptens, wherein the antibodies comprise detectable labels. In some embodiments, the labeled nucleotides comprise detectable labels. In some embodiments, the detectable labels comprise fluorescent labels.

[0027] In some embodiments, nucleic acid samples comprising genomic DNA. In some embodiments, the genomic DNA is human genomic DNA. In some embodiments, the human genomic DNA is obtained from airway epithelial cells. In some embodiments, the cells are obtained from a subject suffering from asthma and/or allergic disease. In some embodiments, the cells are obtained from a subject suspected as having asthma and/or allergic disease.

### BRIEF DESCRIPTION OF THE DRAWINGS

[0028] FIGS. 1A-ID show an overview of exemplary methods described herein. (FIG. 1A) Whole-genome bisulfite sequencing (WGBS) and differential methylation were performed in airway epithelial cell DNA from birth cohorts comprised of African American children or European American young adults (half of each with allergic asthma and half without asthma or allergies). To select CpGs for the Custom array, CpGs were identified based on prior evidence of association with asthma or allergic disease from three sources. The CpGs were then prioritized based on their overlap with functional annotations to ultimately design a Custom array with 53,840 probes for 45,891 CpGs. (FIG. 1B) Airway epithelial cell DNA was hybridized to both the Custom array and the EPIC array, and β value distributions on the arrays were compared to the WGBS data and across tissues using the Custom and EPIC array. (FIG. 1C, FIG. 1D) The Custom array was validated by performing an EWAS of allergic sensitization (AS), examining correlations with the gene expression in the same cells, and replicating findings in a second cohort and with allergic asthma. (FIG. 1E) The combined results of the Custom and EPIC arrays in the discovery cohort and of the Custom array in the replication cohort for known and novel loci were examined in regional association plots.

[0029] FIGS. 2A-2D show proportions of Custom and EPIC CpGs by primary criteria, functional annotation category, and genomic location. All comparisons were performed with a Fisher's Exact Test. (FIG. 2A) Proportions of Custom CpGs that passed processing QC in URECA on each array by three primary criteria and six functional annotation categories. CpGs on the Custom array were significantly enriched (p<2.2×10⁻¹⁶) in all categories compared to the EPIC array with the exception of prior EWAS, in which they were depleted (p<2.2×10⁻¹⁶). (FIG. 2B) The distributions of CpGs by genomic location. Compared to the EPIC CpGs, CpGs on the Custom array were enriched in introns and exons and depleted in intergenic regions and 5′UTRs (p<10⁻⁴), but did not differ in any other categories. (FIG. 2C) Proportions of Custom and EPIC DMCs from each array were compared by three primary criteria and six functional annotation categories. Compared to all CpGs, DMCs from both arrays were depleted at transcription start sites and in areas of open chromatin (Custom p=1.14×10⁻⁷ and p=4.11×10⁻⁹; EPIC p<2.2×10⁻¹⁶ for both, respectively). DMRs were marginally enriched for DMCs compared to all CpGs on the Custom array (p=0.066) but significantly enriched on the EPIC array (p=1.54×10⁻⁶). DMCs in prior EWAS studies of asthma and allergic diseases were modestly enriched on the Custom array (FET p=0.059) and significantly enriched on the EPIC array (p<2.2×10⁻¹⁶). In contrast, CpGs at GWAS loci for asthma and allergic diseases were not enriched among DMCs on the Custom array (p=0.32) and only modestly enriched on the EPIC array (p=0.042). The distribution of DMCs by genomic location is shown in FIG. D. The distribution of DMCs on both arrays did not differ from the distributions of all CpGs.

[0030] FIGS. 3A-3B show cross-tissue comparisons of methylation levels on the EPIC and Custom arrays. Density distribution plots of methylation levels, measured as β values, in 96 individuals after quantile (Custom) or quantile+SWAN (EPIC) normalizations. The x-axis shows the proportion of methylation at CpG sites on the EPIC (FIG. 3A) and Custom (FIG. 3B) arrays for each individual in each cell or tissue type. All DNA methylation data were processed using the same pipeline. The nasal epithelial cell DNA (EPIC and Custom) and nasal lavage cell DNA (Custom) were from the same randomly selected 96 URECA children with both the EPIC and Custom array in nasal epithelial cells. The buccal, placenta, and cord blood cells were from infants in the VCSIP Study.

[0031] FIGS. 4A-4G show allergic sensitization (AS) EWAS results in URECA and INSPIRE children using the EPIC and Custom arrays. (FIG. 4A-4C) Upper panel: Volcano plots showing the log 2-fold change in methylation (M-values) by proportion positive skin prick tests (x-axis) and the −log₁₀(P-value) from the EWAS (y-axis). Significant DMCs at a q-value threshold of 0.05 are shown are shown in blue or purple (EPIC and high-value EPIC, respectively) in URECA (FIG. 4A), and Custom in red (URECA) (FIG. 4B) or turquoise (INSPIRE) (FIG. 4C). The number of AS DMCs that were hypermethylated or hypomethylated are shown as up and down arrows, respectively. (FIG. 4A-4C) Middle panel: Density plots of the DMC β values in each EWAS. (FIG. 4A-4B) Lower panel: Density plots of 0 values for DMCs that are eQTMs for their nearest genes. (FIG. 4D) Distributions of the distances of DMCs to the next nearest DMC on the Custom (red) and EPIC (blue) arrays. The distance to nearest DMC is shown on the x-axis; the proportion of DMCs in each distance bin is shown on the y-axis. (FIG. 4E-4F) Correlation of effect sizes (log fold change) of AS DMCs and allergic asthma in URECA and INSPIRE. The effect size of DMCs for AS (x-axis) and allergic asthma (y-axis) are shown. Red or turquoise dots were associated with allergic asthma at a q-value ≤0.05 in URECA or INSPIRE, respectively; black dots are AS-only DMCs. (FIG. 4G) Correlation of effect sizes (log fold change) between DMCs identified in the INSPIRE AS EWAS (x-axis) and the URECA AS EWAS (y-axis). Red or turquoise points are AS DMCs only in URECA or INSPIRE, respectively, at a q-value threshold of 0.05; black points are AS DMCs in both at a q-value ≤0.05. The dashed lines in E-G are the correlation lines.

[0032] FIG. 5 shows an exemplary functional genomics pipeline for identifying high-value CpGs. The pipeline for selecting high-value CpGs involved three steps. In Step 1, all CpGs with some prior evidence linking them to asthma or allergic diseases were identified in three categories. Using WGBS data, CpG sites within asthma DMRs in ethnically diverse children were identified (red box). Based on literature reviews, CpGs associated with asthma or allergic diseases in other DNA methylation studies (blue box) and CpGs at asthma or allergic disease GWAS loci (green box) were identified. After removing duplicates, CpGs that are on the EPIC array, in blacklisted regions of the genome, or overlapped with common SNPs were removed. In Step 2, the CpGs were overlapped with functional annotations and required that CpGs in DMRs from the WGBS overlapped with at least three annotations (pink box), CpGs from prior methylation studies overlapped with one additional annotation (light blue box), and CpGs from GWAS loci overlapped with at least four additional annotations. This resulted in 92,024 “high-value” CpGs. In Step 3, the CpGs were submitted to Illumina for design and manufacture of the final set of selected CpGs. CpGs that passed manufacturing and quality control are shown in Table A. Table A contains 45,891 CpGs, targeted by 53,840 probes.

[0033] FIGS. 6A-6B show distribution of Custom Array CpGs by primary criteria and DMR category. (FIG. 6A) CpGs on the Custom array proportionally represented DMR-CpGs from WGBS studies in African Americans, European Americans, and the combined samples. (FIG. 6B) CpGs on the Custom array proportionally represented CpGs from the WGBS studies and previous GWAS of asthma or allergic diseases; very few previous EWAS CpGs were included on the Custom array because nearly all were on the EPIC array.

[0034] FIGS. 7A-7C show a comparison of methylation level (β value) distributions from the EPIC and Custom Arrays to the WGBS data. Percent methylation is shown on the x-axis and density is shown on the y-axis. The number of CpGs in each comparison is shown at the top of each pair, which includes the number of sites with at least 10 mapped reads in the WGBS data. (FIG. 7A) β value distribution for the WGBS data compared to the EPIC array for the 19 URECA subjects assayed using both platforms that passed QC. Spearman's rho=0.82 (P<2.2×10⁻¹⁶) (FIG. 7B) β value distribution for the WGBS data compared to the Custom array for the same 19 URECA subjects. Spearman's rho=0.83 (P<2.2×10⁻¹⁶). (FIG. 7C) β value distribution for the WGBS data compared to the Custom array for the 17 COAST samples that passed QC. Spearman's rho=0.82 (P<2.2×10⁻¹⁶)

[0035] FIG. 8 shows β value distribution plots from nine GTEX tissues. Percent methylation (β value) is shown on the x-axis and density is shown on the y-axis. Data are from Oliva et al., Genetic regulation of DNA methylation across tissues reveals thousands of molecular links to complex traits (Oliva M et al., Nat Genet. 2023; 55(1):112-22.)

[0036] FIGS. 9A-9B show β value distributions of the high-value EPIC CpGs compared to all CpGs on the EPIC array. To determine whether the enrichment for IM CpGs on the Custom array was attributable to the selection criteria we used for designing the array, the CpGs on the EPIC array were filtered using the same pipeline as that used for selecting CpGs for the Custom array. These are CpGs that met criteria for inclusion on the Custom array but were excluded because they were on the EPIC array. These are referred to as high-value EPIC CpGs. Of the 789,290 CpGs on the EPIC array that passed QC, 26,905 (3.4%) were designated as high-value. The β distribution of the high-value EPIC CpGs in nasal epithelial cells revealed a pattern similar to CpGs on the Custom array, with the majority (61%) having β values between 20-80% (FIG. 9A) The β value distribution of the 789,290 EPIC CpGs is shown in blue. (FIG. 9B) The β value distribution of the 26,905 EPIC CpGs that meet the selection criteria for inclusion on the Custom array (high-value EPIC CpGs) is shown in purple. The percent methylation (β value) is shown on the x-axis and density is shown on the y-axis

[0037] FIGS. 10A-10B show allergic sensitization in URECA and INSPIRE. (FIG. 10A) Proportion of subjects with positive skin prick test (SPT) results to zero, one to two, three to five, or six to nine allergens tested in the URECA and INSPIRE cohorts. (FIG. 10B) Proportion of positive skin prick tests by allergen tested in URECA and INSPIRE cohorts. The 14 allergens tested for URECA (red) include Mouse epithelia, Dog epithelia, Dermatophagoides fainae (mite), Dermatophagoides pteronyssinus (mite), Cat hair, Rat epithelia, American/German cockroach, German cockroach, Alternaria Tennis, Aspergillus mix, Ragweed mix, Tree pollen (oak or birch), Penicillium Notatum Pennicillium Chrysogenum, Timothy grass. The thirteen allergens tested for INSPIRE (turquoise) include dog, cat, Dermatophagoides pteronyssinus and Dermatophagoides farinae mix, American/German cockroach, Penicillium Notatum Penicillium Chrysogenum, Alternaria Tenuis, Cladosporum Herbarum, Aspergillus mix, Ragweed mix, Eastern 6 Tree mix, K-O-T Grass mix, Maple/Box Elder mix, and Weed mix.

[0038] FIGS. 11A-11C show Manhattan plots illustrating EWAS results of allergic sensitization Chromosomes 1-22 are shown along the x-axis and −log₁₀ P-values are shown on the y-axis. (FIG. 11A) Results in URECA (EPIC array). Significant DMCs at a q-value threshold of 0.05 are shown in blue. (FIG. 11B) Results in URECA (Custom array). Significant DMCs at a q-value threshold of 0.05 are shown in red. (FIG. 11C) Results in INSPIRE (Custom array). Significant DMCs at a q-value threshold of 0.05 are shown in turquoise. Plots were generated using CMplot (https:/github.com/YinLiLin/CMplot).

[0039] FIGS. 12A-12D show density plots showing β value distributions for all CpGs, DMCs, eQTMs and their nearest genes, and eQTMs and their pcHi-C target genes for the EPIC and Custom arrays. All plots show percent methylation (β value) on the x-axis and density on the y-axis. (FIG. 12A) Density plots of all CpGs on the EPIC (blue; N=789,290) and an exemplary Custom (red; N=37,256) arrays. (FIG. 12B) Density plots of all DMCs on the EPIC (N=1,805) and Custom (N=193) arrays. (FIG. 12C) Density plots of eQTMs with their nearest gene on the EPIC (N=87,193) and Custom (N=8,778) arrays. (FIG. 12D) Density plots of eQTMs with their pcHi-C target genes on the EPIC (N=59,542) and Custom arrays (N=9,298) arrays.

[0040] FIG. 13 shows an ancestry PCA plot of self-identified race/ethnicity of 280 URECA subjects Ancestry PCA plot of self-identified race/ethnicity of 280 URECA subjects. PC1 and PC2 are shown on the x-axis and y-axis, respectively. The proportion of variance explained is shown in parentheses.

[0041] FIGS. 14A-14C show DMCs and eQTMs at β exemplary loci. In each panel, locus zoom plots show the DMCs from the three AS EWAS using the EPIC array (URECA; blue points=non-high value CpGs; purple points=high-value [filtered] CpGs) and Custom array (URECA, red points; INSPIRE, turquoise points). The genomic locations and genes are shown on the x-axis; EWAS p-values are shown on the y-axis. The dashed horizontal lines show the 0.05 q-value threshold for the Custom array in URECA (red) and for the EPIC array in URECA and Custom array in INSPIRE (blue and purple overlaid). The bar code at the top of the plot shows the location of CpGs at this locus on both arrays. The most significant DMC in the region for a given EWAS (cohort and platform; see legend) is illustrated by a diamond; additional DMCs appear as circles. Correlations between methylation levels (x-axis) of the lead Custom and high-value EPIC CpGs in URECA and expression of relevant genes (y-axis) in epithelial cells from URECA children are shown in the upper right of each panel, and boxplots of the proportion of positive skin prick tests (x-axis) and methylation levels for the lead Custom and high-value EPIC CpGs in URECA (from the EWAS) are shown in the lower right of each panel. (FIG. 14AA) CISH locus on chromosome 3. (FIG. 14B) SLC22A5-IRF1 locus on chromosome 5. (FIG. 14C) HDAC7-VDR locus on chromosome 12.f

[0042] FIG. 15 shows regional association plots for the 10 most significant DMCs in the URECA EWAS using the Custom array. The genomic locations and genes are shown on the x-axis; EWAS P-values are shown on the y-axis. The dashed horizontal lines show the 0.05 q-value threshold for the Custom array (red) and for the EPIC array (blue). The density of CpGs in the region is shown along the top of each plot. The most significant DMC in a region for a given EWAS (cohort and platform; see legend upper right) is illustrated by a diamond; additional DMCs appear as circles.

[0043] FIG. 16 is a graph showing an evaluation of array performance in identifying men exposed to cow barns (an allergen known to cause asthma). The results demonstrate that the array identified 79 differentially methylated cytosines (DMCs) in men exposed to cow barns compared to men not exposed to cow barns.

[0044] FIG. 17 is a graph showing an evaluation of array performance in samples obtained from subjects receiving food allergy treatment with Xolair (omalizumab) vs. subjects receiving a placebo treatment for food allergy. The array identified 140 CpGs associated with a differential response to Xolair at 36 weeks following treatment.

### DEFINITIONS

[0045] Although any methods and materials similar or equivalent to those described herein can be used in the practice or testing of embodiments described herein, some preferred methods, compositions, devices, and materials are described herein. However, before the present materials and methods are described, it is to be understood that this invention is not limited to the particular molecules, compositions, methodologies or protocols herein described, as these may vary in accordance with routine experimentation and optimization. It is also to be understood that the terminology used in the description is for the purpose of describing the particular versions or embodiments only, and is not intended to limit the scope of the embodiments described herein.

[0046] Unless otherwise defined, all technical and scientific terms used herein have the same meaning as commonly understood by one of ordinary skill in the art to which this invention belongs. However, in case of conflict, the present specification, including definitions, will control. Accordingly, in the context of the embodiments described herein, the following definitions apply.

[0047] As used herein and in the appended claims, the singular forms “a”, “an” and “the” include plural reference unless the context clearly dictates otherwise. Thus, for example, reference to “an oligonucleotide” is a reference to one or more oligonucleotides and equivalents thereof known to those skilled in the art, and so forth.

[0048] As used herein, the term “comprise” and linguistic variations thereof denote the presence of recited feature(s), element(s), method step(s), etc. without the exclusion of the presence of additional feature(s), element(s), method step(s), etc. Conversely, the term “consisting of” and linguistic variations thereof, denotes the presence of recited feature(s), element(s), method step(s), etc. and excludes any unrecited feature(s), element(s), method step(s), etc., except for ordinarily-associated impurities. The phrase “consisting essentially of” denotes the recited feature(s), element(s), method step(s), etc. and any additional feature(s), element(s), method step(s), etc. that do not materially affect the basic nature of the composition, system, or method. Many embodiments herein are described using open “comprising” language. Such embodiments encompass multiple closed “consisting of” and/or “consisting essentially of” embodiments, which may alternatively be claimed or described using such language.

[0049] As used herein, the terms “microarray” or “array” refer to a solid support (e.g., a chip, plate, bead, etc.) displaying an arrangement of biomacromolecules. For example, a DNA array displays an arrangement of a plurality of oligonucleotides.

[0050] As used herein, the term “genome” refers to all the genetic material in the chromosomes of an organism. DNA derived from the genetic material in the chromosomes of a particular organism is genomic DNA.

[0051] As used herein, the term “nucleic acids” refers to any polymer or oligomer of pyrimidine and purine bases, preferably cytosine, thymine and/or uracil, adenine, and guanine, respectively. See Albert L. Lehninger, PRINCIPLES OF BIOCHEMISTRY, at 793-800 (Worth Pub. 1982); incorporated by reference in its entirety. Embodiments herein may utilize any deoxyribonucleotide, ribonucleotide or peptide nucleic acid component, and any chemical variants thereof, such as methylated, hydroxymethylated or glucosylated forms of these bases, and the like. The polymers or oligomers may be heterogeneous or homogeneous in composition, and may be isolated from naturally-occurring sources or may be artificially or synthetically produced. In addition, the nucleic acids may be DNA or RNA. In particular embodiments, the arrays herein and the nucleic acids to be analyzed are deoxyribonucleotides (DNA).

[0052] As used herein, the term “oligonucleotide” refers to a nucleic acid (e.g., a DNA polymer) ranging from at least 2 nucleotides in length up to about 50 nucleotides in length (e.g., 2, 3, 4, 5, 6, 7, 8, 9, 10, 11, 12, 13, 14, 15, 16, 17, 18, 19, 20, 25, 30, 35, 40, 45, 50, or ranges therebetween).

[0053] As used herein, the term “polynucleotide” refers to a nucleic acid (e.g., a DNA polymer) of 50 nucleotides or more in length.

[0054] As used herein, the term “complementary” refers to the capacity for Watson-Crick base pairing between nucleotides or nucleic acids, such as, for instance, between the two strands of a double stranded DNA molecule or between an oligonucleotide probe and a target or sample nucleic acid. “Watson-Crick” base pairing refers to, A and T (or A and U), or C and G. Other forms of base pairing, such as Hoogstein base pairing are not considered complementary herein. Two single nucleic acid molecules are said to be complementary when the nucleotides of one strand, optimally aligned and compared and with a segment of a second strand, allow for 100% Watson-Crick base pairing over the length of the shorter strand. Nucleic acids with less than 100% complementarity (e.g., 95%, 90%, 85%, 80%, 75%, 70%, or less) may still be capable of hybridizing with each other. In some embodiments, a portion of one nucleic acid is complementary to a portion of a second nucleic acid, but the full-lengths of the nucleic acids are not complementary. “Selective hybridization” will occur when there is at least about 65% complementary over a stretch of at least 14 to 25 nucleotides, preferably at least about 75%, more preferably at least about 90% complementary. See, M. Kanehisa Nucleic Acids Res. 12:203 (1984), incorporated herein by reference.

[0055] As used herein, the term “hybridization” refers to the process in which two single-stranded nucleic acids bind non-covalently to form a double-stranded nucleic acid; triple-stranded hybridization is also theoretically possible. The resulting (usually) double-stranded polynucleotide is a “hybrid.” Hybridizations may performed under “stringent conditions,” for example, at a salt concentration of no more than about 1 M and a temperature of at least 25° C. For example, conditions of 5×SSPE (750 mM NaCl, 50 mM NaPhosphate, 5 mM EDTA, pH 7.4) and a temperature of 25° C.-30° C. are suitable for allele-specific probe hybridizations or conditions of 100 mM MES, 1 M Na*, 20 mM EDTA, 0.01% Tween-20 and a temperature of 30° C.-50° C., preferably at about 45° C.-50° C. Hybridizations may be performed in the presence of agents such as herring sperm DNA at about 0.1 mg/ml, acetylated BSA at about 0.5 mg/ml. As other factors may affect the stringency of hybridization, including base composition and length of the complementary strands, presence of organic solvents and extent of base mismatching, the combination of parameters is more important than the absolute measure of any one alone. General hybridization conditions suitable for DNA microarrays are understood in the field

[0056] As used herein, the term “hybridization probes” refers to oligonucleotides capable of binding in a base-specific manner to a complementary strand of nucleic acid.

[0057] As used herein, the term “label” refers to a molecular entity capable of being attached (covalently or non-covalently) to a target molecule (e.g., a nucleic acid) and being detected (e.g., fluorescence, luminescence, radioactivity, etc.) or bound by a secondary agent (e.g., a hapten capable of being bound by an antibody). Fluorescent labels that find use in embodiments herein include, inter alia, xanthene derivatives (e.g., fluorescein, rhodamine, Oregon green, eosin, Texas red, etc.), cyanine derivatives (e.g., cyanine, indocarbocyanine, oxacarbocyanine, thiacarbocyanine, merocyanine, etc.), naphthalene derivatives (e.g., dansyl and prodan derivatives), oxadiazole derivatives (e.g., pyridyloxazole, nitrobenzoxadiazole, benzoxadiazole, etc.), pyrene derivatives (e.g., cascade blue), oxazine derivatives (e.g., Nile red, Nile blue, cresyl violet, oxazine 170, etc.), acridine derivatives (e.g., proflavin, acridine orange, acridine yellow, etc.), arylmethine derivatives (e.g., auramine, crystal violet, malachite green, etc.), tetrapyrrole derivatives (e.g., porphin, phtalocyanine, bilirubin, etc.), CF dye (Biotium), BODIPY (Invitrogen), ALEXA FLOUR (Invitrogen), DYLIGHT FLUOR (Thermo Scientific, Pierce), ATTO and TRACY (Sigma Aldrich), FluoProbes (Interchim), DY and MEGASTOKES (Dyomics), SULFO CY dyes (CYANDYE, LLC), SETAU AND SQUARE DYES (SETA BioMedicals), QUASAR and CAL FLUOR dyes (Biosearch Technologies), SURELIGHT DYES (APC, RPE, PerCP, Phycobilisomes)(Columbia Biosciences), APC, APCXL, RPE, BPE (Phyco-Biotech), autofluorescent proteins (e.g., YFP, RFP, mCherry, mKate), quantum dot nanocrystals, etc. In some embodiments, a fluorescent label is a small molecule fluorescent label.

[0058] As used herein, the term “solid support”, “support”, and “substrate” are used interchangeably and refer to a material or group of materials having a rigid or semi-rigid surface or surfaces. In some embodiments, at least one surface of the solid support will be flat, although in some embodiments it may be desirable to physically separate regions of a surface with, for example, wells, raised regions, etched trenches, or the like. According to certain embodiments, the solid support(s) will take the form of beads, plates, chips, resins, gels, microspheres, or other geometric configurations.

[0059] As used herein, the term “target” refers to a molecule that has an affinity for a given probe. In embodiments herein, a target is a nucleic acid and capable of being bound (or suspected of potentially having such capacity) by an oligonucleotide probe herein.

[0060] As used herein, the term “endonuclease” refers to an enzyme that cleaves a nucleic acid (DNA or RNA) at internal sites in a nucleotide base sequence. Cleavage may be at a specific recognition sequence, at sites of modification, or randomly.

### DETAILED DESCRIPTION

[0061] Provided herein are DNA methylation arrays displaying oligonucleotides containing human CpG sites that are differentially methylated in subjects suffering from asthma and/or allergic disease relative to the general population, and methods of use thereof.

[0062] Experiments were conducted during development of embodiments herein to identify methylation sites (e.g., CpGs) in airway epithelial cells that are likely to be functional and associated with asthma and/or allergies in ethnically diverse populations (See ‘Experimental’). Provided herein are arrays displaying a plurality of allele-specific oligonucleotides corresponding to the methylation sites described herein. Methods are provided for using the array to identify and determine the methylation status the methylation sites in a nucleic acid sample.

[0063] Table A, filed herewith and incorporated in its entirety provides the genomic coordinates of 45,891 differentially-methylated CpGs identified in the experiments conducted during development of embodiments herein.

[0064] In some embodiments, provided herein are reagents capable of determining the methylation status and/or the amount of methylation at one or more of the positions (sequences) provided in Table A. In some embodiments, such reagents comprise oligonucleotide primers and/or probes. In some embodiments, provided herein are oligonucleotides (e.g., probes or primers) capable of hybridizing to a segment of human genomic DNA comprising a genomic position listed in Table A.

[0065] In some embodiments, an oligonucleotide herein is complementary to a sequence identified in Table A. In some embodiments, oligonucleotides are complementary to a human genomic DNA sequence and terminate at a position identified in Table A. In some embodiments, oligonucleotides are provided that are complementary to a human genomic DNA sequence encompassing a genomic coordinate identified in Table A.

[0066] In some embodiments, provided herein are reagents capable of determining the methylation status and/or the amount of methylation at one or more of the positions (sequences) provided in Table A. In some embodiments, such reagents comprise oligonucleotide primers and/or probes. In some embodiments, provided herein are oligonucleotides (e.g., probes or primers) capable of hybridizing to a segment of human genomic DNA comprising a genomic position listed in Table A. In some embodiments, an oligonucleotide herein is complementary to a sequence identified in Table A. In some embodiments, oligonucleotides are complementary to a human genomic DNA sequence and terminate at a position identified in Table A. In some embodiments, oligonucleotides are provided that are complementary to a human genomic DNA sequence encompassing a genomic coordinate identified in Table A.

[0067] In some embodiments, provided herein are oligonucleotides (e.g. oligonucleotide probes) comprising single-stranded DNA sequences. In some embodiments, provided herein are oligonucleotides comprising a sequence having at least 90% sequence identity to (e.g. at least 90%, at least 91%, at least 92%, at least 93%, at least 94%, at least 95%, at least 96%, at least 97%, at least 98%, at least 99%, or 100% identity to) SEQ ID NO: 1-SEQ ID NO: 53,840. In some embodiments, provided herein are oligonucleotides comprising a sequence selected from SEQ ID NO: 1-SEQ ID NO: 53,840.

[0068] In some embodiments, provided herein are nucleic acid sequences and allele specific oligonucleotides comprising or complementary to such sequences. In some embodiments, the sequence and allele specific oligonucleotides find use in probing the methylation status of nucleic acids in a sample (e.g., human genomic DNA).

[0069] In some embodiments, provided herein are arrays displaying a plurality (e.g., 100, 500, 1000, 5000, 10000, 15,000, 20,000, 25,000, 30,000, 35,000, 40,000, 45,000, 50,000, 55,000, 60,000, 65,000, 70,000, 75,000, 80,000, 85,000, 90,000, or more, or ranges therebetween) of separate oligonucleotides representing methylation sites in the genome of a species (e.g., the human genome). In some embodiments, the oligonucleotides displayed on the array are 15-75 nucleotides in length (e.g., 15. 20. 25, 30, 35, 40, 45, 50, 55, 60, 65, 70, 75, or ranges therebetween). In some embodiments, the oligonucleotides are DNA oligonucleotides. In some embodiments, the 5′ end of the oligonucleotide is linked to the solid surface of the array (directly or indirectly) and the 3′ end of the oligonucleotide is free. In some embodiments, the oligonucleotides are allele-specific oligonucleotides. In some embodiments, an oligonucleotide on the array corresponds to the sequence adjacent to a methylation site, terminating at a position corresponding to the first or second position of the CpG (e.g., the C or G position). In some embodiments, the 3′ end of an oligonucleotide probe displays a sequence (e.g., terminal nucleotide or dinucleotide) capable of Watson/Crick base pairing with the query sequence that results from the methylated and/or unmethylated CpG (e.g., CG or CA).

[0070] In some embodiments, two oligonucleotide types are provided on the array for each methylation site, one “methylated” and one “unmethylated” query probe. In some embodiments, the 3′ end of a first type of oligonucleotide probe displays a sequence (e.g., terminal nucleotide) capable of pairing with the query sequence and terminating in a CA dinucleotide (a sequence capable of Watson/Crick base pairing with the TG dinucleotide that results from bisulfite conversion and amplification of an unmethylated CpG). In some embodiments, the 3′ end of a second type oligonucleotide probe displays a sequence (e.g., terminal nucleotide) capable of pairing with the query sequence and terminating in a CG dinucleotide (a sequence capable of Watson/Crick base pairing with the CG dinucleotide that results from protection from bisulfite conversion by a methylated CpG).

[0071] In some embodiments, a single oligonucleotide type is provided on the array for each methylation site. In some embodiments, the 3′ end of the oligonucleotide probe displays a sequence that terminates in a C nucleotide corresponding the position complementary to the G of the CpG.

[0072] Table A contains the genomic locations of the differentially methylated CpGs identified in the experiments conducted during development of embodiments herein. In some embodiments, provided herein are oligonucleotide probes that hybridize to methylated and/or unmethylated versions of the CpG sites of Table A. In some embodiments, oligonucleotide probes are provided that are complementary to the sequence adjacent to the CpG sites of Table A, terminating at a position corresponding to the first or second position of the CpG (e.g., the C or G position). In some embodiments, the 3′ end of an oligonucleotide probe displays a sequence (e.g., terminal nucleotide or dinucleotide) capable of Watson/Crick base pairing with the query sequence that results from a methylated and/or unmethylated CpG (e.g., CG or CA) of Table A.

[0073] In some embodiments, provided herein is a system or composition (e.g., array) comprising 100 or more (e.g., 100, 200, 500, 1,000, 2,000, 5,000, 10,000, 20,000 30,000 40,000, 50,000, 60,000, 70,000, 80,000, 90,000, or more, or ranges therebetween) oligonucleotide probes capable of hybridizing to human genomic DNA (e.g., differentially modified DNA) and revealing the methylation status of a sequence identified in Table A. In some embodiments, the array comprises more than 10,000 oligonucleotide probes. In some embodiments, the array comprises more than 20,000 oligonucleotide probes. In some embodiments, the array comprises more than 30,000 oligonucleotide probes. In some embodiments, the array comprises more than 40,000 oligonucleotide probes. In some embodiments, the array comprises about 50,000 oligonucleotide probes. In some embodiments, the probes are at least 70% complementary (e.g., >70%, >75%, >80%, >85%, >90%, >95%, 100%) to a human genomic sequence at a position identified in Table A (e.g., overlapping the sequence, tenrinating at the sequence, etc.). In some embodiments, the probes are at least 70% identical (e.g., >70%, >75%, >80%, >85%, >90%, >95%, 100%) to a human genomic sequence at a position identified in Table A (e.g., overlapping the sequence, terminating at the sequence, etc.). In some embodiments, a probe herein comprises a sequence that is capable of hybridizing (e.g., under stringent conditions) to a sequence of 5-75 nucleotides in length (e.g., 5, 10, 15, 20, 25, 30, 35, 40, 45, 50, 55, 60, 65, 70, 75, or ranges therebetween) corresponding to a genomic coordinate provided in Table A. In some embodiments, provided herein is a system (e.g. an array) or a composition comprising 1,000 or more (e.g., >1,000, >2,000, >5,000, >10,000, >15,000, >20,000, >25,000, >30,000, >35,000, >40,000, >45,000, >50,000, >55,000, >60,000, >65,000, >70,000, >75,000, >80,000, >85,000, >90,000) probe oligonucleotides, each of the 1,000 or more (e.g., >1,000, >2,000, >5,000, >10,000, >15,000, >20,000, >25,000, >30,000, >35,000, >40,000, >45,000, >50,000, >55,000, >60,000, >65,000, >70,000, >75,000, >80,000, >85,000, >90,000) probe oligonucleotides comprising a distinct sequence having at least 90% sequence identity to (e.g. at least 90%, at least 91%, at least 92%, at least 93%, at least 94%, at least 95%, at least 96%, at least 97%, at least 98%, at least 99%, or 100% identity to) SEQ ID NO: 1-SEQ ID NO: 53,840. In some embodiments, provided herein is a system (e.g. an array) or a composition comprising 1,000 or more (e.g., >1,000, >2,000, >5,000, >10,000, >15,000, >20,000, >25,000, >30,000, >35,000, >40,000, >45,000, >50,000, >55,000, >60,000, >65,000, >70,000, >75,000, >80,000, >85,000, >90,000) probe oligonucleotides, each of the 1,000 or more (e.g., >1,000, >2,000, >5,000, >10,000, >15,000, >20,000, >25,000, >30,000, >35,000, >40,000, >45,000, >50,000, >55,000, >60,000, >65,000, >70,000, >75,000, >80,000, >85,000, >90,000) probe oligonucleotides comprising a distinct sequence selected from SEQ ID NO: 1-SEQ ID NO: 53,840.

[0074] In some embodiments, the system (e.g. array) comprises type I and/or type II oligonucleotides (including type II oligonucleotide pairs). In some embodiments, the system (e.g. array) comprises 1,000 or more (e.g., >1,000, >2,000, >5,000, >10,000, >15,000, >20,000, >25,000, >30,000, >35,000, >40,000, >45,000, >50,000, >55,000, >60,000, >65,000, >70,000, >75,000, >80,000, >85,000, >90,000) type I oligonucleotides. SEQ ID NO: 1-SEQ ID NO: 37942 correspond to type I probe oligonucleotides. In some embodiments, the system (e.g. array) comprises 1,000 or more (e.g., >1,000, >2,000, >5,000, >10,000, >15,000, >20,000, >25,000, >30,000, >35,000, >40,000, >45,000, >50,000, >55,000, >60,000, >65,000, >70,000, >75,000, >80,000, >85,000, >90,000) type II probe oligonucleotides. SEQ ID NO: 37,943-SEQ ID NO: 53,840 correspond to type II probe oligonucleotides. In some embodiments, the system (e.g. array) comprises type I and type II probe oligonucleotides. In some embodiments, the system (e.g. array) comprises type II probe oligonucleotide pairs. In some embodiments, the system (e.g. array) comprises type I probe oligonucleotides and type II probe oligonucleotide pairs. A type II probe oligonucleotide pair refers to the two probe oligonucleotides used to detect a given target. Type II probe oligonucleotide pairs are exemplified by two sequential sequences within SEQ ID NO: 37,943-SEQ ID NO: 53,840, starting with a first pair shown in SEQ ID NO: 37,493 and SEQ ID NO: 37,494, a second pair shown in SEQ ID NO: 37,495 and SEQ ID NO: 37,496, a third pair shown in SEQ ID NO: 37,497 and SEQ ID NO: 37,498, and so on.

[0075] In some embodiments, a probe herein comprises a segment capable of hybridizing to a genomic location identified in Table A and one or more other segments. In some embodiments, the one or more other segments are a linker (e.g., for tethering the probe to a solid surface (e.g., plate, bead, etc.), a barcode, a primer-binding sequence, a capture sequence (e.g., capable of hybridizing to a capture oligo), etc. In some embodiments, a probe herein comprises a sequence having at least 90% sequence identity to (e.g. at least 90%, at least 91%, at least 92%, at least 93%, at least 94%, at least 95%, at least 96%, at least 97%, at least 98%, at least 99%, or 100% identity to) SEQ ID NO: 1-SEQ ID NO: 53,840. In some embodiments, a probe herein comprises a sequence selected from SEQ ID NO: 1-SEQ ID NO: 53,840.

[0076] In some embodiments, the systems and methods herein comprise arrays, e.g., for the detection and analysis of nucleic acids. In some embodiments, the arrays are high density arrays that can allow simultaneous analysis (e.g., parallel rather than serial processing) of a plurality of samples. In some embodiments, a device comprises a composite array comprising a plurality of individual arrays, and configured to allow processing of multiple samples, as is generally outlined in U.S. Ser. No. 09/256,943, incorporated by reference in its entirety. For example, in some embodiments, individual arrays are present within each well of a microtiter plate. Thus, depending on the size of the microtiter plate and the size of the individual array, very high numbers of assays can be run simultaneously.

[0077] Composite arrays can be configured in numerous ways that are understood in the field. In some embodiments, a first substrate comprising a plurality of assay locations (sometimes also referred to herein as “assay wells”), such as a microtiter plate, is configured such that each assay location (microtiter well) contains an individual array. For example, the plastic material of the microtiter plate can be formed to contain a plurality of “bead wells” in the bottom of each of the assay wells. Beads containing the oligonucleotide probes of the invention are loaded into the bead wells in each assay location. Alternatively, oligonucleotide probes are bound directly or via hybridization with a capture probe to discrete spots in the assay well.

[0078] In a “two component” array system, the individual arrays are formed on a second substrate, which then can be fitted into the first microtiter plate substrate. For example, fiber optic bundles form the individual arrays, generally with “bead wells” etched into one surface of each individual fiber, such that the beads containing the capture probes are loaded onto the end of the fiber optic bundle. The composite array thus comprises a number of individual arrays that are configured to fit within the wells of a microtiter plate.

[0079] Certain embodiments herein utilize a bead-based analytic chemistry system in which beads, also termed microspheres, carrying different chemical functionalities are distributed on a substrate comprising a patterned surface of discrete sites that can bind the individual microspheres. The beads are generally put onto the substrate randomly, and thus several different methodologies can be used to “decode” the arrays. In one embodiment, unique optical signatures are incorporated into the beads, generally fluorescent dyes, that are used to identify the chemical functionality on any particular bead. This allows the synthesis of the nucleic acids to be divorced from their placement on an array, i.e. the oligonucleotide probes are synthesized on the beads, and then the beads are randomly distributed on a patterned surface. Since the beads are first coded with an optical signature, this means that the array can later be “decoded”, i.e. after the array is made, a correlation of the location of an individual site on the array with the probe at that particular site can be made. In such embodiments, the beads may be randomly distributed on the array, a fast and inexpensive process as compared to in situ synthesis or spotting techniques of the prior art. These methods are generally outlined in PCTs U.S. Ser. No. 98/05025 and U.S. Ser. No. 99/14387 and U.S. Ser. Nos. 08/818,199 and 09/151,877, all of which are expressly incorporated herein by reference. Other systems and methods described in U.S. Pat. No. 6,355,431 (incorporated by reference in its entirety) also find use in embodiments herein.

[0080] In some embodiments, the DNA arrays described herein are provided as bead arrays. Composition, devices, and methods, including bead arrays and the use thereof, are described, for example in U.S. Pat. Nos. 6,355,431 and 6,429,027; each of which is incorporated herein by reference in their entireties. In bead arrays, microwells (beadwells) are formed in the surface of the array substrate (e.g., by etching). In some embodiments, thousands (e.g., 1,000, 2,000, 5,000, 10,000, 20,000, 50,000, or ranges therebetween), hundreds of thousands (e.g., 100,000, 200,000, 500,000 or ranges therebetween), or millions of wells are formed in the surface. In some embodiments, each well is sized to accommodate and house a single bead or particle. Ise a bead is 1-10 microns in diameter (e.g., 1 μm, 2 μm, β μm, 4 μm, 5 μm, 6 μm, 7 μm, 8 μm, 9 μm, 10 μm, or ranges therebetween). In some embodiments, a bead displays one or more (e.g., 1, 2, 5, 10, 20, 50, 100, 200, 500, or more) copies of a probe oligonucleotide described herein. In some embodiments, a bead displays one or more (e.g., 1, 2, 5, 10, 20, 50, 100, 200, 500, or more) distinct probe oligonucleotides described herein. In some embodiments, a bead displays a probe oligonucleotide capable a hybridizing to a particular methylation site identified in the experiments conducted during development of embodiments herein, and capable of single base extension of the amplicon of the differentially modified version of the methylated or unmethylated variant thereof. In some embodiments, a bead displays two probe oligonucleotides capable a hybridizing to a particular methylation site identified herein, and one probe capable of single base extension of the amplicon of the differentially modified version of the methylated variant thereof and the second probe capable of single base extension of the amplicon of the differentially modified version of the unmethylated variant thereof. In some embodiments, a bead displays a probe oligonucleotide capable a hybridizing to a particular methylation site identified in the experiments conducted during development of embodiments herein, and capable of single base extension of the amplicon of the differentially modified version of the methylated and unmethylated variant thereof.

[0081] In some embodiments, methods are provided for determining the methylation status of CpG sites with a sample nucleic acid. In some embodiments, using probes designed for the asthma- and allergy-related methylation sites identified in experiments conducted during development of embodiments herein, the methylation status of human genomic DNA is analyzed. In some embodiments, the sample nucleic acid is treated (e.g., chemically or enzymatically) to differentiate methylated vs. unmethylated sites, the treated nucleic acid is then applied to the array (e.g., following amplification and/or fragmentation), and hybridization of the sample nucleic acid to the oligonucleotide probes on the array is analyzed. Analysis of the locations bound on the array and/or whether the hybridized nucleic acid will support single nucleotide extension (and which nucleotide is added) reveals the methylation status of the nucleic acid in the sample. In some embodiments, the methylation status of multiple (e.g., 1,000, 2,000, 5,000, 10,000, 20,000, 50,000, or more) asthma- and allergy-related methylation sites in the sample DNA is determined suing the methods herein.

[0082] In some embodiments, target nucleic acids are modified in a methylation-selective manner (e.g., methylated sites are modified and non-methylated sites are not, or non-methylated sites are modified and methylated sites are not). In particular embodiments, methylated cytosines are distinguished from non-methylated cytosines based on their differential reactivity with bisulfite in which case the latter are converted to uracil and the former are protected from conversion. Nucleic acids in a sample that has been treated with bisulfite are detected using arrays as exemplified herein for detecting single nucleotide polymorphisms or the nucleic acids can be sequenced on arrays. Array detection is used to distinguish whether a uracil is present at a site, which is indicative of unmethylated cytosine in the original sample, or whether a cytosine is present at such a site, which is indicative of a methylated cytosine in the original sample. In alternative embodiments, methylation is detected using the arrays described herein to distinguish different fragments resulting from treating a nucleic acid sample with methylation-specific enzymes, such as methylation sensitive restriction endonucleases.

[0083] The arrays herein are utilized in any suitable methods for analyzing the methylation of a target nucleic acid.

[0084] In some embodiments, methylation status of a target nucleic acid is conducted by treating the target nucleic acid with a methylation-specific enzyme that discriminates between methylated and unmethylated sites by cleaving at one but on the other. For example, methylation sensitive restriction endonucleases are not able to cleave methylated-cytosine residues, leaving methylated DNA intact.

[0085] In some embodiments, a method of methylation detection assays includes digesting genomic DNA with a methylation-sensitive restriction enzyme followed by detection of the differentially cleaved DNA. For example, the methylation specific enzyme HpaII recognizes and cleaves at the sequence 5′-CCGG-3′. However, the digestion is blocked by methylation at either C.

[0086] In some embodiments, discrimination of methylated vs unmethylated sites is based on the selective deamination of cytosine to uracil by treatment with bisulfite. The method utilizes bisulfite-induced modification of genomic DNA, under conditions whereby cytosine is converted to uracil, but 5-methylcytosine remains non-reactive. The sequence under investigation is then analyzed by the methods described herein.

[0087] In some embodiments, approximately 0.1-100 μg (e.g., 0.1, 0.2, 0.5, 1, 2, 5, 10, 20, 50, 100, or ranges therebetween) of genomic DNA is used in bisulfite conversion to convert the unmethylated cytosine into uracil. The product contains unconverted cytosine where they were previously methylated, but cytosine converted to uracil if they were previously unmethylated.

[0088] In some embodiments, the methods disclosed herein utilize nucleic acid amplification in one or more steps. Nucleic acid samples may be derived, for example, from total nucleic acid from a cell or sample, total RNA, cDNA, genomic DNA or mRNA. Many methods of analysis of nucleic acid employ methods of amplification of the nucleic acid sample prior to analysis, and various techniques for nucleic acid amplification are understood in the field. A number of methods for the amplification of nucleic acids have been described, for example, exponential amplification, linked linear amplification, ligation-based amplification, and transcription-based amplification. An example of exponential nucleic acid amplification method is polymerase chain reaction (PCR) which has been disclosed in numerous publications and it utilized in some embodiments herein. See, for example, Mullis et al. Cold Spring Harbor Symp. Quant. Biol. 51:263-273 (1986); and U.S. Pat. Nos. 4,582,788 and 4,683,194; incorporated by reference in its entirety.

[0089] Nucleic acid amplification may be carried out through multiple cycles of incubations at various temperatures, i.e., thermal cycling or PCR, or at a constant temperature (an isothermal process). An example of an isothermal amplification technique involves a single, elevated temperature using a DNA polymerase that contains the 5′ to 3′ polymerase activity but lacks the 5′ to 3′ exonuclease activity. As the new strand of DNA is synthesized from the template strand of DNA, the complementary strand of the DNA target is displaced from the original DNA helix. The use of specific primers that invade the target DNA strand allows for self-sustaining amplification and detection techniques and can detect very low copy targets. Isothermal amplification methods, such as strand displacement amplification (SDA), are disclosed in U.S. Pat. Nos. 5,648,211, 5,824,517, 6,858,413, 6,692,918, 6,686,156, 6,251,639 and 5,744,311 and U.S. Patent Pub. No. 20040115644 and in Walker et al. Proc. Natl. Acad. Sci. U.S.A. 89: 392-396 (1992); Guatelli, J. C. et al. Proc. Natl. Acad. Sci. USA 87:1874-1878 (1990), which are incorporated herein by reference in their entirety.

[0090] When a pair of amplification primers is used, each of which hybridizes to one of the two strands of a double stranded target sequence, amplification is exponential. This is because the newly synthesized strands serve as templates for the opposite primer in subsequent rounds of amplification. When a single amplification primer is used, amplification is linear because only one strand serves as a template for primer extension and newly synthesized strands are not used as template. Amplification methods that proceed linearly during the course of the amplification reaction are less likely to introduce bias in the relative levels of different mRNAs than those that proceed exponentially. “Single-primer amplification” protocols have been reported in many patents (see, for example, U.S. Pat. Nos. 5,554,516, 5,716,785, 6,132,997, 6,251,639, and 6,692,918 which are incorporated herein by reference in their entirety).

[0091] Nucleic acid amplification techniques may be grouped according to the temperature requirements of the procedure. Certain nucleic acid amplification methods, such as the polymerase chain reaction (PCR, Saiki et al., Science, 230:1350-1354, 1985), ligase chain reaction (LCR, Wu et al., Genomics, 4:560-569, 1989; Barringer et al., Gene, 89:117-122, 1990; Barany, Proc. Natl. Sci. USA, 88:189-193, 1991), transcription-based amplification (Kwoh et al., Proc. Natl. Acad. Sci., USA, 86:1173-1177, 1989) and restriction amplification (U.S. Pat. No. 5,102,784), require temperature cycling of the reaction between high denaturing temperatures and somewhat lower polymerization temperatures. In contrast, methods such as self-sustained sequence replication (Guatelli et al., Proc. Natl. Acad. Sci. USA, 87:1874-1878, 1990), the Qβ replicase system (Lizardi et al., BioTechnology, 6:1197-1202, 1988), and Strand Displacement Amplification (SDA—Walker et al., Proc. Natl. Acad. Sci. USA, 89:392-396, 1992a, Walker et al., Nuc. Acids. Res., 20:1691-1696, 1992b; U.S. Pat. No. 5,455,166) are isothenrial reactions that are conducted at a constant temperature, which are typically much lower than the reaction temperatures of temperature cycling amplification methods.

[0092] In some embodiments, methods herein utilize PCR techniques understood in the field to amplify genomic DNA. In some embodiments, genomic DNA or other target nucleic acids are amplified by a PCR technique following methylation-status dependent modification of the DNA. For example, a nucleic acid (e.g., genomic DNA) is treated with bisulfite under conditions that modify unmethylated cytosine into uracil, but do not modify methylated cytosine. Amplification of the bisulfite-treated nucleic acid by PCR results in replacement of the uracil nucleotides with thymine nucleotides in the resulting amplicons. Unmethylated CpG sites in the sample nucleic acid are TpG sites in the amplicon; methylated CpG sites in the sample nucleic acid are unmethylated CpG sites in the amplicon.

[0093] The bisulfite treated DNA is subjected to whole-genome multiple displacement amplification via random hexamer priming and Phi29 DNA polymerase, which has a proofreading activity resulting in error rates 100 times lower than the Taq polymerase. The products are then enzymatically fragmented, purified from dNTPs, primers and enzymes, and applied to the chip.

[0094] In some embodiments, target nucleic acids, differentially-modified nucleic acids, and/or amplicons thereof are fragmented to produce target oligonucleotides or polynucleotides for subsequent analysis. A fragmentation process produces DNA fragments within a certain range of length (e.g., that can subsequently be labeled and analyzed). In some embodiments, the average size of fragments obtained from fragmentation are at least 10, 20, 30, 40, 50, 60, 70, 80, 100, 200 nucleotides, or ranges therebetween. Fragmentation of nucleic acids comprises breaking nucleic acid molecules into smaller fragments. Fragmentation of nucleic acid may be desirable to optimize the size of nucleic acid molecules for certain reactions and analyses and reduce three dimensional structures. For example, fragmented nucleic acids may be used for more efficient hybridization of oligonucleotide probes. According to some embodiments herein, before hybridization to a microarray, target nucleic acid (e.g., amplicons of differentially-modified sample DNA) is fragmented to sizes ranging from about 50 to 200 bases long, for example, to improve target specificity and sensitivity.

[0095] In some embodiments, differentially-modified nucleic acids, amplicons thereof, and/or fragments thereof are analyzed by hybridization to oligonucleotide probes (e.g., presented on an array). In some embodiments, multiple copies of target DNA generated by the methods herein and understood in the field are analyzed by hybridization to an array of oligonucleotide probes.

[0096] In some embodiments, there are two bead types present on an array for each CpG site. Each locus tested is differentiated by different bead types. Both bead types are attached to single-stranded DNA oligonucleotides (e.g., 10⁻¹⁰⁰mer (e.g., 10, 20, 30, 40, 50, 60, 70, 80, 90, or 100 nucleotides in length, or ranges therebetween) that differ in sequence only at the free end; this type of probe is known as an allele-specific oligonucleotide. One of the bead types will correspond to the methylated cytosine locus and the other will correspond to the unmethylated cytosine locus, which has been converted into uracil during bisulfite treatment and later amplified as thymine during whole-genome amplification. The bisulfite-converted amplified DNA products are denatured into single strands and hybridized to the chip via allele-specific annealing to either the methylation-specific probe or the non-methylation probe. Hybridization is followed by single-base extension with hapten-labeled dideoxynucleotides (or fluorescently labelled dideoxynucleotides). In some embodiments, the ddCTP and ddGTP are labeled with biotin while ddATP and ddUTP are labeled with 2,4-dinitrophenol (DNP). In other embodiments, ddNTPs are each labeled with different fluorophores. The dideoxynucleotides are capable of terminating DNA synthesis after a single base extension.

[0097] In some embodiments, target nucleic acids, differentially-modified nucleic acids, amplicons thereof, and/or fragments thereof that have been specifically hybridized to the arrayed oligonucleotide probes are used as templates in a single-base extension (SBE) reaction. SBE provides a method for determining the identity of a nucleotide base at a specific position along a nucleic acid. The method has commonly been used to identify single-nucleotide polymorphisms (SNPs). In some embodiments, a hybridization complex is formed between the substrate-displayed oligonucleotide probe and a complementary region of the target nucleic acid (e.g., differentially-modified, amplified, and fragmented target DNA), such that the 3′ terminal nucleotide of the probe oligonucleotide is either adjacent to the position in the target nucleic acid to be analyzed (e.g., the position to be analyzed in the first position in the target nucleic acid not hybridized to a base in the probe) or in position to hybridize to (if they are complementary bases) the position in the target nucleic acid to be analyzed. Using a DNA polymerase, the oligonucleotide probe is enzymatically extended by a single base in the presence of all four nucleotide terminators (e.g., labeled (e.g., fluorescently labelled)); the nucleotide terminator complementary to the base in the template being interrogated is incorporated and identified. However, if the 3′ terminal nucleotide of the probe oligonucleotide is not base-paired with the corresponding base in the target (e.g., because they are not complementary bases), then the extension will not occur. Many approaches can be taken for determining the identity of an incorporated terminator, including fluorescence labeling, mass labeling for mass spectrometry, isotope labeling, and tagging the base with a hapten and detecting chromogenically with an anti-hapten antibody-enzyme conjugate

[0098] In some embodiments, after incorporation of these hapten-labeled ddNTPs, multi-layered immunohistochemical assays are performed by repeated rounds of staining with a combination of antibodies to differentiate the two types. After staining, the chip is scanned to show the intensities of the unmethylated and methylated bead types. The raw data are analyzed by the proprietary software, and the fluorescence intensity ratios between the two bead types are calculated. For a given individual at a given locus, a ratio value of 0 equals to non-methylation of the locus (i.e., homozygous unmethylated); a ratio of 1 equals to total methylation (i.e., homozygous methylated); and a value of 0.5 means that one copy is methylated and the other is not (i.e., heterozygosity), in the diploid human genome. In embodiments in which fluorescently or otherwise detectably-labeled nucleotides (e.g., ddNTPs) are added in the SBE reaction, the staining step is eliminated.

[0099] The scanned microarray images of methylation data are further analyzed by systems and methods herein, which normalizes the raw data to reduce the effects of experimental variation, background and average normalization, and performs standard statistical tests on the results. The data can then be compiled into several types of figures for visualization and analysis. Scatter plots are used to correlate the methylation data; bar plots to visualize relative levels of methylation at each site tested; heat maps to cluster the data to compare the methylation profile at the sites tested.

[0100] In some embodiments, provided herein are methods of detecting the presence of nucleic acid sequences in a sample, comprising: (a) contacting probe oligonucleotides described herein (e.g., >1,000, >2,000, >5,000, >10,000, >15,000, >20,000, >25,000, >30,000, >35,000, >40,000, >45,000, >50,000, >55,000, >60,000, >65,000, >70,000, >75,000, >80,000, >85,000, >90,000) probe oligonucleotides, each of the 1,000 or more (e.g., >1,000, >2,000, >5,000, >10,000, >15,000, >20,000, >25,000, >30,000, >35,000, >40,000, >45,000, >50,000, >55,000, >60,000, >65,000, >70,000, >75,000, >80,000, >85,000, >90,000) or a device displaying such probe oligonucleotides with a nucleic acid sample; and (b) detecting the binding of one or more nucleic acids comprising the nucleic acid sequences to one or more of the probe oligonucleotides.

[0101] In some embodiments, provided herein are methods of detecting the methylation status of methylation sites in a nucleic acid in a sample, the method comprising: (a) treating the sample to differentially modify the nucleic acid at methylated and unmethylated methylation sites to produce a differentially-modified nucleic acid; (b) amplifying the differentially-modified nucleic acid; (c) fragmenting the differentially-modified nucleic acid into differentially-modified oligonucleotides; (d) contacting a device described herein with the differentially-modified oligonucleotides, and allowing the differentially-modified oligonucleotides to hybridize to the probe oligonucleotides, thereby forming probe/differentially-modified oligonucleotide complexes; (e) labeling the probe/differentially-modified oligonucleotide complexes in a manner that is specific to whether the differentially-modified oligonucleotide of each complex corresponds to a methylated or unmethylated methylation site; (f) detecting the labeled probe/differentially-modified oligonucleotide complexes; and (g) analyzing (1) the type of labeling and (2) the location of the probe/differentially-modified oligonucleotide complexes on the surface.

[0102] In some embodiments, amplifying the differentially-modified nucleic acid comprises PCR amplification.

[0103] In some embodiments, treating the sample to differentially modify the nucleic acid at methylated and unmethylated methylation sites comprises exposing the sample to bisulfite that converts unmethylated cytosine to uracil but methylated cytosines are protected from conversion. In some embodiments, amplifying the differentially-modified nucleic acid converts the uracil generated by bisulfite conversion into thymine. In some embodiments, treating the sample to differentially modify the nucleic acid at methylated and unmethylated methylation sites comprises exposing the sample to bisulfite that converts unmethylated cytosine to uracil but methylated cytosines are protected from conversion.

[0104] In some embodiments, fragmenting the differentially-modified nucleic acid comprises site-specific fragmentation of the differentially-modified nucleic acid. In some embodiments, site-specific fragmentation is by restriction endonuclease. In some embodiments, fragmenting the differentially-modified nucleic acid comprises random fragmentation of the differentially-modified nucleic acid. In some embodiments, random fragmentation comprises chemical, enzymatic, and/or mechanical fragmentation.

[0105] In some embodiments, methods further comprise a step of isolating the differentially-modified nucleic acid and/or differentially-modified oligonucleotides from reagents for amplification and/or fragmentation.

[0106] In some embodiments, labeling the probe/differentially-modified oligonucleotide complexes in a manner that is specific to whether the differentially-modified oligonucleotide of each complex comprises performing a single nucleotide extension reaction with labeled nucleotides. In some embodiments, the labeled nucleotides comprise happens. In some embodiments, methods further comprise contacting probe/differentially-modified oligonucleotide complexes following the single nucleotide extension with antibodies capable of binding to the haptens, wherein the antibodies comprise detectable labels. In some embodiments, the labeled nucleotides comprise detectable labels. In some embodiments, the detectable labels comprise fluorescent labels.

[0107] In some embodiments, nucleic acid samples comprising genomic DNA. In some embodiments, the genomic DNA is human genomic DNA. In some embodiments, the human genomic DNA is obtained from airway epithelial cells. In some embodiments, the cells are obtained from a subject suffering from asthma and/or allergic disease. In some embodiments, the cells are obtained from a subject suspected as having asthma and/or allergic disease. The term “asthma” as used herein refers to a chronic condition involving a narrowing and/or swelling of the bronchial airways, making it difficult for a subject to breathe. The asthma may be intermittent asthma, mild persistent asthma, moderate persistent asthma, or severe persistent asthma. Symptoms of asthma include coughing, wheezing, chest tightness, and/or difficulty breathing. The term “allergies” and “allergic disease” are used interchangeably herein and refer to a hypersensitive immune reaction to an allergen. The allergen may be an environmental allergen (e.g. pollen, mold/spores, dust mites, animals (e.g. mice, dogs, cats, cows, horses, etc.), and the like). The allergen may be a toxin (e.g. bee sting, wasp bite, etc.). The allergen may be a food allergen. The allergen may be a drug (e.g. an antibiotic, a compound, etc.). Common examples of allergic disease include, for instance, food allergy, atopic dermatitis, drug allergies, rhinitis, and hay fever.

[0108] In some embodiments, the methods of detecting the presence of nucleic acids in a sample and/or methods of detecting the methylation status of methylation sites in nucleic acids in a sample provided herein (e.g. using an array described herein) are performed to assess whether a subject (e.g. from which the sample is obtained) has or is at risk of having asthma or an allergic disease. In some embodiments, the methods of detecting the presence of nucleic acids in a sample and/or methods of detecting the methylation status of methylation sites in nucleic acids in a sample provided herein (e.g. using an array described herein) are performed to assess whether a subject (e.g. from which the sample is obtained) has been exposed to one or more allergens (e.g. environmental conditions) known to cause asthma. For example, in some embodiments when nucleic acids in a sample obtained from the subject bind to a sufficient number or percentage of the 100 or more probe oligonucleotides (e.g. 1,000 or more, 10,000 or more, 20,000 or more, 30,000 or more, 40,000 or more, 50,000 or more, etc.) on a surface of an array described herein, the subject is determined to have or be at risk of having asthma or allergic disease. As another example, in some embodiments when the sample obtained from the subject contains nucleic acid containing methylation sites that hybridize (after suitable treatment steps, as described herein) to a certain number or percentage of the probes on an array described herein, the subject is indicated as having or at risk of having asthma or allergic disease. In some embodiments, the methods further comprise providing an appropriate treatment to the subject if the subject is determined to have asthma or an allergic disease. In some embodiments, the treatment comprises one or more of corticosteroids, antihistamines, mast cell stabilizers, decongestants, epinephrine, antibodies, immunotherapies, and the like.

[0109] In some embodiments, the methods of detecting the presence of nucleic acids in a sample and methods of detecting the methylation status of methylation sites in nucleic acids in a sample provided herein (e.g. using an array described herein) are performed to evaluate or predict a response to a treatment for asthma or allergic disease. For example, in some embodiments the methods are used to assess whether a subject (e.g. from which the sample is obtained) has, is having, or is likely to have a positive response to a treatment for asthma or an allergic disease. For example, in some embodiments the methods find use in methods of determining whether a subject has, is having, or is likely to have a positive response (e.g. is seeing a positive therapeutic effect) for treatments for a food allergy, including antibody-based treatment for food allergy.

### Experimental

### Example 1

### I. Results

### Identifying Differentially Methylated Regions in Whole Genome Bisulfite Sequences

[0110] Whole genome bisulfite sequencing (WGBS) was performed in airway epithelial cell DNA from 20 African American children (10 with allergic asthma, 10 without asthma or allergies; 11 years old) from the Urban Environment and Childhood Asthma (URECA) cohort (J. E. Gern et al., The Urban Environment and Childhood Asthma (URECA) birth cohort study: design, methods, and study population. BMC Pulm Med 9, 17 (2009) and 19 European American young adults (9 with allergic asthma, 10 without asthma or allergies; 18-20 years old) from the Childhood Origins of Asthma (COAST) cohort (R. F. Lemanske, Jr., The childhood origins of asthma (COAST) study. Pediatr Allergy Immunol 13, 38-43 (2002). After quality control (QC) (see Methods), analyses for differentially methylated regions (DMRs) between the asthma/allergy cases and non-asthma/non-allergy controls were performed in the African American sample, the European American sample, and the combined sample. CpGs covered by at least 10 reads in 80% or more of individuals in each sample were included, and at least three CpGs and a maximum gap of 300 bp was required to define regional boundaries. DMRs were defined as regions with at least 5% difference in methylation between the asthma/allergy cases and the non-allergy/non-asthma controls. Overall, 16,611 DMRs were identified that included 199,473 CpGs. Additional characteristics of the DMRs in the three analyses are described in Table 1.

TABLE 1
Description of the differentially methylated regions (DMRs)
from the whole genome bisulfite sequencing study.

| | | Median | Median | # CpGs | # CpGs |
|---|---|---|---|---|---|
| Group | | Size (bp) | # CpGs | hyper- | hypo- |
| Analyzed | # DMRs | [range] | [range] | methylated | methylated |
| AA | 7,748 | 483 | 10 | 2,048 | 5,700 |
| | | [6-3,828] | [3-124] | | |
| EA | 8,972 | 437 | 9 | 1,879 | 7,093 |
| | | [8-2,841] | [3-144] | | |
| Combined | 2,585 | 513 | 11 | 498 | 2,087 |
| | | [9-2,929] | [3-163] | | |

AA, African American;
EA, European American

### Selecting High-Value CpGs for an Asthma&Allergy Custom DNA Methylation Array

[0111] To develop a custom array of CpGs that would complement and serve as a “booster” for the EPIC array (e.g., an example of the arrays within the scope herein), selection criteria involved three steps (FIG. 5). A set of CpGs was identified based on prior evidence of association with asthma or allergic diseases (atopic dermatitis/eczema, allergic rhinitis/hay fever, and food allergy) from three categories of studies. The first category included the 199,473 CpGs within the DMRs from the WGBS study described above, the second category included 19,057 CpGs from 17 previous EWAS (Table 2), and the third category included 570,350 CpGs at 140 GWAS loci (Table 3). CpGs on the EPIC array, in ENCODE blacklisted regions (F. Krueger, S. R. Andrews, Bismark: a flexible aligner and methylation caller for Bisulfite-Seq applications. Bioinformatics 27, 1571-1572 (2011)), and those that overlapped with a common SNP in 1000 Genomes European (CEU) or African (YRI) populations were removed. To further prioritize the remaining 696,225 CpGs, overlap with functional annotations was considered in the second step, requiring that CpGs within DMRs overlap with at least three annotations or other category of prior evidence, CpGs from prior EWAS overlap with at least one annotation or other category of prior evidence, and CpGs at GWAS loci overlap with at least four annotation categories or other category of prior evidence. After removing duplicates, 92,024 high-value CpGs remained for inclusion on a custom array in the third step. After manufacture and array QC, 45,891 CpGs, targeted by 53,840 probes remained (Table A).

TABLE 2
EWAS studies of asthma and allergic diseases used for CpG selection in Step
1. Phenotypes are shown only for those used to select CpGs for the array.

| | | | |
|---|---|---|---|
| Illumina BeadChip | Phenotype(s) | Sample Size | Study |

Respiratory cells

| | | | |
|---|---|---|---|
| EPIC | Allergic rhinitis | 454 | Morin et al. 2020¹ |
| 450K | Remittent asthma vs Persistent asthma or | 135 | Vermeulun et al. |
| | controls | | 2020² |
| EPIC | Asthma, FeNo, total IgE, environmental | 547 | Cardenas et al. 2019³ |
| | IgE, allergic asthma, bronchodilator | | |
| | response | | |
| 450K | Atopy | 483 | Forno et al. 2019⁴ |
| 450K | Atopic asthma | 72 | Yang et al. 2017⁵ |

Blood cells

| | | | |
|---|---|---|---|
| 450K | Inhaled corticosteroids exposure | 215 | Kere et al. 2020⁶ |
| 450K | Allergic sensitization | 376 | Zhang, et al. 2019⁷ |
| 450K | Asthma | 3572 newborns | Reese et al. 2019⁸ |
| | | 2862 children | |
| 450K | Food allergen sensitization, allergen | 739 | Peng et al. 2019⁹ |
| | sensitization, atopic sensitization | | |
| 450K | Childhood asthma | 817 | Xu et al. 2108¹⁰ |
| 450K | Total serum IgE | 217 | Peng et al. 2018¹¹ |
| 450K | Total serum IgE | 306 | Chen et al. 2017¹² |
| 450K | Atopic sensitization and high serum IgE | 367 | Everson et al. 2015¹³ |
| 450k | Eczema | 366 | Quraishi et al. 2015¹⁴ |
| 27K | Serum IgE | 355 | Liang et al. 2015¹⁵ |

¹Morin, A. et al. Epigenetic landscape links upper airway microbiota in infancy with allergic rhinitis at 6 years of age. J Allergy Clin Immunol 146, 1358-1366, doi: 10.1016/j.jaci.2020.07.005 (2020).
²Vermeulen, C. J. et al. Differential DNA methylation in bronchial biopsies between persistent asthma and asthma in remission. Eur Respir J 55, doi: 10.1183/13993003.01280-2019 (2020).
³Cardenas, A. et al. The nasal methylome as a biomarker of asthma and airway inflammation in children. Nat Commun 10, 3095, doi: 10.1038/s41467-019-11058-3 (2019).
⁴Forno, E. et al. DNA methylation in nasal epithelium, atopy, and atopic asthma in children: a genome-wide study. Lancet Respir Med 7, 336-346, doi: 10.1016/S2213-2600(18)30466-1 (2019).
⁵Yang, I. V. et al. The nasal methylome and childhood atopic asthma. J Allergy Clin Immunol 139, 1478-1488, doi: 10.1016/j.jaci.2016.07.036 (2017).
⁶Kere, M. et al. Effects of inhaled corticosteroids on DNA methylation in peripheral blood cells in children with asthma. Allergy 75, 688-691, doi: 10.1111/all.14043 (2020).
⁷Zhang, H. et al. DNA methylation and allergic sensitizations: A genome-scale longitudinal study during adolescence. Allergy 74, 1166-1175, doi: 10.1111/all. 13746 (2019).
⁸Reese, S. E. et al. Epigenome-wide meta-analysis of DNA methylation and childhood asthma. J Allergy Clin Immunol 143, 2062-2074, doi: 10.1016/j.jaci.2018.11.043 (2019).
⁹Peng, C. et al. Epigenome-wide association study reveals methylation pathways associated with childhood allergic sensitization. Epigenetics 14, 445-466, doi: 10.1080/15592294.2019.1590085 (2019).
¹⁰Xu, C. J. et al. DNA methylation in childhood asthma: an epigenome-wide meta-analysis. Lancet Respir Med 6, 379-388, doi: 10.1016/S2213-2600(18)30052-3 (2018).
¹¹Peng, C. et al. Epigenome-wide association study of total serum immunoglobulin E in children: a life course approach. Clin Epigenetics 10, 55, doi: 10.1186/s13148-018-0488-x (2018).
¹²Chen, W. et al. An epigenome-wide association study of total serum IgE in Hispanic children. J Allergy Clin Immunol 140, 571-577, doi: 10.1016/j.jaci.2016.11.030 (2017).
¹³Everson, T. M. et al. DNA methylation loci associated with atopy and high serum IgE: a genome-wide application of recursive Random Forest feature selection. Genome Med 7, 89, doi: 10.1186/s13073-015-0213-8 (2015).
¹⁴Quraishi, B. M. et al. Identifying CpG sites associated with eczema via random forest screening of epigenome-scale DNA methylation. Clin Epigenetics 7, 68, doi: 10.1186/s13148-015-0108-y (2015).
¹⁵Liang, L. et al. An epigenome-wide association study of total serum immunoglobulin E concentration. Nature 520, 670-674, doi: 10.1038/nature14125 (2015).

TABLE 3
Significant loci in GWAS studies of asthma and allergic disease used to define regions for CpG
inclusion. Both studies were performed using data for white British subjects in the UK Biobank.

| Chr | Start¹ | End | Phenotype² | Study³ |
|---|---|---|---|---|
| 1 | 2492665 | 3175371 | Hay Fever | 1 |
| 1 | 8412989 | 9355936 | Hay Fever, Asthma | 1 |
| 1 | 12100942 | 12147311 | Hay Fever | 1 |
| 1 | 12175658 | 12175658 | Asthma | 1 |
| 1 | 25224509 | 25263997 | Hay Fever | 1 |
| 1 | 149897287 | 153166983 | Hay Fever, Asthma, Childhood onset asthma | 1, 2 |
| 1 | 154405024 | 154428283 | Hay Fever | 1 |
| 1 | 161159147 | 161187665 | Hay Fever, Asthma | 1 |
| 1 | 167198536 | 167439010 | Hay Fever, Asthma | 1 |
| 1 | 172777616 | 173171841 | Hay Fever, Asthma, Childhood onset asthma | 1, 2 |
| 1 | 198656242 | 198670555 | Asthma | 1 |
| 1 | 203058476 | 203108508 | Asthma, shared adult and childhood onset asthma | 1, 2 |
| 1 | 212858748 | 212877647 | Hay Fever | 1 |
| 2 | 8438693 | 8496062 | Hay Fever, Asthma, shared adult and childhood onset asthma | 1, 2 |
| 2 | 28623159 | 28644670 | Hay Fever | 1 |
| 2 | 61112552 | 61161095 | Hay Fever | 1 |
| 2 | 102243154 | 103277862 | Hay Fever, Asthma, shared adult and childhood onset asthma | 1, 2 |
| 2 | 112253302 | 112268892 | Hay Fever | 1 |
| 2 | 113582782 | 113689747 | Hay Fever | 1 |
| 2 | 143745800 | 143886819 | Hay Fever | 1 |
| 2 | 146111968 | 146316319 | adult onset asthma | 2 |
| 2 | 198148084 | 198954774 | Hay Fever, Asthma | 1 |
| 2 | 228625484 | 228751874 | Hay Fever, Childhood onset asthma | 1, 2 |
| 2 | 234113057 | 234115739 | Hay Fever | 1 |
| 2 | 242562010 | 242838542 | Hay Fever, Asthma, shared adult and childhood onset asthma | 1, 2 |
| 3 | 32920602 | 33146535 | Hay Fever, Asthma, shared adult and childhood onset asthma | 1, 2 |
| 3 | 50701250 | 51441307 | Asthma | 1 |
| 3 | 72394852 | 72394852 | Hay Fever | 1 |
| 3 | 112526053 | 112693753 | Hay Fever | 1 |
| 3 | 121387784 | 121728846 | Hay Fever | 1 |
| 3 | 127886957 | 128075398 | Asthma | 1 |
| 3 | 141040654 | 141158614 | Hay Fever | 1 |
| 3 | 176708724 | 176868116 | Asthma | 1 |
| 3 | 187632967 | 188457255 | Hay Fever, Asthma, Childhood onsct asthma | 1, 2 |
| 3 | 196327220 | 196454053 | Hay Fever, Asthma | 1 |
| 4 | 4766265 | 4778175 | Hay Fever | 1 |
| 4 | 38599054 | 38934478 | Hay Fever, Asthma, Childhood onset asthma | 1, 2 |
| 4 | 103188709 | 103590864 | Hay Fever | 1 |
| 4 | 122993500 | 124511672 | Hay Fever, Asthma, shared adult and childhood onset asthma | 1, 2 |
| 5 | 14572453 | 14701003 | Hay Fever, Asthma, shared adult and childhood onset asthma | 1, 2 |
| 5 | 35728440 | 36074412 | Hay Fever, Asthma | 1 |
| 5 | 40442869 | 40623346 | Hay Fever | 1 |
| 5 | 71695880 | 71743322 | childhood onset asthma | 2 |
| 5 | 109612633 | 110749926 | Hay Fever, Asthma, shared adult and childhood onset asthma | 1, 2 |
| 5 | 118659579 | 118739934 | Hay Fever, Asthma | 1 |
| 5 | 129917070 | 132138129 | Asthma | 1 |
| 5 | 131336105 | 132321276 | Hay Fever, Childhood onset asthma | 1, 2 |
| 5 | 133439274 | 133639311 | Hay Fever | 1 |
| 5 | 137461112 | 137605401 | Hay Fever | 1 |
| 5 | 141400028 | 141557236 | Hay Fever, Asthma | 1 |
| 5 | 156930406 | 156988798 | Asthma | 1 |
| 5 | 159896259 | 159929015 | Hay Fever, Asthma | 1 |
| 6 | 403799 | 421196 | childhood onset asthma | 2 |
| 6 | 25823774 | 33770370 | Hay Fever, Asthma, shared adult and childhood onset asthma | 1, 2 |
| 6 | 36349890 | 36380644 | Hay Fever | 1 |
| 6 | 90808352 | 91019304 | Hay Fever, Asthma, shared adult and childhood onset asthma | 1, 2 |
| 6 | 128264925 | 128294709 | Hay Fever, Asthma | 1 |
| 6 | 135624811 | 135950204 | Hay Fever, Asthma | 1 |
| 6 | 138002175 | 138262773 | Hay Fever | 1 |
| 6 | 155162163 | 155162163 | Asthma | 1 |
| 7 | 3062629 | 3174209 | Hay Fever, Asthma | 1 |
| 7 | 20371853 | 20640689 | Hay Fever, Asthma, shared adult and childhood onset asthma | 1, 2 |
| 7 | 22755688 | 22811384 | childhood onset asthma | 2 |
| 7 | 28139386 | 28259233 | Hay Fever, Asthma, shared adult and childhood onset asthma | 1, 2 |
| 7 | 76978096 | 77038945 | Hay Fever | 1 |
| 7 | 150690176 | 150690176 | Hay Fever | 1 |
| 8 | 81171813 | 81329123 | Hay Fever, Asthma, shared adult and childhood onset asthma | 1, 2 |
| 8 | 101514998 | 101519901 | Hay Fever | 1 |
| 8 | 128777719 | 128815029 | Hay Fever, Childhood onset asthma | 1, 2 |
| 9 | 5609742 | 6621066 | Hay Fever, Asthma, shared adult and childhood onset asthma | 1, 2 |
| 9 | 16715826 | 16756377 | Hay Fever | 1 |
| 9 | 101790878 | 101820718 | Hay Fever | 1 |
| 9 | 101915887 | 101989706 | Asthma | 1 |
| 9 | 117804027 | 117834931 | Hay Fever | 1 |
| 9 | 123636121 | 123707497 | Hay Fever | 1 |
| 9 | 127022266 | 127095039 | Hay Fever | 1 |
| 9 | 131455796 | 131617167 | Hay Fever, Asthma | 1 |
| 9 | 136141870 | 136155000 | Hay Fever | 1 |
| 9 | 140500443 | 140500443 | childhood onset asthma | 2 |
| 10 | 5885314 | 6631223 | Hay Fever, Asthma, Childhood onset asthma | 1, 2 |
| 10 | 8095340 | 9938970 | Hay Fever, Asthma, shared adult and childhood onset asthma | 1, 2 |
| 10 | 64349979 | 64391375 | Hay Fever | 1 |
| 10 | 94342983 | 94492716 | Asthma | 1 |
| 10 | 104222963 | 104512006 | Hay Fever | 1 |
| 11 | 1110395 | 1147618 | Asthma, shared adult and childhood onset asthma | 1, 2 |
| 11 | 2237219 | 2296012 | Hay Fever | 1 |
| 11 | 36336263 | 36388519 | Hay Fever, Asthma | 1 |
| 11 | 60793330 | 60793722 | Hay Fever | 1 |
| 11 | 61543499 | 61623140 | Asthma | 1 |
| 11 | 61630104 | 61657926 | shared adult and childhood onset asthma | 2 |
| 11 | 65495211 | 65683531 | Hay Fever, Asthma, Childhood onset asthma | 1, 2 |
| 11 | 75891182 | 76377819 | Hay Fever, Asthma, shared adult and childhood onset asthma | 1, 2 |
| 11 | 95419908 | 95426984 | Hay Fever | 1 |
| 11 | 111415822 | 111647084 | Hay Fever, Asthma | 1 |
| 11 | 118550522 | 118770321 | Hay Fever, Childhood onset asthma | 1, 2 |
| 11 | 128131013 | 128200831 | Hay Fever | 1 |
| 12 | 48186563 | 48210318 | Asthma, shared adult and childhood onset asthma | 1, 2 |
| 12 | 55358844 | 57535266 | Hay Fever, Asthma, shared adult and childhood onset asthma | 1, 2 |
| 12 | 71405206 | 71585743 | Asthma, shared adult and childhood onset asthma | 1, 2 |
| 12 | 94556678 | 94604963 | Asthma | 1 |
| 12 | 111708458 | 112906415 | Hay Fever, Childhood onset asthma | 1, 2 |
| 12 | 121133037 | 121410678 | Hay Fever, Childhood onset asthma | 1, 2 |
| 12 | 122645048 | 123829116 | Hay Fever | 1 |
| 13 | 40975005 | 41502588 | Hay Fever | 1 |
| 13 | 44475398 | 44490181 | Asthma | 1 |
| 13 | 50808877 | 50811151 | Hay Fever | 1 |
| 13 | 73359692 | 74039935 | Hay Fever | 1 |
| 13 | 74039935 | 74039935 | Asthma | 1 |
| 13 | 99781378 | 100227069 | Hay Fever, Asthma, shared adult and childhood onset asthma | 1, 2 |
| 14 | 35510900 | 35864878 | Hay Fever | 1 |
| 14 | 68727506 | 68815261 | Hay Fever, Asthma, shared adult and childhood onset asthma | 1, 2 |
| 14 | 103067487 | 103387971 | Hay Fever | 1 |
| 15 | 41252202 | 41796498 | Hay Fever, Asthma | 1 |
| 15 | 61032054 | 61123862 | Hay Fever, Asthma, shared adult and childhood onset asthma | 1, 2 |
| 15 | 67371244 | 67469570 | Hay Fever, Asthma, shared adult and childhood onset asthma | 1, 2 |
| 15 | 75399102 | 75448181 | Hay Fever | 1 |
| 15 | 84556623 | 84556623 | Asthma | 1 |
| 15 | 90859095 | 91094064 | Hay Fever | 1 |
| 16 | 11006011 | 11336508 | Hay Fever, Asthma, shared adult and childhood onset asthma | 1, 2 |
| 16 | 27203012 | 27417744 | Hay Fever, Asthma, shared adult and childhood onset asthma | 1, 2 |
| 16 | 50745926 | 50790158 | Asthma, shared adult and childhood onset asthma | 1, 2 |
| 17 | 4521473 | 4535314 | Hay Fever | 1 |
| 17 | 37281157 | 38897220 | Hay Fever, Asthma, Childhood onset asthma | 1, 2 |
| 17 | 40338997 | 40450012 | Asthma, Childhood onset asthma | 1, 2 |
| 17 | 43156023 | 43457886 | Hay Fever, Asthma | 1 |
| 17 | 45805811 | 45873184 | childhood onset asthma | 2 |
| 17 | 47299789 | 47481374 | Hay Fever, Asthma, shared adult and childhood onset asthma | 1, 2 |
| 18 | 48482900 | 48662349 | Hay Fever | 1 |
| 18 | 51781019 | 52366730 | Hay Fever, Asthma | 1 |
| 18 | 60005046 | 60018206 | Hay Fever, Childhood onset asthma | 1, 2 |
| 18 | 61412756 | 61627300 | Asthma, Childhood onset asthma | 1, 2 |
| 19 | 1149092 | 1171213 | childhood onset asthma | 2 |
| 19 | 33718053 | 33736279 | Hay Fever, Asthma, shared adult and childhood onset asthma | 1, 2 |
| 19 | 46219145 | 46370381 | Asthma | 1 |
| 20 | 45232161 | 45716594 | Hay Fever | 1 |
| 20 | 52168159 | 52268995 | Hay Fever | 1 |
| 20 | 62270637 | 62400021 | Hay Fever, Asthma | 1 |
| 21 | 36421331 | 36507786 | Asthma, shared adult and childhood onset asthma | 1, 2 |
| 22 | 37319425 | 37319425 | Hay Fever | 1 |
| 22 | 41798520 | 41941243 | Asthma | 1 |

¹All coordinates are hg19
²Johansson et al.: n = 41,926 asthma cases and 239,733 controls; 84,034 hay fever + eczema cases and 239,733 controls. Pividori et al.: n = childhood onset asthma 9,443 cases and 318,237 controls; 21,564 adult onset asthma cases and 318,237 controls.
³1 = A. Johansson, M. Rask-Andersen, T. Karlsson, W. E. Ek, Genome-wide association analysis of 350000 Caucasians from the UK Biobank identifies novel loci for asthma, hay fever and eczema. Hum Mol Genet 28, 4022-4041 (2019), 2 = M. Pividori, N. Schoettler, D. L. Nicolae, C. Ober, H. K. Im, Shared and distinct genetic risk factors for childhood-onset and adult-onset asthma: genome-wide and transcriptome-wide studies. Lancet Respir Med 7, 509-522 (2019).

[0112] The distributions of CpGs on the Custom and EPIC arrays are shown by annotation category in FIG. 2A. Of note, 90% of the Custom array CpGs overlapped with a transcription factor binding site (TFBS) and 94% overlapped with a predicted enhancer, compared to 56% and 54% of the EPIC array CpGs, respectively (Fisher exact test [FET]p<10⁻¹⁶ for all tests). Moreover, compared to EPIC CpGs, Custom CpGs were enriched in introns (52.8% vs. 47.2%) and exons (24.0% vs. 22.1%) and depleted in intergenic regions (23.1% vs. 30.7%) and 5′UTRs (6.8% vs. 7.4%) (FET p<10⁻⁴ in all analyses) (FIG. 2B). The CpGs on the Custom array proportionally represented DMR-CpGs from WGBS studies in the African Americans, European Americans, and the combined samples, and from the WGBS studies and previous GWAS of asthma or allergic diseases; very few previous EWAS CpGs were included on the Custom array because nearly all were on the EPIC array (FIG. 6).

### Evaluating Methylation Patterns of CpGs on the Custom Array

[0113] To assess the reproducibility of methylation measures of CpGs on the Custom array, p values in airway epithelial cell DNA in the WGBS were compared to the same CpGs on the Custom and the EPIC arrays for the subset of individuals with all three measures (19 of the URECA children and 17 of the COAST young adults). CpGs were included with at least 10 WGBS reads that overlapped with an array CpG that passed QC. This resulted in 502,229 CpGs for the WGBS and EPIC array comparison in URECA and 24,744 and 20,861 CpGs for the WGBS and Custom array comparison in URECA and COAST, respectively. The β distribution plots were similar and highly correlated between CpGs measured by WGBS and the arrays (Spearman's p<2.2×10⁻¹⁶ for each) (FIG. 7). Notably, however, compared to the EPIC array, CpGs on the Custom array were depleted for hypermethylated CpGs and enriched for intermediate methylated (IM) CpGs.

[0114] To more broadly assess the β distributions of CpGs on the EPIC and Custom arrays, they were compared across different tissues using available data for the EPIC array in DNA from airway epithelial cells (this study), airway smooth muscle cells (E. E. Thompson et al., Cytokine-induced molecular responses in airway smooth muscle cells inform genome-wide association studies of asthma. Genome Med 12, 64 (2020), and buccal cells, placenta cells, cord blood, and for the Custom array in DNA from nasal epithelial cells and nasal lavage cells from URECA children, and buccal cells, cord blood cells, or placenta tissue from infants in the Vitamin C to Decrease the Effects of Smoking in Pregnancy on Infant Lung Function (VCSIP) cohort (L. E. Shorey-Kendrick et al., Impact of vitamin C supplementation on placental DNA methylation changes related to maternal smoking: association with gene expression and respiratory outcomes. Clin Epigenetics 13, 177 (2021)). The β distributions were similar across cell sources for CpGs on the EPIC array (FIG. 3A) but showed varying patterns between cell types on the Custom array (FIG. 3B). Whereas an average of 68% (range: 60-79%) of CpGs on the EPIC array were either hypomethylated (0-20%) or hypermethylated (80-100%) in all six cell types, most on the Custom array (66% in nasal epithelial cells and 52% on average across cell types) were IM CpGs (β values between 20-80%) with depletions of CpGs with β values between both 0-10% (24% in nasal epithelial cells and 29% on average) and 90-100% (10% in nasal epithelial cells and 20% on average). In fact, the β value distributions of CpGs on the EPIC array in nine GTEx tissues are remarkably similar to those reported here.

[0115] It was next asked whether the enrichment for IM CpGs was attributable to the selection criteria we used for designing the Custom array. To address this question, the CpGs on the EPIC array were filtered using the same pipeline as that used for selecting CpGs for the Custom array. These are CpGs that met criteria for inclusion on the Custom array but were excluded because they were on the EPIC array. These are referred to as “filtered EPIC” CpGs. Of the 789,290 CpGs on the EPIC array that passed QC (see Methods), 26,905 (3.4%) were designated as “high-value”. The β distribution of the filtered EPIC CpGs in nasal epithelial cells revealed a pattern similar to CpGs on the Custom array, with the majority (61%) having β values between 20-80% (FIG. 9). These results confirmed that selecting CpGs with prior evidence of disease association and overlap with chromatin marks of gene regulatory regions results in a depletion of both hypomethylated and hypermethylated CpGs and an enrichment for IM CpGs, are more variable across cell types compared to fully methylated and fully unmethylated CpGs.

### Ewas of Allergic Sensitization in 280 Multi-Ancestry Children Using the Custom and EPIC Arrays

[0116] Experiments were conducted during development of embodiments herein to develop DNA methylation arrays that could detect asthma- or allergy-associated differential methylation that is missed by the content on the EPIC array. Allergic sensitization (atopy) is an IgE response to allergens (15) and a crucial step in the development of allergic diseases and asthma (16, 17). An EWAS of allergic sensitization (AS) was conducted in airway epithelial cell DNA collected from 280 11-year old URECA children using the Custom and the EPIC arrays. AS was defined as the percent positive skin prick tests (SPTs) to 14 airborne and oral allergens (see Methods). The demographic and clinical description of the URECA children is shown in Table 4 and FIG. 10. See Methods for further descriptions of the sample, the allergens tested, and the processing and QC of the array data.

TABLE 4
Demographic characteristics of URECA and INSPIRE samples.

| Characteristic | URECA | INSPIRE |
|---|---|---|
| Sample size (N) | 280 | 474 |
| Mean Age (range), years | 11 (11-12) | 6.3 (5.0-7.9) |
| Female sex | 46.8% | 47.0% |

Ethnicity

| | | |
|---|---|---|
| Non-Hispanic White | <1% | 65.4% |
| Non-Hispanic Black | 71.8% | 18.1% |
| Hispanic | 20.0% | 9.5% |
| Other | 7.9% | 7.6% |

Clinical Definitions

| | | |
|---|---|---|
| Asthma | 32.1% | 9.5% |
| Allergic asthma | 22.1% | 4.6% |
| Allergic sensitization (≥1 + SPT) | 63.2% | 37.8% |
| Non-Allergic/Non-Asthma | 27.1% | 62.2% |

[0117] Two EWAS of AS were performed in the same URECA children using CpGs on the EPIC or Custom array. In each analysis, sex, percent epithelial cells, the first β ancestry PCs, and latent factors were included as covariates to adjust for additional unwanted variation (18, 19) (see Methods). Using a q-value threshold of 0.05, the EWAS of AS revealed 1,805 DMCs using the EPIC array and 193 DMCs using the Custom array (FIG. 4A-B). Overall, the Custom array was enriched for AS DMCs compared to the EPIC array (0.50% vs. 0.23%). Among the DMCs on the EPIC array, 295 (16%) were filtered EPIC CpGs, a significant enrichment compared to 3.5% of filtered CpGs among all CpGs on the array (FET p<2.2×10⁻¹⁶). In contrast to the different β distributions of CpGs on the EPIC and Custom arrays (FIG. 3A), the β distributions of DMCs from the two arrays were similar (FIG. 4A-B; middle panels), showing a near complete depletion of both hypomethylated and hypermethylated CpGs. These data further establish that AS DMCs are highly enriched for EVI CpGs in airway epithelial cells.

The DMCs on both arrays were distributed across the autosomes (FIG. 11A-B). However, whereas the DMCs on the Custom array show spikes of association signals, the DMCs on the EPIC array are more solitary and sparsely distributed across the genome. In fact, 50% of DMCs on the Custom array are within 100 bp of the next nearest DMC compared to only 3% of DMCs on the EPIC. Among the latter, 69% of DMCs are >100 kb from the next nearest DMC compared to only 30% on the Custom arrays. (FIG. 4D)

[0118] Most of the functional annotation categories were represented by DMCs proportionally to all CpGs on each array (FIG. 2A-B). However, DMCs from both arrays were depleted among transcription start sites compared to all CpGs on the arrays (Custom 18.1% vs. 44.3%; FET p=1.14×10⁻⁷; EPIC 9.6% vs 21.9%; FET p<2.2×10⁻¹⁶) and in areas of open chromatin on (Custom 15.0% vs. 43.1%; FET p=4.11×10⁻⁹; EPIC 11.6% vs. 22.2%; FET p<2.2×10⁻¹⁶). Among the primary criteria (prior evidence), CpGs in DMRs were marginally enriched for DMCs compared to all CpGs on the Custom array (77.2% vs. 62.8%; FET p=0.066) but significantly enriched on the EPIC array (3.9% vs. 1.6%; FET p=1.54×10⁻⁶). Similarly, DMCs in prior EWAS studies of asthma and allergic diseases were modestly enriched on the Custom array (4.1% vs. 1.9%; FET p=0.059) and significantly enriched on the EPIC array (21.7% vs. 4.9%; FET p<2.2×10⁻¹⁶). In contrast, CpGs at GWAS loci for asthma and allergic diseases were not enriched among DMCs on the Custom array (37.8% vs 43.5%; FET p=0.32) and only modestly enriched on the EPIC array (4.7% vs 3.8%; FET p=0.042). The locations of the DMCs were proportional to all CpGs on the arrays.

[0119] Because AS is an important step in the development of childhood asthma, experiments were conducted during development of embodiments herein to determine whether AS DMCs were also associated with allergic asthma. Considering only the AS DMCs on the EPIC array, 1,155 (64%) were also associated with allergic asthma at q-value <0.05; among the AS DMCs on the Custom array, 115 (60%) were also associated with allergic asthma at q-value <0.05. The effect sizes were significantly correlated between AS DMCs and allergic asthma DMCs (r=0.68) (FIG. 4E). Among the CpGs that were DMCs for both AS and allergic asthma, all showed the same direction of effect; among all AS DMCs, 93% showed the same direction of effect with allergic asthma (r=0.84)

### Validating the Custom Array in the INSPIRE Cohort

[0120] The URECA cohort is diverse with respect to ancestry but includes <1% non-Hispanic white children. Therefore, to both replicate results of the EWAS in URECA children and assess the performance of the Custom array in a primarily non-Hispanic white population, 5- to 7-year old children from the Infant Susceptibility to Pulmonary Infections and Asthma Following RSV Exposure (INSPIRE) study were studied (20). INSPIRE mothers were enrolled during pregnancy into this population-based longitudinal study in central Tennessee. An EWAS was performed using the Custom array and nasal epithelial cell DNA from 474 children with measures of AS (proportion of positive SPT to 13 inhaled allergens). The demographic and clinical characteristics of the INSPIRE children are shown in Table 4. Studies with the EPIC array were not performed in this cohort.

[0121] The AS EWAS model in INSPIRE included as covariates sex, parent-reported race or ethnicity, DNA concentration, and latent factors to adjust for unwanted variation (18) (see Methods). At a q-value threshold of <0.05, 85 CpGs on the Custom array were DMCs (0.2% of CpGs); the beta distributions of the DMCs were similar to those observed in URECA (FIG. 4C). As in the URECA Custom array EWAS, there were spikes of association signals in the INSPIRE EWAS, many at shared regions (FIG. 11). Among the AS DMCs in INSPIRE, 38% were also associated with allergic asthma, all with the same direction of effect; among all AS DMCs in INSPIRE, 93% had the same direction of effect with allergic asthma (FIG. 4F). Moreover, among the AS DMCs in URECA, 25 were also AS DMCs in INSPIRE at the 0.05 FDR threshold and all had concordant directions of effect. The 253 CpGs that were DMCs in either the URECA or INSPIRE AS EWAS at FDR <0.05 were highly correlated (r=0.61; P<2.2×10⁻¹⁶) and 82% had concordant directions of effect (FIG. 4G). The high reproducibility of EWAS results in two cohorts demonstrates that the high-value CpGs on the Custom array identify AS DMCs that are robust to ancestry, ascertainment strategies, age at sampling, and geography.

### Evaluating the Biological Significance of DMCs in Airway Epithelial Cells

[0122] Nearly all CpGs on the Custom array overlap with a TFBS or enhancer mark. Accordingly, it was tested whether these CpGs are correlated with the expression of genes in airway epithelial cells more often than CpGs on the EPIC array (G. Elliott et al., Intermediate DNA methylation is a conserved signature of genome regulation. Nat Commun 6, 6363 (2015). To test this, gene expression data was used (M. C. Altman et al., Endotype of allergic asthma with airway obstruction in urban children. J Allergy Clin Immunol 10.1016/j.jaci.2021.02.040 (2021)) in the same cells as those used for DNA methylation studies in 249 of the URECA children and defined two sets of genes from among the 15,551 genes detected as expressed in these cells: the nearest gene to each CpG and the promoter capture Hi-C (pcHi-C)-defined target gene in airway epithelial cells (see Methods). The latter identified putative enhancers that physically interact with target gene promoters and account for the 3-dimensional structure of the genome that allows for distal regulatory elements to interact with and regulate the activity of promoters over large distances (e.g., up to 1 Mb or more), which are often not the nearest gene. Among the nearest expressed genes to DMCs on the Custom (98 genes) and EPIC (1,449 genes) arrays, 63 were the nearest gene on both arrays. Among the pcHi-C target genes for DMCs on the Custom (245 genes) or EPIC (1,155 genes), 95 were target genes on both arrays. Thus, although there were no overlapping CpGs between the arrays, 101 of nearest or pcHi-C target genes were shared on both arrays (Table 5). The 318 nearest or pcHi-C target genes on the Custom array that were expressed in airway epithelial cells were enriched in 16 pathways (FDR <0.05), including “Th1 and Th2 cell differentiation”, “JAK-STAT signaling”, “Th17 cell differentiation”, and “Viral protein interaction with cytokine and cytokine receptor” (Table 6). In contrast, the 2,366 nearest or pcHi-C target genes on the EPIC array that were expressed in airway epithelial cells were not enriched for any pathways (smallest FDR=0.13). These findings further demonstrate that the CpGs on the Custom array are enriched in pathways relevant to asthma and allergic disease.

TABLE 5
Nearest and pcHi-C target genes for AS DMCs on the EPIC and Custom arrays in URECA. For all DMCs
on the EPIC and Custom arrays, a nearest gene and a pcHi-C target gene (if identified) were assigned
(see Methods). The prior evidence category for each CpG is also shown (GWAS, EWAS, DMR).

| | Nearest Genes | | | | pcHi-C genes | | | |
|---|---|---|---|---|---|---|---|---|
| Gene | Custom | | EPIC | | Custom | | EPIC | |
| name | CpG | Evidence | CpG | Evidence | CpG | Evidence | CpG | Evidence |
| ABCC5 | cg05910779_BC21 | DMR | | | | | cg01966760 | NA |
| ABCC5 | cg05910778_BC21 | DMR | | | | | cg16221425 | NA |
| ABHD14A | | | | | cg07095346_BC21 | EWAS | cg22988305 | EWAS |
| ACBD4 | | | | | cg22600575_BC21 | GWAS | cg05257097 | GWAS |
| ACBD4 | | | | | cg22600571_TC21 | GWAS | | |
| ACBD4 | | | | | cg22600572_BC21 | GWAS | | |
| ADAMTS15 | | | cg18023339 | NA | cg17084526_TC21 | DMR | cg21770200 | EWAS |
| AHNAK2 | cg20048107_TC21 | DMR | | | | | cg01177261 | DMR |
| AHNAK2 | cg20048043_BC21 | DMR | | | | | | |
| ALDOA | | | | | cg21355554_BC21 | DMR | cg04665974 | NA |
| ALDOA | | | | | cg21355555_TC21 | DMR | | |
| ALOX15 | cg22082619_BC21 | GWAS, | cg19595239 | GWAS, | | | | |
| | | DMR | | EWAS | | | | |
| ALOX15 | | | cg17389538 | GWAS | | | | |
| ANKRD 10 | | | cg27461824 | EWAS | cg19162921_BC21 | DMR | | |
| ANO1 | cg12357484_TC21 | EWAS | cg25723217 | EWAS | | | | |
| ANO1 | | | cg12849969 | NA | | | | |
| ANO1 | | | cg24308267 | NA | | | | |
| ARHGAP27 | | | cg22153994 | EWAS | cg22601529_BC21 | GWAS, | cg21137244 | GWAS, |
| | | | | | | DMR | | EWAS |
| ARHGAP27 | | | | | cg22601528_TC21 | GWAS, | | |
| | | | | | | DMR | | |
| ARHGEF3 | cg04967825_TC21 | DMR | cg01016119 | DMR, | cg04967816_TC21 | DMR | | |
| | | | | EWAS | | | | |
| ARHGEF3 | cg04967816_TC21 | DMR | cg13068706 | NA | | | | |
| ARHGEF3 | cg04967826_BC21 | DMR | | | | | | |
| ARHGEF7 | | | cg20847766 | EWAS | cg19162921_BC21 | DMR | cg27461824 | EWAS |
| ATP8B1 | | | cg02550398 | NA | cg23606851_BC21 | DMR | cg18475483 | DMR |
| ATP8B1 | | | | | cg23606849_TC21 | DMR | cg02550398 | NA |
| ATP8B1 | | | | | cg23606852_BC21 | DMR | cg24331818 | DMR |
| BLOC1S6 | | | | | cg20334662_BC21 | DMR | cg13570892 | EWAS |
| BLOC1S6 | | | | | | | cg07558734 | DMR, |
| | | | | | | | | EWAS |
| C12orf57 | | | | | cg17241870_BC21 | DMR | cg16707011 | NA |
| C14orf79 | | | cg01177261 | DMR | cg20048043_BC21 | DMR | | |
| C14orf79 | | | | | cg20048107_TC21 | DMR | | |
| C15orf48 | | | cg14661236 | NA | cg20334662_BC21 | DMR | | |
| C3orf18 | | | | | cg04902046_TC21 | DMR | cg09575750 | NA |
| C3orf18 | | | | | cg04902043_BC21 | DMR | | |
| CAPN14 | cg02630973_BC21 | DMR | cg04132353 | DMR, | | | | |
| | | | | EWAS | | | | |
| CAPN14 | | | cg01827910 | NA | | | | |
| CCNI2 | | | | | cg08524768_BC21 | GWAS | cg16525542 | GWAS |
| CCNI2 | | | | | cg08524766_BC21 | GWAS | cg23475112 | GWAS, |
| | | | | | | | | EWAS |
| CDCA4 | | | | | cg20048043_BC21 | DMR | cg01177261 | DMR |
| CDCA4 | | | | | cg20050618_BC21 | DMR | | |
| CDCA4 | | | | | cg20048107_TC21 | DMR | | |
| CDK2 | | | | | cg17662800_BC21 | GWAS | cg17865265 | GWAS |
| CDK2 | | | | | | | cg08362736 | GWAS |
| CEP72 | | | | | cg07553021_TC21 | DMR | cg00049323 | EWAS |
| CISH | cg04902026_TC21 | DMR | cg09575750 | NA | | | | |
| CISH | cg04902028_TC21 | DMR | cg23005227 | DMR, | | | | |
| | | | | EWAS | | | | |
| CISH | cg04902029_BC21 | DMR | cg16315329 | EWAS | | | | |
| CISH | cg04902032_TC21 | DMR | | | | | | |
| CISH | cg04902033_BC21 | DMR | | | | | | |
| CISH | cg04902034_BC21 | DMR | | | | | | |
| CISH | cg04902035_BC21 | DMR | | | | | | |
| CISH | cg04902037_BC21 | DMR | | | | | | |
| CISH | cg04902041_BC21 | DMR | | | | | | |
| CISH | cg04902043_BC21 | DMR | | | | | | |
| CISH | cg04902046_TC21 | DMR | | | | | | |
| CLEC16A | cg21129219_BC21 | GWAS, | cg10364862 | GWAS, | | | | |
| | | DMR | | EWAS | | | | |
| CLEC16A | cg21129001_TC21 | GWAS | | | | | | |
| CLEC16A | cg21129004_TC21 | GWAS | | | | | | |
| CLEC16A | cg21129010_BC21 | GWAS | | | | | | |
| CLEC16A | cg21129002_BC21 | GWAS | | | | | | |
| CLEC16A | cg21129003_BC21 | GWAS | | | | | | |
| CLEC16A | cg21129011_BC21 | GWAS | | | | | | |
| CLEC16A | cg21129012_TC21 | GWAS | | | | | | |
| CLMP | cg17016940_BC21 | DMR | cg01941390 | NA | | | | |
| CLMP | | | cg16343910 | NA | | | | |
| CLMP | | | cg25379149 | NA | | | | |
| COASY | | | | | cg22547525_TC21 | GWAS | cg06848514 | NA |
| COASY | | | | | | | cg02691389 | EWAS |
| COASY | | | | | | | cg17177779 | NA |
| CTSC | cg16735276_BC21 | DMR | cg08522340 | DMR, | | | | |
| | | | | EWAS | | | | |
| CTSC | | | cg16118839 | DMR, | | | | |
| | | | | EWAS | | | | |
| CTSC | | | cg09706192 | DMR | | | | |
| CYB561D2 | | | | | cg04902046_TC21 | DMR | cg15152301 | NA |
| CYB561D2 | | | | | cg04902043_BC21 | DMR | cg09575750 | NA |
| CYB561D2 | | | | | | | | |
| CYB561D2 | | | | | | | | |
| CYP11A1 | cg22186216_TC21 | EWAS | cg25788983 | NA | | | | |
| DCAKD | | | | | cg22596680_TC21 | GWAS | cg00146864 | GWAS, |
| | | | | | | | | DMR, |
| | | | | | | | | EWAS |
| DCAKD | | | | | cg22601159_TC21 | GWAS | cg00897875 | GWAS, |
| | | | | | | | | DMR, |
| | | | | | | | | EWAS |
| DCAKD | | | | | cg22601346_TC21 | GWAS, | cg20864568 | GWAS, |
| | | | | | | DMR | | DMR, |
| | | | | | | | | EWAS |
| DCAKD | | | | | cg22601347_TC21 | GWAS, | cg23315838 | NA |
| | | | | | | DMR | | |
| DEF6 | | | | | cg09420574_TC21 | DMR | cg09649521 | NA |
| EFTUD2 | | | cg24508472 | NA | cg22596680_TC21 | GWAS | | |
| EIF2B5 | | | cg20935483 | NA | cg05910779_BC21 | DMR | cg01966760 | NA |
| EIF2B5 | | | cg14141843 | EWAS | cg05910778_BC21 | DMR | cg16221425 | NA |
| ERBB2 | | | cg14377681 | GWAS, | cg22513183_BC21 | GWAS | | |
| | | | | EWAS | | | | |
| EXOC3 | cg07553021_TC21 | DMR | cg00049323 | EWAS | cg07553021_TC21 | DMR | cg00049323 | EWAS |
| FMNL1 | | | | | cg22601346_TC21 | GWAS, | cg00146864 | GWAS, |
| | | | | | | DMR | | DMR, |
| | | | | | | | | EWAS |
| FMNL1 | | | | | cg22601347_TC21 | GWAS, | cg00897875 | GWAS, |
| | | | | | | DMR | | DMR, |
| | | | | | | | | EWAS |
| FMNL1 | | | | | cg22601529_BC21 | GWAS, | cg20864568 | GWAS, |
| | | | | | | DMR | | DMR, |
| | | | | | | | | EWAS |
| FMNL1 | | | | | cg22601159_TC21 | GWAS | cg21137244 | GWAS, |
| | | | | | | | | EWAS |
| FMNL1 | | | | | cg22596680_TC21 | GWAS | | |
| FMNL1 | | | | | cg22601528_TC21 | GWAS, | | |
| | | | | | | DMR | | |
| FOXP1 | cg05089320_TC21 | DMR | cg06262288 | NA | | | | |
| GCNT2 | cg09150434_TC21 | DMR | cg25531743 | DMR | | | | |
| GCNT2 | cg09150474_TC21 | DMR | | | | | | |
| GCNT2 | cg09150429_TC21 | DMR | | | | | | |
| GCNT2 | cg09150432_TC21 | DMR | | | | | | |
| GCNT2 | cg09150433_BC21 | DMR | | | | | | |
| GCNT2 | cg09150431_BC21 | DMR | | | | | | |
| GCNT2 | cg09150428_TC21 | DMR | | | | | | |
| GDF9 | | | | | cg08524766_BC21 | GWAS | cg23475112 | GWAS, |
| | | | | | | | | EWAS |
| GDF9 | | | | | cg08524768_BC21 | GWAS | | |
| GNAI2 | | | | | cg04902043_BC21 | DMR | cg14433598 | NA |
| GNAI2 | | | | | cg04902046_TC21 | DMR | cg09579833 | EWAS |
| GNG12 | cg00902711_TC21 | DMR | cg19277299 | NA | | | cg19277299 | NA |
| GRB7 | | | | | cg22513183_BC21 | GWAS | cg14377681 | EWAS, |
| | | | | | | | | GWAS |
| H6PD | | | cg09869882 | NA | cg00185221_TC21 | GWAS | | |
| HEXIM1 | | | | | cg22596680_TC21 | GWAS | cg00146864 | GWAS, |
| | | | | | | | | DMR, |
| | | | | | | | | EWAS |
| HEXIM1 | | | | | cg22601346_TC21 | GWAS, | cg00897875 | GWAS, |
| | | | | | | DMR | | DMR, |
| | | | | | | | | EWAS |
| HEXIM1 | | | | | cg22601347_TC21 | GWAS, | cg20864568 | GWAS, |
| | | | | | | DMR | | DMR, |
| | | | | | | | | EWAS |
| HEXIM1 | | | | | cg22601528_TC21 | GWAS, | cg21137244 | GWAS, |
| | | | | | | DMR | | EWAS |
| HEXIM1 | | | | | cg22601529_BC21 | GWAS, | | |
| | | | | | | DMR | | |
| HYAL1 | | | | | cg04902046_TC21 | DMR | cg09575750 | NA |
| HYAL1 | | | | | cg04902043_BC21 | DMR | | |
| INO80 | | | | | cg20291832_BC21 | GWAS | cg25454569 | NA |
| IRF1 | | | | | cg08524766_BC21 | GWAS | cg23475112 | GWAS, |
| | | | | | | | | EWAS |
| IRF1 | | | | | cg08524768_BC21 | GWAS | | |
| ITIH4 | cg07095346_BC21 | EWAS | | | | | cg09469170 | EWAS |
| JAZF1 | cg10813825_TC21 | GWAS | cg04266607 | GWAS | | | | |
| JAZF1 | | | cg06607889 | NA | | | | |
| KDM8 | | | | | cg21317192_TC21 | GWAS | cg07057349 | NA |
| KIF18B | | | | | cg22601346_TC21 | GWAS, | cg00146864 | GWAS, |
| | | | | | | DMR | | DMR, |
| | | | | | | | | EWAS |
| KIF18B | | | | | cg22596680_TC21 | GWAS | cg00897875 | GWAS, |
| | | | | | | | | DMR, |
| | | | | | | | | EWAS |
| KIF18B | | | | | cg22601347_TC21 | GWAS, | cg20864568 | GWAS, |
| | | | | | | DMR | | DMR, |
| | | | | | | | | EWAS |
| LRRFIP1 | cg04356823_TC21 | DMR | cg02797113 | DMR, | | | cg16630940 | EWAS |
| | | | | EWAS | | | | |
| LRRFIP1 | cg04356831_BC21 | DMR | cg16630940 | EWAS | | | | |
| LRRFIPI | cg04356833_BC21 | DMR | | | | | | |
| LRRFIP1 | | | | | | | | |
| LRRFIP1 | | | | | | | | |
| LRRFIP1 | | | | | | | | |
| LY96 | cg12730697_BC21 | DMR | cg22007804 | NA | | | cg22007804 | NA |
| LY96 | cg12730695_TC21 | DMR | | | | | | |
| MAD1L1 | cg10556822_BC21 | DMR | cg18752987 | NA | cg10556822_BC21 | DMR | | |
| MANF | | | | | cg04902046_TC21 | DMR | cg23005227 | DMR, |
| | | | | | | | | EWAS |
| MANF | | | | | cg04902026_TC21 | DMR | | |
| MANF | | | | | cg04902033_BC21 | DMR | | |
| MANF | | | | | cg04902034_BC21 | DMR | | |
| MANF | | | | | cg04902037_BC21 | DMR | | |
| MANF | | | | | cg04902041_BC21 | DMR | | |
| MANF | | | | | cg04902035_BC21 | DMR | | |
| MANF | | | | | cg04902028_TC21 | DMR | | |
| MANF | | | | | cg04902032_TC21 | DMR | | |
| MANF | | | | | cg04902029_BC21 | DMR | | |
| MANF | | | | | cg04902043_BC21 | DMR | | |
| MAP3K14 | cg22600571_TC21 | GWAS | cg00146864 | GWAS, | cg22601159_TC21 | GWAS | | |
| | | | | DMR, | | | | |
| | | | | EWAS | | | | |
| MAP3K14 | cg22600572_BC21 | GWAS | cg00897875 | GWAS, | | | | |
| | | | | DMR, | | | | |
| | | | | EWAS | | | | |
| MAP3K14 | cg22600575_BC21 | GWAS | cg05257097 | GWAS | | | | |
| MAP3K14 | cg22601159_TC21 | GWAS | cg16022555 | GWAS | | | | |
| MAP3K14 | cg22601346_TC21 | GWAS, | cg20864568 | GWAS, | | | | |
| | | DMR | | DMR, | | | | |
| | | | | EWAS | | | | |
| MAP3K14 | cg22601347_TC21 | GWAS, | cg21137244 | GWAS, | | | | |
| | | DMR | | EWAS | | | | |
| MAP3K14 | cg22601528_TC21 | GWAS, | | | | | | |
| | | DMR | | | | | | |
| MAP3K14 | cg22601529_BC21 | GWAS, | | | | | | |
| | | DMR | | | | | | |
| MMP19 | cg17662800_BC21 | GWAS | cg17865265 | GWAS | | | | |
| MMP19 | | | cg08362736 | GWAS | | | | |
| MRPS6 | cg25807822_BC21 | DMR | cg25011666 | NA | | | | |
| MRPS6 | | | cg21291385 | EWAS | | | | |
| MYC | cg13109596_TC21 | GWAS | cg08349436 | NA | | | | |
| MYC | | | cg03691530 | EWAS | | | | |
| MYC | | | cg21975232 | NA | | | | |
| MYC | | | cg26169156 | NA | | | | |
| NAT6 | | | | | cg04902029_BC21 | DMR | cg23005227 | DMR, |
| | | | | | | | | EWAS |
| NAT6 | | | | | cg04902046_TC21 | DMR | | |
| NAT6 | | | | | cg04902034_BC21 | DMR | | |
| NAT6 | | | | | cg04902028_TC21 | DMR | | |
| NAT6 | | | | | cg04902032_TC21 | DMR | | |
| NAT6 | | | | | cg04902043_BC21 | DMR | | |
| NAT6 | | | | | cg04902033_BC21 | DMR | | |
| NAT6 | | | | | cg04902037_BC21 | DMR | | |
| NAT6 | | | | | cg04902035_BC21 | DMR | | |
| NAT6 | | | | | cg04902026_TC21 | DMR | | |
| NAT6 | | | | | cg04902041_BC21 | DMR | | |
| NEDD4L | cg23606849_TC21 | DMR | cg18475483 | DMR | | | | |
| NEDD4L | cg23606851_BC21 | DMR | cg24331818 | DMR | | | | |
| NEDD4L | cg23606852_BC21 | DMR | | | | | | |
| NR1D1 | | | | | cg22515799_TC21 | GWAS, | cg13762512 | GWAS |
| | | | | | | DMR | | |
| NR1D1 | | | | | cg22515797_BC21 | GWAS | | |
| NRIP1 | cg21021629_BC21 | EWAS | cg00712106 | EWAS | | | | |
| OIP5 | | | | | cg20291832_BC21 | GWAS | cg25454569 | NA |
| P4HA2 | | | cg16476284 | NA | cg08524766_BC21 | GWAS | cg23475112 | GWAS, |
| | | | | | | | | EWAS |
| P4HA2 | | | | | cg08524768_BC21 | GWAS | | |
| PARL | | | cg01966760 | NA | cg05910779_BC21 | DMR | | |
| PARL | | | cg16221425 | NA | cg05910778_BC21 | DMR | | |
| PELP1 | | | | | cg22082619_BC21 | GWAS, | cg17389538 | GWAS |
| | | | | | | DMR | | |
| PELP1 | | | | | | | cg19595239 | GWAS, |
| | | | | | | | | EWAS |
| PFKFB3 | | | cg22750548 | GWAS | cg14607001_TC21 | GWAS | cg04808066 | NA |
| PLCD3 | | | | | cg22601346_TC21 | GWAS, | cg20864568 | GWAS, |
| | | | | | | DMR | | DMR, |
| | | | | | | | | EWAS |
| PLCD3 | | | | | cg22596680_TC21 | GWAS | cg00897875 | GWAS, |
| | | | | | | | | DMR, |
| | | | | | | | | EWAS |
| PLCD3 | | | | | cg22601347_TC21 | GWAS, | | |
| | | | | | | DMR | | |
| PRDM10 | cg17084526_TC21 | DMR | cg25007761 | NA | cg17084526_TC21 | DMR | cg25007761 | NA |
| PRDM10 | | | cg06182390 | NA | | | | |
| PRKAG2 | cg11918680_TC21 | DMR | cg26405880 | NA | cg11918680_TC21 | DMR | cg09932376 | NA |
| PRKAG2 | | | cg04578183 | NA | | | | |
| PRKAG2 | | | cg09932376 | NA | | | | |
| RAB38 | | | cg00167102 | NA | cg16735276_BC21 | DMR | cg09706192 | DMR |
| RAB38 | | | | | | | cg08522340 | DMR. |
| | | | | | | | | EWAS |
| RAB38 | | | | | | | cg16118839 | DMR. |
| | | | | | | | | EWAS |
| RAD50 | | | | | cg08524768_BC21 | GWAS | cg23475112 | GWAS, |
| | | | | | | | | EWAS |
| RAD50 | | | | | cg08524766_BC21 | GWAS | | |
| RASSF1 | | | | | cg04902026_TC21 | DMR | cg09575750 | NA |
| RASSF1 | | | | | cg04902028_TC21 | DMR | cg23005227 | DMR, |
| | | | | | | | | EWAS |
| RASSF1 | | | | | cg04902029_BC21 | DMR | | |
| RASSF1 | | | | | cg04902032_TC21 | DMR | | |
| RASSF1 | | | | | cg04902033_BC21 | DMR | | |
| RASSF1 | | | | | cg04902034_BC21 | DMR | | |
| RASSF1 | | | | | cg04902035_BC21 | DMR | | |
| RASSF1 | | | | | cg04902037_BC21 | DMR | | |
| RMI2 | | | | | cg21129011_BC21 | GWAS | cg10364862 | GWAS, |
| | | | | | | | | EWAS |
| RMI2 | | | | | cg21129012_TC21 | GWAS | | |
| RMI2 | | | | | cg21129003_BC21 | GWAS | | |
| RMI2 | | | | | cg21129010_BC21 | GWAS | | |
| RMI2 | | | | | cg21129004_TC21 | GWAS | | |
| RMI2 | | | | | cg21129002_BC21 | GWAS | | |
| RMI2 | | | | | cg21129001_TC21 | GWAS | | |
| RPL7 | | | | | cg12730695_TC21 | DMR | cg18305583 | NA |
| RPL7 | | | | | cg12730697_BC21 | DMR | | |
| S100PBP | | | cg02962744 | NA | cg00549862_BC21 | DMR | | |
| S100PBP | | | | | cg00549865_BC21 | DMR | | |
| S100PBP | | | | | cg00549864_TC21 | DMR | | |
| SEPT8 | | | cg16525542 | GWAS | cg08524766_BC21 | GWAS | cg23475112 | GWAS, |
| | | | | | | | | EWAS |
| SEPT8 | | | | | cg08524768_BC21 | GWAS | | |
| SHROOM1 | | | | | cg08524766_BC21 | GWAS | cg23475112 | GWAS, |
| | | | | | | | | EWAS |
| SHROOM1 | | | | | cg08524768_BC21 | GWAS | | |
| SLC12A7 | | | | | cg07553021_TC21 | DMR | cg00049323 | EWAS |
| SLC22A5 | cg08524768_BC21 | GWAS | cg23475112 | GWAS, | | | cg16476284 | GWAS |
| | | | | EWAS | | | | |
| SLC22A5 | cg08524766_BC21 | GWAS | | | | | | |
| SLC25A39 | | | cg19481596 | NA | cg22547036_TC21 | GWAS | cg00897875 | GWAS, |
| | | | | | | | | DMR, |
| | | | | | | | | EWAS |
| SLC25A39 | | | | | cg22547038_BC21 | GWAS | cg20864568 | GWAS, |
| | | | | | | | | DMR, |
| | | | | | | | | EWAS |
| SLC25A39 | | | | | cg22601347_TC21 | GWAS, | | |
| | | | | | | DMR | | |
| SLC25A39 | | | | | cg22601346_TC21 | GWAS, | | |
| | | | | | | DMR | | |
| SLC48A1 | | | | | cg17561368_TC21 | DMR | cg15635287 | NA |
| SLC48A1 | | | | | cg17561366_TC21 | DMR | cg26115531 | EWAS |
| SLC48A1 | | | | | cg17561362_TC21 | DMR | | |
| SNX8 | cg10562002_BC21 | DMR | cg06047184 | DMR | | | | |
| SOCS1 | | | | | cg21129001_TC21 | GWAS | cg10364862 | GWAS, |
| | | | | | | | | EWAS |
| SOCS1 | | | | | cg21129010_BC21 | GWAS | | |
| SOCS1 | | | | | cg21129004_TC21 | GWAS | | |
| SOCS1 | | | | | cg21129003_BC21 | GWAS | | |
| SOCS1 | | | | | cg21129219_BC21 | GWAS, | | |
| | | | | | | DMR | | |
| SOCS1 | | | | | cg21129002_BC21 | GWAS | | |
| SOCS1 | | | | | cg21129011_BC21 | GWAS | | |
| SOCS1 | | | | | cg21129012_TC21 | GWAS | | |
| SPATA32 | | | | | cg22601346_TC21 | GWAS, | cg00897875 | GWAS, |
| | | | | | | DMR | | DMR, |
| | | | | | | | | EWAS |
| SPATA32 | | | | | cg22601347_TC21 | GWAS, | cg20864568 | GWAS, |
| | | | | | | DMR | | DMR, |
| | | | | | | | | EWAS |
| SPATA32 | | | | | | | cg00146864 | GWAS, |
| | | | | | | | | DMR, |
| | | | | | | | | EWAS |
| SSBP3 | cg00792117_TC21 | DMR | cg19682405 | NA | | | | |
| SSR3 | cg05713868_BC21 | DMR | | | | | cg20877312 | NA |
| SSR3 | cg05713870_BC21 | DMR | | | | | | |
| STAT3 | | | | | cg22547525_TC21 | GWAS | cg02691389 | EWAS |
| STAT3 | | | | | cg22547036_TC21 | GWAS | cg17177779 | NA |
| STAT3 | | | | | cg22547038_BC21 | GWAS | cg06848514 | NA |
| STON1 | cg02793110_BC21 | DMR | cg03390090 | NA | | | | |
| STON1 | cg02793111_BC21 | DMR | cg07150906 | DMR | | | | |
| STON1 | cg02793115_BC21 | DMR | cg10463553 | NA | | | | |
| STON1 | cg02793116_TC21 | DMR | cg23971565 | NA | | | | |
| STON1 | cg02793118_TC21 | DMR | | | | | | |
| STON1 | cg02793119_TC21 | DMR | | | | | | |
| SYNPO | | | cg25162888 | EWAS | cg08706842_TC21 | DMR | | |
| SYNPO | | | cg06675531 | EWAS | | | | |
| TAOK2 | | | | | cg21355555_TC21 | DMR | cg04665974 | NA |
| TAOK2 | | | | | cg21355554_BC21 | DMR | | |
| TMEM14C | | | | | cg09150474_TC21 | DMR | cg25531743 | DMR |
| TMEM54 | | | | | cg00549865_BC21 | DMR | cg02962744 | NA |
| TMEM54 | | | | | cg00549864_TC21 | DMR | | |
| TMEM54 | | | | | cg00549861_TC21 | DMR | | |
| TMEM54 | | | | | cg00549862_BC21 | DMR | | |
| TPPP | | | | | cg07553021_TC21 | DMR | cg00049323 | EWAS |
| TRERF1 | cg09496657_BC21 | DMR | cg19406053 | NA | | | | |
| TRIM69 | cg20334662_BC21 | DMR | cg09359575 | NA | | | | |
| TRPM8 | cg04308881_TC21 | DMR | cg10549071 | DMR, | cg04308881_TC21 | DMR | cg10549071 | DMR, |
| | | | | EWAS | | | | EWAS |
| TRPM8 | cg04308883_BC21 | DMR | cg20285660 | NA | cg04308883_BC21 | DMR | | |
| TRPM8 | | | | | | | | |
| TRPM8 | | | | | | | | |
| TRPM8 | | | | | | | | |
| TRPM8 | | | | | | | | |
| TRPM8 | | | | | | | | |
| TRPM8 | | | | | | | | |
| WIBG | | | | | cg17662800_BC21 | GWAS | cg08362736 | GWAS |
| WIBG | | | | | | | cg17865265 | GWAS |
| ZMYND10 | | | | | cg04902026_TC21 | DMR | cg09575750 | NA |
| ZMYND10 | | | | | cg04902028_TC21 | DMR | cg09579833 | EWAS |
| ZMYND10 | | | | | cg04902029_BC21 | DMR | cg23005227 | DMR, |
| | | | | | | | | EWAS |
| ZMYND10 | | | | | cg04902032_TC21 | DMR | | |
| ZMYND10 | | | | | cg04902033_BC21 | DMR | | |
| ZMYND10 | | | | | cg04902034_BC21 | DMR | | |
| ZMYND10 | | | | | cg04902035_BC21 | DMR | | |
| ZMYND10 | | | | | cg04902037_BC21 | DMR | | |
| ZMYND10 | | | | | cg04902041_BC21 | DMR | | |
| ZMYND10 | | | | | cg04902043_BC21 | DMR | | |
| ZMYND10 | | | | | cg04902046_TC21 | DMR | | |

TABLE 6
Results of KEGG pathway analysis on genes nearest DMCs and
pcHi-C target genes on the Custom array using iPathway Guide.
The list of genes (N = 318) was submitted to iPathway
Guide using the total list of genes nearest CpGs on the
Custom and EPIC arrays combined (N = 14,049) as background.
The “countAll” column lists the number of genes
in the background list that fall into the pathways shown.

| Pathway | countDE | countAll | fdr |
|---|---|---|---|
| Prolactin signaling pathway | 9 | 62 | 0.011 |
| Th1 and Th2 cell differentiation | 6 | 84 | 0.022 |
| Viral carcinogenesis | 13 | 164 | 0.022 |
| Adipocytokine signaling pathway | 8 | 55 | 0.022 |
| JAK-STAT signaling pathway | 11 | 119 | 0.023 |
| Acute myeloid leukemia | 8 | 61 | 0.024 |
| Human T-cell leukemia virus 1 infection | 15 | 203 | 0.024 |
| PI3K-Akt signaling pathway | 17 | 279 | 0.024 |
| Th17 cell differentiation | 8 | 97 | 0.024 |
| Small cell lung cancer | 9 | 85 | 0.029 |
| Non-small cell lung cancer | 7 | 66 | 0.029 |
| Hippo signaling pathway - multiple | 1 | 27 | 0.042 |
| species | | | |
| Epstein-Barr virus infection | 12 | 175 | 0.042 |
| Viral protein interaction with cytokine | 2 | 71 | 0.042 |
| and cytokine receptor | | | |
| Pathways in cancer | 22 | 449 | 0.044 |
| Alcoholic liver disease | 7 | 117 | 0.045 |
| PPAR signaling pathway | 1 | 56 | 0.049 |

[0123] Each CpG-gene pair was tested for correlation between methylation and expression levels to identify expression quantitative methylation (eQTM) CpGs with their nearest and pcHi-C target gene(s) in a linear model that included sex, percent epithelial cells, and three ancestry PCs as covariates (FDR <0.05). Significantly more CpGs on the Custom array were eQTMs with their nearest gene (23%) or pcHi-C target gene (16%) compared to CpGs on the EPIC array (11% and 9% respectively; FET p<2.2×10⁻¹⁶ in both analyses). The filtered EPIC CpGs were also enriched for eQTMs compared to all EPIC CpGs (20% and 12%, respectively; FET p<2.2×10⁻¹⁶ in both analyses). Although there were more AS DMCs that were eQTMs on both arrays, there were still significantly more on the Custom compared to the EPIC array (nearest gene 35% vs. 20% [FET p=0.0019] and pcHi-C 22% vs 15% [FET p=0.0082], respectively) (Table 7). To assess whether the enrichment of eQTMs among DMCs was not due to unaccounted structure in the data, 20 permutations were performed, testing for associations between methylation levels at each Custom array CpG and expression levels of randomly selected genes on different chromosomes (see Methods). Among these permutations, as many eQTMs was never observed as the 23% (all CpGs) and 35% (DMCs only) for nearest gene or the 16% (all CpGs) and 22% (DMCs only) for pcHi-C target genes observed in our data (permutations: all CpGs median 2.6% and range [2.5%-2.8%]; considering only DMCs the median was 2.8% (range 1%-6.7%). The β distributions for DMCs on the Custom and EPIC arrays that were eQTMs were further enriched for IM CpGs and depleted of CpGs at the extremes of the distribution (FIG. 12).

TABLE 7
Enrichment of eQTMs among all CpGs on an
exemplary Custom array and among DMCs.

| | | Percent eQTMs | |
|---|---|---|---|
| | | Nearest | pcHi-C |
| | # of CpGs | Gene | Target Gene |
| EPIC | 789,290 | 11% | 9% |
| Custom | 37,256 | 23% | 16% |
| P-value for difference (FET) | — | <2.2 × 10⁻¹⁶ | <2.2 × 10⁻¹⁶ |

| | | Percent eQTMs | |
|---|---|---|---|
| | | Nearest | pcHi-C |
| | # of DMCs | Gene | Target Gene |
| EPIC | 1,805 | 20% | 15% |
| Custom | 193 | 35% | 22% |
| P-value for difference (FET) | — | 0.0019 | 0.0082 |

Further Insights into the Epigenetic Regulation of Gene Expression at EWAS Loci

[0124] To examine the DMCs and their associations with gene expression more closely, regional association plots for the 10 most significant DMCs in the URECA EWAS using the EPIC and Custom array were generated. The 10 most significant EPIC DMCs were at 10 loci (FIG. 11) Seven were “solitary” with no other DMCs within 500 kb and three had one other DMC within 6.5 kb. Among the solitary DMCs, six were high-value EPIC CpGs and all 10 were reported as DMCs in airway epithelial cells in previous EWAS of asthma or allergic phenotypes. Six of the DMCs were within genes and four were intergenic. CpGs from the Custom array were present in four of these regions, but none were AS DMCs. In contrast, the 10 most significant Custom DMCs were at six loci and only two were solitary (FIG. 15). One solitary DMC in ALOXJ5 was near a high-value and a non-high-value EPIC DMC; the other solitary CpG in the PDE6A gene was also a DMC in the INSPIRE EWAS. The other four loci had spikes of association, often with a combination of DMCs from both arrays in URECA and the Custom array in both URECA and INSPIRE. Eight of the 10 most significant DMCs were within genes; two were intergenic. Three additional regions were selected as examples of patterns of associations (Table 9). The first includes a spike of 11 Custom array DMCs in URECA, 12 in INSPIRE and one high-value EPIC DMC in exons 2 and β of the CISH (Cytokine Inducible SH2-Containing Protein) gene, a member of the SOCs family of negative regulators of cytokine signaling (FIG. 14A). There was one nearby DMC from the EPIC array downstream of CISH. The lead Custom and EPIC URECA DMCs were eQTMs for CISH, with increased methylation associated with decreased gene expression and fewer allergic sensitizations. The EPIC high-value CpG at this locus was identified in previous asthma/allergy EWAS, but this locus has not been associated with asthma or allergic diseases in GWAS. CISH expression is induced by IL-13 in bronchial epithelial cells and macrophages, and has been implicated in eosinophil physiology and eosinophilic inflammation. The studies herein are consistent with these findings and further indicate that increased expression of CISH is associated with increased sensitization to allergens and that the regulation of CISH expression may be epigenetically mediated.

TABLE 9
Annotation information for three selected loci. For each locus, the number of DMCs (URECA and INSPIRE), eQTMs
for the nearest gene and pcHi-C target gene, genic location, primary inclusion criteria (GWAS, EWAS, and/or
DMR), and functional annotation category are shown for each platform (Custom, high-value EPIC, and EPIC).

| | | # DMCs | | | | | | |
|---|---|---|---|---|---|---|---|---|
| | | (# in | | | | | | |
| | | INSPIRE | | | | | | |
| | | that | eQTM | | | | | |
| | | overlap | (Number of DMCs) | | | | | |
| | | with | Nearest | pcHi-C target | | Primary Criteria | | |
| Locus | | URECA) | gene | gene | Location(s) | GWAS | EWAS | DMR |
| CISH | URECA (Custom) | 11 | CISH (11) | RASSF1 (2), MANF (4), | Exons 2 and 3 | 0 | 0 | 11 |
| | | | | ZMYND10 (1), HYAL1 (2) | | | | |
| | INSPIRE (Custom) | 12 (9) | NA | NA | Exon 3 | 0 | 0 | 12 |
| | URECA (high-value EPIC) | 2 | CISH (2) | 0 | Exon 3, intron 1 | 0 | 2 ^{E24, E25} | 1 |
| | URECA (EPIC) | 1 | CISH (1) | HYALI | Intergenic | 0 | 0 | 0 |
| SLC22A5/ | URECA (Custom) | 2 | 0 | IRFI (2), CCNI2 (1), GDF9 | Intron 6 | 2 ^{E9, E10} | 0 | 0 |
| IRF1 | | | | (2), SEPT8 (1), SHROOM1 (1) | | | | |
| | INSPIRE (Custom) | 1 (1) | NA | NA | Intron 6 | 1 ^{E9, E10} | 0 | 0 |
| | URECA (high-value EPIC) | 1 | 0 | IRF1 (1), CCNI2 (1) | Intron 6 | 1 ^{F9, F10} | 1 ^{F24, F25} | 0 |
| | URECA (EPIC) | 0 | 0 | 0 | — | | | |
| HDAC7 | URECA (Custom) | 3 | HDAC7 (1) | SLC48A (1) | Intergenic | 3 ^{E9} | 0 | 3 |
| /VDR | INSPIRE (Custom) | 2 (2) | NA | NA | Intergenic | 2 ^{E9} | 0 | 2 |
| | URECA (high-value EPIC) | 1 | VDR (1) | 0 | Intergenic | 1 ^{E9} | 1^{E25} | 0 |
| | URECA (EPIC) | 1 | VDR (1) | 0 | Intergenic | 1 ^{E9} | 0 | 0 |

| | | Functional Annotations | | | | | |
|---|---|---|---|---|---|---|---|
| | | Open | | | | | |
| | | chromatin | Enhancer | TFBS | TSS | Poised | Active |
| Locus | | (ATAC-seq) | (pcHi-C) | (ENCODE) | (ROADMAP) | enhancer | enhancer |
| CISH | URECA (Custom) | 0 | 11 | 10 | 0 | 11 | 2 |
| | INSPIRE (Custom) | 0 | 12 | 12 | 0 | 12 | 1 |
| | URECA (high-value EPIC) | 0 | 2 | 2 | 1 | 1 | 0 |
| | URECA (EPIC) | 0 | 1 | 1 | 0 | 1 | 1 |
| SLC22A5/ | URECA (Custom) | 2 | 2 | 2 | 0 | 2 | 2 |
| IRF1 | INSPIRE (Custom) | 1 | 1 | 1 | 0 | 1 | 1 |
| | URECA (high-value EPIC) | 1 | 1 | 1 | 0 | 1 | 1 |
| | URECA (EPIC) | | | | | | |
| HDAC7 | URECA (Custom) | 0 | 3 | 3 | 0 | 0 | 3 |
| /VDR | INSPIRE (Custom) | 0 | 2 | 2 | 0 | 0 | 2 |
| | URECA (high-value EPIC) | 0 | 1 | 1 | 0 | 0 | 1 |
| | URECA (EPIC) | 0 | 1 | 1 | 0 | 0 | 1 |

[0125] A second locus included one Custom DMC in URECA and INSPIRE, a second Custom DMC in URECA, and one high-value EPIC DMC in an intron of SLC22A5 (Solute Carrier Family 22 Member 5) (FIG. 14B). The lead DMC was a high-value EPIC CpG, which was also identified in prior EWAS in nasal epithelium. None of the DMCs were eQTMs for SLC22A5, but all three were in a region that physically interacted with the promoter of Interferon Response Factor 1 (IRF1), 91 kb away, and were eQTMs for IRF1 (p=2.4×10⁷, beta=0.27 and p=2.7×10⁻⁶, beta=0.27). This region is at a GWAS locus for adult- and childhood-onset asthma and hay fever (Table 9). Genetic variation in the IRF1 gene has been associated with increased expression of pro-inflammatory genes and IL-13 secretion in peripheral blood cells. The studies herein further demonstrate long-range epigenetic regulation of IRF1 expression in airway epithelial cells, with increased methylation levels associated with increased gene expression and decreased numbers of sensitizations.

[0126] At a third locus, a spike of three Custom array DMCs was observed in URECA and two in INSPIRE upstream of the HDAC7 (Histone Deacetylase 7) gene (FIG. 14C). One Custom DMC (upstream of HDAC7 and downstream of VDR) was an eQTM for HDAC7. Histone deacetylases (HDACs) have diverse functions, including regulation of inflammatory genes, and impaired barrier function in asthmatics was both induced by HDAC activity and reversed by inhibition of endogenous HDAC. In this study, increased methylation in the HDAC7 gene was associated with increased expression of HDAC7 and fewer sensitizations. At this extended locus, two EPIC DMCs were in an intergenic region 42 kb upstream of the VDR (Vitamin D Receptor) gene. Vitamin D deficiency in childhood has been associated with increased risk for persistent asthma and high dose vitamin D supplementation in pregnancy reduced risk of recurrent wheeze in childhood. Here, increased methylation (EPIC array) near the VDR gene was associated with decreased VDR expression and sensitization to fewer allergens. The HDAC7-VDR region has been identified in GWAS of childhood- and adult-onset asthma. This locus demonstrates the complementarity of the Custom and EPIC arrays in detecting differential methylation relevant to asthma and allergic diseases.

### Evaluating Environmental Effects

[0127] To evaluate whether the CpGs on the arrays described herein are affected by environmental exposures relevant to asthma, array performance was evaluated in blood cell samples obtained from men exposed to cow barns vs. men not exposed to cow barns. The array identified 79 differentially methylated cytosines (DMCs) in men exposed to cow barns compared to men not exposed to cow barns. Results are shown in FIG. 16. This data demonstrates that the arrays described herein find use in methods of identifying subjects that have been exposed to allergens, including environmental allergens, relevant to asthma. For example, the arrays described herein can be used in methods of identifying subjects that have been exposed to environmental allergens known to cause asthma, and thus can be used to identifying subjects having or at risk of having asthma.

[0128] To evaluate whether CpGs on the arrays described herein are affected by allergy treatment, array performance was evaluated in samples obtained from subjects receiving food allergy treatment with Xolair (omalizumab) vs. subjects receiving a placebo treatment for food allergy. The array identified 140 CpGs associated with a differential response to Xolair at 36 weeks following treatment. Results are shown in FIG. 17. This data demonstrates that the arrays described herein find use in methods of evaluating or predicting response to treatment for asthma or allergic disease, including evaluating or predicting response to antibody-based treatment for food allergy.

### II. Discussion

[0129] The epigenome plays a critical role in regulating gene expression in a context-specific manner, such as in the presence of environmental exposures or disease states. DNA methylation, for example, is responsive to disease promoting exposures in both in vitro cell models and in ex vivo cells from individuals who are both healthy and with disease. Yet, the DNA methylome has been underexplored and largely limited to the CpGs on commercial arrays. As a result, it is unknown whether the 800,000 or fewer CpGs interrogated in nearly all EWAS studies to date include CpGs most relevant to any specific exposure, disease, or tissue type. Experiments conducted during development of embodiments herein addressed this question by designing a Custom Allergy & Asthma DNA methylation array with high-value CpGs that are not included on the commercial EPIC array (i.e., one embodiment of the arrays within the scope herein). The study design allowed for important observations regarding features of high-value CpGs and to propose a pipeline that can be used to prioritize CpGs from among the more than 28 million in the human genome in future studies.

[0130] Although CpGs were not selected based on methylation levels, those that passed through the pipeline were significantly enriched for IM CpGs (β values between 20-80%). The CpGs that were DMCs and eQTMs were further enriched for intermediate methylation levels on both the EPIC and Custom arrays, indicating that this one feature is a signature of high-value, functional CpGs in the genome. IM CpGs are more likely to be tissue-specific, to vary between individuals, and to play important roles in gene regulation. The study further revealed that CpGs with intermediate levels of methylation are also more likely to be associated with AS, an important clinical phenotype that reflects both an immune response to past allergen exposures and a risk factor for the development of asthma and allergic diseases. Indeed, AS DMCs were highly enriched for those associated with allergic asthma. Although the CpGs on the custom array were overall enriched for IM CpGs, AS DMCs were further enriched, with a near complete depletion of very hypomethylated (0-20% methylation) and very hypermethylated (80-100%) CpGs. This important observation was further supported by EWAS results using the EPIC array. Whereas the EPIC array CpGs are enriched for hypomethylated and hypermethylated CpGs in all tissues, the EPIC DMCs were depleted for CpGs at both extremes and enriched for IM CpGs, similar to the DMCs on the custom Allergy&Asthma array. It was demonstrated that the 26,905 CpGs on the EPIC array that passed the filtering pipeline described herein were also enriched for IM CpGs and enriched among AS DMCs: 16.3% of the DMCs in the AS EWAS were among the filtered EPIC CpGs compared to 3.4% of all CpGs on the EPIC array. This data indicate that filtering CpGs on the EPIC array to include just IM CpGs (β=20-80%) in the tissue or cell types in individual studies should enrich for functional CpGs and increase power to detect DMCs associated with exposure or disease outcomes. Using all CpGs on the EPIC, 1,805 DMCs were identified (0.23% of all CpGs). However, when only IM CpGs in the GWAS were included, 2,182 DMCs were identified (0.70% of all CpGs), more than three times the proportion of DMCs among CpGs. Finally, DMCs that were eQTMs were further enriched for IM CpGs, supporting their role in gene regulation.

[0131] In addition to the enrichment of IM CpGs on the Custom compared to the EPIC array, the patterns of associations with AS on the two arrays were notable. Whereas DMCs on the EPIC are more sparsely distributed throughout the genome, the DMCs on the Custom commonly form spikes of association, analogous to GWAS peaks. Such regional clustering of DMCs provides confidence in and internal validation of EWAS results, in contrast to the more solitary distribution of DMCs on the EPIC array (FIG. 12). Another distinguishing feature of the DMCs on the Custom array were their enrichment in exons and depletions in intergenic regions compared to DMCs on the EPIC array.

The CpGs included on the custom Allergy&Asthma array were selected based on prior evidence of associations with asthma or allergic diseases using three classes of evidence: within a DMR in our WGBS study, in a previous published EWAS, or at published GWAS loci. Overall, 62% of CpGs on the custom array were selected from DMRs compared to 1.6% of all CpGs on the EPIC array, yet the DMR CpGs were enriched among DMCs on both the custom (77.2%) and EPIC (3.9%) arrays. Because all CpGs on the EPIC were excluded from the Custom array, there were few previous EWAS CpGs on the Custom array, although a modest enrichment of EWAS CpGs among DMCs was still observed on the Custom array (1.9% overall vs. 3.9% of DMCs) and a highly significant enrichment among DMCs on the EPIC array (4.9% overall vs. 21.7% of DMCs). These represent replications of results from previous EWAS of asthma and allergic disease-associated phenotypes. In contrast to these two categories of prior evidence, CpGs at asthma and allergy GWAS loci were not significantly enriched among DMCs from either array and even slightly depleted among the Custom array DMCs. In a WGBS in 25 different cell and tissue types, Elliott et al. (G. Elliott et al., Intermediate DNA methylation is a conserved signature of genome regulation. Nat Commun 6, 6363 (2015) showed that IM CpGs were more likely to be allele-independent than to show allele-specific methylation. Busche et al. (S. Busche et al., Population whole-genome bisulfite sequencing across two tissues highlights the environment as the principal source of human methylome variation. Genome Biol 16, 290 (2015)) conducted a WGBS study in adipose and blood cells from twins and concluded that non-genetic effects were mainly tissue-specific and located in gene regions (consistent with the features of CpGs on the Custom array), whereas CpGs with genetic effects were shared across tissues and more likely to be intergenic (consistent with features of CpGs on the EPIC array). They concluded that non-shared environments accounted for most of the variance in methylation levels. The present findings of a lack of enrichment of DMCs at GWAS loci, but enrichments for IM CpGs and for AS DMCs in exons indicate that inter-individual variation for IM CpGs on the Custom array may be the set of more plastic CpGs in the human genome and more reflective of environmental exposures than of genetic effects. Nonetheless, experiments conducted during development of embodiments herein revealed examples of AS DMCs at important GWAS loci (e.g., IRF1 on chromosome 5, CLEC16A on chromosome 16, and HDAC7/VDR on chromosome 12). Proportionally more CpGs on the custom array are influenced by local genetic variation compared to the EPIC array. Data show that 57% of CpGs on the custom array but only 37% of CpGs on the EPIC are meCpGs, meaning that variation is associated with genotype at least one nearby SNP.

[0132] Experiments conducted during development of embodiments herein revealed high-value functional CpGs in airway epithelial cells that are not interrogated on the EPIC array. The development pipeline identified 92,024 high-value CpGs after excluding 26,905 high-value CpGs on the EPIC array. Therefore, among the >28 million CpG sites in the genome, less than 0.5% are likely functional, or high-value, in any particular tissue or disease/environment context. The Custom array (i.e., one embodiment of the present invention), which included about half of the non-EPIC high-value CpGs, revealed that associations with AS and allergic asthma were robust to race/ethnicity, ascertainment, age, and geography.

### III. Methods

### Cohorts Included in WGBS or EWAS Studies

[0133] Three longitudinal birth cohort studies were included in these studies. All studies were approved by the Institutional Review Boards of each of the institutions recruiting subjects. The URECA study is an observational birth cohort study initiated in 2005 in Baltimore, Boston, New York City and St. Louis under the NIAID-funded Inner City Asthma Consortium. Either the pregnant mother or the father of their unborn child had a history of asthma, allergic rhinitis, or eczema. Asthma was assessed at age 10 according to a definition that considered symptoms, diagnosis by a health care provider, and measurements of pulmonary function. Skin prick testing was performed at age 10 (255 subjects) or age 7 (25 subjects) and included the following allergens: mouse epithelia, dog epithelia, Dermatophagoides fainae (mite), Dermatophagoides pteronyssinus (mite), cat hair, rat epithelia, American/German cockroach mix, German cockroach, Alternaria tenuis (mold), Aspergillus mix, ragweed mix, tree pollen (oak or birch), Penicillium Notatum/Pennicillium Chrysogenum, and Timothy grass. Nasal brushings were obtained at age 11 years. Twenty African American children were selected for the WGBS studies (10 with asthma and allergic disease [3 females, 7 males], 10 without asthma or allergic disease [3 females, 7 males]), and 280 unrelated children were included in the EWAS using both the Custom and EPIC arrays. The characteristics of the 280 URECA participants are described in Table 4.

[0134] The COAST study is an observational birth cohort study initiated in 1998 in Madison, Wisconsin. Pregnant women were recruited in the third trimester of pregnancy if the mother or the father had a history of asthma or allergic diseases. Asthma was assessed beginning at age 6 years. Children were diagnosed with asthma if they fulfilled at least one of the following criteria: (1) physician-diagnosed asthma; (2) frequent albuterol use for coughing or wheezing episodes as prescribed by a physician; (3) use of a prescribed daily controller medication; (4) an implemented step-up plan, including use of albuterol or inhaled corticosteroids during illness as prescribed by a physician; (5) use of prednisone for an asthma exacerbation. Nasal brushings were obtained between ages 18-20 years. Twenty participants of European American ancestry were selected for the WGBS studies (10 with asthma and allergic disease [5 males, 5 females], 10 without asthma or allergic disease [5 males, 5 females]).

[0135] The INSPIRE study is an observational birth cohort of healthy infants in central Tennessee (E. K. Larkin et al., Objectives, design and enrollment results from the Infant Susceptibility to Pulmonary Infections and Asthma Following RSV Exposure Study (INSPIRE). BMC Pulm Med 15, 45 (2015). Flocked nasal swabs were obtained at age 5-6 years and samples were stored at −80 C in RNA lysis buffer. RNA and DNA were isolated from the swabs using the Qiagen AllPrep DNA/RNA kit. Subjects were tested for the following thirteen allergens: dog, cat, Dermatophagoides pteronyssinus and Dermatophagoides farinae mix, American/German cockroach, Penicillium Notatum/Penicillium Chrysogenum, Alternaria Tenuis, Cladosporum Herbarum, Aspergillus mix, Ragweed mix, Eastern 6 Tree mix, K-O-T Grass mix, Maple/Box Elder mix, and Weed mix. The characteristics of the 474 unrelated INSPIRE children included in the EWAS are described in Table 4.

### Cohorts Included in the Cross-Tissue Comparison Studies

[0136] In addition to studying nasal epithelial cell DNA with the Custom array in URECA, results were included from studies of the Custom array in DNA from nasal lavage cells (n=96), buccal cells (n=96), placenta (n=96) and cord blood (96). The nasal lavage cell DNA was isolated from URECA subjects around age 13 (mean=13.4 years, range=12.8-14.9 years) using the QIAamp DNA Micro Kit. The buccal, placenta and cord blood cell DNA was collected from 96 participants in the VCSIP cohort (11). Placental DNA was extracted from powdered tissue under liquid nitrogen, using the QIAcube for automated nucleic acid extraction. Cord blood DNA was extracted from 200 μL of whole blood using the QIAamp DNA Mini Kit and the QIAcube, and buccal DNA was extracted from buccal swabs following proteinase K digestion using the Maxwell 16 Blood DNA Extraction Kit and the Maxwell 16 Instrument for automated nucleic acid extraction.

### Whole Genome Bisulfite Sequencing and DMR Studies

DNA (250 ng) from participants in the URECA and COAST participants was transferred to the University of Chicago Genomics Facility for bisulfite conversion and sequencing were conducted using the EZ DNA Methylation-Gold Kit library prep and the Swift Biosciences Accel-NGS Methyl-seq DNA library kit, respectively. Samples were sequenced to a minimum of 330 million reads on the Illumina NovaSEQ6000 (S4 flowcell). Adapters were removed from sequence reads using trimgalore (A. Kechin, U. Boyarskikh, A. Kel, M. Filipenko, cutPrimers: A New Tool for Accurate Cutting of Primers from Reads of Targeted Next Generation Sequencing. J Comput Biol 24, 1138-1143 (2017)) prior to mapping the reads using bismark (version 0.18.2) and the hg19 reference assembly. Bismark was further used to remove duplicate reads and call methylation values. Prior to DMR analyses, CpGs were removed if they overlapped with a common SNP (MAF >0.05) in 1000 genomes CEU or YRI populations (C. Genomes Project et al., A global reference for human genetic variation. Nature 526, 68-74 (2015)) or in Blacklisted regions (H. M. Amemiya, A. Kundaje, A. P. Boyle, The ENCODE Blacklist: Identification of Problematic Regions of the Genome. Sci Rep 9, 9354 (2019)). Variant calling from WGBS was performed using the biscuit algorithm, which also identified sample swaps and contamination. The variant calls from WGBS were compared to either array-based genotypes (COAST) or whole genome sequence-based genotypes (URECA). All variant calls matched with an accuracy of >95%, except for one mismatched sample in COAST. The latter sample was excluded from further analysis, leaving 19 samples for analysis (9 allergic asthmatics and 10 non-asthma/non-allergic controls).

[0137] Three DMR analyses were conducted in the African American sample (n=20), the European American sample (n=19), and the combined African American and European American sample (n=39). The methylation data were then smoothed using BSmooth and DMRs were called using the bsseq package (version 1.14) (K. D. Hansen, B. Langmead, R. A. Irizarry, BSmooth: from whole genome bisulfite sequencing reads to differentially methylated regions. Genome Biol 13, R83 (2012)). Only CpGs covered by at least 10 reads in 80% of the cases and controls (AA only, EA only, and combined n=39) were included. T-statistics cutoffs were based on 5% quantiles and a maximum gap of 300 bp was required between CpGs to define a cluster, as recommended. DMRs were then filtered to require three or more CpGs per DMR and a minimum of 5% difference in methylation levels between the allergy asthma cases and non-allergy, non-asthmatic controls. The union of DMRs between analyses was assessed using the reduce function from the GenomicRanges β package (version 1.30).

### Selection of CpGs for Custom Array

[0138] CpGs were first identified with a high likelihood of being associated with asthma and allergic disease (FIG. 5). In the first step, regions with prior evidence of association with asthma or allergic diseases (atopic dermatitis/eczema, allergic rhinitis/hay fever, and food allergy) were prioritized from three categories of studies. The first category included the 199,473 CpGs within the DMRs from the WGBS. The second category included CpGs from previous DNA methylation studies (EWAS) of asthma or allergic diseases. For this, a literature search was conducted for array-based studies of DNA methylation in asthma and allergic disease. 15 studies were identified that conducted 25 EWAS of asthma- or allergy-related phenotypes, five of which were conducted in respiratory epithelium and 10 in blood)(Table 2). CpG sites for five additional genes from two candidate gene DNA methylation studies of food allergies were also included; FOXP3 and IL4, IL5, IL10 and INFG. In total, 19,057 unique DMCs were identified. The third category included CpGs located within the 140 GWAS loci defined in two recent large studies of adult-onset and childhood-onset asthma (M. Pividori, N. Schoettler, D. L. Nicolae, C. Ober, H. K. Im, Shared and distinct genetic risk factors for childhood-onset and adult-onset asthma: genome-wide and transcriptome-wide studies. Lancet Respir Med 7, 509-522 (2019)) and allergic diseases (asthma, hay fever and eczema) (A. Johansson, M. Rask-Andersen, T. Karlsson, W. E. Ek, Genome-wide association analysis of 350 000 Caucasians from the UK Biobank identifies novel loci for asthma, hay fever and eczema. Hum Mol Genet 28, 4022-4041 (2019)) in UK Biobank subjects (C. Bycroft et al., The UK Biobank resource with deep phenotyping and genomic data. Nature 562, 203-209 (2018)), which included nearly all the loci reported in other GWAS in multi-ancestry populations. In total, the GWAS loci covered a total of 570,350 CpG motifs. CpGs for the MALT1 gene that was significantly associated with peanut allergy in a genome-wide interaction study (A. Winters et al., The MALT1 locus and peanut avoidance in the risk for peanut allergy. J Allergy Clin Immunol 143, 2326-2329 (2019)) were also included. Duplicate CpGs were removed from among the three categories of prior studies, CpGs on the EPIC array, CpGs in ENCODE blacklist regions, and those in which the cytosine nucleotide overlapped with common SNPs (MAF >5%) in 1000 Genomes CEU or YRI populations. A total of 696,225 CpGs remained for consideration in the second step.

[0139] To further prioritize the CpGs, in the second step overlap with six functional annotations was considered: 1) ENCODE (E. P. Consortium et al., Expanded encyclopaedias of DNA elements in the human and mouse genomes. Nature 583, 699-710 (2020)) TFBSs from all cell types; 2-4) ROADMAP Epigenetics (C. Roadmap Epigenomics et al., Integrative analysis of 111 reference human epigenomes. Nature 518, 317-330 (2015)) transcriptional start sites, poised enhancers and active enhancers from smooth muscle (E078, E076, E103, E111), epithelial (E055, E056, E059, E061, E058), and blood cells (E062, E034, E045, E044, E043, E039, E041, E042, E040, E037, E048, E038, E047, E029, E050, E032, E046); 5) ATAC-seq in human cultured bronchial epithelial cells exposed to rhinovirus or vehicle from asthmatic and non-asthmatic individuals, and 6) pcHi-C from ex vivo human bronchial epithelial cells (B. A. Helling et al., Altered transcriptional and chromatin responses to rhinovirus in bronchial epithelial cells from adults with asthma. Commun Biol 3, 678 (2020)). It was required that CpGs at DMRs overlapped with at least three functional annotations or prior evidence (GWAS or EWAS), CpGs from previous EWASs overlapped with at least one functional annotation or prior evidence (GWAS or DMR), and CpGs at GWAS loci overlapped with at least four functional annotations or prior evidence (EWAS or DMR). Lastly, all remaining CpGs that were within both a GWAS locus and a DMR were selected.

[0140] From the 92,024 resulting high-value CpGs identified, an exemplary array was manufactured (the “Custom array”), containing probes that passed quality control and manufacturing amounting to 53,840 probes targeting 45,891 CpGs.

### Rna-Seq Studies in URECA

[0141] Protocols for processing samples for RNA-seq in nasal epithelial cells from the URECA children have been described (M. C. Altman et al., Endotype of allergic asthma with airway obstruction in urban children. J Allergy Clin Immunol 10.1016/j.jaci.2021.02.040 (2021)). Gene expression data were available in 249 of the children with DNA methylation data. In these data, 15,643 genes were detected as expressed.

### Estimation of Genetic Ancestry

[0142] Ancestry PCs were estimated in the URECA children using a set of 3,534 SNPs that were genotyped in URECA and in reference panels from the 1000 Genomes Project (1 KG; n=156) (C. Genomes Project et al., A global reference for human genetic variation. Nature 526, 68-74 (2015)) and the Human Genome Diversity Project (HGDP; n=52). European, West African, and East Asian reference samples were randomly selected from CEU (n=52), YRI (n=52), JPT (n=26), and CHB (n=26) samples in the phase 3 1 KG reference panel. Ancestry PCs were calculated PC-Air (M. P. Conomos, M. B. Miller, T. A. Thornton, Robust inference of population structure for ancestry prediction and correction of stratification in the presence of relatedness. Genet Epidemiol 39, 276-293 (2015)).

### Processing Custom and EPIC Array Methylation Data in URECA

[0143] DNA methylation was assessed using the Illumina Allergy&Asthma Custom BeadChip or the Illumina Infinium MethylationEPIC BeadChip (Illumina, San Diego, CA) following bisulfite conversion at the University of Chicago Genomics Facility. Methylation data from both arrays were processed using minfi v1.29.1 (M. J. Aryee et al., Minfi: a flexible and comprehensive Bioconductor package for the analysis of Infinium DNA methylation microarrays. Bioinformatics 30, 1363-1369 (2014)).

For the EPIC array, probes that failed (detection P<0.01 in at least 25% of samples), overlapped with known SNPs with MAF of at least 5% in African American or European Americans, mapped to the X or Y chromosomes, overlapped ENCODE blacklist regions, or mapped to multiple locations in a bisulfite-converted genome were removed. Raw probe values were background corrected using preprocessIllumina (bg.correct=“TRUE”, normalize=“no”), and quantile normalization was performed using ENmix (v 1.30.01), followed by SWAN normalization (J. Maksimovic, L. Gordon, A. Oshlack, SWAN: Subset-quantile within array normalization for illumina infinium HumanMethylation450 BeadChips. Genome Biol 13, R44 (2012)). Samples that failed sex checks using the getSex function in minfi were removed. DNA concentration, collection site, array and plate showed batch effects by principal components analysis (PCA). The effects of collection site, array, and plate were removed using ComBat (W. E. Johnson, C. Li, A. Rabinovic, Adjusting batch effects in microarray expression data using empirical Bayes methods. Biostatistics 8, 118-127 (2007)); DNA concentration was removed using linear regression. It was estimated unobserved variation in the data that was not correlated with our phenotype of interest and included these latent factors in the model. The first three ancestry PCs were also included as covariates to capture the effects of admixture in the sample. After QC, we retained 789,290 (91.1%) of CpGs on the EPIC array for analysis.

[0144] For an exemplary Custom array provided herein, probes that failed (detection P<0.01 in at least 25% of samples), contained a SNP with MAF of at least 5% in African American or European Americans within β bp of the CpG interrogation site, mapped to the X chromosome, or were missing genomic coordinates were removed. Raw probe values were background corrected using preprocessIllumina (bg.correct=“TRUE”, normalize=“no”), and quantile normalization was performed using ENmix. DNA concentration, collection site, array, and plate showed batch effects by PCA. The effects of site, plate, and chip were removed using ComBat, and DNA concentration was removed using linear regression. It was estimated unobserved variation in the data that was not correlated with the phenotype of interest and included these latent factors in the model. To account for regional differences in the density of Custom array CpGs on the estimation of latent factors, we used the partition.params function in FALCO (https://github.com/chrismckennan) to partition groups of CpGs into independent units (default size=1e5). The first three ancestry PCs were included as covariates to capture the effects of admixture in the sample for analyses in URECA. After QC, 37,256 (98.1%) CpGs were retained for analyses.

[0145] For comparison purposes, the CpGs were filtered on the EPIC array through the same pipeline described above for selecting CpGs for the Custom array; we refer to these as “filtered” EPIC CpGs. Of the 789,290 CpGs on the EPIC, 26,905 (3.4%) were included in the filtered dataset.

### Processing Custom Array Methylation Data in INSPIRE

[0146] The same pipeline used in URECA was used to process INSPIRE Custom methylation data. Twenty-one probes failed P-value detection and were removed from the analysis. Sex was estimated using the X chromosome CpGs and removed five samples with discrepancies between these classifications and reported sex. DNA concentration, collection year, plate, and array were identified as having batch effects by PCA. The effects of collection year, plate, and array were removed using ComBat, and DNA concentration was removed using linear regression. Because DNA concentration was correlated with other variables, it was also included as a covariate in the model, along with sex, ethnicity and latent factors estimated using the same methods described above for URECA. A total of 37,261 CpGs passed processing QC and were included in the analysis.

### EWAS in the URECA and INSPIRE Cohorts

[0147] For each EWAS we used the following models:
[0148] URECA: DNAm˜proportion positive SPTs+sex+epithelial cells+AncPCs₁₋₃+LFs₁₋ₙ
[0149] INSPIRE: DNAm˜proportion positive SPTs+sex+self-reported ethnicity+DNA concentration+LF_{S1-n}

[0150] For the URECA EWAS, 14 and 5 latent variables were included for the Custom (18) and EPIC (19) arrays, respectively, after removing technical variables (Table 8). Because we did not have information on cell proportion or genetic ancestry for INSPIRE, we included sex, self-reported race, DNA concentration, and 21 latent factors as covariates to adjust for cell composition, as well as other unwanted variation in the EWAS. Analyses were performed in R (version 4.1.0) using limma v 3.50.0 (B. Phipson, S. Lee, I. J. Majewski, W. S. Alexander, G. K. Smyth, Robust Hyperparameter Estimation Protects against Hypervariable Genes and Improves Power to Detect Differential Expression. Ann Appl Stat 10, 946-963 (2016); M. E. Ritchie et al., limma powers differential expression analyses for RNA-sequencing and microarray studies. Nucleic Acids Res 43, e47 (2015)). To control the false discovery rate, a q-value threshold of 0.05 was used. The URECA EWAS sample included 19 of the 20 African American children in the WGBS studies and the 96 children shown in the cross-tissue density plots of β distributions (FIG. 3).

TABLE 8
PCA of DNA methylation analysis and identifying batch effects. Significance of correlations between potential confounders
and PCs 1 through 5 for A) quantile normalized methylation data in URECA subjects (Custom), B) final adjusted methylation
data for URECA subjects (Custom), C) quantile normalized methylation data in URECA subjects (EPIC), D) final adjusted
methylation data for URECA subjects (EPIC), E) quantile normalized methylation data in INSPIRE subjects (Custom), and
F) final adjusted methylation data for INSPIRE subjects (Custom). Values less than P = 0.05 are highlighted in red.

| | | | | | | | | | | |
|---|---|---|---|---|---|---|---|---|---|---|
| | | | Study_{—} | DNA_{—} | | % | % | | | |
| PropVar | Plate | Array | Site | Conc | Sex | Ciliated | Squamous | AncPC1 | AncPC2 | AncPC3 |

A. URECA Custom Array, raw

| | | | | | | | | | | | |
|---|---|---|---|---|---|---|---|---|---|---|---|
| PC1 | 0.386 | 0.236 | 0.016 | 0.103 | 1.37E−08 | 0.960 | 3.38E−25 | 0.008 | 0.265 | 0.198 | 0.230 |
| PC2 | 0.133 | 1.17E−90 | 4.31E−72 | 0.690 | 0.355 | 0.223 | 0.946 | 0.884 | 0.697 | 0.924 | 0.677 |
| PC3 | 0.079 | 0.002 | 0.002 | 1.72E−10 | 0.882 | 0.243 | 0.153 | 0.001 | 0.041 | 0.079 | 0.962 |
| PC4 | 0.029 | 0.246 | 0.919 | 1.54E−08 | 7.29E−07 | 0.016 | 0.896 | 0.180 | 0.150 | 0.129 | 0.361 |
| PC5 | 0.019 | 0.754 | 0.845 | 0.388 | 0.484 | 1.63E−07 | 0.243 | 0.862 | 0.186 | 0.117 | 0.893 |

B. URECA Custom Final. The effects of DNA concentration, plate, array, and study site were
removed. Sex, % ciliated cells, ancestry PCs 1-3, and latent factors were included in the model.

| | | | | | | | | | | | |
|---|---|---|---|---|---|---|---|---|---|---|---|
| PC1 | 0.389 | 0.970 | 1.000 | 0.738 | 0.839 | 0.950 | 2.15E−22 | 0.028 | 0.097 | 0.065 | 0.480 |
| PC2 | 0.089 | 0.936 | 0.999 | 0.410 | 0.436 | 0.038 | 0.231 | 0.002 | 0.130 | 0.236 | 0.817 |
| PC3 | 0.060 | 0.907 | 1.000 | 0.968 | 0.181 | 0.327 | 0.825 | 0.604 | 0.584 | 0.443 | 0.708 |
| PC4 | 0.030 | 0.982 | 1.000 | 0.296 | 0.605 | 0.059 | 0.175 | 0.362 | 0.033 | 0.151 | 0.366 |
| PC5 | 0.024 | 0.954 | 1.000 | 0.283 | 0.922 | 8.17E−07 | 0.462 | 0.614 | 0.037 | 0.030 | 0.862 |

C. URERCA EPIC Array, raw

| | | | | | | | | | | | |
|---|---|---|---|---|---|---|---|---|---|---|---|
| PC1 | 0.229 | 0.139 | 0.064 | 0.128 | 3.498.08 | 0.841 | 2.62E−25 | 0.003 | 0.405 | 0.369 | 0.736 |
| PC2 | 0.064 | 0.002 | 0.002 | 3.20E−09 | 0.676 | 0.130 | 0.487 | 0.008 | 0.016 | 0.188 | 0.285 |
| PC3 | 0.021 | 0.280 | 0.176 | 0.966 | 0.826 | 0.935 | 0.247 | 0.774 | 0.089 | 0.163 | 0.773 |
| PC4 | 0.019 | 0.609 | 0.932 | 1.08E−07 | 0.010 | 0.244 | 0.172 | 0.280 | 0.025 | 0.030 | 0.130 |
| PC5 | 0.017 | 0.199 | 0.137 | 0.675 | 0.284 | 0.123 | 0.416 | 0.644 | 0.085 | 0,015 | 0.292 |

Rna-Sequencing and Expression Quantitative Trait Methylation (eQTM) Studies in URECA
Protocols for processing samples for RNA-seq in nasal epithelial cells from the URECA children have been described²¹. Gene expression data were available in 249 of the children with DNA methylation data. In these samples, 15,643 genes were detected as expressed. To test for cis associations between DNA methylation and gene expression (eQTM studies), we used a linear model that included sex, percent epithelial cells, and three ancestry PCs as covariates (FDR <0.05).
Correlations of Methylation Level with Expression of Nearest Gene and Target Promoter Capture Hi-C Gene

[0151] Correlations between methylation levels at each CpG with the expression levels of the nearest gene and the pcHi-C target genes (42) were assessed using linear regression in both the full data set (all CpGs that passed QC on each array) and in the DMCs. Comparisons were only assessed for DMCs falling in “capture end regions” (+/−1 kb) that interacted with gene promoters (42). Sex, ancestry PCs and epithelial cell composition were included as covariates in the model. The nearest gene was annotated using the GenomicRanges package v 1.46.1 in β with the gene list from the β biomaRt package v2.50.2 using ensemble GRCh37. A false discovery rate of 5% was used to assess significance.

### Pathway Analysis

[0152] Pathway over-representation testing was performed with Advaita Bio's iPathwayGuide using KEGG Pathways (release 100.0+/11-12, November 2021). For both the Custom (N=318) and the EPIC (2,366) arrays, genes that were either the nearest gene or a pcHi-C target gene to a DMC were entered as significant against a background of all nearest genes to CpGs on both arrays that are expressed in NECs (N=14,049).

### Dna Extraction Protocols:

[0153] URLCA Nasal brushings were obtained at age 11 years. Total DNA was isolated from brushes stored in RLT Plus lysis buffer. Samples were thawed, vortexed, and then spun to collect the supernatant, which was transferred to fresh tubes. Seventy percent EtOH was used to wash the brushes and original tubes, which was then transferred to the new tubes. The samples were spun through a Qiashredder column (Qiagen) and then extracted using AllPrep DNA/RNA mini kits (Qiagen) with 100 ul elution volumes for DNA following the manufacturer's protocol. Nasal lavage DNA was isolated using the QIAamp DNA Micro Kit. COAST: DNA was extracted from nasal brushings obtained at ages 18-20 years.

INSPIRE: Flocked nasal swabs were obtained at age 5-6 years and samples were stored at −80° C. in RNA lysis buffer. RNA and DNA were isolated from the swabs using the Qiagen AllPrep DNA/RNA kit.
VCSIP: Placental DNA was extracted from powdered tissue under liquid nitrogen, using the QIAcube for automated nucleic acid extraction. Cord blood DNA was extracted from 200 mL of whole blood using the QIAamp DNA Mini Kit and the QfAcube, and buccal DNA was extracted from buccal swabs following proteinase K digestion using the Maxwell 16 Blood DNA Extraction Kit and the Maxwell 16 Instrument for auwomrated nucleic acid extraction.

### DMR Analysis

[0154] DMR analyses were conducted in the African American sample (n=20), the European American sample (n=19), and the combined African American and European American sample (n=39). The methylation data were then smoothed using BSmooth (Hansen K D, Langmead B, Irizarry R A. BSmooth: from whole genome bisulfite sequencing reads to differentially methylated regions. Genome Biol. 2012; 13(10):R83) and DMRs were called using the bsseq package (version 1.14)). Only CpGs covered by at least 10 reads in 80% of the cases and controls (AA only, EA only, and combined n=39) were included. T-statistics cutoffs were based on 5% quantiles, and a maximum gap of 300 bp was required between CpGs to define a cluster, as recommended by BSmooth. To maximize the number of DMRs, three or more CpGs per DMR and a minimum of 5% difference in methylation levels between the allergy asthma cases and non-allergy, non-asthmatic controls were required. The union of DMRs between analyses was assessed using the reduce function from the GenomicRanges β package (version 1.30).

### Estimating Genetic Ancestry

[0155] Ancestry PCs were estimated in the URECA children using a set of 3,534 SNPs that were genotyped in URECA and in reference panels from the 1000 Genomes Project (1 KG; n=156) (Genomes Project C, Auton A, Brooks L D, Durbin R M, Garrison E P, Kang H M, et al. A global reference for human genetic variation. Nature. 2015; 526(7571):68-74) and the Human Genome Diversity Project (HGDP; n=52). European, West African, and East Asian reference samples were randomly selected from CEU (n=52), YRI (n=52), JPT (n=26), and CHB (n=26) samples, respectively, in the phase 3 1 KG reference panel. Ancestry PCs were calculated using PC-Air (Conomos M P, Miller M B, Thornton T A. Robust inference of population structure for ancestry prediction and correction of stratification in the presence of relatedness. Genet Epidemiol. 2015; 39(4):276-93). The first two ancestry PCs for the URECA children in our study are shown in FIG. 13.

The application's sequence listing, which the Patent Office published only in electronic form, follows.

SEQUENCE LISTING (53840 sequences)

SEQ ID NO: 1 - DNA, 50 bp, synthetic construct
  source 1..50: mol_type = other DNA
aaaatatttaaatcatttttatctaatttttaaattcttctttttaaccc

SEQ ID NO: 2 - DNA, 50 bp, synthetic construct
  source 1..50: mol_type = other DNA
ataaaattacrccatattactaaactactcttaacctaaaaaatcctccc

SEQ ID NO: 3 - DNA, 50 bp, synthetic construct
  source 1..50: mol_type = other DNA
ctaaaaaactcctcaaataccrccaaaataaaaacccaaacaaaaaaaac

SEQ ID NO: 4 - DNA, 50 bp, synthetic construct
  source 1..50: mol_type = other DNA
ttctactccaattaaaacacaaactctcttacaaaatacaccttatctcc

SEQ ID NO: 5 - DNA, 50 bp, synthetic construct
  source 1..50: mol_type = other DNA
tactacccaaaaatccaaaccaaaaaaattctaacaaaaaaaaccctacc

SEQ ID NO: 6 - DNA, 50 bp, synthetic construct
  source 1..50: mol_type = other DNA
aaatatttacaaattaccaaaatatctaaaaaaaaccrcaaactacatcc

SEQ ID NO: 7 - DNA, 50 bp, synthetic construct
  source 1..50: mol_type = other DNA
caaaaacactaaaaaaaatactcaaccctaaaaacaaaacccracccttc

SEQ ID NO: 8 - DNA, 50 bp, synthetic construct
  source 1..50: mol_type = other DNA
aaataacacaaaaacactaaaaaaaatactcaaccctaaaaacaaaaccc

SEQ ID NO: 9 - DNA, 50 bp, synthetic construct
  source 1..50: mol_type = other DNA
rattaaaaatatacataacractatctataacrcaaataaaccrtaaacc

SEQ ID NO: 10 - DNA, 50 bp, synthetic construct
  source 1..50: mol_type = other DNA
acccctaaacaactacaaacctaaaattaataaactcrataactacracc

SEQ ID NO: 11 - DNA, 50 bp, synthetic construct
  source 1..50: mol_type = other DNA
cccaacccctaaacaactacaaacctaaaattaataaactcrataactac

SEQ ID NO: 12 - DNA, 50 bp, synthetic construct
  source 1..50: mol_type = other DNA
atataacaaataaaacacctaataaatctcacrtaaacacrtacatcctc

SEQ ID NO: 13 - DNA, 50 bp, synthetic construct
  source 1..50: mol_type = other DNA
tatataacccrtatctataacrtataaaacrtataacctatatctataac

SEQ ID NO: 14 - DNA, 50 bp, synthetic construct
  source 1..50: mol_type = other DNA
tatataacccrtatctataacatataaaatatataacccrtatctataac

SEQ ID NO: 15 - DNA, 50 bp, synthetic construct
  source 1..50: mol_type = other DNA
aacrtataaaatatataacccrtatctataacatataaaatatataaccc

SEQ ID NO: 16 - DNA, 50 bp, synthetic construct
  source 1..50: mol_type = other DNA
tactttttactctacctcrtatatatctatatctataaaatatataaaac

SEQ ID NO: 17 - DNA, 50 bp, synthetic construct
  source 1..50: mol_type = other DNA
aaatcaccraaaacaactatacccaaatactaaaacaataactacccaac

SEQ ID NO: 18 - DNA, 50 bp, synthetic construct
  source 1..50: mol_type = other DNA
aactctttcctacttaaaaaatataacaaaaaaccttaacctaacccatc

SEQ ID NO: 19 - DNA, 50 bp, synthetic construct
  source 1..50: mol_type = other DNA
caaatccaaaactaccaaaaaaatctctaccttctccaccaaactactcc

SEQ ID NO: 20 - DNA, 50 bp, synthetic construct
  source 1..50: mol_type = other DNA
aaacaaatacatatataaatcrcaaataaatatcccatttccatcraccc

SEQ ID NO: 21 - DNA, 50 bp, synthetic construct
  source 1..50: mol_type = other DNA
aacccaaacaaatacatatataaatcrcaaataaatatcccatttccatc

SEQ ID NO: 22 - DNA, 50 bp, synthetic construct
  source 1..50: mol_type = other DNA
tacrtaaataaataacaaacaaataacccaaacaaatacatatataaatc

SEQ ID NO: 23 - DNA, 50 bp, synthetic construct
  source 1..50: mol_type = other DNA
aaataaataaatacttaaataacaaacaaataaaccaaacaaataaatac

SEQ ID NO: 24 - DNA, 50 bp, synthetic construct
  source 1..50: mol_type = other DNA
cacatccctaccraaaataaaactactaaaaaaatcaacrataccaaacc

SEQ ID NO: 25 - DNA, 50 bp, synthetic construct
  source 1..50: mol_type = other DNA
cacctaaacctaaaacrtaattaaatctaaatacccraaacttacaatcc

SEQ ID NO: 26 - DNA, 50 bp, synthetic construct
  source 1..50: mol_type = other DNA
ctcrcttaatctaacacctaaacctaaaacrtaattaaatctaaataccc

SEQ ID NO: 27 - DNA, 50 bp, synthetic construct
  source 1..50: mol_type = other DNA
raaaaaaaaatcrtaaatatctcrcttaatctaacacctaaacctaaaac

SEQ ID NO: 28 - DNA, 50 bp, synthetic construct
  source 1..50: mol_type = other DNA
rccctaaactcaaatactaaactaaacraaatactcacratcctttcttc

SEQ ID NO: 29 - DNA, 50 bp, synthetic construct
  source 1..50: mol_type = other DNA
tcctttcttcraaaaccaaattacacaatctaattcccctaaaacaaaac

SEQ ID NO: 30 - DNA, 50 bp, synthetic construct
  source 1..50: mol_type = other DNA
caaaaacaaccacaaatcaacaaaataactaaatattaaaaatcaatccc

SEQ ID NO: 31 - DNA, 50 bp, synthetic construct
  source 1..50: mol_type = other DNA
aactactctcraccataaacaacctctacaacctataatttaaaacctcc

SEQ ID NO: 32 - DNA, 50 bp, synthetic construct
  source 1..50: mol_type = other DNA
taccrcctacaaacraaaacatctaactaacctctaacttaatactaaac

SEQ ID NO: 33 - DNA, 50 bp, synthetic construct
  source 1..50: mol_type = other DNA
ctcatctcccacraataatacttccaaaaattctaacraaaatctcaacc

SEQ ID NO: 34 - DNA, 50 bp, synthetic construct
  source 1..50: mol_type = other DNA
crctaaaaaacctactactaccacaactacaaaaaccaaaccaaaaaatc

SEQ ID NO: 35 - DNA, 50 bp, synthetic construct
  source 1..50: mol_type = other DNA
catatccaaacaacttcaaaaaccaaaataaccrtcaaaaaaataaaacc

SEQ ID NO: 36 - DNA, 50 bp, synthetic construct
  source 1..50: mol_type = other DNA
atcaccctaatccctaaaactacctaaatataatcrccatacaaaaaacc

SEQ ID NO: 37 - DNA, 50 bp, synthetic construct
  source 1..50: mol_type = other DNA
rcctcaccttaccttaaaactaaaaaaaatactaaaactaaaatcaacac

SEQ ID NO: 38 - DNA, 50 bp, synthetic construct
  source 1..50: mol_type = other DNA
rtactaattttaactccaacacctcccccaattttaaaacaaaataaaac

SEQ ID NO: 39 - DNA, 50 bp, synthetic construct
  source 1..50: mol_type = other DNA
aaaaacaaacaaccraaaatcctcaaaacctaaacaactaaaaaaaattc

SEQ ID NO: 40 - DNA, 50 bp, synthetic construct
  source 1..50: mol_type = other DNA
atcaaacataacaaaaatttttcaaaaacaaacaaccttccctattctcc

SEQ ID NO: 41 - DNA, 50 bp, synthetic construct
  source 1..50: mol_type = other DNA
aataccaataattctaataaaataatttctactacccccaacactatccc

SEQ ID NO: 42 - DNA, 50 bp, synthetic construct
  source 1..50: mol_type = other DNA
atataaaattttaaattaacaatattttatctctacactttacaaacaac

SEQ ID NO: 43 - DNA, 50 bp, synthetic construct
  source 1..50: mol_type = other DNA
taaatctactaatactaaattctatcaatttttatttaccttaaccaaac

SEQ ID NO: 44 - DNA, 50 bp, synthetic construct
  source 1..50: mol_type = other DNA
cacactataacctctaaaaacccaaacaacaaactaaataaaatctaaac

SEQ ID NO: 45 - DNA, 50 bp, synthetic construct
  source 1..50: mol_type = other DNA
actataacctctaaaaacccaaacaacaaactaaataaaatctaaacrcc

SEQ ID NO: 46 - DNA, 50 bp, synthetic construct
  source 1..50: mol_type = other DNA
aacccaaatcccraacrtaaaaaatactactaaacaaaacaaaataccac

SEQ ID NO: 47 - DNA, 50 bp, synthetic construct
  source 1..50: mol_type = other DNA
ccaatcraaataactctataactcrcaataaaactaacaaccacaaaacc

SEQ ID NO: 48 - DNA, 50 bp, synthetic construct
  source 1..50: mol_type = other DNA
ccccraaatcaaaaaacctaaaacraccaatcraaataactctataactc

SEQ ID NO: 49 - DNA, 50 bp, synthetic construct
  source 1..50: mol_type = other DNA
tctaactaaatcaaaataccccraaatcaaaaaacctaaaacraccaatc

SEQ ID NO: 50 - DNA, 50 bp, synthetic construct
  source 1..50: mol_type = other DNA
cttcraaatctaactaaatcaaaataccccraaatcaaaaaacctaaaac

SEQ ID NO: 51 - DNA, 50 bp, synthetic construct
  source 1..50: mol_type = other DNA
aaacctcctactacctactacttcraaatctaactaaatcaaaatacccc

SEQ ID NO: 52 - DNA, 50 bp, synthetic construct
  source 1..50: mol_type = other DNA
aaaatataaatttaccactttaccraaaacctcctactacctactacttc

SEQ ID NO: 53 - DNA, 50 bp, synthetic construct
  source 1..50: mol_type = other DNA
tcaccctaaattactccaacctttcaaatataacaacctctcactataac

SEQ ID NO: 54 - DNA, 50 bp, synthetic construct
  source 1..50: mol_type = other DNA
tacctaaaactccaaaaatcaactacccaaatcccaaacaaaaccctacc

SEQ ID NO: 55 - DNA, 50 bp, synthetic construct
  source 1..50: mol_type = other DNA
aaaaaaaaatactaaaaactaaccaaacattaaaaacrtacccacaaccc

SEQ ID NO: 56 - DNA, 50 bp, synthetic construct
  source 1..50: mol_type = other DNA
aaatctaaaaaattctctacatcctatataaccatactaactcccaaaac

SEQ ID NO: 57 - DNA, 50 bp, synthetic construct
  source 1..50: mol_type = other DNA
aacctaaaacrtacacaaaaaactctaaaaacacaaaataactctacacc

SEQ ID NO: 58 - DNA, 50 bp, synthetic construct
  source 1..50: mol_type = other DNA
aaaaattaaaaaaccacaaacccccaaaactaaaaaccctaacctaaaac

SEQ ID NO: 59 - DNA, 50 bp, synthetic construct
  source 1..50: mol_type = other DNA
tccaactaaaaccctaacaaatataaccactaataaaaccaaaaataacc

SEQ ID NO: 60 - DNA, 50 bp, synthetic construct
  source 1..50: mol_type = other DNA
aaatcctaacaacacaaaccaacractaactactacttcttaaaactaac

SEQ ID NO: 61 - DNA, 50 bp, synthetic construct
  source 1..50: mol_type = other DNA
caaaaaacaacaattaatcrctaatctatactaccaaaaccccraaccac

SEQ ID NO: 62 - DNA, 50 bp, synthetic construct
  source 1..50: mol_type = other DNA
ccrctcaaacatcaactaattaaatacaaaatctcaacacaaattcaaac

SEQ ID NO: 63 - DNA, 50 bp, synthetic construct
  source 1..50: mol_type = other DNA
ccaaaaatcttaaccaaaccaacacraatctaaccctaaaatcctttccc

SEQ ID NO: 64 - DNA, 50 bp, synthetic construct
  source 1..50: mol_type = other DNA
aacaacccraaacaacaaaataattccaaaaatcttaaccaaaccaacac

SEQ ID NO: 65 - DNA, 50 bp, synthetic construct
  source 1..50: mol_type = other DNA
aaatccccatctaatttttaaacttatcccaaatatacttctaaaactcc

SEQ ID NO: 66 - DNA, 50 bp, synthetic construct
  source 1..50: mol_type = other DNA
aacaacaaaaccrtacactaacataaataaaacaaaaaaccaaccccaac

SEQ ID NO: 67 - DNA, 50 bp, synthetic construct
  source 1..50: mol_type = other DNA
rcatctactaatacctctaaacaaactctattaataaaacttaaaactac

SEQ ID NO: 68 - DNA, 50 bp, synthetic construct
  source 1..50: mol_type = other DNA
ataataaactaaacaactctaactaactcactttttatctctcaactatc

SEQ ID NO: 69 - DNA, 50 bp, synthetic construct
  source 1..50: mol_type = other DNA
aactaaacaactctaactaactcactttttatctctcaactatcraaaac

SEQ ID NO: 70 - DNA, 50 bp, synthetic construct
  source 1..50: mol_type = other DNA
actcactttttatctctcaactatcraaaacrataaaacacattaataac

SEQ ID NO: 71 - DNA, 50 bp, synthetic construct
  source 1..50: mol_type = other DNA
ctttttatctctcaactatcraaaacrataaaacacattaataacrtccc

SEQ ID NO: 72 - DNA, 50 bp, synthetic construct
  source 1..50: mol_type = other DNA
crtcaaaacrccrtaactaaaaacaaacataaacrtattacaatacttcc

SEQ ID NO: 73 - DNA, 50 bp, synthetic construct
  source 1..50: mol_type = other DNA
caaataaacacaaaccattaacacatactaaaacraaaacattacaacac

SEQ ID NO: 74 - DNA, 50 bp, synthetic construct
  source 1..50: mol_type = other DNA
tcccctaaatacacctcccttttaatctaaataaccctcaaacctttaac

SEQ ID NO: 75 - DNA, 50 bp, synthetic construct
  source 1..50: mol_type = other DNA
taaattcaacaccttctacrttccaaactcctaaccatttaaactacatc

SEQ ID NO: 76 - DNA, 50 bp, synthetic construct
  source 1..50: mol_type = other DNA
acaaaaattaaaaaccactatattctttcaataaattcaacaccttctac

SEQ ID NO: 77 - DNA, 50 bp, synthetic construct
  source 1..50: mol_type = other DNA
atactaaattcattaaaaaaatacaataattctcaactcttatttaaacc

SEQ ID NO: 78 - DNA, 50 bp, synthetic construct
  source 1..50: mol_type = other DNA
ccraaattctttctatttatttatatattaaaacacaatatcrccctatc

SEQ ID NO: 79 - DNA, 50 bp, synthetic construct
  source 1..50: mol_type = other DNA
aaattctttctatttatttatatattaaaacacaatatcrccctatcrcc

SEQ ID NO: 80 - DNA, 50 bp, synthetic construct
  source 1..50: mol_type = other DNA
cactcaccatattattcaaactaatcttaaattctaacctcaaataattc

SEQ ID NO: 81 - DNA, 50 bp, synthetic construct
  source 1..50: mol_type = other DNA
tattattcaaactaatcttaaattctaacctcaaataattcrcccacctc

SEQ ID NO: 82 - DNA, 50 bp, synthetic construct
  source 1..50: mol_type = other DNA
cctaacctaataattaaaattaccraaaaaaaccataaacaacractcac

SEQ ID NO: 83 - DNA, 50 bp, synthetic construct
  source 1..50: mol_type = other DNA
ttcccatcctaacctaataattaaaattaccraaaaaaaccataaacaac

SEQ ID NO: 84 - DNA, 50 bp, synthetic construct
  source 1..50: mol_type = other DNA
cctaaaatccaacccttaattcccatcctaacctaataattaaaattacc

SEQ ID NO: 85 - DNA, 50 bp, synthetic construct
  source 1..50: mol_type = other DNA
ttaaccatcaaattaaaataaaaatcaaaaactaaacttcaaaacacctc

SEQ ID NO: 86 - DNA, 50 bp, synthetic construct
  source 1..50: mol_type = other DNA
ttaaaaacaacatcccattctcrattctaaaacccaaaaactaccaaaac

SEQ ID NO: 87 - DNA, 50 bp, synthetic construct
  source 1..50: mol_type = other DNA
cacacraccaaaaatataacacaataacaacrattcataactacaaaccc

SEQ ID NO: 88 - DNA, 50 bp, synthetic construct
  source 1..50: mol_type = other DNA
caaaaatataacacaataacaacrattcataactacaaacccrtattcac

SEQ ID NO: 89 - DNA, 50 bp, synthetic construct
  source 1..50: mol_type = other DNA
ctctcaatcacaaccaacaattaactttattactttaacctcatatttcc

SEQ ID NO: 90 - DNA, 50 bp, synthetic construct
  source 1..50: mol_type = other DNA
tattatttctcacrtatactccctataatataccttatatctaaacctcc

SEQ ID NO: 91 - DNA, 50 bp, synthetic construct
  source 1..50: mol_type = other DNA
ctaaaaaaataacraaaacccaaacacaaaacataccacaaaaaacacac

SEQ ID NO: 92 - DNA, 50 bp, synthetic construct
  source 1..50: mol_type = other DNA
ctaaaataacttccttaccaattcaaacaacatacaataaaatatattcc

SEQ ID NO: 93 - DNA, 50 bp, synthetic construct
  source 1..50: mol_type = other DNA
ttcaaacaacatacaataaaatatattccrtcaaaacacaaacaaaaacc

SEQ ID NO: 94 - DNA, 50 bp, synthetic construct
  source 1..50: mol_type = other DNA
caacatacaataaaatatattccrtcaaaacacaaacaaaaaccraacrc

SEQ ID NO: 95 - DNA, 50 bp, synthetic construct
  source 1..50: mol_type = other DNA
actatctcctttaactactataatcacrctaatcctaaacttctttatac

SEQ ID NO: 96 - DNA, 50 bp, synthetic construct
  source 1..50: mol_type = other DNA
ttcttattaatattaaaaaacaaactatctcctttaactactataatcac

SEQ ID NO: 97 - DNA, 50 bp, synthetic construct
  source 1..50: mol_type = other DNA
cctatttaaaaacaaaatacaatttatttttcccccaacaaaaaattcac

SEQ ID NO: 98 - DNA, 50 bp, synthetic construct
  source 1..50: mol_type = other DNA
aaaaaactatttaacaacaaaaacaatatttctcccaaactaatacaacc

SEQ ID NO: 99 - DNA, 50 bp, synthetic construct
  source 1..50: mol_type = other DNA
aaaacaatatttctcccaaactaatacaaccracaaaacaaccaacttac

SEQ ID NO: 100 - DNA, 50 bp, synthetic construct
  source 1..50: mol_type = other DNA
attaatatcaaaaatattttccaaactatccttacttttatataaaaaac

SEQ ID NO: 101 - DNA, 50 bp, synthetic construct
  source 1..50: mol_type = other DNA
acataaaaacaaaaacaacttaaaaaacactcctaacaccaacaaacttc

SEQ ID NO: 102 - DNA, 50 bp, synthetic construct
  source 1..50: mol_type = other DNA
caacttaaaaaacactcctaacaccaacaaacttcrcctaaaaaaccaac

SEQ ID NO: 103 - DNA, 50 bp, synthetic construct
  source 1..50: mol_type = other DNA
crataacactataaactaaatacttaacrccctaaaaaaaacacratacc

SEQ ID NO: 104 - DNA, 50 bp, synthetic construct
  source 1..50: mol_type = other DNA
actaactaaaccctaaaccaaaaaactaaaaaactttataccaatttccc

SEQ ID NO: 105 - DNA, 50 bp, synthetic construct
  source 1..50: mol_type = other DNA
aaaacaactacctaactttcctaaaataaaaatccaacaacaaaaaatac

SEQ ID NO: 106 - DNA, 50 bp, synthetic construct
  source 1..50: mol_type = other DNA
taaaaactcrctaataataacaaaacctatataacraatactataacaac

SEQ ID NO: 107 - DNA, 50 bp, synthetic construct
  source 1..50: mol_type = other DNA
tcttaaacrtaacctccttaccatataaataaatttaattttaaaaactc

SEQ ID NO: 108 - DNA, 50 bp, synthetic construct
  source 1..50: mol_type = other DNA
ccaccaacraatttctaaaaccaaattcatttacataacaaaaaaaccac

SEQ ID NO: 109 - DNA, 50 bp, synthetic construct
  source 1..50: mol_type = other DNA
taccttttaaattccaaatttacctcracrtcaaataaaacrtaactaac

SEQ ID NO: 110 - DNA, 50 bp, synthetic construct
  source 1..50: mol_type = other DNA
aaaaatacttaccttttaaattccaaatttacctcracrtcaaataaaac

SEQ ID NO: 111 - DNA, 50 bp, synthetic construct
  source 1..50: mol_type = other DNA
atcacaaaatcaaaaaattaaaaccatcctaactaacacrataaaacccc

SEQ ID NO: 112 - DNA, 50 bp, synthetic construct
  source 1..50: mol_type = other DNA
tcaccatattaaccaaaataatcttaatctcctaaccttataatccaccc

SEQ ID NO: 113 - DNA, 50 bp, synthetic construct
  source 1..50: mol_type = other DNA
cttcttactaaacttaaaaaaaacacctctactctccaaatacatacctc

SEQ ID NO: 114 - DNA, 50 bp, synthetic construct
  source 1..50: mol_type = other DNA
actaataaacctcacaacctcacaccatcataaaaacactcataataccc

SEQ ID NO: 115 - DNA, 50 bp, synthetic construct
  source 1..50: mol_type = other DNA
aacatcccaatcaccaactaccctattataactcctaaaacaaaatttac

SEQ ID NO: 116 - DNA, 50 bp, synthetic construct
  source 1..50: mol_type = other DNA
aacctcctaaaatattaaaattataacccaccatacccaaccaaaaatac

SEQ ID NO: 117 - DNA, 50 bp, synthetic construct
  source 1..50: mol_type = other DNA
aacactttaaaaaatcaaatcraaaaaactacttaaatccaacaatttac

SEQ ID NO: 118 - DNA, 50 bp, synthetic construct
  source 1..50: mol_type = other DNA
acaaaaattacatcattacactacaacctaaacrataaaaataaaactcc

SEQ ID NO: 119 - DNA, 50 bp, synthetic construct
  source 1..50: mol_type = other DNA
tacaaaaactaaccaaacrtaataacatacrcctataattccaactactc

SEQ ID NO: 120 - DNA, 50 bp, synthetic construct
  source 1..50: mol_type = other DNA
acttatataaaaaaataaacacacaataaatacracttccaaatacrtcc

SEQ ID NO: 121 - DNA, 50 bp, synthetic construct
  source 1..50: mol_type = other DNA
ctatttctactacaacctaattcattataaaaaaatatcatacaaaaccc

SEQ ID NO: 122 - DNA, 50 bp, synthetic construct
  source 1..50: mol_type = other DNA
aacctaattcattataaaaaaatatcatacaaaacccraaatctaactcc

SEQ ID NO: 123 - DNA, 50 bp, synthetic construct
  source 1..50: mol_type = other DNA
atcattacaactaacraaacaaaaaaacacatctatatacatacccacac

SEQ ID NO: 124 - DNA, 50 bp, synthetic construct
  source 1..50: mol_type = other DNA
acatctatatacatacccacacrcatatatatacacacaatttcataaac

SEQ ID NO: 125 - DNA, 50 bp, synthetic construct
  source 1..50: mol_type = other DNA
ttccraacaaattaaaccctataatattaacctaacatcaaaataaacac

SEQ ID NO: 126 - DNA, 50 bp, synthetic construct
  source 1..50: mol_type = other DNA
ccacrtatttactctaataccaaaccaacactacaaaactcaacctattc

SEQ ID NO: 127 - DNA, 50 bp, synthetic construct
  source 1..50: mol_type = other DNA
cttactcaactatactaaacaaacaaacrcccctataaaaacraaacctc

SEQ ID NO: 128 - DNA, 50 bp, synthetic construct
  source 1..50: mol_type = other DNA
attcactccttactcaactatactaaacaaacaaacrcccctataaaaac

SEQ ID NO: 129 - DNA, 50 bp, synthetic construct
  source 1..50: mol_type = other DNA
aaatttcactaaaaattcactccttactcaactatactaaacaaacaaac

SEQ ID NO: 130 - DNA, 50 bp, synthetic construct
  source 1..50: mol_type = other DNA
tactcaaattataaatatatatacacatacacacrtacctatctatacac

SEQ ID NO: 131 - DNA, 50 bp, synthetic construct
  source 1..50: mol_type = other DNA
tacrcacatacatatatactcaaattataaatatatatacacatacacac

SEQ ID NO: 132 - DNA, 50 bp, synthetic construct
  source 1..50: mol_type = other DNA
acccaacttaaatatacatacacatatacatatcaccaactcccatatac

SEQ ID NO: 133 - DNA, 50 bp, synthetic construct
  source 1..50: mol_type = other DNA
atataaacaaacacraactaaatatacatacatatacatacacacccaac

SEQ ID NO: 134 - DNA, 50 bp, synthetic construct
  source 1..50: mol_type = other DNA
catcrtatttaacaatatactaatcatcacaaccattaccaaattcraac

SEQ ID NO: 135 - DNA, 50 bp, synthetic construct
  source 1..50: mol_type = other DNA
taactaaacaataaatatacaactcacrtcaaaaaattaatatttctaac

SEQ ID NO: 136 - DNA, 50 bp, synthetic construct
  source 1..50: mol_type = other DNA
atacaaaaaccrcrtaaaacctcccaaaataacaaattaacaacctacac

SEQ ID NO: 137 - DNA, 50 bp, synthetic construct
  source 1..50: mol_type = other DNA
rcaaacccacaaacattacccaaataaaaaaacacaaacctcatactccc

SEQ ID NO: 138 - DNA, 50 bp, synthetic construct
  source 1..50: mol_type = other DNA
acaaacattacccaaataaaaaaacacaaacctcatactcccraaaaaac

SEQ ID NO: 139 - DNA, 50 bp, synthetic construct
  source 1..50: mol_type = other DNA
craaaaaacracctaccccaaatcaaaaaaattaaatccaactaaaccac

SEQ ID NO: 140 - DNA, 50 bp, synthetic construct
  source 1..50: mol_type = other DNA
tacctcaaacccaaatctttcttaaaattaaaataaaaataactatcctc

SEQ ID NO: 141 - DNA, 50 bp, synthetic construct
  source 1..50: mol_type = other DNA
aataatactaatctttaccaatactctacacacctataaaaaaacctctc

SEQ ID NO: 142 - DNA, 50 bp, synthetic construct
  source 1..50: mol_type = other DNA
taaacttaaaactttaaaaaactctaaccacctactaaactaaaccaacc

SEQ ID NO: 143 - DNA, 50 bp, synthetic construct
  source 1..50: mol_type = other DNA
tactaactcttcaaaaatcaacaaatccaacctaaaccaacaaaaaaacc

SEQ ID NO: 144 - DNA, 50 bp, synthetic construct
  source 1..50: mol_type = other DNA
tctacccaataaactcaatactcccaaatataaaatataaaatccctaac

SEQ ID NO: 145 - DNA, 50 bp, synthetic construct
  source 1..50: mol_type = other DNA
aaaatataaaatccctaacraaaacaaaattccaattcccaaaactccrc

SEQ ID NO: 146 - DNA, 50 bp, synthetic construct
  source 1..50: mol_type = other DNA
cacctacctaaactacacttaaaacaacactcraaacccactaaatactc

SEQ ID NO: 147 - DNA, 50 bp, synthetic construct
  source 1..50: mol_type = other DNA
tacctaaaaaataacaccctaaactactaaaatctacattccaaaaaaac

SEQ ID NO: 148 - DNA, 50 bp, synthetic construct
  source 1..50: mol_type = other DNA
aacctccttaaaccrctccttccctaataatcacaaactctaaaaaaatc

SEQ ID NO: 149 - DNA, 50 bp, synthetic construct
  source 1..50: mol_type = other DNA
ttccctaataatcacaaactctaaaaaaatcrcattccacctactccacc

SEQ ID NO: 150 - DNA, 50 bp, synthetic construct
  source 1..50: mol_type = other DNA
aaaaaaaaacaccaaaccttaaaaaaataaacccaaaacaaaactaaacc

SEQ ID NO: 151 - DNA, 50 bp, synthetic construct
  source 1..50: mol_type = other DNA
aatatacacatataaacaaacatacatacacaaaaaaacaaacaatactc

SEQ ID NO: 152 - DNA, 50 bp, synthetic construct
  source 1..50: mol_type = other DNA
acrcaataatacacaaactaaaaaaaacccaaacctaaataaatctttcc

SEQ ID NO: 153 - DNA, 50 bp, synthetic construct
  source 1..50: mol_type = other DNA
catctaactacttcctcaaacctcactattctctatccaactcaacacac

SEQ ID NO: 154 - DNA, 50 bp, synthetic construct
  source 1..50: mol_type = other DNA
aaccattttcaaaaacrttcccaaaaacraaaatacraaatcaattcctc

SEQ ID NO: 155 - DNA, 50 bp, synthetic construct
  source 1..50: mol_type = other DNA
aaaaaaacccctctaccrtctaaaactatacaaacaataaacaaactacc

SEQ ID NO: 156 - DNA, 50 bp, synthetic construct
  source 1..50: mol_type = other DNA
ttaacttctttaccttcttttaacataactaatcataaaacttcacaccc

SEQ ID NO: 157 - DNA, 50 bp, synthetic construct
  source 1..50: mol_type = other DNA
cccacctaaactaaaaaactacataacaaataaccattatcaccaatatc

SEQ ID NO: 158 - DNA, 50 bp, synthetic construct
  source 1..50: mol_type = other DNA
cttatattataacttatacccatatataacaattcccaaattcttatccc

SEQ ID NO: 159 - DNA, 50 bp, synthetic construct
  source 1..50: mol_type = other DNA
aaaactattccrtctctcaataaaattcttctctacccttctcacacttc

SEQ ID NO: 160 - DNA, 50 bp, synthetic construct
  source 1..50: mol_type = other DNA
taattcccracctaaaatcaaataatttctctcctaatataactaaatcc

SEQ ID NO: 161 - DNA, 50 bp, synthetic construct
  source 1..50: mol_type = other DNA
cctcatctctaacccaattttttcacaaaatcaaccacraccaaaaatcc

SEQ ID NO: 162 - DNA, 50 bp, synthetic construct
  source 1..50: mol_type = other DNA
ctaaactcccrcaaaacacaatataacctcttctaccaactataaacrac

SEQ ID NO: 163 - DNA, 50 bp, synthetic construct
  source 1..50: mol_type = other DNA
atataacctcttctaccaactataaacracrctaaacaaaacaaaaactc

SEQ ID NO: 164 - DNA, 50 bp, synthetic construct
  source 1..50: mol_type = other DNA
aaccataatcccraaacccaaaaaaaacractaaataaaatctcctaaac

SEQ ID NO: 165 - DNA, 50 bp, synthetic construct
  source 1..50: mol_type = other DNA
acraccraactaaacraaataaaatctcaaaactcccaaaaaaactaaac

SEQ ID NO: 166 - DNA, 50 bp, synthetic construct
  source 1..50: mol_type = other DNA
tactaaacaataactcataaattaaaaaaccccctcaaataaaaaactac

SEQ ID NO: 167 - DNA, 50 bp, synthetic construct
  source 1..50: mol_type = other DNA
aacaccattattcaaaaatcaactactaatttctacctacatataattac

SEQ ID NO: 168 - DNA, 50 bp, synthetic construct
  source 1..50: mol_type = other DNA
tttatctactcattatatattttacaaacatttttctccttttataaatc

SEQ ID NO: 169 - DNA, 50 bp, synthetic construct
  source 1..50: mol_type = other DNA
tttctctataaatttacaacactcatctatcacctattaaattttaaatc

SEQ ID NO: 170 - DNA, 50 bp, synthetic construct
  source 1..50: mol_type = other DNA
ctctataaatttacaacactcatctatcacctattaaattttaaatcrac

SEQ ID NO: 171 - DNA, 50 bp, synthetic construct
  source 1..50: mol_type = other DNA
caaacacacacaaacacactcacactcrtctacaacttaaaaactaaacc

SEQ ID NO: 172 - DNA, 50 bp, synthetic construct
  source 1..50: mol_type = other DNA
ctacaacttaaaaactaaaccractataccctaaaaacccaaattccctc

SEQ ID NO: 173 - DNA, 50 bp, synthetic construct
  source 1..50: mol_type = other DNA
aaaaaaactattcrttaactaaaacaataaatacaaactaaaaccatccc

SEQ ID NO: 174 - DNA, 50 bp, synthetic construct
  source 1..50: mol_type = other DNA
ctattcrttaactaaaacaataaatacaaactaaaaccatcccraacatc

SEQ ID NO: 175 - DNA, 50 bp, synthetic construct
  source 1..50: mol_type = other DNA
ccctatatataccrcccraaaaaaactatactataaaataatcaaaaaac

SEQ ID NO: 176 - DNA, 50 bp, synthetic construct
  source 1..50: mol_type = other DNA
aaaaacaataactcctaccccaaaatctaaaaaatactaaaataaacaac

SEQ ID NO: 177 - DNA, 50 bp, synthetic construct
  source 1..50: mol_type = other DNA
aataactcctaccccaaaatctaaaaaatactaaaataaacaacratacc

SEQ ID NO: 178 - DNA, 50 bp, synthetic construct
  source 1..50: mol_type = other DNA
taaaaaatactaaaataaacaacrataccrtaaaacccccaaaaatctcc

SEQ ID NO: 179 - DNA, 50 bp, synthetic construct
  source 1..50: mol_type = other DNA
aaacccccaaaaatctccrttcccactacaaatatattaaattatttccc

SEQ ID NO: 180 - DNA, 50 bp, synthetic construct
  source 1..50: mol_type = other DNA
caaaaatctccrttcccactacaaatatattaaattatttcccractctc

SEQ ID NO: 181 - DNA, 50 bp, synthetic construct
  source 1..50: mol_type = other DNA
tcccactacaaatatattaaattatttcccractctcraaacaaaactac

SEQ ID NO: 182 - DNA, 50 bp, synthetic construct
  source 1..50: mol_type = other DNA
cactacaaatatattaaattatttcccractctcraaacaaaactacrtc

SEQ ID NO: 183 - DNA, 50 bp, synthetic construct
  source 1..50: mol_type = other DNA
rtatcrtatatcrcattccaaatataaatcaccaatcaccctttcaaaac

SEQ ID NO: 184 - DNA, 50 bp, synthetic construct
  source 1..50: mol_type = other DNA
aaaccacccataactttcatcacataaacaaattaataaatataaaatcc

SEQ ID NO: 185 - DNA, 50 bp, synthetic construct
  source 1..50: mol_type = other DNA
aataaaccraatataacaaaaaaatcactaaaaaaaacttcctcaaaaac

SEQ ID NO: 186 - DNA, 50 bp, synthetic construct
  source 1..50: mol_type = other DNA
attctcctaccacattcracccatttccttctaaacaaatacaaaaacac

SEQ ID NO: 187 - DNA, 50 bp, synthetic construct
  source 1..50: mol_type = other DNA
tctaaacaaatacaaaaacacractttacctattcacttccttatctccc

SEQ ID NO: 188 - DNA, 50 bp, synthetic construct
  source 1..50: mol_type = other DNA
aataacaacaaaataacatcctaaccccrtaacaacacctaacaaacctc

SEQ ID NO: 189 - DNA, 50 bp, synthetic construct
  source 1..50: mol_type = other DNA
acaacctaaaactcraaacaaaaataacaacaaaataacatcctaacccc

SEQ ID NO: 190 - DNA, 50 bp, synthetic construct
  source 1..50: mol_type = other DNA
actaacaaaactaaaaccataacrtcacccaacaaaaaactaaatacccc

SEQ ID NO: 191 - DNA, 50 bp, synthetic construct
  source 1..50: mol_type = other DNA
tacaacccactaaccactccaaacccaactaacaaaactaaaaccataac

SEQ ID NO: 192 - DNA, 50 bp, synthetic construct
  source 1..50: mol_type = other DNA
tctaccaactaaacttaaaataaccaataaactacaaacatcaactaacc

SEQ ID NO: 193 - DNA, 50 bp, synthetic construct
  source 1..50: mol_type = other DNA
accaactaaacttaaaataaccaataaactacaaacatcaactaaccrac

SEQ ID NO: 194 - DNA, 50 bp, synthetic construct
  source 1..50: mol_type = other DNA
aaaatttaatccaaaacctataaaatcaccttttataaaatctaccatac

SEQ ID NO: 195 - DNA, 50 bp, synthetic construct
  source 1..50: mol_type = other DNA
ctttaaaccaaatcccaaatttacttccaaaaacctctattaataaaacc

SEQ ID NO: 196 - DNA, 50 bp, synthetic construct
  source 1..50: mol_type = other DNA
atttacttccaaaaacctctattaataaaaccraactcctctctaaaatc

SEQ ID NO: 197 - DNA, 50 bp, synthetic construct
  source 1..50: mol_type = other DNA
aattaaaaccaaaaccaactttcratttaacrataaaattataaactctc

SEQ ID NO: 198 - DNA, 50 bp, synthetic construct
  source 1..50: mol_type = other DNA
ctctaaaatcratcaaacctccatacacctcraaaatttacaactctatc

SEQ ID NO: 199 - DNA, 50 bp, synthetic construct
  source 1..50: mol_type = other DNA
cccccacaatatataatttacccttaaaattaaaaccaaaaccaactttc

SEQ ID NO: 200 - DNA, 50 bp, synthetic construct
  source 1..50: mol_type = other DNA
aaccttaattttaattccaaaaacaaaccacatactataaaaaaaatccc

SEQ ID NO: 201 - DNA, 50 bp, synthetic construct
  source 1..50: mol_type = other DNA
ttttaattccaaaaacaaaccacatactataaaaaaaatcccraaaatac

SEQ ID NO: 202 - DNA, 50 bp, synthetic construct
  source 1..50: mol_type = other DNA
acctaaataaatccaaaaacccctaaaaaataaactttctaaaactctcc

SEQ ID NO: 203 - DNA, 50 bp, synthetic construct
  source 1..50: mol_type = other DNA
acacaaaacactaatacaatatccaaaacccactaaaaaacccaaaaaac

SEQ ID NO: 204 - DNA, 50 bp, synthetic construct
  source 1..50: mol_type = other DNA
ataaatcctaaacactatatcaatactctatactaaactcctctctcccc

SEQ ID NO: 205 - DNA, 50 bp, synthetic construct
  source 1..50: mol_type = other DNA
aaacactcttccaactaccrtaaacaaaaataaccrctaaaaaacaaaac

SEQ ID NO: 206 - DNA, 50 bp, synthetic construct
  source 1..50: mol_type = other DNA
aaacrtaaccacaaaaacctaaactaaataactaacctaacctaaaaacc

SEQ ID NO: 207 - DNA, 50 bp, synthetic construct
  source 1..50: mol_type = other DNA
tacaacaaattcctacraaatacraaaatctaaaaacccttcccataaac

SEQ ID NO: 208 - DNA, 50 bp, synthetic construct
  source 1..50: mol_type = other DNA
aaaaacaaaccaaacrctaaaaaacaaaccaaaaacaccacctactaacc

SEQ ID NO: 209 - DNA, 50 bp, synthetic construct
  source 1..50: mol_type = other DNA
actatatcaaatcaaacatttccaaatataaccaacttacrcraaaatac

SEQ ID NO: 210 - DNA, 50 bp, synthetic construct
  source 1..50: mol_type = other DNA
aaaacracactatatcaaatcaaacatttccaaatataaccaacttacrc

SEQ ID NO: 211 - DNA, 50 bp, synthetic construct
  source 1..50: mol_type = other DNA
ataaaacracactatatcaaatcaaacatttccaaatataaccaacttac

SEQ ID NO: 212 - DNA, 50 bp, synthetic construct
  source 1..50: mol_type = other DNA
aataaaacccaaatcrcatttctcactcrataaattaaaaaaccrcttac

SEQ ID NO: 213 - DNA, 50 bp, synthetic construct
  source 1..50: mol_type = other DNA
atcracaataaaacccaaatcrcatttctcactcrataaattaaaaaacc

SEQ ID NO: 214 - DNA, 50 bp, synthetic construct
  source 1..50: mol_type = other DNA
attttttatttaaaaaatcracaataaaacccaaatcrcatttctcactc

SEQ ID NO: 215 - DNA, 50 bp, synthetic construct
  source 1..50: mol_type = other DNA
aacrattttttaacccaccraataaaaaatacratctaaattttactacc

SEQ ID NO: 216 - DNA, 50 bp, synthetic construct
  source 1..50: mol_type = other DNA
racataaaaaaaaaccraatatatactaaaaaaaccattccaaaatcccc

SEQ ID NO: 217 - DNA, 50 bp, synthetic construct
  source 1..50: mol_type = other DNA
ractctccttccccttaactaccaacatacataaacaaccaaacaaaacc

SEQ ID NO: 218 - DNA, 50 bp, synthetic construct
  source 1..50: mol_type = other DNA
ataaaccttaaaaatactatcraaaaatacctaacaaaaacraaaactac

SEQ ID NO: 219 - DNA, 50 bp, synthetic construct
  source 1..50: mol_type = other DNA
aaaaccraaacaaaaccaaaacaaaaaatttctctaataaattaaacaac

SEQ ID NO: 220 - DNA, 50 bp, synthetic construct
  source 1..50: mol_type = other DNA
aaacccaatttccaaataaaattacactctaaaattctaaataaacatac

SEQ ID NO: 221 - DNA, 50 bp, synthetic construct
  source 1..50: mol_type = other DNA
aaaaatcaacctaaatcacctaaattacaccacctacratcaaaaaaccc

SEQ ID NO: 222 - DNA, 50 bp, synthetic construct
  source 1..50: mol_type = other DNA
ataaaacacctaaacctaaacctaaacctaacctaacraatcccttaacc

SEQ ID NO: 223 - DNA, 50 bp, synthetic construct
  source 1..50: mol_type = other DNA
aaaatctttaaaaccrtatcttaactataacctaaaactccccccaactc

SEQ ID NO: 224 - DNA, 50 bp, synthetic construct
  source 1..50: mol_type = other DNA
tcraattcctcattttaacaaacaaatacctttcaccttatattaacaac

SEQ ID NO: 225 - DNA, 50 bp, synthetic construct
  source 1..50: mol_type = other DNA
acctaacaccaaacactaaaaatcaaaacacctattcacaccrctataac

SEQ ID NO: 226 - DNA, 50 bp, synthetic construct
  source 1..50: mol_type = other DNA
caacratataaacaaataccctaactttcaatacctaataccaaaccccc

SEQ ID NO: 227 - DNA, 50 bp, synthetic construct
  source 1..50: mol_type = other DNA
crccctctaactaaaaatatcaaaaaaaaactccractacaaaaacaacc

SEQ ID NO: 228 - DNA, 50 bp, synthetic construct
  source 1..50: mol_type = other DNA
actacaaaaacaaccrttataataaacrcctctctatacactaaaataac

SEQ ID NO: 229 - DNA, 50 bp, synthetic construct
  source 1..50: mol_type = other DNA
caactactactcacaaaacctaatatcctacrctaaataaccrataatac

SEQ ID NO: 230 - DNA, 50 bp, synthetic construct
  source 1..50: mol_type = other DNA
raccacaacaactactactcacaaaacctaatatcctacrctaaataacc

SEQ ID NO: 231 - DNA, 50 bp, synthetic construct
  source 1..50: mol_type = other DNA
aacaccaaaccctataaacaacaactactataaccrtaaattaaacatac

SEQ ID NO: 232 - DNA, 50 bp, synthetic construct
  source 1..50: mol_type = other DNA
cctataaacaacaactactataaccrtaaattaaacatacrtctataatc

SEQ ID NO: 233 - DNA, 50 bp, synthetic construct
  source 1..50: mol_type = other DNA
actataaccrtaaattaaacatacrtctataatcrataacttcataaaac

SEQ ID NO: 234 - DNA, 50 bp, synthetic construct
  source 1..50: mol_type = other DNA
aaacrccttctaataaaaataacacacaacacaaaaaaacraccctaaac

SEQ ID NO: 235 - DNA, 50 bp, synthetic construct
  source 1..50: mol_type = other DNA
aaaaatttactctatccctcattccacaataacaaacatttctcraaaac

SEQ ID NO: 236 - DNA, 50 bp, synthetic construct
  source 1..50: mol_type = other DNA
ataatattaaacataaacccttaattaaaataaaatctaccaaatttttc

SEQ ID NO: 237 - DNA, 50 bp, synthetic construct
  source 1..50: mol_type = other DNA
ttttccatttataattaataaatatctaaaacaaaatactttaaaactac

SEQ ID NO: 238 - DNA, 50 bp, synthetic construct
  source 1..50: mol_type = other DNA
aaaaaaattactctcccctttcrtcaacttttcrctaactttcacttttc

SEQ ID NO: 239 - DNA, 50 bp, synthetic construct
  source 1..50: mol_type = other DNA
taactctcaatcctaatcaaatcatattccraacttttaaaataataaac

SEQ ID NO: 240 - DNA, 50 bp, synthetic construct
  source 1..50: mol_type = other DNA
cctaatcaaatcatattccraacttttaaaataataaacrctaaaacacc

SEQ ID NO: 241 - DNA, 50 bp, synthetic construct
  source 1..50: mol_type = other DNA
aataaaaacttttacccraactaaaaactataatcrtaaaatttatcccc

SEQ ID NO: 242 - DNA, 50 bp, synthetic construct
  source 1..50: mol_type = other DNA
tctctccaatctaaaatccctaaaaaaaactccaaaacccctaaaaaatc

SEQ ID NO: 243 - DNA, 50 bp, synthetic construct
  source 1..50: mol_type = other DNA
caaaaactctaaaatcttccttaaaaaccccaaattaaaaaaaaactacc

SEQ ID NO: 244 - DNA, 50 bp, synthetic construct
  source 1..50: mol_type = other DNA
taccctattatctacrtaattaataatatcrctatacacaaatttacacc

SEQ ID NO: 245 - DNA, 50 bp, synthetic construct
  source 1..50: mol_type = other DNA
acaaaataaaacraatttttcctaaaaactataaacaatcrcttaacccc

SEQ ID NO: 246 - DNA, 50 bp, synthetic construct
  source 1..50: mol_type = other DNA
aaaaataatatttcctactaattaaaaacaaacctatacattaaaccccc

SEQ ID NO: 247 - DNA, 50 bp, synthetic construct
  source 1..50: mol_type = other DNA
aaaacataacttttttctatttaaattctacttcccaaaacccctaaccc

SEQ ID NO: 248 - DNA, 50 bp, synthetic construct
  source 1..50: mol_type = other DNA
ccccaaatatttctaaaaattccrctaaaacccraaataaaacaacrtcc

SEQ ID NO: 249 - DNA, 50 bp, synthetic construct
  source 1..50: mol_type = other DNA
aaaaccccaaatatttctaaaaattccrctaaaacccraaataaaacaac

SEQ ID NO: 250 - DNA, 50 bp, synthetic construct
  source 1..50: mol_type = other DNA
acaaataaaaattaaaaccccaaatatttctaaaaattccrctaaaaccc

SEQ ID NO: 251 - DNA, 50 bp, synthetic construct
  source 1..50: mol_type = other DNA
tacccraaaaacaaataaaaattaaaaccccaaatatttctaaaaattcc

SEQ ID NO: 252 - DNA, 50 bp, synthetic construct
  source 1..50: mol_type = other DNA
tcccaaaaacacctaaaattctaattcctacttatccttcraacaaaaac

SEQ ID NO: 253 - DNA, 50 bp, synthetic construct
  source 1..50: mol_type = other DNA
aaacacctaaaattctaattcctacttatccttcraacaaaaacrcccac

SEQ ID NO: 254 - DNA, 50 bp, synthetic construct
  source 1..50: mol_type = other DNA
ttaaaactaataactacacraaactcrcaaacaaaatcraattaaaaacc

SEQ ID NO: 255 - DNA, 50 bp, synthetic construct
  source 1..50: mol_type = other DNA
ataattaacataacatcttattatttaaaactaataactacacraaactc

SEQ ID NO: 256 - DNA, 50 bp, synthetic construct
  source 1..50: mol_type = other DNA
taaatatcaacttaaaaccccccaaccctttacaaaactataaaaatccc

SEQ ID NO: 257 - DNA, 50 bp, synthetic construct
  source 1..50: mol_type = other DNA
aaccccccaaccctttacaaaactataaaaatcccratacctaaaaaaac

SEQ ID NO: 258 - DNA, 50 bp, synthetic construct
  source 1..50: mol_type = other DNA
acaaaactataaaaatcccratacctaaaaaaacrtacracaaaatctac

SEQ ID NO: 259 - DNA, 50 bp, synthetic construct
  source 1..50: mol_type = other DNA
tcaaacaaaataaaaactacaactctacraacaacccctataaaacraac

SEQ ID NO: 260 - DNA, 50 bp, synthetic construct
  source 1..50: mol_type = other DNA
aaaaatcctataaaaccataaaactaaacaatatctccactaaaatcttc

SEQ ID NO: 261 - DNA, 50 bp, synthetic construct
  source 1..50: mol_type = other DNA
atccacaaaccacctcctaattacacaatccaaacctttctaaatataac

SEQ ID NO: 262 - DNA, 50 bp, synthetic construct
  source 1..50: mol_type = other DNA
actacrccactacctaccratacctattaactttataatatatttatccc

SEQ ID NO: 263 - DNA, 50 bp, synthetic construct
  source 1..50: mol_type = other DNA
ctatcaaataaccaccrtaaaacaaaaccctccrcaaaaacraaaaatac

SEQ ID NO: 264 - DNA, 50 bp, synthetic construct
  source 1..50: mol_type = other DNA
aaaaaatatctatcaaataaccaccrtaaaacaaaaccctccrcaaaaac

SEQ ID NO: 265 - DNA, 50 bp, synthetic construct
  source 1..50: mol_type = other DNA
rccracaaaaaaaatatctatcaaataaccaccrtaaaacaaaaccctcc

SEQ ID NO: 266 - DNA, 50 bp, synthetic construct
  source 1..50: mol_type = other DNA
aataaatatttctaaacrccracaaaaaaaatatctatcaaataaccacc

SEQ ID NO: 267 - DNA, 50 bp, synthetic construct
  source 1..50: mol_type = other DNA
caacaaaactcaaaaataatcccaaaaccaaaaaatcratacccraactc

SEQ ID NO: 268 - DNA, 50 bp, synthetic construct
  source 1..50: mol_type = other DNA
taaaaacaacaaaactcaaaaataatcccaaaaccaaaaaatcrataccc

SEQ ID NO: 269 - DNA, 50 bp, synthetic construct
  source 1..50: mol_type = other DNA
ccctaactttaaaaccacctttaaattttattacttctatcaaataaaac

SEQ ID NO: 270 - DNA, 50 bp, synthetic construct
  source 1..50: mol_type = other DNA
attaacraacatcattcatttcaaacaaaaataactaccacttaattccc

SEQ ID NO: 271 - DNA, 50 bp, synthetic construct
  source 1..50: mol_type = other DNA
aaaaacraaaattaaataacaaccacctctacctaaaataaataatatcc

SEQ ID NO: 272 - DNA, 50 bp, synthetic construct
  source 1..50: mol_type = other DNA
aatataactcrattaataaaacacrtcaaaaccaaaaaaactaccacacc

SEQ ID NO: 273 - DNA, 50 bp, synthetic construct
  source 1..50: mol_type = other DNA
ccccacctaaacraaacraatcaataccctacctaaaaactataaataac

SEQ ID NO: 274 - DNA, 50 bp, synthetic construct
  source 1..50: mol_type = other DNA
aaactaacaaaaactctataatctcaaaccratatacaacaactctaaac

SEQ ID NO: 275 - DNA, 50 bp, synthetic construct
  source 1..50: mol_type = other DNA
taaaccaaaactcctaacctaaactaacaaaaactctataatctcaaacc

SEQ ID NO: 276 - DNA, 50 bp, synthetic construct
  source 1..50: mol_type = other DNA
ccacaaaacttctaccaatccaaatcaaaaatcttaacctaaaatactcc

SEQ ID NO: 277 - DNA, 50 bp, synthetic construct
  source 1..50: mol_type = other DNA
aactaaaaccaaaataacctaaaaactaactaataaatccttaaataaac

SEQ ID NO: 278 - DNA, 50 bp, synthetic construct
  source 1..50: mol_type = other DNA
ctcaacraaataatcactcctcaatctcataaccaaaataaaaaataccc

SEQ ID NO: 279 - DNA, 50 bp, synthetic construct
  source 1..50: mol_type = other DNA
atataatcctaaccaaacaaaaaactaaccaaactaatctaaaactcaac

SEQ ID NO: 280 - DNA, 50 bp, synthetic construct
  source 1..50: mol_type = other DNA
tcctaactaccccaacttacactaacraaaaatacaataaccaaaacaac

SEQ ID NO: 281 - DNA, 50 bp, synthetic construct
  source 1..50: mol_type = other DNA
tttctacttaaccaaaaccacacaccrttatcctaattattacacctccc

SEQ ID NO: 282 - DNA, 50 bp, synthetic construct
  source 1..50: mol_type = other DNA
raaatccatacttaaatattcctaaaaaacccraaaaccaactacccrac

SEQ ID NO: 283 - DNA, 50 bp, synthetic construct
  source 1..50: mol_type = other DNA
aacraaatccatacttaaatattcctaaaaaacccraaaaccaactaccc

SEQ ID NO: 284 - DNA, 50 bp, synthetic construct
  source 1..50: mol_type = other DNA
actaaaaaataaaccaacraaatccatacttaaatattcctaaaaaaccc

SEQ ID NO: 285 - DNA, 50 bp, synthetic construct
  source 1..50: mol_type = other DNA
rtcraacaattaatccccraatctcccaaaaatacctaaacataaactcc

SEQ ID NO: 286 - DNA, 50 bp, synthetic construct
  source 1..50: mol_type = other DNA
ataatctaaatacaataccracctaaaatcrtaactacaaacccctacac

SEQ ID NO: 287 - DNA, 50 bp, synthetic construct
  source 1..50: mol_type = other DNA
taaaaataacrattcaaaaaataatctaaatacaataccracctaaaatc

SEQ ID NO: 288 - DNA, 50 bp, synthetic construct
  source 1..50: mol_type = other DNA
aaaactacccctaaaaataacrattcaaaaaataatctaaatacaatacc

SEQ ID NO: 289 - DNA, 50 bp, synthetic construct
  source 1..50: mol_type = other DNA
ccccaaacaaaaaaactatcctcaaaaataataatccctaaaccaaatcc

SEQ ID NO: 290 - DNA, 50 bp, synthetic construct
  source 1..50: mol_type = other DNA
ccaaccctaacctacctaaataacaccaatactacaaactaaaaaaattc

SEQ ID NO: 291 - DNA, 50 bp, synthetic construct
  source 1..50: mol_type = other DNA
aaaacaaaatttcactatattaaccraaataatctcratctcctaacctc

SEQ ID NO: 292 - DNA, 50 bp, synthetic construct
  source 1..50: mol_type = other DNA
aatttcactatattaaccaaaataatctcratctcctaacctcataatcc

SEQ ID NO: 293 - DNA, 50 bp, synthetic construct; identical to SEQ ID NO: 292
  source 1..50: mol_type = other DNA

SEQ ID NO: 294 - DNA, 50 bp, synthetic construct
  source 1..50: mol_type = other DNA
tctcctaaaattatccaacctttctaaactaaaccaaaatacactcrcac

SEQ ID NO: 295 - DNA, 50 bp, synthetic construct
  source 1..50: mol_type = other DNA
ttatacaatcaacraaaaactaaacaaaaactcaaaaaaatacaccctcc

SEQ ID NO: 296 - DNA, 50 bp, synthetic construct
  source 1..50: mol_type = other DNA
ctcacctaaacaaatacatatctaatcrcttcctttactctactatttac

SEQ ID NO: 297 - DNA, 50 bp, synthetic construct
  source 1..50: mol_type = other DNA
ctaaactcaaaaccatccctctactcacctaaacaaatacatatctaatc

SEQ ID NO: 298 - DNA, 50 bp, synthetic construct
  source 1..50: mol_type = other DNA
attaaatttcaccctaacaatacaaattaataacttcccttcacaaatac

SEQ ID NO: 299 - DNA, 50 bp, synthetic construct
  source 1..50: mol_type = other DNA
taaaaacraactaaaaacrtaaccactaaaacacaacatcacaaaaaaac

SEQ ID NO: 300 - DNA, 50 bp, synthetic construct
  source 1..50: mol_type = other DNA
ctaaaccaaaaaaccctctaataaccctatctaaacataacaaaaaactc

SEQ ID NO: 301 - DNA, 50 bp, synthetic construct
  source 1..50: mol_type = other DNA
ttcacaaatcrtcatttcactattttaccaccaaaaaacaaaatacaaac

SEQ ID NO: 302 - DNA, 50 bp, synthetic construct
  source 1..50: mol_type = other DNA
ctcrctcattactaacacaacaatctaaaatcraactacaaaataacaac

SEQ ID NO: 303 - DNA, 50 bp, synthetic construct
  source 1..50: mol_type = other DNA
aaaaaattacaaaacaaacccraaatatctaaaaacttacacracattcc

SEQ ID NO: 304 - DNA, 50 bp, synthetic construct
  source 1..50: mol_type = other DNA
cacactataaaaaattacaaaacaaacccraaatatctaaaaacttacac

SEQ ID NO: 305 - DNA, 50 bp, synthetic construct
  source 1..50: mol_type = other DNA
aaattttcaacatatcataacraaataccrtacaaaccctcaaacacttc

SEQ ID NO: 306 - DNA, 50 bp, synthetic construct
  source 1..50: mol_type = other DNA
aaaaatcatcattctcaataaactatcrcaaaaacaaaaaaccaaacacc

SEQ ID NO: 307 - DNA, 50 bp, synthetic construct
  source 1..50: mol_type = other DNA
ccacacccaaaaacaaaaccaaataaccaaaaaaccacttaaataccaac

SEQ ID NO: 308 - DNA, 50 bp, synthetic construct
  source 1..50: mol_type = other DNA
cctaactaaaatctccaatctctaataaaatttacacaattcttctcctc

SEQ ID NO: 309 - DNA, 50 bp, synthetic construct
  source 1..50: mol_type = other DNA
tcctcrcatttctttaactacatctaaaccaaaatctaaataaaactatc

SEQ ID NO: 310 - DNA, 50 bp, synthetic construct
  source 1..50: mol_type = other DNA
cccattccttccctaaataaaatctaataacaaaaaatcaatactacaac

SEQ ID NO: 311 - DNA, 50 bp, synthetic construct
  source 1..50: mol_type = other DNA
tacccttctatatcatacrattttaaacaattatacctcttcctatctcc

SEQ ID NO: 312 - DNA, 50 bp, synthetic construct
  source 1..50: mol_type = other DNA
tctaacacrcaaaacaaacaaaccataattttatattatacaataatcac

SEQ ID NO: 313 - DNA, 50 bp, synthetic construct
  source 1..50: mol_type = other DNA
aacaaacaaaccataattttatattatacaataatcacracaaatacttc

SEQ ID NO: 314 - DNA, 50 bp, synthetic construct
  source 1..50: mol_type = other DNA
acacctacttattaaactaatattattttacatattacttctaaaacccc

SEQ ID NO: 315 - DNA, 50 bp, synthetic construct
  source 1..50: mol_type = other DNA
aaacaacatacaaaataacatcaattcaacaaacaaatactaaaatcctc

SEQ ID NO: 316 - DNA, 50 bp, synthetic construct
  source 1..50: mol_type = other DNA
tctccatcccttctacratattcactaaacattaccacatactaataacc

SEQ ID NO: 317 - DNA, 50 bp, synthetic construct
  source 1..50: mol_type = other DNA
tctacratattcactaaacattaccacatactaataaccrctctaaatac

SEQ ID NO: 318 - DNA, 50 bp, synthetic construct
  source 1..50: mol_type = other DNA
aacratacaaaatatactttattaaacaaatacttaaaaacaacatactc

SEQ ID NO: 319 - DNA, 50 bp, synthetic construct; identical to SEQ ID NO: 318
  source 1..50: mol_type = other DNA

SEQ ID NO: 320 - DNA, 50 bp, synthetic construct
  source 1..50: mol_type = other DNA
aacraacatactaccttcaaacatctatttaacaaaacacatcttacacc

SEQ ID NO: 321 - DNA, 50 bp, synthetic construct
  source 1..50: mol_type = other DNA
tccctatccttcacaaaaaataaatcaaacrttactaaaacaaataaaac

SEQ ID NO: 322 - DNA, 50 bp, synthetic construct
  source 1..50: mol_type = other DNA
ctcccctatttataaataattccctatccttcacaaaaaataaatcaaac

SEQ ID NO: 323 - DNA, 50 bp, synthetic construct
  source 1..50: mol_type = other DNA
atctaaaatttaaataaataataccraataccctctataaataaatattc

SEQ ID NO: 324 - DNA, 50 bp, synthetic construct
  source 1..50: mol_type = other DNA
atcctaaatcaaaatatccctatacatctaaaatttaaataaataatacc

SEQ ID NO: 325 - DNA, 50 bp, synthetic construct
  source 1..50: mol_type = other DNA
acrttatacacractatacaataaatacccttacaatacttcrtttaacc

SEQ ID NO: 326 - DNA, 50 bp, synthetic construct
  source 1..50: mol_type = other DNA
catatcctacrttatacacractatacaataaatacccttacaatacttc

SEQ ID NO: 327 - DNA, 50 bp, synthetic construct
  source 1..50: mol_type = other DNA
tttccacacacrattaaacraaacactacaaaaatactcactacacaacc

SEQ ID NO: 328 - DNA, 50 bp, synthetic construct
  source 1..50: mol_type = other DNA
acrattaaacraaacactacaaaaatactcactacacaaccrtatataac

SEQ ID NO: 329 - DNA, 50 bp, synthetic construct
  source 1..50: mol_type = other DNA
tacaaaaatactcactacacaaccrtatataacrcaaaacataaaccaac

SEQ ID NO: 330 - DNA, 50 bp, synthetic construct
  source 1..50: mol_type = other DNA
caataactatttcccaacacttactatatactaaatacccaacaaaccac

SEQ ID NO: 331 - DNA, 50 bp, synthetic construct
  source 1..50: mol_type = other DNA
tatcaaattcaactaaattaacacaaataaaacctcattctttcactttc

SEQ ID NO: 332 - DNA, 50 bp, synthetic construct
  source 1..50: mol_type = other DNA
aaaataaaacctcacctatactaattcaactaaacctaacaaacctaccc

SEQ ID NO: 333 - DNA, 50 bp, synthetic construct
  source 1..50: mol_type = other DNA
caaaaaactacraataatcatcaacrtaaataaaaactacrctaatcccc

SEQ ID NO: 334 - DNA, 50 bp, synthetic construct
  source 1..50: mol_type = other DNA
tactacacacraaaacctcctacatcaaaaaactacraataatcatcaac

SEQ ID NO: 335 - DNA, 50 bp, synthetic construct
  source 1..50: mol_type = other DNA
aacratataaaaactactacacacraaaacctcctacatcaaaaaactac

SEQ ID NO: 336 - DNA, 50 bp, synthetic construct
  source 1..50: mol_type = other DNA
ccctactcacrttaataatcacccrcaatttcctaatataaaaaacctcc

SEQ ID NO: 337 - DNA, 50 bp, synthetic construct
  source 1..50: mol_type = other DNA
acaaactaataatattataaattccccctaccctcctataaaataaccac

SEQ ID NO: 338 - DNA, 50 bp, synthetic construct
  source 1..50: mol_type = other DNA
aattaaaaaaaacccatatataacatacttaacataaaacctaacacaac

SEQ ID NO: 339 - DNA, 50 bp, synthetic construct
  source 1..50: mol_type = other DNA
ctacacttctctaaaccccaaattcctcatctaaaaaataacccracaac

SEQ ID NO: 340 - DNA, 50 bp, synthetic construct
  source 1..50: mol_type = other DNA
aactctatactaaacatattatatataaacctcttttaatcctcrctacc

SEQ ID NO: 341 - DNA, 50 bp, synthetic construct
  source 1..50: mol_type = other DNA
ttacatacaaatctaaaactacccaactaaaacatctaatcctcactacc

SEQ ID NO: 342 - DNA, 50 bp, synthetic construct
  source 1..50: mol_type = other DNA
aataacaaaacaaccatctacttcttctaaataaaaaacaaacattaatc

SEQ ID NO: 343 - DNA, 50 bp, synthetic construct
  source 1..50: mol_type = other DNA
ccatctacttcttctaaataaaaaacaaacattaatcrctaaaattaacc

SEQ ID NO: 344 - DNA, 50 bp, synthetic construct
  source 1..50: mol_type = other DNA
aaataaaaaacaaacattaatcrctaaaattaaccrtcttccttaaactc

SEQ ID NO: 345 - DNA, 50 bp, synthetic construct
  source 1..50: mol_type = other DNA
atacctttacctacaactacctaaataaaaacttaccaaaaaactacaac

SEQ ID NO: 346 - DNA, 50 bp, synthetic construct
  source 1..50: mol_type = other DNA
aaaactacaacraaaccaaatatatcaccttcaacctactcttcaacttc

SEQ ID NO: 347 - DNA, 50 bp, synthetic construct
  source 1..50: mol_type = other DNA
aaacracaaaaaatcacrtaacacttaaacaaaaaatacccaccraaacc

SEQ ID NO: 348 - DNA, 50 bp, synthetic construct
  source 1..50: mol_type = other DNA
aaatctaaacracaaaaaatcacrtaacacttaaacaaaaaatacccacc

SEQ ID NO: 349 - DNA, 50 bp, synthetic construct
  source 1..50: mol_type = other DNA
taaacaacctaaacaacracttcrataaatattttctacctaaatactac

SEQ ID NO: 350 - DNA, 50 bp, synthetic construct
  source 1..50: mol_type = other DNA
ccaaacctcaacaacacaaaacacttccaaacctccattcaaaactacac

SEQ ID NO: 351 - DNA, 50 bp, synthetic construct
  source 1..50: mol_type = other DNA
cctcaacaacacaaaacacttccaaacctccattcaaaactacacraaac

SEQ ID NO: 352 - DNA, 50 bp, synthetic construct
  source 1..50: mol_type = other DNA
aaccaataaatcaacaaacacractaacaaccttctctaccctaaaaatc

SEQ ID NO: 353 - DNA, 50 bp, synthetic construct
  source 1..50: mol_type = other DNA
aaatcaacaaacacractaacaaccttctctaccctaaaaatcraaaatc

SEQ ID NO: 354 - DNA, 50 bp, synthetic construct
  source 1..50: mol_type = other DNA
atacaataacaaaattataactcactacaacctcraaactaaattcaaac

SEQ ID NO: 355 - DNA, 50 bp, synthetic construct
  source 1..50: mol_type = other DNA
craacaaaaaaactcctcacatcccaaacrataaacaaccaaacaaaaac

SEQ ID NO: 356 - DNA, 50 bp, synthetic construct
  source 1..50: mol_type = other DNA
ccaaaaaataacacccactaccccacctttataacctcaattcaataacc

SEQ ID NO: 357 - DNA, 50 bp, synthetic construct
  source 1..50: mol_type = other DNA
taacatcaactaaaacatctcaaaaaacaaaaacraattcacaataaacc

SEQ ID NO: 358 - DNA, 50 bp, synthetic construct
  source 1..50: mol_type = other DNA
cacccaaaaccacttaacacttaataaacacrtctacctatattaacctc

SEQ ID NO: 359 - DNA, 50 bp, synthetic construct
  source 1..50: mol_type = other DNA
ccacaaaacaaaaaccaacatttaaaaaaaccatattctactataataac

SEQ ID NO: 360 - DNA, 50 bp, synthetic construct
  source 1..50: mol_type = other DNA
aaaccaacatttaaaaaaaccatattctactataataacrtatccacccc

SEQ ID NO: 361 - DNA, 50 bp, synthetic construct
  source 1..50: mol_type = other DNA
aacatttaaaaaaaccatattctactataataacrtatccaccccraaac

SEQ ID NO: 362 - DNA, 50 bp, synthetic construct
  source 1..50: mol_type = other DNA
tattctactataataacrtatccaccccraaacraaaataaacaaacctc

SEQ ID NO: 363 - DNA, 50 bp, synthetic construct
  source 1..50: mol_type = other DNA
aacaaaaaaataacaccctcccctaaaaacccrataactcaaaaacttac

SEQ ID NO: 364 - DNA, 50 bp, synthetic construct
  source 1..50: mol_type = other DNA
ctctatctatatctatctatctatctttcaaactctctatctctctctac

SEQ ID NO: 365 - DNA, 50 bp, synthetic construct
  source 1..50: mol_type = other DNA
ctataaaccacataaactctaataccctacctataaaaaactccctaccc

SEQ ID NO: 366 - DNA, 50 bp, synthetic construct
  source 1..50: mol_type = other DNA
aacaaacctctaaaaaaacraatttcaacctaaaataaaaaacrcctacc

SEQ ID NO: 367 - DNA, 50 bp, synthetic construct
  source 1..50: mol_type = other DNA
tcaacaaaacaaacctctaaaaaaacraatttcaacctaaaataaaaaac

SEQ ID NO: 368 - DNA, 50 bp, synthetic construct
  source 1..50: mol_type = other DNA
aaaaccaaaacctacttaatcaaatcaacaaaacaaacctctaaaaaaac

SEQ ID NO: 369 - DNA, 50 bp, synthetic construct
  source 1..50: mol_type = other DNA
cccaacraataaaacaataacccaaaatccctaccacccaaaaaattaac

SEQ ID NO: 370 - DNA, 50 bp, synthetic construct
  source 1..50: mol_type = other DNA
aatttcaccrtattaaccaaaataatctcaatttcctaacctaataatcc

SEQ ID NO: 371 - DNA, 50 bp, synthetic construct
  source 1..50: mol_type = other DNA
ctctcaaaaccacaactctttcctcataacctaaatcactctctaaaccc

SEQ ID NO: 372 - DNA, 50 bp, synthetic construct
  source 1..50: mol_type = other DNA
attaaaacaactcttcaaaaaacaacrtcrcatacaaacttcctaaaacc

SEQ ID NO: 373 - DNA, 50 bp, synthetic construct
  source 1..50: mol_type = other DNA
caacaacrttaaaacactccaattaaaacaactcttcaaaaaacaacrtc

SEQ ID NO: 374 - DNA, 50 bp, synthetic construct
  source 1..50: mol_type = other DNA
cracaacaacrttaaaacactccaattaaaacaactcttcaaaaaacaac

SEQ ID NO: 375 - DNA, 50 bp, synthetic construct
  source 1..50: mol_type = other DNA
crcataaaattccataccaaaaaatattcctaactacactcracaacaac

SEQ ID NO: 376 - DNA, 50 bp, synthetic construct
  source 1..50: mol_type = other DNA
aaaataactcrcataaaattccataccaaaaaatattcctaactacactc

SEQ ID NO: 377 - DNA, 50 bp, synthetic construct
  source 1..50: mol_type = other DNA
crctactaccraatacaatcaaaaacatttcctaacataaaatcctatac

SEQ ID NO: 378 - DNA, 50 bp, synthetic construct
  source 1..50: mol_type = other DNA
atcttaaactaaccccacctatttacaaattaaaaccacaaaaccttcac

SEQ ID NO: 379 - DNA, 50 bp, synthetic construct
  source 1..50: mol_type = other DNA
caaaaacccaactacttaactacttcttctaaaactttctctatattacc

SEQ ID NO: 380 - DNA, 50 bp, synthetic construct
  source 1..50: mol_type = other DNA
tatattaccraaaaacttttctaccatattcctttctaccatattccccc

SEQ ID NO: 381 - DNA, 50 bp, synthetic construct
  source 1..50: mol_type = other DNA
caccactaaataacatcatacaaatttcactcctacatcttttcattccc

SEQ ID NO: 382 - DNA, 50 bp, synthetic construct
  source 1..50: mol_type = other DNA
attcaaaatattatcttaaacctataaaatactcacaaataaaataacac

SEQ ID NO: 383 - DNA, 50 bp, synthetic construct
  source 1..50: mol_type = other DNA
acaaaaaacacrtatattctaataaattccaaacrcacattaatacatac

SEQ ID NO: 384 - DNA, 50 bp, synthetic construct
  source 1..50: mol_type = other DNA
aataacactttaacactaaaaaaataacttccatttttctaaaactaaac

SEQ ID NO: 385 - DNA, 50 bp, synthetic construct
  source 1..50: mol_type = other DNA
taaccactttcctaaatactcttaaaacaaatccaaaaaattctcacaac

SEQ ID NO: 386 - DNA, 50 bp, synthetic construct
  source 1..50: mol_type = other DNA
ataaacctaaaatcactaaaaccaaactaataaaaatattaaccactacc

SEQ ID NO: 387 - DNA, 50 bp, synthetic construct
  source 1..50: mol_type = other DNA
aaaaaatacacctaccaatctatatcaaacaactataaaatttataaacc

SEQ ID NO: 388 - DNA, 50 bp, synthetic construct
  source 1..50: mol_type = other DNA
tttttttaaaacaaaacctcactctattactcaaactaaaatataataac

SEQ ID NO: 389 - DNA, 50 bp, synthetic construct
  source 1..50: mol_type = other DNA
taattttaattttaatttttatttcctctcctctcccrttttaaaaacac

SEQ ID NO: 390 - DNA, 50 bp, synthetic construct
  source 1..50: mol_type = other DNA
caatacataataataattttaattttaatttttatttcctctcctctccc

SEQ ID NO: 391 - DNA, 50 bp, synthetic construct
  source 1..50: mol_type = other DNA
atatcacctataccttacaaaacaaaataataataataaaattaatcctc

SEQ ID NO: 392 - DNA, 50 bp, synthetic construct
  source 1..50: mol_type = other DNA
actcaactacaaacaaaatcttcatctccttttcaactataaataacaac

SEQ ID NO: 393 - DNA, 50 bp, synthetic construct
  source 1..50: mol_type = other DNA
tcaaccrtctaataaatcaaatttaattttaacaacataaaatattaccc

SEQ ID NO: 394 - DNA, 50 bp, synthetic construct
  source 1..50: mol_type = other DNA
taaaatattacccrctttataattatacttccaaaaataaaacccaactc

SEQ ID NO: 395 - DNA, 50 bp, synthetic construct
  source 1..50: mol_type = other DNA
taatcattttaaaatttacaattcaaaaacaattaatacatctacaatac

SEQ ID NO: 396 - DNA, 50 bp, synthetic construct
  source 1..50: mol_type = other DNA
caaaaaaccataaaaactaacactcacaaatatactttccaatctaccac

SEQ ID NO: 397 - DNA, 50 bp, synthetic construct
  source 1..50: mol_type = other DNA
accttcataacatctccataaaacaaataataatattaccatcacaatac

SEQ ID NO: 398 - DNA, 50 bp, synthetic construct
  source 1..50: mol_type = other DNA
ttaaaaacattttataaacatcaactcaacaatcatccccataaatctac

SEQ ID NO: 399 - DNA, 50 bp, synthetic construct
  source 1..50: mol_type = other DNA
aatataaaaaatattcatactaaaaacctattccaaataaacatttatac

SEQ ID NO: 400 - DNA, 50 bp, synthetic construct
  source 1..50: mol_type = other DNA
crcctaaaaatactatatttaaaaatcccccaaacaaatctaaatatccc

SEQ ID NO: 401 - DNA, 50 bp, synthetic construct
  source 1..50: mol_type = other DNA
aaaaaaaactatactacctactcaaataaaattaacttattctaacaacc

SEQ ID NO: 402 - DNA, 50 bp, synthetic construct
  source 1..50: mol_type = other DNA
tacttctattcctctccccaaaacaatactactcacaaaaactatatccc

SEQ ID NO: 403 - DNA, 50 bp, synthetic construct
  source 1..50: mol_type = other DNA
acttcctacaacaaccrttctaaataaaatcttataaacctttatcattc

SEQ ID NO: 404 - DNA, 50 bp, synthetic construct
  source 1..50: mol_type = other DNA
atttttacaaaaaaccraataataaaaatccacaaaacctcacccaaaac

SEQ ID NO: 405 - DNA, 50 bp, synthetic construct
  source 1..50: mol_type = other DNA
tcctattctatttattatacrcaataaatcaactctcctatttacrcaac

SEQ ID NO: 406 - DNA, 50 bp, synthetic construct
  source 1..50: mol_type = other DNA
atccttcctattctatttattatacrcaataaatcaactctcctatttac

SEQ ID NO: 407 - DNA, 50 bp, synthetic construct
  source 1..50: mol_type = other DNA
caatacattaaaaaatctctatttttaaaccttatccctcttctacaaac

SEQ ID NO: 408 - DNA, 50 bp, synthetic construct
  source 1..50: mol_type = other DNA
actaaattataaaaaaaacctcctctttaatcccatcctatacatacttc

SEQ ID NO: 409 - DNA, 50 bp, synthetic construct
  source 1..50: mol_type = other DNA
cccaaaatctaccctacaactataatttaaacccaaattctactacatcc

SEQ ID NO: 410 - DNA, 50 bp, synthetic construct
  source 1..50: mol_type = other DNA
tccrcttatacaacctcctttccaaccatactcatatacttactaaacac

SEQ ID NO: 411 - DNA, 50 bp, synthetic construct
  source 1..50: mol_type = other DNA
ctaaaaaatttaacttataattattctcttaaataccctaaaattaacac

SEQ ID NO: 412 - DNA, 50 bp, synthetic construct
  source 1..50: mol_type = other DNA
taacacrtaatacccattcaactaaacctctataaacaattaaattttcc

SEQ ID NO: 413 - DNA, 50 bp, synthetic construct
  source 1..50: mol_type = other DNA
tactaataccttccratacctcctaacaaattctttaaattaaaaaaaac

SEQ ID NO: 414 - DNA, 50 bp, synthetic construct
  source 1..50: mol_type = other DNA
aaaattaaaaaaccrctttccttaatccaaaaaatttaccaaaaaacacc

SEQ ID NO: 415 - DNA, 50 bp, synthetic construct
  source 1..50: mol_type = other DNA
ttctctaatatctcraaataacttttaataacraacrataaaacaaaccc

SEQ ID NO: 416 - DNA, 50 bp, synthetic construct
  source 1..50: mol_type = other DNA
ccraacaaaaaaacatcaaaacrataaaacacaaaaacttcctccctacc

SEQ ID NO: 417 - DNA, 50 bp, synthetic construct
  source 1..50: mol_type = other DNA
aaaaccctctacccrataaacaaataatttattaactaaaaaacttccrc

SEQ ID NO: 418 - DNA, 50 bp, synthetic construct
  source 1..50: mol_type = other DNA
caaactaatcttaaaaaactaaatctaacccttcactaaatccrcctaac

SEQ ID NO: 419 - DNA, 50 bp, synthetic construct
  source 1..50: mol_type = other DNA
aaactctcctctaatataaaaaataacctttattacttaacaaaaatatc

SEQ ID NO: 420 - DNA, 50 bp, synthetic construct
  source 1..50: mol_type = other DNA
tctaccttcctaaacaaactacaactccttaaaaacaaaaccatctttcc

SEQ ID NO: 421 - DNA, 50 bp, synthetic construct
  source 1..50: mol_type = other DNA
atcataaaatcaaaaaatcraaaccatcctaactaacaaaataaaacccc

SEQ ID NO: 422 - DNA, 50 bp, synthetic construct; identical to SEQ ID NO: 421
  source 1..50: mol_type = other DNA

SEQ ID NO: 423 - DNA, 50 bp, synthetic construct
  source 1..50: mol_type = other DNA
ctactataaaaatacaatcacrtaataatctttaacaaaacaatctatac

SEQ ID NO: 424 - DNA, 50 bp, synthetic construct
  source 1..50: mol_type = other DNA
acacatctaaatataaaaaacrcacaaattactctatcaaaaaccactac

SEQ ID NO: 425 - DNA, 50 bp, synthetic construct
  source 1..50: mol_type = other DNA
caaaacatttttcaaaccaaaaaacaaacataataaaaataaccccaaac

SEQ ID NO: 426 - DNA, 50 bp, synthetic construct
  source 1..50: mol_type = other DNA
atttttcaaaccaaaaaacaaacataataaaaataaccccaaacraatac

SEQ ID NO: 427 - DNA, 50 bp, synthetic construct
  source 1..50: mol_type = other DNA
acaacaacaataaaaaaacaatcaacaactacctaatattacaaacaaac

SEQ ID NO: 428 - DNA, 50 bp, synthetic construct
  source 1..50: mol_type = other DNA
ataaaatcctttctatattaccccaattacctaactattttctaatcaac

SEQ ID NO: 429 - DNA, 50 bp, synthetic construct
  source 1..50: mol_type = other DNA
acaacacaaaaaaaaccccatctcaaccaaaaacaaaattaaaaataacc

SEQ ID NO: 430 - DNA, 50 bp, synthetic construct
  source 1..50: mol_type = other DNA
accccatctcaaccaaaaacaaaattaaaaataaccraacataataccac

SEQ ID NO: 431 - DNA, 50 bp, synthetic construct
  source 1..50: mol_type = other DNA
aataacttatataataaaatcaacccacatacaaacatttccctatcacc

SEQ ID NO: 432 - DNA, 50 bp, synthetic construct
  source 1..50: mol_type = other DNA
aaaaatatataaaaaaatcaaatcaaccacaaattattttaatcacaaac

SEQ ID NO: 433 - DNA, 50 bp, synthetic construct
  source 1..50: mol_type = other DNA
accatataccattaactataatcaaataaaacaaacaacaaaacacaccc

SEQ ID NO: 434 - DNA, 50 bp, synthetic construct
  source 1..50: mol_type = other DNA
tcttactatttatctcatctaaccacaattaataatacataatttcttcc

SEQ ID NO: 435 - DNA, 50 bp, synthetic construct
  source 1..50: mol_type = other DNA
aaataattaaaatttttctaaacatattacttcccccaaccccataaaac

SEQ ID NO: 436 - DNA, 50 bp, synthetic construct
  source 1..50: mol_type = other DNA
caacaaactaacttactatacrctttataattccaacraaaaaatctttc

SEQ ID NO: 437 - DNA, 50 bp, synthetic construct
  source 1..50: mol_type = other DNA
tctccacattactataacaaaatacaaatatatattcraaaaatttcctc

SEQ ID NO: 438 - DNA, 50 bp, synthetic construct
  source 1..50: mol_type = other DNA
aatctaaaaacaaaaacraaataacaatacaacaaactaacttactatac

SEQ ID NO: 439 - DNA, 50 bp, synthetic construct
  source 1..50: mol_type = other DNA
crctaaaattataaaacrtacaacaaaccaacctactatactaccacctc

SEQ ID NO: 440 - DNA, 50 bp, synthetic construct
  source 1..50: mol_type = other DNA
acatccaaaaacataaaccataaaaaaacaataacaattacatcacaaac

SEQ ID NO: 441 - DNA, 50 bp, synthetic construct
  source 1..50: mol_type = other DNA
aaaacaataacaattacatcacaaacractacttatttcacaacatcatc

SEQ ID NO: 442 - DNA, 50 bp, synthetic construct
  source 1..50: mol_type = other DNA
caaaaacataaaaaaccctaaaactacatcaaaaattccacatcctcaac

SEQ ID NO: 443 - DNA, 50 bp, synthetic construct
  source 1..50: mol_type = other DNA
aatcacctaatcrtacaactaatcaataaataaccaacataattcaaacc

SEQ ID NO: 444 - DNA, 50 bp, synthetic construct
  source 1..50: mol_type = other DNA
taaaaaaataataacttattattaaccrtttctctcctaccccctacccc

SEQ ID NO: 445 - DNA, 50 bp, synthetic construct
  source 1..50: mol_type = other DNA
taaaaaataaaataacttactttcaatttaactaaactttcatttctatc

SEQ ID NO: 446 - DNA, 50 bp, synthetic construct
  source 1..50: mol_type = other DNA
aatactaactccccrttcctaaaaaaccatcatcattcttaaaaacaccc

SEQ ID NO: 447 - DNA, 50 bp, synthetic construct
  source 1..50: mol_type = other DNA
ttcttaaaaacacccraattccatctttctaaaatcractaaaacactcc

SEQ ID NO: 448 - DNA, 50 bp, synthetic construct
  source 1..50: mol_type = other DNA
caataccaactacaattttatctccttcrttacttaaccaacctccaccc

SEQ ID NO: 449 - DNA, 50 bp, synthetic construct
  source 1..50: mol_type = other DNA
acaaatacattttctaactaaccacrctattaaaaactaccatcaatcac

SEQ ID NO: 450 - DNA, 50 bp, synthetic construct
  source 1..50: mol_type = other DNA
aacaaaaacaactctaaaatatataaaatactaatcactcacaaaaatac

SEQ ID NO: 451 - DNA, 50 bp, synthetic construct
  source 1..50: mol_type = other DNA
ctttacattataatcrtttaaacataccaaaatcaactaataaaactctc

SEQ ID NO: 452 - DNA, 50 bp, synthetic construct
  source 1..50: mol_type = other DNA
aatcatcccctccaatcttcaaaacaaactaactctacaataaaaaatac

SEQ ID NO: 453 - DNA, 50 bp, synthetic construct
  source 1..50: mol_type = other DNA
acaatcatttcctttcacttaaaaaaataaacatactttacattataatc

SEQ ID NO: 454 - DNA, 50 bp, synthetic construct
  source 1..50: mol_type = other DNA
tcaccaaattcaccctcttactaattatctttttttacrtttaaaaattc

SEQ ID NO: 455 - DNA, 50 bp, synthetic construct
  source 1..50: mol_type = other DNA
aatcraacraaaacaaaacacttctttaatcctatccraaccaaataacc

SEQ ID NO: 456 - DNA, 50 bp, synthetic construct
  source 1..50: mol_type = other DNA
aatcrtatactttcttttttaacccctcrtcctaataatcaaaaaaaatc

SEQ ID NO: 457 - DNA, 50 bp, synthetic construct
  source 1..50: mol_type = other DNA
aaaacaaaaccaaacataatcctaaactcctacttctaaaaaatctaccc

SEQ ID NO: 458 - DNA, 50 bp, synthetic construct
  source 1..50: mol_type = other DNA
ttacaaaatattaacaaaccaacaataaattaataattcaccctaaattc

SEQ ID NO: 459 - DNA, 50 bp, synthetic construct
  source 1..50: mol_type = other DNA
ttttatactacrttttctaccccttattttatacraaccttaactccttc

SEQ ID NO: 460 - DNA, 50 bp, synthetic construct
  source 1..50: mol_type = other DNA
acttattaatatccttataccatacactcttcccraaaaaattaaaatcc

SEQ ID NO: 461 - DNA, 50 bp, synthetic construct
  source 1..50: mol_type = other DNA
ataaatatatattactatacatttatcaaaacccacaaaataaaccaaac

SEQ ID NO: 462 - DNA, 50 bp, synthetic construct
  source 1..50: mol_type = other DNA
aatatatattactatacatttatcaaaacccacaaaataaaccaaacrcc

SEQ ID NO: 463 - DNA, 50 bp, synthetic construct
  source 1..50: mol_type = other DNA
tactatacatttatcaaaacccacaaaataaaccaaacrccrtaactcac

SEQ ID NO: 464 - DNA, 50 bp, synthetic construct
  source 1..50: mol_type = other DNA
aaaaaatcatttaaacccaaaaattcaaaactacaataaactataattac

SEQ ID NO: 465 - DNA, 50 bp, synthetic construct
  source 1..50: mol_type = other DNA
ttataactaataaatcaatattaatacaatcttattcactaaaatccatc

SEQ ID NO: 466 - DNA, 50 bp, synthetic construct
  source 1..50: mol_type = other DNA
tatacaaaaactctatcctttaaactcaattttactataaacctaaaacc

SEQ ID NO: 467 - DNA, 50 bp, synthetic construct
  source 1..50: mol_type = other DNA
tttactataaacctaaaaccrctctaaaaaataaaatctattaaccaaac

SEQ ID NO: 468 - DNA, 50 bp, synthetic construct
  source 1..50: mol_type = other DNA
aacaaaactcaaatactcttacttttttaattaataaactcttaattttc

SEQ ID NO: 469 - DNA, 50 bp, synthetic construct
  source 1..50: mol_type = other DNA
actacaataatcacaactcacaactcctaaactcaaataatctctccacc

SEQ ID NO: 470 - DNA, 50 bp, synthetic construct
  source 1..50: mol_type = other DNA
cttcaaacaaaatcactcaacratactaaactcacaaaaaactaccaatc

SEQ ID NO: 471 - DNA, 50 bp, synthetic construct
  source 1..50: mol_type = other DNA
aaaaaaatccaatacctttataactctatattacctccaacacataacrc

SEQ ID NO: 472 - DNA, 50 bp, synthetic construct
  source 1..50: mol_type = other DNA
aaaaaaaaatccaatacctttataactctatattacctccaacacataac

SEQ ID NO: 473 - DNA, 50 bp, synthetic construct
  source 1..50: mol_type = other DNA
cacctcaaaaaatatataccacctccttaatttccataattccttccacc

SEQ ID NO: 474 - DNA, 50 bp, synthetic construct
  source 1..50: mol_type = other DNA
tcaccatatctattctcaaaatccataccaaaaaaatctttaactctcrc

SEQ ID NO: 475 - DNA, 50 bp, synthetic construct
  source 1..50: mol_type = other DNA
attcaccatatctattctcaaaatccataccaaaaaaatctttaactctc

SEQ ID NO: 476 - DNA, 50 bp, synthetic construct
  source 1..50: mol_type = other DNA
ctacatccaatatttaatccaatactaattctctctaatccacraacctc

SEQ ID NO: 477 - DNA, 50 bp, synthetic construct
  source 1..50: mol_type = other DNA
aaatcaaaccttaacaataacttaaacaatcraataaaaataactcccac

SEQ ID NO: 478 - DNA, 50 bp, synthetic construct
  source 1..50: mol_type = other DNA
cctaatattccattactaaaacrctaaaaacrtaaaaattacttttatcc

SEQ ID NO: 479 - DNA, 50 bp, synthetic construct
  source 1..50: mol_type = other DNA
aacaacacattcatctttctatttaaatttaattctccctaaacacacac

SEQ ID NO: 480 - DNA, 50 bp, synthetic construct
  source 1..50: mol_type = other DNA
tcactcataacaataaccaatttcaaacaactcctaaaccactctacrtc

SEQ ID NO: 481 - DNA, 50 bp, synthetic construct
  source 1..50: mol_type = other DNA
tattcactcataacaataaccaatttcaaacaactcctaaaccactctac

SEQ ID NO: 482 - DNA, 50 bp, synthetic construct
  source 1..50: mol_type = other DNA
ttcactattttattttaattctactacaaacaaaattttcccctaatccc

SEQ ID NO: 483 - DNA, 50 bp, synthetic construct
  source 1..50: mol_type = other DNA
taatcaaaaattctaaatttaaaaatcaaaaacaataaaatccttaaacc

SEQ ID NO: 484 - DNA, 50 bp, synthetic construct
  source 1..50: mol_type = other DNA
aactcatttaactccraaaaaacacctcttaaaaaacctacaacaaaacc

SEQ ID NO: 485 - DNA, 50 bp, synthetic construct
  source 1..50: mol_type = other DNA
taccaataatctaacractctactataaattcctcaaaaaataccttctc

SEQ ID NO: 486 - DNA, 50 bp, synthetic construct
  source 1..50: mol_type = other DNA
aaaataccttctcraaattaaataaatcaccrcttactaaacaaaaacrc

SEQ ID NO: 487 - DNA, 50 bp, synthetic construct
  source 1..50: mol_type = other DNA
ctccattttaaaaaaaacctaacctaaataaccaccrccrctaaatctac

SEQ ID NO: 488 - DNA, 50 bp, synthetic construct
  source 1..50: mol_type = other DNA
aaaacttttctaaacttataaaactcttttccctccraaaaaaacracrc

SEQ ID NO: 489 - DNA, 50 bp, synthetic construct
  source 1..50: mol_type = other DNA
rcaaaacttttctaaacttataaaactcttttccctccraaaaaaacrac

SEQ ID NO: 490 - DNA, 50 bp, synthetic construct
  source 1..50: mol_type = other DNA
racrcaaaacttttctaaacttataaaactcttttccctccraaaaaaac

SEQ ID NO: 491 - DNA, 50 bp, synthetic construct
  source 1..50: mol_type = other DNA
craacaaacracrcaaaacttttctaaacttataaaactcttttccctcc

SEQ ID NO: 492 - DNA, 50 bp, synthetic construct
  source 1..50: mol_type = other DNA
raacraaactctaaccccaaataaaaccrataaaccraactaaaatatac

SEQ ID NO: 493 - DNA, 50 bp, synthetic construct
  source 1..50: mol_type = other DNA
aaattttaaacttcctattcraccactatccaattaattcctacacactc

SEQ ID NO: 494 - DNA, 50 bp, synthetic construct
  source 1..50: mol_type = other DNA
taattaattaatcaaaacaacrctattcacaaattttaaacttcctattc

SEQ ID NO: 495 - DNA, 50 bp, synthetic construct
  source 1..50: mol_type = other DNA
aaaatcaactaaacaataaccraacaaaaaattcaaaacttataaataac

SEQ ID NO: 496 - DNA, 50 bp, synthetic construct
  source 1..50: mol_type = other DNA
atatctttacctaccctaaaaaaccccttaaataaattttatataaactc

SEQ ID NO: 497 - DNA, 50 bp, synthetic construct
  source 1..50: mol_type = other DNA
aaacctcttaaaacraacctctaaacaaaaacaaaaaacattaaaattac

SEQ ID NO: 498 - DNA, 50 bp, synthetic construct
  source 1..50: mol_type = other DNA
ataacactacataacctcaatataaattaaacaataattcccaataaccc

SEQ ID NO: 499 - DNA, 50 bp, synthetic construct
  source 1..50: mol_type = other DNA
crataacaaaaattatctaaatccctaaatacactaaaatcraaaatacc

SEQ ID NO: 500 - DNA, 50 bp, synthetic construct
  source 1..50: mol_type = other DNA
ctcaatataaattaaacaataattcccaataacccraaaacracactttc

SEQ ID NO: 501 - DNA, 50 bp, synthetic construct
  source 1..50: mol_type = other DNA
tattacccaaataccracactaatccattaatatatattacccaaatacc

SEQ ID NO: 502 - DNA, 50 bp, synthetic construct
  source 1..50: mol_type = other DNA
ccaattaaacctatataaacctatcaatataaccaaaaataacacattcc

SEQ ID NO: 503 - DNA, 50 bp, synthetic construct
  source 1..50: mol_type = other DNA
aacctatataaacctatcaatataaccaaaaataacacattccrtctccc

SEQ ID NO: 504 - DNA, 50 bp, synthetic construct
  source 1..50: mol_type = other DNA
caactacatctcaaactctaaatacaaaacatttattctaccaaacaacc

SEQ ID NO: 505 - DNA, 50 bp, synthetic construct
  source 1..50: mol_type = other DNA
aaatacaaaacatttattctaccaaacaaccrataaaaacctttcaaacc

SEQ ID NO: 506 - DNA, 50 bp, synthetic construct
  source 1..50: mol_type = other DNA
raattactacattataacacattacrttataaatttaatcataactcccc

SEQ ID NO: 507 - DNA, 50 bp, synthetic construct
  source 1..50: mol_type = other DNA
accaccattaataactttaaataaaaaaatcttaccaaacrcaataactc

SEQ ID NO: 508 - DNA, 50 bp, synthetic construct
  source 1..50: mol_type = other DNA
aaacaccctataaactatcactattaaaacaattatacttccaaatctac

SEQ ID NO: 509 - DNA, 50 bp, synthetic construct
  source 1..50: mol_type = other DNA
caacaataacaatttacaaaatattcattaacactcactataattctcac

SEQ ID NO: 510 - DNA, 50 bp, synthetic construct
  source 1..50: mol_type = other DNA
atattcattaacactcactataattctcacraaaaaataacaaacttaac

SEQ ID NO: 511 - DNA, 50 bp, synthetic construct
  source 1..50: mol_type = other DNA
aaactaaatcatacaataaaaatttcctaaaactaaacataataactcac

SEQ ID NO: 512 - DNA, 50 bp, synthetic construct
  source 1..50: mol_type = other DNA
taaatcatacaataaaaatttcctaaaactaaacataataactcacrctc

SEQ ID NO: 513 - DNA, 50 bp, synthetic construct
  source 1..50: mol_type = other DNA
racctctctccratcctatttaaacctctacatctaaaaaatacctactc

SEQ ID NO: 514 - DNA, 50 bp, synthetic construct
  source 1..50: mol_type = other DNA
acrataacttttaccaaacacactacctacaaacacatttttaacaaaac

SEQ ID NO: 515 - DNA, 50 bp, synthetic construct
  source 1..50: mol_type = other DNA
aaccttccrcaatacattatatccctaaatactcracaataaaaaataac

SEQ ID NO: 516 - DNA, 50 bp, synthetic construct
  source 1..50: mol_type = other DNA
atatttacaaacaatatacttaataaaaatcatcrccattctccattatc

SEQ ID NO: 517 - DNA, 50 bp, synthetic construct
  source 1..50: mol_type = other DNA
accttaaacaatacccaaactttcttaaacaaaaatccctataaccttcc

SEQ ID NO: 518 - DNA, 50 bp, synthetic construct
  source 1..50: mol_type = other DNA
acaattttctcctatctcaataaacaaaacrtacrctcraattttatacc

SEQ ID NO: 519 - DNA, 50 bp, synthetic construct
  source 1..50: mol_type = other DNA
tccaatcataaaacaattttctcctatctcaataaacaaaacrtacrctc

SEQ ID NO: 520 - DNA, 50 bp, synthetic construct
  source 1..50: mol_type = other DNA
cacctccaatcataaaacaattttctcctatctcaataaacaaaacrtac

SEQ ID NO: 521 - DNA, 50 bp, synthetic construct
  source 1..50: mol_type = other DNA
atctcacctccaatcataaaacaattttctcctatctcaataaacaaaac

SEQ ID NO: 522 - DNA, 50 bp, synthetic construct
  source 1..50: mol_type = other DNA
tatatttaactttacacaaacatctcaatataataaaaaacaatattacc

SEQ ID NO: 523 - DNA, 50 bp, synthetic construct
  source 1..50: mol_type = other DNA
craaccaacaaatataactcattttccctaccctacctaaaaaaaaattc

SEQ ID NO: 524 - DNA, 50 bp, synthetic construct
  source 1..50: mol_type = other DNA
aataaataccaaacataaaaaactaacaataacctaaccttaaaataacc

SEQ ID NO: 525 - DNA, 50 bp, synthetic construct
  source 1..50: mol_type = other DNA
aaaaataaaaacctataaaacttataaaactttaaattttaaccacttac

SEQ ID NO: 526 - DNA, 50 bp, synthetic construct
  source 1..50: mol_type = other DNA
ccccaaaattactcaaaataaaaaactataaaaaacctaacaacrtaacc

SEQ ID NO: 527 - DNA, 50 bp, synthetic construct
  source 1..50: mol_type = other DNA
aaaaactcaacattccctttcaccaactactacctatctttttcttctac

SEQ ID NO: 528 - DNA, 50 bp, synthetic construct
  source 1..50: mol_type = other DNA
taataacaataaaaacaaccaaaaatcacttccatcaccatcttaatttc

SEQ ID NO: 529 - DNA, 50 bp, synthetic construct
  source 1..50: mol_type = other DNA
aataaaaacttaaatcacttccccacccatatccaaaacaactatttaac

SEQ ID NO: 530 - DNA, 50 bp, synthetic construct
  source 1..50: mol_type = other DNA
aacaatataaaccctataaaattcrcaaaatttattaaacccaaaaaaac

SEQ ID NO: 531 - DNA, 50 bp, synthetic construct
  source 1..50: mol_type = other DNA
aaaataactcaaattcccactcacrtctctctaaacctaataaattttac

SEQ ID NO: 532 - DNA, 50 bp, synthetic construct
  source 1..50: mol_type = other DNA
aaccaccccacaatacccttactttacttttaacacaaacaatatatctc

SEQ ID NO: 533 - DNA, 50 bp, synthetic construct
  source 1..50: mol_type = other DNA
aaaaaaaacaccrcrcrtaaacactaaaattaaaaaatcctatatcaacc

SEQ ID NO: 534 - DNA, 50 bp, synthetic construct
  source 1..50: mol_type = other DNA
aaacttaaaaaacrcacrttttctaaaccctccctacaaacttaaattcc

SEQ ID NO: 535 - DNA, 50 bp, synthetic construct
  source 1..50: mol_type = other DNA
aaatttacaccccaaacatatcaaaacrtaatcaacaatctctctacctc

SEQ ID NO: 536 - DNA, 50 bp, synthetic construct
  source 1..50: mol_type = other DNA
acataacaaaatacctatatattttctcaccaaaaacaaaatttaacctc

SEQ ID NO: 537 - DNA, 50 bp, synthetic construct
  source 1..50: mol_type = other DNA
atattttctcaccaaaaacaaaatttaacctcrcctatcaaaaaatacac

SEQ ID NO: 538 - DNA, 50 bp, synthetic construct
  source 1..50: mol_type = other DNA
atacacrtacacaaaaaaaacrtactcctaaaaaaacacaaacaaaaaac

SEQ ID NO: 539 - DNA, 50 bp, synthetic construct
  source 1..50: mol_type = other DNA
atatataaccracaaaaaccccttaaatcctaaaaaacctctactactcc

SEQ ID NO: 540 - DNA, 50 bp, synthetic construct
  source 1..50: mol_type = other DNA
crtaaaaaccraaacaacaaaaactcttcaaaacccaaaaaacttctatc

SEQ ID NO: 541 - DNA, 50 bp, synthetic construct
  source 1..50: mol_type = other DNA
tattccatattacaacataaaaaactcataaaaacatactctaaatcttc

SEQ ID NO: 542 - DNA, 50 bp, synthetic construct
  source 1..50: mol_type = other DNA
aatcccacttctaaatatatatccaaaataattaaaaacraaaactcaac

SEQ ID NO: 543 - DNA, 50 bp, synthetic construct
  source 1..50: mol_type = other DNA
taaaaaatacaactatacrcataaatatacaaatatctcrctaaaccccc

SEQ ID NO: 544 - DNA, 50 bp, synthetic construct
  source 1..50: mol_type = other DNA
tttttttaaaaattaccrttctattttccacaataactacrccattttac

SEQ ID NO: 545 - DNA, 50 bp, synthetic construct
  source 1..50: mol_type = other DNA
taatttacatttccctaataataaataacrttaaacatcttttcacattc

SEQ ID NO: 546 - DNA, 50 bp, synthetic construct
  source 1..50: mol_type = other DNA
tttccctaataataaataacrttaaacatcttttcacattcrtattaacc

SEQ ID NO: 547 - DNA, 50 bp, synthetic construct
  source 1..50: mol_type = other DNA
attattttaaatcttaaaaaaatatacttataaaacctttaatccctctc

SEQ ID NO: 548 - DNA, 50 bp, synthetic construct
  source 1..50: mol_type = other DNA
aatcttaaaaaaatatacttataaaacctttaatccctctcrcctaaaac

SEQ ID NO: 549 - DNA, 50 bp, synthetic construct
  source 1..50: mol_type = other DNA
taaactaaatacaataactcatacccataatcccaacaatttaaaaaacc

SEQ ID NO: 550 - DNA, 50 bp, synthetic construct
  source 1..50: mol_type = other DNA
aacaaataaaaacacaaaaactcactccaacaaacctacaaaataaaccc

SEQ ID NO: 551 - DNA, 50 bp, synthetic construct
  source 1..50: mol_type = other DNA
caacactctaatactaaaaaatactcrataaaaacatactaaataaaacc

SEQ ID NO: 552 - DNA, 50 bp, synthetic construct
  source 1..50: mol_type = other DNA
actctaatactaaaaaatactcrataaaaacatactaaataaaaccraac

SEQ ID NO: 553 - DNA, 50 bp, synthetic construct
  source 1..50: mol_type = other DNA
atatatttattctcataacracccracaataacaccctataatcactatc

SEQ ID NO: 554 - DNA, 50 bp, synthetic construct
  source 1..50: mol_type = other DNA
tacctaaccctatactctatacacacatatatttattctcataacraccc

SEQ ID NO: 555 - DNA, 50 bp, synthetic construct
  source 1..50: mol_type = other DNA
acacctacctaaccctatactctatacacacatatatttattctcataac

SEQ ID NO: 556 - DNA, 50 bp, synthetic construct
  source 1..50: mol_type = other DNA
atatatacaaaacacaaaaccaaacaaatatataaatatttactactatc

SEQ ID NO: 557 - DNA, 50 bp, synthetic construct
  source 1..50: mol_type = other DNA
accaaacaaatatataaatatttactactatcrtaactattataaatcac

SEQ ID NO: 558 - DNA, 50 bp, synthetic construct
  source 1..50: mol_type = other DNA
acrtcctactatcccaaaattcaaacctataatacaaacactaatactac

SEQ ID NO: 559 - DNA, 50 bp, synthetic construct
  source 1..50: mol_type = other DNA
tctaatctcacaattatcataatatcattcctatttacctaaaactttac

SEQ ID NO: 560 - DNA, 50 bp, synthetic construct
  source 1..50: mol_type = other DNA
tactcctatatctttataacttccaacaaaacatactacctcctaccacc

SEQ ID NO: 561 - DNA, 50 bp, synthetic construct
  source 1..50: mol_type = other DNA
tcaaaaaattctcccrcctcaacctcccactaaaataaaattacaaaaac

SEQ ID NO: 562 - DNA, 50 bp, synthetic construct
  source 1..50: mol_type = other DNA
cctctaatcataatatactattcctcrttactttacaattacaaaattcc

SEQ ID NO: 563 - DNA, 50 bp, synthetic construct
  source 1..50: mol_type = other DNA
cactcaaataaaaaattcccctctaaattaaacctaaaaaaatcacratc

SEQ ID NO: 564 - DNA, 50 bp, synthetic construct
  source 1..50: mol_type = other DNA
ctaaaaatttcttccctaaaaacaataaacacttattatccaactccaac

SEQ ID NO: 565 - DNA, 50 bp, synthetic construct
  source 1..50: mol_type = other DNA
aaaaaaacttctttaataaaaaaataaacccaatataataacttataccc

SEQ ID NO: 566 - DNA, 50 bp, synthetic construct
  source 1..50: mol_type = other DNA
ttatcaaaaaaacccttcctaaacaacacaaaaacccccctaaaaaatcc

SEQ ID NO: 567 - DNA, 50 bp, synthetic construct
  source 1..50: mol_type = other DNA
cccttcctaaacaacacaaaaacccccctaaaaaatccrtaataaaaacc

SEQ ID NO: 568 - DNA, 50 bp, synthetic construct
  source 1..50: mol_type = other DNA
taaatcccrtaataactaactaaatataaaccccraatacacraaaaatc

SEQ ID NO: 569 - DNA, 50 bp, synthetic construct
  source 1..50: mol_type = other DNA
accctatctaaatcccrtaataactaactaaatataaaccccraatacac

SEQ ID NO: 570 - DNA, 50 bp, synthetic construct
  source 1..50: mol_type = other DNA
cccatctaaccctatctaaatcccrtaataactaactaaatataaacccc

SEQ ID NO: 571 - DNA, 50 bp, synthetic construct
  source 1..50: mol_type = other DNA
aaactcaaatactacaaataaaataaaaccctaccttaccttaccttccc

SEQ ID NO: 572 - DNA, 50 bp, synthetic construct
  source 1..50: mol_type = other DNA
tacttctcaactatacaaataaaaaatctttacaacacatcatccaaacc

SEQ ID NO: 573 - DNA, 50 bp, synthetic construct
  source 1..50: mol_type = other DNA
aaacaaatcacctaaatatcacacracaaaactacaaaactataaaaatc

SEQ ID NO: 574 - DNA, 50 bp, synthetic construct
  source 1..50: mol_type = other DNA
tcaatacacaactaaaaatcaaacractcttacaaccctataaccttacc

SEQ ID NO: 575 - DNA, 50 bp, synthetic construct
  source 1..50: mol_type = other DNA
accrtataacacccaaataacctatctctaccaaaatactaactatactc

SEQ ID NO: 576 - DNA, 50 bp, synthetic construct
  source 1..50: mol_type = other DNA
aataaaaaacacaatcctttataaactatacaacaaaaacacracaactc

SEQ ID NO: 577 - DNA, 50 bp, synthetic construct
  source 1..50: mol_type = other DNA
cacaatcctttataaactatacaacaaaaacacracaactcraaaataac

SEQ ID NO: 578 - DNA, 50 bp, synthetic construct
  source 1..50: mol_type = other DNA
craattaaataactatcccraactaaaaaaccracaactaccaatcccac

SEQ ID NO: 579 - DNA, 50 bp, synthetic construct
  source 1..50: mol_type = other DNA
cttaaaataaaataataacrtaaaactaacaattaccractctccaaccc

SEQ ID NO: 580 - DNA, 50 bp, synthetic construct
  source 1..50: mol_type = other DNA
cactatatcctaactatctctactacccataaaaaaacaaactaaaaaac

SEQ ID NO: 581 - DNA, 50 bp, synthetic construct
  source 1..50: mol_type = other DNA
aaacacaataaaacaaatcacaaaaaactcaaaatatcctccccaacccc

SEQ ID NO: 582 - DNA, 50 bp, synthetic construct
  source 1..50: mol_type = other DNA
aaacrccaacaaacactacttactataaataaaaaatatccaacctaaac

SEQ ID NO: 583 - DNA, 50 bp, synthetic construct
  source 1..50: mol_type = other DNA
ctaaacccaaatctctaaaccctataaacaaaaaatcraaacrcrtaaac

SEQ ID NO: 584 - DNA, 50 bp, synthetic construct
  source 1..50: mol_type = other DNA
taaactctaaacccaaatctctaaaccctataaacaaaaaatcraaacrc

SEQ ID NO: 585 - DNA, 50 bp, synthetic construct
  source 1..50: mol_type = other DNA
crtaaattaaactctaaacccaaatctctaaaccctataaacaaaaaatc

SEQ ID NO: 586 - DNA, 50 bp, synthetic construct
  source 1..50: mol_type = other DNA
taaaccaaaatcaaaacccraaacacaaaaatataacraaatacrtaaac

SEQ ID NO: 587 - DNA, 50 bp, synthetic construct
  source 1..50: mol_type = other DNA
aacacctaaaccaaaatcaaaacccraaacacaaaaatataacraaatac

SEQ ID NO: 588 - DNA, 50 bp, synthetic construct
  source 1..50: mol_type = other DNA
raaaaaaaacacctaaaccaaaatcaaaacccraaacacaaaaatataac

SEQ ID NO: 589 - DNA, 50 bp, synthetic construct
  source 1..50: mol_type = other DNA
aacctaaaaataccctaaaataaaacttaaaaacctaaaaacttaaaaac

SEQ ID NO: 590 - DNA, 50 bp, synthetic construct
  source 1..50: mol_type = other DNA
aactaaatatcccaaacacctaacaaaaacaaaaataaacctaaaaaaac

SEQ ID NO: 591 - DNA, 50 bp, synthetic construct
  source 1..50: mol_type = other DNA
acccraaaactatttctattactaataaaaaaaatacctctaatcctcac

SEQ ID NO: 592 - DNA, 50 bp, synthetic construct
  source 1..50: mol_type = other DNA
tcaaccrtaatcccracrtattcacaaattaataataacttaaaaaaacc

SEQ ID NO: 593 - DNA, 50 bp, synthetic construct
  source 1..50: mol_type = other DNA
aacaaaatctaaaacactcactactcaatatcaatattaaaaaacacaac

SEQ ID NO: 594 - DNA, 50 bp, synthetic construct
  source 1..50: mol_type = other DNA
aaaaaaacacaataataacttccccaaatcttaaaccacaaaacacaacc

SEQ ID NO: 595 - DNA, 50 bp, synthetic construct
  source 1..50: mol_type = other DNA
acccaaactatactatatactcaattattcaatatcracttaaacttaac

SEQ ID NO: 596 - DNA, 50 bp, synthetic construct
  source 1..50: mol_type = other DNA
acacaacacaacctaaatataaaatcaaactctatacctaaaattaaaac

SEQ ID NO: 597 - DNA, 50 bp, synthetic construct
  source 1..50: mol_type = other DNA
cacctaaaataaaaaattcaaaactaacctaaccaacataaaaaaacccc

SEQ ID NO: 598 - DNA, 50 bp, synthetic construct
  source 1..50: mol_type = other DNA
aactaacraataatctaaaaaccaaaacratctaaattaactaatacacc

SEQ ID NO: 599 - DNA, 50 bp, synthetic construct
  source 1..50: mol_type = other DNA
ctcctttaaatctcaacccaataactaacraataatctaaaaaccaaaac

SEQ ID NO: 600 - DNA, 50 bp, synthetic construct
  source 1..50: mol_type = other DNA
aaaatcrccaaatatttccctctcctttaaatctcaacccaataactaac

SEQ ID NO: 601 - DNA, 50 bp, synthetic construct
  source 1..50: mol_type = other DNA
ctactaataatctaattataaacacctttactattcaattccctaaaatc

SEQ ID NO: 602 - DNA, 50 bp, synthetic construct
  source 1..50: mol_type = other DNA
aaaaaactaaacaacaaaaatattcacaatcaaaccaccaacaaaaatac

SEQ ID NO: 603 - DNA, 50 bp, synthetic construct
  source 1..50: mol_type = other DNA
taacctcatcraacccatttatttatttcrttaactcacccaatctaacc

SEQ ID NO: 604 - DNA, 50 bp, synthetic construct
  source 1..50: mol_type = other DNA
cactaaaaaccaaaaacactccctacccttcaattataataatcaaaaac

SEQ ID NO: 605 - DNA, 50 bp, synthetic construct
  source 1..50: mol_type = other DNA
taaccccaaatatctataacactaccactaaaaaactattctcatccacc

SEQ ID NO: 606 - DNA, 50 bp, synthetic construct
  source 1..50: mol_type = other DNA
aacacctaccaatctactataacrataacraaataataaaaactatcatc

SEQ ID NO: 607 - DNA, 50 bp, synthetic construct
  source 1..50: mol_type = other DNA
aaaactcattatcacctataaaacacctaccaatctactataacrataac

SEQ ID NO: 608 - DNA, 50 bp, synthetic construct
  source 1..50: mol_type = other DNA
tcacaacaaactaataaatactttacaaataacaataaactttcacattc

SEQ ID NO: 609 - DNA, 50 bp, synthetic construct
  source 1..50: mol_type = other DNA
aaattcttaacctaccaaaccaataaaacatacaaaaaccacctatcccc

SEQ ID NO: 610 - DNA, 50 bp, synthetic construct
  source 1..50: mol_type = other DNA
tatcacctctacccaactctaaactctaaaatctccccaaataaatacac

SEQ ID NO: 611 - DNA, 50 bp, synthetic construct
  source 1..50: mol_type = other DNA
acaaaactaatacctaatcaaaatctaaaccctccacctcaaaacctacc

SEQ ID NO: 612 - DNA, 50 bp, synthetic construct
  source 1..50: mol_type = other DNA
tattccaataaaaatacraattttaaattaaaaacccrccttccaactcc

SEQ ID NO: 613 - DNA, 50 bp, synthetic construct
  source 1..50: mol_type = other DNA
rtaaaacacctcaaaaccccactaaaaccccaatattccaataaaaatac

SEQ ID NO: 614 - DNA, 50 bp, synthetic construct
  source 1..50: mol_type = other DNA
ataccatacraatcactaacatacataataccaatcatttttctccattc

SEQ ID NO: 615 - DNA, 50 bp, synthetic construct
  source 1..50: mol_type = other DNA
acttataaaaacraactatttaatacaaactctaaaaaacaataccatac

SEQ ID NO: 616 - DNA, 50 bp, synthetic construct
  source 1..50: mol_type = other DNA
acacatcaatactacaactacaactatctatctaacatacttataaaaac

SEQ ID NO: 617 - DNA, 50 bp, synthetic construct
  source 1..50: mol_type = other DNA
caaactaaaaaccttacrtaaaacaaaacttaactcaaccraaaaaccrc

SEQ ID NO: 618 - DNA, 50 bp, synthetic construct
  source 1..50: mol_type = other DNA
ctctcaatatatctattctacctaaccccttataaattatattaaaatac

SEQ ID NO: 619 - DNA, 50 bp, synthetic construct
  source 1..50: mol_type = other DNA
crttaattataatacactacaacaatataactatatcccaaacaaaatac

SEQ ID NO: 620 - DNA, 50 bp, synthetic construct
  source 1..50: mol_type = other DNA
crcatcctacttaaaacacaaccacactactacaatacaccacaaccaac

SEQ ID NO: 621 - DNA, 50 bp, synthetic construct
  source 1..50: mol_type = other DNA
aaacrctacatcccacaaactaaataaccttaaataactaaaacccaacc

SEQ ID NO: 622 - DNA, 50 bp, synthetic construct
  source 1..50: mol_type = other DNA
aaacractaaaccttaatcacccaaaatcacctaacctataaaatacaac

SEQ ID NO: 623 - DNA, 50 bp, synthetic construct
  source 1..50: mol_type = other DNA
ctataattttctcactatacctatcattacaccctcttaaacaaataatc

SEQ ID NO: 624 - DNA, 50 bp, synthetic construct
  source 1..50: mol_type = other DNA
ctcactatacctatcattacaccctcttaaacaaataatcracctctacc

SEQ ID NO: 625 - DNA, 50 bp, synthetic construct
  source 1..50: mol_type = other DNA
atacctattctctacctctaactacaaaaaaacaacttaatatttttccc

SEQ ID NO: 626 - DNA, 50 bp, synthetic construct
  source 1..50: mol_type = other DNA
cttacaaccaaaaacaaaaaacaaacacaaaattaaaatccaaaacaaac

SEQ ID NO: 627 - DNA, 50 bp, synthetic construct
  source 1..50: mol_type = other DNA
ctccraaattatctaacacttaaatacttaataaacraaaacttaaaccc

SEQ ID NO: 628 - DNA, 50 bp, synthetic construct
  source 1..50: mol_type = other DNA
aattcaatttcttcatctatacaataaaaacaataaaaatacctacctcc

SEQ ID NO: 629 - DNA, 50 bp, synthetic construct
  source 1..50: mol_type = other DNA
ctaaaaaatcccaaaacraataccaaatcrtaaaaaacaaccaacacccc

SEQ ID NO: 630 - DNA, 50 bp, synthetic construct
  source 1..50: mol_type = other DNA
ctatataaaaacaactacacrcctcttccrcttatataaaaacaaaaacc

SEQ ID NO: 631 - DNA, 50 bp, synthetic construct
  source 1..50: mol_type = other DNA
taaaatattaacaaaaccttttaactaataaatctctcccaaaataactc

SEQ ID NO: 632 - DNA, 50 bp, synthetic construct
  source 1..50: mol_type = other DNA
aaaaccttcttctaataactcatcttaaaaccaaaacraactacaaacac

SEQ ID NO: 633 - DNA, 50 bp, synthetic construct
  source 1..50: mol_type = other DNA
tttcatttacaattcttatttaaaatacttaccaaaaatacactcactac

SEQ ID NO: 634 - DNA, 50 bp, synthetic construct
  source 1..50: mol_type = other DNA
ataactacratataaaaacaaacacttcctacctaacaaaaaaccaccac

SEQ ID NO: 635 - DNA, 50 bp, synthetic construct
  source 1..50: mol_type = other DNA
aaaaacacrtaataatttcttaccaaacaaaaaatatttatttccacatc

SEQ ID NO: 636 - DNA, 50 bp, synthetic construct
  source 1..50: mol_type = other DNA
atactttctaactattactctctattataaatctaaacaacacaactaac

SEQ ID NO: 637 - DNA, 50 bp, synthetic construct
  source 1..50: mol_type = other DNA
aaaaaaaaccccctataaacttaactcccacctatacacatccaaaactc

SEQ ID NO: 638 - DNA, 50 bp, synthetic construct
  source 1..50: mol_type = other DNA
tctactaaaatacaaaaattaaacaaacatactaaccracrcctataatc

SEQ ID NO: 639 - DNA, 50 bp, synthetic construct
  source 1..50: mol_type = other DNA
acrctctctaaatataaaaacaaatattctaactaaacrcrataactcac

SEQ ID NO: 640 - DNA, 50 bp, synthetic construct
  source 1..50: mol_type = other DNA
aaaaacracttcctaactctaaacaccrtaattctatcctaacraaaaac

SEQ ID NO: 641 - DNA, 50 bp, synthetic construct
  source 1..50: mol_type = other DNA
aaaactcaaatactaaacrccaaaaaaacracttcctaactctaaacacc

SEQ ID NO: 642 - DNA, 50 bp, synthetic construct
  source 1..50: mol_type = other DNA
raaaataaaaacaatcaaaaaacracaatacratacaaaaacccccccac

SEQ ID NO: 643 - DNA, 50 bp, synthetic construct
  source 1..50: mol_type = other DNA
aaatcrtaataaaaattccacaactaaccrcrtaaaaaaacccttacacc

SEQ ID NO: 644 - DNA, 50 bp, synthetic construct
  source 1..50: mol_type = other DNA
caaccrcrattatcaaaactcaactaaactaaacrctactacctataaac

SEQ ID NO: 645 - DNA, 50 bp, synthetic construct
  source 1..50: mol_type = other DNA
rctactacctataaacrtttcctcctcatatattttttatcaacaacaac

SEQ ID NO: 646 - DNA, 50 bp, synthetic construct
  source 1..50: mol_type = other DNA
crtttcctcctcatatattttttatcaacaacaacractacaaaatcccc

SEQ ID NO: 647 - DNA, 50 bp, synthetic construct
  source 1..50: mol_type = other DNA
tatcaacaacaacractacaaaatccccrtactcaaaaattacctctatc

SEQ ID NO: 648 - DNA, 50 bp, synthetic construct
  source 1..50: mol_type = other DNA
tcctccaaaacrctaaacaaattaaccraataataaaaaactaatcaacc

SEQ ID NO: 649 - DNA, 50 bp, synthetic construct
  source 1..50: mol_type = other DNA
acccctaaaaaataaaccttctctcctccaaaacrctaaacaaattaacc

SEQ ID NO: 650 - DNA, 50 bp, synthetic construct
  source 1..50: mol_type = other DNA
taaatttcccaaaaaaacccctaaaaaataaaccttctctcctccaaaac

SEQ ID NO: 651 - DNA, 50 bp, synthetic construct
  source 1..50: mol_type = other DNA
ccctaaactaaacraacctaaataaacattctaactttccaaataccaac

SEQ ID NO: 652 - DNA, 50 bp, synthetic construct
  source 1..50: mol_type = other DNA
taaactcaaaataaaattacraaaactcaaccaactaccctaaactaaac

SEQ ID NO: 653 - DNA, 50 bp, synthetic construct
  source 1..50: mol_type = other DNA
aaaatcttcrcraaaaataaaattatcccaaaaaccccraacaaaacctc

SEQ ID NO: 654 - DNA, 50 bp, synthetic construct
  source 1..50: mol_type = other DNA
ataaaactcacratcracraatctcaaatataataaaacacaacattaac

SEQ ID NO: 655 - DNA, 50 bp, synthetic construct
  source 1..50: mol_type = other DNA
ccratacataaacaactcrctaatactatatttcatcacatctaaaaccc

SEQ ID NO: 656 - DNA, 50 bp, synthetic construct
  source 1..50: mol_type = other DNA
atacataaacaactcrctaatactatatttcatcacatctaaaacccrtc

SEQ ID NO: 657 - DNA, 50 bp, synthetic construct
  source 1..50: mol_type = other DNA
ataaacaactcrctaatactatatttcatcacatctaaaacccrtcracc

SEQ ID NO: 658 - DNA, 50 bp, synthetic construct
  source 1..50: mol_type = other DNA
accaacctaataacaaaaatcttaaaatataaatcacataactctaaatc

SEQ ID NO: 659 - DNA, 50 bp, synthetic construct
  source 1..50: mol_type = other DNA
ttaacccaatatccattaaataaactaatccaaaccaacaatcaaaaccc

SEQ ID NO: 660 - DNA, 50 bp, synthetic construct
  source 1..50: mol_type = other DNA
aaattcaaaaaaacattactaaaaaaaatcatcttacattccaacacacc

SEQ ID NO: 661 - DNA, 50 bp, synthetic construct
  source 1..50: mol_type = other DNA
actatatataaaataaatactttttttaatcaccccatccctcacccrcc

SEQ ID NO: 662 - DNA, 50 bp, synthetic construct
  source 1..50: mol_type = other DNA
tccactatatataaaataaatactttttttaatcaccccatccctcaccc

SEQ ID NO: 663 - DNA, 50 bp, synthetic construct
  source 1..50: mol_type = other DNA
cccattaaaaaatttataaaacaaacrctcttcccaaaccccaaaaaaac

SEQ ID NO: 664 - DNA, 50 bp, synthetic construct
  source 1..50: mol_type = other DNA
acacratacctaacacacaaaaaacccattaaaaaatttataaaacaaac

SEQ ID NO: 665 - DNA, 50 bp, synthetic construct
  source 1..50: mol_type = other DNA
aaacrtctatcccataaatcctccaataaaccttttatataccaaacacc

SEQ ID NO: 666 - DNA, 50 bp, synthetic construct
  source 1..50: mol_type = other DNA
taaacaaaaaatatatacactcttccaaaaaattacratattcaaaaaac

SEQ ID NO: 667 - DNA, 50 bp, synthetic construct
  source 1..50: mol_type = other DNA
ttactactaacacaacraaccacaaatataaccaaaactaaacrccaatc

SEQ ID NO: 668 - DNA, 50 bp, synthetic construct
  source 1..50: mol_type = other DNA
atactaaaaaacaacrtaatctaacaactaaaaaacaatattaaaaatcc

SEQ ID NO: 669 - DNA, 50 bp, synthetic construct
  source 1..50: mol_type = other DNA
taaacrccaatcracraattcccaatattatcttccaattactaaactac

SEQ ID NO: 670 - DNA, 50 bp, synthetic construct
  source 1..50: mol_type = other DNA
attcattacctcttcttaccaacttaatcaaaaaccaattaccttattac

SEQ ID NO: 671 - DNA, 50 bp, synthetic construct
  source 1..50: mol_type = other DNA
tataaaactaccaattaaatttaacaaaaaaatctccaaatatatcaatc

SEQ ID NO: 672 - DNA, 50 bp, synthetic construct
  source 1..50: mol_type = other DNA
atttcracaaaaaaatcaacaaacaacattcccactaaaatctaactaac

SEQ ID NO: 673 - DNA, 50 bp, synthetic construct
  source 1..50: mol_type = other DNA
ccatttcctaacaacrtaaaactcataatacrcraaaattatccaaaaac

SEQ ID NO: 674 - DNA, 50 bp, synthetic construct
  source 1..50: mol_type = other DNA
taattcttaaaaccctaccccatttcctaacaacrtaaaactcataatac

SEQ ID NO: 675 - DNA, 50 bp, synthetic construct
  source 1..50: mol_type = other DNA
accatcctaaaataaataattcttaaaaccctaccccatttcctaacaac

SEQ ID NO: 676 - DNA, 50 bp, synthetic construct
  source 1..50: mol_type = other DNA
cctttaaaaataacttccataacactctaaatcactctcataccacacac

SEQ ID NO: 677 - DNA, 50 bp, synthetic construct
  source 1..50: mol_type = other DNA
aataatcactccataaatatatattcttcataaatactctaaatacttac

SEQ ID NO: 678 - DNA, 50 bp, synthetic construct
  source 1..50: mol_type = other DNA
ctcaaaacttcaacaaacaaatcaataacactccaaccctttacaacttc

SEQ ID NO: 679 - DNA, 50 bp, synthetic construct
  source 1..50: mol_type = other DNA
acaatcaaaatctaaaacaactatctctaccctaacaacaatttccctac

SEQ ID NO: 680 - DNA, 50 bp, synthetic construct
  source 1..50: mol_type = other DNA
aaaatcacatataacacccaaataaaaaatcaactaatatcaaacaaaac

SEQ ID NO: 681 - DNA, 50 bp, synthetic construct
  source 1..50: mol_type = other DNA
aatactattttcaaaataaaaaccrcactaaaaactcctctactcccccc

SEQ ID NO: 682 - DNA, 50 bp, synthetic construct
  source 1..50: mol_type = other DNA
cratcctcactctaaaaacaacatttttccctaaacttaaaaatacctcc

SEQ ID NO: 683 - DNA, 50 bp, synthetic construct
  source 1..50: mol_type = other DNA
aactattcctacactaactaaaatataaacacttatcctttctcttcctc

SEQ ID NO: 684 - DNA, 50 bp, synthetic construct
  source 1..50: mol_type = other DNA
aaaacctatccaaatccatataaaatccctactcccaaaaacaactaaac

SEQ ID NO: 685 - DNA, 50 bp, synthetic construct
  source 1..50: mol_type = other DNA
atacaacttatctccctaacctataataaaacccrtaaccacttaaaaac

SEQ ID NO: 686 - DNA, 50 bp, synthetic construct
  source 1..50: mol_type = other DNA
attaacacractcaaaatacaacttatctccctaacctataataaaaccc

SEQ ID NO: 687 - DNA, 50 bp, synthetic construct
  source 1..50: mol_type = other DNA
ataatcacraacctcaccataaaccaaaaaaacaaactacactttaaacc

SEQ ID NO: 688 - DNA, 50 bp, synthetic construct
  source 1..50: mol_type = other DNA
accaaaaaaacaaactacactttaaaccrtattaacaaccctacttcccc

SEQ ID NO: 689 - DNA, 50 bp, synthetic construct
  source 1..50: mol_type = other DNA
caactcaactcraaataaatcaactccraaaaaaaccatatcctaaaacc

SEQ ID NO: 690 - DNA, 50 bp, synthetic construct
  source 1..50: mol_type = other DNA
aaacrtaataactaaatactaaatcacratcccaaaatataactcccctc

SEQ ID NO: 691 - DNA, 50 bp, synthetic construct
  source 1..50: mol_type = other DNA
aaactaaactatctatttaaaaatttctcaaaaaaccaaaaaaaccaaac

SEQ ID NO: 692 - DNA, 50 bp, synthetic construct
  source 1..50: mol_type = other DNA
taaacrctccccacttctccaaaaaacaactatatcctaactaccaaaac

SEQ ID NO: 693 - DNA, 50 bp, synthetic construct
  source 1..50: mol_type = other DNA
tatatcctaactaccaaaacrtaaactctaaataaaacctaaaccttccc

SEQ ID NO: 694 - DNA, 50 bp, synthetic construct
  source 1..50: mol_type = other DNA
tcrtacttaaacacctacaccaactacaacaaatactaaaacaactcatc

SEQ ID NO: 695 - DNA, 50 bp, synthetic construct
  source 1..50: mol_type = other DNA
acctactacaactaatacaaatactcaaatacraatcctacctaaactac

SEQ ID NO: 696 - DNA, 50 bp, synthetic construct
  source 1..50: mol_type = other DNA
caaatacraatcctacctaaactacraactaaccaaattcctactaaacc

SEQ ID NO: 697 - DNA, 50 bp, synthetic construct
  source 1..50: mol_type = other DNA
caaaaaaactcaaaaactaaaattcccacaaaacractaaaacaaatccc

SEQ ID NO: 698 - DNA, 50 bp, synthetic construct
  source 1..50: mol_type = other DNA
rtccccaataaccttccaaaaaaactcaaaaactaaaattcccacaaaac

SEQ ID NO: 699 - DNA, 50 bp, synthetic construct
  source 1..50: mol_type = other DNA
rttctataaaaatcccaacccctaaatctccctaaaaaaccactaaaaac

SEQ ID NO: 700 - DNA, 50 bp, synthetic construct
  source 1..50: mol_type = other DNA
cctaaaaaaccactaaaaacrtttccaacaaacctaaatatcctaacctc

SEQ ID NO: 701 - DNA, 50 bp, synthetic construct
  source 1..50: mol_type = other DNA
aaacctaaatatcctaacctcrctaaatcctactaaacraaaaaaactac

SEQ ID NO: 702 - DNA, 50 bp, synthetic construct
  source 1..50: mol_type = other DNA
catataataaatactacccctacaataaacctccaaaataaaaccraaac

SEQ ID NO: 703 - DNA, 50 bp, synthetic construct
  source 1..50: mol_type = other DNA
accttcatataataaatactacccctacaataaacctccaaaataaaacc

SEQ ID NO: 704 - DNA, 50 bp, synthetic construct
  source 1..50: mol_type = other DNA
accacataaaaatactaataaaacaaataaaacccaaaaccctaaaaaac

SEQ ID NO: 705 - DNA, 50 bp, synthetic construct
  source 1..50: mol_type = other DNA
taaacrtctaaaaatccccaaaactaaatcraaactaaaacctacccacc

SEQ ID NO: 706 - DNA, 50 bp, synthetic construct
  source 1..50: mol_type = other DNA
aaaaccttcaatttactcaatacttccccctaataaacaaataaaaaaac

SEQ ID NO: 707 - DNA, 50 bp, synthetic construct
  source 1..50: mol_type = other DNA
ctattaatttctcaaaaatcttccaaaactcaacaaaaccaaaaataacc

SEQ ID NO: 708 - DNA, 50 bp, synthetic construct
  source 1..50: mol_type = other DNA
taatttctcaaaaatcttccaaaactcaacaaaaccaaaaataaccrccc

SEQ ID NO: 709 - DNA, 50 bp, synthetic construct
  source 1..50: mol_type = other DNA
taactactaacraacccctaataaatcaaaacaaaactaacacctaaacc

SEQ ID NO: 710 - DNA, 50 bp, synthetic construct
  source 1..50: mol_type = other DNA
aaatttcaacacttactaaaaacaaacrtataaccaaaaaaataccccrc

SEQ ID NO: 711 - DNA, 50 bp, synthetic construct
  source 1..50: mol_type = other DNA
ataaatttcaacacttactaaaaacaaacrtataaccaaaaaaatacccc

SEQ ID NO: 712 - DNA, 50 bp, synthetic construct
  source 1..50: mol_type = other DNA
tcraaacaaacaaacratctaataaatttcaacacttactaaaaacaaac

SEQ ID NO: 713 - DNA, 50 bp, synthetic construct
  source 1..50: mol_type = other DNA
aaatacrcctatatacrcraatataaaaacacactttacaaaaccacaac

SEQ ID NO: 714 - DNA, 50 bp, synthetic construct
  source 1..50: mol_type = other DNA
acaaaaccacaacrtttctaattttaaatatacaatcttatatacctaac

SEQ ID NO: 715 - DNA, 50 bp, synthetic construct
  source 1..50: mol_type = other DNA
tctctcctattttaattttaaacctacactcccttatttctttttaaacc

SEQ ID NO: 716 - DNA, 50 bp, synthetic construct
  source 1..50: mol_type = other DNA
aatatatccrctacaataaaattctaattctaactaactccaaccraaac

SEQ ID NO: 717 - DNA, 50 bp, synthetic construct
  source 1..50: mol_type = other DNA
caaaaaatatatccrctacaataaaattctaattctaactaactccaacc

SEQ ID NO: 718 - DNA, 50 bp, synthetic construct
  source 1..50: mol_type = other DNA
raatacactttctaacctatcataaatatacacatctacraaaaaaaacc

SEQ ID NO: 719 - DNA, 50 bp, synthetic construct
  source 1..50: mol_type = other DNA
atacactttctaacctatcataaatatacacatctacraaaaaaaaccrc

SEQ ID NO: 720 - DNA, 50 bp, synthetic construct
  source 1..50: mol_type = other DNA
aacccaaaaaccacaaccctaacctcttaaacttatcaaaaacttttacc

SEQ ID NO: 721 - DNA, 50 bp, synthetic construct
  source 1..50: mol_type = other DNA
aaaattataactcctaaactaaactccaaaaaatcccttaataaaaaaac

SEQ ID NO: 722 - DNA, 50 bp, synthetic construct
  source 1..50: mol_type = other DNA
aaccraaatacaaaaaacccaacaactactaaacaataaataaaaacrac

SEQ ID NO: 723 - DNA, 50 bp, synthetic construct
  source 1..50: mol_type = other DNA
caccttatcctaattataacctactaaataaaaactttacctataaatcc

SEQ ID NO: 724 - DNA, 50 bp, synthetic construct
  source 1..50: mol_type = other DNA
tatccaaaatactccctaaaaaaactataaactcacacaataacrataac

SEQ ID NO: 725 - DNA, 50 bp, synthetic construct
  source 1..50: mol_type = other DNA
tactaaaaactatataccacatatttttaatattaaaatcacccrccacc

SEQ ID NO: 726 - DNA, 50 bp, synthetic construct
  source 1..50: mol_type = other DNA
ttaaaataatttaactcaacaacttaacaccttcattaattttacaacac

SEQ ID NO: 727 - DNA, 50 bp, synthetic construct
  source 1..50: mol_type = other DNA
tcatattaaaaaattaaactacttatctttccttaatatctcttaaaatc

SEQ ID NO: 728 - DNA, 50 bp, synthetic construct
  source 1..50: mol_type = other DNA
ttatctttccttaatatctcttaaaatcraacacccaactcttaccactc

SEQ ID NO: 729 - DNA, 50 bp, synthetic construct
  source 1..50: mol_type = other DNA
aaacaaacraactaactacaaattaaaaatttaaccaacrtaccaaaaac

SEQ ID NO: 730 - DNA, 50 bp, synthetic construct
  source 1..50: mol_type = other DNA
ctataaaaaaataataatttccataaatatccrtctccctctaacracac

SEQ ID NO: 731 - DNA, 50 bp, synthetic construct
  source 1..50: mol_type = other DNA
aactactataaaaaaataataatttccataaatatccrtctccctctaac

SEQ ID NO: 732 - DNA, 50 bp, synthetic construct
  source 1..50: mol_type = other DNA
ttccaaacaaccrattaataacraatttaaaaataaaccccaaacctacc

SEQ ID NO: 733 - DNA, 50 bp, synthetic construct
  source 1..50: mol_type = other DNA
ccccaaaactactcaaaacttatcaaaattccaaacaaccrattaataac

SEQ ID NO: 734 - DNA, 50 bp, synthetic construct
  source 1..50: mol_type = other DNA
aaaactaaaaccccaaaactactcaaaacttatcaaaattccaaacaacc

SEQ ID NO: 735 - DNA, 50 bp, synthetic construct
  source 1..50: mol_type = other DNA
ttaatataatatctaacacacaataaaacactccrtaaataataattatc

SEQ ID NO: 736 - DNA, 50 bp, synthetic construct
  source 1..50: mol_type = other DNA
attaactataaaccttttaatataatatctaacacacaataaaacactcc

SEQ ID NO: 737 - DNA, 50 bp, synthetic construct
  source 1..50: mol_type = other DNA
atcacaaaatcaaaaaattaaaaccatcctaactaacacrataaaaaccc

SEQ ID NO: 738 - DNA, 50 bp, synthetic construct
  source 1..50: mol_type = other DNA
aacctaaaaacaccctctaataaaaattattaataaaacaaaaaccatac

SEQ ID NO: 739 - DNA, 50 bp, synthetic construct
  source 1..50: mol_type = other DNA
aaatatctccaaactttataaaaaaactacccaatttaacctcctatccc

SEQ ID NO: 740 - DNA, 50 bp, synthetic construct
  source 1..50: mol_type = other DNA
tatcccraaaaaaccctaataactaaacaaaatattatcctactttcttc

SEQ ID NO: 741 - DNA, 50 bp, synthetic construct
  source 1..50: mol_type = other DNA
craaaaaaccctaataactaaacaaaatattatcctactttcttcrtctc

SEQ ID NO: 742 - DNA, 50 bp, synthetic construct
  source 1..50: mol_type = other DNA
actattaatacctaaatacctctaacttaaaacccaataacttttatttc

SEQ ID NO: 743 - DNA, 50 bp, synthetic construct
  source 1..50: mol_type = other DNA
aaaacratctacrttcaataaaaaccatatttccaatccccaatataacc

SEQ ID NO: 744 - DNA, 50 bp, synthetic construct
  source 1..50: mol_type = other DNA
aataatctaacataatttatctactttccaacaatacraaaacratctac

SEQ ID NO: 745 - DNA, 50 bp, synthetic construct
  source 1..50: mol_type = other DNA
ctccccaacttacaataatctaacataatttatctactttccaacaatac

SEQ ID NO: 746 - DNA, 50 bp, synthetic construct
  source 1..50: mol_type = other DNA
aaaataccacrtaaaaatctattatatccttccataaccaaaaataaatc

SEQ ID NO: 747 - DNA, 50 bp, synthetic construct
  source 1..50: mol_type = other DNA
aaatctattatatccttccataaccaaaaataaatcrtaacaaaaactcc

SEQ ID NO: 748 - DNA, 50 bp, synthetic construct
  source 1..50: mol_type = other DNA
cataaccaaaaataaatcrtaacaaaaactccrattcctttaaaaatacc

SEQ ID NO: 749 - DNA, 50 bp, synthetic construct
  source 1..50: mol_type = other DNA
accccaactaataaaaataaatacaatatcaatatctaaaccacaaaaac

SEQ ID NO: 750 - DNA, 50 bp, synthetic construct
  source 1..50: mol_type = other DNA
aaaaacctaactccaaaaccctaacrtataaccacacaacaaaaaaatcc

SEQ ID NO: 751 - DNA, 50 bp, synthetic construct
  source 1..50: mol_type = other DNA
tatccttctcatttcaaccctaaccraatttttctactatataattacac

SEQ ID NO: 752 - DNA, 50 bp, synthetic construct
  source 1..50: mol_type = other DNA
ctatataattacacrtcaaaatcctaaaaccaaacttcctaaatcccacc

SEQ ID NO: 753 - DNA, 50 bp, synthetic construct
  source 1..50: mol_type = other DNA
ttcttattcctatttacacttaaacaactaaaatcaacaaaaataaaacc

SEQ ID NO: 754 - DNA, 50 bp, synthetic construct
  source 1..50: mol_type = other DNA
atatctatatacaaacatatacttacacccatcaactataaactcccaac

SEQ ID NO: 755 - DNA, 50 bp, synthetic construct
  source 1..50: mol_type = other DNA
acacacacrcacccaataaatacaaataaacacctacctctatcaaacac

SEQ ID NO: 756 - DNA, 50 bp, synthetic construct
  source 1..50: mol_type = other DNA
ataaacatataaacaaaaatctctaattttcctaaacaaaaaaccctacc

SEQ ID NO: 757 - DNA, 50 bp, synthetic construct
  source 1..50: mol_type = other DNA
actacttcctattcrtaattttaaaacataaatcatcaaaaaactaaccc

SEQ ID NO: 758 - DNA, 50 bp, synthetic construct
  source 1..50: mol_type = other DNA
rtaattttaaaacataaatcatcaaaaaactaacccracacattcaaaac

SEQ ID NO: 759 - DNA, 50 bp, synthetic construct
  source 1..50: mol_type = other DNA
taacctcaaaatcccaataaaaatctatcttacaaaattacttaaacaac

SEQ ID NO: 760 - DNA, 50 bp, synthetic construct
  source 1..50: mol_type = other DNA
raaaacaaccratctatccactaacaattattaaacacctactatatacc

SEQ ID NO: 761 - DNA, 50 bp, synthetic construct
  source 1..50: mol_type = other DNA
taaaatacccratacacaataaatattcaataactatcaataaacaaacc

SEQ ID NO: 762 - DNA, 50 bp, synthetic construct
  source 1..50: mol_type = other DNA
ratacacaataaatattcaataactatcaataaacaaaccractatcctc

SEQ ID NO: 763 - DNA, 50 bp, synthetic construct
  source 1..50: mol_type = other DNA
caataaatattcaataactatcaataaacaaaccractatcctcrcacac

SEQ ID NO: 764 - DNA, 50 bp, synthetic construct
  source 1..50: mol_type = other DNA
ccttcatcctatatttaatccttattcacttcaactttatcaaacccccc

SEQ ID NO: 765 - DNA, 50 bp, synthetic construct
  source 1..50: mol_type = other DNA
aaaactcttctcaacataaaactctcacactactaaactatataataccc

SEQ ID NO: 766 - DNA, 50 bp, synthetic construct
  source 1..50: mol_type = other DNA
tattaattacttacacraccctcrcctctcttaataattataatactaac

SEQ ID NO: 767 - DNA, 50 bp, synthetic construct
  source 1..50: mol_type = other DNA
aaactattaacataacacttactccratattaattacttacacraccctc

SEQ ID NO: 768 - DNA, 50 bp, synthetic construct
  source 1..50: mol_type = other DNA
crtctacaaactattaacataacacttactccratattaattacttacac

SEQ ID NO: 769 - DNA, 50 bp, synthetic construct
  source 1..50: mol_type = other DNA
aaacaaaataacataatacrtctacaaactattaacataacacttactcc

SEQ ID NO: 770 - DNA, 50 bp, synthetic construct
  source 1..50: mol_type = other DNA
aaaaccacccttaaccacaccccaacaaactaaacaaaataacataatac

SEQ ID NO: 771 - DNA, 50 bp, synthetic construct
  source 1..50: mol_type = other DNA
cccacraaaccctatccctttaaaaccttccatttatctcctaaatactc

SEQ ID NO: 772 - DNA, 50 bp, synthetic construct
  source 1..50: mol_type = other DNA
rtattaaccaaaataatcttaatctcctaaccttataatccrcctacctc

SEQ ID NO: 773 - DNA, 50 bp, synthetic construct
  source 1..50: mol_type = other DNA
acaataaaaaacttaacacctaaaccaacaactactatactcratttctc

SEQ ID NO: 774 - DNA, 50 bp, synthetic construct
  source 1..50: mol_type = other DNA
attatatataataaaatttataactatcacaccaatccccataaaattac

SEQ ID NO: 775 - DNA, 50 bp, synthetic construct
  source 1..50: mol_type = other DNA
taacaaccacaaatttcactacacacaatattccacaaactttcactacc

SEQ ID NO: 776 - DNA, 50 bp, synthetic construct
  source 1..50: mol_type = other DNA
cacaaatttcactacacacaatattccacaaactttcactaccrccattc

SEQ ID NO: 777 - DNA, 50 bp, synthetic construct
  source 1..50: mol_type = other DNA
cttacaaaaacacaaaccaaaatatatttatacaactccracatattatc

SEQ ID NO: 778 - DNA, 50 bp, synthetic construct
  source 1..50: mol_type = other DNA
tcttcttatcacttacaaaaacacaaaccaaaatatatttatacaactcc

SEQ ID NO: 779 - DNA, 50 bp, synthetic construct
  source 1..50: mol_type = other DNA
cacaaacatatcctaacttatacttctacaaataacaaaaaaaaatacac

SEQ ID NO: 780 - DNA, 50 bp, synthetic construct
  source 1..50: mol_type = other DNA
ctaaaaaaaacccaataccattaaaacaaactatacaacccaaaaataac

SEQ ID NO: 781 - DNA, 50 bp, synthetic construct
  source 1..50: mol_type = other DNA
tttactaaactcaacactaaaattaaaccttttaaactatcccattcrtc

SEQ ID NO: 782 - DNA, 50 bp, synthetic construct
  source 1..50: mol_type = other DNA
cattttactaaactcaacactaaaattaaaccttttaaactatcccattc

SEQ ID NO: 783 - DNA, 50 bp, synthetic construct
  source 1..50: mol_type = other DNA
taatacaaaaaacaattcttcaaaaaaacaaatctacaaaacaaaaaacc

SEQ ID NO: 784 - DNA, 50 bp, synthetic construct
  source 1..50: mol_type = other DNA
cttaaaaaatacttataaatcatcctctcacatctacccttactataatc

SEQ ID NO: 785 - DNA, 50 bp, synthetic construct
  source 1..50: mol_type = other DNA
acccttactataatcraaaattcacttacattaaaaacctaaataaacac

SEQ ID NO: 786 - DNA, 50 bp, synthetic construct
  source 1..50: mol_type = other DNA
cttactataatcraaaattcacttacattaaaaacctaaataaacacrcc

SEQ ID NO: 787 - DNA, 50 bp, synthetic construct
  source 1..50: mol_type = other DNA
taaacactcatcacctacaaataataacaaaaacaataacaacaaccacc

SEQ ID NO: 788 - DNA, 50 bp, synthetic construct
  source 1..50: mol_type = other DNA
aaaataaaacttaaataaaacctaaactacraactctaatcttacccaac

SEQ ID NO: 789 - DNA, 50 bp, synthetic construct
  source 1..50: mol_type = other DNA
raaaattaaaatacaaaacatacaaactccrttaaacaaaaccaaaaccc

SEQ ID NO: 790 - DNA, 50 bp, synthetic construct
  source 1..50: mol_type = other DNA
caactttaaattttttcccctcaacataaattattttaaccattcttatc

SEQ ID NO: 791 - DNA, 50 bp, synthetic construct
  source 1..50: mol_type = other DNA
tttactttataaaacaactttacttttctataccctcacrtacaaactcc

SEQ ID NO: 792 - DNA, 50 bp, synthetic construct
  source 1..50: mol_type = other DNA
ccaaaaatcattctactcaactttccaacaaaacatcacraaacctacac

SEQ ID NO: 793 - DNA, 50 bp, synthetic construct
  source 1..50: mol_type = other DNA
cactccrctctctaaattttatattaaaccratctattcttttcttactc

SEQ ID NO: 794 - DNA, 50 bp, synthetic construct
  source 1..50: mol_type = other DNA
ctctctcttattctcactcaaatcaacaacaactaccaactaaaaactcc

SEQ ID NO: 795 - DNA, 50 bp, synthetic construct
  source 1..50: mol_type = other DNA
ctacaaaaacaaacaaacctccttaaactataataaactccacccaattc

SEQ ID NO: 796 - DNA, 50 bp, synthetic construct; identical to SEQ ID NO: 795
  source 1..50: mol_type = other DNA

SEQ ID NO: 797 - DNA, 50 bp, synthetic construct
  source 1..50: mol_type = other DNA
aaaaacactcacaccctcaaatatatacccataattccatcccaaattcc

SEQ ID NO: 798 - DNA, 50 bp, synthetic construct
  source 1..50: mol_type = other DNA
caccctcaaatatatacccataattccatcccaaattccraaaaatcaac

SEQ ID NO: 799 - DNA, 50 bp, synthetic construct
  source 1..50: mol_type = other DNA
tcaatacccaaaacaaaactaacaaaccacacraccaaaaaaacaaaatc

SEQ ID NO: 800 - DNA, 50 bp, synthetic construct
  source 1..50: mol_type = other DNA
ataataaaaaaacacaaatcaatacccaaaacaaaactaacaaaccacac

SEQ ID NO: 801 - DNA, 50 bp, synthetic construct
  source 1..50: mol_type = other DNA
caacctcracaaacacataaattctccaactaactcaaaaacaacaaaac

SEQ ID NO: 802 - DNA, 50 bp, synthetic construct
  source 1..50: mol_type = other DNA
atatcrcrctctactacctctaaatcaactaaaaaattcatatacctacc

SEQ ID NO: 803 - DNA, 50 bp, synthetic construct
  source 1..50: mol_type = other DNA
aaaaaaaacacacttttttcttccctataattcraataactacaaattac

SEQ ID NO: 804 - DNA, 50 bp, synthetic construct
  source 1..50: mol_type = other DNA
aaaaatacaacccraaactaaactaaaccataaaaacaaatccaaacccc

SEQ ID NO: 805 - DNA, 50 bp, synthetic construct
  source 1..50: mol_type = other DNA
aaatatctaaaatattaacaaaacccaaacccctccaactacractctcc

SEQ ID NO: 806 - DNA, 50 bp, synthetic construct
  source 1..50: mol_type = other DNA
ccacatcccaaatcaaaaaacacctaaacttctaaaactttcccaacacc

SEQ ID NO: 807 - DNA, 50 bp, synthetic construct
  source 1..50: mol_type = other DNA
tttatactaactcactacatctaaaaaaatctattaataacttaaaacac

SEQ ID NO: 808 - DNA, 50 bp, synthetic construct
  source 1..50: mol_type = other DNA
ctttctataaaacrttcccaatcactaactcaccctaaaaaaaacaatac

SEQ ID NO: 809 - DNA, 50 bp, synthetic construct
  source 1..50: mol_type = other DNA
cctaaaaccctcttataaaaaacaaatttatctactcctttctataaaac

SEQ ID NO: 810 - DNA, 50 bp, synthetic construct
  source 1..50: mol_type = other DNA
taactctaataaaaataatccccaaatatctataacttttatcataaacc

SEQ ID NO: 811 - DNA, 50 bp, synthetic construct
  source 1..50: mol_type = other DNA
ttcaaatataaaataatttacactatatataactaacatactcctacctc

SEQ ID NO: 812 - DNA, 50 bp, synthetic construct
  source 1..50: mol_type = other DNA
ctatccaaaactccaaaataataaaacaaatcattccttaaaaaataacc

SEQ ID NO: 813 - DNA, 50 bp, synthetic construct
  source 1..50: mol_type = other DNA
caacaacaactaatactcaacataaatcaaatacattcctaaactcaccc

SEQ ID NO: 814 - DNA, 50 bp, synthetic construct
  source 1..50: mol_type = other DNA
aaaaaccctaaataaactaaactaaaccracattaccrattaacatatcc

SEQ ID NO: 815 - DNA, 50 bp, synthetic construct
  source 1..50: mol_type = other DNA
aacaacaaaaacttaacaatatcaacaatacaataccaacaatacraccc

SEQ ID NO: 816 - DNA, 50 bp, synthetic construct
  source 1..50: mol_type = other DNA
aaccaaaactaattaatataactcraaatctaaatcactcctattccaac

SEQ ID NO: 817 - DNA, 50 bp, synthetic construct
  source 1..50: mol_type = other DNA
aacrccacacaacaaaccaataattaaaccaaaactaattaatataactc

SEQ ID NO: 818 - DNA, 50 bp, synthetic construct
  source 1..50: mol_type = other DNA
ttaatcttaactcaaccactaacctactatataacrttaaacaaacctac

SEQ ID NO: 819 - DNA, 50 bp, synthetic construct
  source 1..50: mol_type = other DNA
ataactaaaatatacccaataaatccccaatttataaataaaacaataac

SEQ ID NO: 820 - DNA, 50 bp, synthetic construct
  source 1..50: mol_type = other DNA
ccactaaacacatttcaatcatatttaaatcaaatttcctctctcaaacc

SEQ ID NO: 821 - DNA, 50 bp, synthetic construct
  source 1..50: mol_type = other DNA
ctaaacacatttcaatcatatttaaatcaaatttcctctctcaaaccrac

SEQ ID NO: 822 - DNA, 50 bp, synthetic construct
  source 1..50: mol_type = other DNA
atatttaaatcaaatttcctctctcaaaccracratttcaaaaatatcac

SEQ ID NO: 823 - DNA, 50 bp, synthetic construct
  source 1..50: mol_type = other DNA
ctcttataatcatttattacaataatcacaaaaaaccacaatttcacacc

SEQ ID NO: 824 - DNA, 50 bp, synthetic construct
  source 1..50: mol_type = other DNA
aaacacaattttcaaaatctaataacattaaaactaatacaataactcac

SEQ ID NO: 825 - DNA, 50 bp, synthetic construct
  source 1..50: mol_type = other DNA
atttattatataatactattataacaataactatcaaaataatataaccc

SEQ ID NO: 826 - DNA, 50 bp, synthetic construct
  source 1..50: mol_type = other DNA
aaaaactctatctacaactattaaaactcttacaattatacacctccccc

SEQ ID NO: 827 - DNA, 50 bp, synthetic construct
  source 1..50: mol_type = other DNA
actacaaataaaatttttcaaaccctccctaactatttacctcccaaaac

SEQ ID NO: 828 - DNA, 50 bp, synthetic construct
  source 1..50: mol_type = other DNA
accataacatacccaccataataaaaacccraaaaccatatcttaatcac

SEQ ID NO: 829 - DNA, 50 bp, synthetic construct
  source 1..50: mol_type = other DNA
aaataataactcactctctcctttacacacrtaactaaaatataactccc

SEQ ID NO: 830 - DNA, 50 bp, synthetic construct
  source 1..50: mol_type = other DNA
ataatcrttaaaaatacatatatttaatcaaacctaattcaaaacccaac

SEQ ID NO: 831 - DNA, 50 bp, synthetic construct
  source 1..50: mol_type = other DNA
ctaattcaaaacccaacracacccttatcacctataacctaaactaaatc

SEQ ID NO: 832 - DNA, 50 bp, synthetic construct
  source 1..50: mol_type = other DNA
tttacatcaaattctcacaaaaaacctataaaacracataaacataaacc

SEQ ID NO: 833 - DNA, 50 bp, synthetic construct
  source 1..50: mol_type = other DNA
acacrataccaaatattttacatcaaattctcacaaaaaacctataaaac

SEQ ID NO: 834 - DNA, 50 bp, synthetic construct
  source 1..50: mol_type = other DNA
taccrcttcataaacttcttataaaaatctaatacaaaacacctaacatc

SEQ ID NO: 835 - DNA, 50 bp, synthetic construct
  source 1..50: mol_type = other DNA
caaccatacacaatacaaatatcccaaccttacacccaaataaaccccac

SEQ ID NO: 836 - DNA, 50 bp, synthetic construct
  source 1..50: mol_type = other DNA
aaaactcacctaaatacaaaactaaaacatctacactatacataattaac

SEQ ID NO: 837 - DNA, 50 bp, synthetic construct
  source 1..50: mol_type = other DNA
atatataccaaccccaccaaccttaatttctcaaacatactaatctattc

SEQ ID NO: 838 - DNA, 50 bp, synthetic construct
  source 1..50: mol_type = other DNA
aaaccaacatacttaaaaaactaaaattaataaaactaacacacaccaac

SEQ ID NO: 839 - DNA, 50 bp, synthetic construct
  source 1..50: mol_type = other DNA
tattctaaatactataacaataaacaaaaactacaatcaactaaaaacac

SEQ ID NO: 840 - DNA, 50 bp, synthetic construct
  source 1..50: mol_type = other DNA
atactataacaataaacaaaaactacaatcaactaaaaacacrccactac

SEQ ID NO: 841 - DNA, 50 bp, synthetic construct
  source 1..50: mol_type = other DNA
tcctaaacctatcctactaaaactcttccaaacactcttatataaataac

SEQ ID NO: 842 - DNA, 50 bp, synthetic construct
  source 1..50: mol_type = other DNA
aaaaactactattacctaacraccttctccctaaacatcacaaaaaaatc

SEQ ID NO: 843 - DNA, 50 bp, synthetic construct
  source 1..50: mol_type = other DNA
ccaaaccraaccraacaaaatttcttaaatatccttaaatctatatctac

SEQ ID NO: 844 - DNA, 50 bp, synthetic construct
  source 1..50: mol_type = other DNA
aacaaacacaacrataaaaccccacaataaccaaacaattaaacaaacac

SEQ ID NO: 845 - DNA, 50 bp, synthetic construct
  source 1..50: mol_type = other DNA
caaacacrcttacaaccatctatccaacctctcctattattaaaacaaac

SEQ ID NO: 846 - DNA, 50 bp, synthetic construct
  source 1..50: mol_type = other DNA
ctactctataaataaaaaaatataacccctactcccctaatataacttac

SEQ ID NO: 847 - DNA, 50 bp, synthetic construct
  source 1..50: mol_type = other DNA
ctataaaaaacrataaacaaccaaataaacataaaacaattccaaataac

SEQ ID NO: 848 - DNA, 50 bp, synthetic construct
  source 1..50: mol_type = other DNA
tccttccaaattaatctctaataattaactcaaaaataactataaaaaac

SEQ ID NO: 849 - DNA, 50 bp, synthetic construct
  source 1..50: mol_type = other DNA
ctctaatcttcatacacccacaaaacaatttctaatactataattaatac

SEQ ID NO: 850 - DNA, 50 bp, synthetic construct
  source 1..50: mol_type = other DNA
aaattttaatcaaaataaatcccactctctactctaaactaccacaaccc

SEQ ID NO: 851 - DNA, 50 bp, synthetic construct
  source 1..50: mol_type = other DNA
ctaaatcaaacatttcttaacttattaaaatataccacccacacttcccc

SEQ ID NO: 852 - DNA, 50 bp, synthetic construct
  source 1..50: mol_type = other DNA
ttaacttattaaaatataccacccacacttccccraaacaatcttataac

SEQ ID NO: 853 - DNA, 50 bp, synthetic construct
  source 1..50: mol_type = other DNA
ctctcctatccctactactaatttttcrattatactcaaacaccaaaacc

SEQ ID NO: 854 - DNA, 50 bp, synthetic construct
  source 1..50: mol_type = other DNA
ctaaaataaactaaactaacttttcccraccctaatacctaaacacaacc

SEQ ID NO: 855 - DNA, 50 bp, synthetic construct
  source 1..50: mol_type = other DNA
aaatccacraactctaaaacctctatctcaaaaacatattcccaaaccac

SEQ ID NO: 856 - DNA, 50 bp, synthetic construct
  source 1..50: mol_type = other DNA
tctaaaacrtaatctaaaaacatacctttaaaacaaaaacctcaaaatcc

SEQ ID NO: 857 - DNA, 50 bp, synthetic construct
  source 1..50: mol_type = other DNA
attcttaatttttaaacaaaaaaccccacatttttattttatcctaaatc

SEQ ID NO: 858 - DNA, 50 bp, synthetic construct
  source 1..50: mol_type = other DNA
ctcatcractaaataaaaaatctactctaaaactctccacttaaatcccc

SEQ ID NO: 859 - DNA, 50 bp, synthetic construct
  source 1..50: mol_type = other DNA
cttcctattactaaaccrcatataacccaataacaactaaaatttcatac

SEQ ID NO: 860 - DNA, 50 bp, synthetic construct
  source 1..50: mol_type = other DNA
aaaactacaaaaaacacrcataaaatctcaactattactaaattacatac

SEQ ID NO: 861 - DNA, 50 bp, synthetic construct
  source 1..50: mol_type = other DNA
cacatatacaaacaataacttccacacaactcacataaaatcttacacac

SEQ ID NO: 862 - DNA, 50 bp, synthetic construct
  source 1..50: mol_type = other DNA
acctcccrtttaaacttaaatccraaacaaaatacaaacraactaaaacc

SEQ ID NO: 863 - DNA, 50 bp, synthetic construct
  source 1..50: mol_type = other DNA
tctaaaccttttccctattaccccaaaaaaacttcraactcctaacaacc

SEQ ID NO: 864 - DNA, 50 bp, synthetic construct
  source 1..50: mol_type = other DNA
cccraacccaatatatctaaaccttttccctattaccccaaaaaaacttc

SEQ ID NO: 865 - DNA, 50 bp, synthetic construct
  source 1..50: mol_type = other DNA
aacaaacaataacacctaaaaaaaacttaacaaaaactcctacctctcac

SEQ ID NO: 866 - DNA, 50 bp, synthetic construct
  source 1..50: mol_type = other DNA
taaactaaaaacacattaaaaatatccccttaataaacaaaacaaaatcc

SEQ ID NO: 867 - DNA, 50 bp, synthetic construct
  source 1..50: mol_type = other DNA
aatcaataccttaaacacccaaaaaaccactaaaccaaaaaactaaacac

SEQ ID NO: 868 - DNA, 50 bp, synthetic construct
  source 1..50: mol_type = other DNA
atacatcacaaactcacraaacccraactatttacaacaacaaaaaacac

SEQ ID NO: 869 - DNA, 50 bp, synthetic construct
  source 1..50: mol_type = other DNA
ccaaaactaaaaactaaactcttaaatatcaaaaacctaataaaaaccac

SEQ ID NO: 870 - DNA, 50 bp, synthetic construct
  source 1..50: mol_type = other DNA
tactctaccacctacaaaaaacttaaaaaacataaactcaaactaaatac

SEQ ID NO: 871 - DNA, 50 bp, synthetic construct
  source 1..50: mol_type = other DNA
cctatataactcatatcacctcccaaaataacactaatttaaacacaaac

SEQ ID NO: 872 - DNA, 50 bp, synthetic construct
  source 1..50: mol_type = other DNA
aatatacacccactcaacaaaacctaacaaacatcrccacctatttaaac

SEQ ID NO: 873 - DNA, 50 bp, synthetic construct
  source 1..50: mol_type = other DNA
attacctacaaaaaaaatatacacccactcaacaaaacctaacaaacatc

SEQ ID NO: 874 - DNA, 50 bp, synthetic construct
  source 1..50: mol_type = other DNA
atcctatctaaacacccaattacrtacctaaataaataccaaaaaacctc

SEQ ID NO: 875 - DNA, 50 bp, synthetic construct
  source 1..50: mol_type = other DNA
cacaataatatctaaacataaatcaccaacaaaataaacacatacctctc

SEQ ID NO: 876 - DNA, 50 bp, synthetic construct
  source 1..50: mol_type = other DNA
acratccttaaaacctcaaaacaatctttctctaactcaaaaaaaaaccc

SEQ ID NO: 877 - DNA, 50 bp, synthetic construct
  source 1..50: mol_type = other DNA
acctctacaatataatcaccccataaatatactttaacaatacractcac

SEQ ID NO: 878 - DNA, 50 bp, synthetic construct
  source 1..50: mol_type = other DNA
tactttaacaatacractcacrcatttctaaaattacacatcttcataac

SEQ ID NO: 879 - DNA, 50 bp, synthetic construct
  source 1..50: mol_type = other DNA
ttaaattttttataactcatatattattcctattaaacatcacaaccttc

SEQ ID NO: 880 - DNA, 50 bp, synthetic construct
  source 1..50: mol_type = other DNA
actataacaaaaattccccrctaactactatcctcaaaatcaaaaaatac

SEQ ID NO: 881 - DNA, 50 bp, synthetic construct
  source 1..50: mol_type = other DNA
aaaattacttctaaatttcrtattccctaattctaaaaacaataatcaac

SEQ ID NO: 882 - DNA, 50 bp, synthetic construct
  source 1..50: mol_type = other DNA
actatataacctcaaaaaacctcaacatctccctaaacttcaattcttcc

SEQ ID NO: 883 - DNA, 50 bp, synthetic construct
  source 1..50: mol_type = other DNA
aataaaaaaattatcaaaaacacaaaatctaaccaaacrtaataatacac

SEQ ID NO: 884 - DNA, 50 bp, synthetic construct
  source 1..50: mol_type = other DNA
tccatctaatcccctaaacaaaacaaacaaataacacaacaaaaaacacc

SEQ ID NO: 885 - DNA, 50 bp, synthetic construct
  source 1..50: mol_type = other DNA
taaatctataaaaaactccrcaaaaaaattctaaacaaccaatctaaaac

SEQ ID NO: 886 - DNA, 50 bp, synthetic construct
  source 1..50: mol_type = other DNA
ttcaaaaaaaccctaaaacatctctaaaaaaacctaaaatttcaaaaacc

SEQ ID NO: 887 - DNA, 50 bp, synthetic construct
  source 1..50: mol_type = other DNA
taaatttttccaaaacaaatatattcctttcctaaaacctcaatttcccc

SEQ ID NO: 888 - DNA, 50 bp, synthetic construct
  source 1..50: mol_type = other DNA
aaataaaacratactactaaaacaaataaaatacraacrtctctcttccc

SEQ ID NO: 889 - DNA, 50 bp, synthetic construct
  source 1..50: mol_type = other DNA
ccaaaacrtaaaatataatatcaacttctaacrctaacctaaaataaaac

SEQ ID NO: 890 - DNA, 50 bp, synthetic construct
  source 1..50: mol_type = other DNA
ratctattcaaattacacccaaaacrtaaaatataatatcaacttctaac

SEQ ID NO: 891 - DNA, 50 bp, synthetic construct
  source 1..50: mol_type = other DNA
aaaaaataaattaacattaaacaacratctattcaaattacacccaaaac

SEQ ID NO: 892 - DNA, 50 bp, synthetic construct
  source 1..50: mol_type = other DNA
rccaaaaactaacatcacaccccacrccctaaatacaacttaaataaatc

SEQ ID NO: 893 - DNA, 50 bp, synthetic construct
  source 1..50: mol_type = other DNA
taaataaatcrttactcaataccaacccatctccctccaaaactaaacac

SEQ ID NO: 894 - DNA, 50 bp, synthetic construct
  source 1..50: mol_type = other DNA
acaaacctaaaacataacaacacaatcaacaataacaaacaaaaaaaccc

SEQ ID NO: 895 - DNA, 50 bp, synthetic construct
  source 1..50: mol_type = other DNA
acaaatacctacttccctaacctaccccaataacattaaccataaaaaac

SEQ ID NO: 896 - DNA, 50 bp, synthetic construct
  source 1..50: mol_type = other DNA
raacttctctcctaaattacctatttctctaaaaaacttaaaaataaccc

SEQ ID NO: 897 - DNA, 50 bp, synthetic construct
  source 1..50: mol_type = other DNA
catataacrcctaacttcctaaaaataaatcttacactccactaaaaaac

SEQ ID NO: 898 - DNA, 50 bp, synthetic construct
  source 1..50: mol_type = other DNA
aaaaacccrtctcccaataaaatataaaacctacccccaaaaaactaaac

SEQ ID NO: 899 - DNA, 50 bp, synthetic construct
  source 1..50: mol_type = other DNA
cataattactttatacctcccaaaaaacatcaccatcctactatctcctc

SEQ ID NO: 900 - DNA, 50 bp, synthetic construct
  source 1..50: mol_type = other DNA
ccttccatctctaaaaatctatccaaaaaactaaacataaatctccttcc

SEQ ID NO: 901 - DNA, 50 bp, synthetic construct
  source 1..50: mol_type = other DNA
taacrttcttatcacaaaactctcctttctaaccccacatataaacctcc

SEQ ID NO: 902 - DNA, 50 bp, synthetic construct
  source 1..50: mol_type = other DNA
acatataaacctccrctacaaactaaactcacaaacaaatacatcacacc

SEQ ID NO: 903 - DNA, 50 bp, synthetic construct
  source 1..50: mol_type = other DNA
tacaccctaaatactccttacaaacaccttaaaaaatccrattattaccc

SEQ ID NO: 904 - DNA, 50 bp, synthetic construct
  source 1..50: mol_type = other DNA
actaccaacaatcaaaacataacccaaaactatctaataaatcaaccaac

SEQ ID NO: 905 - DNA, 50 bp, synthetic construct
  source 1..50: mol_type = other DNA
cataacccaaaactatctaataaatcaaccaacraaactaaacaacacac

SEQ ID NO: 906 - DNA, 50 bp, synthetic construct
  source 1..50: mol_type = other DNA
tctatactatttacccttcaaatcactaaacaaatctaaccactataacc

SEQ ID NO: 907 - DNA, 50 bp, synthetic construct
  source 1..50: mol_type = other DNA
catatccaccrcccaaactctcactttatcccattaacccaaatatttac

SEQ ID NO: 908 - DNA, 50 bp, synthetic construct
  source 1..50: mol_type = other DNA
aaactacttcctatatcacttaccactccaaactattaataattccaccc

SEQ ID NO: 909 - DNA, 50 bp, synthetic construct
  source 1..50: mol_type = other DNA
aaaaaaccacraaatctcaatttcaataaccttaaaatcccacttccccc

SEQ ID NO: 910 - DNA, 50 bp, synthetic construct
  source 1..50: mol_type = other DNA
tatactaaaaactacaatataaaacaaaactaccaaacaaccaacaccrc

SEQ ID NO: 911 - DNA, 50 bp, synthetic construct
  source 1..50: mol_type = other DNA
tctatactaaaaactacaatataaaacaaaactaccaaacaaccaacacc

SEQ ID NO: 912 - DNA, 50 bp, synthetic construct
  source 1..50: mol_type = other DNA
tctcraaaacrtaccatatacaaaacacaacaaaactaaaaatatcaacc

SEQ ID NO: 913 - DNA, 50 bp, synthetic construct
  source 1..50: mol_type = other DNA
ccaataacataaaccccaaaaaacaaccraaaacraataatctcraaaac

SEQ ID NO: 914 - DNA, 50 bp, synthetic construct
  source 1..50: mol_type = other DNA
cractatcccctaaaattcataccactaaatcactaaatacttaataaac

SEQ ID NO: 915 - DNA, 50 bp, synthetic construct
  source 1..50: mol_type = other DNA
actaaatacttaataaacrccaaccatttcaaaaaccacctcttattccc

SEQ ID NO: 916 - DNA, 50 bp, synthetic construct
  source 1..50: mol_type = other DNA
aaccacaacrtaaccaaataaaaatactaccrattttccctacaactaac

SEQ ID NO: 917 - DNA, 50 bp, synthetic construct
  source 1..50: mol_type = other DNA
aacattatcactaactattactcacaacactacaaaacaaactaatatac

SEQ ID NO: 918 - DNA, 50 bp, synthetic construct
  source 1..50: mol_type = other DNA
attaaaaaattattattacacctctcctcaaaaccaactattactatttc

SEQ ID NO: 919 - DNA, 50 bp, synthetic construct
  source 1..50: mol_type = other DNA
accttttacataccatctatatcaataatttccttttatctattatttcc

SEQ ID NO: 920 - DNA, 50 bp, synthetic construct
  source 1..50: mol_type = other DNA
taaataacacrtacctataaaataatattcatattatcttacccattacc

SEQ ID NO: 921 - DNA, 50 bp, synthetic construct
  source 1..50: mol_type = other DNA
taaaaatcaaatcactaaaataaaacactcrataaactcctaaataacac

SEQ ID NO: 922 - DNA, 50 bp, synthetic construct
  source 1..50: mol_type = other DNA
aaccactccccaaaacctctatctcccatctacaaaataaaaataataac

SEQ ID NO: 923 - DNA, 50 bp, synthetic construct
  source 1..50: mol_type = other DNA
atttcactaaaacaaatacaactcaaactaaaataacctcaaaacctacc

SEQ ID NO: 924 - DNA, 50 bp, synthetic construct
  source 1..50: mol_type = other DNA
acaactcaaactaaaataacctcaaaacctaccraaaatcctataaaaac

SEQ ID NO: 925 - DNA, 50 bp, synthetic construct
  source 1..50: mol_type = other DNA
acaactataacaattaaactaaaaaatacataaaaatctctaaaaaaatc

SEQ ID NO: 926 - DNA, 50 bp, synthetic construct
  source 1..50: mol_type = other DNA
ctaacaaaccrctaaaatacaactattatatttaaataaacaaaccactc

SEQ ID NO: 927 - DNA, 50 bp, synthetic construct
  source 1..50: mol_type = other DNA
caccrcccatccctatataataaatactaaaaaaaactaatattccctcc

SEQ ID NO: 928 - DNA, 50 bp, synthetic construct
  source 1..50: mol_type = other DNA
tactaaaaaaaactaatattccctccrtataacaaataatccctatactc

SEQ ID NO: 929 - DNA, 50 bp, synthetic construct
  source 1..50: mol_type = other DNA
tttttaatcctctactatataccacccactccatctctaaaaaataattc

SEQ ID NO: 930 - DNA, 50 bp, synthetic construct
  source 1..50: mol_type = other DNA
ttttattaaaaatttccattttaaaaatcctttaccatcttatccttacc

SEQ ID NO: 931 - DNA, 50 bp, synthetic construct
  source 1..50: mol_type = other DNA
atactaatctcacattataataaattaaattccctcaaatttttcataac

SEQ ID NO: 932 - DNA, 50 bp, synthetic construct
  source 1..50: mol_type = other DNA
ctttcaactttaaccaaaaacactaaattacatttttaaccttctcaacc

SEQ ID NO: 933 - DNA, 50 bp, synthetic construct
  source 1..50: mol_type = other DNA
caaccraaaatattaaaaaaaacccccacacccataaatacatataaaac

SEQ ID NO: 934 - DNA, 50 bp, synthetic construct
  source 1..50: mol_type = other DNA
ttaaactcaaacaaatctcatacaaatactaactttactaccraccaacc

SEQ ID NO: 935 - DNA, 50 bp, synthetic construct
  source 1..50: mol_type = other DNA
atccraacttaaactcaaacaaatctcatacaaatactaactttactacc

SEQ ID NO: 936 - DNA, 50 bp, synthetic construct
  source 1..50: mol_type = other DNA
aaccracaacaaaactaacatctacataaaacctacctaaatctaaaccc

SEQ ID NO: 937 - DNA, 50 bp, synthetic construct
  source 1..50: mol_type = other DNA
acaaatctaacraaaataaaatcaactcctatcaccctaaaaaacctacc

SEQ ID NO: 938 - DNA, 50 bp, synthetic construct
  source 1..50: mol_type = other DNA
aaatcaaaaaaaccccaaaccaaaaattttatttaatataatcctaaaac

SEQ ID NO: 939 - DNA, 50 bp, synthetic construct
  source 1..50: mol_type = other DNA
tataaaaaaattatccattccctaaacctctttcrcaatctcaaaactcc

SEQ ID NO: 940 - DNA, 50 bp, synthetic construct
  source 1..50: mol_type = other DNA
aaaaaacaataacaaatcaaaaacaattacacccraaactctaaaactac

SEQ ID NO: 941 - DNA, 50 bp, synthetic construct
  source 1..50: mol_type = other DNA
caaaaccrataaaatatctaaaacaaaattcccaaaacacaaccraacac

SEQ ID NO: 942 - DNA, 50 bp, synthetic construct
  source 1..50: mol_type = other DNA
taaaaacaaaaccrataaaatatctaaaacaaaattcccaaaacacaacc

SEQ ID NO: 943 - DNA, 50 bp, synthetic construct
  source 1..50: mol_type = other DNA
tttaacaatccrtaattacactaaatctcrttcctactaaaaacaaaacc

SEQ ID NO: 944 - DNA, 50 bp, synthetic construct
  source 1..50: mol_type = other DNA
atacctaaaatataacaaatatttaacaatccrtaattacactaaatctc

SEQ ID NO: 945 - DNA, 50 bp, synthetic construct
  source 1..50: mol_type = other DNA
aaaacaaccaataatactaatttcctctcttacaatccaaaaaaaccttc

SEQ ID NO: 946 - DNA, 50 bp, synthetic construct
  source 1..50: mol_type = other DNA
ttcctctcttacaatccaaaaaaaccttcraaacccctaactatttaaac

SEQ ID NO: 947 - DNA, 50 bp, synthetic construct
  source 1..50: mol_type = other DNA
tattacaccccaacctaaaatctcttatccctactttctaactctccatc

SEQ ID NO: 948 - DNA, 50 bp, synthetic construct
  source 1..50: mol_type = other DNA
aaaacaaaccaataccacctctcaatattactaaactaattcacaatacc

SEQ ID NO: 949 - DNA, 50 bp, synthetic construct
  source 1..50: mol_type = other DNA
accacaaataaattatcctatattattttatattccccrtaacaattaac

SEQ ID NO: 950 - DNA, 50 bp, synthetic construct
  source 1..50: mol_type = other DNA
tattacccaaactacrataaaataacacaatcacaactcactataacctc

SEQ ID NO: 951 - DNA, 50 bp, synthetic construct
  source 1..50: mol_type = other DNA
crataaaataacacaatcacaactcactataacctcraactcctaaactc

SEQ ID NO: 952 - DNA, 50 bp, synthetic construct
  source 1..50: mol_type = other DNA
atcattctatattataattatctacttattactctcctataccaaacccc

SEQ ID NO: 953 - DNA, 50 bp, synthetic construct
  source 1..50: mol_type = other DNA
tttcaataatttaaccattaaacatttactaaactattactatataccac

SEQ ID NO: 954 - DNA, 50 bp, synthetic construct
  source 1..50: mol_type = other DNA
ataaatattcaataaccaaactactaaaaattataaatacctatacttac

SEQ ID NO: 955 - DNA, 50 bp, synthetic construct
  source 1..50: mol_type = other DNA
ctaaaatattcttctcacactaaaaaaattctactactctttaaaatccc

SEQ ID NO: 956 - DNA, 50 bp, synthetic construct
  source 1..50: mol_type = other DNA
actataaaaacaaaatactataatataaaaatcactcccaaaaaatcrac

SEQ ID NO: 957 - DNA, 50 bp, synthetic construct
  source 1..50: mol_type = other DNA
cttactataaaaacaaaatactataatataaaaatcactcccaaaaaatc

SEQ ID NO: 958 - DNA, 50 bp, synthetic construct
  source 1..50: mol_type = other DNA
attcccacactacaacactttattcctacaacaaataaaacacttactac

SEQ ID NO: 959 - DNA, 50 bp, synthetic construct
  source 1..50: mol_type = other DNA
tacaacactttattcctacaacaaataaaacacttactacrttataccac

SEQ ID NO: 960 - DNA, 50 bp, synthetic construct
  source 1..50: mol_type = other DNA
cctacaacaaataaaacacttactacrttataccacrcttaaataaatac

SEQ ID NO: 961 - DNA, 50 bp, synthetic construct
  source 1..50: mol_type = other DNA
craccaaccattcataaaaaaacacaaaaaaatacaaacctaaccctaac

SEQ ID NO: 962 - DNA, 50 bp, synthetic construct
  source 1..50: mol_type = other DNA
tttatctaaacctcttatataacctcaaataaatcacacaacctctacac

SEQ ID NO: 963 - DNA, 50 bp, synthetic construct
  source 1..50: mol_type = other DNA
aacaactaaactcacaacctccaaaaacccttccaaactaaaaattatcc

SEQ ID NO: 964 - DNA, 50 bp, synthetic construct
  source 1..50: mol_type = other DNA
aaaaacaccaaattaaacaaaactcaataatttcttttttacaatacttc

SEQ ID NO: 965 - DNA, 50 bp, synthetic construct
  source 1..50: mol_type = other DNA
acttcctcatctattaataaaaaaaataactctaaccaacaattcccaac

SEQ ID NO: 966 - DNA, 50 bp, synthetic construct
  source 1..50: mol_type = other DNA
aatatttaaacaaaaactctataattaataaccaaaaataacttcctacc

SEQ ID NO: 967 - DNA, 50 bp, synthetic construct
  source 1..50: mol_type = other DNA
ccaccaaccacaaaatttctatccaaacactacatcctaaacaaacttcc

SEQ ID NO: 968 - DNA, 50 bp, synthetic construct
  source 1..50: mol_type = other DNA
tcctaatcttctttaactcaaaaaaccaaaaaaataaaactatattcccc

SEQ ID NO: 969 - DNA, 50 bp, synthetic construct
  source 1..50: mol_type = other DNA
cctcccaccacttctaacaaatcatctattttcatttttccacattctcc

SEQ ID NO: 970 - DNA, 50 bp, synthetic construct
  source 1..50: mol_type = other DNA
aaaactataataaactaaaatcataccattacacatcaacctaaataacc

SEQ ID NO: 971 - DNA, 50 bp, synthetic construct
  source 1..50: mol_type = other DNA
cctacccactttctaatataatctcataccatactctccrcataatttac

SEQ ID NO: 972 - DNA, 50 bp, synthetic construct
  source 1..50: mol_type = other DNA
aaactaataatccccrccctataattctctaacacatcacctaatttctc

SEQ ID NO: 973 - DNA, 50 bp, synthetic construct
  source 1..50: mol_type = other DNA
taacaaaatcccaatactctaaaacctataatctaaaaataaaaacaaac

SEQ ID NO: 974 - DNA, 50 bp, synthetic construct
  source 1..50: mol_type = other DNA
acctaaatcctaaaaattaacaaaaactaactttaaaaaaaatccctctc

SEQ ID NO: 975 - DNA, 50 bp, synthetic construct
  source 1..50: mol_type = other DNA
cctaaaatataaaaatactctcctaactataaataaataatctactaaac

SEQ ID NO: 976 - DNA, 50 bp, synthetic construct
  source 1..50: mol_type = other DNA
actcaaaaaaacccaaaactttaaaatcaaaaaaaacctaaaaacttacc

SEQ ID NO: 977 - DNA, 50 bp, synthetic construct
  source 1..50: mol_type = other DNA
aacaaatcttaaacccaatctaaacttcaatattctctccttcacaatac

SEQ ID NO: 978 - DNA, 50 bp, synthetic construct
  source 1..50: mol_type = other DNA
cccttaaattctattcaaattaactactctctcctcaaactcccaaactc

SEQ ID NO: 979 - DNA, 50 bp, synthetic construct
  source 1..50: mol_type = other DNA
ctcccaatacactatataaccttaaaaaaatccatacaaccaacrttacc

SEQ ID NO: 980 - DNA, 50 bp, synthetic construct
  source 1..50: mol_type = other DNA
tcactactcccaatacactatataaccttaaaaaaatccatacaaccaac

SEQ ID NO: 981 - DNA, 50 bp, synthetic construct
  source 1..50: mol_type = other DNA
aaaatcacacaatacactaaaaataataaattaaatctccctccaaactc

SEQ ID NO: 982 - DNA, 50 bp, synthetic construct
  source 1..50: mol_type = other DNA
tctttttctaataacattttattccaaaataatatcattttcttcttacc

SEQ ID NO: 983 - DNA, 50 bp, synthetic construct
  source 1..50: mol_type = other DNA
cttcctaaattaataacttttttaaattaaacatctttaaacccaacaac

SEQ ID NO: 984 - DNA, 50 bp, synthetic construct
  source 1..50: mol_type = other DNA
aaaattcaatattacaaaaaatatacacaactttactaactaaataccac

SEQ ID NO: 985 - DNA, 50 bp, synthetic construct
  source 1..50: mol_type = other DNA
aaacttatacaataaccccaatcacaaaaacaaaactcaaaaacaacccc

SEQ ID NO: 986 - DNA, 50 bp, synthetic construct
  source 1..50: mol_type = other DNA
tttaaacttactcaaaaaactacttacracaattactaaccaaaacaccc

SEQ ID NO: 987 - DNA, 50 bp, synthetic construct
  source 1..50: mol_type = other DNA
aaaacaaaactcaaaaacaaccccrtcraatattctaaccaacaactacc

SEQ ID NO: 988 - DNA, 50 bp, synthetic construct
  source 1..50: mol_type = other DNA
taacacatcataattccaacattcrattatacaactatatatatacatac

SEQ ID NO: 989 - DNA, 50 bp, synthetic construct
  source 1..50: mol_type = other DNA
aacaacttatataattaaaaattaaataacacatcataattccaacattc

SEQ ID NO: 990 - DNA, 50 bp, synthetic construct
  source 1..50: mol_type = other DNA
aactaataactcaaaaaaatttactcctcctaactttaaccaaataaaac

SEQ ID NO: 991 - DNA, 50 bp, synthetic construct
  source 1..50: mol_type = other DNA
tcaaatctcccaaacaacaataactcctacacraactatcaactaaaatc

SEQ ID NO: 992 - DNA, 50 bp, synthetic construct
  source 1..50: mol_type = other DNA
atactactaaccaaaatctcaaatctcccaaacaacaataactcctacac

SEQ ID NO: 993 - DNA, 50 bp, synthetic construct
  source 1..50: mol_type = other DNA
caactaccaacaacrcctttccctattcattctaaatcaaaaatataaac

SEQ ID NO: 994 - DNA, 50 bp, synthetic construct
  source 1..50: mol_type = other DNA
ctacttaaattcraaattctacttacttatccaaacctaatcacttaacc

SEQ ID NO: 995 - DNA, 50 bp, synthetic construct
  source 1..50: mol_type = other DNA
rtaaaccttatactattaaccctaaaactactttaaaaaccaaaaattac

SEQ ID NO: 996 - DNA, 50 bp, synthetic construct
  source 1..50: mol_type = other DNA
acttttaacrtctctaccttctaactcataacacaaattttaaataaaac

SEQ ID NO: 997 - DNA, 50 bp, synthetic construct
  source 1..50: mol_type = other DNA
aaaccaccaaatataccattataatttaaaacaccracacaccaaacaac

SEQ ID NO: 998 - DNA, 50 bp, synthetic construct
  source 1..50: mol_type = other DNA
tacttaatataccrataccccaaaccacaataacacacctaataattttc

SEQ ID NO: 999 - DNA, 50 bp, synthetic construct
  source 1..50: mol_type = other DNA
accrataccccaaaccacaataacacacctaataattttcrataaaaaac

SEQ ID NO: 1000 - DNA, 50 bp, synthetic construct
  source 1..50: mol_type = other DNA
aataacacacctaataattttcrataaaaaacracctaaattcaacccac

SEQ ID NO: 1001 - DNA, 50 bp, synthetic construct
  source 1..50: mol_type = other DNA
cccacrtattaacctaaaaacatcrcataaatcaactaaaataaataatc

SEQ ID NO: 1002 - DNA, 50 bp, synthetic construct
  source 1..50: mol_type = other DNA
actaactaaactcaaaaaaaactaaaattccaaataacrtatctatactc

SEQ ID NO: 1003 - DNA, 50 bp, synthetic construct
  source 1..50: mol_type = other DNA
aaaataactcatactaactaaactcaaaaaaaactaaaattccaaataac

SEQ ID NO: 1004 - DNA, 50 bp, synthetic construct
  source 1..50: mol_type = other DNA
atttttcaatatacttctcatacatctatcatcacctctaatcttacaac

SEQ ID NO: 1005 - DNA, 50 bp, synthetic construct
  source 1..50: mol_type = other DNA
ctccttatccaaacracaaaacaacctccccraaatatataaatataaac

SEQ ID NO: 1006 - DNA, 50 bp, synthetic construct
  source 1..50: mol_type = other DNA
aaaaccaaatttcaccatcttaaccaaactaatcttaaactcctaacctc

SEQ ID NO: 1007 - DNA, 50 bp, synthetic construct
  source 1..50: mol_type = other DNA
aaaaataaacracaacttcaatacccccattttacaaataaaacaactac

SEQ ID NO: 1008 - DNA, 50 bp, synthetic construct
  source 1..50: mol_type = other DNA
aaaaattaatacccactactaacaaactcacaataacactatatcaaaac

SEQ ID NO: 1009 - DNA, 50 bp, synthetic construct
  source 1..50: mol_type = other DNA
actactaacaaactcacaataacactatatcaaaacrtcttcctttcctc

SEQ ID NO: 1010 - DNA, 50 bp, synthetic construct
  source 1..50: mol_type = other DNA
cctttcctcrtacttcctacatcaatatatttacctaatacaactttaac

SEQ ID NO: 1011 - DNA, 50 bp, synthetic construct
  source 1..50: mol_type = other DNA
cccaaactatctatacccactttaaaccttacaaactcaatacractacc

SEQ ID NO: 1012 - DNA, 50 bp, synthetic construct
  source 1..50: mol_type = other DNA
ttataatttcttccctcctattctctaattataactaatcccaaatcaac

SEQ ID NO: 1013 - DNA, 50 bp, synthetic construct
  source 1..50: mol_type = other DNA
aacaaattaaacaatccttctaataatcctattccattccctcctactac

SEQ ID NO: 1014 - DNA, 50 bp, synthetic construct
  source 1..50: mol_type = other DNA
caaaaaaactacctaacctaccaatatatctctaatatataattctaacc

SEQ ID NO: 1015 - DNA, 50 bp, synthetic construct
  source 1..50: mol_type = other DNA
aaaaaaactcataaaaactaacaacatacratattttaactttctacctc

SEQ ID NO: 1016 - DNA, 50 bp, synthetic construct
  source 1..50: mol_type = other DNA
taaaacaaatttctacatccacaaaaaccraaacaaaaaattaaaatacc

SEQ ID NO: 1017 - DNA, 50 bp, synthetic construct
  source 1..50: mol_type = other DNA
aacaaaaaattaaaataccrcatactactaacctttataaattcccttac

SEQ ID NO: 1018 - DNA, 50 bp, synthetic construct
  source 1..50: mol_type = other DNA
accaaaaaactctaatataaaaatccatacaacctaacccttaaacaaac

SEQ ID NO: 1019 - DNA, 50 bp, synthetic construct
  source 1..50: mol_type = other DNA
caaacrcccactttcccattttacaaaattcaaaaacaaaacttcacctc

SEQ ID NO: 1020 - DNA, 50 bp, synthetic construct
  source 1..50: mol_type = other DNA
aaaacaaaaacactataaaaaactctccaaccrcaactcaactacactac

SEQ ID NO: 1021 - DNA, 50 bp, synthetic construct
  source 1..50: mol_type = other DNA
atactaactatacrtaacaaaacaaaaacactataaaaaactctccaacc

SEQ ID NO: 1022 - DNA, 50 bp, synthetic construct
  source 1..50: mol_type = other DNA
acaactaaactacractaaaaaaccctttacaatacttctatcctaccac

SEQ ID NO: 1023 - DNA, 50 bp, synthetic construct
  source 1..50: mol_type = other DNA
ctaaacatctctcctctataactctaaaacatctatccaaaaaactaaac

SEQ ID NO: 1024 - DNA, 50 bp, synthetic construct
  source 1..50: mol_type = other DNA
aatattaaaaccctaataaccccacaccctcaaaaaacaactaaaaatcc

SEQ ID NO: 1025 - DNA, 50 bp, synthetic construct
  source 1..50: mol_type = other DNA
tattaaaaccctaataaccccacaccctcaaaaaacaactaaaaatccrc

SEQ ID NO: 1026 - DNA, 50 bp, synthetic construct
  source 1..50: mol_type = other DNA
aaatataattccrtaattataataactctataattataaacaacatcccc

SEQ ID NO: 1027 - DNA, 50 bp, synthetic construct
  source 1..50: mol_type = other DNA
aaacttaatctaacrttttcaaacacaaaatctcttacaaatataattcc

SEQ ID NO: 1028 - DNA, 50 bp, synthetic construct
  source 1..50: mol_type = other DNA
actatcataatcacraaactatacctataaaaaaccttatatttaaaaac

SEQ ID NO: 1029 - DNA, 50 bp, synthetic construct
  source 1..50: mol_type = other DNA
tttactttcaaaacacaaaacaaattacaaacaaatatataccaaaaatc

SEQ ID NO: 1030 - DNA, 50 bp, synthetic construct
  source 1..50: mol_type = other DNA
aatataaaataaaacraccaaaatctaaaccraaaacaatatcccraacc

SEQ ID NO: 1031 - DNA, 50 bp, synthetic construct
  source 1..50: mol_type = other DNA
cttaaaaattattaaaatccccrcctccaacraaaaaaatccaccaaaac

SEQ ID NO: 1032 - DNA, 50 bp, synthetic construct
  source 1..50: mol_type = other DNA
ctactactaccraccaccataaaaaactaataaaaaccaaaaaatatccc

SEQ ID NO: 1033 - DNA, 50 bp, synthetic construct
  source 1..50: mol_type = other DNA
aaaaacaactaacataaccccraaataatacatcctaaaatctaaaaaac

SEQ ID NO: 1034 - DNA, 50 bp, synthetic construct
  source 1..50: mol_type = other DNA
ctaacataaccccraaataatacatcctaaaatctaaaaaacractctcc

SEQ ID NO: 1035 - DNA, 50 bp, synthetic construct
  source 1..50: mol_type = other DNA
aaaactcaatcttactctctctctacctccattttcttatcttcaaaaac

SEQ ID NO: 1036 - DNA, 50 bp, synthetic construct
  source 1..50: mol_type = other DNA
ataaaaaccaaaactcctataaactcaatacccacaacccaaatataaac

SEQ ID NO: 1037 - DNA, 50 bp, synthetic construct
  source 1..50: mol_type = other DNA
actaccaaaacaaattaaaataacatccaatcactatataaccacraatc

SEQ ID NO: 1038 - DNA, 50 bp, synthetic construct
  source 1..50: mol_type = other DNA
actttactaccaaaacaaattaaaataacatccaatcactatataaccac

SEQ ID NO: 1039 - DNA, 50 bp, synthetic construct
  source 1..50: mol_type = other DNA
aaaaaacacaatcctaccrttatatcctacratccccatttatttccttc

SEQ ID NO: 1040 - DNA, 50 bp, synthetic construct
  source 1..50: mol_type = other DNA
aaataaaaaccrcaaaatacaacracaaaactatacccctcaaaactcac

SEQ ID NO: 1041 - DNA, 50 bp, synthetic construct
  source 1..50: mol_type = other DNA
aaaataaacatttctttccactattaaaattaaccactcracaatacccc

SEQ ID NO: 1042 - DNA, 50 bp, synthetic construct
  source 1..50: mol_type = other DNA
ataacraaaaaaatccctacaaacttaatatcactccaaaaatatccctc

SEQ ID NO: 1043 - DNA, 50 bp, synthetic construct
  source 1..50: mol_type = other DNA
aaaccraaaaacacttctaaaataatatcaaacttacaaaaacctccccc

SEQ ID NO: 1044 - DNA, 50 bp, synthetic construct
  source 1..50: mol_type = other DNA
aaaaacrcaaaataaacttctcataaaactctcttaaacaacctcaatcc

SEQ ID NO: 1045 - DNA, 50 bp, synthetic construct
  source 1..50: mol_type = other DNA
ttaaatcccttccrtaacaaaaaaaatccccaaaattttataaaaactcc

SEQ ID NO: 1046 - DNA, 50 bp, synthetic construct
  source 1..50: mol_type = other DNA
taaaaccctaaaaatcctccctactacraaaaaaattcaacaaacataac

SEQ ID NO: 1047 - DNA, 50 bp, synthetic construct
  source 1..50: mol_type = other DNA
aaaaatcctccctactacraaaaaaattcaacaaacataacraaaataac

SEQ ID NO: 1048 - DNA, 50 bp, synthetic construct
  source 1..50: mol_type = other DNA
caaccctaaaaaaactacaaccactaaaaaatacraacaaaaacrttccc

SEQ ID NO: 1049 - DNA, 50 bp, synthetic construct
  source 1..50: mol_type = other DNA
tcraatcaaccctaaaaaaactacaaccactaaaaaatacraacaaaaac

SEQ ID NO: 1050 - DNA, 50 bp, synthetic construct
  source 1..50: mol_type = other DNA
attaaaattaatcaaccraaccctaaaatacacaatcctccaaaaaaacc

SEQ ID NO: 1051 - DNA, 50 bp, synthetic construct
  source 1..50: mol_type = other DNA
cctaactaacaacctcccaccaaatcacrtaaaataaaataaccrtaacc

SEQ ID NO: 1052 - DNA, 50 bp, synthetic construct
  source 1..50: mol_type = other DNA
accatattaatcaaactaatttcaaactcctaacctcactcaaataatcc

SEQ ID NO: 1053 - DNA, 50 bp, synthetic construct
  source 1..50: mol_type = other DNA
caaaactcactacrcttcttaaaacctaaacaaataattactaaaaactc

SEQ ID NO: 1054 - DNA, 50 bp, synthetic construct
  source 1..50: mol_type = other DNA
accaaaatccattacrttcccattctaaaaatcaaaaatcaaacccatac

SEQ ID NO: 1055 - DNA, 50 bp, synthetic construct
  source 1..50: mol_type = other DNA
aaaacccraaacctcrcataaacctaatttctaattttcaaaataaaaac

SEQ ID NO: 1056 - DNA, 50 bp, synthetic construct
  source 1..50: mol_type = other DNA
ctttctttctaaaactcccaaatacctatttaaacttccaacaaaaatac

SEQ ID NO: 1057 - DNA, 50 bp, synthetic construct
  source 1..50: mol_type = other DNA
ccaaaacctattaaaactaaaaactcratctaaaattaaaaactctaacc

SEQ ID NO: 1058 - DNA, 50 bp, synthetic construct
  source 1..50: mol_type = other DNA
cccaaatcctttacactcaaactattatcraatcaatctataatccccac

SEQ ID NO: 1059 - DNA, 50 bp, synthetic construct
  source 1..50: mol_type = other DNA
aacttataactaactaaaacacccaaatcctttacactcaaactattatc

SEQ ID NO: 1060 - DNA, 50 bp, synthetic construct
  source 1..50: mol_type = other DNA
ttaaaaaaaaccaataaaactaatacaaaacctcaaaccttattactttc

SEQ ID NO: 1061 - DNA, 50 bp, synthetic construct
  source 1..50: mol_type = other DNA
cctatttctaaatcacaccatatacaaaaaatatttacaattactcctac

SEQ ID NO: 1062 - DNA, 50 bp, synthetic construct
  source 1..50: mol_type = other DNA
aatataacttaaataaaaccaccaaactacaaataacaaaacccrtcctc

SEQ ID NO: 1063 - DNA, 50 bp, synthetic construct
  source 1..50: mol_type = other DNA
aaaaaaaatataacttaaataaaaccaccaaactacaaataacaaaaccc

SEQ ID NO: 1064 - DNA, 50 bp, synthetic construct
  source 1..50: mol_type = other DNA
acaccttaaaccaacacctcaacccacaaaaacaatataataaaaacacc

SEQ ID NO: 1065 - DNA, 50 bp, synthetic construct
  source 1..50: mol_type = other DNA
atctttataaattaaaatactaacctaaaatataaacactttccaatcac

SEQ ID NO: 1066 - DNA, 50 bp, synthetic construct
  source 1..50: mol_type = other DNA
acccaaaactcttttcctaacactttcccttttattcccattatttaaac

SEQ ID NO: 1067 - DNA, 50 bp, synthetic construct
  source 1..50: mol_type = other DNA
aaattccraaatcaaattacctaacccacaacctaaatcccraaacaaac

SEQ ID NO: 1068 - DNA, 50 bp, synthetic construct
  source 1..50: mol_type = other DNA
aaaaaaaatccaacaacacttcraaaataacttccttattactataaaac

SEQ ID NO: 1069 - DNA, 50 bp, synthetic construct
  source 1..50: mol_type = other DNA
cctattcccaatataaaaaccctaaccctataactctaaaactctctaac

SEQ ID NO: 1070 - DNA, 50 bp, synthetic construct
  source 1..50: mol_type = other DNA
raaataaattaaaaccaaaactccccacrcaactcttactctaaataacc

SEQ ID NO: 1071 - DNA, 50 bp, synthetic construct
  source 1..50: mol_type = other DNA
taatcttcaaaaaaaacctctttcattcrattacccaaaacaaaaactac

SEQ ID NO: 1072 - DNA, 50 bp, synthetic construct
  source 1..50: mol_type = other DNA
rattacccaaaacaaaaactacrtaaaaaactctaactctaacccactcc

SEQ ID NO: 1073 - DNA, 50 bp, synthetic construct
  source 1..50: mol_type = other DNA
aaaaccccttccttttaaaaatccctaatttaaaataacaaaaatcaacc

SEQ ID NO: 1074 - DNA, 50 bp, synthetic construct
  source 1..50: mol_type = other DNA
tttccacatctataaaataattatcatactatctaacccctaaaaatacc

SEQ ID NO: 1075 - DNA, 50 bp, synthetic construct
  source 1..50: mol_type = other DNA
acccaacaactaaaaactaacaacaaccaaaacaaaccctaaaaaccaac

SEQ ID NO: 1076 - DNA, 50 bp, synthetic construct
  source 1..50: mol_type = other DNA
aaataaccctaataatctcttaattcccccaaaaacatcaaatacctaac

SEQ ID NO: 1077 - DNA, 50 bp, synthetic construct
  source 1..50: mol_type = other DNA
acccctatcataaaaataacaaccattttaacaaacatccataatatacc

SEQ ID NO: 1078 - DNA, 50 bp, synthetic construct
  source 1..50: mol_type = other DNA
acaaacatccataatataccraacactatacaaaaaaaaccatacatatc

SEQ ID NO: 1079 - DNA, 50 bp, synthetic construct
  source 1..50: mol_type = other DNA
cctttccaaatttaaatctcaaaaataccacacaccrtataaccttaacc

SEQ ID NO: 1080 - DNA, 50 bp, synthetic construct
  source 1..50: mol_type = other DNA
aactccatatataacctttccaaatttaaatctcaaaaataccacacacc

SEQ ID NO: 1081 - DNA, 50 bp, synthetic construct
  source 1..50: mol_type = other DNA
aaattcaaacctaaaaaaatcacacataaaactcaactactaaaatcatc

SEQ ID NO: 1082 - DNA, 50 bp, synthetic construct
  source 1..50: mol_type = other DNA
tttcccaaaaaactaaacactaaactaacctcttaccaactaaaccttac

SEQ ID NO: 1083 - DNA, 50 bp, synthetic construct
  source 1..50: mol_type = other DNA
caaataaataacraacctaatcattaaaacccacactatccccaacaaac

SEQ ID NO: 1084 - DNA, 50 bp, synthetic construct
  source 1..50: mol_type = other DNA
aaaaacaacatcrtctactaaaaacaatataaactccaataaccaaaccc

SEQ ID NO: 1085 - DNA, 50 bp, synthetic construct
  source 1..50: mol_type = other DNA
ccccaccctactactaaataaacaataactactatatctaaatcacaacc

SEQ ID NO: 1086 - DNA, 50 bp, synthetic construct
  source 1..50: mol_type = other DNA
actataacccaaacacaacaaccactatctacccaacaacaaaataaaac

SEQ ID NO: 1087 - DNA, 50 bp, synthetic construct
  source 1..50: mol_type = other DNA
crcraaactattaaaaatcraatataaatctcctaacaaaccrcaaaacc

SEQ ID NO: 1088 - DNA, 50 bp, synthetic construct
  source 1..50: mol_type = other DNA
aacctaaaataatctactataaatcraccccctataaacaaataaaaacc

SEQ ID NO: 1089 - DNA, 50 bp, synthetic construct
  source 1..50: mol_type = other DNA
aaaataatctactataaatcraccccctataaacaaataaaaaccraatc

SEQ ID NO: 1090 - DNA, 50 bp, synthetic construct
  source 1..50: mol_type = other DNA
caaaaacctaaaataaacaaccaacaaaatataactaccraaaatttaac

SEQ ID NO: 1091 - DNA, 50 bp, synthetic construct
  source 1..50: mol_type = other DNA
taacctttaaacaaaaacctaaaataaacaaccaacaaaatataactacc

SEQ ID NO: 1092 - DNA, 50 bp, synthetic construct
  source 1..50: mol_type = other DNA
caaaaaataacraacacaaactaaaaaaacrtaaaaacctttcccccacc

SEQ ID NO: 1093 - DNA, 50 bp, synthetic construct
  source 1..50: mol_type = other DNA
accaactaaatttaaaaactaacttaataacttcctacctatataacctc

SEQ ID NO: 1094 - DNA, 50 bp, synthetic construct
  source 1..50: mol_type = other DNA
cractataaattctataaccraatcrttcccctctaataccctacaaaac

SEQ ID NO: 1095 - DNA, 50 bp, synthetic construct
  source 1..50: mol_type = other DNA
ctaaaaatctataaatccctaaaaccractataaattctataaccraatc

SEQ ID NO: 1096 - DNA, 50 bp, synthetic construct
  source 1..50: mol_type = other DNA
aaaaactaaaaatctataaatccctaaaaccractataaattctataacc

SEQ ID NO: 1097 - DNA, 50 bp, synthetic construct
  source 1..50: mol_type = other DNA
aaccttcacaaattattacaaaccttttatactcctaaacttcctttccc

SEQ ID NO: 1098 - DNA, 50 bp, synthetic construct
  source 1..50: mol_type = other DNA
cctataacaacctataaaaattataaaaacacttcctaaaaccaaacccc

SEQ ID NO: 1099 - DNA, 50 bp, synthetic construct
  source 1..50: mol_type = other DNA
atcraaacccccaaaatatactaacaatcaccttaaacaaaaaattttac

SEQ ID NO: 1100 - DNA, 50 bp, synthetic construct
  source 1..50: mol_type = other DNA
caataaccaaaaaccrctaaactaatcccttcactcttacaaataaaaac

SEQ ID NO: 1101 - DNA, 50 bp, synthetic construct
  source 1..50: mol_type = other DNA
ataaaattcaaactcttaaacttaacattcaaaacccctaaaaatctaac

SEQ ID NO: 1102 - DNA, 50 bp, synthetic construct
  source 1..50: mol_type = other DNA
aaataacractaaatctctccraaaaatcatctcactccaaaaaaaatcc

SEQ ID NO: 1103 - DNA, 50 bp, synthetic construct
  source 1..50: mol_type = other DNA
attaaaacatattacraacrcraatccctcttaaaataaaataactctcc

SEQ ID NO: 1104 - DNA, 50 bp, synthetic construct
  source 1..50: mol_type = other DNA
craacrcraatccctcttaaaataaaataactctccraaaaaatttaatc

SEQ ID NO: 1105 - DNA, 50 bp, synthetic construct
  source 1..50: mol_type = other DNA
atccctcttaaaataaaataactctccraaaaaatttaatcrtcaccctc

SEQ ID NO: 1106 - DNA, 50 bp, synthetic construct
  source 1..50: mol_type = other DNA
aatcttccatcttaataaacacatccctaaaatataacrcaacctcacac

SEQ ID NO: 1107 - DNA, 50 bp, synthetic construct
  source 1..50: mol_type = other DNA
ctacrtcacaccccaaaaatatatctatcaaaataaaaaatcttttacac

SEQ ID NO: 1108 - DNA, 50 bp, synthetic construct
  source 1..50: mol_type = other DNA
ttaaacttattaatactttccatactatatttataaccatcaatttcccc

SEQ ID NO: 1109 - DNA, 50 bp, synthetic construct
  source 1..50: mol_type = other DNA
cacacrctaaataatttttcattttcacttctatttctcrttcttctatc

SEQ ID NO: 1110 - DNA, 50 bp, synthetic construct
  source 1..50: mol_type = other DNA
aaactatcraaaataaatcttcataaactactttctacacraaaaaaccc

SEQ ID NO: 1111 - DNA, 50 bp, synthetic construct
  source 1..50: mol_type = other DNA
cacttctatttctcrttcttctatcrttttatattcaaacraatttctcc

SEQ ID NO: 1112 - DNA, 50 bp, synthetic construct
  source 1..50: mol_type = other DNA
aaatttaaaaatctaaataaaaatcctcctctcaccctattctctattac

SEQ ID NO: 1113 - DNA, 50 bp, synthetic construct
  source 1..50: mol_type = other DNA
cctattctctattacratccacaacctcatactttataaaattaataacc

SEQ ID NO: 1114 - DNA, 50 bp, synthetic construct
  source 1..50: mol_type = other DNA
ctctattacratccacaacctcatactttataaaattaataaccraaaac

SEQ ID NO: 1115 - DNA, 50 bp, synthetic construct
  source 1..50: mol_type = other DNA
aaaatacraaaccattaacccctacccacaaaaaattcccaaacctatac

SEQ ID NO: 1116 - DNA, 50 bp, synthetic construct
  source 1..50: mol_type = other DNA
atcccacrtacaaacctaaaaactccctataaataaaaaccaataatctc

SEQ ID NO: 1117 - DNA, 50 bp, synthetic construct
  source 1..50: mol_type = other DNA
aacctacctactcactttaaaaacrtatcaaaaaaacaccaaaaaaatac

SEQ ID NO: 1118 - DNA, 50 bp, synthetic construct
  source 1..50: mol_type = other DNA
tcccacctacaacrtaaaactattaaaacctacctactcactttaaaaac

SEQ ID NO: 1119 - DNA, 50 bp, synthetic construct
  source 1..50: mol_type = other DNA
aaactataaaatactaatctccaccctaaacttcatctcccacctacaac

SEQ ID NO: 1120 - DNA, 50 bp, synthetic construct
  source 1..50: mol_type = other DNA
aataaaactcaaaataaaaaccaatatctcacaattctctttacataacc

SEQ ID NO: 1121 - DNA, 50 bp, synthetic construct
  source 1..50: mol_type = other DNA
taaatcctataacataactcctaacaacctaactaatttaattttattcc

SEQ ID NO: 1122 - DNA, 50 bp, synthetic construct
  source 1..50: mol_type = other DNA
ctaaaactccraaaacaaatacaatcaaaatttctatccctacctcaacc

SEQ ID NO: 1123 - DNA, 50 bp, synthetic construct
  source 1..50: mol_type = other DNA
atacaaataatctaaaaaaataccaaacaaatacctcraactccctaccc

SEQ ID NO: 1124 - DNA, 50 bp, synthetic construct
  source 1..50: mol_type = other DNA
raaaaatttaaacaaacaacccaaaaccctaaaaaccaaactaaaaacac

SEQ ID NO: 1125 - DNA, 50 bp, synthetic construct
  source 1..50: mol_type = other DNA
ctctacccttaatttatttaacaaatattattaaacacctactctatacc

SEQ ID NO: 1126 - DNA, 50 bp, synthetic construct
  source 1..50: mol_type = other DNA
ttaaaaacaaaaataataactcccattttacacacaaatactaacrtccc

SEQ ID NO: 1127 - DNA, 50 bp, synthetic construct
  source 1..50: mol_type = other DNA
acaaatccttaaacattctctacctaaattcctatatatataaaatcccc

SEQ ID NO: 1128 - DNA, 50 bp, synthetic construct
  source 1..50: mol_type = other DNA
cttcttaactaaaactaaaaaaaccccraaatcccctaaaactaaaacac

SEQ ID NO: 1129 - DNA, 50 bp, synthetic construct
  source 1..50: mol_type = other DNA
cacataaactctcraactataatcaactaattaaaaaacaactatatatc

SEQ ID NO: 1130 - DNA, 50 bp, synthetic construct
  source 1..50: mol_type = other DNA
ccraatctctatcracacacaattactttttaaccaattaatcacaactc

SEQ ID NO: 1131 - DNA, 50 bp, synthetic construct
  source 1..50: mol_type = other DNA
tcacaactcraaaactcatatacttttcattttcacttaaaccaataacc

SEQ ID NO: 1132 - DNA, 50 bp, synthetic construct
  source 1..50: mol_type = other DNA
ttaaaccaataaccrcctactaaaaaaacatttttaaaatttataataac

SEQ ID NO: 1133 - DNA, 50 bp, synthetic construct
  source 1..50: mol_type = other DNA
aaatttataataacrtataatcaacataatattaaaataacactaccaac

SEQ ID NO: 1134 - DNA, 50 bp, synthetic construct
  source 1..50: mol_type = other DNA
acaaatttttccctcccaaaaaaaattaaatcttcaccaccctaaacaac

SEQ ID NO: 1135 - DNA, 50 bp, synthetic construct
  source 1..50: mol_type = other DNA
cccccatctctacaacaaataattttaaaaaatcaactaaacataataac

SEQ ID NO: 1136 - DNA, 50 bp, synthetic construct
  source 1..50: mol_type = other DNA
caatcaacaaaataaacactacaaatatatatctacataccaacraaccc

SEQ ID NO: 1137 - DNA, 50 bp, synthetic construct
  source 1..50: mol_type = other DNA
cctttaaacrataacaaccactaattctctaattactatataatttaaac

SEQ ID NO: 1138 - DNA, 50 bp, synthetic construct
  source 1..50: mol_type = other DNA
aataaacaaaaccttctcaaaattctaattccctctaaactaccaacccc

SEQ ID NO: 1139 - DNA, 50 bp, synthetic construct
  source 1..50: mol_type = other DNA
ctaaccctttaaaaccaacctacctacraaaaataactaaaataaaaatc

SEQ ID NO: 1140 - DNA, 50 bp, synthetic construct
  source 1..50: mol_type = other DNA
taaaacraaaacctaaaaatccactaaccctttaaaaccaacctacctac

SEQ ID NO: 1141 - DNA, 50 bp, synthetic construct
  source 1..50: mol_type = other DNA
cttctcrtaaacaaactaatcttaaaaaaccaataaaccctcaaacctcc

SEQ ID NO: 1142 - DNA, 50 bp, synthetic construct
  source 1..50: mol_type = other DNA
ttaatctaaaattttaatataaaaactcraaattccatcttcttattttc

SEQ ID NO: 1143 - DNA, 50 bp, synthetic construct
  source 1..50: mol_type = other DNA
taaatcaactcaatcactataatataaaatacaattcccctattatcttc

SEQ ID NO: 1144 - DNA, 50 bp, synthetic construct
  source 1..50: mol_type = other DNA
tctttctcatttaaaaacttcrttactaaaaacatattaattcctctttc

SEQ ID NO: 1145 - DNA, 50 bp, synthetic construct
  source 1..50: mol_type = other DNA
rttccrttttaaatacrccctacaaaaataacttttaacraaattacccc

SEQ ID NO: 1146 - DNA, 50 bp, synthetic construct
  source 1..50: mol_type = other DNA
aaaacccaaataaaacraaacaaccccrttaaaaatcattcctacaaaac

SEQ ID NO: 1147 - DNA, 50 bp, synthetic construct
  source 1..50: mol_type = other DNA
raaaactctaaaaacccraaacaaatactaaaaatttacttaaaacrtcc

SEQ ID NO: 1148 - DNA, 50 bp, synthetic construct
  source 1..50: mol_type = other DNA
aaaaacccraaacaaatactaaaaatttacttaaaacrtccraatcccac

SEQ ID NO: 1149 - DNA, 50 bp, synthetic construct
  source 1..50: mol_type = other DNA
craaacaaatactaaaaatttacttaaaacrtccraatcccacraaaaac

SEQ ID NO: 1150 - DNA, 50 bp, synthetic construct
  source 1..50: mol_type = other DNA
aaaaaattattaaccccaaactacttaaaatccctaaaaaactcccttcc

SEQ ID NO: 1151 - DNA, 50 bp, synthetic construct
  source 1..50: mol_type = other DNA
crcctcaaacattcctaccaacaataaaaaccacataactttccaacatc

SEQ ID NO: 1152 - DNA, 50 bp, synthetic construct
  source 1..50: mol_type = other DNA
acccatttatatctcataccatacrtacaacacataattaatttatttcc

SEQ ID NO: 1153 - DNA, 50 bp, synthetic construct
  source 1..50: mol_type = other DNA
tatcaataaacatcaaaaacracataaaaaaccractattacccacctcc

SEQ ID NO: 1154 - DNA, 50 bp, synthetic construct
  source 1..50: mol_type = other DNA
taaaatacaaataaacatacraaaataaacaacaatcratcttttatacc

SEQ ID NO: 1155 - DNA, 50 bp, synthetic construct
  source 1..50: mol_type = other DNA
ttctaaaaccaaaaccctatacractacataaatcacaaaccaaaaaacc

SEQ ID NO: 1156 - DNA, 50 bp, synthetic construct
  source 1..50: mol_type = other DNA
taaatatcccaaaaacaaaaccractttctaacctataacccatacaatc

SEQ ID NO: 1157 - DNA, 50 bp, synthetic construct
  source 1..50: mol_type = other DNA
tactatttattttatacccctttccttaattaataaaccctactaaaatc

SEQ ID NO: 1158 - DNA, 50 bp, synthetic construct
  source 1..50: mol_type = other DNA
tcaactaaatacaataactcatacctataattccaacactttaaaatacc

SEQ ID NO: 1159 - DNA, 50 bp, synthetic construct
  source 1..50: mol_type = other DNA
ataactcactataacatcracttaacttcccaaactctaacaatcctccc

SEQ ID NO: 1160 - DNA, 50 bp, synthetic construct
  source 1..50: mol_type = other DNA
tcaacaaaaatactcctattaaaatataaaatcatttcattcctctactc

SEQ ID NO: 1161 - DNA, 50 bp, synthetic construct
  source 1..50: mol_type = other DNA
aaaacttaataaaaaactatattcctaataaccaactaaacaaaccaaac

SEQ ID NO: 1162 - DNA, 50 bp, synthetic construct
  source 1..50: mol_type = other DNA
ctaacaaattactacaaaatcacctacttaacccctccctaaataataac

SEQ ID NO: 1163 - DNA, 50 bp, synthetic construct
  source 1..50: mol_type = other DNA
aacraccacaaccracctttctacttctataaaacataaaataatttttc

SEQ ID NO: 1164 - DNA, 50 bp, synthetic construct
  source 1..50: mol_type = other DNA
crataaactatttacttaaattcacttatacctaatttctaaaataccac

SEQ ID NO: 1165 - DNA, 50 bp, synthetic construct
  source 1..50: mol_type = other DNA
catacaccataatcaccttcctatttaacctcttaaatataaaaacattc

SEQ ID NO: 1166 - DNA, 50 bp, synthetic construct
  source 1..50: mol_type = other DNA
aaactttcaaacaacctatctaaaaatcaattttaataaaataaactctc

SEQ ID NO: 1167 - DNA, 50 bp, synthetic construct
  source 1..50: mol_type = other DNA
ctatcctcctctacacraaaaacaaaattttactcctaaaaccctaaacc

SEQ ID NO: 1168 - DNA, 50 bp, synthetic construct
  source 1..50: mol_type = other DNA
catacaacctaaaccaaaaatcttatttcacctccaactaccaactcccc

SEQ ID NO: 1169 - DNA, 50 bp, synthetic construct
  source 1..50: mol_type = other DNA
crtaaacaacrcaaaaaacraataatttctacatttccatctaaaatacc

SEQ ID NO: 1170 - DNA, 50 bp, synthetic construct
  source 1..50: mol_type = other DNA
aaaaaaacccaacccctattcccctcatatacaattaaaaaaccacctcc

SEQ ID NO: 1171 - DNA, 50 bp, synthetic construct
  source 1..50: mol_type = other DNA
tttcaccatactaaccaaactaatctcaaactcctaacctaaaataatcc

SEQ ID NO: 1172 - DNA, 50 bp, synthetic construct
  source 1..50: mol_type = other DNA
ccttctaaaaaacactcactactccacccccaaaattataaaaaaaatac

SEQ ID NO: 1173 - DNA, 50 bp, synthetic construct
  source 1..50: mol_type = other DNA
rcaatccrcttcaaccaaaaacaaaaatcaaaaatattaaacaaacrctc

SEQ ID NO: 1174 - DNA, 50 bp, synthetic construct
  source 1..50: mol_type = other DNA
tattaaaacatctaacraatatccttaaataacrtaatctccaacraccc

SEQ ID NO: 1175 - DNA, 50 bp, synthetic construct
  source 1..50: mol_type = other DNA
cactaaacaaatcttactattaaaacatctaacraatatccttaaataac

SEQ ID NO: 1176 - DNA, 50 bp, synthetic construct
  source 1..50: mol_type = other DNA
tcatccaaaaacatccrccaaatatctcaacaacaaaacttactcaatac

SEQ ID NO: 1177 - DNA, 50 bp, synthetic construct
  source 1..50: mol_type = other DNA
aaaccaaatcttaaaataaacaaaaactttaacaaataatccaaaaaccc

SEQ ID NO: 1178 - DNA, 50 bp, synthetic construct
  source 1..50: mol_type = other DNA
atatataatacacatctccatacctatcaataaatataaccatcccatac

SEQ ID NO: 1179 - DNA, 50 bp, synthetic construct
  source 1..50: mol_type = other DNA
tatatatacaaccaacaaatacctatacacaaacacaaacccaccaactc

SEQ ID NO: 1180 - DNA, 50 bp, synthetic construct
  source 1..50: mol_type = other DNA
taaaaacataaaaaactccctaatactactacacaactaactcttaaaac

SEQ ID NO: 1181 - DNA, 50 bp, synthetic construct
  source 1..50: mol_type = other DNA
acatctctaataccatcattcccaaacacccaaaaataaataaaacaaac

SEQ ID NO: 1182 - DNA, 50 bp, synthetic construct
  source 1..50: mol_type = other DNA
aaaacaaacaactactctaaccactcccaccctcctaaacttaaaacatc

SEQ ID NO: 1183 - DNA, 50 bp, synthetic construct
  source 1..50: mol_type = other DNA
tacctatcaaaatcctctataaaactatacrttccctaaaaacaaaaacc

SEQ ID NO: 1184 - DNA, 50 bp, synthetic construct
  source 1..50: mol_type = other DNA
atacrttccctaaaaacaaaaaccraaaaactcaatttatatctataccc

SEQ ID NO: 1185 - DNA, 50 bp, synthetic construct
  source 1..50: mol_type = other DNA
tttaaataactacrcraaactacactccccaattaatctaatcccaaaac

SEQ ID NO: 1186 - DNA, 50 bp, synthetic construct
  source 1..50: mol_type = other DNA
ttttctaatatactaccaaatacccttatctctatacaccttaatatttc

SEQ ID NO: 1187 - DNA, 50 bp, synthetic construct
  source 1..50: mol_type = other DNA
actactctccataatccatctaattccccaaaaatcaattataactcttc

SEQ ID NO: 1188 - DNA, 50 bp, synthetic construct
  source 1..50: mol_type = other DNA
caaccratactctaaaccattactcacctttataatattaacacaaaacc

SEQ ID NO: 1189 - DNA, 50 bp, synthetic construct
  source 1..50: mol_type = other DNA
aaaacrattctataccaacatcataaaaataaacaataacccaaaacacc

SEQ ID NO: 1190 - DNA, 50 bp, synthetic construct
  source 1..50: mol_type = other DNA
ctacaataacaaaacaactactacraaaaaaactccaaaccaataaaaac

SEQ ID NO: 1191 - DNA, 50 bp, synthetic construct
  source 1..50: mol_type = other DNA
caaccaatcaactcrcttaaattccaaaacctacaaaaaaccttaaactc

SEQ ID NO: 1192 - DNA, 50 bp, synthetic construct
  source 1..50: mol_type = other DNA
cctttactctccaaaccctattaataaccaaacctaaatttaatatactc

SEQ ID NO: 1193 - DNA, 50 bp, synthetic construct
  source 1..50: mol_type = other DNA
ttaataccaaactttcaaaacracttacctatcctatttctaactttctc

SEQ ID NO: 1194 - DNA, 50 bp, synthetic construct
  source 1..50: mol_type = other DNA
tatcctatttctaactttctcrttatctttaataaccacaaaaaaaatcc

SEQ ID NO: 1195 - DNA, 50 bp, synthetic construct
  source 1..50: mol_type = other DNA
caaaaacaaacacraaaattcaaaaacatacacttacaacaaacaacctc

SEQ ID NO: 1196 - DNA, 50 bp, synthetic construct
  source 1..50: mol_type = other DNA
caatcctaaaaatacaacaactaaaaccccaaaaataacttaactatccc

SEQ ID NO: 1197 - DNA, 50 bp, synthetic construct
  source 1..50: mol_type = other DNA
aacaactaaaaccccaaaaataacttaactatcccraaaattaaaacctc

SEQ ID NO: 1198 - DNA, 50 bp, synthetic construct
  source 1..50: mol_type = other DNA
atcccraaaattaaaacctcractaatttcctaatcacccaaataacaac

SEQ ID NO: 1199 - DNA, 50 bp, synthetic construct
  source 1..50: mol_type = other DNA
ractaatttcctaatcacccaaataacaacraacaaccraaaaatacctc

SEQ ID NO: 1200 - DNA, 50 bp, synthetic construct
  source 1..50: mol_type = other DNA
acaaaaaaaaaacctacttcatccaaaaaaaaccatcaattaacaaaaac

SEQ ID NO: 1201 - DNA, 50 bp, synthetic construct
  source 1..50: mol_type = other DNA
tacttcatccaaaaaaaaccatcaattaacaaaaacrcacaaaaatcctc

SEQ ID NO: 1202 - DNA, 50 bp, synthetic construct
  source 1..50: mol_type = other DNA
ccaaaactaaaaccctaataatcctctctccctatccacatacaaccaac

SEQ ID NO: 1203 - DNA, 50 bp, synthetic construct
  source 1..50: mol_type = other DNA
acttaaaaactctaaaaccaaaacataaatccraacttcctcattcaacc

SEQ ID NO: 1204 - DNA, 50 bp, synthetic construct
  source 1..50: mol_type = other DNA
taaaaccaaaacataaatccraacttcctcattcaaccrctataaaaccc

SEQ ID NO: 1205 - DNA, 50 bp, synthetic construct
  source 1..50: mol_type = other DNA
aaacaaaaactaatcrataaaaccccttaaaatcrctcataacctctacc

SEQ ID NO: 1206 - DNA, 50 bp, synthetic construct
  source 1..50: mol_type = other DNA
caactaaacctcttaaaaacaaaaactaatcrataaaaccccttaaaatc

SEQ ID NO: 1207 - DNA, 50 bp, synthetic construct
  source 1..50: mol_type = other DNA
aataaattaaaacccracaaaaactataaacrattccaaaaaactttacc

SEQ ID NO: 1208 - DNA, 50 bp, synthetic construct
  source 1..50: mol_type = other DNA
taccratcaatctctaccctcaaaaaactcaactacaccatcaaaaaaac

SEQ ID NO: 1209 - DNA, 50 bp, synthetic construct
  source 1..50: mol_type = other DNA
aaactaaataataaaaaaaactcccaacaaaacccaaaccaacaaaaccc

SEQ ID NO: 1210 - DNA, 50 bp, synthetic construct
  source 1..50: mol_type = other DNA
tctactaaaaatccccttcattactcaactcctctaacctcrataaaacc

SEQ ID NO: 1211 - DNA, 50 bp, synthetic construct
  source 1..50: mol_type = other DNA
ttaaaatctaaaattcccaaacraacrttataaccttacctaaattcacc

SEQ ID NO: 1212 - DNA, 50 bp, synthetic construct
  source 1..50: mol_type = other DNA
tctaaacaaaccccaaacrataccratataaaaaatatccatttaatcac

SEQ ID NO: 1213 - DNA, 50 bp, synthetic construct
  source 1..50: mol_type = other DNA
acractaaacaataaatccaaaacraacatccaatataaacraatctaac

SEQ ID NO: 1214 - DNA, 50 bp, synthetic construct
  source 1..50: mol_type = other DNA
aaacaataaatccaaaacraacatccaatataaacraatctaacrcttac

SEQ ID NO: 1215 - DNA, 50 bp, synthetic construct
  source 1..50: mol_type = other DNA
ctttccaactcaaaccctacctctaattaaaactcaactatctcaacrac

SEQ ID NO: 1216 - DNA, 50 bp, synthetic construct
  source 1..50: mol_type = other DNA
cttaattatcaaaccacatatcccaatttaaacccraaaaacaccaattc

SEQ ID NO: 1217 - DNA, 50 bp, synthetic construct
  source 1..50: mol_type = other DNA
ttaaaacaaaaactactactaaaataaatacaaactctccacaatcaaac

SEQ ID NO: 1218 - DNA, 50 bp, synthetic construct
  source 1..50: mol_type = other DNA
aactattcttcaaccrcaataaaacaatcctctaaataaatacccccaac

SEQ ID NO: 1219 - DNA, 50 bp, synthetic construct
  source 1..50: mol_type = other DNA
tacttaaaccaaaacrctaaaaacatctatccaaaaaactactctattac

SEQ ID NO: 1220 - DNA, 50 bp, synthetic construct
  source 1..50: mol_type = other DNA
actttactttcccctctatctataaacctctcaaaaacaaaaaccaaatc

SEQ ID NO: 1221 - DNA, 50 bp, synthetic construct
  source 1..50: mol_type = other DNA
aaaacaaaaactataccacraaaaatcctaaaaaaacaactaacctaatc

SEQ ID NO: 1222 - DNA, 50 bp, synthetic construct
  source 1..50: mol_type = other DNA
cctactcctaaattctcaaaactcttataaaataaaacccctcccatccc

SEQ ID NO: 1223 - DNA, 50 bp, synthetic construct
  source 1..50: mol_type = other DNA
aactctaaaacctacaaaatacaaaaatactctcaaaaaaaactactatc

SEQ ID NO: 1224 - DNA, 50 bp, synthetic construct
  source 1..50: mol_type = other DNA
tctaaaacctacaaaatacaaaaatactctcaaaaaaaactactatcrcc

SEQ ID NO: 1225 - DNA, 50 bp, synthetic construct
  source 1..50: mol_type = other DNA
raaaaaattatccaaaattttcccaacacatctacccccacatcractcc

SEQ ID NO: 1226 - DNA, 50 bp, synthetic construct
  source 1..50: mol_type = other DNA
tcrctacttctctaaaattcattctcrtctaaatctctcccaaataactc

SEQ ID NO: 1227 - DNA, 50 bp, synthetic construct
  source 1..50: mol_type = other DNA
taaaatttaactacaaaacccaaacrctaaactaactctctcctcacctc

SEQ ID NO: 1228 - DNA, 50 bp, synthetic construct
  source 1..50: mol_type = other DNA
acttaacrtttaaattttacaatcaaatttcaacaaaacraactaacctc

SEQ ID NO: 1229 - DNA, 50 bp, synthetic construct
  source 1..50: mol_type = other DNA
atcaaatttcaacaaaacraactaacctcrctaatcttaattttctcatc

SEQ ID NO: 1230 - DNA, 50 bp, synthetic construct
  source 1..50: mol_type = other DNA
ataataatacttactttaataaattactttacttcaacatttaaaaaacc

SEQ ID NO: 1231 - DNA, 50 bp, synthetic construct
  source 1..50: mol_type = other DNA
ctaaacaataaaataatatttattaaacacatactatataaatcctcacc

SEQ ID NO: 1232 - DNA, 50 bp, synthetic construct
  source 1..50: mol_type = other DNA
ttccaaaatctaaacaaccctaaaaattctacaaaacaactaaacaaaac

SEQ ID NO: 1233 - DNA, 50 bp, synthetic construct
  source 1..50: mol_type = other DNA
aaaatctaaacaaccctaaaaattctacaaaacaactaaacaaaacracc

SEQ ID NO: 1234 - DNA, 50 bp, synthetic construct
  source 1..50: mol_type = other DNA
actaaaacaaataaaaatcccctaaaaacatatttcctaaacracttctc

SEQ ID NO: 1235 - DNA, 50 bp, synthetic construct
  source 1..50: mol_type = other DNA
actttacaaacctacatacattcaaacttctcaaatatttctaaaccccc

SEQ ID NO: 1236 - DNA, 50 bp, synthetic construct
  source 1..50: mol_type = other DNA
caaacctacatacattcaaacttctcaaatatttctaaacccccractcc

SEQ ID NO: 1237 - DNA, 50 bp, synthetic construct
  source 1..50: mol_type = other DNA
tttcacttctaccttctattaaaaattatcaccataacacctaccatacc

SEQ ID NO: 1238 - DNA, 50 bp, synthetic construct
  source 1..50: mol_type = other DNA
aattatcaccataacacctaccataccrtataaaaaaccaaaatacaacc

SEQ ID NO: 1239 - DNA, 50 bp, synthetic construct
  source 1..50: mol_type = other DNA
attataatccaatcccttcttaaaacctaaattaaactaccaaatactac

SEQ ID NO: 1240 - DNA, 50 bp, synthetic construct
  source 1..50: mol_type = other DNA
ttataaaaaaaccaaaaacccaataacttctaaaaatcacttactttttc

SEQ ID NO: 1241 - DNA, 50 bp, synthetic construct
  source 1..50: mol_type = other DNA
crataaaaatctaccacacctcatcccctaaactaacttcatttctaaac

SEQ ID NO: 1242 - DNA, 50 bp, synthetic construct
  source 1..50: mol_type = other DNA
attaccattatctaaccaaatttaatcraatccacaatccacrcaattcc

SEQ ID NO: 1243 - DNA, 50 bp, synthetic construct
  source 1..50: mol_type = other DNA
catacacaattaccattatctaaccaaatttaatcraatccacaatccac

SEQ ID NO: 1244 - DNA, 50 bp, synthetic construct
  source 1..50: mol_type = other DNA
taattccaataaacccaattaataataccctaatacttttcattccttac

SEQ ID NO: 1245 - DNA, 50 bp, synthetic construct
  source 1..50: mol_type = other DNA
ataataccctaatacttttcattccttacraaataaacaaataatccctc

SEQ ID NO: 1246 - DNA, 50 bp, synthetic construct
  source 1..50: mol_type = other DNA
caattaatactttaatatatactaccctaaaatatttcatttaatacatc

SEQ ID NO: 1247 - DNA, 50 bp, synthetic construct
  source 1..50: mol_type = other DNA
taaattcatatactcraaaaaattaaaatacctctaaaaaacaactcccc

SEQ ID NO: 1248 - DNA, 50 bp, synthetic construct
  source 1..50: mol_type = other DNA
aaaatacaaattaactaacacataaaaacaacaaataaatacactcacac

SEQ ID NO: 1249 - DNA, 50 bp, synthetic construct
  source 1..50: mol_type = other DNA
acaaaaatcttcatttatttctcttttccccaatacccaacaataataac

SEQ ID NO: 1250 - DNA, 50 bp, synthetic construct
  source 1..50: mol_type = other DNA
aaacttaaaaaacctttatatctaactaaaaaattataaatacaccaatc

SEQ ID NO: 1251 - DNA, 50 bp, synthetic construct
  source 1..50: mol_type = other DNA
tttcaccatattaaccaaacaaatctcaaactccaaacctcaaataatcc

SEQ ID NO: 1252 - DNA, 50 bp, synthetic construct
  source 1..50: mol_type = other DNA
ttataaaataaaaaatcaaaaatctcacaaccttcaaaactaaaaacctc

SEQ ID NO: 1253 - DNA, 50 bp, synthetic construct
  source 1..50: mol_type = other DNA
tcttctacrttactcacrctaaaaactataaactaaaactattcctattc

SEQ ID NO: 1254 - DNA, 50 bp, synthetic construct
  source 1..50: mol_type = other DNA
aatacaactcataactaacaaaactaaaatttaaacccaaatacttaacc

SEQ ID NO: 1255 - DNA, 50 bp, synthetic construct
  source 1..50: mol_type = other DNA
aacctctctaaacctcaatttcccaactataatataaaaataataaccac

SEQ ID NO: 1256 - DNA, 50 bp, synthetic construct
  source 1..50: mol_type = other DNA
ccaaaccaaataccaaattataaaaattacataaactcttccctaccatc

SEQ ID NO: 1257 - DNA, 50 bp, synthetic construct
  source 1..50: mol_type = other DNA
atcttactcataaaaaccatcctaataatctccctactaaataattctcc

SEQ ID NO: 1258 - DNA, 50 bp, synthetic construct
  source 1..50: mol_type = other DNA
ttaatttacattcaacraaatacacacaacttaacaaaacrcrataactc

SEQ ID NO: 1259 - DNA, 50 bp, synthetic construct
  source 1..50: mol_type = other DNA
attaaaacttaatttacattcaacraaatacacacaacttaacaaaacrc

SEQ ID NO: 1260 - DNA, 50 bp, synthetic construct
  source 1..50: mol_type = other DNA
taattaaaacttaatttacattcaacraaatacacacaacttaacaaaac

SEQ ID NO: 1261 - DNA, 50 bp, synthetic construct
  source 1..50: mol_type = other DNA
cacaccctcataaaatcaccctctaacatatttccataacatactataac

SEQ ID NO: 1262 - DNA, 50 bp, synthetic construct
  source 1..50: mol_type = other DNA
ccaaaacaacaattataatataatctattttaaaacccttcctacrctcc

SEQ ID NO: 1263 - DNA, 50 bp, synthetic construct
  source 1..50: mol_type = other DNA
actctctttattctccattttaaaatctaacttcctaattctattacccc

SEQ ID NO: 1264 - DNA, 50 bp, synthetic construct
  source 1..50: mol_type = other DNA
caaccctcctaacttaaatcaaaaaaaactaaatattcttattaaaaatc

SEQ ID NO: 1265 - DNA, 50 bp, synthetic construct
  source 1..50: mol_type = other DNA
cacattttctcccaatcctatctcttttccaaacacraaaaatactaacc

SEQ ID NO: 1266 - DNA, 50 bp, synthetic construct
  source 1..50: mol_type = other DNA
atcttaaccatttttctacctttactaaaaattctaaaatcctatacccc

SEQ ID NO: 1267 - DNA, 50 bp, synthetic construct
  source 1..50: mol_type = other DNA
catcatccttttccatacacttacccctatccaataaaaaaatcacttac

SEQ ID NO: 1268 - DNA, 50 bp, synthetic construct
  source 1..50: mol_type = other DNA
ctcttaccccttaaccctataaacctaaaaaaaataacaaccaaatcacc

SEQ ID NO: 1269 - DNA, 50 bp, synthetic construct
  source 1..50: mol_type = other DNA
ctctcttttccaaaatcttttataacaacaactaaacccataacctaacc

SEQ ID NO: 1270 - DNA, 50 bp, synthetic construct
  source 1..50: mol_type = other DNA
accratacactcataacaaaaaacatctaccaaaaaaatataataatcac

SEQ ID NO: 1271 - DNA, 50 bp, synthetic construct
  source 1..50: mol_type = other DNA
tcataacaaaaaacatctaccaaaaaaatataataatcacraacttacac

SEQ ID NO: 1272 - DNA, 50 bp, synthetic construct
  source 1..50: mol_type = other DNA
tctaaaaacaaactcccctccataaaatacaaaccaaaaaatctcctaac

SEQ ID NO: 1273 - DNA, 50 bp, synthetic construct
  source 1..50: mol_type = other DNA
caaaaacccaaaacaaacataaactaaaatttcaaccaactacccaatcc

SEQ ID NO: 1274 - DNA, 50 bp, synthetic construct
  source 1..50: mol_type = other DNA
aacctacraaaccccaaaaacctaataaacaaaactttaaactaaactac

SEQ ID NO: 1275 - DNA, 50 bp, synthetic construct
  source 1..50: mol_type = other DNA
cctctaaaacctaacacaaaacaccaataaccratacaaaaccaaatatc

SEQ ID NO: 1276 - DNA, 50 bp, synthetic construct
  source 1..50: mol_type = other DNA
cctaaaatcccrcaaattaaacaacaaactacratacttaatcttatacc

SEQ ID NO: 1277 - DNA, 50 bp, synthetic construct
  source 1..50: mol_type = other DNA
ttaaatttccctaaaacaaaacrtaaaacaaaaactaaactactacctac

SEQ ID NO: 1278 - DNA, 50 bp, synthetic construct
  source 1..50: mol_type = other DNA
ccrcccatctaaactattaacaaaaaataaacccaacrctatactccaac

SEQ ID NO: 1279 - DNA, 50 bp, synthetic construct
  source 1..50: mol_type = other DNA
tatacaaaacacrctcaataactatttactaactaaataaattaatcaac

SEQ ID NO: 1280 - DNA, 50 bp, synthetic construct
  source 1..50: mol_type = other DNA
acttatccactcrctaattaacttatttaattaacaaataattattaaac

SEQ ID NO: 1281 - DNA, 50 bp, synthetic construct
  source 1..50: mol_type = other DNA
actccaaaatctacctccctaatacaatcacccaaaataactaaataaac

SEQ ID NO: 1282 - DNA, 50 bp, synthetic construct
  source 1..50: mol_type = other DNA
aaataacattaataaaatatcrcacaatacttaacacacaacaacccctc

SEQ ID NO: 1283 - DNA, 50 bp, synthetic construct
  source 1..50: mol_type = other DNA
aaacattaactttctttccctttcttatcratttcttcctctccaaaccc

SEQ ID NO: 1284 - DNA, 50 bp, synthetic construct
  source 1..50: mol_type = other DNA
cccaaaaataacaaaacccacaaaacaataaacctctactacctaaacac

SEQ ID NO: 1285 - DNA, 50 bp, synthetic construct
  source 1..50: mol_type = other DNA
aaacaaattaaactaatttcccaacctactacaaccaaaacctaataaac

SEQ ID NO: 1286 - DNA, 50 bp, synthetic construct
  source 1..50: mol_type = other DNA
caataaaatacccaacctccacaaacccttactaatcaacctttaatcac

SEQ ID NO: 1287 - DNA, 50 bp, synthetic construct
  source 1..50: mol_type = other DNA
tttcccacaataattattaaataaaacctattttcactactctaaataac

SEQ ID NO: 1288 - DNA, 50 bp, synthetic construct
  source 1..50: mol_type = other DNA
cccacaataattattaaataaaacctattttcactactctaaataacrtc

SEQ ID NO: 1289 - DNA, 50 bp, synthetic construct
  source 1..50: mol_type = other DNA
atacaaaataccctaaaaacacacataaaactatctaaaaaatactttac

SEQ ID NO: 1290 - DNA, 50 bp, synthetic construct
  source 1..50: mol_type = other DNA
cacaacttaaaaatcaaaaaacctaaattttacttccaactttaccattc

SEQ ID NO: 1291 - DNA, 50 bp, synthetic construct
  source 1..50: mol_type = other DNA
tatcacataaactcccaaccacatccctaaacaaaattaaaaaactctac

SEQ ID NO: 1292 - DNA, 50 bp, synthetic construct
  source 1..50: mol_type = other DNA
attcaaaaatataactaaaaatccatataacattatacaaacaaaaatcc

SEQ ID NO: 1293 - DNA, 50 bp, synthetic construct
  source 1..50: mol_type = other DNA
tatataaaaccrctcaactttatacccctatataacaataaaaaaatatc

SEQ ID NO: 1294 - DNA, 50 bp, synthetic construct
  source 1..50: mol_type = other DNA
ttacccaaactaactatcacattttaacaaacatattttccatcactctc

SEQ ID NO: 1295 - DNA, 50 bp, synthetic construct
  source 1..50: mol_type = other DNA
aattatatccracttaatcttccttttaaataaaaaccctacttccctac

SEQ ID NO: 1296 - DNA, 50 bp, synthetic construct
  source 1..50: mol_type = other DNA
ttaccttatatttaatatcaaataactctaaactttctaaacaacatatc

SEQ ID NO: 1297 - DNA, 50 bp, synthetic construct
  source 1..50: mol_type = other DNA
atattcrcctctaaataataataataaaccttttcatctactaaaatatc

SEQ ID NO: 1298 - DNA, 50 bp, synthetic construct
  source 1..50: mol_type = other DNA
ctctaaaacrcaaattatcaactcaaaacttaaaattctcttaaaacctc

SEQ ID NO: 1299 - DNA, 50 bp, synthetic construct
  source 1..50: mol_type = other DNA
aaactatctacctctttttccaacaaattctctttttcacacaaatacac

SEQ ID NO: 1300 - DNA, 50 bp, synthetic construct
  source 1..50: mol_type = other DNA
attcatacaacractatactaaaattacctaaaaaacttttacaaaacac

SEQ ID NO: 1301 - DNA, 50 bp, synthetic construct
  source 1..50: mol_type = other DNA
tccttaactcctttaaaactaaaaatcacacaactttttactaacattac

SEQ ID NO: 1302 - DNA, 50 bp, synthetic construct
  source 1..50: mol_type = other DNA
taccctaaacactatatattctataccacrctatcraaaaacactctatc

SEQ ID NO: 1303 - DNA, 50 bp, synthetic construct
  source 1..50: mol_type = other DNA
aaataaactctcraataccctaaacactatatattctataccacrctatc

SEQ ID NO: 1304 - DNA, 50 bp, synthetic construct
  source 1..50: mol_type = other DNA
actaaaaaataaactctcraataccctaaacactatatattctataccac

SEQ ID NO: 1305 - DNA, 50 bp, synthetic construct
  source 1..50: mol_type = other DNA
aaaatacctcccrataacrtaacacaaaacacataatactcaaaataccc

SEQ ID NO: 1306 - DNA, 50 bp, synthetic construct
  source 1..50: mol_type = other DNA
aaaacaaacttaacattacaaaaaaaaacrtattctccctaacaaccacc

SEQ ID NO: 1307 - DNA, 50 bp, synthetic construct
  source 1..50: mol_type = other DNA
ccccaatcacctccatcccaactttcaacrataattatcaaaaaaaacac

SEQ ID NO: 1308 - DNA, 50 bp, synthetic construct
  source 1..50: mol_type = other DNA
cttcttctacaatactaaatctatccctaaccaaataaacacacccctcc

SEQ ID NO: 1309 - DNA, 50 bp, synthetic construct
  source 1..50: mol_type = other DNA
cttctacaatactaaatctatccctaaccaaataaacacacccctccrac

SEQ ID NO: 1310 - DNA, 50 bp, synthetic construct
  source 1..50: mol_type = other DNA
aaaataacacataaactaaacttaaaacratccatcaaatctctatatac

SEQ ID NO: 1311 - DNA, 50 bp, synthetic construct
  source 1..50: mol_type = other DNA
ctcttctacattcttaacattattcataaactaaaaaacttcccttctac

SEQ ID NO: 1312 - DNA, 50 bp, synthetic construct
  source 1..50: mol_type = other DNA
attctctaaatcaacaatctccaaaatttttaacaccaaaaactaatttc

SEQ ID NO: 1313 - DNA, 50 bp, synthetic construct
  source 1..50: mol_type = other DNA
aaaacacaaaccctattataaactatacatacraataatataaattaccc

SEQ ID NO: 1314 - DNA, 50 bp, synthetic construct
  source 1..50: mol_type = other DNA
aatcaaacattaattaaattctcacaaaaaacraacaacctacattactc

SEQ ID NO: 1315 - DNA, 50 bp, synthetic construct
  source 1..50: mol_type = other DNA
atataacattactactttaaataatctatatatcttcctatcccctacac

SEQ ID NO: 1316 - DNA, 50 bp, synthetic construct
  source 1..50: mol_type = other DNA
tattctctttatcaactttcaaaataataaattaaccacaaaacrttttc

SEQ ID NO: 1317 - DNA, 50 bp, synthetic construct
  source 1..50: mol_type = other DNA
ttaatttattctctttatcaactttcaaaataataaattaaccacaaaac

SEQ ID NO: 1318 - DNA, 50 bp, synthetic construct
  source 1..50: mol_type = other DNA
aaaaaataaatcaaacatttatcctaacttttctataccaaccatatcac

SEQ ID NO: 1319 - DNA, 50 bp, synthetic construct
  source 1..50: mol_type = other DNA
aatcaaacatttatcctaacttttctataccaaccatatcacraaataac

SEQ ID NO: 1320 - DNA, 50 bp, synthetic construct
  source 1..50: mol_type = other DNA
tactcccaaaaaaaataatccaatttctaaaactaaacataataactcac

SEQ ID NO: 1321 - DNA, 50 bp, synthetic construct
  source 1..50: mol_type = other DNA
taaaatctaaaaccatctcacccaaaatataaatcatccctttatccaac

SEQ ID NO: 1322 - DNA, 50 bp, synthetic construct
  source 1..50: mol_type = other DNA
taattcttaatctctaaaccaaaaaattttacattttaaaataatcaaac

SEQ ID NO: 1323 - DNA, 50 bp, synthetic construct
  source 1..50: mol_type = other DNA
ttatcattaaaacrcactacacaaacctatatcrattaattaaataatac

SEQ ID NO: 1324 - DNA, 50 bp, synthetic construct
  source 1..50: mol_type = other DNA
ataaaaaataaaaatccttatcattaaaacrcactacacaaacctatatc

SEQ ID NO: 1325 - DNA, 50 bp, synthetic construct
  source 1..50: mol_type = other DNA
aattactataattaccatatatcaaatactattctaaatactttaaatac

SEQ ID NO: 1326 - DNA, 50 bp, synthetic construct
  source 1..50: mol_type = other DNA
ccaatctacctccactaattactatctattctaaacaaattacttcatac

SEQ ID NO: 1327 - DNA, 50 bp, synthetic construct
  source 1..50: mol_type = other DNA
aaaaactactacaaatacrtctacacrtaaaactaacaacaaaacrcctc

SEQ ID NO: 1328 - DNA, 50 bp, synthetic construct
  source 1..50: mol_type = other DNA
tctacaacaacctcaaacatcrctcaacaaactatactcttaaacaacac

SEQ ID NO: 1329 - DNA, 50 bp, synthetic construct
  source 1..50: mol_type = other DNA
aacctactaaacratacctaaaactactacaaaattcacactctaaaccc

SEQ ID NO: 1330 - DNA, 50 bp, synthetic construct
  source 1..50: mol_type = other DNA
raaattccrtaaacrtaaaaccctctaaaccaaatataaaatataatctc

SEQ ID NO: 1331 - DNA, 50 bp, synthetic construct
  source 1..50: mol_type = other DNA
crtaaacrtaaaaccctctaaaccaaatataaaatataatctcrtaatac

SEQ ID NO: 1332 - DNA, 50 bp, synthetic construct
  source 1..50: mol_type = other DNA
tatttaaaactctactaacttctcrctaaacttaacaaaaccccaaattc

SEQ ID NO: 1333 - DNA, 50 bp, synthetic construct
  source 1..50: mol_type = other DNA
cattaaatcaattcataccactcccttatttaaaactctactaacttctc

SEQ ID NO: 1334 - DNA, 50 bp, synthetic construct
  source 1..50: mol_type = other DNA
cctatatacatataaatccccctaaaactaacttacacctctaaacatac

SEQ ID NO: 1335 - DNA, 50 bp, synthetic construct
  source 1..50: mol_type = other DNA
ccttatttctatactactataaatataaaaacacccrcctacctatccac

SEQ ID NO: 1336 - DNA, 50 bp, synthetic construct
  source 1..50: mol_type = other DNA
taactcacacatcttcctcccaatcctaaaataactcaaaaaatataaac

SEQ ID NO: 1337 - DNA, 50 bp, synthetic construct
  source 1..50: mol_type = other DNA
aatatccccaactacaaaaaactaaacacaattaaaccttaaaaaaaccc

SEQ ID NO: 1338 - DNA, 50 bp, synthetic construct
  source 1..50: mol_type = other DNA
acraaaacctatctcaatttaaattattttaaacttacaaaccaaaaacc

SEQ ID NO: 1339 - DNA, 50 bp, synthetic construct
  source 1..50: mol_type = other DNA
aaaaaaaattaattataaccccaaaaaaattatttttcaaataccraacc

SEQ ID NO: 1340 - DNA, 50 bp, synthetic construct
  source 1..50: mol_type = other DNA
attaatcaaaataatcttaaattcctaaactcaaacaatccacccrcctc

SEQ ID NO: 1341 - DNA, 50 bp, synthetic construct
  source 1..50: mol_type = other DNA
aaatttattatataaacacaatctcaactataattctcccttttcccttc

SEQ ID NO: 1342 - DNA, 50 bp, synthetic construct
  source 1..50: mol_type = other DNA
acaatacccaacctaacattataattttttaaaaataccttaatctattc

SEQ ID NO: 1343 - DNA, 50 bp, synthetic construct
  source 1..50: mol_type = other DNA
aactaaaaaattacactactacatataatatactcaaaatctcctacttc

SEQ ID NO: 1344 - DNA, 50 bp, synthetic construct
  source 1..50: mol_type = other DNA
attaaataaaattcatacacacccatacatacacacatacatactcactc

SEQ ID NO: 1345 - DNA, 50 bp, synthetic construct
  source 1..50: mol_type = other DNA
accactaaactaacaaactaattaaaaataccatatctaataaatcttac

SEQ ID NO: 1346 - DNA, 50 bp, synthetic construct
  source 1..50: mol_type = other DNA
taaacaactactacaacaaaaaatacttttattttaaatatacttataac

SEQ ID NO: 1347 - DNA, 50 bp, synthetic construct
  source 1..50: mol_type = other DNA
catcrttattcaaacatatcttatcrctatatacataaataaaattccac

SEQ ID NO: 1348 - DNA, 50 bp, synthetic construct
  source 1..50: mol_type = other DNA
taaataaattatttcaaacrtactccatcrttattcaaacatatcttatc

SEQ ID NO: 1349 - DNA, 50 bp, synthetic construct
  source 1..50: mol_type = other DNA
aaataaaaatcttaaaccttcrttaatacctccaaaattactaacactac

SEQ ID NO: 1350 - DNA, 50 bp, synthetic construct
  source 1..50: mol_type = other DNA
crtcccatacaacccctactcactactaaaaaatattcctattaaactcc

SEQ ID NO: 1351 - DNA, 50 bp, synthetic construct
  source 1..50: mol_type = other DNA
craaacttaacaaaaatattttccaacaataaacaaaaactatataaaac

SEQ ID NO: 1352 - DNA, 50 bp, synthetic construct
  source 1..50: mol_type = other DNA
taacacctaacacaatactaaacacacaatcaatacctaataaatatacc

SEQ ID NO: 1353 - DNA, 50 bp, synthetic construct
  source 1..50: mol_type = other DNA
caattatatatttacctatattatctcccatactaaaacataaaatcccc

SEQ ID NO: 1354 - DNA, 50 bp, synthetic construct
  source 1..50: mol_type = other DNA
acccctacaaaacctaaaaacaaaacttacatataactaccaaactaaac

SEQ ID NO: 1355 - DNA, 50 bp, synthetic construct
  source 1..50: mol_type = other DNA
caaaatttactaaaaaatacacctaataaaacaaatcttaaaaactaacc

SEQ ID NO: 1356 - DNA, 50 bp, synthetic construct
  source 1..50: mol_type = other DNA
atttactccatcaaatacatcttctaacaaattctaaaaaccaaaaatcc

SEQ ID NO: 1357 - DNA, 50 bp, synthetic construct
  source 1..50: mol_type = other DNA
aacaatacaataataatttaaaaacccctaataaccaaaaactaaaaacc

SEQ ID NO: 1358 - DNA, 50 bp, synthetic construct
  source 1..50: mol_type = other DNA
actactcactctttaaatccacactacctttataaactataacactcacc

SEQ ID NO: 1359 - DNA, 50 bp, synthetic construct
  source 1..50: mol_type = other DNA
acaataatacaatcataactcactacaaccttaacctcctaaacccaaac

SEQ ID NO: 1360 - DNA, 50 bp, synthetic construct
  source 1..50: mol_type = other DNA
atcacraaatcaaaaaatcraaatcatcctaactaatataataaaatccc

SEQ ID NO: 1361 - DNA, 50 bp, synthetic construct
  source 1..50: mol_type = other DNA
taccttatcaaaactttattattattcttattacaaaaacaataactcac

SEQ ID NO: 1362 - DNA, 50 bp, synthetic construct
  source 1..50: mol_type = other DNA
atatattaaaataaatttaacaaatacatttcaaaataaaataactctcc

SEQ ID NO: 1363 - DNA, 50 bp, synthetic construct
  source 1..50: mol_type = other DNA
aacaaccrataccaaccactacaaaatcataccaaaatataaaaaccatc

SEQ ID NO: 1364 - DNA, 50 bp, synthetic construct
  source 1..50: mol_type = other DNA
aactaaactattcatccacraaaatccacaacrtcctacaaaaactaaac

SEQ ID NO: 1365 - DNA, 50 bp, synthetic construct
  source 1..50: mol_type = other DNA
caaacaccaacacratactaaataaactaataaaacacraaacaaccacc

SEQ ID NO: 1366 - DNA, 50 bp, synthetic construct
  source 1..50: mol_type = other DNA
ctaaaaataaaaactccaaattaaaaaccttaaaaataccaccaccccrc

SEQ ID NO: 1367 - DNA, 50 bp, synthetic construct
  source 1..50: mol_type = other DNA
ttctaaaaataaaaactccaaattaaaaaccttaaaaataccaccacccc

SEQ ID NO: 1368 - DNA, 50 bp, synthetic construct
  source 1..50: mol_type = other DNA
acraacctcatatatcctaaccacaaaaataacacttacctcataaccac

SEQ ID NO: 1369 - DNA, 50 bp, synthetic construct
  source 1..50: mol_type = other DNA
acrtaaccataaaataaatatcacttctataaccaaaacacataaaattc

SEQ ID NO: 1370 - DNA, 50 bp, synthetic construct
  source 1..50: mol_type = other DNA
aacaaaaaaacctaaactaaaaccctacctctatcacttaccaataacrc

SEQ ID NO: 1371 - DNA, 50 bp, synthetic construct
  source 1..50: mol_type = other DNA
craacaaaaaaacctaaactaaaaccctacctctatcacttaccaataac

SEQ ID NO: 1372 - DNA, 50 bp, synthetic construct
  source 1..50: mol_type = other DNA
crctactaataaataacaaaaacaaaattccaacccaaatccctctatcc

SEQ ID NO: 1373 - DNA, 50 bp, synthetic construct
  source 1..50: mol_type = other DNA
taactaataataaaaaacaatcaaaactcraacccaaatctaaaccactc

SEQ ID NO: 1374 - DNA, 50 bp, synthetic construct
  source 1..50: mol_type = other DNA
ctcccrctaataaccaaatatataacttcattcttataaaacttactacc

SEQ ID NO: 1375 - DNA, 50 bp, synthetic construct
  source 1..50: mol_type = other DNA
ttcacrataacaaaccctataaaaataaaaccatatatctaaccaccaac

SEQ ID NO: 1376 - DNA, 50 bp, synthetic construct
  source 1..50: mol_type = other DNA
tataaaaataaaaccatatatctaaccaccaacraaaactcaatacctac

SEQ ID NO: 1377 - DNA, 50 bp, synthetic construct
  source 1..50: mol_type = other DNA
cctatacrtcaatactcaaacaaatacraaaacaaacacaaaccctaatc

SEQ ID NO: 1378 - DNA, 50 bp, synthetic construct
  source 1..50: mol_type = other DNA
ccaaaacctatacttatcactaccctatacrtcaatactcaaacaaatac

SEQ ID NO: 1379 - DNA, 50 bp, synthetic construct
  source 1..50: mol_type = other DNA
rtacaaaataataataaacataaaccctaaacttacrtctctcttccacc

SEQ ID NO: 1380 - DNA, 50 bp, synthetic construct
  source 1..50: mol_type = other DNA
caaataaaacataataaataacctaaccttttcccaccataaaatttaac

SEQ ID NO: 1381 - DNA, 50 bp, synthetic construct
  source 1..50: mol_type = other DNA
cttaactttaactttcatccaacctattctaaaaaatccrtaaataaacc

SEQ ID NO: 1382 - DNA, 50 bp, synthetic construct
  source 1..50: mol_type = other DNA
taacrtaacacaatttactacctaaaaaccaaaaacatctaaacacaaac

SEQ ID NO: 1383 - DNA, 50 bp, synthetic construct
  source 1..50: mol_type = other DNA
ccctaacctactaataaccacacacaaaaataattaacrccaaaatcacc

SEQ ID NO: 1384 - DNA, 50 bp, synthetic construct
  source 1..50: mol_type = other DNA
acctacaaaactccctaacctactaataaccacacacaaaaataattaac

SEQ ID NO: 1385 - DNA, 50 bp, synthetic construct
  source 1..50: mol_type = other DNA
atataaccatcaacaaattaaaaaaccctataaacctaactctaaatccc

SEQ ID NO: 1386 - DNA, 50 bp, synthetic construct
  source 1..50: mol_type = other DNA
aatcttcttcttctccaattcccrcaaaatatactaatctaaaaaataac

SEQ ID NO: 1387 - DNA, 50 bp, synthetic construct
  source 1..50: mol_type = other DNA
actataacracaaattcattataaaactaacctacraatctaacraaatc

SEQ ID NO: 1388 - DNA, 50 bp, synthetic construct
  source 1..50: mol_type = other DNA
aattcattataaaactaacctacraatctaacraaatcrtaatttccaac

SEQ ID NO: 1389 - DNA, 50 bp, synthetic construct
  source 1..50: mol_type = other DNA
aacaactctaactaaaatacaaataaacrtcctaaatacccaaaaaattc

SEQ ID NO: 1390 - DNA, 50 bp, synthetic construct
  source 1..50: mol_type = other DNA
acaacccrtacctcatataaactttccccctacaaatatttttatactac

SEQ ID NO: 1391 - DNA, 50 bp, synthetic construct
  source 1..50: mol_type = other DNA
ctaaaaatctccatcaatcaaataaccaaaataaaacraaataacaaccc

SEQ ID NO: 1392 - DNA, 50 bp, synthetic construct
  source 1..50: mol_type = other DNA
atctactaaatacctaaaaatctccatcaatcaaataaccaaaataaaac

SEQ ID NO: 1393 - DNA, 50 bp, synthetic construct
  source 1..50: mol_type = other DNA
acctataacatacacrcttaaacacaacccctctaacataacttcaaacc

SEQ ID NO: 1394 - DNA, 50 bp, synthetic construct
  source 1..50: mol_type = other DNA
crcatccacaaataaaaaacaccaaatccaaacaatcaaaccacaaaccc

SEQ ID NO: 1395 - DNA, 50 bp, synthetic construct
  source 1..50: mol_type = other DNA
ataaaaaacaccaaatccaaacaatcaaaccacaaacccrtcaaaaactc

SEQ ID NO: 1396 - DNA, 50 bp, synthetic construct
  source 1..50: mol_type = other DNA
aaaaactaatttcraaactataactcaaactaaatctcaaaacraacrac

SEQ ID NO: 1397 - DNA, 50 bp, synthetic construct
  source 1..50: mol_type = other DNA
actaaaaactaatttcraaactataactcaaactaaatctcaaaacraac

SEQ ID NO: 1398 - DNA, 50 bp, synthetic construct
  source 1..50: mol_type = other DNA
aaaaactaaaaactaatttcraaactataactcaaactaaatctcaaaac

SEQ ID NO: 1399 - DNA, 50 bp, synthetic construct
  source 1..50: mol_type = other DNA
aacaaaaaaacrtctatcaacrtcatttatctctaacatcatcaatcacc

SEQ ID NO: 1400 - DNA, 50 bp, synthetic construct
  source 1..50: mol_type = other DNA
tcacatcttaaaacccctcctaaactttataccataatctccttctaaac

SEQ ID NO: 1401 - DNA, 50 bp, synthetic construct
  source 1..50: mol_type = other DNA
accctatacrttatcttctaactcctactaacatctccaattaaacaacc

SEQ ID NO: 1402 - DNA, 50 bp, synthetic construct
  source 1..50: mol_type = other DNA
tcaaacctttttcccctcccataataaacttaaccattttcaccctatac

SEQ ID NO: 1403 - DNA, 50 bp, synthetic construct
  source 1..50: mol_type = other DNA
raaataaacaaatcacctaaaatcaaaaattcaaaactaacctaaccaac

SEQ ID NO: 1404 - DNA, 50 bp, synthetic construct
  source 1..50: mol_type = other DNA
ttactaacaaaccaacccaaaacaaaaacratactactaataaacacctc

SEQ ID NO: 1405 - DNA, 50 bp, synthetic construct
  source 1..50: mol_type = other DNA
aactaatataatataatccraataaaacatcttacaacaaataacaactc

SEQ ID NO: 1406 - DNA, 50 bp, synthetic construct
  source 1..50: mol_type = other DNA
ccaaacataaaaaacaactaacrcaaaaacctaaaaacctaaaaacatac

SEQ ID NO: 1407 - DNA, 50 bp, synthetic construct
  source 1..50: mol_type = other DNA
tcctcaacaaatatttactaaacacataataaataccraaaactaaaaac

SEQ ID NO: 1408 - DNA, 50 bp, synthetic construct
  source 1..50: mol_type = other DNA
craatacctaccacrtatatttataattaataattaccacatatacttac

SEQ ID NO: 1409 - DNA, 50 bp, synthetic construct
  source 1..50: mol_type = other DNA
cacccatacacacaaaatactttatccacatactacttacatacacacac

SEQ ID NO: 1410 - DNA, 50 bp, synthetic construct
  source 1..50: mol_type = other DNA
taaacacctaaccatccataaactcatatataaaaaactttaaaattccc

SEQ ID NO: 1411 - DNA, 50 bp, synthetic construct
  source 1..50: mol_type = other DNA
ataaaaaaaccaaatacctactaatactaattttattaccaactcactcc

SEQ ID NO: 1412 - DNA, 50 bp, synthetic construct
  source 1..50: mol_type = other DNA
aaaaatcaaccttacctctatttaaccctcactaaacaatataaaccaac

SEQ ID NO: 1413 - DNA, 50 bp, synthetic construct
  source 1..50: mol_type = other DNA
caccatattaaccaaaatcatctcraactactaacctcaaataatcatcc

SEQ ID NO: 1414 - DNA, 50 bp, synthetic construct
  source 1..50: mol_type = other DNA
cacttaaaatcaacaattcraaataaccctaaccaacataataaaacccc

SEQ ID NO: 1415 - DNA, 50 bp, synthetic construct
  source 1..50: mol_type = other DNA
tttctccctaactctccaaattcatactctaaaccacaaccactaaaaac

SEQ ID NO: 1416 - DNA, 50 bp, synthetic construct
  source 1..50: mol_type = other DNA
aaaacttccctaaaaaaataacatttcaactaaaaactaataaatcaatc

SEQ ID NO: 1417 - DNA, 50 bp, synthetic construct
  source 1..50: mol_type = other DNA
acaaaaaaaatccttaaacaaatactcatttccttccaatttaatcctcc

SEQ ID NO: 1418 - DNA, 50 bp, synthetic construct
  source 1..50: mol_type = other DNA
aaaaaaattaatacactcatctcattattcaaatcaaatttcctaaatac

SEQ ID NO: 1419 - DNA, 50 bp, synthetic construct
  source 1..50: mol_type = other DNA
ttatattactcttctaattaatattcttcaaaaacaatccaataaccaac

SEQ ID NO: 1420 - DNA, 50 bp, synthetic construct
  source 1..50: mol_type = other DNA
tcttaatataacatatactaaatataaccaaactctaaattttaactctc

SEQ ID NO: 1421 - DNA, 50 bp, synthetic construct
  source 1..50: mol_type = other DNA
aaaattacraaaacaacctcactacacraattaataaatactataataac

SEQ ID NO: 1422 - DNA, 50 bp, synthetic construct
  source 1..50: mol_type = other DNA
atacaatcrccatcacaacattcaccaactcrtacaataaaactattctc

SEQ ID NO: 1423 - DNA, 50 bp, synthetic construct
  source 1..50: mol_type = other DNA
ttctaaaacctccttcctctaataaaccaaaactataaaatttataaaac

SEQ ID NO: 1424 - DNA, 50 bp, synthetic construct
  source 1..50: mol_type = other DNA
aaaacctccttcctctaataaaccaaaactataaaatttataaaacraac

SEQ ID NO: 1425 - DNA, 50 bp, synthetic construct
  source 1..50: mol_type = other DNA
ccccttctaaccctaaacccaaaataataattacratctactaccrtaac

SEQ ID NO: 1426 - DNA, 50 bp, synthetic construct
  source 1..50: mol_type = other DNA
ccctaccccttctaaccctaaacccaaaataataattacratctactacc

SEQ ID NO: 1427 - DNA, 50 bp, synthetic construct
  source 1..50: mol_type = other DNA
aaatcccttttccctaccccttctaaccctaaacccaaaataataattac

SEQ ID NO: 1428 - DNA, 50 bp, synthetic construct
  source 1..50: mol_type = other DNA
aaaaaaaaaatctaaacaactctaacaaacaccactcacaaatcraaaac

SEQ ID NO: 1429 - DNA, 50 bp, synthetic construct
  source 1..50: mol_type = other DNA
actcacaaatcraaaacrtaaaacaccacaaaaaacctaacccaaaatac

SEQ ID NO: 1430 - DNA, 50 bp, synthetic construct
  source 1..50: mol_type = other DNA
crtaaaacaccacaaaaaacctaacccaaaatacrtaaaaccataaatcc

SEQ ID NO: 1431 - DNA, 50 bp, synthetic construct
  source 1..50: mol_type = other DNA
accccacctatactattatctcttactcttaatcaacataaaatcacaac

SEQ ID NO: 1432 - DNA, 50 bp, synthetic construct
  source 1..50: mol_type = other DNA
ccacctatactattatctcttactcttaatcaacataaaatcacaacrtc

SEQ ID NO: 1433 - DNA, 50 bp, synthetic construct
  source 1..50: mol_type = other DNA
ttttacccatctacacaaaaaacatattaaacaacccaaaactttataac

SEQ ID NO: 1434 - DNA, 50 bp, synthetic construct
  source 1..50: mol_type = other DNA
ctcaaaccaaaataacaaaaacaaaatctaccttaaacacccctaaaatc

SEQ ID NO: 1435 - DNA, 50 bp, synthetic construct
  source 1..50: mol_type = other DNA
aaaaaaccccaataattaaaccaaactaccraataacctcaaaaaacaac

SEQ ID NO: 1436 - DNA, 50 bp, synthetic construct
  source 1..50: mol_type = other DNA
tcctattttataaatataacttacaataaaccttaaaaaactaactacac

SEQ ID NO: 1437 - DNA, 50 bp, synthetic construct
  source 1..50: mol_type = other DNA
ttcaaaacccattacaaatcatatctacaaaacaaaaaccrcctaaatcc

SEQ ID NO: 1438 - DNA, 50 bp, synthetic construct
  source 1..50: mol_type = other DNA
tatctcaccttcctctaataaccataatactaaaaacrtctactctcatc

SEQ ID NO: 1439 - DNA, 50 bp, synthetic construct
  source 1..50: mol_type = other DNA
acaatctcaatacctaacaatacatataccaatatacataaaaatcaaac

SEQ ID NO: 1440 - DNA, 50 bp, synthetic construct
  source 1..50: mol_type = other DNA
acatttaatttatcccaattttactctaaaaatttaacatctctctttac

SEQ ID NO: 1441 - DNA, 50 bp, synthetic construct
  source 1..50: mol_type = other DNA
taccctaatctccctaaattttaaataatcctaaaaattcctctaccacc

SEQ ID NO: 1442 - DNA, 50 bp, synthetic construct
  source 1..50: mol_type = other DNA
aatacaataacacaaacacraactaaatatatcataacatatctatcatc

SEQ ID NO: 1443 - DNA, 50 bp, synthetic construct
  source 1..50: mol_type = other DNA
atccrtatctatactactatatcaatctttctaaaaaaataatacttacc

SEQ ID NO: 1444 - DNA, 50 bp, synthetic construct
  source 1..50: mol_type = other DNA
aaaaaatacctcccaattaacatttataacctcrattaaataaaaactcc

SEQ ID NO: 1445 - DNA, 50 bp, synthetic construct
  source 1..50: mol_type = other DNA
aaacattttatcacaaaaaaaaatacctcccaattaacatttataacctc

SEQ ID NO: 1446 - DNA, 50 bp, synthetic construct
  source 1..50: mol_type = other DNA
craaaacaaaattctataattaatatctattttctaaacatctccaaatc

SEQ ID NO: 1447 - DNA, 50 bp, synthetic construct
  source 1..50: mol_type = other DNA
aaattcttaatctaaaacaaaattctcctcttacccaacctcataattcc

SEQ ID NO: 1448 - DNA, 50 bp, synthetic construct
  source 1..50: mol_type = other DNA
ctcaatcataaataaaaactacctcacrctaacccaacctttaactctac

SEQ ID NO: 1449 - DNA, 50 bp, synthetic construct
  source 1..50: mol_type = other DNA
tttaactctacrtacccaaaacrcrtatcttaaaataatactataacttc

SEQ ID NO: 1450 - DNA, 50 bp, synthetic construct
  source 1..50: mol_type = other DNA
aaataaccrataaaaataaatataacctcactacctcattctattaaaac

SEQ ID NO: 1451 - DNA, 50 bp, synthetic construct
  source 1..50: mol_type = other DNA
aacttccaaaaaaacratcaaacaacaacatttactattcaccaatatcc

SEQ ID NO: 1452 - DNA, 50 bp, synthetic construct
  source 1..50: mol_type = other DNA
aaatccactaaccccactaaaatctaaaataaaacttctactaaacctac

SEQ ID NO: 1453 - DNA, 50 bp, synthetic construct
  source 1..50: mol_type = other DNA
ccctaataataccacctccctaaccttaaaacracctaaatctaatacac

SEQ ID NO: 1454 - DNA, 50 bp, synthetic construct
  source 1..50: mol_type = other DNA
acaaaaactcttactataataaaaaactatacatataaactccaaaaaac

SEQ ID NO: 1455 - DNA, 50 bp, synthetic construct
  source 1..50: mol_type = other DNA
cctctcttcctttctcaaaaccacctttctacaaactttaatatctcaac

SEQ ID NO: 1456 - DNA, 50 bp, synthetic construct
  source 1..50: mol_type = other DNA
tctcttcctttctcaaaaccacctttctacaaactttaatatctcaacrc

SEQ ID NO: 1457 - DNA, 50 bp, synthetic construct
  source 1..50: mol_type = other DNA
aaccacctttctacaaactttaatatctcaacrcraaaaacacaaataac

SEQ ID NO: 1458 - DNA, 50 bp, synthetic construct
  source 1..50: mol_type = other DNA
tcaacrcraaaaacacaaataacraaatctacctttaaccaaatataaac

SEQ ID NO: 1459 - DNA, 50 bp, synthetic construct
  source 1..50: mol_type = other DNA
ccaataactaacacataaaaaaacccaataaacaccaactctacatctcc

SEQ ID NO: 1460 - DNA, 50 bp, synthetic construct
  source 1..50: mol_type = other DNA
aaaactaatattcactaaatttttctatatactaattactaaaacttcac

SEQ ID NO: 1461 - DNA, 50 bp, synthetic construct
  source 1..50: mol_type = other DNA
aacccaaaaaaactaaacaaaaaacctaaaactacttaaaatcctaaaac

SEQ ID NO: 1462 - DNA, 50 bp, synthetic construct
  source 1..50: mol_type = other DNA
catataatcaaatcctcttaccctaaaacrttaacaatatataaatatcc

SEQ ID NO: 1463 - DNA, 50 bp, synthetic construct
  source 1..50: mol_type = other DNA
tcrataaaaataacaaaacctcatataatcaaatcctcttaccctaaaac

SEQ ID NO: 1464 - DNA, 50 bp, synthetic construct
  source 1..50: mol_type = other DNA
ttatctcaaatattaaaataaaacrtaaaacaaaaacaatacaacctctc

SEQ ID NO: 1465 - DNA, 50 bp, synthetic construct
  source 1..50: mol_type = other DNA
atataaaattttatcatctttaccraaaaattatattacctttatttcac

SEQ ID NO: 1466 - DNA, 50 bp, synthetic construct
  source 1..50: mol_type = other DNA
aataactataaccactctaataaactacaaccaaaaatctaacaaaaatc

SEQ ID NO: 1467 - DNA, 50 bp, synthetic construct
  source 1..50: mol_type = other DNA
actaataacttaacatttttcttcctatttaaaaacaaaactacaaacac

SEQ ID NO: 1468 - DNA, 50 bp, synthetic construct
  source 1..50: mol_type = other DNA
cttcctatttaaaaacaaaactacaaacacrtctttaaaacttacccttc

SEQ ID NO: 1469 - DNA, 50 bp, synthetic construct
  source 1..50: mol_type = other DNA
taatacccracttacaaaaaaacccataaaatacaatacrtctactacac

SEQ ID NO: 1470 - DNA, 50 bp, synthetic construct
  source 1..50: mol_type = other DNA
catcttaaaaataatacccracttacaaaaaaacccataaaatacaatac

SEQ ID NO: 1471 - DNA, 50 bp, synthetic construct
  source 1..50: mol_type = other DNA
acataataaacctcraatttaaaccaactcaactatatactaacccracc

SEQ ID NO: 1472 - DNA, 50 bp, synthetic construct
  source 1..50: mol_type = other DNA
tataaataacatcaaaaaaacctaactcataactaaataattaaaaaacc

SEQ ID NO: 1473 - DNA, 50 bp, synthetic construct
  source 1..50: mol_type = other DNA
taccctaacctacaatatctatatactaaattaaacaacttaaattactc

SEQ ID NO: 1474 - DNA, 50 bp, synthetic construct
  source 1..50: mol_type = other DNA
tactaaacttaacaaactctaaaattaaaaaatcraaactatattctccc

SEQ ID NO: 1475 - DNA, 50 bp, synthetic construct
  source 1..50: mol_type = other DNA
atctccraccrcctaaaaattcraaactacaaaatttaaatcaaacaaac

SEQ ID NO: 1476 - DNA, 50 bp, synthetic construct
  source 1..50: mol_type = other DNA
ccaaaaaccttaataaataaaaccrttaaacctaacrcrcaactataaac

SEQ ID NO: 1477 - DNA, 50 bp, synthetic construct
  source 1..50: mol_type = other DNA
accctaattaaatccraccacraactccaaaaaccttaataaataaaacc

SEQ ID NO: 1478 - DNA, 50 bp, synthetic construct
  source 1..50: mol_type = other DNA
taaacccaaaaaaacccaacccatttactacaatcttataacaataactc

SEQ ID NO: 1479 - DNA, 50 bp, synthetic construct
  source 1..50: mol_type = other DNA
aatctaaaaaatccaacttacaaaacacataaaaaaaacccaaatcctac

SEQ ID NO: 1480 - DNA, 50 bp, synthetic construct
  source 1..50: mol_type = other DNA
actcracacttttataaaccactcaatataatctattatctaatactatc

SEQ ID NO: 1481 - DNA, 50 bp, synthetic construct
  source 1..50: mol_type = other DNA
tctaaacccaaaaccacctaaattctctcctctaactataaatatccctc

SEQ ID NO: 1482 - DNA, 50 bp, synthetic construct
  source 1..50: mol_type = other DNA
aaaactaaaactaaaattaaccctccaaacccctaaccttctacrcctac

SEQ ID NO: 1483 - DNA, 50 bp, synthetic construct
  source 1..50: mol_type = other DNA
aaacattactaaataaaacctaaatcctactccttaaaactaaaaaactc

SEQ ID NO: 1484 - DNA, 50 bp, synthetic construct
  source 1..50: mol_type = other DNA
acaataaatttttaaaaattcactaactaataaacaaacaatacacaaac

SEQ ID NO: 1485 - DNA, 50 bp, synthetic construct
  source 1..50: mol_type = other DNA
atacactaaacacatttctcacacactatcccatataatcccacatctcc

SEQ ID NO: 1486 - DNA, 50 bp, synthetic construct
  source 1..50: mol_type = other DNA
aaaataaaaccaacaaccttaattttaacaaccctccaaataactctaac

SEQ ID NO: 1487 - DNA, 50 bp, synthetic construct
  source 1..50: mol_type = other DNA
acaacatcctcatcacctaaaaacttattaaaaatacaaaatatcatacc

SEQ ID NO: 1488 - DNA, 50 bp, synthetic construct
  source 1..50: mol_type = other DNA
taaattacaaaaaatctaaaaataaactctcaccctacccccacctaccc

SEQ ID NO: 1489 - DNA, 50 bp, synthetic construct
  source 1..50: mol_type = other DNA
aacaattccaacacraaactaaaaaataacatttaatcaccacaacaacc

SEQ ID NO: 1490 - DNA, 50 bp, synthetic construct
  source 1..50: mol_type = other DNA
ttaaaactactttataaaaattttttacatctcttacctacctcaaacac

SEQ ID NO: 1491 - DNA, 50 bp, synthetic construct
  source 1..50: mol_type = other DNA
atctcttacctacctcaaacacraatacaaactaatctatctctccctac

SEQ ID NO: 1492 - DNA, 50 bp, synthetic construct
  source 1..50: mol_type = other DNA
ctacccaatcctaacattctctaaatctcaatttctctctcactaaaaac

SEQ ID NO: 1493 - DNA, 50 bp, synthetic construct
  source 1..50: mol_type = other DNA
ctataaaaataaacccctaataactataaaaaactacctaaaccaaaaac

SEQ ID NO: 1494 - DNA, 50 bp, synthetic construct
  source 1..50: mol_type = other DNA
ttctctttataaatcrtcctttccttaaactttcctttattaccccattc

SEQ ID NO: 1495 - DNA, 50 bp, synthetic construct
  source 1..50: mol_type = other DNA
acattcctttcctaaaaatcacaactcctcctacaaccrtaatcataacc

SEQ ID NO: 1496 - DNA, 50 bp, synthetic construct
  source 1..50: mol_type = other DNA
aattaaaaaaacatataccaacacccaaaaaaaactacractataaccac

SEQ ID NO: 1497 - DNA, 50 bp, synthetic construct
  source 1..50: mol_type = other DNA
ttaccttcaaaattcctataaaatttaacacataaaaaacattaaaaaac

SEQ ID NO: 1498 - DNA, 50 bp, synthetic construct
  source 1..50: mol_type = other DNA
ctccatccttcctccattcctaaaaacaaaaaccaaaaaaatatctattc

SEQ ID NO: 1499 - DNA, 50 bp, synthetic construct
  source 1..50: mol_type = other DNA
aacaatataaacccaaaaaataaacaacaacaaaatttattacaaaaaac

SEQ ID NO: 1500 - DNA, 50 bp, synthetic construct
  source 1..50: mol_type = other DNA
catcataaaaattcaaaaaattactatattctaaatatctatattccccc

SEQ ID NO: 1501 - DNA, 50 bp, synthetic construct
  source 1..50: mol_type = other DNA
aaactaactaactctctaaaacttcttttataaaaacactaatcccattc

SEQ ID NO: 1502 - DNA, 50 bp, synthetic construct
  source 1..50: mol_type = other DNA
tttcatcatattaactaaactaatctccaacrcctaacctcaaataatcc

SEQ ID NO: 1503 - DNA, 50 bp, synthetic construct
  source 1..50: mol_type = other DNA
cctattcaaataaccatattaccttaaactataaaaaaactcaataaaac

SEQ ID NO: 1504 - DNA, 50 bp, synthetic construct
  source 1..50: mol_type = other DNA
aaaataatatttcaaacaaattactataatcatttcttataattcatacc

SEQ ID NO: 1505 - DNA, 50 bp, synthetic construct
  source 1..50: mol_type = other DNA
accrttctatatacctaattctcatttcactaaatcttacrttaataatc

SEQ ID NO: 1506 - DNA, 50 bp, synthetic construct
  source 1..50: mol_type = other DNA
ttaaaaacctatctattctttaatatatcaataattttaaaatacctacc

SEQ ID NO: 1507 - DNA, 50 bp, synthetic construct
  source 1..50: mol_type = other DNA
tattctttaatatatcaataattttaaaatacctaccrcaatccttttcc

SEQ ID NO: 1508 - DNA, 50 bp, synthetic construct
  source 1..50: mol_type = other DNA
tactactaaaacaacttcracaataaatatacctaaaattataaaataac

SEQ ID NO: 1509 - DNA, 50 bp, synthetic construct
  source 1..50: mol_type = other DNA
attcttccctacattaaatatactctttctattttaatttttaatattac

SEQ ID NO: 1510 - DNA, 50 bp, synthetic construct
  source 1..50: mol_type = other DNA
ctaaattcataacctttcaataaaataatctcctaatttaaatttatccc

SEQ ID NO: 1511 - DNA, 50 bp, synthetic construct
  source 1..50: mol_type = other DNA
cccaatcatcttcctttttaaccaatcttaacatcccaaaaactccaaac

SEQ ID NO: 1512 - DNA, 50 bp, synthetic construct
  source 1..50: mol_type = other DNA
aactaaccracactataactcattcctataatcctaacacttaaaaaacc

SEQ ID NO: 1513 - DNA, 50 bp, synthetic construct
  source 1..50: mol_type = other DNA
tcrccctaaattctttcttatacraaatccataaacctctcttaaaatcc

SEQ ID NO: 1514 - DNA, 50 bp, synthetic construct
  source 1..50: mol_type = other DNA
aacttactctcactttacattacraactcrccctaaattctttcttatac

SEQ ID NO: 1515 - DNA, 50 bp, synthetic construct
  source 1..50: mol_type = other DNA
tcaccctattaaccaaaataatctcaatctcctaaccttataatctaccc

SEQ ID NO: 1516 - DNA, 50 bp, synthetic construct
  source 1..50: mol_type = other DNA
atatcaaccaataaataactaaaataaatacttaacacaaaaaaccraac

SEQ ID NO: 1517 - DNA, 50 bp, synthetic construct
  source 1..50: mol_type = other DNA
caaaatatcaaccaataaataactaaaataaatacttaacacaaaaaacc

SEQ ID NO: 1518 - DNA, 50 bp, synthetic construct
  source 1..50: mol_type = other DNA
aaaaacaaacatcatttctaaaccraccaacaaaaatcrtaaaaacaaac

SEQ ID NO: 1519 - DNA, 50 bp, synthetic construct
  source 1..50: mol_type = other DNA
aacratacccatactataaaaacrtaaaaaacaaacatcatttctaaacc

SEQ ID NO: 1520 - DNA, 50 bp, synthetic construct
  source 1..50: mol_type = other DNA
accrattcaaaaataatacctatctcctacrctcccacaacataaatatc

SEQ ID NO: 1521 - DNA, 50 bp, synthetic construct
  source 1..50: mol_type = other DNA
taactacaaacraaacctaaaactaaaaatcaaaataccctactaacrcc

SEQ ID NO: 1522 - DNA, 50 bp, synthetic construct
  source 1..50: mol_type = other DNA
aacaaaaaaacracrtcaacaaaatatcttaacctccaatcctaaactcc

SEQ ID NO: 1523 - DNA, 50 bp, synthetic construct
  source 1..50: mol_type = other DNA
ccctacctctacctctaaaaaacaacaaaccatcccatatataaaaaatc

SEQ ID NO: 1524 - DNA, 50 bp, synthetic construct
  source 1..50: mol_type = other DNA
aacaaaccatcccatatataaaaaatcracttatttccccacctaattcc

SEQ ID NO: 1525 - DNA, 50 bp, synthetic construct
  source 1..50: mol_type = other DNA
ccatatataaaaaatcracttatttccccacctaattccraaaatccctc

SEQ ID NO: 1526 - DNA, 50 bp, synthetic construct
  source 1..50: mol_type = other DNA
acacatctataaatccataaatacccccacactctaaaacataattaacc

SEQ ID NO: 1527 - DNA, 50 bp, synthetic construct
  source 1..50: mol_type = other DNA
atttattaaacacrcactataactcctatcctaataaaaactaatctaac

SEQ ID NO: 1528 - DNA, 50 bp, synthetic construct
  source 1..50: mol_type = other DNA
ttattaaacacrcactataactcctatcctaataaaaactaatctaacrc

SEQ ID NO: 1529 - DNA, 50 bp, synthetic construct
  source 1..50: mol_type = other DNA
atatatacccaaatactacaacaatccraattaaatcttaacrattcctc

SEQ ID NO: 1530 - DNA, 50 bp, synthetic construct
  source 1..50: mol_type = other DNA
cctatactacaatttccaacaaacaacaaaaaaattcccaacraaaaatc

SEQ ID NO: 1531 - DNA, 50 bp, synthetic construct
  source 1..50: mol_type = other DNA
actacacccaaaatataactataatatatacccaaatactacaacaatcc

SEQ ID NO: 1532 - DNA, 50 bp, synthetic construct
  source 1..50: mol_type = other DNA
craaatcttactaattactaacacaacaatctaaaatcaaactacaaaac

SEQ ID NO: 1533 - DNA, 50 bp, synthetic construct
  source 1..50: mol_type = other DNA
aaacrtaaaaccctccraaccaaatacraaatataatctcctaatatacc

SEQ ID NO: 1534 - DNA, 50 bp, synthetic construct
  source 1..50: mol_type = other DNA
crtaaacrtaaaaccctccraaccaaatataaaatataatctcrtaatac

SEQ ID NO: 1535 - DNA, 50 bp, synthetic construct
  source 1..50: mol_type = other DNA
accaaatacaaaaattcacccacacataaaaaatcaacacaaaaactctc

SEQ ID NO: 1536 - DNA, 50 bp, synthetic construct
  source 1..50: mol_type = other DNA
aatatttacctaactactaaccattactcttaaacaccatctactaaatc

SEQ ID NO: 1537 - DNA, 50 bp, synthetic construct
  source 1..50: mol_type = other DNA
aaataaaacaatacactctaactaaactacaaaaaaaatactatatacac

SEQ ID NO: 1538 - DNA, 50 bp, synthetic construct
  source 1..50: mol_type = other DNA
ttatcaaaactttttaaaaaaatattattaatttcccaatcttcctattc

SEQ ID NO: 1539 - DNA, 50 bp, synthetic construct
  source 1..50: mol_type = other DNA
atcaaaatactaacacccacttattataacttaatccttatacatataac

SEQ ID NO: 1540 - DNA, 50 bp, synthetic construct
  source 1..50: mol_type = other DNA
cctaactctaaaattatatcataaatcaaaaaataactttcttcaaaacc

SEQ ID NO: 1541 - DNA, 50 bp, synthetic construct
  source 1..50: mol_type = other DNA
accttcctaatatacatttttctatcaaattaatatcaaaaaccttaatc

SEQ ID NO: 1542 - DNA, 50 bp, synthetic construct
  source 1..50: mol_type = other DNA
ctcattccaaatccttaaatataactaaatctttaaaaacaattataatc

SEQ ID NO: 1543 - DNA, 50 bp, synthetic construct
  source 1..50: mol_type = other DNA
actaaaaccacaaataaaaaacttcaaaaaacaacccaataactaaacac

SEQ ID NO: 1544 - DNA, 50 bp, synthetic construct
  source 1..50: mol_type = other DNA
tcaccrtattaaccaaaataatcttattctcctaacctcataatctaccc

SEQ ID NO: 1545 - DNA, 50 bp, synthetic construct
  source 1..50: mol_type = other DNA
aactaccctcatctcaatttttcattaatttcccctattaactaacaacc

SEQ ID NO: 1546 - DNA, 50 bp, synthetic construct
  source 1..50: mol_type = other DNA
ccttattactaaaaacaactacctttatcatcacaacctccccrctaatc

SEQ ID NO: 1547 - DNA, 50 bp, synthetic construct
  source 1..50: mol_type = other DNA
tttctctccttattactaaaaacaactacctttatcatcacaacctcccc

SEQ ID NO: 1548 - DNA, 50 bp, synthetic construct
  source 1..50: mol_type = other DNA
ataacaataatctaaacataaaaaatacaatactaatattaaattacaac

SEQ ID NO: 1549 - DNA, 50 bp, synthetic construct
  source 1..50: mol_type = other DNA
tatttcacatataaaataataacataaaacctaactcataaaatcactac

SEQ ID NO: 1550 - DNA, 50 bp, synthetic construct
  source 1..50: mol_type = other DNA
ccttaaaccttaatactttactaaaatcaaaaactttataaactaaatac

SEQ ID NO: 1551 - DNA, 50 bp, synthetic construct
  source 1..50: mol_type = other DNA
ataatacaatctataaaaacaatcttaaaatttaaataaactatctaaac

SEQ ID NO: 1552 - DNA, 50 bp, synthetic construct
  source 1..50: mol_type = other DNA
atctatattatatccaacaaacaaatataccacccrtcratataaaaaac

SEQ ID NO: 1553 - DNA, 50 bp, synthetic construct
  source 1..50: mol_type = other DNA
acctttcaatttcctatctatattatatccaacaaacaaatataccaccc

SEQ ID NO: 1554 - DNA, 50 bp, synthetic construct
  source 1..50: mol_type = other DNA
aatataaaatcacttcctcctctatacaccraataatatctcacccatcc

SEQ ID NO: 1555 - DNA, 50 bp, synthetic construct
  source 1..50: mol_type = other DNA
aaattatttaattattttcccaacattctaatttataccacaaaattacc

SEQ ID NO: 1556 - DNA, 50 bp, synthetic construct
  source 1..50: mol_type = other DNA
taaaaaattttaacttcaaacttaaatcaataaatactacttctaaccac

SEQ ID NO: 1557 - DNA, 50 bp, synthetic construct
  source 1..50: mol_type = other DNA
acaatattcattaatttaaatctaaaattaaaacttctcacttctttctc

SEQ ID NO: 1558 - DNA, 50 bp, synthetic construct
  source 1..50: mol_type = other DNA
cctcctaactcaaaacrtaaactaataattaattacaatttcaattcttc

SEQ ID NO: 1559 - DNA, 50 bp, synthetic construct
  source 1..50: mol_type = other DNA
aaaataacacaattaaattctctaaaaaaattcataaattataaaacctc

SEQ ID NO: 1560 - DNA, 50 bp, synthetic construct
  source 1..50: mol_type = other DNA
acaatctttaataaaattttaaaatctaccctctttcttaaccaaaacac

SEQ ID NO: 1561 - DNA, 50 bp, synthetic construct
  source 1..50: mol_type = other DNA
taaaattttaaaatctaccctctttcttaaccaaaacacrctacaaacac

SEQ ID NO: 1562 - DNA, 50 bp, synthetic construct
  source 1..50: mol_type = other DNA
crctacaaacacrtcaaaataatcraaatcccctaacaataaataaattc

SEQ ID NO: 1563 - DNA, 50 bp, synthetic construct
  source 1..50: mol_type = other DNA
cttattatacctcctcctcaaaatatacctaaccactcctcctttatttc

SEQ ID NO: 1564 - DNA, 50 bp, synthetic construct
  source 1..50: mol_type = other DNA
caaaataatttaattcttcccaaatctccccttatcacaaacttatcctc

SEQ ID NO: 1565 - DNA, 50 bp, synthetic construct
  source 1..50: mol_type = other DNA
caaaaaaaaacctttcctactacaacaactttctaacaaaaaaaatatcc

SEQ ID NO: 1566 - DNA, 50 bp, synthetic construct
  source 1..50: mol_type = other DNA
aactttctaacaaaaaaaatatccrctccctctactaactcctacttccc

SEQ ID NO: 1567 - DNA, 50 bp, synthetic construct
  source 1..50: mol_type = other DNA
tttccaaaacctaactcccaaccccacctactaaaaaaatcttaaaattc

SEQ ID NO: 1568 - DNA, 50 bp, synthetic construct
  source 1..50: mol_type = other DNA
taaaactaaaaatcaaaccctaaaaaccaattcctccaacaaaacaaaac

SEQ ID NO: 1569 - DNA, 50 bp, synthetic construct
  source 1..50: mol_type = other DNA
aaaaatcaaaccctaaaaaccaattcctccaacaaaacaaaacrccaaac

SEQ ID NO: 1570 - DNA, 50 bp, synthetic construct
  source 1..50: mol_type = other DNA
tctactaaccttctctcracccttccttcacttacctaaaaacaaataac

SEQ ID NO: 1571 - DNA, 50 bp, synthetic construct
  source 1..50: mol_type = other DNA
taaaatccaaacttttacaatccaaaactaaactttacccccaaacaccc

SEQ ID NO: 1572 - DNA, 50 bp, synthetic construct
  source 1..50: mol_type = other DNA
aataataaattactacrtaaaaaaataaatctacaaccttccaaactttc

SEQ ID NO: 1573 - DNA, 50 bp, synthetic construct
  source 1..50: mol_type = other DNA
aaacraacccatttaataaattctataaatcaaactaaccttctctcctc

SEQ ID NO: 1574 - DNA, 50 bp, synthetic construct
  source 1..50: mol_type = other DNA
aaaaccaacctaatttacaaaatttaccaaataaatccrtttttcacccc

SEQ ID NO: 1575 - DNA, 50 bp, synthetic construct
  source 1..50: mol_type = other DNA
tattaccataataataaaaacaaactcctactaaaactctaactataatc

SEQ ID NO: 1576 - DNA, 50 bp, synthetic construct
  source 1..50: mol_type = other DNA
tcaaacrtcaattaaatcctttacaaccaaacaaatctaaattccaatcc

SEQ ID NO: 1577 - DNA, 50 bp, synthetic construct
  source 1..50: mol_type = other DNA
aaaaaacactctaaacatacrcracactttacaattcacactatactacc

SEQ ID NO: 1578 - DNA, 50 bp, synthetic construct
  source 1..50: mol_type = other DNA
aactttctcatcacaatattataaatacccaaactcaataaaaactaaac

SEQ ID NO: 1579 - DNA, 50 bp, synthetic construct
  source 1..50: mol_type = other DNA
aacaacatatacaaaaatccctcactaaaaaacaaatccaaccctaacac

SEQ ID NO: 1580 - DNA, 50 bp, synthetic construct
  source 1..50: mol_type = other DNA
aatctaaacttaaatcctaacacttctaccctaaactataaaactaaacc

SEQ ID NO: 1581 - DNA, 50 bp, synthetic construct
  source 1..50: mol_type = other DNA
acctatcttatactataacccacaaacracaaactaaaaccaaataaaac

SEQ ID NO: 1582 - DNA, 50 bp, synthetic construct
  source 1..50: mol_type = other DNA
aaaaaaaaacaacccccttccctacctatcttatactataacccacaaac

SEQ ID NO: 1583 - DNA, 50 bp, synthetic construct
  source 1..50: mol_type = other DNA
ataattcaaaaataactatcaaaaactaactcttccctctctaaaaacac

SEQ ID NO: 1584 - DNA, 50 bp, synthetic construct
  source 1..50: mol_type = other DNA
accaaactaccttcaataaaaaacacaaccaaaattaatatattaaatac

SEQ ID NO: 1585 - DNA, 50 bp, synthetic construct
  source 1..50: mol_type = other DNA
ttatccttaaacacrcatcraacacaattaatacaacraataaactacac

SEQ ID NO: 1586 - DNA, 50 bp, synthetic construct
  source 1..50: mol_type = other DNA
tccctaataaaataaacccratacctcaaataaaaatacaaaaatcaccc

SEQ ID NO: 1587 - DNA, 50 bp, synthetic construct; identical to SEQ ID NO: 1586
  source 1..50: mol_type = other DNA

SEQ ID NO: 1588 - DNA, 50 bp, synthetic construct
  source 1..50: mol_type = other DNA
tccctaataaaataaacccaatacctcaaataaaaatacaaaaatcaccc

SEQ ID NO: 1589 - DNA, 50 bp, synthetic construct; identical to SEQ ID NO: 1588
  source 1..50: mol_type = other DNA

SEQ ID NO: 1590 - DNA, 50 bp, synthetic construct
  source 1..50: mol_type = other DNA
tccaacctacrtcataaaaccctaaacrtaactacaaaatttaaaaaacc

SEQ ID NO: 1591 - DNA, 50 bp, synthetic construct
  source 1..50: mol_type = other DNA
atcttaaactactaccaaataaaaacataaccataaattaaataacaaac

SEQ ID NO: 1592 - DNA, 50 bp, synthetic construct
  source 1..50: mol_type = other DNA
taaccaaaaccaatataatcctaaaaaacttacaaatacacccaaaatac

SEQ ID NO: 1593 - DNA, 50 bp, synthetic construct
  source 1..50: mol_type = other DNA
ctccaaaactacattaattttaactataacataaccaaaaactctaaatc

SEQ ID NO: 1594 - DNA, 50 bp, synthetic construct
  source 1..50: mol_type = other DNA
acattaattttaactataacataaccaaaaactctaaatcrataatcacc

SEQ ID NO: 1595 - DNA, 50 bp, synthetic construct
  source 1..50: mol_type = other DNA
taattttaactataacataaccaaaaactctaaatcrataatcaccraac

SEQ ID NO: 1596 - DNA, 50 bp, synthetic construct
  source 1..50: mol_type = other DNA
attactacaaaaaacacratttcattctttttataactacataatattcc

SEQ ID NO: 1597 - DNA, 50 bp, synthetic construct
  source 1..50: mol_type = other DNA
cccaaatctattaatcccaaaaaaatatccccccacacaaaaaatatccc

SEQ ID NO: 1598 - DNA, 50 bp, synthetic construct
  source 1..50: mol_type = other DNA
tttctaaaaccaacaaacctaaatctaaatacccatcctaccrcttcctc

SEQ ID NO: 1599 - DNA, 50 bp, synthetic construct
  source 1..50: mol_type = other DNA
tccatctctctcaacctcattatcctcatctataaaataaaaataataac

SEQ ID NO: 1600 - DNA, 50 bp, synthetic construct
  source 1..50: mol_type = other DNA
aataatattaattaccattaacaacactaaatacttaaaatatataatcc

SEQ ID NO: 1601 - DNA, 50 bp, synthetic construct
  source 1..50: mol_type = other DNA
actattctttactacttactaaaaatcttcaaacttcttttaaaataacc

SEQ ID NO: 1602 - DNA, 50 bp, synthetic construct
  source 1..50: mol_type = other DNA
acaaaataaaataataacracccctaaaactaacaaattacaaaccttcc

SEQ ID NO: 1603 - DNA, 50 bp, synthetic construct
  source 1..50: mol_type = other DNA
aacaataaaaaacaacccraaaaatctacaacctatcaactccaaaaacc

SEQ ID NO: 1604 - DNA, 50 bp, synthetic construct
  source 1..50: mol_type = other DNA
aaacacaccaactcatcccacaatactaaactaaacccctctaatactac

SEQ ID NO: 1605 - DNA, 50 bp, synthetic construct
  source 1..50: mol_type = other DNA
craaaactactaatactttttaaccttccaaaaactattccrattaaacc

SEQ ID NO: 1606 - DNA, 50 bp, synthetic construct
  source 1..50: mol_type = other DNA
aaaaacctaccacttcttaccttcatttaataaaaaataacratttaacc

SEQ ID NO: 1607 - DNA, 50 bp, synthetic construct
  source 1..50: mol_type = other DNA
attaatactaaacctaaatcccaaacaaaccatttcaacataaaaaatac

SEQ ID NO: 1608 - DNA, 50 bp, synthetic construct
  source 1..50: mol_type = other DNA
atctataacttacacactaaaaaacaacraaacccaattactcaaaaccc

SEQ ID NO: 1609 - DNA, 50 bp, synthetic construct
  source 1..50: mol_type = other DNA
ctaaaattcccaaaaaaaaacctcataaatccaaacaatatctaatatcc

SEQ ID NO: 1610 - DNA, 50 bp, synthetic construct
  source 1..50: mol_type = other DNA
aaccaaaaaccaaattttcttataaaaatataacaactcctcctacaatc

SEQ ID NO: 1611 - DNA, 50 bp, synthetic construct
  source 1..50: mol_type = other DNA
ctctactcatacaaattttacctttccctttatacctcactccacctcac

SEQ ID NO: 1612 - DNA, 50 bp, synthetic construct
  source 1..50: mol_type = other DNA
atcctttcaatacctaaaacataaaaaatatctccttataacaccaaccc

SEQ ID NO: 1613 - DNA, 50 bp, synthetic construct
  source 1..50: mol_type = other DNA
ttataccttaaacattaaaaaaatactccttccaaaaaacctttcccaac

SEQ ID NO: 1614 - DNA, 50 bp, synthetic construct
  source 1..50: mol_type = other DNA
caaaactaaattactcttaaacccaaaacaaacaaattcttttcaaaaac

SEQ ID NO: 1615 - DNA, 50 bp, synthetic construct
  source 1..50: mol_type = other DNA
ccataaacaaaatctctacaacactataacatattcrtaataaccataac

SEQ ID NO: 1616 - DNA, 50 bp, synthetic construct
  source 1..50: mol_type = other DNA
taactcccaaaatattataccccttaaacccaaaacctactaaaccaaac

SEQ ID NO: 1617 - DNA, 50 bp, synthetic construct
  source 1..50: mol_type = other DNA
caaaaaaaatttctattatcactttctttcactataattttctaacaacc

SEQ ID NO: 1618 - DNA, 50 bp, synthetic construct
  source 1..50: mol_type = other DNA
ataattaaacaaaaacctccacaaactcraaactaaacaccaaaacaccc

SEQ ID NO: 1619 - DNA, 50 bp, synthetic construct
  source 1..50: mol_type = other DNA
taacctactttttcacttaatcacctctcccaaacatattattatatatc

SEQ ID NO: 1620 - DNA, 50 bp, synthetic construct
  source 1..50: mol_type = other DNA
tctttaaacatcttctctaaacacaataaataacraacaaaaacaaaacc

SEQ ID NO: 1621 - DNA, 50 bp, synthetic construct
  source 1..50: mol_type = other DNA
tcttatactaaatatctaatatatcttatatcacrattttattcttaccc

SEQ ID NO: 1622 - DNA, 50 bp, synthetic construct
  source 1..50: mol_type = other DNA
atattttcacttacrtttttctatataatacatcaaattacctattcttc

SEQ ID NO: 1623 - DNA, 50 bp, synthetic construct
  source 1..50: mol_type = other DNA
ataaacaccaataaaaaaacatcttcacttaaaaatcttatatctaaaac

SEQ ID NO: 1624 - DNA, 50 bp, synthetic construct
  source 1..50: mol_type = other DNA
atctcatccaatttcatacaattcacaattataacratttacaaaaatac

SEQ ID NO: 1625 - DNA, 50 bp, synthetic construct
  source 1..50: mol_type = other DNA
tataaacctctaaaaatacatatttaaaaaccatcrcattcctataaatc

SEQ ID NO: 1626 - DNA, 50 bp, synthetic construct
  source 1..50: mol_type = other DNA
aaaaaaacaaattattctaaatacaaaaaaataactatctaccctaaacc

SEQ ID NO: 1627 - DNA, 50 bp, synthetic construct
  source 1..50: mol_type = other DNA
aaaaaccacattctaccaaaatataacaaatactatatcacaataataac

SEQ ID NO: 1628 - DNA, 50 bp, synthetic construct
  source 1..50: mol_type = other DNA
tcctaatattaactccactcaccttaaaaatactaactatctcaccaacc

SEQ ID NO: 1629 - DNA, 50 bp, synthetic construct
  source 1..50: mol_type = other DNA
accacaataacaatcatcratataatatcaaacacaccccaataactctc

SEQ ID NO: 1630 - DNA, 50 bp, synthetic construct
  source 1..50: mol_type = other DNA
aaaatcactaaaatatacctaacaccatatcrataactaccactataacc

SEQ ID NO: 1631 - DNA, 50 bp, synthetic construct
  source 1..50: mol_type = other DNA
aaaaacaacrtaaaacttcctactttacacttcaactcaacaaaaaaacc

SEQ ID NO: 1632 - DNA, 50 bp, synthetic construct
  source 1..50: mol_type = other DNA
actcaacaaaaaaaccrtaccaaaacccttaaaaaaaaacactaacattc

SEQ ID NO: 1633 - DNA, 50 bp, synthetic construct
  source 1..50: mol_type = other DNA
accaaaaaattcctattaccaaaacattctcaatattttaaaattacacc

SEQ ID NO: 1634 - DNA, 50 bp, synthetic construct
  source 1..50: mol_type = other DNA
taattcaaaattaaacaaacaaaaataaacattttataccaatccttcac

SEQ ID NO: 1635 - DNA, 50 bp, synthetic construct
  source 1..50: mol_type = other DNA
aattacaacaacctatccctattaaattttacctccataaccataaaacc

SEQ ID NO: 1636 - DNA, 50 bp, synthetic construct
  source 1..50: mol_type = other DNA
aaccaactttatctaaattaatcaattaaaacaattaaaaaactaaatac

SEQ ID NO: 1637 - DNA, 50 bp, synthetic construct
  source 1..50: mol_type = other DNA
taaatttaaattaataaataattcactctttaaaactcccaattatcatc

SEQ ID NO: 1638 - DNA, 50 bp, synthetic construct
  source 1..50: mol_type = other DNA
atattactaaacactcactaaaattaataacaacacaataactcctcctc

SEQ ID NO: 1639 - DNA, 50 bp, synthetic construct
  source 1..50: mol_type = other DNA
tattataacrttaacatactcaaatatcaaataaacctatttacataatc

SEQ ID NO: 1640 - DNA, 50 bp, synthetic construct
  source 1..50: mol_type = other DNA
atactactatctaatcrttcctctaaaaattttatctcaaaaaaataccc

SEQ ID NO: 1641 - DNA, 50 bp, synthetic construct
  source 1..50: mol_type = other DNA
acttccaatatacaaaaatattcatttatcatactttctaactcaaatac

SEQ ID NO: 1642 - DNA, 50 bp, synthetic construct
  source 1..50: mol_type = other DNA
atttacaccaattcaaataaaccacaatcctaaaataccccacccaaatc

SEQ ID NO: 1643 - DNA, 50 bp, synthetic construct
  source 1..50: mol_type = other DNA
tacatacacctcttaaaaaaacaatttactcccaaactccrtataataac

SEQ ID NO: 1644 - DNA, 50 bp, synthetic construct
  source 1..50: mol_type = other DNA
aaaaccacaaatacacaaaaaacctccrcaaaaccttatcctaacaaatc

SEQ ID NO: 1645 - DNA, 50 bp, synthetic construct
  source 1..50: mol_type = other DNA
aacaacacaacactctaaaaataaaaaccacaaatacacaaaaaacctcc

SEQ ID NO: 1646 - DNA, 50 bp, synthetic construct
  source 1..50: mol_type = other DNA
taaccctcatccccaaaatactatactattaccctataaattactatatc

SEQ ID NO: 1647 - DNA, 50 bp, synthetic construct
  source 1..50: mol_type = other DNA
cccaaaatactatactattaccctataaattactatatcraaataaaaac

SEQ ID NO: 1648 - DNA, 50 bp, synthetic construct
  source 1..50: mol_type = other DNA
atactatactattaccctataaattactatatcraaataaaaacrataac

SEQ ID NO: 1649 - DNA, 50 bp, synthetic construct
  source 1..50: mol_type = other DNA
attcatttttttcttaataaacaaatttaaacaacccaaaaataaaactc

SEQ ID NO: 1650 - DNA, 50 bp, synthetic construct
  source 1..50: mol_type = other DNA
taattacraaatctataaaaaacctttaaacacaaatcctccctcatacc

SEQ ID NO: 1651 - DNA, 50 bp, synthetic construct
  source 1..50: mol_type = other DNA
taaccrctaaaaaatcttataaatcctaactcatttcctcatctaattac

SEQ ID NO: 1652 - DNA, 50 bp, synthetic construct
  source 1..50: mol_type = other DNA
aattctccttctatcaatcatctacactacaaaaacttaaaatacactcc

SEQ ID NO: 1653 - DNA, 50 bp, synthetic construct
  source 1..50: mol_type = other DNA
aataaaccaataatctaatcatatcacaaactacttttctttctaacacc

SEQ ID NO: 1654 - DNA, 50 bp, synthetic construct
  source 1..50: mol_type = other DNA
aaatactaaacaaaaaattaaaatcctctaaaaatctactattataatac

SEQ ID NO: 1655 - DNA, 50 bp, synthetic construct
  source 1..50: mol_type = other DNA
taaaaaaataccacctaaacccatcttcctaccctctaattaaaactaac

SEQ ID NO: 1656 - DNA, 50 bp, synthetic construct
  source 1..50: mol_type = other DNA
aaatttacccccacccaaaactaacaaattaactttactcaacatacccc

SEQ ID NO: 1657 - DNA, 50 bp, synthetic construct
  source 1..50: mol_type = other DNA
aaactaaactcctcacttactaactaaacrccttccaaaaaccaaaattc

SEQ ID NO: 1658 - DNA, 50 bp, synthetic construct
  source 1..50: mol_type = other DNA
tctatatactcataaacaatacctaatacraatcctaactcttaaaaaac

SEQ ID NO: 1659 - DNA, 50 bp, synthetic construct
  source 1..50: mol_type = other DNA
attactccaataaatctaaaaaatatacacctccttaaaaattcctactc

SEQ ID NO: 1660 - DNA, 50 bp, synthetic construct
  source 1..50: mol_type = other DNA
aaaaacraaaaacctaaatttatcacctaaaccccaaaaccracatatcc

SEQ ID NO: 1661 - DNA, 50 bp, synthetic construct
  source 1..50: mol_type = other DNA
atccccactaacttaactaaccctcaaaaaataaatcaacctctacaacc

SEQ ID NO: 1662 - DNA, 50 bp, synthetic construct
  source 1..50: mol_type = other DNA
tccttaataaccctaaacctcttacaaaaaaatccctaatcccaaccaac

SEQ ID NO: 1663 - DNA, 50 bp, synthetic construct
  source 1..50: mol_type = other DNA
aattcataaaattcaaaacctaataacrcctctaaatctcactaacrtcc

SEQ ID NO: 1664 - DNA, 50 bp, synthetic construct
  source 1..50: mol_type = other DNA
tcctaactatataatcttatcaaatcacttctattcacttaaaataaaac

SEQ ID NO: 1665 - DNA, 50 bp, synthetic construct
  source 1..50: mol_type = other DNA
taaaaaacaaactaccctattccatacratcataaaacctaaaaaaatcc

SEQ ID NO: 1666 - DNA, 50 bp, synthetic construct
  source 1..50: mol_type = other DNA
tccaaactctactcctccaacattaaaaaacaaactaccctattccatac

SEQ ID NO: 1667 - DNA, 50 bp, synthetic construct
  source 1..50: mol_type = other DNA
aataaaacttaaaaaaatttactactaaactcrctacrctaaccaaacac

SEQ ID NO: 1668 - DNA, 50 bp, synthetic construct
  source 1..50: mol_type = other DNA
rtaatcacaataacttcaaaaaaactcrcacaacaatttccattaactac

SEQ ID NO: 1669 - DNA, 50 bp, synthetic construct
  source 1..50: mol_type = other DNA
ccttccctaatcactaaatctcctctaaaaactcaatataaacatccaac

SEQ ID NO: 1670 - DNA, 50 bp, synthetic construct
  source 1..50: mol_type = other DNA
ccaactataaaaaattttttatcttaaattcccacaattacaaatttccc

SEQ ID NO: 1671 - DNA, 50 bp, synthetic construct
  source 1..50: mol_type = other DNA
ttaacttctaccacttcctctttccattcttccatttaaataaatattcc

SEQ ID NO: 1672 - DNA, 50 bp, synthetic construct
  source 1..50: mol_type = other DNA
atactcctctaaaacaaaacttccaaaaaaacratcaaacaacaacattc

SEQ ID NO: 1673 - DNA, 50 bp, synthetic construct
  source 1..50: mol_type = other DNA
tccatataaaaaactaaacctacctacrcctacrcaatacaacttaatac

SEQ ID NO: 1674 - DNA, 50 bp, synthetic construct
  source 1..50: mol_type = other DNA
cctaaaatccraaattataacraaaaccctaaaataaacraatttctccc

SEQ ID NO: 1675 - DNA, 50 bp, synthetic construct
  source 1..50: mol_type = other DNA
ctataaaatctcctaaaatccraaattataacraaaaccctaaaataaac

SEQ ID NO: 1676 - DNA, 50 bp, synthetic construct
  source 1..50: mol_type = other DNA
ctaaaccraaaaacractctataaaatctcctaaaatccraaattataac

SEQ ID NO: 1677 - DNA, 50 bp, synthetic construct
  source 1..50: mol_type = other DNA
acaaaaaccacctaaaccraaaaacractctataaaatctcctaaaatcc

SEQ ID NO: 1678 - DNA, 50 bp, synthetic construct
  source 1..50: mol_type = other DNA
aaactcctccacccaatcactccttaccttaaactaaccraaaatttaac

SEQ ID NO: 1679 - DNA, 50 bp, synthetic construct
  source 1..50: mol_type = other DNA
tcaattaccaaataataccaaacatttcttcaaaccttctccaacatatc

SEQ ID NO: 1680 - DNA, 50 bp, synthetic construct
  source 1..50: mol_type = other DNA
taaaaacrattaaacacccacaaaccrtacattcctataccctaaataac

SEQ ID NO: 1681 - DNA, 50 bp, synthetic construct
  source 1..50: mol_type = other DNA
actaactaactcrctaaatacaccaaaactcccaattaaatatactaacc

SEQ ID NO: 1682 - DNA, 50 bp, synthetic construct
  source 1..50: mol_type = other DNA
tacaataaacactaataaccaacctacacctacaactaactaactaactc

SEQ ID NO: 1683 - DNA, 50 bp, synthetic construct
  source 1..50: mol_type = other DNA
cactacatccctatcataactcaaccccaaaaaaaaccttatacaaatcc

SEQ ID NO: 1684 - DNA, 50 bp, synthetic construct
  source 1..50: mol_type = other DNA
atccrttcatataaaataactaatttaaaacttaacctaattaaccaaac

SEQ ID NO: 1685 - DNA, 50 bp, synthetic construct
  source 1..50: mol_type = other DNA
aaatttatccaaatcctcacaactaaactctaaaaaatacaaaataaaac

SEQ ID NO: 1686 - DNA, 50 bp, synthetic construct
  source 1..50: mol_type = other DNA
craaatctcrctaattactaacacaacaatctaaaatcaaactacaaaac

SEQ ID NO: 1687 - DNA, 50 bp, synthetic construct; identical to SEQ ID NO: 1686
  source 1..50: mol_type = other DNA

SEQ ID NO: 1688 - DNA, 50 bp, synthetic construct
  source 1..50: mol_type = other DNA
raaactccrtaaacrtaaaaccctccraaccaaatataaaatataatctc

SEQ ID NO: 1689 - DNA, 50 bp, synthetic construct
  source 1..50: mol_type = other DNA
aataaatcttcctccatccttttattttaaacrtatatatatctctacac

SEQ ID NO: 1690 - DNA, 50 bp, synthetic construct
  source 1..50: mol_type = other DNA
tcattatctacccaaaacctatataccaaacttatttatcaaacctatac

SEQ ID NO: 1691 - DNA, 50 bp, synthetic construct
  source 1..50: mol_type = other DNA
taccaaacttatttatcaaacctatacrtccaaaacctatattccccctc

SEQ ID NO: 1692 - DNA, 50 bp, synthetic construct
  source 1..50: mol_type = other DNA
ctataatcaaaaataaccaaaaacaaacatctaatccaacataactcaac

SEQ ID NO: 1693 - DNA, 50 bp, synthetic construct
  source 1..50: mol_type = other DNA
rccacttaaaaaacattaaataatcacacacataaactcattcttaactc

SEQ ID NO: 1694 - DNA, 50 bp, synthetic construct
  source 1..50: mol_type = other DNA
attcraacttcctaactactttatttacctaaacaaacctaaacaataac

SEQ ID NO: 1695 - DNA, 50 bp, synthetic construct
  source 1..50: mol_type = other DNA
aaaaaaccaaaataaccraacaaaaacaactccratctacaactcccaac

SEQ ID NO: 1696 - DNA, 50 bp, synthetic construct
  source 1..50: mol_type = other DNA
actaacrtaaacacrataattaaacttcttatataataactcaaatctcc

SEQ ID NO: 1697 - DNA, 50 bp, synthetic construct
  source 1..50: mol_type = other DNA
aaatactctaattcraaaatctaaatcaccatacaaaaaattcaactatc

SEQ ID NO: 1698 - DNA, 50 bp, synthetic construct
  source 1..50: mol_type = other DNA
taattcraaaatctaaatcaccatacaaaaaattcaactatcrtacttac

SEQ ID NO: 1699 - DNA, 50 bp, synthetic construct
  source 1..50: mol_type = other DNA
tatacracttctacrtttaacctaaactttctcacaacattatacttcac

SEQ ID NO: 1700 - DNA, 50 bp, synthetic construct
  source 1..50: mol_type = other DNA
aaaattcaactatcrtaaaacacaatactataaaaaaacccaaaccaaac

SEQ ID NO: 1701 - DNA, 50 bp, synthetic construct
  source 1..50: mol_type = other DNA
aaataaatatcacccctaccrtttataatcctcccaataatctacatctc

SEQ ID NO: 1702 - DNA, 50 bp, synthetic construct
  source 1..50: mol_type = other DNA
ccrtttataatcctcccaataatctacatctcrttttatcrtaactaatc

SEQ ID NO: 1703 - DNA, 50 bp, synthetic construct
  source 1..50: mol_type = other DNA
ttcctttaaaaactattaaacaaacacattaaaaaacactataacraacc

SEQ ID NO: 1704 - DNA, 50 bp, synthetic construct
  source 1..50: mol_type = other DNA
aacaaacacattaaaaaacactataacraaccraaattcctacrataaac

SEQ ID NO: 1705 - DNA, 50 bp, synthetic construct
  source 1..50: mol_type = other DNA
atcactaaatcaaaaaattaaaaccatcctaactaacacrataaaacccc

SEQ ID NO: 1706 - DNA, 50 bp, synthetic construct
  source 1..50: mol_type = other DNA
aaatccaaaactcataaatctaaaatacaacrttcttccaccctcaaacc

SEQ ID NO: 1707 - DNA, 50 bp, synthetic construct
  source 1..50: mol_type = other DNA
attttctaaccttacctaaaatacaaatttttcttattttatatatattc

SEQ ID NO: 1708 - DNA, 50 bp, synthetic construct
  source 1..50: mol_type = other DNA
aaaactattttcaaatatacaaatactattttataaaaacacacacacac

SEQ ID NO: 1709 - DNA, 50 bp, synthetic construct
  source 1..50: mol_type = other DNA
ccttttaatacacaccaatttacttatatccttttaaaatcataatatcc

SEQ ID NO: 1710 - DNA, 50 bp, synthetic construct
  source 1..50: mol_type = other DNA
aaaaaaatttccaacccaactataaacatcaatacacatatattaataac

SEQ ID NO: 1711 - DNA, 50 bp, synthetic construct
  source 1..50: mol_type = other DNA
aaaatttccaacccaactataaacatcaatacacatatattaataacrcc

SEQ ID NO: 1712 - DNA, 50 bp, synthetic construct
  source 1..50: mol_type = other DNA
ttaccaaaaaaaccrtcctaatcctccataaaatccttaatactatcctc

SEQ ID NO: 1713 - DNA, 50 bp, synthetic construct
  source 1..50: mol_type = other DNA
aataaatctataacraaaataatatcaaaaaccccataaaaaaccaaaac

SEQ ID NO: 1714 - DNA, 50 bp, synthetic construct
  source 1..50: mol_type = other DNA
acatctcaatacaatatctaaaatactcaatctccacttaccaaaaaacc

SEQ ID NO: 1715 - DNA, 50 bp, synthetic construct
  source 1..50: mol_type = other DNA
tctaaaaaatcttccctcttatatatctctaatttttaaaataaaacctc

SEQ ID NO: 1716 - DNA, 50 bp, synthetic construct
  source 1..50: mol_type = other DNA
aatccraatttctttcacaaaacracactcaaaattatcattaataactc

SEQ ID NO: 1717 - DNA, 50 bp, synthetic construct
  source 1..50: mol_type = other DNA
cattaccctcctttcttccacccttaaaaaaacctacatttattaacccc

SEQ ID NO: 1718 - DNA, 50 bp, synthetic construct
  source 1..50: mol_type = other DNA
cttccacccttaaaaaaacctacatttattaaccccrttcaaccaacaac

SEQ ID NO: 1719 - DNA, 50 bp, synthetic construct
  source 1..50: mol_type = other DNA
aacacccratcatacaaatattcrctaaccraaaatcttatctaaaaacc

SEQ ID NO: 1720 - DNA, 50 bp, synthetic construct
  source 1..50: mol_type = other DNA
aaattaaaaactacccaaaaaacrattcttaaataaaacccccratcaac

SEQ ID NO: 1721 - DNA, 50 bp, synthetic construct
  source 1..50: mol_type = other DNA
rtactctaaactcctccrcactactttacccaccttaaactaataaaatc

SEQ ID NO: 1722 - DNA, 50 bp, synthetic construct
  source 1..50: mol_type = other DNA
caatccatatacacrccraccttactaacctaaaataaacaaaataatac

SEQ ID NO: 1723 - DNA, 50 bp, synthetic construct
  source 1..50: mol_type = other DNA
aacctaattaacatttaacatataactactaaaaaacrtcccttattaac

SEQ ID NO: 1724 - DNA, 50 bp, synthetic construct
  source 1..50: mol_type = other DNA
actcatccacctcaacctaattaacatttaacatataactactaaaaaac

SEQ ID NO: 1725 - DNA, 50 bp, synthetic construct
  source 1..50: mol_type = other DNA
ctaaatactaactaaactaaaataaataaactctaccaactactatcatc

SEQ ID NO: 1726 - DNA, 50 bp, synthetic construct
  source 1..50: mol_type = other DNA
ataaaatatttaaaaacactaaaactaaaaaacttcaaaacaaacactac

SEQ ID NO: 1727 - DNA, 50 bp, synthetic construct
  source 1..50: mol_type = other DNA
acctacrcctaaaaccaaccctattaaataaaatactaaaaataaactac

SEQ ID NO: 1728 - DNA, 50 bp, synthetic construct
  source 1..50: mol_type = other DNA
aaaaacrcaatctattttcaataccttacctaacaaaattaacttcaaac

SEQ ID NO: 1729 - DNA, 50 bp, synthetic construct
  source 1..50: mol_type = other DNA
accttacctaacaaaattaacttcaaacrtaaataacctaaaaaataaac

SEQ ID NO: 1730 - DNA, 50 bp, synthetic construct
  source 1..50: mol_type = other DNA
aaaaaaaatcatctttacaataatcraactcttataacaatataaacrac

SEQ ID NO: 1731 - DNA, 50 bp, synthetic construct
  source 1..50: mol_type = other DNA
caaaaaaaactacaactaataatacrccrcccacactattacaaaaatcc

SEQ ID NO: 1732 - DNA, 50 bp, synthetic construct
  source 1..50: mol_type = other DNA
ttcacactctaccttattaatttacttctaaaatatttataaaattcacc

SEQ ID NO: 1733 - DNA, 50 bp, synthetic construct
  source 1..50: mol_type = other DNA
aattcaccratacaacaaaaaatatctaaacrataaacaaaatcctaaac

SEQ ID NO: 1734 - DNA, 50 bp, synthetic construct
  source 1..50: mol_type = other DNA
acatatactacccaactttaactaattctttccrctcttattctaaaaac

SEQ ID NO: 1735 - DNA, 50 bp, synthetic construct
  source 1..50: mol_type = other DNA
actcrtatctccttaaaacatatactacccaactttaactaattctttcc

SEQ ID NO: 1736 - DNA, 50 bp, synthetic construct
  source 1..50: mol_type = other DNA
aattacacraatccattttcataaaacaatttttcaacaatttcaaactc

SEQ ID NO: 1737 - DNA, 50 bp, synthetic construct
  source 1..50: mol_type = other DNA
aatctaacttcraaaaccaaaaccraattcctactatcaaccaaacaacc

SEQ ID NO: 1738 - DNA, 50 bp, synthetic construct
  source 1..50: mol_type = other DNA
ctaaaactacaaatcaacccttaacaaatctaacttcraaaaccaaaacc

SEQ ID NO: 1739 - DNA, 50 bp, synthetic construct
  source 1..50: mol_type = other DNA
atcaaacttactaaaaactaacctacaaccccaatccccctcaaataacc

SEQ ID NO: 1740 - DNA, 50 bp, synthetic construct
  source 1..50: mol_type = other DNA
caatctattacttttaaaatcraataacrcaaaaatccttccttcrcttc

SEQ ID NO: 1741 - DNA, 50 bp, synthetic construct
  source 1..50: mol_type = other DNA
aaaaacaatctattacttttaaaatcraataacrcaaaaatccttccttc

SEQ ID NO: 1742 - DNA, 50 bp, synthetic construct
  source 1..50: mol_type = other DNA
aaataaaatataatataatcaccaatcrcraaaaaccccacaaccaatac

SEQ ID NO: 1743 - DNA, 50 bp, synthetic construct
  source 1..50: mol_type = other DNA
aaaattaactataaaatataactcaacrcrcactaactataaaatccccc

SEQ ID NO: 1744 - DNA, 50 bp, synthetic construct
  source 1..50: mol_type = other DNA
tctaaatataaatattcccctattaaaaataattcaaccaacacctattc

SEQ ID NO: 1745 - DNA, 50 bp, synthetic construct
  source 1..50: mol_type = other DNA
atactaaaaactcaatatcaatttttattatctttaaaccaatatttaac

SEQ ID NO: 1746 - DNA, 50 bp, synthetic construct
  source 1..50: mol_type = other DNA
caaaaactactttaaataaaaataattcaaacctccccrtaccaaacacc

SEQ ID NO: 1747 - DNA, 50 bp, synthetic construct
  source 1..50: mol_type = other DNA
tattccttccttcaaaaactactttaaataaaaataattcaaacctcccc

SEQ ID NO: 1748 - DNA, 50 bp, synthetic construct
  source 1..50: mol_type = other DNA
acctatcraaaaatataactattaattaaaactacrtttctcacactacc

SEQ ID NO: 1749 - DNA, 50 bp, synthetic construct
  source 1..50: mol_type = other DNA
ttacaacattatactaaccaaaaaaactactccacttttactcctttttc

SEQ ID NO: 1750 - DNA, 50 bp, synthetic construct
  source 1..50: mol_type = other DNA
ccctaaatttctcattcrttactcacttatatctattatatatcttcttc

SEQ ID NO: 1751 - DNA, 50 bp, synthetic construct
  source 1..50: mol_type = other DNA
atcraacaaaaactaattaacrataaaaacaaaaactccaactcatttcc

SEQ ID NO: 1752 - DNA, 50 bp, synthetic construct
  source 1..50: mol_type = other DNA
crctataaaaatataatatatataacatactcccatatatccrtataccc

SEQ ID NO: 1753 - DNA, 50 bp, synthetic construct
  source 1..50: mol_type = other DNA
tatatacacrctataaaaatataatatatataacatactcccatatatcc

SEQ ID NO: 1754 - DNA, 50 bp, synthetic construct
  source 1..50: mol_type = other DNA
aaaaaaatattaccctaaatacccraaaacaacraaaccrcaaaaacctc

SEQ ID NO: 1755 - DNA, 50 bp, synthetic construct
  source 1..50: mol_type = other DNA
caacctacctttctcatcaaaattaaccaaacctcaactctaaaacttcc

SEQ ID NO: 1756 - DNA, 50 bp, synthetic construct
  source 1..50: mol_type = other DNA
acaaaaccctaaaaaaccaaaacaaaccctactaaaatcctacaacaaac

SEQ ID NO: 1757 - DNA, 50 bp, synthetic construct
  source 1..50: mol_type = other DNA
taacracaaaactacaatccttaaaaaaactataaataccctaaatttac

SEQ ID NO: 1758 - DNA, 50 bp, synthetic construct
  source 1..50: mol_type = other DNA
caatccaaaaacctttatcccactaccaacacaattctaaatatttaaac

SEQ ID NO: 1759 - DNA, 50 bp, synthetic construct
  source 1..50: mol_type = other DNA
tattataaccataaactacaacaaccctatatacattatacacaaaatac

SEQ ID NO: 1760 - DNA, 50 bp, synthetic construct
  source 1..50: mol_type = other DNA
ctatttactttcttacctctaaaatacaccaatataacatcccrctttcc

SEQ ID NO: 1761 - DNA, 50 bp, synthetic construct
  source 1..50: mol_type = other DNA
atttatactatttactttcttacctctaaaatacaccaatataacatccc

SEQ ID NO: 1762 - DNA, 50 bp, synthetic construct
  source 1..50: mol_type = other DNA
tcatcacracatcrctctttaattacttcaaaacacaattcraaattacc

SEQ ID NO: 1763 - DNA, 50 bp, synthetic construct
  source 1..50: mol_type = other DNA
caattctttctataaaacaacaaaacatattaaaactcattcaaaaatac

SEQ ID NO: 1764 - DNA, 50 bp, synthetic construct
  source 1..50: mol_type = other DNA
ttctattaccttataaaaaaaattaacattaaaaatcaactataaattcc

SEQ ID NO: 1765 - DNA, 50 bp, synthetic construct
  source 1..50: mol_type = other DNA
tatctaaaaatttacrtcttcaactattaaattactccaaactatcttac

SEQ ID NO: 1766 - DNA, 50 bp, synthetic construct
  source 1..50: mol_type = other DNA
ttaaatccttcactttaattactcatcrccactctaattacccactttac

SEQ ID NO: 1767 - DNA, 50 bp, synthetic construct
  source 1..50: mol_type = other DNA
cctcaaatcrcaaaaaatccaaaaaaaccttacttaactacrttaaatac

SEQ ID NO: 1768 - DNA, 50 bp, synthetic construct
  source 1..50: mol_type = other DNA
aaataaaaacctcaaatcrcaaaaaatccaaaaaaaccttacttaactac

SEQ ID NO: 1769 - DNA, 50 bp, synthetic construct
  source 1..50: mol_type = other DNA
cttaacctaatccaaaaaccaaaatctcccraaaatttaacrctaatccc

SEQ ID NO: 1770 - DNA, 50 bp, synthetic construct
  source 1..50: mol_type = other DNA
ttcctatttttataaacaaacttaacctaatccaaaaaccaaaatctccc

SEQ ID NO: 1771 - DNA, 50 bp, synthetic construct
  source 1..50: mol_type = other DNA
ttactctaaacccaataaacaaatataaaaaaccacaatctcacacccac

SEQ ID NO: 1772 - DNA, 50 bp, synthetic construct
  source 1..50: mol_type = other DNA
aaacaaatataaaaaaccacaatctcacacccacrcaaaaacaaaaaccc

SEQ ID NO: 1773 - DNA, 50 bp, synthetic construct
  source 1..50: mol_type = other DNA
acccracctcatcaacrtatcaacataaaaataaaactactaaataaaac

SEQ ID NO: 1774 - DNA, 50 bp, synthetic construct
  source 1..50: mol_type = other DNA
acrtatcaacataaaaataaaactactaaataaaacrctattaccacaac

SEQ ID NO: 1775 - DNA, 50 bp, synthetic construct
  source 1..50: mol_type = other DNA
ataaaaacaaaccaaaaaacrcttcctcacaaatacratactaaaccttc

SEQ ID NO: 1776 - DNA, 50 bp, synthetic construct
  source 1..50: mol_type = other DNA
taaaaactatctaatcaataaatccccactatcctcraaaatccaatacc

SEQ ID NO: 1777 - DNA, 50 bp, synthetic construct
  source 1..50: mol_type = other DNA
cttaaaactcacatcaaataaccattataaattaaacttaaaaatatccc

SEQ ID NO: 1778 - DNA, 50 bp, synthetic construct
  source 1..50: mol_type = other DNA
taaaactacaaatccaaattataaattctctatcataaaacaaccraaac

SEQ ID NO: 1779 - DNA, 50 bp, synthetic construct
  source 1..50: mol_type = other DNA
aattataaaactacaaatccaaattataaattctctatcataaaacaacc

SEQ ID NO: 1780 - DNA, 50 bp, synthetic construct
  source 1..50: mol_type = other DNA
ataattcctccataaattatatttcaaacaacacaatacaaaatttaccc

SEQ ID NO: 1781 - DNA, 50 bp, synthetic construct
  source 1..50: mol_type = other DNA
cacaaacaaaacrcttatctacraacrtaccaaaaaatattaaaaataac

SEQ ID NO: 1782 - DNA, 50 bp, synthetic construct
  source 1..50: mol_type = other DNA
aaaactacccraataacaataaaaaacccacaaacaaaacrcttatctac

SEQ ID NO: 1783 - DNA, 50 bp, synthetic construct
  source 1..50: mol_type = other DNA
caccaatcaaaactctaccacttactatttaaaaaaacrattcacaattc

SEQ ID NO: 1784 - DNA, 50 bp, synthetic construct
  source 1..50: mol_type = other DNA
ctctaccacttactatttaaaaaaacrattcacaattcrcatccttacac

SEQ ID NO: 1785 - DNA, 50 bp, synthetic construct
  source 1..50: mol_type = other DNA
tcaaaattactcrctacaaacacaacrctaaaaaataacccaaataaaac

SEQ ID NO: 1786 - DNA, 50 bp, synthetic construct
  source 1..50: mol_type = other DNA
taccaaaaatacaaaaccctaatcacrctttacttaaaccatttctcaac

SEQ ID NO: 1787 - DNA, 50 bp, synthetic construct
  source 1..50: mol_type = other DNA
cctactctttattccataaaaaaacattacctcatccctcaaaattactc

SEQ ID NO: 1788 - DNA, 50 bp, synthetic construct
  source 1..50: mol_type = other DNA
atttttaaattaactccctaaaccccaattctcacaaaaacraaacacac

SEQ ID NO: 1789 - DNA, 50 bp, synthetic construct
  source 1..50: mol_type = other DNA
ttaaacaaatcaaaaatcctactcaaatctccaatctatttacatacccc

SEQ ID NO: 1790 - DNA, 50 bp, synthetic construct
  source 1..50: mol_type = other DNA
cataaaatctaactttcaaaattactctccaaaaaaacctataaaacctc

SEQ ID NO: 1791 - DNA, 50 bp, synthetic construct
  source 1..50: mol_type = other DNA
cccacaaatccctctaaaaaacaatcctaaaaaccaaatttcatatatac

SEQ ID NO: 1792 - DNA, 50 bp, synthetic construct
  source 1..50: mol_type = other DNA
atattaacaaaaataatcttaatctcctaacctcrtaatctacccacctc

SEQ ID NO: 1793 - DNA, 50 bp, synthetic construct
  source 1..50: mol_type = other DNA
tttataaaatcttatttttaataccttttaaaacacaccaaactctaaac

SEQ ID NO: 1794 - DNA, 50 bp, synthetic construct
  source 1..50: mol_type = other DNA
tttaaaaaaaatttcacacatacaatataatatcttcataccaaatccrc

SEQ ID NO: 1795 - DNA, 50 bp, synthetic construct
  source 1..50: mol_type = other DNA
aaaacccttccttctacaactcratatctaaaaaattttatctaaaactc

SEQ ID NO: 1796 - DNA, 50 bp, synthetic construct
  source 1..50: mol_type = other DNA
cracatttaccraattactaaaattccrtaaaattaatacaaattctaac

SEQ ID NO: 1797 - DNA, 50 bp, synthetic construct
  source 1..50: mol_type = other DNA
rccaaaaattaataaatacrtccccrtcataaaatattatatcactaccc

SEQ ID NO: 1798 - DNA, 50 bp, synthetic construct
  source 1..50: mol_type = other DNA
caataattcracaaatatcraacaataacacaacatttcataacraaaac

SEQ ID NO: 1799 - DNA, 50 bp, synthetic construct
  source 1..50: mol_type = other DNA
raacaataacacaacatttcataacraaaacrcatctaccaacttctaac

SEQ ID NO: 1800 - DNA, 50 bp, synthetic construct
  source 1..50: mol_type = other DNA
tacacaatctttaattaaatattcacattttttctctacctaaaaccttc

SEQ ID NO: 1801 - DNA, 50 bp, synthetic construct
  source 1..50: mol_type = other DNA
accatattaaccacactactctctaactactaacctcaaataaaccaccc

SEQ ID NO: 1802 - DNA, 50 bp, synthetic construct
  source 1..50: mol_type = other DNA
cacctaaaatcaacaattaaaaaacaatataaccaacataataaaacccc

SEQ ID NO: 1803 - DNA, 50 bp, synthetic construct
  source 1..50: mol_type = other DNA
aaataatctataaaaataattcrctattcacttaacccraaaaaccccac

SEQ ID NO: 1804 - DNA, 50 bp, synthetic construct
  source 1..50: mol_type = other DNA
ctaaaatcacttcaaccactttaaccaaaaatcracratatctaaacacc

SEQ ID NO: 1805 - DNA, 50 bp, synthetic construct
  source 1..50: mol_type = other DNA
ccrtttacttatataaatttttcttttccttaaactatcaaaaaaatctc

SEQ ID NO: 1806 - DNA, 50 bp, synthetic construct
  source 1..50: mol_type = other DNA
tttcaaatcctaaaacaccacrtcrtcraaaaacattcaaaaaattaccc

SEQ ID NO: 1807 - DNA, 50 bp, synthetic construct
  source 1..50: mol_type = other DNA
aaaaaaaaattcacacaaacaaacraacaaccctttaaatattttccrac

SEQ ID NO: 1808 - DNA, 50 bp, synthetic construct
  source 1..50: mol_type = other DNA
ctttacacctattccaaatactaataaaaaaccactatttaccrcttccc

SEQ ID NO: 1809 - DNA, 50 bp, synthetic construct
  source 1..50: mol_type = other DNA
aacttccctttacacctattccaaatactaataaaaaaccactatttacc

SEQ ID NO: 1810 - DNA, 50 bp, synthetic construct
  source 1..50: mol_type = other DNA
taaccctataactcccaaatccctaaatacattaccacacaaatattacc

SEQ ID NO: 1811 - DNA, 50 bp, synthetic construct
  source 1..50: mol_type = other DNA
taaccacccatctctttaataacctttaacacccaaaataaataactacc

SEQ ID NO: 1812 - DNA, 50 bp, synthetic construct
  source 1..50: mol_type = other DNA
tcrtcattaaacctaaaataaatcattcccctacaacataccattaaaac

SEQ ID NO: 1813 - DNA, 50 bp, synthetic construct
  source 1..50: mol_type = other DNA
ttaaaaaaccctaactcaccctcaaaaatccraaaatcaataacattatc

SEQ ID NO: 1814 - DNA, 50 bp, synthetic construct
  source 1..50: mol_type = other DNA
aacrtaaactataataaatttaaaaaaccctaactcaccctcaaaaatcc

SEQ ID NO: 1815 - DNA, 50 bp, synthetic construct
  source 1..50: mol_type = other DNA
tccraattcctaaaaataaatcaaaattctccaaatctatcacaacctac

SEQ ID NO: 1816 - DNA, 50 bp, synthetic construct
  source 1..50: mol_type = other DNA
tactcaccaataaatcratcaacaaaactaacaaactataaaaaaacccc

SEQ ID NO: 1817 - DNA, 50 bp, synthetic construct
  source 1..50: mol_type = other DNA
tttttttaaaaaacaaactctctatcrcctacactaaaaaacaataacac

SEQ ID NO: 1818 - DNA, 50 bp, synthetic construct
  source 1..50: mol_type = other DNA
attcraaactacaataaactataatcrtaccactactctccaatataaac

SEQ ID NO: 1819 - DNA, 50 bp, synthetic construct
  source 1..50: mol_type = other DNA
ctaaaatctcaaaataaaaaactacccaaacccttctatctctaccttcc

SEQ ID NO: 1820 - DNA, 50 bp, synthetic construct
  source 1..50: mol_type = other DNA
taaccaataacatcatcacccactaccccatactaaaaacaaaataaatc

SEQ ID NO: 1821 - DNA, 50 bp, synthetic construct
  source 1..50: mol_type = other DNA
rttctaaaacctacccraatacaacctaaaaaatataaaaccctaactac

SEQ ID NO: 1822 - DNA, 50 bp, synthetic construct
  source 1..50: mol_type = other DNA
ccaaatatttactcaattactaacccaaaaatacttcatttttcrtaccc

SEQ ID NO: 1823 - DNA, 50 bp, synthetic construct
  source 1..50: mol_type = other DNA
tatttactcaattactaacccaaaaatacttcatttttcrtacccrcccc

SEQ ID NO: 1824 - DNA, 50 bp, synthetic construct
  source 1..50: mol_type = other DNA
acatcacaacaaaaaaacrcaacttaacacataactaacctacccraaac

SEQ ID NO: 1825 - DNA, 50 bp, synthetic construct
  source 1..50: mol_type = other DNA
caaaacccaaacttaaaacctatacttaattaaacaccctcaaaacaacc

SEQ ID NO: 1826 - DNA, 50 bp, synthetic construct
  source 1..50: mol_type = other DNA
aactaataacttttattaacattaaatttttcaaccaacaaaaaacaaac

SEQ ID NO: 1827 - DNA, 50 bp, synthetic construct
  source 1..50: mol_type = other DNA
aaccacaataaaaacaaaatccttccactcaaaacctatcrtattttacc

SEQ ID NO: 1828 - DNA, 50 bp, synthetic construct
  source 1..50: mol_type = other DNA
aatctcaaaaaaccacaataaaaacaaaatccttccactcaaaacctatc

SEQ ID NO: 1829 - DNA, 50 bp, synthetic construct
  source 1..50: mol_type = other DNA
caaaaacttttatctcaaatcaccctaaccataaataccattctcacatc

SEQ ID NO: 1830 - DNA, 50 bp, synthetic construct
  source 1..50: mol_type = other DNA
tactaaaaaaacracaaaactaaaaataccctaatttttccatttatctc

SEQ ID NO: 1831 - DNA, 50 bp, synthetic construct
  source 1..50: mol_type = other DNA
aaactaaaaataccctaatttttccatttatctcrctaaaaaccactccc

SEQ ID NO: 1832 - DNA, 50 bp, synthetic construct
  source 1..50: mol_type = other DNA
caccttccaaaaattttctaatcaccaaataccttaataaaattcaatac

SEQ ID NO: 1833 - DNA, 50 bp, synthetic construct
  source 1..50: mol_type = other DNA
caaaatctaaactaactcactaaaaaatcaacaaattaaaacaaccatcc

SEQ ID NO: 1834 - DNA, 50 bp, synthetic construct
  source 1..50: mol_type = other DNA
ataaaaaccttaaactttctattatcaaatatccccaaacaatatcctac

SEQ ID NO: 1835 - DNA, 50 bp, synthetic construct
  source 1..50: mol_type = other DNA
ctaaatcaacttttcaaacaaataaacccacaattactatacrttctaac

SEQ ID NO: 1836 - DNA, 50 bp, synthetic construct
  source 1..50: mol_type = other DNA
aaataatcctaaatcaacttttcaaacaaataaacccacaattactatac

SEQ ID NO: 1837 - DNA, 50 bp, synthetic construct
  source 1..50: mol_type = other DNA
tacaatatttaaaaataactaaacccaaacaaaaaatacaacctctaccc

SEQ ID NO: 1838 - DNA, 50 bp, synthetic construct
  source 1..50: mol_type = other DNA
tacacctcctacttaaattcaaccaccttcaaatactacatcaataactc

SEQ ID NO: 1839 - DNA, 50 bp, synthetic construct
  source 1..50: mol_type = other DNA
tcaaatactacatcaataactcrtacctctacctacraaactaaaccaac

SEQ ID NO: 1840 - DNA, 50 bp, synthetic construct
  source 1..50: mol_type = other DNA
aaaactataactttataacacacacaaaatatataaaatcaaaacatacc

SEQ ID NO: 1841 - DNA, 50 bp, synthetic construct
  source 1..50: mol_type = other DNA
ttaatccracaattctcaaccaaactaaaaacracctaaaatcccaaatc

SEQ ID NO: 1842 - DNA, 50 bp, synthetic construct
  source 1..50: mol_type = other DNA
ctacctataatacaacatcaaaaattaaaaacrtcctccaaaaaaacrac

SEQ ID NO: 1843 - DNA, 50 bp, synthetic construct
  source 1..50: mol_type = other DNA
actctacctataatacaacatcaaaaattaaaaacrtcctccaaaaaaac

SEQ ID NO: 1844 - DNA, 50 bp, synthetic construct
  source 1..50: mol_type = other DNA
aataaaattctaacaactctacctataatacaacatcaaaaattaaaaac

SEQ ID NO: 1845 - DNA, 50 bp, synthetic construct
  source 1..50: mol_type = other DNA
ttcaatctaacaaaaatacacaacaaattataaaaataaccccaaaacac

SEQ ID NO: 1846 - DNA, 50 bp, synthetic construct
  source 1..50: mol_type = other DNA
acccaaattcaataataactcccactaacracacctaatatcccttctac

SEQ ID NO: 1847 - DNA, 50 bp, synthetic construct
  source 1..50: mol_type = other DNA
aaaaacacaacaaatttataaatcactaaataaacaaaaatacaccttac

SEQ ID NO: 1848 - DNA, 50 bp, synthetic construct
  source 1..50: mol_type = other DNA
actaaaacaaccttattcctcaaactataaaaaacccccttcccraaaac

SEQ ID NO: 1849 - DNA, 50 bp, synthetic construct
  source 1..50: mol_type = other DNA
cccacrttacrttctaaaaattataaataccrccaaacaaatttataaac

SEQ ID NO: 1850 - DNA, 50 bp, synthetic construct
  source 1..50: mol_type = other DNA
aaactttacctctaaacttacttaactctttcctccaacctacrttcatc

SEQ ID NO: 1851 - DNA, 50 bp, synthetic construct
  source 1..50: mol_type = other DNA
ccaaaatcaaataactcaaaaatacatttcaaaattaactatctaactcc

SEQ ID NO: 1852 - DNA, 50 bp, synthetic construct
  source 1..50: mol_type = other DNA
aaatcaaataactcaaaaatacatttcaaaattaactatctaactccrac

SEQ ID NO: 1853 - DNA, 50 bp, synthetic construct
  source 1..50: mol_type = other DNA
aaaaactttctacacctacttatctaaactatcattaaaaaaacaataac

SEQ ID NO: 1854 - DNA, 50 bp, synthetic construct
  source 1..50: mol_type = other DNA
taccttttctaaaattctaaattatctaataaaatttcctaaaaaaatcc

SEQ ID NO: 1855 - DNA, 50 bp, synthetic construct
  source 1..50: mol_type = other DNA
caaaaaaactaaacaaaattcactaaaatatcacrctacaaaaaaatatc

SEQ ID NO: 1856 - DNA, 50 bp, synthetic construct
  source 1..50: mol_type = other DNA
ccataatttaaaacaccaaaaaaactaaacaaaattcactaaaatatcac

SEQ ID NO: 1857 - DNA, 50 bp, synthetic construct
  source 1..50: mol_type = other DNA
cattcaacaaatacttaacacrtataatcctcaatacctaacaactaatc

SEQ ID NO: 1858 - DNA, 50 bp, synthetic construct
  source 1..50: mol_type = other DNA
actaaactcatctttataatcattcaattcattcaacaaatacttaacac

SEQ ID NO: 1859 - DNA, 50 bp, synthetic construct
  source 1..50: mol_type = other DNA
ttacaaatttatataacaaatttttccaccctatacttaccaactaaaac

SEQ ID NO: 1860 - DNA, 50 bp, synthetic construct
  source 1..50: mol_type = other DNA
aaaaatactaactttaaaaaacataaacccaaccracctaccttccaaac

SEQ ID NO: 1861 - DNA, 50 bp, synthetic construct
  source 1..50: mol_type = other DNA
acctaccacacaaatttacaattatttaacttccrcctaaaaaacaaatc

SEQ ID NO: 1862 - DNA, 50 bp, synthetic construct
  source 1..50: mol_type = other DNA
acttaaacataaatataccactactatccccccaacaaaataattcaaac

SEQ ID NO: 1863 - DNA, 50 bp, synthetic construct
  source 1..50: mol_type = other DNA
acctaaaaaaaaaatcttctaattaaactaaaaactccaaatcccttaac

SEQ ID NO: 1864 - DNA, 50 bp, synthetic construct
  source 1..50: mol_type = other DNA
aaacraattccttccctaaatataaaataaaccracaaaatcaaccracc

SEQ ID NO: 1865 - DNA, 50 bp, synthetic construct
  source 1..50: mol_type = other DNA
tccaaaacraattccttccctaaatataaaataaaccracaaaatcaacc

SEQ ID NO: 1866 - DNA, 50 bp, synthetic construct
  source 1..50: mol_type = other DNA
atctcttaatatctccaaaacraattccttccctaaatataaaataaacc

SEQ ID NO: 1867 - DNA, 50 bp, synthetic construct
  source 1..50: mol_type = other DNA
cactctaattttaaaattaaaaatacaatatctcttaatatctccaaaac

SEQ ID NO: 1868 - DNA, 50 bp, synthetic construct
  source 1..50: mol_type = other DNA
caaaaaaaaatatcctaaaatttaaaactaaaatcccraaaccraatccc

SEQ ID NO: 1869 - DNA, 50 bp, synthetic construct
  source 1..50: mol_type = other DNA
aataaaaaaaatcaataactataattaaactcccctaatctaccctaccc

SEQ ID NO: 1870 - DNA, 50 bp, synthetic construct
  source 1..50: mol_type = other DNA
catacaaacaataaacattctttccttaactttaaacttaacaattaccc

SEQ ID NO: 1871 - DNA, 50 bp, synthetic construct
  source 1..50: mol_type = other DNA
racttacataactctacaaacrccctaataataccaactccaaaaaaatc

SEQ ID NO: 1872 - DNA, 50 bp, synthetic construct
  source 1..50: mol_type = other DNA
ractcccctaaaactaacaccaccaaaacrtctacaaaactatataaatc

SEQ ID NO: 1873 - DNA, 50 bp, synthetic construct
  source 1..50: mol_type = other DNA
atctatctctttaataactacaaaaacaatatttattatcctttattttc

SEQ ID NO: 1874 - DNA, 50 bp, synthetic construct
  source 1..50: mol_type = other DNA
acctaaacctcaaaacaaacacaacacaaaacaaaataataaactaaaac

SEQ ID NO: 1875 - DNA, 50 bp, synthetic construct
  source 1..50: mol_type = other DNA
caatacratacccttcrcaaacaactttccaaaaatcaaaatcacaatac

SEQ ID NO: 1876 - DNA, 50 bp, synthetic construct
  source 1..50: mol_type = other DNA
ataaaccaaaactaacrtactataattctaacccctaaaaaattacctac

SEQ ID NO: 1877 - DNA, 50 bp, synthetic construct
  source 1..50: mol_type = other DNA
actaacrtactataattctaacccctaaaaaattacctacraaaaacacc

SEQ ID NO: 1878 - DNA, 50 bp, synthetic construct
  source 1..50: mol_type = other DNA
aaaaaattacctacraaaaacaccrcattaccaaaaaaaccaaataaacc

SEQ ID NO: 1879 - DNA, 50 bp, synthetic construct
  source 1..50: mol_type = other DNA
aaatttacctaaacatacaactcaaaaattattttcaaattaaaaccatc

SEQ ID NO: 1880 - DNA, 50 bp, synthetic construct
  source 1..50: mol_type = other DNA
cttatttttttaatacaacaatatatccattctaataacaaacctatccc

SEQ ID NO: 1881 - DNA, 50 bp, synthetic construct
  source 1..50: mol_type = other DNA
ccaaattctttaataaataatcaattaatctaaaattcttacaaaatacc

SEQ ID NO: 1882 - DNA, 50 bp, synthetic construct
  source 1..50: mol_type = other DNA
tctataaaacaactactacttacctaatacataataaacactttacaaac

SEQ ID NO: 1883 - DNA, 50 bp, synthetic construct
  source 1..50: mol_type = other DNA
ccatcaaaattacacctatacttataactacatatataaaatataaaaac

SEQ ID NO: 1884 - DNA, 50 bp, synthetic construct
  source 1..50: mol_type = other DNA
ctttcaattttttttccatttaaaaattcaaactaaacacaataactcac

SEQ ID NO: 1885 - DNA, 50 bp, synthetic construct
  source 1..50: mol_type = other DNA
atccaacaaattcataaacaaaataaataatttttatttcaaaccactac

SEQ ID NO: 1886 - DNA, 50 bp, synthetic construct
  source 1..50: mol_type = other DNA
aataaaaataactaaatcctatatctctcatcctatatcaaactaacccc

SEQ ID NO: 1887 - DNA, 50 bp, synthetic construct
  source 1..50: mol_type = other DNA
tcatcctatatcaaactaaccccracttattcacataactacaaaattac

SEQ ID NO: 1888 - DNA, 50 bp, synthetic construct
  source 1..50: mol_type = other DNA
aactctaccacaatctacctaaaaaacatacaaccctacttataaaccrc

SEQ ID NO: 1889 - DNA, 50 bp, synthetic construct
  source 1..50: mol_type = other DNA
taaaaaaacrtatctcctaaataccccaataaaaaaaatctaccaacatc

SEQ ID NO: 1890 - DNA, 50 bp, synthetic construct
  source 1..50: mol_type = other DNA
tctccataaatccctaataatacaaataaaactatacccaaaacataccc

SEQ ID NO: 1891 - DNA, 50 bp, synthetic construct
  source 1..50: mol_type = other DNA
accctacaaaacttatccacaacttaaatttcaaaccaaaaaccaaatac

SEQ ID NO: 1892 - DNA, 50 bp, synthetic construct
  source 1..50: mol_type = other DNA
tacctcaactacacaaaaacttcracaaccaaattctttaaaccaatatc

SEQ ID NO: 1893 - DNA, 50 bp, synthetic construct
  source 1..50: mol_type = other DNA
aatataaacactaaaaaccttacacaaaaaaaataatcccctccraaatc

SEQ ID NO: 1894 - DNA, 50 bp, synthetic construct
  source 1..50: mol_type = other DNA
aaactaaatataaacactaaaaaccttacacaaaaaaaataatcccctcc

SEQ ID NO: 1895 - DNA, 50 bp, synthetic construct
  source 1..50: mol_type = other DNA
caaaacttatataaaacataatatcaacacaaaaccttctccaaacacac

SEQ ID NO: 1896 - DNA, 50 bp, synthetic construct
  source 1..50: mol_type = other DNA
aaataaaccctactcaataaacttatcctctaataccactcraaaaatcc

SEQ ID NO: 1897 - DNA, 50 bp, synthetic construct
  source 1..50: mol_type = other DNA
ctaaactaaaaataaaccctactcaataaacttatcctctaataccactc

SEQ ID NO: 1898 - DNA, 50 bp, synthetic construct
  source 1..50: mol_type = other DNA
taaaaatcraccctaaaataccataataaacacttaataaacatatttcc

SEQ ID NO: 1899 - DNA, 50 bp, synthetic construct
  source 1..50: mol_type = other DNA
ccaaccacraaaatatatttattaaatacccaccataataccccaaaacc

SEQ ID NO: 1900 - DNA, 50 bp, synthetic construct
  source 1..50: mol_type = other DNA
taattcctataacctaacctaaaattctcttccaaacccctaaaaaaaac

SEQ ID NO: 1901 - DNA, 50 bp, synthetic construct
  source 1..50: mol_type = other DNA
aattctcttccaaacccctaaaaaaaacractctaaatctttcacaaaac

SEQ ID NO: 1902 - DNA, 50 bp, synthetic construct
  source 1..50: mol_type = other DNA
aaataatcatttaccctatatacaactaaaacctaaataacacraacacc

SEQ ID NO: 1903 - DNA, 50 bp, synthetic construct
  source 1..50: mol_type = other DNA
aataatatattcataatcacaaactacttaataactcaaaaataaaactc

SEQ ID NO: 1904 - DNA, 50 bp, synthetic construct
  source 1..50: mol_type = other DNA
acaaatactaaccctccttacrccctctaatatcccaataaaatataacc

SEQ ID NO: 1905 - DNA, 50 bp, synthetic construct
  source 1..50: mol_type = other DNA
aactaaaaactatcacttaatattattcacacrcctacctctaacaatac

SEQ ID NO: 1906 - DNA, 50 bp, synthetic construct
  source 1..50: mol_type = other DNA
catcctttccctctaacaaactaaaaactatcacttaatattattcacac

SEQ ID NO: 1907 - DNA, 50 bp, synthetic construct
  source 1..50: mol_type = other DNA
cttaactcctcccaaacacactaaatctaaatctctaaaattctaatttc

SEQ ID NO: 1908 - DNA, 50 bp, synthetic construct
  source 1..50: mol_type = other DNA
tttcttaaaaattaattaaccctaactaacccttaccttttcttacacac

SEQ ID NO: 1909 - DNA, 50 bp, synthetic construct
  source 1..50: mol_type = other DNA
aatcaaaaactttataaaattaccctaacaaacaaaaacaaacaaacacc

SEQ ID NO: 1910 - DNA, 50 bp, synthetic construct
  source 1..50: mol_type = other DNA
ctttataaaattaccctaacaaacaaaaacaaacaaacaccrctccttcc

SEQ ID NO: 1911 - DNA, 50 bp, synthetic construct
  source 1..50: mol_type = other DNA
caaaaacaaacaaacaccrctccttccrtttatttactactttatctctc

SEQ ID NO: 1912 - DNA, 50 bp, synthetic construct
  source 1..50: mol_type = other DNA
atctaaaaaaaacaatcttattcttccccaaacctaataactcacrtatc

SEQ ID NO: 1913 - DNA, 50 bp, synthetic construct
  source 1..50: mol_type = other DNA
actataactctcatatcaaatttcttactacttttaatttaaaatcttcc

SEQ ID NO: 1914 - DNA, 50 bp, synthetic construct
  source 1..50: mol_type = other DNA
tatcctaaaactaccacactataaaaaacccaaacaccataaaaaaccrc

SEQ ID NO: 1915 - DNA, 50 bp, synthetic construct
  source 1..50: mol_type = other DNA
attatcctaaaactaccacactataaaaaacccaaacaccataaaaaacc

SEQ ID NO: 1916 - DNA, 50 bp, synthetic construct
  source 1..50: mol_type = other DNA
actaaatctatatacaactaccatctactaacaatttctaatatttcacc

SEQ ID NO: 1917 - DNA, 50 bp, synthetic construct
  source 1..50: mol_type = other DNA
acctccaaaaaacatctcctataaacccaaaaaataaacaaaatctaaac

SEQ ID NO: 1918 - DNA, 50 bp, synthetic construct
  source 1..50: mol_type = other DNA
taactataacatcctctccrataacaaacacaaacctaaaccctattaac

SEQ ID NO: 1919 - DNA, 50 bp, synthetic construct
  source 1..50: mol_type = other DNA
aaattttaactacattatcccatccattatcrccacaaaataacrataac

SEQ ID NO: 1920 - DNA, 50 bp, synthetic construct
  source 1..50: mol_type = other DNA
rctcraaaatatcattaacraaaaaattcataatacccataaccttaaac

SEQ ID NO: 1921 - DNA, 50 bp, synthetic construct
  source 1..50: mol_type = other DNA
atatcattaacraaaaaattcataatacccataaccttaaacraaatacc

SEQ ID NO: 1922 - DNA, 50 bp, synthetic construct
  source 1..50: mol_type = other DNA
ttaaacraaataccratatcraaataaacctacttcaacaccttatacac

SEQ ID NO: 1923 - DNA, 50 bp, synthetic construct; identical to SEQ ID NO: 1922
  source 1..50: mol_type = other DNA

SEQ ID NO: 1924 - DNA, 50 bp, synthetic construct
  source 1..50: mol_type = other DNA
caacaccttatacacrtaaataaaataactctctttacractacrcttac

SEQ ID NO: 1925 - DNA, 50 bp, synthetic construct
  source 1..50: mol_type = other DNA
tttaccctcttttcctaaaatacaccaacatacttacaaatacctaaacc

SEQ ID NO: 1926 - DNA, 50 bp, synthetic construct
  source 1..50: mol_type = other DNA
rctaaaatcataccaacrattaatacctaacracaaaattaccctttccc

SEQ ID NO: 1927 - DNA, 50 bp, synthetic construct
  source 1..50: mol_type = other DNA
aaaaaaaatttctaaaaccrctaaaatcataccaacrattaatacctaac

SEQ ID NO: 1928 - DNA, 50 bp, synthetic construct
  source 1..50: mol_type = other DNA
aaaaaaaaactttcaaaaaaaatttctaaaaccrctaaaatcataccaac

SEQ ID NO: 1929 - DNA, 50 bp, synthetic construct
  source 1..50: mol_type = other DNA
tcccatataacaaataaacctaaaaactcttatatttcttcctcctcaac

SEQ ID NO: 1930 - DNA, 50 bp, synthetic construct
  source 1..50: mol_type = other DNA
caatatctctacaaaaataaaaaactaaactcctcccttccccaaaaaac

SEQ ID NO: 1931 - DNA, 50 bp, synthetic construct
  source 1..50: mol_type = other DNA
aaaaaaaaatccaatctcccacccctacaaaaacactactaactataatc

SEQ ID NO: 1932 - DNA, 50 bp, synthetic construct
  source 1..50: mol_type = other DNA
aaaacaatataattctttcaaatctaacaatacattaaaaaaacctaaac

SEQ ID NO: 1933 - DNA, 50 bp, synthetic construct
  source 1..50: mol_type = other DNA
tttcaactataccctaaattccacttaatctaaaccacaaacactttccc

SEQ ID NO: 1934 - DNA, 50 bp, synthetic construct
  source 1..50: mol_type = other DNA
aattaaaaaccaaacaatattcraacttcraaaactaaaaacaactaaac

SEQ ID NO: 1935 - DNA, 50 bp, synthetic construct
  source 1..50: mol_type = other DNA
ttaaaaattataattctaccccttacatataaaactaaatatttctatcc

SEQ ID NO: 1936 - DNA, 50 bp, synthetic construct
  source 1..50: mol_type = other DNA
ccctaacactaaaataatcttaacccctttattcctttccttccatcaac

SEQ ID NO: 1937 - DNA, 50 bp, synthetic construct
  source 1..50: mol_type = other DNA
ttctaactacaaatttataccaaaaataaaaactactaaaaaaaacaacc

SEQ ID NO: 1938 - DNA, 50 bp, synthetic construct
  source 1..50: mol_type = other DNA
attttcctcctcrataaccaatcaaaattatccttattaaaaatactcac

SEQ ID NO: 1939 - DNA, 50 bp, synthetic construct
  source 1..50: mol_type = other DNA
cctttataaaccrtaaacatttccaacaaaaacaatcttaactaactacc

SEQ ID NO: 1940 - DNA, 50 bp, synthetic construct
  source 1..50: mol_type = other DNA
taatccccacatttaatctaaaacacttaaacrtacatacatatacrtac

SEQ ID NO: 1941 - DNA, 50 bp, synthetic construct
  source 1..50: mol_type = other DNA
aacccatcccttaaaacrtaatccccacatttaatctaaaacacttaaac

SEQ ID NO: 1942 - DNA, 50 bp, synthetic construct
  source 1..50: mol_type = other DNA
cacrcacatacatacacrctcaaatactttaaatcaaatataaaaattac

SEQ ID NO: 1943 - DNA, 50 bp, synthetic construct
  source 1..50: mol_type = other DNA
taatactctaaacacataaatacacttattccccttcttcacatacaccc

SEQ ID NO: 1944 - DNA, 50 bp, synthetic construct
  source 1..50: mol_type = other DNA
ttcacatacacccraaaatatatacaattacataattaactttttttccc

SEQ ID NO: 1945 - DNA, 50 bp, synthetic construct
  source 1..50: mol_type = other DNA
atctaaacaacctatactctaaccaaaaccatttctaaaaactttaaacc

SEQ ID NO: 1946 - DNA, 50 bp, synthetic construct
  source 1..50: mol_type = other DNA
aactctaaccaaaacataaactattcaaacttatactttatacaaaatac

SEQ ID NO: 1947 - DNA, 50 bp, synthetic construct
  source 1..50: mol_type = other DNA
tcaaacttatactttatacaaaatacraaaaaactccccctactatatcc

SEQ ID NO: 1948 - DNA, 50 bp, synthetic construct
  source 1..50: mol_type = other DNA
taataaactaaccacaaattaaaatcaactataacttaacaaaaaaaacc

SEQ ID NO: 1949 - DNA, 50 bp, synthetic construct
  source 1..50: mol_type = other DNA
aaaaaccttttatcaaaatacaaccctaaacatttcttaaatatttacac

SEQ ID NO: 1950 - DNA, 50 bp, synthetic construct
  source 1..50: mol_type = other DNA
taaaaatactaactccaaaataaaaaccacacatcccaaatataacacac

SEQ ID NO: 1951 - DNA, 50 bp, synthetic construct
  source 1..50: mol_type = other DNA
ttaaaccctttaattcaaaaactcaaaaacaaaaaatcaaacaaacatcc

SEQ ID NO: 1952 - DNA, 50 bp, synthetic construct
  source 1..50: mol_type = other DNA
tcttactttattactttaaatcttctcaacccttacatacttatcaacac

SEQ ID NO: 1953 - DNA, 50 bp, synthetic construct
  source 1..50: mol_type = other DNA
ttaatctttcttttaaaacccctatttaaaaaacracttaatttaaaaac

SEQ ID NO: 1954 - DNA, 50 bp, synthetic construct
  source 1..50: mol_type = other DNA
cataaaaccactaaaaaccacctaataattaacattcattaccaatcacc

SEQ ID NO: 1955 - DNA, 50 bp, synthetic construct
  source 1..50: mol_type = other DNA
tcattaccttatttaacttattccttacttttaatactaaaaactccctc

SEQ ID NO: 1956 - DNA, 50 bp, synthetic construct
  source 1..50: mol_type = other DNA
rattttaccctcatttttaattatcaccacctttctaccaataattatcc

SEQ ID NO: 1957 - DNA, 50 bp, synthetic construct
  source 1..50: mol_type = other DNA
aaaataaataaacttaatattactcctctacaaactaaatacccccracc

SEQ ID NO: 1958 - DNA, 50 bp, synthetic construct
  source 1..50: mol_type = other DNA
ctataaaataaataaacttaatattactcctctacaaactaaataccccc

SEQ ID NO: 1959 - DNA, 50 bp, synthetic construct
  source 1..50: mol_type = other DNA
ttcaaccttcaaaatatcaataaactaacacaacaaattaattactaaac

SEQ ID NO: 1960 - DNA, 50 bp, synthetic construct
  source 1..50: mol_type = other DNA
aacttttttaaatatttaaaaattaacaactctttaaaaccaatcttacc

SEQ ID NO: 1961 - DNA, 50 bp, synthetic construct
  source 1..50: mol_type = other DNA
acaaaacrttaacttttattttccttatctttttatacrtactacrtaac

SEQ ID NO: 1962 - DNA, 50 bp, synthetic construct
  source 1..50: mol_type = other DNA
aattaacaaaacrttaacttttattttccttatctttttatacrtactac

SEQ ID NO: 1963 - DNA, 50 bp, synthetic construct
  source 1..50: mol_type = other DNA
aacctaaaattaacaaaacrttaacttttattttccttatctttttatac

SEQ ID NO: 1964 - DNA, 50 bp, synthetic construct
  source 1..50: mol_type = other DNA
aaacttttcaaacaacttttcacraatacaaaacctaaaattaacaaaac

SEQ ID NO: 1965 - DNA, 50 bp, synthetic construct
  source 1..50: mol_type = other DNA
crtaatctcactcttctcataattactaaattaacratataactccratc

SEQ ID NO: 1966 - DNA, 50 bp, synthetic construct
  source 1..50: mol_type = other DNA
actacrtaatctcactcttctcataattactaaattaacratataactcc

SEQ ID NO: 1967 - DNA, 50 bp, synthetic construct
  source 1..50: mol_type = other DNA
tcataacaacttttcttttttctaaaattcttaaaactaccctaaaatcc

SEQ ID NO: 1968 - DNA, 50 bp, synthetic construct
  source 1..50: mol_type = other DNA
ttttcttttttctaaaattcttaaaactaccctaaaatccrtcaacctcc

SEQ ID NO: 1969 - DNA, 50 bp, synthetic construct
  source 1..50: mol_type = other DNA
tcctccaactcctattcaaaaatactccaaaccaaaaactttaaaaactc

SEQ ID NO: 1970 - DNA, 50 bp, synthetic construct
  source 1..50: mol_type = other DNA
atacaaaataaactcttaaaactctaaaataaaatcaattaactacaacc

SEQ ID NO: 1971 - DNA, 50 bp, synthetic construct
  source 1..50: mol_type = other DNA
ataaaaaaactaacattctaataactctacacaatcattctaaaataacc

SEQ ID NO: 1972 - DNA, 50 bp, synthetic construct
  source 1..50: mol_type = other DNA
aaaacaatactaaatataataaaccaatcacaaaaaaattccaatactac

SEQ ID NO: 1973 - DNA, 50 bp, synthetic construct
  source 1..50: mol_type = other DNA
aaaaattaaaaatcrttaccctaaaaaactctcacatatatataaaacac

SEQ ID NO: 1974 - DNA, 50 bp, synthetic construct
  source 1..50: mol_type = other DNA
aaacattctcatacrtatctcacatacatataaaaattctctaaaacaac

SEQ ID NO: 1975 - DNA, 50 bp, synthetic construct
  source 1..50: mol_type = other DNA
caaaatttcatcatattatctaaactaatcttaaacttctaaactcaaac

SEQ ID NO: 1976 - DNA, 50 bp, synthetic construct
  source 1..50: mol_type = other DNA
ttaacctcrccttaaccttccaaaatattaaaattacaaaaataaaccac

SEQ ID NO: 1977 - DNA, 50 bp, synthetic construct
  source 1..50: mol_type = other DNA
tctttatccttttaataatttatacttaaacacataactttttaaaaaac

SEQ ID NO: 1978 - DNA, 50 bp, synthetic construct
  source 1..50: mol_type = other DNA
aaattctttccatctattacttacaaactaactattatttaaaaaaacac

SEQ ID NO: 1979 - DNA, 50 bp, synthetic construct
  source 1..50: mol_type = other DNA
cattcttatcaatttaaatattcrtatcttacaaaaaacataaaaacaac

SEQ ID NO: 1980 - DNA, 50 bp, synthetic construct
  source 1..50: mol_type = other DNA
aatacaaaaaatattatataaacattccattcttatcaatttaaatattc

SEQ ID NO: 1981 - DNA, 50 bp, synthetic construct
  source 1..50: mol_type = other DNA
taattttaaaattcaataaaaacttaaaaattttaacttcaaatccccac

SEQ ID NO: 1982 - DNA, 50 bp, synthetic construct
  source 1..50: mol_type = other DNA
aaaacttaaaaattttaacttcaaatccccacrctaattttaattctacc

SEQ ID NO: 1983 - DNA, 50 bp, synthetic construct
  source 1..50: mol_type = other DNA
catttcaaaaaacccaatcacctcractcttacctaaatttcaaaatccc

SEQ ID NO: 1984 - DNA, 50 bp, synthetic construct
  source 1..50: mol_type = other DNA
craaattaaaactaacaaaatccaattactcaaaacrccraaacraaaac

SEQ ID NO: 1985 - DNA, 50 bp, synthetic construct
  source 1..50: mol_type = other DNA
acctaaaattctccaaaaaaatctacaactaaaatcraccrtaaaaactc

SEQ ID NO: 1986 - DNA, 50 bp, synthetic construct
  source 1..50: mol_type = other DNA
ttaaaaacaaaaacracraaatataactacrtaccctatttaccattaac

SEQ ID NO: 1987 - DNA, 50 bp, synthetic construct
  source 1..50: mol_type = other DNA
ccctcatctctcactaccatacaaaaaaacrttaataacaaataaaacac

SEQ ID NO: 1988 - DNA, 50 bp, synthetic construct
  source 1..50: mol_type = other DNA
ctaccatacaaaaaaacrttaataacaaataaaacacrtaaccacactcc

SEQ ID NO: 1989 - DNA, 50 bp, synthetic construct
  source 1..50: mol_type = other DNA
ccatacaaaaaaacrttaataacaaataaaacacrtaaccacactccrtc

SEQ ID NO: 1990 - DNA, 50 bp, synthetic construct
  source 1..50: mol_type = other DNA
tctatcattttaaaaatatactacttcacaacaaaaaccacrttcataac

SEQ ID NO: 1991 - DNA, 50 bp, synthetic construct
  source 1..50: mol_type = other DNA
cataaaaacccctacccaataatattcraaaaatttataaattaataaac

SEQ ID NO: 1992 - DNA, 50 bp, synthetic construct
  source 1..50: mol_type = other DNA
ctaaatcaatcaccaaaaactaataatttaatcaaacatacccacataac

SEQ ID NO: 1993 - DNA, 50 bp, synthetic construct
  source 1..50: mol_type = other DNA
taactttccttattaataaaaataacaattcatccctcaccacttaatac

SEQ ID NO: 1994 - DNA, 50 bp, synthetic construct
  source 1..50: mol_type = other DNA
tcatcaccactctaaactttaatcaaatcactaaatttctttaaacccrc

SEQ ID NO: 1995 - DNA, 50 bp, synthetic construct
  source 1..50: mol_type = other DNA
ttcaataacttaaccaaaacccaaaataataataaaaccaatacccaaac

SEQ ID NO: 1996 - DNA, 50 bp, synthetic construct
  source 1..50: mol_type = other DNA
aaacctccaaaacacatcttaataacttcatatctttttaatatatatac

SEQ ID NO: 1997 - DNA, 50 bp, synthetic construct
  source 1..50: mol_type = other DNA
tttaatcraataaaacratactataaaaactaacratctccaatcttcac

SEQ ID NO: 1998 - DNA, 50 bp, synthetic construct
  source 1..50: mol_type = other DNA
taacttctaaccactataaaaacaattctaatttctccacattaatacac

SEQ ID NO: 1999 - DNA, 50 bp, synthetic construct
  source 1..50: mol_type = other DNA
ataactatccaaaaacaatcaatataacctaaaaaactatcctatatacc

SEQ ID NO: 2000 - DNA, 50 bp, synthetic construct
  source 1..50: mol_type = other DNA
aaaaaaaacttcccaattaaccctaaataaaaaaacacaaaatacctccc

SEQ ID NO: 2001 - DNA, 50 bp, synthetic construct
  source 1..50: mol_type = other DNA
craataattcacttaaaaccaaaaattttaaaaacaacctaatcaacaac

SEQ ID NO: 2002 - DNA, 50 bp, synthetic construct
  source 1..50: mol_type = other DNA
tatatctcctatcttccccraacttcttaattacaaaaaactctaattac

SEQ ID NO: 2003 - DNA, 50 bp, synthetic construct
  source 1..50: mol_type = other DNA
aattattttccaaaacaatccccaacttcccaaattctaaaataaaactc

SEQ ID NO: 2004 - DNA, 50 bp, synthetic construct
  source 1..50: mol_type = other DNA
accaacacttatctcattaaaactaaacaaacaaataaaaataacctcac

SEQ ID NO: 2005 - DNA, 50 bp, synthetic construct
  source 1..50: mol_type = other DNA
ctataattataattttcaacttctctaaacaaattcaacaaactaaacac

SEQ ID NO: 2006 - DNA, 50 bp, synthetic construct
  source 1..50: mol_type = other DNA
ctctaaacaaattcaacaaactaaacacraaactaccrtcctataataac

SEQ ID NO: 2007 - DNA, 50 bp, synthetic construct
  source 1..50: mol_type = other DNA
aaaaaactatactacacacatataaataaaaaaaccaaaaaccrcccctc

SEQ ID NO: 2008 - DNA, 50 bp, synthetic construct
  source 1..50: mol_type = other DNA
ctttcccaaaatcaaattattcccttcataactcttctaaaaacctcacc

SEQ ID NO: 2009 - DNA, 50 bp, synthetic construct
  source 1..50: mol_type = other DNA
aaaccacattaaaatataccttactaactacttaatcctccaaaaacaac

SEQ ID NO: 2010 - DNA, 50 bp, synthetic construct
  source 1..50: mol_type = other DNA
ctataacatcraaacaacrtcataaccaaatctacatataacttaacccc

SEQ ID NO: 2011 - DNA, 50 bp, synthetic construct
  source 1..50: mol_type = other DNA
aaaacctataaaaaaaacaaattcttcaatccrcattcttctactctaac

SEQ ID NO: 2012 - DNA, 50 bp, synthetic construct
  source 1..50: mol_type = other DNA
aatcccractccctccattaaaaaaaatatctaaaatattaacctaaaac

SEQ ID NO: 2013 - DNA, 50 bp, synthetic construct
  source 1..50: mol_type = other DNA
aaaaaaatacaaatttctctaactcctaccctaatcctcacatactatac

SEQ ID NO: 2014 - DNA, 50 bp, synthetic construct
  source 1..50: mol_type = other DNA
atactatacrattctaaacctaaaactctatccctaaaaaaacaactctc

SEQ ID NO: 2015 - DNA, 50 bp, synthetic construct
  source 1..50: mol_type = other DNA
aatcccacccacaaaataaaaaaactatttactattccccacctttaatc

SEQ ID NO: 2016 - DNA, 50 bp, synthetic construct
  source 1..50: mol_type = other DNA
aactcttattaaacttataattaatacaaaaaatctaaatcaaaaacaac

SEQ ID NO: 2017 - DNA, 50 bp, synthetic construct
  source 1..50: mol_type = other DNA
ctccccrtctcrcatatctacttaattacttttttctcaatattcaaatc

SEQ ID NO: 2018 - DNA, 50 bp, synthetic construct
  source 1..50: mol_type = other DNA
tatctacttaattacttttttctcaatattcaaatcraattatttctttc

SEQ ID NO: 2019 - DNA, 50 bp, synthetic construct
  source 1..50: mol_type = other DNA
ctttcraaaaaacttcctaattcaccataccaccattcttatactaacrc

SEQ ID NO: 2020 - DNA, 50 bp, synthetic construct
  source 1..50: mol_type = other DNA
ttaatactatctaaaatatacttattaataatatcctaccactaaatccc

SEQ ID NO: 2021 - DNA, 50 bp, synthetic construct
  source 1..50: mol_type = other DNA
tctaaaatatacttattaataatatcctaccactaaatcccraaaaaaac

SEQ ID NO: 2022 - DNA, 50 bp, synthetic construct
  source 1..50: mol_type = other DNA
ttactccccataatctaaaacaatacttaacacaaaaaattcaacaactc

SEQ ID NO: 2023 - DNA, 50 bp, synthetic construct
  source 1..50: mol_type = other DNA
ttaacaaaacaaattccctacctcaaaaaacataaccrcaataaaaaaac

SEQ ID NO: 2024 - DNA, 50 bp, synthetic construct
  source 1..50: mol_type = other DNA
tacaaaaattaactaaacataataataaacacctataattccaactactc

SEQ ID NO: 2025 - DNA, 50 bp, synthetic construct
  source 1..50: mol_type = other DNA
atcataaaatcaaaaaatccaaaccatcctaactaacacrataaaacccc

SEQ ID NO: 2026 - DNA, 50 bp, synthetic construct
  source 1..50: mol_type = other DNA
taactacatacccacaaaaaataaaaacatattcaaacaaaaacttatcc

SEQ ID NO: 2027 - DNA, 50 bp, synthetic construct
  source 1..50: mol_type = other DNA
tacatacccacaaaaaataaaaacatattcaaacaaaaacttatccrtac

SEQ ID NO: 2028 - DNA, 50 bp, synthetic construct
  source 1..50: mol_type = other DNA
taacctactattaaccaaaaaccttaccaataacataaacaattaaacac

SEQ ID NO: 2029 - DNA, 50 bp, synthetic construct
  source 1..50: mol_type = other DNA
aaaaaccttaccaataacataaacaattaaacacrttttatatattatac

SEQ ID NO: 2030 - DNA, 50 bp, synthetic construct
  source 1..50: mol_type = other DNA
tattctcacaacaaaactaatattactttaataaccraatcctttcttac

SEQ ID NO: 2031 - DNA, 50 bp, synthetic construct
  source 1..50: mol_type = other DNA
ctcacaacctaaattattctcacaacaaaactaatattactttaataacc

SEQ ID NO: 2032 - DNA, 50 bp, synthetic construct
  source 1..50: mol_type = other DNA
ttttataattttattctatcactcaacacttcctacaatataatttttac

SEQ ID NO: 2033 - DNA, 50 bp, synthetic construct
  source 1..50: mol_type = other DNA
aataacrtaacaaattaaccatttcttaaaataactattcccaaaaacac

SEQ ID NO: 2034 - DNA, 50 bp, synthetic construct
  source 1..50: mol_type = other DNA
raaaaatttcttaaaaataaaacaataaaaataattacccccatccccac

SEQ ID NO: 2035 - DNA, 50 bp, synthetic construct
  source 1..50: mol_type = other DNA
rtaaaaataaaaataatcactcctactattttattttcaaaaaattctcc

SEQ ID NO: 2036 - DNA, 50 bp, synthetic construct
  source 1..50: mol_type = other DNA
taaaaataatcactcctactattttattttcaaaaaattctccrccccac

SEQ ID NO: 2037 - DNA, 50 bp, synthetic construct
  source 1..50: mol_type = other DNA
aaacaatataatccaaaatttataaatccaaactactcttaaaataaacc

SEQ ID NO: 2038 - DNA, 50 bp, synthetic construct
  source 1..50: mol_type = other DNA
aaatccaaactactcttaaaataaaccraaacactctacctacaattttc

SEQ ID NO: 2039 - DNA, 50 bp, synthetic construct
  source 1..50: mol_type = other DNA
tactcttaaaataaaccraaacactctacctacaattttcracatcaaac

SEQ ID NO: 2040 - DNA, 50 bp, synthetic construct
  source 1..50: mol_type = other DNA
taacaactaaaaaaacccaaaactaaaaaaacrcaactaaaactaaaaac

SEQ ID NO: 2041 - DNA, 50 bp, synthetic construct
  source 1..50: mol_type = other DNA
rcaaaaactaaaatactaaaaactactaaaaccrccatcttaaattccrc

SEQ ID NO: 2042 - DNA, 50 bp, synthetic construct
  source 1..50: mol_type = other DNA
aaaaactaaccrtatattaactccrcctactatataaacraaatctcccc

SEQ ID NO: 2043 - DNA, 50 bp, synthetic construct
  source 1..50: mol_type = other DNA
aatttttcttaaaaaactaaccrtatattaactccrcctactatataaac

SEQ ID NO: 2044 - DNA, 50 bp, synthetic construct
  source 1..50: mol_type = other DNA
crcrcccaacctaaaatacccattttaattacatttcaataacrttactc

SEQ ID NO: 2045 - DNA, 50 bp, synthetic construct
  source 1..50: mol_type = other DNA
cttttaaaataatacttttatttctataaaaaaaattccccaaaccraac

SEQ ID NO: 2046 - DNA, 50 bp, synthetic construct
  source 1..50: mol_type = other DNA
ataatttaaattatttaaattattttccrttctcaaccccracaaataac

SEQ ID NO: 2047 - DNA, 50 bp, synthetic construct
  source 1..50: mol_type = other DNA
tcctaactaacacrataaaaccccrtctatactaaaaatattaaccraac

SEQ ID NO: 2048 - DNA, 50 bp, synthetic construct
  source 1..50: mol_type = other DNA
atcatcctaactaacacrataaaaccccrtctatactaaaaatattaacc

SEQ ID NO: 2049 - DNA, 50 bp, synthetic construct
  source 1..50: mol_type = other DNA
cccctaaaaaactctaccttaacrcatacrtaattaccttaattttcrtc

SEQ ID NO: 2050 - DNA, 50 bp, synthetic construct
  source 1..50: mol_type = other DNA
aaataaacctttaatcaccaaataactcaacaatattccccrcacctccc

SEQ ID NO: 2051 - DNA, 50 bp, synthetic construct
  source 1..50: mol_type = other DNA
cttttcttcctatctctactttcactttctaaaccaacctaaatcccacc

SEQ ID NO: 2052 - DNA, 50 bp, synthetic construct
  source 1..50: mol_type = other DNA
aataaaatccttaaactaaaatactaacccrtaacaaactaaaaaatttc

SEQ ID NO: 2053 - DNA, 50 bp, synthetic construct
  source 1..50: mol_type = other DNA
acccaaacttcactcccccatacacataaaaaaacataatatctatctac

SEQ ID NO: 2054 - DNA, 50 bp, synthetic construct
  source 1..50: mol_type = other DNA
taaaaatcrtaacraatacaataaacccctattcctaaaaaaataaatcc

SEQ ID NO: 2055 - DNA, 50 bp, synthetic construct
  source 1..50: mol_type = other DNA
taaaaacctactcraactcacttctccaaaaacaaaaactcactacattc

SEQ ID NO: 2056 - DNA, 50 bp, synthetic construct
  source 1..50: mol_type = other DNA
atttcaatcacctaaattaccaaacccaaattcaaaaaattctaaaaatc

SEQ ID NO: 2057 - DNA, 50 bp, synthetic construct
  source 1..50: mol_type = other DNA
aatataaataactaacaaaaaaactcctaataaaactaactttctaaacc

SEQ ID NO: 2058 - DNA, 50 bp, synthetic construct
  source 1..50: mol_type = other DNA
aactctaaatttaaaaaaatccaacaaaatctcaatcacataacaaaaac

SEQ ID NO: 2059 - DNA, 50 bp, synthetic construct
  source 1..50: mol_type = other DNA
aattcaaaattcaacctaacataccraccaaaaaccccttaaaaaaattc

SEQ ID NO: 2060 - DNA, 50 bp, synthetic construct
  source 1..50: mol_type = other DNA
tcaaaattcaacctaacataccraccaaaaaccccttaaaaaaattcrac

SEQ ID NO: 2061 - DNA, 50 bp, synthetic construct
  source 1..50: mol_type = other DNA
acccttcaaaatttcttctaactacctacccaacaaatttaaaaaaaacc

SEQ ID NO: 2062 - DNA, 50 bp, synthetic construct
  source 1..50: mol_type = other DNA
aaaaactaaataaccrcaattaaactaaataaacacratactacaactcc

SEQ ID NO: 2063 - DNA, 50 bp, synthetic construct
  source 1..50: mol_type = other DNA
aaccttcaatcaaaaaacacaaacaacaacraaatttaccaaaaaaattc

SEQ ID NO: 2064 - DNA, 50 bp, synthetic construct
  source 1..50: mol_type = other DNA
taccctaaccaaaacatctcactaatactcraattcttttaacaaacttc

SEQ ID NO: 2065 - DNA, 50 bp, synthetic construct
  source 1..50: mol_type = other DNA
aaataaccaaatacacatcaaaaacacttccaactccaatacctcttccc

SEQ ID NO: 2066 - DNA, 50 bp, synthetic construct
  source 1..50: mol_type = other DNA
aaaacctaaatataaattactataacactaaaacaaaacaaaattcctac

SEQ ID NO: 2067 - DNA, 50 bp, synthetic construct
  source 1..50: mol_type = other DNA
tctccactaacccaaaaattcccatactaaaaaaaataacttaaccctcc

SEQ ID NO: 2068 - DNA, 50 bp, synthetic construct
  source 1..50: mol_type = other DNA
atttaaaaataacrtactacratactatcatttcctaatacctttttctc

SEQ ID NO: 2069 - DNA, 50 bp, synthetic construct
  source 1..50: mol_type = other DNA
ccaaactcrcattaccttatacttaatcataatactaaaataattatttc

SEQ ID NO: 2070 - DNA, 50 bp, synthetic construct
  source 1..50: mol_type = other DNA
aaaacrctaaattcaccctccttaacaactactatcaactcacacaatcc

SEQ ID NO: 2071 - DNA, 50 bp, synthetic construct
  source 1..50: mol_type = other DNA
ccttaacaactactatcaactcacacaatccrtaataaatcaactaaacc

SEQ ID NO: 2072 - DNA, 50 bp, synthetic construct
  source 1..50: mol_type = other DNA
ctcrtccctttctaacaaacctaattacaaaacaattcctaaaaaccacc

SEQ ID NO: 2073 - DNA, 50 bp, synthetic construct
  source 1..50: mol_type = other DNA
taatccttcctattataaaccttaaatttaaaccaaatttcccccractc

SEQ ID NO: 2074 - DNA, 50 bp, synthetic construct
  source 1..50: mol_type = other DNA
ctaaataatccttcctattataaaccttaaatttaaaccaaatttccccc

SEQ ID NO: 2075 - DNA, 50 bp, synthetic construct
  source 1..50: mol_type = other DNA
caaaatccacaacaaaaaaaaccatccaaaaaacccctatcaaaaacccc

SEQ ID NO: 2076 - DNA, 50 bp, synthetic construct
  source 1..50: mol_type = other DNA
tcctttccaaaaaatccacttaacacaataaaaatctaactcaaactatc

SEQ ID NO: 2077 - DNA, 50 bp, synthetic construct
  source 1..50: mol_type = other DNA
aacatacccttattatctctacttcaaacaatatcccaaaaattaacccc

SEQ ID NO: 2078 - DNA, 50 bp, synthetic construct
  source 1..50: mol_type = other DNA
aaaattatccccacactaactaaacaacaaaacttaatctactaactccc

SEQ ID NO: 2079 - DNA, 50 bp, synthetic construct
  source 1..50: mol_type = other DNA
ttttaaccataaaataccatcaacctaaaaatccaacccctaataaaacc

SEQ ID NO: 2080 - DNA, 50 bp, synthetic construct
  source 1..50: mol_type = other DNA
atacaataactcctaactataaacaatatatatataaacaaaaaaacccc

SEQ ID NO: 2081 - DNA, 50 bp, synthetic construct
  source 1..50: mol_type = other DNA
taaactctttccacctctaacttactataaccaaataaaaccaaaaaatc

SEQ ID NO: 2082 - DNA, 50 bp, synthetic construct
  source 1..50: mol_type = other DNA
ttactatctcaatactaactatcaaaaaatacttactaaatccaaacacc

SEQ ID NO: 2083 - DNA, 50 bp, synthetic construct
  source 1..50: mol_type = other DNA
cattctttcctactctaaaatactccataccctccccaacaaaattaaac

SEQ ID NO: 2084 - DNA, 50 bp, synthetic construct
  source 1..50: mol_type = other DNA
aataatcaaataaatcaaaatttcattcttttcctcctctttcttaactc

SEQ ID NO: 2085 - DNA, 50 bp, synthetic construct
  source 1..50: mol_type = other DNA
atttataatttttcttttcttctctctctcttttttattctcatcaaaac

SEQ ID NO: 2086 - DNA, 50 bp, synthetic construct
  source 1..50: mol_type = other DNA
atcacaaaactactaaccraatcaaaaaatcctaataaaaatccaccaac

SEQ ID NO: 2087 - DNA, 50 bp, synthetic construct
  source 1..50: mol_type = other DNA
aaaaaaaacctacccaacrctaataaatttccatcaaaactttctaaccc

SEQ ID NO: 2088 - DNA, 50 bp, synthetic construct
  source 1..50: mol_type = other DNA
atacacctaataaaatacaaaaaatataataaaaaccccaaactctaaac

SEQ ID NO: 2089 - DNA, 50 bp, synthetic construct
  source 1..50: mol_type = other DNA
ttcaaataccacaataataaattactataacacatacacatttatttacc

SEQ ID NO: 2090 - DNA, 50 bp, synthetic construct
  source 1..50: mol_type = other DNA
aataccacaataataaattactataacacatacacatttatttaccraac

SEQ ID NO: 2091 - DNA, 50 bp, synthetic construct
  source 1..50: mol_type = other DNA
cractaatccctcaaaaaacaatccttccctcrattactaaaaacattac

SEQ ID NO: 2092 - DNA, 50 bp, synthetic construct
  source 1..50: mol_type = other DNA
aatactacttattcaatctcccratttttaactccccrcctttaaaatcc

SEQ ID NO: 2093 - DNA, 50 bp, synthetic construct
  source 1..50: mol_type = other DNA
aacaacaaacaaaaactcaaatacaaaattcaaacccaaaacttctcccc

SEQ ID NO: 2094 - DNA, 50 bp, synthetic construct
  source 1..50: mol_type = other DNA
ctacttactatcatcttaatcaattccatcaaaaaaaccaaaactatacc

SEQ ID NO: 2095 - DNA, 50 bp, synthetic construct
  source 1..50: mol_type = other DNA
cttactatcatcttaatcaattccatcaaaaaaaccaaaactataccrcc

SEQ ID NO: 2096 - DNA, 50 bp, synthetic construct
  source 1..50: mol_type = other DNA
actttatacttatcccttccaaataaaaaatttttatatcatttatatac

SEQ ID NO: 2097 - DNA, 50 bp, synthetic construct
  source 1..50: mol_type = other DNA
taaaaatatacacatcataatttacraataataaataatccaatcaaacc

SEQ ID NO: 2098 - DNA, 50 bp, synthetic construct
  source 1..50: mol_type = other DNA
tattccttttatattcattccttttaattactatctaaatttaactaaac

SEQ ID NO: 2099 - DNA, 50 bp, synthetic construct
  source 1..50: mol_type = other DNA
tatcatttccctattattatctcctctttaaatctataaaatcctaaaac

SEQ ID NO: 2100 - DNA, 50 bp, synthetic construct
  source 1..50: mol_type = other DNA
atcaaaatatactaacaaaacttcctaaaacaaaaacaaaaatttctttc

SEQ ID NO: 2101 - DNA, 50 bp, synthetic construct
  source 1..50: mol_type = other DNA
aatctaaaaaacactcatccaccaaactattcataaacrtcraaaacaac

SEQ ID NO: 2102 - DNA, 50 bp, synthetic construct
  source 1..50: mol_type = other DNA
rctatattaaaaatcrcactaaaaaactctctactaatactatcctttcc

SEQ ID NO: 2103 - DNA, 50 bp, synthetic construct
  source 1..50: mol_type = other DNA
aactattaactataaacctcrtactaaaactccccrctatattaaaaatc

SEQ ID NO: 2104 - DNA, 50 bp, synthetic construct
  source 1..50: mol_type = other DNA
taatttcaaactcctaactattaactataaacctcrtactaaaactcccc

SEQ ID NO: 2105 - DNA, 50 bp, synthetic construct
  source 1..50: mol_type = other DNA
tttataaccaataatcaaaaacctaaaatcaaactaacttcaaacctacc

SEQ ID NO: 2106 - DNA, 50 bp, synthetic construct
  source 1..50: mol_type = other DNA
tataaccaataatcaaaaacctaaaatcaaactaacttcaaacctaccrc

SEQ ID NO: 2107 - DNA, 50 bp, synthetic construct
  source 1..50: mol_type = other DNA
accractcraaataaacccaaatataaaccactaactcaaaataacctac

SEQ ID NO: 2108 - DNA, 50 bp, synthetic construct
  source 1..50: mol_type = other DNA
acaccaaccrcaaatcctcaaaaaataacataactataaataaaaataac

SEQ ID NO: 2109 - DNA, 50 bp, synthetic construct
  source 1..50: mol_type = other DNA
cccraaatcrattacaaaaacattattaataaatacaaaacttatactcc

SEQ ID NO: 2110 - DNA, 50 bp, synthetic construct
  source 1..50: mol_type = other DNA
attaatatcaatacaaaaacttatatccaaaaaacactcttcccraaatc

SEQ ID NO: 2111 - DNA, 50 bp, synthetic construct
  source 1..50: mol_type = other DNA
aacacaattaatatcaatacaaaaacttatatccaaaaaacactcttccc

SEQ ID NO: 2112 - DNA, 50 bp, synthetic construct
  source 1..50: mol_type = other DNA
ctctcctcaaaaaaacaatattaatacaaaattccatctcaaccactttc

SEQ ID NO: 2113 - DNA, 50 bp, synthetic construct
  source 1..50: mol_type = other DNA
cttatatcaccccaaactttactaatttctaccactatcctttaatcctc

SEQ ID NO: 2114 - DNA, 50 bp, synthetic construct
  source 1..50: mol_type = other DNA
aattctaactaaaaacccraaacaacaactaatccctatataaaaacccc

SEQ ID NO: 2115 - DNA, 50 bp, synthetic construct
  source 1..50: mol_type = other DNA
aaaaaattaatattaaacctatcacttaactaaaatataaaatccacacc

SEQ ID NO: 2116 - DNA, 50 bp, synthetic construct
  source 1..50: mol_type = other DNA
tacraatctctaaacttaattaaatctaaaaatttaaaaaactccrcttc

SEQ ID NO: 2117 - DNA, 50 bp, synthetic construct
  source 1..50: mol_type = other DNA
caactatcccccacctcatataaaatctttcaatctaaccataaacaacc

SEQ ID NO: 2118 - DNA, 50 bp, synthetic construct
  source 1..50: mol_type = other DNA
aataacaaaacataaatactataaaaaaataactacccattattcataac

SEQ ID NO: 2119 - DNA, 50 bp, synthetic construct
  source 1..50: mol_type = other DNA
tacttcttcraaatccraaacraccaaatttaatttaacaaaaaaacctc

SEQ ID NO: 2120 - DNA, 50 bp, synthetic construct
  source 1..50: mol_type = other DNA
craaccccraaaaaacaaccaaaaattaaaacrcaatctacataactaac

SEQ ID NO: 2121 - DNA, 50 bp, synthetic construct
  source 1..50: mol_type = other DNA
tctaatattaacrccaaaaacctaacraactactaaaaaaaactcraaac

SEQ ID NO: 2122 - DNA, 50 bp, synthetic construct
  source 1..50: mol_type = other DNA
ctaaatctaatattaacrccaaaaacctaacraactactaaaaaaaactc

SEQ ID NO: 2123 - DNA, 50 bp, synthetic construct
  source 1..50: mol_type = other DNA
aaaactactaattacrtatcttacrcrtctaaataattccaacaaaaaac

SEQ ID NO: 2124 - DNA, 50 bp, synthetic construct
  source 1..50: mol_type = other DNA
aactcatactcccattctaacaaaaaaataatacacccccraaattcatc

SEQ ID NO: 2125 - DNA, 50 bp, synthetic construct
  source 1..50: mol_type = other DNA
ataatcaaaaaactcatactcccattctaacaaaaaaataatacaccccc

SEQ ID NO: 2126 - DNA, 50 bp, synthetic construct
  source 1..50: mol_type = other DNA
crccaatttaatcccrtttccttctctaattaaaactccctatcaaaaac

SEQ ID NO: 2127 - DNA, 50 bp, synthetic construct
  source 1..50: mol_type = other DNA
aactaaaaaacratataacttctcacracactttcctttccaaccctaac

SEQ ID NO: 2128 - DNA, 50 bp, synthetic construct
  source 1..50: mol_type = other DNA
ataaatataaaacctaaaactaaaaaactaaaccaaaaaaaacccaaacc

SEQ ID NO: 2129 - DNA, 50 bp, synthetic construct
  source 1..50: mol_type = other DNA
ccccrtctctattaaaaatatacaaaaattaaccatacataataacrcac

SEQ ID NO: 2130 - DNA, 50 bp, synthetic construct
  source 1..50: mol_type = other DNA
aaaaccccrtctctattaaaaatatacaaaaattaaccatacataataac

SEQ ID NO: 2131 - DNA, 50 bp, synthetic construct
  source 1..50: mol_type = other DNA
caataaaaaaatctataattcttttaatattactcaaatccccactaaac

SEQ ID NO: 2132 - DNA, 50 bp, synthetic construct
  source 1..50: mol_type = other DNA
acttaaacaatactaaaaaaaccataaattcttccattacaattctttcc

SEQ ID NO: 2133 - DNA, 50 bp, synthetic construct
  source 1..50: mol_type = other DNA
attttattacatcrttaataataaaccataaactatccttttccaaaaac

SEQ ID NO: 2134 - DNA, 50 bp, synthetic construct
  source 1..50: mol_type = other DNA
cttaatccacccaatccaataaaaatattcttaaacatatattttcacac

SEQ ID NO: 2135 - DNA, 50 bp, synthetic construct
  source 1..50: mol_type = other DNA
caaacacttcataaattattaaaacacacacttattaaaaaattttaacc

SEQ ID NO: 2136 - DNA, 50 bp, synthetic construct
  source 1..50: mol_type = other DNA
cacttcataaattattaaaacacacacttattaaaaaattttaaccraac

SEQ ID NO: 2137 - DNA, 50 bp, synthetic construct
  source 1..50: mol_type = other DNA
tattaaaacacacacttattaaaaaattttaaccraacrcaataactcac

SEQ ID NO: 2138 - DNA, 50 bp, synthetic construct
  source 1..50: mol_type = other DNA
atttttaatcaactaaacrtaataatacccactaataatcccaactactc

SEQ ID NO: 2139 - DNA, 50 bp, synthetic construct
  source 1..50: mol_type = other DNA
caacctaaaccacaaaataaaaccctatctctttaaaaaacaaacaaacc

SEQ ID NO: 2140 - DNA, 50 bp, synthetic construct
  source 1..50: mol_type = other DNA
ctaaaccacaaaataaaaccctatctctttaaaaaacaaacaaaccraac

SEQ ID NO: 2141 - DNA, 50 bp, synthetic construct
  source 1..50: mol_type = other DNA
taacrcaaaaaacaactaatacraatttacaaatcraatttttcaccccc

SEQ ID NO: 2142 - DNA, 50 bp, synthetic construct
  source 1..50: mol_type = other DNA
ccctattaaaaacaaaaatctacccccractcttacttaaaaaacraaac

SEQ ID NO: 2143 - DNA, 50 bp, synthetic construct
  source 1..50: mol_type = other DNA
ttcrtccctattaaaaacaaaaatctacccccractcttacttaaaaaac

SEQ ID NO: 2144 - DNA, 50 bp, synthetic construct
  source 1..50: mol_type = other DNA
acaaaccraaatctaaacaccctctaaaaaattaactcrtacaaaaaaac

SEQ ID NO: 2145 - DNA, 50 bp, synthetic construct
  source 1..50: mol_type = other DNA
ccttcaaaaaatactcaaattccracttacacaaaaacaaaaaaacaccc

SEQ ID NO: 2146 - DNA, 50 bp, synthetic construct
  source 1..50: mol_type = other DNA
taataaaaacaaaatctaaacacctcrttcaattaaactttcrtcraatc

SEQ ID NO: 2147 - DNA, 50 bp, synthetic construct
  source 1..50: mol_type = other DNA
aactatactaataaaaacaaaatctaaacacctcrttcaattaaactttc

SEQ ID NO: 2148 - DNA, 50 bp, synthetic construct
  source 1..50: mol_type = other DNA
aataaccraaccccrtaactatactaataaaaacaaaatctaaacacctc

SEQ ID NO: 2149 - DNA, 50 bp, synthetic construct
  source 1..50: mol_type = other DNA
attaaacraaatacccaaactctactctcaccaatacaattacraaactc

SEQ ID NO: 2150 - DNA, 50 bp, synthetic construct
  source 1..50: mol_type = other DNA
tccacccaaaaaaccaaaccraaaaactaaactaaaaaccaaaaacaaac

SEQ ID NO: 2151 - DNA, 50 bp, synthetic construct
  source 1..50: mol_type = other DNA
ccraaaacatccaaaacaaaactaacacccaacacaacaaataaaaaacc

SEQ ID NO: 2152 - DNA, 50 bp, synthetic construct
  source 1..50: mol_type = other DNA
ttaatttttctaataacaaaacaacctctaaaaaacctaattttaaatac

SEQ ID NO: 2153 - DNA, 50 bp, synthetic construct
  source 1..50: mol_type = other DNA
tactttactcccaacttaccttaaaactttctaaaccatactccccaacc

SEQ ID NO: 2154 - DNA, 50 bp, synthetic construct
  source 1..50: mol_type = other DNA
ttaataacatatcaactccatatatccaaaattctctccccataatcttc

SEQ ID NO: 2155 - DNA, 50 bp, synthetic construct
  source 1..50: mol_type = other DNA
aaaactcaaaccttcaaaactacctacccttcttaaaatattaacttctc

SEQ ID NO: 2156 - DNA, 50 bp, synthetic construct
  source 1..50: mol_type = other DNA
attataaaaataaacttcaaaccaaataatccaaaaaaacctccttcccc

SEQ ID NO: 2157 - DNA, 50 bp, synthetic construct
  source 1..50: mol_type = other DNA
catctttataatttactaataactttaaccaaattactatatttctcttc

SEQ ID NO: 2158 - DNA, 50 bp, synthetic construct
  source 1..50: mol_type = other DNA
acaacaacctacttccccttaaaatataacttatactaaactaacctccc

SEQ ID NO: 2159 - DNA, 50 bp, synthetic construct
  source 1..50: mol_type = other DNA
ctataacaaatcttaactccaaaacaacccacraaaataacrataacccc

SEQ ID NO: 2160 - DNA, 50 bp, synthetic construct
  source 1..50: mol_type = other DNA
cccttaatactataacaaatcttaactccaaaacaacccacraaaataac

SEQ ID NO: 2161 - DNA, 50 bp, synthetic construct
  source 1..50: mol_type = other DNA
tactttttccccttaatactataacaaatcttaactccaaaacaacccac

SEQ ID NO: 2162 - DNA, 50 bp, synthetic construct
  source 1..50: mol_type = other DNA
tctatataattaataaaatcaaacaaacctatttaaatcccaaatctaac

SEQ ID NO: 2163 - DNA, 50 bp, synthetic construct
  source 1..50: mol_type = other DNA
ttaaaacccraaaacaccctaactaaactaacactcaaatataaaataac

SEQ ID NO: 2164 - DNA, 50 bp, synthetic construct
  source 1..50: mol_type = other DNA
aaactacttcaaaaaaaccraactcrttcatataaaaacctaatacaatc

SEQ ID NO: 2165 - DNA, 50 bp, synthetic construct
  source 1..50: mol_type = other DNA
tctttccctcactaaaaaacaaaccrattacaccaaacttccatataaac

SEQ ID NO: 2166 - DNA, 50 bp, synthetic construct
  source 1..50: mol_type = other DNA
tcccctaattacaaccttaactattaacaaaataaaaaaataacttcccc

SEQ ID NO: 2167 - DNA, 50 bp, synthetic construct
  source 1..50: mol_type = other DNA
aatcccctaaatattcattcccaaacttcaaacctatcaatcrcaatctc

SEQ ID NO: 2168 - DNA, 50 bp, synthetic construct
  source 1..50: mol_type = other DNA
aaaaaaaaaatcccctaaatattcattcccaaacttcaaacctatcaatc

SEQ ID NO: 2169 - DNA, 50 bp, synthetic construct
  source 1..50: mol_type = other DNA
ccataaaaaatacaattccctccraacaccaaaaaataaatttccraatc

SEQ ID NO: 2170 - DNA, 50 bp, synthetic construct
  source 1..50: mol_type = other DNA
ataaaaaatacaattccctccraacaccaaaaaataaatttccraatcrc

SEQ ID NO: 2171 - DNA, 50 bp, synthetic construct
  source 1..50: mol_type = other DNA
ttaaaaaacatcacractataaatcccaaaaataataaattctctattcc

SEQ ID NO: 2172 - DNA, 50 bp, synthetic construct
  source 1..50: mol_type = other DNA
aaaataacraaaccraaacaaaaaatttatcacttctaaaactcacaatc

SEQ ID NO: 2173 - DNA, 50 bp, synthetic construct
  source 1..50: mol_type = other DNA
aaatcctctccrctcacrcttactttaaacacattaaattaactccaatc

SEQ ID NO: 2174 - DNA, 50 bp, synthetic construct
  source 1..50: mol_type = other DNA
caaaacaataaaacaaaactccttcccaaccttcaaaaaacractaaaac

SEQ ID NO: 2175 - DNA, 50 bp, synthetic construct
  source 1..50: mol_type = other DNA
aattattaccaaaacaataaaacaaaactccttcccaaccttcaaaaaac

SEQ ID NO: 2176 - DNA, 50 bp, synthetic construct
  source 1..50: mol_type = other DNA
craaaacctcctaaccaattacattccaaaaaataaaacrctaatacttc

SEQ ID NO: 2177 - DNA, 50 bp, synthetic construct
  source 1..50: mol_type = other DNA
cctaaccaattacattccaaaaaataaaacrctaatacttcraaataaac

SEQ ID NO: 2178 - DNA, 50 bp, synthetic construct
  source 1..50: mol_type = other DNA
aaaacaaaatcacttaaaccctaaaattcraaaacaacctaaacaacacc

SEQ ID NO: 2179 - DNA, 50 bp, synthetic construct
  source 1..50: mol_type = other DNA
tttattaaaaccaaacrtaataacatacrcttataaacccaactaatcrc

SEQ ID NO: 2180 - DNA, 50 bp, synthetic construct
  source 1..50: mol_type = other DNA
aatttattaaaaccaaacrtaataacatacrcttataaacccaactaatc

SEQ ID NO: 2181 - DNA, 50 bp, synthetic construct
  source 1..50: mol_type = other DNA
actcaaataatcctacctcctcaacrtcrcrattaactaaatttacaaac

SEQ ID NO: 2182 - DNA, 50 bp, synthetic construct
  source 1..50: mol_type = other DNA
accactctaaataaaaatcccaaacatctaaactaaatttatcttcccac

SEQ ID NO: 2183 - DNA, 50 bp, synthetic construct
  source 1..50: mol_type = other DNA
aaacataaaaccaactatattaacaaaacttccaacaactatattaaaac

SEQ ID NO: 2184 - DNA, 50 bp, synthetic construct
  source 1..50: mol_type = other DNA
aaaaaactctctcttccccttacacctcattatccttaatttttttatcc

SEQ ID NO: 2185 - DNA, 50 bp, synthetic construct
  source 1..50: mol_type = other DNA
tttctaaatctttcatattcaacataatatatatacataactccttatac

SEQ ID NO: 2186 - DNA, 50 bp, synthetic construct
  source 1..50: mol_type = other DNA
aattaacaattaaaatactatataataaaccraacacaataactttaacc

SEQ ID NO: 2187 - DNA, 50 bp, synthetic construct
  source 1..50: mol_type = other DNA
ccaataaaataactacctaaattaacaattaaaatactatataataaacc

SEQ ID NO: 2188 - DNA, 50 bp, synthetic construct
  source 1..50: mol_type = other DNA
acactatttttaatattctatttccctaaaacctaaaacaacctattacc

SEQ ID NO: 2189 - DNA, 50 bp, synthetic construct
  source 1..50: mol_type = other DNA
crcaaatatacrataaatttctaccrttctctattctctaaaatacctcc

SEQ ID NO: 2190 - DNA, 50 bp, synthetic construct
  source 1..50: mol_type = other DNA
taaatttctaccrttctctattctctaaaatacctccraaaaacttctcc

SEQ ID NO: 2191 - DNA, 50 bp, synthetic construct
  source 1..50: mol_type = other DNA
aaaataaattctaccaaacracttataaaaatttcacaaaaacaaaatcc

SEQ ID NO: 2192 - DNA, 50 bp, synthetic construct
  source 1..50: mol_type = other DNA
caccaaataaactcattaaacaaaaaaaatcrctaaatactaaaacaaac

SEQ ID NO: 2193 - DNA, 50 bp, synthetic construct
  source 1..50: mol_type = other DNA
actctaatacccaacratctcccttactcaataaatccacttaataatac

SEQ ID NO: 2194 - DNA, 50 bp, synthetic construct
  source 1..50: mol_type = other DNA
aatcattcattaattaattcactcaattaacattatttaacccaaactac

SEQ ID NO: 2195 - DNA, 50 bp, synthetic construct
  source 1..50: mol_type = other DNA
ctcttaccaatccccatcacttcattctaatcttaaaaacttttctaacc

SEQ ID NO: 2196 - DNA, 50 bp, synthetic construct
  source 1..50: mol_type = other DNA
taccaatccccatcacttcattctaatcttaaaaacttttctaaccraac

SEQ ID NO: 2197 - DNA, 50 bp, synthetic construct
  source 1..50: mol_type = other DNA
aaaaccactcctccccrataacattcctaacataataaaactataataac

SEQ ID NO: 2198 - DNA, 50 bp, synthetic construct
  source 1..50: mol_type = other DNA
aatactatttttatttttaatttcaccaactcccactcaatccctaaaac

SEQ ID NO: 2199 - DNA, 50 bp, synthetic construct
  source 1..50: mol_type = other DNA
tttctaattttaaaattaaaaacaaactaataaatcccaaaataaccaac

SEQ ID NO: 2200 - DNA, 50 bp, synthetic construct
  source 1..50: mol_type = other DNA
tactaccatttcctaaattactttaaaaatcraataatataaccraacrc

SEQ ID NO: 2201 - DNA, 50 bp, synthetic construct
  source 1..50: mol_type = other DNA
ttccraaaaaacataaaattactaccatttcctaaattactttaaaaatc

SEQ ID NO: 2202 - DNA, 50 bp, synthetic construct
  source 1..50: mol_type = other DNA
atccratttctaaaataactcaaaaaataataacaatcctataccttttc

SEQ ID NO: 2203 - DNA, 50 bp, synthetic construct
  source 1..50: mol_type = other DNA
attatttccctactaccacctactaaattattcrtcttcctttaaacacc

SEQ ID NO: 2204 - DNA, 50 bp, synthetic construct
  source 1..50: mol_type = other DNA
tataaaaatctaaaataattatttccctactaccacctactaaattattc

SEQ ID NO: 2205 - DNA, 50 bp, synthetic construct
  source 1..50: mol_type = other DNA
ataaaataactccattaaaacaaattttataaccraacrcrataactcac

SEQ ID NO: 2206 - DNA, 50 bp, synthetic construct
  source 1..50: mol_type = other DNA
ctcataacccataaaataactccattaaaacaaattttataaccraacrc

SEQ ID NO: 2207 - DNA, 50 bp, synthetic construct
  source 1..50: mol_type = other DNA
aactcataacccataaaataactccattaaaacaaattttataaccraac

SEQ ID NO: 2208 - DNA, 50 bp, synthetic construct
  source 1..50: mol_type = other DNA
ctcaaactcataacccataaaataactccattaaaacaaattttataacc

SEQ ID NO: 2209 - DNA, 50 bp, synthetic construct
  source 1..50: mol_type = other DNA
atttcataaaccataaatttaaaaaaatctatctaaccractcttacccc

SEQ ID NO: 2210 - DNA, 50 bp, synthetic construct
  source 1..50: mol_type = other DNA
aaaaactatatttaattcactcttatatctccaactcctccaataacttc

SEQ ID NO: 2211 - DNA, 50 bp, synthetic construct
  source 1..50: mol_type = other DNA
aaaaatacacaaaaaaatttctcccattataatcttcrtaataactactc

SEQ ID NO: 2212 - DNA, 50 bp, synthetic construct
  source 1..50: mol_type = other DNA
ctccaaaaaacataaaaatacacaaaaaaatttctcccattataatcttc

SEQ ID NO: 2213 - DNA, 50 bp, synthetic construct
  source 1..50: mol_type = other DNA
ctttcctaaattaaaaatttcaaaaaacttaacraaccractcttatccc

SEQ ID NO: 2214 - DNA, 50 bp, synthetic construct
  source 1..50: mol_type = other DNA
aaatcactcracccaatcctaacaaaaaactaaacctaaaaaaacctacc

SEQ ID NO: 2215 - DNA, 50 bp, synthetic construct
  source 1..50: mol_type = other DNA
aacaaaaaactaaacctaaaaaaacctaccraaccaccrtaaaaactatc

SEQ ID NO: 2216 - DNA, 50 bp, synthetic construct
  source 1..50: mol_type = other DNA
cccrattaattttactccttttttctccccaataaataaactaatacccc

SEQ ID NO: 2217 - DNA, 50 bp, synthetic construct
  source 1..50: mol_type = other DNA
ttttactccttttttctccccaataaataaactaataccccraaaaaatc

SEQ ID NO: 2218 - DNA, 50 bp, synthetic construct
  source 1..50: mol_type = other DNA
actccttttttctccccaataaataaactaataccccraaaaaatcraac

SEQ ID NO: 2219 - DNA, 50 bp, synthetic construct
  source 1..50: mol_type = other DNA
caaaaataaccaatcaataaccrtccccctaaaaataacaataataaccc

SEQ ID NO: 2220 - DNA, 50 bp, synthetic construct
  source 1..50: mol_type = other DNA
aaaacratcattaactaatcattcctacttcctttctctattctaacrcc

SEQ ID NO: 2221 - DNA, 50 bp, synthetic construct
  source 1..50: mol_type = other DNA
aaactattacrataaatccraaaaacaaaactataactaaaaacaaaccc

SEQ ID NO: 2222 - DNA, 50 bp, synthetic construct
  source 1..50: mol_type = other DNA
aaaaaaaaatctcataaatacctatttcacccaatcrataatttatattc

SEQ ID NO: 2223 - DNA, 50 bp, synthetic construct
  source 1..50: mol_type = other DNA
aaatataatcactaaatataatacaaaataattaacraacacaaatcacc

SEQ ID NO: 2224 - DNA, 50 bp, synthetic construct
  source 1..50: mol_type = other DNA
caaatttcactaaacatcctatatattatctaacaatactatactccccc

SEQ ID NO: 2225 - DNA, 50 bp, synthetic construct
  source 1..50: mol_type = other DNA
aataacactcactaacaaaattcrtatacaaacccaatataccacctcrc

SEQ ID NO: 2226 - DNA, 50 bp, synthetic construct
  source 1..50: mol_type = other DNA
ctaataacactcactaacaaaattcrtatacaaacccaatataccacctc

SEQ ID NO: 2227 - DNA, 50 bp, synthetic construct
  source 1..50: mol_type = other DNA
tcraaaaataaatctccttaatactctaataacactcactaacaaaattc

SEQ ID NO: 2228 - DNA, 50 bp, synthetic construct
  source 1..50: mol_type = other DNA
acraattctaccaataaatactattaaaacatcaaaaaaattcattttcc

SEQ ID NO: 2229 - DNA, 50 bp, synthetic construct
  source 1..50: mol_type = other DNA
attctaccaataaatactattaaaacatcaaaaaaattcattttccraac

SEQ ID NO: 2230 - DNA, 50 bp, synthetic construct
  source 1..50: mol_type = other DNA
aacrtaaccraaccatttccaaaaaaacattaaaaaaacaactaataaac

SEQ ID NO: 2231 - DNA, 50 bp, synthetic construct
  source 1..50: mol_type = other DNA
aacrcctatcaattactcctttaatacctctttaaaaataacccraccac

SEQ ID NO: 2232 - DNA, 50 bp, synthetic construct
  source 1..50: mol_type = other DNA
cratcttcccaccrtctaaatcrccatataatctaataaataaaatcctc

SEQ ID NO: 2233 - DNA, 50 bp, synthetic construct
  source 1..50: mol_type = other DNA
craaaaccccatccatcaaattatataacratttaaacrataaaaaaacc

SEQ ID NO: 2234 - DNA, 50 bp, synthetic construct
  source 1..50: mol_type = other DNA
cactaataccrtacaaaaattacaaaataaaacrccaccccaaacattac

SEQ ID NO: 2235 - DNA, 50 bp, synthetic construct
  source 1..50: mol_type = other DNA
aaataaaacacaaaaatataaatccttttacrctatttcaaactaaaccc

SEQ ID NO: 2236 - DNA, 50 bp, synthetic construct
  source 1..50: mol_type = other DNA
ttctataacttctatacracatcaataacacraatttaacttaaaacaac

SEQ ID NO: 2237 - DNA, 50 bp, synthetic construct
  source 1..50: mol_type = other DNA
aaaacccaacttctatataataaacactaaaaacaaaaccrcattaaatc

SEQ ID NO: 2238 - DNA, 50 bp, synthetic construct
  source 1..50: mol_type = other DNA
rcraatataaaaaacccaacttctatataataaacactaaaaacaaaacc

SEQ ID NO: 2239 - DNA, 50 bp, synthetic construct
  source 1..50: mol_type = other DNA
acrattctactctcaatacccaccacacaaaaactaaattccttacattc

SEQ ID NO: 2240 - DNA, 50 bp, synthetic construct
  source 1..50: mol_type = other DNA
actaaattccttacattcrcraaaataaactacaacttcaaacttcraac

SEQ ID NO: 2241 - DNA, 50 bp, synthetic construct
  source 1..50: mol_type = other DNA
ctcccccttccaataaacaaactaaaaaacaaactaacttctttctaaac

SEQ ID NO: 2242 - DNA, 50 bp, synthetic construct
  source 1..50: mol_type = other DNA
ccaataaacaaactaaaaaacaaactaacttctttctaaacracaataac

SEQ ID NO: 2243 - DNA, 50 bp, synthetic construct
  source 1..50: mol_type = other DNA
aaacaaactaacttctttctaaacracaataacraaaaccaatcrtttac

SEQ ID NO: 2244 - DNA, 50 bp, synthetic construct
  source 1..50: mol_type = other DNA
attaaacaaaaaaccraaaccctctaaaaatacctctccccattaactac

SEQ ID NO: 2245 - DNA, 50 bp, synthetic construct
  source 1..50: mol_type = other DNA
aaaaacraaaccaaaaacraatatttaccccaaacacrcttacttattcc

SEQ ID NO: 2246 - DNA, 50 bp, synthetic construct
  source 1..50: mol_type = other DNA
aaaaacraaacaaataaacrtacctaaaataaatacccrcccttaactcc

SEQ ID NO: 2247 - DNA, 50 bp, synthetic construct
  source 1..50: mol_type = other DNA
caataaataaaaacratatctaaaccttcctaaaaaccrccccaaaaaac

SEQ ID NO: 2248 - DNA, 50 bp, synthetic construct
  source 1..50: mol_type = other DNA
ctaaaaatttacccractacraactatacttacaacaaaccaaaaatttc

SEQ ID NO: 2249 - DNA, 50 bp, synthetic construct
  source 1..50: mol_type = other DNA
taaaacraataaacraaactcctaacctattataaacacaatccrtaacc

SEQ ID NO: 2250 - DNA, 50 bp, synthetic construct
  source 1..50: mol_type = other DNA
ctaacctattataaacacaatccrtaaccraataaacccccaaaaaaatc

SEQ ID NO: 2251 - DNA, 50 bp, synthetic construct
  source 1..50: mol_type = other DNA
aaacttaacracttacttaatcractatctactctaaataaataaccatc

SEQ ID NO: 2252 - DNA, 50 bp, synthetic construct
  source 1..50: mol_type = other DNA
taacraaatataaaaacraataaattcrcaaatattttctcctaatcccc

SEQ ID NO: 2253 - DNA, 50 bp, synthetic construct
  source 1..50: mol_type = other DNA
aacctaaactaccttccactcaaatactcaaaaaaataaactactacaac

SEQ ID NO: 2254 - DNA, 50 bp, synthetic construct
  source 1..50: mol_type = other DNA
attccttcccattctcaaatcaacatttaaattaaaaacccctaaattac

SEQ ID NO: 2255 - DNA, 50 bp, synthetic construct
  source 1..50: mol_type = other DNA
cctaaccctttaatcccacaaaatcttaaaccttattactaaacaaaaac

SEQ ID NO: 2256 - DNA, 50 bp, synthetic construct
  source 1..50: mol_type = other DNA
tcctaaattctatccaacataatctaccaaaacaaaaaacaaaacaacac

SEQ ID NO: 2257 - DNA, 50 bp, synthetic construct
  source 1..50: mol_type = other DNA
tctaacttaatataatataatatcaacttcttacttcatctttactcccc

SEQ ID NO: 2258 - DNA, 50 bp, synthetic construct
  source 1..50: mol_type = other DNA
aattaactttatcttttcaaaactacaacctttatacaaaaaaatctacc

SEQ ID NO: 2259 - DNA, 50 bp, synthetic construct
  source 1..50: mol_type = other DNA
attacaatcctaaaaaaacaaaactaatctactaacaatatcatcatatc

SEQ ID NO: 2260 - DNA, 50 bp, synthetic construct
  source 1..50: mol_type = other DNA
ttaccatttaattacaaataaaaaaacaaactacctaaacaaaattcccc

SEQ ID NO: 2261 - DNA, 50 bp, synthetic construct
  source 1..50: mol_type = other DNA
aactacctaaacaaaattccccractaaactaataaaataactttaaaac

SEQ ID NO: 2262 - DNA, 50 bp, synthetic construct
  source 1..50: mol_type = other DNA
atttaaaaataattatatcatcttatcccacttcctttctcttccttatc

SEQ ID NO: 2263 - DNA, 50 bp, synthetic construct
  source 1..50: mol_type = other DNA
taaaacttaaacaactaattactaccatatctctctcaacctataataac

SEQ ID NO: 2264 - DNA, 50 bp, synthetic construct
  source 1..50: mol_type = other DNA
atcactctaaaaatcaaataaaaaaatcacatactaaacccaaaaatccc

SEQ ID NO: 2265 - DNA, 50 bp, synthetic construct
  source 1..50: mol_type = other DNA
aaattaaataatctaaaacaaattttctcacaatctcattcaatttccac

SEQ ID NO: 2266 - DNA, 50 bp, synthetic construct
  source 1..50: mol_type = other DNA
caactcctaacttccaaaaattacctattcccttctccttaaaaaatctc

SEQ ID NO: 2267 - DNA, 50 bp, synthetic construct
  source 1..50: mol_type = other DNA
acaactcacccractccttaaattactataaaatcrataaaatcctaacc

SEQ ID NO: 2268 - DNA, 50 bp, synthetic construct
  source 1..50: mol_type = other DNA
cctcccrtatactacaaaactcccttaataaatcaaaccrtaaaataaac

SEQ ID NO: 2269 - DNA, 50 bp, synthetic construct
  source 1..50: mol_type = other DNA
ctcccttaataaatcaaaccrtaaaataaacrctaaattcctaaaaaaac

SEQ ID NO: 2270 - DNA, 50 bp, synthetic construct
  source 1..50: mol_type = other DNA
cccttaataaatcaaaccrtaaaataaacrctaaattcctaaaaaaacrc

SEQ ID NO: 2271 - DNA, 50 bp, synthetic construct
  source 1..50: mol_type = other DNA
aaaacrttctttctaactacccttttcctacttatcttaaaaaacratac

SEQ ID NO: 2272 - DNA, 50 bp, synthetic construct
  source 1..50: mol_type = other DNA
ttcctacttatcttaaaaaacratacraaatttaaactccttaacatttc

SEQ ID NO: 2273 - DNA, 50 bp, synthetic construct
  source 1..50: mol_type = other DNA
aaaaacacrccatacaaataaacctctaatattacttttatatatttttc

SEQ ID NO: 2274 - DNA, 50 bp, synthetic construct
  source 1..50: mol_type = other DNA
cccaacactttaatacctaaaaccracaaattacttaaaactaacaattc

SEQ ID NO: 2275 - DNA, 50 bp, synthetic construct
  source 1..50: mol_type = other DNA
tactatattacccaaacttatctcraactattaacctcaaacaatctacc

SEQ ID NO: 2276 - DNA, 50 bp, synthetic construct
  source 1..50: mol_type = other DNA
aatcaacaatcttaaccraaaaatacacaaaaaacttactaaacraaatc

SEQ ID NO: 2277 - DNA, 50 bp, synthetic construct
  source 1..50: mol_type = other DNA
actctaaatcaacaatcttaaccraaaaatacacaaaaaacttactaaac

SEQ ID NO: 2278 - DNA, 50 bp, synthetic construct
  source 1..50: mol_type = other DNA
cccaaataatactaaaactaaaaaacctaccacccttcttcaaaaactcc

SEQ ID NO: 2279 - DNA, 50 bp, synthetic construct
  source 1..50: mol_type = other DNA
caaaaaaaaattataactatattttcaacaacttcttcacccatatacac

SEQ ID NO: 2280 - DNA, 50 bp, synthetic construct
  source 1..50: mol_type = other DNA
aaataatttctctttctcccttacctttattattacttatattaaaaaac

SEQ ID NO: 2281 - DNA, 50 bp, synthetic construct
  source 1..50: mol_type = other DNA
tcctttttctaaataattataacaaccrcratctacctaaatacacraac

SEQ ID NO: 2282 - DNA, 50 bp, synthetic construct
  source 1..50: mol_type = other DNA
tacaaatcccaaaaaattcttctcttaaaaaaaccrcaaaataaaaaaac

SEQ ID NO: 2283 - DNA, 50 bp, synthetic construct
  source 1..50: mol_type = other DNA
cctacccatcattatctaattattttatcatccattaattcttctcttcc

SEQ ID NO: 2284 - DNA, 50 bp, synthetic construct
  source 1..50: mol_type = other DNA
ttacttccaaaaaattacaaatacatttacatccccataattctacaatc

SEQ ID NO: 2285 - DNA, 50 bp, synthetic construct
  source 1..50: mol_type = other DNA
aatacaatattccctaaatataaaaaattcctataacatccaacaccccc

SEQ ID NO: 2286 - DNA, 50 bp, synthetic construct
  source 1..50: mol_type = other DNA
aataactaaaaaataacctaaacacaaaaaaactttaaactccctacctc

SEQ ID NO: 2287 - DNA, 50 bp, synthetic construct
  source 1..50: mol_type = other DNA
ctcctccttaaatcrtatattaaaacrctataatctaatccaaactccac

SEQ ID NO: 2288 - DNA, 50 bp, synthetic construct
  source 1..50: mol_type = other DNA
crtatattaaaacrctataatctaatccaaactccacraaaatacratac

SEQ ID NO: 2289 - DNA, 50 bp, synthetic construct
  source 1..50: mol_type = other DNA
caataatcctaaataacraccraaacaaaaaattaaaattacccaacatc

SEQ ID NO: 2290 - DNA, 50 bp, synthetic construct
  source 1..50: mol_type = other DNA
acaaccatattaataaaatcrtaactaaacatacaataatcctaaataac

SEQ ID NO: 2291 - DNA, 50 bp, synthetic construct
  source 1..50: mol_type = other DNA
rttaacrcaaacrctttcattttttctactaccrtaactaaaataaaaac

SEQ ID NO: 2292 - DNA, 50 bp, synthetic construct
  source 1..50: mol_type = other DNA
crccraaaacttactaaatccrcrtaattaaacctctataaaatacaaac

SEQ ID NO: 2293 - DNA, 50 bp, synthetic construct
  source 1..50: mol_type = other DNA
aaaatattacraaaacraaccaaaaaaccrtaaaatcccaacatatctac

SEQ ID NO: 2294 - DNA, 50 bp, synthetic construct
  source 1..50: mol_type = other DNA
craaataataattaccrcaaacatactaaaatcctacractccttaactc

SEQ ID NO: 2295 - DNA, 50 bp, synthetic construct
  source 1..50: mol_type = other DNA
aacacccaacataatactattattaactcrcataatacraaaaatattac

SEQ ID NO: 2296 - DNA, 50 bp, synthetic construct
  source 1..50: mol_type = other DNA
tacaccatctaaccraaaacttacttcaaatactaaaaatcaacrtaatc

SEQ ID NO: 2297 - DNA, 50 bp, synthetic construct
  source 1..50: mol_type = other DNA
cttcccccattttacacctaataccaaaaactttattacaaacacaaatc

SEQ ID NO: 2298 - DNA, 50 bp, synthetic construct
  source 1..50: mol_type = other DNA
ctataatcctaaaactattcattcataactaaccaaaaccatatacaacc

SEQ ID NO: 2299 - DNA, 50 bp, synthetic construct
  source 1..50: mol_type = other DNA
tctataaacaataatccctctatttcaacacctttttcrataacaataac

SEQ ID NO: 2300 - DNA, 50 bp, synthetic construct
  source 1..50: mol_type = other DNA
tcccaattaatctctataaacaataatccctctatttcaacacctttttc

SEQ ID NO: 2301 - DNA, 50 bp, synthetic construct
  source 1..50: mol_type = other DNA
ataaacaaaaaacttaattttttactccttttctctatacratacaatac

SEQ ID NO: 2302 - DNA, 50 bp, synthetic construct
  source 1..50: mol_type = other DNA
acaataaaaaataaaaattcatatcattttctttatacacacccctatac

SEQ ID NO: 2303 - DNA, 50 bp, synthetic construct
  source 1..50: mol_type = other DNA
ctaatttacraaatctcctccctcratccccaaatttcttttaaaataac

SEQ ID NO: 2304 - DNA, 50 bp, synthetic construct
  source 1..50: mol_type = other DNA
acttaatctaataatacatcctaaaccttaatacactacaactaatttac

SEQ ID NO: 2305 - DNA, 50 bp, synthetic construct
  source 1..50: mol_type = other DNA
acttaaaatatactattaaaccaaacaaaaattacataacacaaaaaatc

SEQ ID NO: 2306 - DNA, 50 bp, synthetic construct
  source 1..50: mol_type = other DNA
attacataacacaaaaaatcractcaacaatcactcattttcctcctccc

SEQ ID NO: 2307 - DNA, 50 bp, synthetic construct
  source 1..50: mol_type = other DNA
tctaaaatttataaaatcatcatactaaaataacctaaatttccctatac

SEQ ID NO: 2308 - DNA, 50 bp, synthetic construct
  source 1..50: mol_type = other DNA
aatcatcatactaaaataacctaaatttccctatacrtaaacctcataac

SEQ ID NO: 2309 - DNA, 50 bp, synthetic construct
  source 1..50: mol_type = other DNA
aaaaaaaaacctctatttttaaaaccaaaaatcttataaatccctcccac

SEQ ID NO: 2310 - DNA, 50 bp, synthetic construct
  source 1..50: mol_type = other DNA
tttaaaaaacaaacatcraaacratataaaatacccctctccaaaacacc

SEQ ID NO: 2311 - DNA, 50 bp, synthetic construct
  source 1..50: mol_type = other DNA
acatctaacacctcaaaataaaaatcractcttaatcaataccccacccc

SEQ ID NO: 2312 - DNA, 50 bp, synthetic construct
  source 1..50: mol_type = other DNA
tccaaaaacatctaacrctaaaacrctttcatacrctaaaaacaaccttc

SEQ ID NO: 2313 - DNA, 50 bp, synthetic construct
  source 1..50: mol_type = other DNA
taccaaacraaaaacacctaaaacraaaactattcccaacrcataaaaac

SEQ ID NO: 2314 - DNA, 50 bp, synthetic construct
  source 1..50: mol_type = other DNA
aaaaaaattctacccctaaaactaacrtctaacctccaaaaacatctaac

SEQ ID NO: 2315 - DNA, 50 bp, synthetic construct
  source 1..50: mol_type = other DNA
ttcccaacrcataaaaacrtttcaacrccaaatatctctaaaaatcaaac

SEQ ID NO: 2316 - DNA, 50 bp, synthetic construct
  source 1..50: mol_type = other DNA
tctaaaaatcaaacrccaaccctaaaaacaaaatttctcttaaaaacaac

SEQ ID NO: 2317 - DNA, 50 bp, synthetic construct
  source 1..50: mol_type = other DNA
aatcaaacrccaaccctaaaaacaaaatttctcttaaaaacaacrataac

SEQ ID NO: 2318 - DNA, 50 bp, synthetic construct
  source 1..50: mol_type = other DNA
aaattaattccaactaaatcraaaactactactacctaaaatacaaactc

SEQ ID NO: 2319 - DNA, 50 bp, synthetic construct
  source 1..50: mol_type = other DNA
aaaaactacactaacaacttataaaacaaaccaaaaaaattccacaccac

SEQ ID NO: 2320 - DNA, 50 bp, synthetic construct
  source 1..50: mol_type = other DNA
aacaaataaacaataatcaaaaaccaaacaacataaaatccaaaacctac

SEQ ID NO: 2321 - DNA, 50 bp, synthetic construct
  source 1..50: mol_type = other DNA
tctataaaccacaaccaaataaaaaaaccatctaccaaaaacaactaaac

SEQ ID NO: 2322 - DNA, 50 bp, synthetic construct
  source 1..50: mol_type = other DNA
aaccacaaccaaataaaaaaaccatctaccaaaaacaactaaacraaaac

SEQ ID NO: 2323 - DNA, 50 bp, synthetic construct
  source 1..50: mol_type = other DNA
aaactcatcctttctcacraacacaaattccttttaaaacaatatatccc

SEQ ID NO: 2324 - DNA, 50 bp, synthetic construct
  source 1..50: mol_type = other DNA
actcattctcttataacccaatataactacccaaaaaacrcctaaaaccc

SEQ ID NO: 2325 - DNA, 50 bp, synthetic construct
  source 1..50: mol_type = other DNA
tccattatatatcaaccacaaatcctactccctactctttatttttaaac

SEQ ID NO: 2326 - DNA, 50 bp, synthetic construct
  source 1..50: mol_type = other DNA
attatatatcaaccacaaatcctactccctactctttatttttaaacrac

SEQ ID NO: 2327 - DNA, 50 bp, synthetic construct
  source 1..50: mol_type = other DNA
ctataatatactataattacacccrtaaaaaaccactatactacaactcc

SEQ ID NO: 2328 - DNA, 50 bp, synthetic construct
  source 1..50: mol_type = other DNA
cracraatatcttactatattaccraaactacaatacaataactcttcac

SEQ ID NO: 2329 - DNA, 50 bp, synthetic construct
  source 1..50: mol_type = other DNA
taataattcattaacactaccaataccaacttaatcttaaacttctttcc

SEQ ID NO: 2330 - DNA, 50 bp, synthetic construct
  source 1..50: mol_type = other DNA
ctataaacaaatattaataccaaatacctaataataaaataactctcctc

SEQ ID NO: 2331 - DNA, 50 bp, synthetic construct
  source 1..50: mol_type = other DNA
tcccacctctctaaacacacrtatctaaaactaaaaccatctaaatacac

SEQ ID NO: 2332 - DNA, 50 bp, synthetic construct
  source 1..50: mol_type = other DNA
aaccaaacttaaatctaaaccaccaaccttcctaacacatacctatttcc

SEQ ID NO: 2333 - DNA, 50 bp, synthetic construct
  source 1..50: mol_type = other DNA
tacctacttaataatttttacttctatactcccaaacccaaaaaaaccac

SEQ ID NO: 2334 - DNA, 50 bp, synthetic construct
  source 1..50: mol_type = other DNA
actaatattaccrcttaacctcctaaaacttaaccaacaaatcctacacc

SEQ ID NO: 2335 - DNA, 50 bp, synthetic construct
  source 1..50: mol_type = other DNA
ccaaatcccaaatctcacctcaaaaaccacacaatctaactaatattacc

SEQ ID NO: 2336 - DNA, 50 bp, synthetic construct
  source 1..50: mol_type = other DNA
ttctaactaaataccacaaactaaaaaaacaaaactataaaacctaaaac

SEQ ID NO: 2337 - DNA, 50 bp, synthetic construct
  source 1..50: mol_type = other DNA
aacaaaactataaaacctaaaacrcttatctacttttccctctcctaaac

SEQ ID NO: 2338 - DNA, 50 bp, synthetic construct
  source 1..50: mol_type = other DNA
rtttacactatttactatccaaaaccaacccataattcaaaaatcaactc

SEQ ID NO: 2339 - DNA, 50 bp, synthetic construct
  source 1..50: mol_type = other DNA
aacccaaaaattcttaccacracacaaacaaaaataacttctaaatcacc

SEQ ID NO: 2340 - DNA, 50 bp, synthetic construct
  source 1..50: mol_type = other DNA
aatacccatctaaaacaaccrataattcaaaaatcatttctatctatatc

SEQ ID NO: 2341 - DNA, 50 bp, synthetic construct
  source 1..50: mol_type = other DNA
ttataaaacacctatctaataccaaatattacaccaaacactaaaaactc

SEQ ID NO: 2342 - DNA, 50 bp, synthetic construct
  source 1..50: mol_type = other DNA
aatacaattctttctacaacaacacaaatttaatcactcatccaatccac

SEQ ID NO: 2343 - DNA, 50 bp, synthetic construct
  source 1..50: mol_type = other DNA
tacttatcaatacctaaactcctaaactaaaaaaaacctacaaataaatc

SEQ ID NO: 2344 - DNA, 50 bp, synthetic construct
  source 1..50: mol_type = other DNA
atcaatacctaaactcctaaactaaaaaaaacctacaaataaatcraaac

SEQ ID NO: 2345 - DNA, 50 bp, synthetic construct
  source 1..50: mol_type = other DNA
ataccccttttaaaatcctaatttctcaaaaactaacaaccataactaac

SEQ ID NO: 2346 - DNA, 50 bp, synthetic construct
  source 1..50: mol_type = other DNA
tactctttaacaactatccaaacccaataaaaactaaatcccaacctaac

SEQ ID NO: 2347 - DNA, 50 bp, synthetic construct
  source 1..50: mol_type = other DNA
caaacccaataaaaactaaatcccaacctaacrcccatcttaacccaaac

SEQ ID NO: 2348 - DNA, 50 bp, synthetic construct
  source 1..50: mol_type = other DNA
atcctaaattttcttttataacccacccaaaaacatcaaaccttactaac

SEQ ID NO: 2349 - DNA, 50 bp, synthetic construct
  source 1..50: mol_type = other DNA
accaaacccttacttttctcrttctacttaacaatcaacattattactcc

SEQ ID NO: 2350 - DNA, 50 bp, synthetic construct
  source 1..50: mol_type = other DNA
aataaccctaaaaaaacttcraaacaacaatactaactaccaaacaaaac

SEQ ID NO: 2351 - DNA, 50 bp, synthetic construct
  source 1..50: mol_type = other DNA
acctcccaaataatatctcttaaataaaactccaccctaaacaaactcac

SEQ ID NO: 2352 - DNA, 50 bp, synthetic construct
  source 1..50: mol_type = other DNA
taaacttactcaaaataaaaccccacccaaaaaataccatttaaaaaacc

SEQ ID NO: 2353 - DNA, 50 bp, synthetic construct
  source 1..50: mol_type = other DNA
attactatatatcattccacaaattaatacaataaatatattataccttc

SEQ ID NO: 2354 - DNA, 50 bp, synthetic construct
  source 1..50: mol_type = other DNA
acttaaaacaatacaaataaaaactaaaaaccacctatcaacaaaatccc

SEQ ID NO: 2355 - DNA, 50 bp, synthetic construct
  source 1..50: mol_type = other DNA
aattactaactcttctcatctataatcacttaactcaactctcccatttc

SEQ ID NO: 2356 - DNA, 50 bp, synthetic construct
  source 1..50: mol_type = other DNA
ccctttcatttcataacctctaaaaaacaataatattaaaataacttaac

SEQ ID NO: 2357 - DNA, 50 bp, synthetic construct
  source 1..50: mol_type = other DNA
aaaaatataacccaacacccaacrtaataaaataattcaattcttaatac

SEQ ID NO: 2358 - DNA, 50 bp, synthetic construct
  source 1..50: mol_type = other DNA
aaatacrcaaaaaaaaccrcatcctaaaaatataaatatcraaactaccc

SEQ ID NO: 2359 - DNA, 50 bp, synthetic construct
  source 1..50: mol_type = other DNA
ctttctaacccttacatacctttaaaataaaaaacrtaaaatttaacacc

SEQ ID NO: 2360 - DNA, 50 bp, synthetic construct
  source 1..50: mol_type = other DNA
tactaataaaaacrctaaattccaaattaaaatataatacraaaccaacc

SEQ ID NO: 2361 - DNA, 50 bp, synthetic construct
  source 1..50: mol_type = other DNA
aataaaaaacrtaaaatttaacaccrtaatttctcttctcrattaacccc

SEQ ID NO: 2362 - DNA, 50 bp, synthetic construct
  source 1..50: mol_type = other DNA
aatttctcttctcrattaaccccrtatcacaccctaatttaaaatctaac

SEQ ID NO: 2363 - DNA, 50 bp, synthetic construct
  source 1..50: mol_type = other DNA
actccaatttaatttcaaaactaaaaattaaaacaaaaccttaataaacc

SEQ ID NO: 2364 - DNA, 50 bp, synthetic construct
  source 1..50: mol_type = other DNA
ctcttaatccaatctatatacctaaccattaataccaaaaaatatacatc

SEQ ID NO: 2365 - DNA, 50 bp, synthetic construct
  source 1..50: mol_type = other DNA
aaaacttacrtaaaacaatctaaatcaaacacaaataaaatttttaattc

SEQ ID NO: 2366 - DNA, 50 bp, synthetic construct
  source 1..50: mol_type = other DNA
acaaccctaaaatcaactttataacttataaatatattaatttttttccc

SEQ ID NO: 2367 - DNA, 50 bp, synthetic construct
  source 1..50: mol_type = other DNA
aaatattcatcaaatattaatactattataaatcaaacataattctaaac

SEQ ID NO: 2368 - DNA, 50 bp, synthetic construct
  source 1..50: mol_type = other DNA
acattacatcrtaattcttcttaaacatcccctctataactataatcctc

SEQ ID NO: 2369 - DNA, 50 bp, synthetic construct
  source 1..50: mol_type = other DNA
cataatctttctattaatcacttcctaacaaaacattcatatccttatac

SEQ ID NO: 2370 - DNA, 50 bp, synthetic construct
  source 1..50: mol_type = other DNA
ataaaaaacacraaacatcracccaaaaaaaacctaaaactcatcctaac

SEQ ID NO: 2371 - DNA, 50 bp, synthetic construct
  source 1..50: mol_type = other DNA
cttactctccaccractacrtcaaaataaactccaaattttctttaaacc

SEQ ID NO: 2372 - DNA, 50 bp, synthetic construct
  source 1..50: mol_type = other DNA
tccaaattttctttaaaccratacttcrtatcctccaccaacttataaac

SEQ ID NO: 2373 - DNA, 50 bp, synthetic construct
  source 1..50: mol_type = other DNA
aaaaaaaaaatattccttataaaaactaacttaccrtcrctttcctaacc

SEQ ID NO: 2374 - DNA, 50 bp, synthetic construct
  source 1..50: mol_type = other DNA
ctcaaaatccaaaaaaacacctacttaaaacaataaaaatattattaatc

SEQ ID NO: 2375 - DNA, 50 bp, synthetic construct
  source 1..50: mol_type = other DNA
aataaacaaataaacaaaaatctctaattttcctaaacaaaaaaccctac

SEQ ID NO: 2376 - DNA, 50 bp, synthetic construct
  source 1..50: mol_type = other DNA
aataaacaaaaatctctaattttcctaaacaaaaaaccctacraccttcc

SEQ ID NO: 2377 - DNA, 50 bp, synthetic construct
  source 1..50: mol_type = other DNA
aaaatactattaatctataaccttacccccaaccccatactctctaaaac

SEQ ID NO: 2378 - DNA, 50 bp, synthetic construct
  source 1..50: mol_type = other DNA
ccaaccctccaatatttaaatactactatattacttccaaaccrttcaac

SEQ ID NO: 2379 - DNA, 50 bp, synthetic construct
  source 1..50: mol_type = other DNA
taactaaaaccrcacctactaaaaattaaacaaccaattacaaacttccc

SEQ ID NO: 2380 - DNA, 50 bp, synthetic construct
  source 1..50: mol_type = other DNA
accaattaccraaaaattttctatcttctaacccttaaaaaaaaatctac

SEQ ID NO: 2381 - DNA, 50 bp, synthetic construct
  source 1..50: mol_type = other DNA
ttctatcttctaacccttaaaaaaaaatctacrctccaacaactaaaacc

SEQ ID NO: 2382 - DNA, 50 bp, synthetic construct
  source 1..50: mol_type = other DNA
ctttatacaaaaacaccaatttttacraacrataccactcataattcaac

SEQ ID NO: 2383 - DNA, 50 bp, synthetic construct
  source 1..50: mol_type = other DNA
ctccaacaactaaaaccraaacataaaaacrttaaatcataaataacacc

SEQ ID NO: 2384 - DNA, 50 bp, synthetic construct
  source 1..50: mol_type = other DNA
aacaactaaaaccraaacataaaaacrttaaatcataaataacaccrttc

SEQ ID NO: 2385 - DNA, 50 bp, synthetic construct
  source 1..50: mol_type = other DNA
attaatatctttatacaaaaacaataccacaacacaactcaataaccatc

SEQ ID NO: 2386 - DNA, 50 bp, synthetic construct
  source 1..50: mol_type = other DNA
ataccacaacacaactcaataaccatcraaaaaacaacctcataataaac

SEQ ID NO: 2387 - DNA, 50 bp, synthetic construct
  source 1..50: mol_type = other DNA
atcraaaaaacaacctcataataaacratactccatcaattttctcttac

SEQ ID NO: 2388 - DNA, 50 bp, synthetic construct
  source 1..50: mol_type = other DNA
ataataaacratactccatcaattttctcttacratcttttacataaatc

SEQ ID NO: 2389 - DNA, 50 bp, synthetic construct
  source 1..50: mol_type = other DNA
aacratactccatcaattttctcttacratcttttacataaatcratccc

SEQ ID NO: 2390 - DNA, 50 bp, synthetic construct
  source 1..50: mol_type = other DNA
taaccaaacctaaaaaaaatcaactcataaacaataacctcacacccctc

SEQ ID NO: 2391 - DNA, 50 bp, synthetic construct
  source 1..50: mol_type = other DNA
aaatctctttaacrtacaaacacattatctccacttaacaacaacaaatc

SEQ ID NO: 2392 - DNA, 50 bp, synthetic construct
  source 1..50: mol_type = other DNA
ctctaaatatatcacaatcccaaaccccatatactttaacttttaccatc

SEQ ID NO: 2393 - DNA, 50 bp, synthetic construct
  source 1..50: mol_type = other DNA
cataaaaactatataaaatccaatcaaaatacacccraacacatacctac

SEQ ID NO: 2394 - DNA, 50 bp, synthetic construct
  source 1..50: mol_type = other DNA
acccaatccaaaaacataaaaactatataaaatccaatcaaaatacaccc

SEQ ID NO: 2395 - DNA, 50 bp, synthetic construct
  source 1..50: mol_type = other DNA
cctcatatccctaaattaaacaaaaaacctaataactttaaaacctaaac

SEQ ID NO: 2396 - DNA, 50 bp, synthetic construct
  source 1..50: mol_type = other DNA
aaacaacraaaatcaactaaaattaacaaacaacaaaacacaaaatcccc

SEQ ID NO: 2397 - DNA, 50 bp, synthetic construct
  source 1..50: mol_type = other DNA
ttacacaactaatatctaataaaaactaataattactaaaaaccctaaac

SEQ ID NO: 2398 - DNA, 50 bp, synthetic construct
  source 1..50: mol_type = other DNA
taattaccaacccccatcaaataccaactatataacattaaaccaaatac

SEQ ID NO: 2399 - DNA, 50 bp, synthetic construct
  source 1..50: mol_type = other DNA
attaccaacccccatcaaataccaactatataacattaaaccaaatacrc

SEQ ID NO: 2400 - DNA, 50 bp, synthetic construct
  source 1..50: mol_type = other DNA
actcaaaaattcctcaacaatcctcttaccattactactatcaaaaaacc

SEQ ID NO: 2401 - DNA, 50 bp, synthetic construct
  source 1..50: mol_type = other DNA
caaatttactcacactattcccaaaacatcctcctttccaaaaaaataac

SEQ ID NO: 2402 - DNA, 50 bp, synthetic construct
  source 1..50: mol_type = other DNA
ccaaaacatcctcctttccaaaaaaataacracaaaatccaaactccccc

SEQ ID NO: 2403 - DNA, 50 bp, synthetic construct
  source 1..50: mol_type = other DNA
atcctactctaaaaaaattcctaacttaaaccataaataaaaccaaaaac

SEQ ID NO: 2404 - DNA, 50 bp, synthetic construct
  source 1..50: mol_type = other DNA
taccccacattctctacaaaaataaaatcccacatccctaaataaataac

SEQ ID NO: 2405 - DNA, 50 bp, synthetic construct
  source 1..50: mol_type = other DNA
acaaaaacactacttccttaatctaaccaaaaccccaaacaacaataacc

SEQ ID NO: 2406 - DNA, 50 bp, synthetic construct
  source 1..50: mol_type = other DNA
ctaaaaaataaacccacacctaaaaaaacctatccacattctaacccctc

SEQ ID NO: 2407 - DNA, 50 bp, synthetic construct
  source 1..50: mol_type = other DNA
cctaataaacacctaaaacaaaaattctctaacctaaaactaaataatac

SEQ ID NO: 2408 - DNA, 50 bp, synthetic construct
  source 1..50: mol_type = other DNA
ctaaacttacraaatctaacaaaacctcaaaaacctcaacacctaaacac

SEQ ID NO: 2409 - DNA, 50 bp, synthetic construct
  source 1..50: mol_type = other DNA
ctaaacratcaaaactactaaaaataaaattctatatccccraaaaatac

SEQ ID NO: 2410 - DNA, 50 bp, synthetic construct
  source 1..50: mol_type = other DNA
rctctaaaaataacraaaaatcaatactacctttatactcrataatttcc

SEQ ID NO: 2411 - DNA, 50 bp, synthetic construct
  source 1..50: mol_type = other DNA
tccraaaaccrctctaaaaataacraaaaatcaatactacctttatactc

SEQ ID NO: 2412 - DNA, 50 bp, synthetic construct
  source 1..50: mol_type = other DNA
aactcraatcccaaaacaaaaaatcraaacacratactcttaataactcc

SEQ ID NO: 2413 - DNA, 50 bp, synthetic construct
  source 1..50: mol_type = other DNA
ctcccctctaactctaaaaatttcaaaacctaaaaccaaaacccaaaaac

SEQ ID NO: 2414 - DNA, 50 bp, synthetic construct
  source 1..50: mol_type = other DNA
ctaaaaacctaacttcaactaaaaaaaatcaaaaaaccraactaataacc

SEQ ID NO: 2415 - DNA, 50 bp, synthetic construct
  source 1..50: mol_type = other DNA
tataaaaccttcctataatttactcctacccaccttctctttccctaaac

SEQ ID NO: 2416 - DNA, 50 bp, synthetic construct
  source 1..50: mol_type = other DNA
ccaaaactcaaacaaaacctttcctctattcaaaacaacaaaatataatc

SEQ ID NO: 2417 - DNA, 50 bp, synthetic construct
  source 1..50: mol_type = other DNA
ccctaattaatacatttacaatccctaaactaaacacaaaaattctccac

SEQ ID NO: 2418 - DNA, 50 bp, synthetic construct
  source 1..50: mol_type = other DNA
ccrataaatttataatctcrttaacttcaaaaataaaactacaaaccttc

SEQ ID NO: 2419 - DNA, 50 bp, synthetic construct
  source 1..50: mol_type = other DNA
ccttcrtaataaatattataactcttaaaacaacacrtctaaaattattc

SEQ ID NO: 2420 - DNA, 50 bp, synthetic construct
  source 1..50: mol_type = other DNA
tctaataaattcataatcttactaactcaaaaataaaattacraaccttc

SEQ ID NO: 2421 - DNA, 50 bp, synthetic construct
  source 1..50: mol_type = other DNA
caactccaaacrtactaccttaaaaactataacactcaccacraaaatcc

SEQ ID NO: 2422 - DNA, 50 bp, synthetic construct
  source 1..50: mol_type = other DNA
atccrtaacttctttcttaaaatcaataaaaccaaaaacccatcaattcc

SEQ ID NO: 2423 - DNA, 50 bp, synthetic construct
  source 1..50: mol_type = other DNA
ttacctttatactacctctatatccttactttcacrccactatacttcac

SEQ ID NO: 2424 - DNA, 50 bp, synthetic construct
  source 1..50: mol_type = other DNA
taaaatcaaatactatctttattctaaacccaacttttaaatattaatcc

SEQ ID NO: 2425 - DNA, 50 bp, synthetic construct
  source 1..50: mol_type = other DNA
taaaccttttaatcttataacattcctcttctttttaaaaaaacaacaac

SEQ ID NO: 2426 - DNA, 50 bp, synthetic construct
  source 1..50: mol_type = other DNA
aaaaaaaaactacaaacacctaataaaaaacrccaaccaaccataccrac

SEQ ID NO: 2427 - DNA, 50 bp, synthetic construct
  source 1..50: mol_type = other DNA
tttacaaaaaatataaacrataatcctcatcattcccaaaaaaacaaaac

SEQ ID NO: 2428 - DNA, 50 bp, synthetic construct
  source 1..50: mol_type = other DNA
cracttacctcacaaatcctttcrcacaaaactttacaaaaaatataaac

SEQ ID NO: 2429 - DNA, 50 bp, synthetic construct
  source 1..50: mol_type = other DNA
caaaacacacaaattaactacaacttacracttacctcacaaatcctttc

SEQ ID NO: 2430 - DNA, 50 bp, synthetic construct
  source 1..50: mol_type = other DNA
ataaaacatacaaaaaaacatacaaaacacacaaattaactacaacttac

SEQ ID NO: 2431 - DNA, 50 bp, synthetic construct
  source 1..50: mol_type = other DNA
accaatctatatattttacatatctttctatatactccacaacaaacttc

SEQ ID NO: 2432 - DNA, 50 bp, synthetic construct
  source 1..50: mol_type = other DNA
ttctatatactccacaacaaacttcrctacaaacctccatcttattttac

SEQ ID NO: 2433 - DNA, 50 bp, synthetic construct
  source 1..50: mol_type = other DNA
tctaaaccataccraactaaacraaactatacaataaaattacaaaccac

SEQ ID NO: 2434 - DNA, 50 bp, synthetic construct
  source 1..50: mol_type = other DNA
cctaacttaaaaaataaatcctttctaatttaatatctatataccctttc

SEQ ID NO: 2435 - DNA, 50 bp, synthetic construct
  source 1..50: mol_type = other DNA
aaaataaatcctttctaatttaatatctatataccctttcrctatttatc

SEQ ID NO: 2436 - DNA, 50 bp, synthetic construct
  source 1..50: mol_type = other DNA
aaacaacataaacaacaaaaacctaaaaatacaatcctaaaattcaaacc

SEQ ID NO: 2437 - DNA, 50 bp, synthetic construct
  source 1..50: mol_type = other DNA
tctaaaattaactaattaaaatataaataacaatcraaaactctattacc

SEQ ID NO: 2438 - DNA, 50 bp, synthetic construct
  source 1..50: mol_type = other DNA
rctattaaatctatcttctaattccraccttttctttccraaaacctccc

SEQ ID NO: 2439 - DNA, 50 bp, synthetic construct
  source 1..50: mol_type = other DNA
aataacctcaaaaacatcrataacaataaaataattacaatacctattac

SEQ ID NO: 2440 - DNA, 50 bp, synthetic construct
  source 1..50: mol_type = other DNA
attactaaattcraaactcaaaaaatatacrcctaatattcccaccatac

SEQ ID NO: 2441 - DNA, 50 bp, synthetic construct
  source 1..50: mol_type = other DNA
ratttcaaaatcccaataaaattactaaattcraaactcaaaaaatatac

SEQ ID NO: 2442 - DNA, 50 bp, synthetic construct
  source 1..50: mol_type = other DNA
aatactccaacccaatccratttcaaaatcccaataaaattactaaattc

SEQ ID NO: 2443 - DNA, 50 bp, synthetic construct
  source 1..50: mol_type = other DNA
acaacccaacatctaccctcacrtaaaatataactaaaataaatactacc

SEQ ID NO: 2444 - DNA, 50 bp, synthetic construct
  source 1..50: mol_type = other DNA
aaaaacaaacaaacaaaaaaacrataatacttactctaaccacaccctac

SEQ ID NO: 2445 - DNA, 50 bp, synthetic construct
  source 1..50: mol_type = other DNA
actaaactattaccataataatacaaaatattttataaaacacttaaccc

SEQ ID NO: 2446 - DNA, 50 bp, synthetic construct
  source 1..50: mol_type = other DNA
ccttcctctaaataaaaaaaacratacaataaattcccttttactcttcc

SEQ ID NO: 2447 - DNA, 50 bp, synthetic construct
  source 1..50: mol_type = other DNA
aaaacttccaactaaattctaataaaatcaattctattttcctataaaac

SEQ ID NO: 2448 - DNA, 50 bp, synthetic construct
  source 1..50: mol_type = other DNA
ttaacacaactaaaactaataaaaaaatttttataactttcttccatccc

SEQ ID NO: 2449 - DNA, 50 bp, synthetic construct
  source 1..50: mol_type = other DNA
acattatcctaaacttttcaacaaaaaatatttaaacaactataaacaac

SEQ ID NO: 2450 - DNA, 50 bp, synthetic construct
  source 1..50: mol_type = other DNA
attaccttactataataaaccaatttttttttcttatctctattacaaac

SEQ ID NO: 2451 - DNA, 50 bp, synthetic construct
  source 1..50: mol_type = other DNA
ctttacacattaacaactaattctaccacaataacaattcctaatcctac

SEQ ID NO: 2452 - DNA, 50 bp, synthetic construct
  source 1..50: mol_type = other DNA
aataaaatacatctaactaacaaaaccttaaccacaacaaattcctaacc

SEQ ID NO: 2453 - DNA, 50 bp, synthetic construct
  source 1..50: mol_type = other DNA
ctaaaatcacttctttaactaatcaactcccctccttcattaatactccc

SEQ ID NO: 2454 - DNA, 50 bp, synthetic construct
  source 1..50: mol_type = other DNA
ctcccrtaataaattcctctttataaacttactaatataatacttcaacc

SEQ ID NO: 2455 - DNA, 50 bp, synthetic construct
  source 1..50: mol_type = other DNA
tctctctctaattaataacataaaccctacaaaaaaaaccacaccttacc

SEQ ID NO: 2456 - DNA, 50 bp, synthetic construct
  source 1..50: mol_type = other DNA
aaaaatttctaaatacaatttaaaaacatctaacacacttaaaacactac

SEQ ID NO: 2457 - DNA, 50 bp, synthetic construct
  source 1..50: mol_type = other DNA
aaaatacrataaaacrttaaatcctacctcttatcatctaactaataaac

SEQ ID NO: 2458 - DNA, 50 bp, synthetic construct
  source 1..50: mol_type = other DNA
ctaaactaatataccrtttaccaatcaaataacaaaaaacaaaacccaac

SEQ ID NO: 2459 - DNA, 50 bp, synthetic construct
  source 1..50: mol_type = other DNA
atataccrtttaccaatcaaataacaaaaaacaaaacccaacrttttacc

SEQ ID NO: 2460 - DNA, 50 bp, synthetic construct
  source 1..50: mol_type = other DNA
ttatacccaaatataataatctaacatatttcctttcctttcttataaac

SEQ ID NO: 2461 - DNA, 50 bp, synthetic construct
  source 1..50: mol_type = other DNA
taattccttccaattaaaccaaaattcactaaaattctattaaataccac

SEQ ID NO: 2462 - DNA, 50 bp, synthetic construct
  source 1..50: mol_type = other DNA
cctatccaataataattttaaataatattaaccaaaacttatctattctc

SEQ ID NO: 2463 - DNA, 50 bp, synthetic construct
  source 1..50: mol_type = other DNA
actttaactaatatcacctaaaatcactactaaataaaaaacaaataaac

SEQ ID NO: 2464 - DNA, 50 bp, synthetic construct
  source 1..50: mol_type = other DNA
aatatctaactcctttcctaaattatttaaaaactaaaataaaatcccac

SEQ ID NO: 2465 - DNA, 50 bp, synthetic construct
  source 1..50: mol_type = other DNA
ataaatctacctcacactatataaatacttaaatctaaaatcactcaatc

SEQ ID NO: 2466 - DNA, 50 bp, synthetic construct
  source 1..50: mol_type = other DNA
ttaaatctaaaatcactcaatcrcatacctctcttacccacaaccattac

SEQ ID NO: 2467 - DNA, 50 bp, synthetic construct
  source 1..50: mol_type = other DNA
ctaaatacaaccaataattacccaactaaatcaaccctacctaaccctcc

SEQ ID NO: 2468 - DNA, 50 bp, synthetic construct
  source 1..50: mol_type = other DNA
aatacaaaaaacccacatctatccaaaaataaaacttacaaaataactac

SEQ ID NO: 2469 - DNA, 50 bp, synthetic construct
  source 1..50: mol_type = other DNA
ccttaaaactaaaactaaaaaactacaatatcctctctatccccaataac

SEQ ID NO: 2470 - DNA, 50 bp, synthetic construct
  source 1..50: mol_type = other DNA
aattacccaaaactaaactaaaaaccttataactcaaaactcaaaaaaac

SEQ ID NO: 2471 - DNA, 50 bp, synthetic construct
  source 1..50: mol_type = other DNA
ttccttttacrtataaaatatacactcctatatactctatctactattcc

SEQ ID NO: 2472 - DNA, 50 bp, synthetic construct
  source 1..50: mol_type = other DNA
atatcattctaactaaacctatttaacaaaacacatatttttccttttac

SEQ ID NO: 2473 - DNA, 50 bp, synthetic construct
  source 1..50: mol_type = other DNA
ctactcctaaaaaatctcaaatatttactttaaacctatacccaaatccc

SEQ ID NO: 2474 - DNA, 50 bp, synthetic construct
  source 1..50: mol_type = other DNA
acccaaatcccractacaatttcaaaaaaaacacttctacaaaataaatc

SEQ ID NO: 2475 - DNA, 50 bp, synthetic construct
  source 1..50: mol_type = other DNA
aaaaaaaatttcttccaaattctttcttcctattaaattacatctaaaac

SEQ ID NO: 2476 - DNA, 50 bp, synthetic construct
  source 1..50: mol_type = other DNA
aaacacaacccacttaatatacccttaaacacaatccaatcttttaaaac

SEQ ID NO: 2477 - DNA, 50 bp, synthetic construct
  source 1..50: mol_type = other DNA
ctccaccctaacctcactaaaataactacttaaaaaactaaccaacacac

SEQ ID NO: 2478 - DNA, 50 bp, synthetic construct
  source 1..50: mol_type = other DNA
ttttaaatcttaccctactttctaaataatactcttcctaacttttctcc

SEQ ID NO: 2479 - DNA, 50 bp, synthetic construct
  source 1..50: mol_type = other DNA
aaaacaataattaaatctacaaaaccttaacraaaccrcttttcrttatc

SEQ ID NO: 2480 - DNA, 50 bp, synthetic construct
  source 1..50: mol_type = other DNA
ccrataaaaacaataattaaatctacaaaaccttaacraaaccrcttttc

SEQ ID NO: 2481 - DNA, 50 bp, synthetic construct
  source 1..50: mol_type = other DNA
taaactaccrataaaaacaataattaaatctacaaaaccttaacraaacc

SEQ ID NO: 2482 - DNA, 50 bp, synthetic construct
  source 1..50: mol_type = other DNA
ctcractaaactaccrataaaaacaataattaaatctacaaaaccttaac

SEQ ID NO: 2483 - DNA, 50 bp, synthetic construct
  source 1..50: mol_type = other DNA
cacctaatctaactaccaatctacaaaaaaaatttctcractaaactacc

SEQ ID NO: 2484 - DNA, 50 bp, synthetic construct
  source 1..50: mol_type = other DNA
aaaaataaatcacacctaatctaactaccaatctacaaaaaaaatttctc

SEQ ID NO: 2485 - DNA, 50 bp, synthetic construct
  source 1..50: mol_type = other DNA
aaattttccccraacaacaaatccraacctaaaaactacccaaaaaaaac

SEQ ID NO: 2486 - DNA, 50 bp, synthetic construct
  source 1..50: mol_type = other DNA
aaaaaacaaactcaaaataaaaataccctaaaatattcraaaacaaaacc

SEQ ID NO: 2487 - DNA, 50 bp, synthetic construct
  source 1..50: mol_type = other DNA
tacccttcctctcraatttaattttaaaaaatatacaaatcaaaaaaccc

SEQ ID NO: 2488 - DNA, 50 bp, synthetic construct
  source 1..50: mol_type = other DNA
cttcctctcraatttaattttaaaaaatatacaaatcaaaaaacccracc

SEQ ID NO: 2489 - DNA, 50 bp, synthetic construct
  source 1..50: mol_type = other DNA
tttaaaaaatatacaaatcaaaaaacccraccrtcctacraataaaacac

SEQ ID NO: 2490 - DNA, 50 bp, synthetic construct
  source 1..50: mol_type = other DNA
acaaaatcatccaacaaataattcctaaacccrtaaataaccrcaaaacc

SEQ ID NO: 2491 - DNA, 50 bp, synthetic construct
  source 1..50: mol_type = other DNA
cactccctacaaaatcatccaacaaataattcctaaacccrtaaataacc

SEQ ID NO: 2492 - DNA, 50 bp, synthetic construct
  source 1..50: mol_type = other DNA
aaaattacttactaaataaccctacaaaaaataacacrtaaaatcctatc

SEQ ID NO: 2493 - DNA, 50 bp, synthetic construct
  source 1..50: mol_type = other DNA
acctcaaaaacactatcaaattaaccctaaaaaatccrtctaaaaatctc

SEQ ID NO: 2494 - DNA, 50 bp, synthetic construct
  source 1..50: mol_type = other DNA
ataacrccacacaaaaaaataaatcccctattcaacaaaaaatttataac

SEQ ID NO: 2495 - DNA, 50 bp, synthetic construct
  source 1..50: mol_type = other DNA
aaaattctccccraataccaaacactaaaattcaaacaaactaacattcc

SEQ ID NO: 2496 - DNA, 50 bp, synthetic construct
  source 1..50: mol_type = other DNA
aacaaaccacaatccataataaacaaatcatatcttacaaaattctcccc

SEQ ID NO: 2497 - DNA, 50 bp, synthetic construct
  source 1..50: mol_type = other DNA
cccactatctaactttacaaacaactcaaatcactcaaaatccaatttac

SEQ ID NO: 2498 - DNA, 50 bp, synthetic construct
  source 1..50: mol_type = other DNA
aacattccaaaataaaaaccaacaccttaaaataaaccactacctcaacc

SEQ ID NO: 2499 - DNA, 50 bp, synthetic construct
  source 1..50: mol_type = other DNA
ttataaccatcctttccaacatacttctaaaaaacaacaatcaaaaactc

SEQ ID NO: 2500 - DNA, 50 bp, synthetic construct
  source 1..50: mol_type = other DNA
tttcctcacaacaaaatttttcaaaaaaattctataaaacccaatcatcc

SEQ ID NO: 2501 - DNA, 50 bp, synthetic construct
  source 1..50: mol_type = other DNA
aacctccctctaataaataaaaaccrcaattacaaactttctaaaaaacc

SEQ ID NO: 2502 - DNA, 50 bp, synthetic construct
  source 1..50: mol_type = other DNA
ctaaatactaaattacaaatatcaccatccaaacataaatcattattaac

SEQ ID NO: 2503 - DNA, 50 bp, synthetic construct
  source 1..50: mol_type = other DNA
taaaaaaacctctaactctaacctccaaaaaatccatcctaaaaacaaac

SEQ ID NO: 2504 - DNA, 50 bp, synthetic construct
  source 1..50: mol_type = other DNA
aaaataaccrcctaaaataacaacraaaattctttaaccttcccaatcac

SEQ ID NO: 2505 - DNA, 50 bp, synthetic construct
  source 1..50: mol_type = other DNA
aaaaataaaaccctaaaatcatccttaaaataaccrcctaaaataacaac

SEQ ID NO: 2506 - DNA, 50 bp, synthetic construct
  source 1..50: mol_type = other DNA
cctatctaacctaaatacccaaaataaactcatacataaaaaaaacccac

SEQ ID NO: 2507 - DNA, 50 bp, synthetic construct
  source 1..50: mol_type = other DNA
taactaactttccctatcaaaaattactaacccttaaaaaacaatttcrc

SEQ ID NO: 2508 - DNA, 50 bp, synthetic construct
  source 1..50: mol_type = other DNA
aataactaactttccctatcaaaaattactaacccttaaaaaacaatttc

SEQ ID NO: 2509 - DNA, 50 bp, synthetic construct
  source 1..50: mol_type = other DNA
aaaaaacacaaaacatcaaaaccaaaacattaaatattataacaaaaaac

SEQ ID NO: 2510 - DNA, 50 bp, synthetic construct
  source 1..50: mol_type = other DNA
aaactaactccttatacctcatttcccaactaaacccataaaactctctc

SEQ ID NO: 2511 - DNA, 50 bp, synthetic construct
  source 1..50: mol_type = other DNA
aacctataaaaacrctaaacaacaaaaaaacacactctacctacaacctc

SEQ ID NO: 2512 - DNA, 50 bp, synthetic construct
  source 1..50: mol_type = other DNA
caccctaatatctaaattactacttcctttatcttacaaaaaaacrtaac

SEQ ID NO: 2513 - DNA, 50 bp, synthetic construct
  source 1..50: mol_type = other DNA
aacracaaaacctaataaacaaaataaaacaatacctcacaaaaaccacc

SEQ ID NO: 2514 - DNA, 50 bp, synthetic construct
  source 1..50: mol_type = other DNA
aaaaaaacaatttattattataataacatttcctcctttcttaaacacac

SEQ ID NO: 2515 - DNA, 50 bp, synthetic construct
  source 1..50: mol_type = other DNA
accaaaattataaactaaaaataaactaccaactccaacctttactaaac

SEQ ID NO: 2516 - DNA, 50 bp, synthetic construct
  source 1..50: mol_type = other DNA
taaacatctacrtaatcttatacattataacaaacacatcacaatatccc

SEQ ID NO: 2517 - DNA, 50 bp, synthetic construct
  source 1..50: mol_type = other DNA
caaaccaaacaccaatattcacatataataaacactaaacctcatcatcc

SEQ ID NO: 2518 - DNA, 50 bp, synthetic construct
  source 1..50: mol_type = other DNA
aacratacaaaatatactttattaaacaactacttaaaaacaacatactc

SEQ ID NO: 2519 - DNA, 50 bp, synthetic construct
  source 1..50: mol_type = other DNA
aacraacatactaccttcaaacaactatttaacaaaacacatcttacacc

SEQ ID NO: 2520 - DNA, 50 bp, synthetic construct
  source 1..50: mol_type = other DNA
ctattaatctataaccttacccccaaccctatacttactaaaacatatac

SEQ ID NO: 2521 - DNA, 50 bp, synthetic construct
  source 1..50: mol_type = other DNA
aatccaacaacctcaacctcctaaaataccaaaattacaaacaaaatctc

SEQ ID NO: 2522 - DNA, 50 bp, synthetic construct
  source 1..50: mol_type = other DNA
taaaataaaatcaaaaacaaatccrtaataatttccataacataactaac

SEQ ID NO: 2523 - DNA, 50 bp, synthetic construct
  source 1..50: mol_type = other DNA
ttattatttaataaaatcacttccrttaattatactataaaaaccatcac

SEQ ID NO: 2524 - DNA, 50 bp, synthetic construct
  source 1..50: mol_type = other DNA
aaaacttctaaaaaataaatttcatcaaattctaaaaataaaaactccac

SEQ ID NO: 2525 - DNA, 50 bp, synthetic construct
  source 1..50: mol_type = other DNA
tttaataaaactcattttccaaaaattctttcaactctaccttattcaac

SEQ ID NO: 2526 - DNA, 50 bp, synthetic construct
  source 1..50: mol_type = other DNA
ttcaacrtatcatactccccatactaaataacatattaataaaaaacatc

SEQ ID NO: 2527 - DNA, 50 bp, synthetic construct
  source 1..50: mol_type = other DNA
tccccatactaaataacatattaataaaaaacatcrataacaataataac

SEQ ID NO: 2528 - DNA, 50 bp, synthetic construct
  source 1..50: mol_type = other DNA
cttttaaaaattacccaaaaaactacaaaatcaatatccattctataacc

SEQ ID NO: 2529 - DNA, 50 bp, synthetic construct
  source 1..50: mol_type = other DNA
aaaatttactaaataaaaactaatttcctacaaaaaccaactattatcac

SEQ ID NO: 2530 - DNA, 50 bp, synthetic construct
  source 1..50: mol_type = other DNA
actaatctttaaatatcatataatttcacatatcatatattttttcaacc

SEQ ID NO: 2531 - DNA, 50 bp, synthetic construct
  source 1..50: mol_type = other DNA
tcaaccataaactaaactaaacttaactcacatactcaaaactctaacac

SEQ ID NO: 2532 - DNA, 50 bp, synthetic construct
  source 1..50: mol_type = other DNA
tatatacacatatacatatttacacacacatacaataaaaacacattaac

SEQ ID NO: 2533 - DNA, 50 bp, synthetic construct
  source 1..50: mol_type = other DNA
attaaattttaccttctttaaactcatcattaatatctaaatatttcacc

SEQ ID NO: 2534 - DNA, 50 bp, synthetic construct
  source 1..50: mol_type = other DNA
tatcaaaacrtctacactcattccatacatctataattccatattctacc

SEQ ID NO: 2535 - DNA, 50 bp, synthetic construct
  source 1..50: mol_type = other DNA
atatttaaaaaaactatactaataactatcatattaactttaaccttccc

SEQ ID NO: 2536 - DNA, 50 bp, synthetic construct
  source 1..50: mol_type = other DNA
ctaataacatctaaattcaaaacaaaaaccccaaaccctaaaaatcacac

SEQ ID NO: 2537 - DNA, 50 bp, synthetic construct
  source 1..50: mol_type = other DNA
ctatataccaaacttttcaccaatatctaaaaatataactatatctatcc

SEQ ID NO: 2538 - DNA, 50 bp, synthetic construct
  source 1..50: mol_type = other DNA
aaacatttcatcattaacctaaaaacttcaaacatatataaaactactcc

SEQ ID NO: 2539 - DNA, 50 bp, synthetic construct
  source 1..50: mol_type = other DNA
aacataactaaacaaactcaaaaaaatcctaatacctcaaaacaaaaaac

SEQ ID NO: 2540 - DNA, 50 bp, synthetic construct
  source 1..50: mol_type = other DNA
accccttaaaaaaacctttaacraaaacracrctctattaaaaaaacatc

SEQ ID NO: 2541 - DNA, 50 bp, synthetic construct
  source 1..50: mol_type = other DNA
tttcttccaaatttatcrtaaaaaactccrcratatcctctcaacaaaac

SEQ ID NO: 2542 - DNA, 50 bp, synthetic construct
  source 1..50: mol_type = other DNA
ttctaaacccaacaaacaccatacaaaaaatattattctcctatttcctc

SEQ ID NO: 2543 - DNA, 50 bp, synthetic construct
  source 1..50: mol_type = other DNA
tcctcacaataatctaaaaatataaacattcacttccccactttttatac

SEQ ID NO: 2544 - DNA, 50 bp, synthetic construct
  source 1..50: mol_type = other DNA
caaaaaaccraactacaattttctaaaaacctaaatatatccaaaaaccc

SEQ ID NO: 2545 - DNA, 50 bp, synthetic construct
  source 1..50: mol_type = other DNA
tcatttaaccrcaaaatcaaacatcctaaataaatcaataaaacatttcc

SEQ ID NO: 2546 - DNA, 50 bp, synthetic construct
  source 1..50: mol_type = other DNA
acaaaacaaaactaccctccaaaacctccctaacaaaaaatcatttaacc

SEQ ID NO: 2547 - DNA, 50 bp, synthetic construct
  source 1..50: mol_type = other DNA
aaacctcaacttcctactccaaattaaaccctcaccctcaaattaactac

SEQ ID NO: 2548 - DNA, 50 bp, synthetic construct
  source 1..50: mol_type = other DNA
caaaaaaacctaaaaaaccataaacaaaaaactctaaaccttccaaaatc

SEQ ID NO: 2549 - DNA, 50 bp, synthetic construct
  source 1..50: mol_type = other DNA
acatcaaaaaatcacctctcaaatattcttacaaacccaattaaaaaatc

SEQ ID NO: 2550 - DNA, 50 bp, synthetic construct
  source 1..50: mol_type = other DNA
tactaaactaaatatatactacctatacactataaaccacracaaccaac

SEQ ID NO: 2551 - DNA, 50 bp, synthetic construct
  source 1..50: mol_type = other DNA
ataattctaatactaaactaaatatatactacctatacactataaaccac

SEQ ID NO: 2552 - DNA, 50 bp, synthetic construct
  source 1..50: mol_type = other DNA
ataaaatcataatacatattaccctataactaactattttcatttaatac

SEQ ID NO: 2553 - DNA, 50 bp, synthetic construct
  source 1..50: mol_type = other DNA
aattttcaatataacattaactttctaaaatccaaataataattatacac

SEQ ID NO: 2554 - DNA, 50 bp, synthetic construct
  source 1..50: mol_type = other DNA
aaatactctcaaaactcacctaaatatctaaaaaacctaaaccccaaaac

SEQ ID NO: 2555 - DNA, 50 bp, synthetic construct
  source 1..50: mol_type = other DNA
taaaattctccctctctactataaactccaaaacaataaaaataataccc

SEQ ID NO: 2556 - DNA, 50 bp, synthetic construct
  source 1..50: mol_type = other DNA
caaaaaacacttaccraaatcacaaacaacacaaaatccttcaacacctc

SEQ ID NO: 2557 - DNA, 50 bp, synthetic construct
  source 1..50: mol_type = other DNA
taaccctatactctctcacctcttccctatttttatactaatctatctcc

SEQ ID NO: 2558 - DNA, 50 bp, synthetic construct
  source 1..50: mol_type = other DNA
cattactcacctctctccttcctattctctctcraacaaatcaaaacatc

SEQ ID NO: 2559 - DNA, 50 bp, synthetic construct
  source 1..50: mol_type = other DNA
aaccctcttaaccctttcttaatctcatctcccttccttaaataacaaac

SEQ ID NO: 2560 - DNA, 50 bp, synthetic construct
  source 1..50: mol_type = other DNA
aaacttataaaatcattcacataaacaataaaaaaacctctcccatatac

SEQ ID NO: 2561 - DNA, 50 bp, synthetic construct
  source 1..50: mol_type = other DNA
caatcaaaaactcacacataccatcttctccttaaaactcttattatacc

SEQ ID NO: 2562 - DNA, 50 bp, synthetic construct
  source 1..50: mol_type = other DNA
accratcttataaattaacaaaaactcaatatctaccaaatctacctccc

SEQ ID NO: 2563 - DNA, 50 bp, synthetic construct
  source 1..50: mol_type = other DNA
cccrtaacaatcaatctaaaacaacaaactcaaatcaaaaaaatcacacc

SEQ ID NO: 2564 - DNA, 50 bp, synthetic construct
  source 1..50: mol_type = other DNA
tatactctactactaacttcatctaaaaaaaatctacctcttcccaaccc

SEQ ID NO: 2565 - DNA, 50 bp, synthetic construct
  source 1..50: mol_type = other DNA
caaaaaaaccctaactaataataaatttctacaataaaacttcaacactc

SEQ ID NO: 2566 - DNA, 50 bp, synthetic construct
  source 1..50: mol_type = other DNA
aaacacacrtacaaacctacaaaaaataataaaacacactaaaactaacc

SEQ ID NO: 2567 - DNA, 50 bp, synthetic construct
  source 1..50: mol_type = other DNA
ctaacaatctaacattcctaaaaaaatcacaaatacctaacactaaaaac

SEQ ID NO: 2568 - DNA, 50 bp, synthetic construct
  source 1..50: mol_type = other DNA
taacattcctaaaaaaatcacaaatacctaacactaaaaacrccctaaac

SEQ ID NO: 2569 - DNA, 50 bp, synthetic construct
  source 1..50: mol_type = other DNA
rtataaacaaaacccccaaacaacaataacacacttaaacataacatacc

SEQ ID NO: 2570 - DNA, 50 bp, synthetic construct
  source 1..50: mol_type = other DNA
aacaataaacaaaaccaaaaaacttccaaaaaattatatcctttatcttc

SEQ ID NO: 2571 - DNA, 50 bp, synthetic construct
  source 1..50: mol_type = other DNA
aaacataatctcttaaaaattctctaaccctacccactacctaaaaaaac

SEQ ID NO: 2572 - DNA, 50 bp, synthetic construct
  source 1..50: mol_type = other DNA
ttctctaaccctacccactacctaaaaaaacraaatacttatctaatatc

SEQ ID NO: 2573 - DNA, 50 bp, synthetic construct
  source 1..50: mol_type = other DNA
aaaacacaaactcctcctaataatcacraaatcttttaactacaaaaccc

SEQ ID NO: 2574 - DNA, 50 bp, synthetic construct
  source 1..50: mol_type = other DNA
ctctatcatttatataactttaaactaatctcttctccatattacacctc

SEQ ID NO: 2575 - DNA, 50 bp, synthetic construct
  source 1..50: mol_type = other DNA
actaatccaaaatcacacaaataacaaaattactcaaaataatacaatac

SEQ ID NO: 2576 - DNA, 50 bp, synthetic construct
  source 1..50: mol_type = other DNA
acccccaacctacctattacaaactcctactttaaaaacctaaaaactcc

SEQ ID NO: 2577 - DNA, 50 bp, synthetic construct
  source 1..50: mol_type = other DNA
aaaaacctaaaaactccrctctaaatacaaaattttaaaaactcccactc

SEQ ID NO: 2578 - DNA, 50 bp, synthetic construct
  source 1..50: mol_type = other DNA
tcaaaaaatttcctacaccaataaaaacrctatataactaaatctactac

SEQ ID NO: 2579 - DNA, 50 bp, synthetic construct
  source 1..50: mol_type = other DNA
tctaaaatacctaaaacttaactcaaaaaatttcctacaccaataaaaac

SEQ ID NO: 2580 - DNA, 50 bp, synthetic construct
  source 1..50: mol_type = other DNA
ccattaaaaaatttactcacratcaacctctaaaaataactcattaactc

SEQ ID NO: 2581 - DNA, 50 bp, synthetic construct
  source 1..50: mol_type = other DNA
aataaatcctctaacctaacraatcaataaatcattttcaaaaattaacc

SEQ ID NO: 2582 - DNA, 50 bp, synthetic construct
  source 1..50: mol_type = other DNA
ttatacaataaattttttttaatcaaatttacccttacrtcctaacttcc

SEQ ID NO: 2583 - DNA, 50 bp, synthetic construct
  source 1..50: mol_type = other DNA
ccccaaaaaaataacatactcctaaaaattcacctcctaatccttattcc

SEQ ID NO: 2584 - DNA, 50 bp, synthetic construct
  source 1..50: mol_type = other DNA
ctaatcctcatttaaaaaaataaatatccractaaaaacatcccctaccc

SEQ ID NO: 2585 - DNA, 50 bp, synthetic construct
  source 1..50: mol_type = other DNA
tactatcctattattatttccccatataaaaatctcattaccccaacatc

SEQ ID NO: 2586 - DNA, 50 bp, synthetic construct
  source 1..50: mol_type = other DNA
cracaaacaaaaaaaatcccacaaatttttcttctaaatacaacttcctc

SEQ ID NO: 2587 - DNA, 50 bp, synthetic construct
  source 1..50: mol_type = other DNA
rcccctaaaacccaaaaaaacaaataactcaccaaaattacacaactaac

SEQ ID NO: 2588 - DNA, 50 bp, synthetic construct
  source 1..50: mol_type = other DNA
rccaactatacaaccttaataaaccatttatctctctaaatctcaaaaac

SEQ ID NO: 2589 - DNA, 50 bp, synthetic construct
  source 1..50: mol_type = other DNA
tcaaaaaaaatcttaaccctaaccrccctatactacaaaactcttatccc

SEQ ID NO: 2590 - DNA, 50 bp, synthetic construct
  source 1..50: mol_type = other DNA
ctctaatctcaacrtttaaaaaaaaatcctaaaaactttaactctaaacc

SEQ ID NO: 2591 - DNA, 50 bp, synthetic construct
  source 1..50: mol_type = other DNA
aaaaaaaaacataaatcataaactcttctaaataaaaccaaaaccccrac

SEQ ID NO: 2592 - DNA, 50 bp, synthetic construct
  source 1..50: mol_type = other DNA
catatttccaaaacaacctaatctcratcctcaacttctatcctacctcc

SEQ ID NO: 2593 - DNA, 50 bp, synthetic construct
  source 1..50: mol_type = other DNA
aattaaacaaacaaataactacaaaaaatccttccaattctaacatcaac

SEQ ID NO: 2594 - DNA, 50 bp, synthetic construct
  source 1..50: mol_type = other DNA
cacatacaacccrcaaaaaaccctttaaaatatatttaaccacctttctc

SEQ ID NO: 2595 - DNA, 50 bp, synthetic construct
  source 1..50: mol_type = other DNA
ctatcaacccaccttataaaactttctcaaatttcttatctatctttccc

SEQ ID NO: 2596 - DNA, 50 bp, synthetic construct
  source 1..50: mol_type = other DNA
tcaactacttacaaaataaccttaaaaaaattacttaaacttatcaactc

SEQ ID NO: 2597 - DNA, 50 bp, synthetic construct
  source 1..50: mol_type = other DNA
ctacttacaaaataaccttaaaaaaattacttaaacttatcaactcraac

SEQ ID NO: 2598 - DNA, 50 bp, synthetic construct
  source 1..50: mol_type = other DNA
ttacaaaataaccttaaaaaaattacttaaacttatcaactcraacraac

SEQ ID NO: 2599 - DNA, 50 bp, synthetic construct
  source 1..50: mol_type = other DNA
ttcaaaaaaaaatcaaaaacactcctatattaaaacctctatttactctc

SEQ ID NO: 2600 - DNA, 50 bp, synthetic construct
  source 1..50: mol_type = other DNA
aaaaaaaatcaaaaacactcctatattaaaacctctatttactctcrcac

SEQ ID NO: 2601 - DNA, 50 bp, synthetic construct
  source 1..50: mol_type = other DNA
aattctcctaatcactcttactaataacatttccctcttacaaatacttc

SEQ ID NO: 2602 - DNA, 50 bp, synthetic construct
  source 1..50: mol_type = other DNA
aaataaaaaaaacttctaactttcaaaattacctaacttaatataaaaac

SEQ ID NO: 2603 - DNA, 50 bp, synthetic construct
  source 1..50: mol_type = other DNA
ctaactttcaaaattacctaacttaatataaaaacraaatctaaactaac

SEQ ID NO: 2604 - DNA, 50 bp, synthetic construct
  source 1..50: mol_type = other DNA
aaaaaaaaataacttaattaaacaacaaacctaataccttaaacctatcc

SEQ ID NO: 2605 - DNA, 50 bp, synthetic construct
  source 1..50: mol_type = other DNA
aaattcatatcccaaaacaaaaaactatcctataataaattccccaaccc

SEQ ID NO: 2606 - DNA, 50 bp, synthetic construct
  source 1..50: mol_type = other DNA
tttcaccatattaacraaactaatctcraacttctaacctaaaataatcc

SEQ ID NO: 2607 - DNA, 50 bp, synthetic construct
  source 1..50: mol_type = other DNA
cctaaaatctaaataaaacctcaataaaaactaaaacccctaaaactctc

SEQ ID NO: 2608 - DNA, 50 bp, synthetic construct
  source 1..50: mol_type = other DNA
ctccttcttccacaaacaaaaataaactcaacctctaccttaaaccaaac

SEQ ID NO: 2609 - DNA, 50 bp, synthetic construct
  source 1..50: mol_type = other DNA
aaaaaattaaatttatcccatatactaaattcaacaaaaacccaaaattc

SEQ ID NO: 2610 - DNA, 50 bp, synthetic construct
  source 1..50: mol_type = other DNA
aaaacctaaaacttcaccctcttataacacatataaacatataaaaccac

SEQ ID NO: 2611 - DNA, 50 bp, synthetic construct
  source 1..50: mol_type = other DNA
aataaaacctcaaatttccaaaccaaataaaataataactaactcacctc

SEQ ID NO: 2612 - DNA, 50 bp, synthetic construct
  source 1..50: mol_type = other DNA
aactcaactaatcactcaaacaataatcractaaccaactctaatctccc

SEQ ID NO: 2613 - DNA, 50 bp, synthetic construct
  source 1..50: mol_type = other DNA
cctacaataccaaaaacacaaacccaacraaaaaccaaaactaaccaacc

SEQ ID NO: 2614 - DNA, 50 bp, synthetic construct
  source 1..50: mol_type = other DNA
actaactaaatttacaaatatatataaacatataacctaacrcctaacac

SEQ ID NO: 2615 - DNA, 50 bp, synthetic construct
  source 1..50: mol_type = other DNA
aaaacttaaaaacacaaaacttataaatctaaaactaaaattcaaacccc

SEQ ID NO: 2616 - DNA, 50 bp, synthetic construct
  source 1..50: mol_type = other DNA
acacaaaacaaaaacaaaacttacctatcaatttcrcacaaactcaaaac

SEQ ID NO: 2617 - DNA, 50 bp, synthetic construct
  source 1..50: mol_type = other DNA
tattctaactattaaacacaaaacaaaaacaaaacttacctatcaatttc

SEQ ID NO: 2618 - DNA, 50 bp, synthetic construct
  source 1..50: mol_type = other DNA
ctaacaaacaaaccctacccttattttatatctaacaatcaaaacaatcc

SEQ ID NO: 2619 - DNA, 50 bp, synthetic construct
  source 1..50: mol_type = other DNA
taccaatattcccaaaaatcccaaaaattctcctaccaattaacaatccc

SEQ ID NO: 2620 - DNA, 50 bp, synthetic construct
  source 1..50: mol_type = other DNA
ccctaaaaaatttaaattttactaaacttactcccracactactaacrac

SEQ ID NO: 2621 - DNA, 50 bp, synthetic construct
  source 1..50: mol_type = other DNA
caaccctaaaaaatttaaattttactaaacttactcccracactactaac

SEQ ID NO: 2622 - DNA, 50 bp, synthetic construct
  source 1..50: mol_type = other DNA
aaaaaaacaactctttctacataatatccatatacrtcrccaataatatc

SEQ ID NO: 2623 - DNA, 50 bp, synthetic construct
  source 1..50: mol_type = other DNA
raaaacaaattcaacaaaactcaaacctttcaaaattataaaatctatac

SEQ ID NO: 2624 - DNA, 50 bp, synthetic construct
  source 1..50: mol_type = other DNA
taaccccctctccaacaatttccttctcttttaatttaatactccttatc

SEQ ID NO: 2625 - DNA, 50 bp, synthetic construct
  source 1..50: mol_type = other DNA
aaattcaaaaaattctcctatctcaacccccraataactaaaatacaaac

SEQ ID NO: 2626 - DNA, 50 bp, synthetic construct
  source 1..50: mol_type = other DNA
caaaattctataatacataaataaaacaaaaactttctacttcaacttcc

SEQ ID NO: 2627 - DNA, 50 bp, synthetic construct
  source 1..50: mol_type = other DNA
actaccatcaaattaaaataatctaaaataacctcaatcacatatctaac

SEQ ID NO: 2628 - DNA, 50 bp, synthetic construct
  source 1..50: mol_type = other DNA
atctaaaataacctcaatcacatatctaacrataatactaactaataacc

SEQ ID NO: 2629 - DNA, 50 bp, synthetic construct
  source 1..50: mol_type = other DNA
raataaaaatcccaccacaactaaaaaaatacactacaaaaaaattaacc

SEQ ID NO: 2630 - DNA, 50 bp, synthetic construct
  source 1..50: mol_type = other DNA
tacttctttaacataaacacaacttctataaaaactcaaataaaacaatc

SEQ ID NO: 2631 - DNA, 50 bp, synthetic construct
  source 1..50: mol_type = other DNA
crataatacaatatttaatacactaatacrtccctaacaaccaaataacc

SEQ ID NO: 2632 - DNA, 50 bp, synthetic construct
  source 1..50: mol_type = other DNA
aataaataaactcaccccacacrataatacaatatttaatacactaatac

SEQ ID NO: 2633 - DNA, 50 bp, synthetic construct
  source 1..50: mol_type = other DNA
crattatttaactattaaaaacrcatcaatatactaaacactatatcacc

SEQ ID NO: 2634 - DNA, 50 bp, synthetic construct
  source 1..50: mol_type = other DNA
tataacactaataaaattaattcaactctcaaaacctcaatcttatcatc

SEQ ID NO: 2635 - DNA, 50 bp, synthetic construct
  source 1..50: mol_type = other DNA
aaaaaaaataaaaccaaaaacatcccaaaatcactatcctaaataccatc

SEQ ID NO: 2636 - DNA, 50 bp, synthetic construct
  source 1..50: mol_type = other DNA
crtactataaacaccatctattacrtattaaacatactacaataaaacac

SEQ ID NO: 2637 - DNA, 50 bp, synthetic construct
  source 1..50: mol_type = other DNA
crtaccccactataatatatctaatacrtaataaataatattcacaacac

SEQ ID NO: 2638 - DNA, 50 bp, synthetic construct
  source 1..50: mol_type = other DNA
aaaacttttcctactatctctaaactaccccaacaaaacaatctacttac

SEQ ID NO: 2639 - DNA, 50 bp, synthetic construct
  source 1..50: mol_type = other DNA
ttataaccataaaccactataccaaactaaaaccccttttcaaaaaaaac

SEQ ID NO: 2640 - DNA, 50 bp, synthetic construct
  source 1..50: mol_type = other DNA
acaaaaaaaactatatatacaaatctccacaatatctaaataccaaaaac

SEQ ID NO: 2641 - DNA, 50 bp, synthetic construct
  source 1..50: mol_type = other DNA
aaaaaatataaaataaaatccccttactcaacacrcaaaaactacctaac

SEQ ID NO: 2642 - DNA, 50 bp, synthetic construct
  source 1..50: mol_type = other DNA
caaaaattctaaaattccacaaaataatttaaacaaaaatcacraacctc

SEQ ID NO: 2643 - DNA, 50 bp, synthetic construct
  source 1..50: mol_type = other DNA
aatccaaaacattccactcactacctattacrattaaaacccaaactttc

SEQ ID NO: 2644 - DNA, 50 bp, synthetic construct
  source 1..50: mol_type = other DNA
aacccaaactttcrcttaaatacttaacctcctcttaccttaaaatttcc

SEQ ID NO: 2645 - DNA, 50 bp, synthetic construct
  source 1..50: mol_type = other DNA
aaatacttaacctcctcttaccttaaaatttccrcaaaaacactattccc

SEQ ID NO: 2646 - DNA, 50 bp, synthetic construct
  source 1..50: mol_type = other DNA
taaatttaatacacattacaacaacaaaaatataaaccaaacaccctcac

SEQ ID NO: 2647 - DNA, 50 bp, synthetic construct
  source 1..50: mol_type = other DNA
aatacctactaaaatcaaacaacrcaaaaaacccaaactaataaacraac

SEQ ID NO: 2648 - DNA, 50 bp, synthetic construct
  source 1..50: mol_type = other DNA
caaaaaacataaaacatacttaaaaaaacttatctttacaaccaacrccc

SEQ ID NO: 2649 - DNA, 50 bp, synthetic construct
  source 1..50: mol_type = other DNA
tacctaactctaataaacatctaaaataataactaacaaacaacctcttc

SEQ ID NO: 2650 - DNA, 50 bp, synthetic construct
  source 1..50: mol_type = other DNA
cactataacactaccaacaacttacacaataccraatacaaaataaaatc

SEQ ID NO: 2651 - DNA, 50 bp, synthetic construct
  source 1..50: mol_type = other DNA
accacatatatctttttcactataacactaccaacaacttacacaatacc

SEQ ID NO: 2652 - DNA, 50 bp, synthetic construct
  source 1..50: mol_type = other DNA
aaattccaccacttaacaaaaaaaacacctcaaactcaaaatttctaaac

SEQ ID NO: 2653 - DNA, 50 bp, synthetic construct
  source 1..50: mol_type = other DNA
ccatcccctaaaacccatctcacctcaaaacaataacaatacaaaaaaac

SEQ ID NO: 2654 - DNA, 50 bp, synthetic construct
  source 1..50: mol_type = other DNA
caccataacatactttttataactcttaccacaataataattacctcttc

SEQ ID NO: 2655 - DNA, 50 bp, synthetic construct
  source 1..50: mol_type = other DNA
caaaaaaaacaaactccaaacataccaccttaaaaactataacactcacc

SEQ ID NO: 2656 - DNA, 50 bp, synthetic construct
  source 1..50: mol_type = other DNA
aaactccaaacataccaccttaaaaactataacactcaccrtaaaaatcc

SEQ ID NO: 2657 - DNA, 50 bp, synthetic construct
  source 1..50: mol_type = other DNA
tctcaaatatcatccaaatataaaaaattattatttattcttaacacttc

SEQ ID NO: 2658 - DNA, 50 bp, synthetic construct
  source 1..50: mol_type = other DNA
aaatcaaattttccaactcatcttcaataaacatatatttaaacctccac

SEQ ID NO: 2659 - DNA, 50 bp, synthetic construct
  source 1..50: mol_type = other DNA
acatctcctattttacctaaatcacataaaaaaaatcaaaacttactccc

SEQ ID NO: 2660 - DNA, 50 bp, synthetic construct
  source 1..50: mol_type = other DNA
aaaatcaaaacttactcccraaatctctttcctcacctaacccaatacac

SEQ ID NO: 2661 - DNA, 50 bp, synthetic construct
  source 1..50: mol_type = other DNA
ttctaccactccatattaaaacatataaccattaaatccctactaaatac

SEQ ID NO: 2662 - DNA, 50 bp, synthetic construct
  source 1..50: mol_type = other DNA
caaaataaaatacaactcaaaacccraaaaacaactatcaaaaacactcc

SEQ ID NO: 2663 - DNA, 50 bp, synthetic construct
  source 1..50: mol_type = other DNA
aaatataaataatcataacccaatcaccttattactaactcaaaaaaccc

SEQ ID NO: 2664 - DNA, 50 bp, synthetic construct
  source 1..50: mol_type = other DNA
aatacrtaacatcctcrataaacacctaaacctaaaaacatctaaactac

SEQ ID NO: 2665 - DNA, 50 bp, synthetic construct
  source 1..50: mol_type = other DNA
aaaatatcaatcatcacctcactctaacactaaaaatacrtaacatcctc

SEQ ID NO: 2666 - DNA, 50 bp, synthetic construct
  source 1..50: mol_type = other DNA
taaacattaattaatacaatccaaataaacattaaaataaccataacctc

SEQ ID NO: 2667 - DNA, 50 bp, synthetic construct
  source 1..50: mol_type = other DNA
aacaacccaaaatcaacaaaattaaaataaacaaaaactaaatcaaatcc

SEQ ID NO: 2668 - DNA, 50 bp, synthetic construct
  source 1..50: mol_type = other DNA
aaaaaaacraaacccaaacraactttaaaaaactaacrtaactaaactcc

SEQ ID NO: 2669 - DNA, 50 bp, synthetic construct
  source 1..50: mol_type = other DNA
aattaacrcaataaaaaaccacrttttattcaatccaattcaaaatcccc

SEQ ID NO: 2670 - DNA, 50 bp, synthetic construct
  source 1..50: mol_type = other DNA
ccaaatcccrataaactaacctatacccaaaattaaaaaaaccaatcaac

SEQ ID NO: 2671 - DNA, 50 bp, synthetic construct
  source 1..50: mol_type = other DNA
taacrtcccattcttaaacrctccaacaaaataaacaacttatcttcttc

SEQ ID NO: 2672 - DNA, 50 bp, synthetic construct
  source 1..50: mol_type = other DNA
rttaaatacacaaataccaaaacaaaatactccataacctatacttaatc

SEQ ID NO: 2673 - DNA, 50 bp, synthetic construct
  source 1..50: mol_type = other DNA
ccttcraaaataccctctacaaaataattctaacraccactatcctcaac

SEQ ID NO: 2674 - DNA, 50 bp, synthetic construct
  source 1..50: mol_type = other DNA
ctaataaacccccaaccaatacctactaaaaaaacrcaacaaacaaaaac

SEQ ID NO: 2675 - DNA, 50 bp, synthetic construct
  source 1..50: mol_type = other DNA
caccaccctctacaactaataaacccccaaccaatacctactaaaaaaac

SEQ ID NO: 2676 - DNA, 50 bp, synthetic construct
  source 1..50: mol_type = other DNA
aacacacaacaataactacctcaaccctatactatactatctcctaaaac

SEQ ID NO: 2677 - DNA, 50 bp, synthetic construct
  source 1..50: mol_type = other DNA
caataactacctcaaccctatactatactatctcctaaaacraaaacccc

SEQ ID NO: 2678 - DNA, 50 bp, synthetic construct
  source 1..50: mol_type = other DNA
ctctaacaaacaccttcaaaaatctacrattaaaactataaccccaaaac

SEQ ID NO: 2679 - DNA, 50 bp, synthetic construct
  source 1..50: mol_type = other DNA
aaccttttatcccaattccacctccaattcaatataaaacaaaaaaattc

SEQ ID NO: 2680 - DNA, 50 bp, synthetic construct
  source 1..50: mol_type = other DNA
taaaatttccaacacctaccaaaccctaaatataaaaccctaatactaac

SEQ ID NO: 2681 - DNA, 50 bp, synthetic construct
  source 1..50: mol_type = other DNA
attaaacaacaactccttcactaaccccaatactataatcaaatcctaac

SEQ ID NO: 2682 - DNA, 50 bp, synthetic construct
  source 1..50: mol_type = other DNA
aaactaaaatataaataaaactaattaaaccrttccccataccaaccccc

SEQ ID NO: 2683 - DNA, 50 bp, synthetic construct
  source 1..50: mol_type = other DNA
tcccaaatactttttactccttcaattaatcctcacaacaaacctataac

SEQ ID NO: 2684 - DNA, 50 bp, synthetic construct
  source 1..50: mol_type = other DNA
catccatacacaaatcctatcaacaataacccctcaaaatactaaaacac

SEQ ID NO: 2685 - DNA, 50 bp, synthetic construct
  source 1..50: mol_type = other DNA
tcaaaacacctaactcctcctaataccaaaataaaatatataaataaacc

SEQ ID NO: 2686 - DNA, 50 bp, synthetic construct
  source 1..50: mol_type = other DNA
aacaaatccaaaataaacccaataaaataaaccccraaaacataaaacac

SEQ ID NO: 2687 - DNA, 50 bp, synthetic construct
  source 1..50: mol_type = other DNA
accccraaaacataaaacacraaacttaaaaaaatattcraataacttac

SEQ ID NO: 2688 - DNA, 50 bp, synthetic construct
  source 1..50: mol_type = other DNA
acataaaatatacaatacrcatctacraaaaaacraacccaaaatatccc

SEQ ID NO: 2689 - DNA, 50 bp, synthetic construct
  source 1..50: mol_type = other DNA
ttcraataacttacrtaactataatataacaaacraaacactctaaatcc

SEQ ID NO: 2690 - DNA, 50 bp, synthetic construct
  source 1..50: mol_type = other DNA
acttacrtaactataatataacaaacraaacactctaaatccrtcctctc

SEQ ID NO: 2691 - DNA, 50 bp, synthetic construct
  source 1..50: mol_type = other DNA
aactataatataacaaacraaacactctaaatccrtcctctcrcaaatac

SEQ ID NO: 2692 - DNA, 50 bp, synthetic construct
  source 1..50: mol_type = other DNA
aataaataacaatacactatatattacctataaaccctatacaaattacc

SEQ ID NO: 2693 - DNA, 50 bp, synthetic construct
  source 1..50: mol_type = other DNA
ctttcatcttcataaataaaataattaatatataataaatacctccaaac

SEQ ID NO: 2694 - DNA, 50 bp, synthetic construct
  source 1..50: mol_type = other DNA
aaaaataaaactaatctccrctaaaccaacaaataacrccaaaacctatc

SEQ ID NO: 2695 - DNA, 50 bp, synthetic construct
  source 1..50: mol_type = other DNA
ctcctaccccaactaaaaaccctcaacrcctaaacataaaataaacaaac

SEQ ID NO: 2696 - DNA, 50 bp, synthetic construct
  source 1..50: mol_type = other DNA
aaaaaaaataaaatcctaaaacctaaataaaattccaaaccctaaaactc

SEQ ID NO: 2697 - DNA, 50 bp, synthetic construct
  source 1..50: mol_type = other DNA
aacactacaaaaaataacacaaaaaaacccaataaaacaatctaaaaaac

SEQ ID NO: 2698 - DNA, 50 bp, synthetic construct
  source 1..50: mol_type = other DNA
ctatcttactaaatctctctatattattctctacaatatctatatatatc

SEQ ID NO: 2699 - DNA, 50 bp, synthetic construct
  source 1..50: mol_type = other DNA
ataccaaaataatacaacataaatttccaactcccctatctacttactac

SEQ ID NO: 2700 - DNA, 50 bp, synthetic construct
  source 1..50: mol_type = other DNA
atataactttctatacctatttcctcaattacataaaaataacacctatc

SEQ ID NO: 2701 - DNA, 50 bp, synthetic construct
  source 1..50: mol_type = other DNA
ataaaacttattaaataccaaacactactctaaatattatattaactcac

SEQ ID NO: 2702 - DNA, 50 bp, synthetic construct
  source 1..50: mol_type = other DNA
aactctatataaatatttactattatattattattatcactaccaccacc

SEQ ID NO: 2703 - DNA, 50 bp, synthetic construct
  source 1..50: mol_type = other DNA
taacaaacactaactaaaaaaaacataaatacataatccctatactctac

SEQ ID NO: 2704 - DNA, 50 bp, synthetic construct
  source 1..50: mol_type = other DNA
tcccattaccttccaacttctttcaactcaaactaactaatcaaaaaaac

SEQ ID NO: 2705 - DNA, 50 bp, synthetic construct
  source 1..50: mol_type = other DNA
aaaccctaaatcaacaactaaaattaactaaaatactactactaactttc

SEQ ID NO: 2706 - DNA, 50 bp, synthetic construct
  source 1..50: mol_type = other DNA
acccaaaaaactcraaatctaaattaccccaattacttcactttaccaac

SEQ ID NO: 2707 - DNA, 50 bp, synthetic construct
  source 1..50: mol_type = other DNA
tatttaatataaatatctatctcctacaaaaaaaaaccccttccaaaacc

SEQ ID NO: 2708 - DNA, 50 bp, synthetic construct
  source 1..50: mol_type = other DNA
aaaataactccttttttaaactctcctaaacaaaacactacctaaatctc

SEQ ID NO: 2709 - DNA, 50 bp, synthetic construct
  source 1..50: mol_type = other DNA
tcctttcctaaatcctaataaccttactaattcactcaactttcatttac

SEQ ID NO: 2710 - DNA, 50 bp, synthetic construct
  source 1..50: mol_type = other DNA
tcactcaactttcatttacraaaaatacaatatatccattactattaaac

SEQ ID NO: 2711 - DNA, 50 bp, synthetic construct
  source 1..50: mol_type = other DNA
actaatacttctttaatatatttacataaaacraaaacttcaaaaaaacc

SEQ ID NO: 2712 - DNA, 50 bp, synthetic construct
  source 1..50: mol_type = other DNA
cttcacctcccaataataaacaacaaaactaaaccataaaaactaaacac

SEQ ID NO: 2713 - DNA, 50 bp, synthetic construct
  source 1..50: mol_type = other DNA
caataataaacaacaaaactaaaccataaaaactaaacacraaacttaac

SEQ ID NO: 2714 - DNA, 50 bp, synthetic construct
  source 1..50: mol_type = other DNA
taaaccataaaaactaaacacraaacttaacrccaataaaaccccaactc

SEQ ID NO: 2715 - DNA, 50 bp, synthetic construct
  source 1..50: mol_type = other DNA
aacataaaccaacacctactcaacactttcacataaaaaaacattaaatc

SEQ ID NO: 2716 - DNA, 50 bp, synthetic construct
  source 1..50: mol_type = other DNA
ctatcccttttaaaactaaacaaaatataaactaattaaaacctctctac

SEQ ID NO: 2717 - DNA, 50 bp, synthetic construct
  source 1..50: mol_type = other DNA
cttaacttctcatattctccttttattcccatttctatatctattttatc

SEQ ID NO: 2718 - DNA, 50 bp, synthetic construct
  source 1..50: mol_type = other DNA
aaataatcaaaaccttaactataactctacctcctacctcacraaaaacc

SEQ ID NO: 2719 - DNA, 50 bp, synthetic construct
  source 1..50: mol_type = other DNA
taacacaaaaataatcaaaaccttaactataactctacctcctacctcac

SEQ ID NO: 2720 - DNA, 50 bp, synthetic construct
  source 1..50: mol_type = other DNA
aatataatacccaacctctatccttaaaacatttccaacrtccctaaaac

SEQ ID NO: 2721 - DNA, 50 bp, synthetic construct
  source 1..50: mol_type = other DNA
tttttctaaaacaaaatctcrctctattacccaaacttaaaaacaataac

SEQ ID NO: 2722 - DNA, 50 bp, synthetic construct
  source 1..50: mol_type = other DNA
caaaaattaaccaaacrtaacratacataactataataccaaatactcac

SEQ ID NO: 2723 - DNA, 50 bp, synthetic construct
  source 1..50: mol_type = other DNA
taatcctcccatctcaacctcrtaaatatctaataccacaatcatacacc

SEQ ID NO: 2724 - DNA, 50 bp, synthetic construct
  source 1..50: mol_type = other DNA
acaaaatcccaaaatacataccaaactaaaaaatttaaacttaccctatc

SEQ ID NO: 2725 - DNA, 50 bp, synthetic construct
  source 1..50: mol_type = other DNA
ctaaaacccraaaaaaatatccttttctacctccccatatcratatttcc

SEQ ID NO: 2726 - DNA, 50 bp, synthetic construct
  source 1..50: mol_type = other DNA
ataaattaaaactctctaaaaaaccatctcatcaaactaccaaacccctc

SEQ ID NO: 2727 - DNA, 50 bp, synthetic construct
  source 1..50: mol_type = other DNA
tacctactataacacaacaactcccaaaaacttccaaaaatactcaaccc

SEQ ID NO: 2728 - DNA, 50 bp, synthetic construct
  source 1..50: mol_type = other DNA
tactacaaaaaccaataaacctaaatcttctaaaaccaaacccraatctc

SEQ ID NO: 2729 - DNA, 50 bp, synthetic construct
  source 1..50: mol_type = other DNA
taacatatcactacaaaacaaccraattctcaaaaactccctaatatatc

SEQ ID NO: 2730 - DNA, 50 bp, synthetic construct
  source 1..50: mol_type = other DNA
aattttctaacaatctctccccaaacttcctttcccctattcttctttcc

SEQ ID NO: 2731 - DNA, 50 bp, synthetic construct
  source 1..50: mol_type = other DNA
tacacaaaaacacraaaacatctaaaaaaaacaaattcctcccccaaatc

SEQ ID NO: 2732 - DNA, 50 bp, synthetic construct
  source 1..50: mol_type = other DNA
ctatccttataaacrcctacatacatatactatatataattataacrttc

SEQ ID NO: 2733 - DNA, 50 bp, synthetic construct
  source 1..50: mol_type = other DNA
tatcctatccttataaacrcctacatacatatactatatataattataac

SEQ ID NO: 2734 - DNA, 50 bp, synthetic construct
  source 1..50: mol_type = other DNA
ttctctaaactccatatacttcaattaaccctttcccaatacrattctcc

SEQ ID NO: 2735 - DNA, 50 bp, synthetic construct
  source 1..50: mol_type = other DNA
acaaaaactaaaaacaaattatattaaaactacttcaactatcraaaatc

SEQ ID NO: 2736 - DNA, 50 bp, synthetic construct
  source 1..50: mol_type = other DNA
cactttaaccatatcctctaatatctctaaactaatattccttaaacttc

SEQ ID NO: 2737 - DNA, 50 bp, synthetic construct
  source 1..50: mol_type = other DNA
aaataacctaaataactttcaaaactacaaaaactctaacacttctaaac

SEQ ID NO: 2738 - DNA, 50 bp, synthetic construct
  source 1..50: mol_type = other DNA
tatatattcactaacacaccaacaattaccaaaacaaaaataataacttc

SEQ ID NO: 2739 - DNA, 50 bp, synthetic construct
  source 1..50: mol_type = other DNA
tataatttacacacaaaacraataaaacctctaccctaacaacttctacc

SEQ ID NO: 2740 - DNA, 50 bp, synthetic construct
  source 1..50: mol_type = other DNA
tactttacttcctcactacttttccctctttcctaaacaactaaatcacc

SEQ ID NO: 2741 - DNA, 50 bp, synthetic construct
  source 1..50: mol_type = other DNA
tacttaactaaataaccttccactatcataaaaaaaacctaaaaataacc

SEQ ID NO: 2742 - DNA, 50 bp, synthetic construct
  source 1..50: mol_type = other DNA
acctaacaactaaaaataatcctctacaaaattactataaatatcataac

SEQ ID NO: 2743 - DNA, 50 bp, synthetic construct
  source 1..50: mol_type = other DNA
cctaccrctactctcctattccaaatcattacatattacttaaaactacc

SEQ ID NO: 2744 - DNA, 50 bp, synthetic construct
  source 1..50: mol_type = other DNA
ctattaattctatacctaaacaaacattctaccaccaaataaatactaac

SEQ ID NO: 2745 - DNA, 50 bp, synthetic construct
  source 1..50: mol_type = other DNA
acaaaactaaaaccaaaaaactaaattactacaatatttctcacacctac

SEQ ID NO: 2746 - DNA, 50 bp, synthetic construct
  source 1..50: mol_type = other DNA
ctactctatatatccatatatacccattacttccacttataaataaaaac

SEQ ID NO: 2747 - DNA, 50 bp, synthetic construct
  source 1..50: mol_type = other DNA
cacaacractaacttacatataaactaaataccratttctaatctctaac

SEQ ID NO: 2748 - DNA, 50 bp, synthetic construct
  source 1..50: mol_type = other DNA
aacatatccttaaaatacacaacractaacttacatataaactaaatacc

SEQ ID NO: 2749 - DNA, 50 bp, synthetic construct
  source 1..50: mol_type = other DNA
raaatcctaatctctcccaaaacacaaaacatatccttaaaatacacaac

SEQ ID NO: 2750 - DNA, 50 bp, synthetic construct
  source 1..50: mol_type = other DNA
aaataaatcacrctactaaaaacaacaattccttcaactaaataacttcc

SEQ ID NO: 2751 - DNA, 50 bp, synthetic construct
  source 1..50: mol_type = other DNA
accaaaatcccraaaatcatccaactaaaaaaactactatccctaacaac

SEQ ID NO: 2752 - DNA, 50 bp, synthetic construct
  source 1..50: mol_type = other DNA
crcccataaacrcctataacactaaaaatataattcctaaaaattactac

SEQ ID NO: 2753 - DNA, 50 bp, synthetic construct
  source 1..50: mol_type = other DNA
attactaatactaaaaactaaaaaaatcctttactcctccacacttaaac

SEQ ID NO: 2754 - DNA, 50 bp, synthetic construct
  source 1..50: mol_type = other DNA
raaaaataaacraataaacaactacaatacratttcccatatattcatcc

SEQ ID NO: 2755 - DNA, 50 bp, synthetic construct
  source 1..50: mol_type = other DNA
aaaacactcacaacaccctattccaacttcraataaatacataaaaaacc

SEQ ID NO: 2756 - DNA, 50 bp, synthetic construct
  source 1..50: mol_type = other DNA
attccaacttcraataaatacataaaaaaccrcactataactacctactc

SEQ ID NO: 2757 - DNA, 50 bp, synthetic construct
  source 1..50: mol_type = other DNA
raataaatacataaaaaaccrcactataactacctactcrtctatctccc

SEQ ID NO: 2758 - DNA, 50 bp, synthetic construct
  source 1..50: mol_type = other DNA
aaaaacctaaatttcctaaaaaaacctaactacttactacaaccaaaacc

SEQ ID NO: 2759 - DNA, 50 bp, synthetic construct
  source 1..50: mol_type = other DNA
caactcctcratctatatccaaaaccratacatccatactaactataatc

SEQ ID NO: 2760 - DNA, 50 bp, synthetic construct
  source 1..50: mol_type = other DNA
accatttatataacttttaaacaaattctttaacttttctaaacctcaac

SEQ ID NO: 2761 - DNA, 50 bp, synthetic construct
  source 1..50: mol_type = other DNA
taatcccaacaccaaaccctaaaccttaataacactatccctaaataaac

SEQ ID NO: 2762 - DNA, 50 bp, synthetic construct
  source 1..50: mol_type = other DNA
tttcttttcctctaactccccatcttctaatactacatttaataaaaatc

SEQ ID NO: 2763 - DNA, 50 bp, synthetic construct
  source 1..50: mol_type = other DNA
caaactccaaatatataaccaataaatccctctaacctatcctatttccc

SEQ ID NO: 2764 - DNA, 50 bp, synthetic construct
  source 1..50: mol_type = other DNA
ccaatccaaaattccactcaaacttatctatacataaatatcaaaaaaac

SEQ ID NO: 2765 - DNA, 50 bp, synthetic construct
  source 1..50: mol_type = other DNA
accctaaaatctcacattaaaatcctaaaactaatccatataaaaacaac

SEQ ID NO: 2766 - DNA, 50 bp, synthetic construct
  source 1..50: mol_type = other DNA
acataacataaccattaaaataaccaaaacaccaaaaaacaacacaaaac

SEQ ID NO: 2767 - DNA, 50 bp, synthetic construct
  source 1..50: mol_type = other DNA
taacataaccattaaaataaccaaaacaccaaaaaacaacacaaaacrac

SEQ ID NO: 2768 - DNA, 50 bp, synthetic construct
  source 1..50: mol_type = other DNA
accaaaacaccaaaaaacaacacaaaacracracaactataaacaataac

SEQ ID NO: 2769 - DNA, 50 bp, synthetic construct
  source 1..50: mol_type = other DNA
caccaaaaaacaacacaaaacracracaactataaacaataacrtaaatc

SEQ ID NO: 2770 - DNA, 50 bp, synthetic construct
  source 1..50: mol_type = other DNA
tccattacatctacctataactttccctaacaaaaactataatactaacc

SEQ ID NO: 2771 - DNA, 50 bp, synthetic construct
  source 1..50: mol_type = other DNA
tacttaaccaacactatttaatcataacaaatacctataaaataaatacc

SEQ ID NO: 2772 - DNA, 50 bp, synthetic construct
  source 1..50: mol_type = other DNA
ttttattttaaatacaaatataatctcactatattacctaaactaatctc

SEQ ID NO: 2773 - DNA, 50 bp, synthetic construct
  source 1..50: mol_type = other DNA
acatctctacctaataacaatcatcctactattcttacatacctcactac

SEQ ID NO: 2774 - DNA, 50 bp, synthetic construct
  source 1..50: mol_type = other DNA
acaaaaaaaacacacttaaaaaaaacaatttaatccatacaaaatacaac

SEQ ID NO: 2775 - DNA, 50 bp, synthetic construct
  source 1..50: mol_type = other DNA
tataataactcatataaatcctaaaaaaccctaatccccctacaataccc

SEQ ID NO: 2776 - DNA, 50 bp, synthetic construct
  source 1..50: mol_type = other DNA
taacaactccaaaccatacatcaatttaaataaacctttaaacacctctc

SEQ ID NO: 2777 - DNA, 50 bp, synthetic construct
  source 1..50: mol_type = other DNA
acataaacaaccaaaacacctaaatccattaaattaaaatccaaattccc

SEQ ID NO: 2778 - DNA, 50 bp, synthetic construct
  source 1..50: mol_type = other DNA
atatcacacaactccaaaaacatcatttacatcataatctatataataac

SEQ ID NO: 2779 - DNA, 50 bp, synthetic construct
  source 1..50: mol_type = other DNA
tttaacacaaccattctatttacccrtcaaataaaaccccaatcaacacc

SEQ ID NO: 2780 - DNA, 50 bp, synthetic construct
  source 1..50: mol_type = other DNA
taaaattatacaatacataacctacratactaactaaaacctcacctaac

SEQ ID NO: 2781 - DNA, 50 bp, synthetic construct
  source 1..50: mol_type = other DNA
acctcacctaacraataaacaaaataactatatcaaaataatcaaaatcc

SEQ ID NO: 2782 - DNA, 50 bp, synthetic construct
  source 1..50: mol_type = other DNA
atccraatcctcaaaaatattaaaaccccrctaccaaacacaaaaactac

SEQ ID NO: 2783 - DNA, 50 bp, synthetic construct
  source 1..50: mol_type = other DNA
rcaatcctatcaacttaataataactcractaataatcctaaaatcaaac

SEQ ID NO: 2784 - DNA, 50 bp, synthetic construct
  source 1..50: mol_type = other DNA
taaacacctctcccaaacccaaaaactaaattttctccatttcctttaac

SEQ ID NO: 2785 - DNA, 50 bp, synthetic construct
  source 1..50: mol_type = other DNA
ctaacatcctccaaacttcccraacctacaaaatcacaaacccaaaaaac

SEQ ID NO: 2786 - DNA, 50 bp, synthetic construct
  source 1..50: mol_type = other DNA
caccaataccracraccttaacatcctattcttttttattttaatttaac

SEQ ID NO: 2787 - DNA, 50 bp, synthetic construct
  source 1..50: mol_type = other DNA
tttactaaaaacrtttcctcccacaactcctaactaacttttctaaaaac

SEQ ID NO: 2788 - DNA, 50 bp, synthetic construct
  source 1..50: mol_type = other DNA
acaactctcracacactttctccaaaactaaaatttctcaaattaaaaac

SEQ ID NO: 2789 - DNA, 50 bp, synthetic construct
  source 1..50: mol_type = other DNA
tataaccccattatccatccctaatttcttaaactacraaatacaataac

SEQ ID NO: 2790 - DNA, 50 bp, synthetic construct
  source 1..50: mol_type = other DNA
acctctcctatcatacctaaataaaactcaaccaaaaaaccaaaatactc

SEQ ID NO: 2791 - DNA, 50 bp, synthetic construct
  source 1..50: mol_type = other DNA
acctaaataaaactcaaccaaaaaaccaaaatactcrctatctctctatc

SEQ ID NO: 2792 - DNA, 50 bp, synthetic construct
  source 1..50: mol_type = other DNA
aaatactcrctatctctctatcrttaaccttaaacaaacacttttctcac

SEQ ID NO: 2793 - DNA, 50 bp, synthetic construct
  source 1..50: mol_type = other DNA
attacccatactaaaaaacaataatataatttcractcactaaaacctcc

SEQ ID NO: 2794 - DNA, 50 bp, synthetic construct
  source 1..50: mol_type = other DNA
aactaaatttcactcttattacccatactaaaaaacaataatataatttc

SEQ ID NO: 2795 - DNA, 50 bp, synthetic construct
  source 1..50: mol_type = other DNA
ctattcaaaccctttatctaaaatctatctttaactccccaaaaatattc

SEQ ID NO: 2796 - DNA, 50 bp, synthetic construct
  source 1..50: mol_type = other DNA
ctctacttcacaaatacctattattatcactattatatctattaaatttc

SEQ ID NO: 2797 - DNA, 50 bp, synthetic construct
  source 1..50: mol_type = other DNA
ttcaaattcactacattatctccctctccaaacaaaataataattttccc

SEQ ID NO: 2798 - DNA, 50 bp, synthetic construct
  source 1..50: mol_type = other DNA
caaacttacaataacaataactaaatacttaccatttaccaaacattttc

SEQ ID NO: 2799 - DNA, 50 bp, synthetic construct
  source 1..50: mol_type = other DNA
atctaaaattactttaacctaaaactttaccaatttactacccttaaaac

SEQ ID NO: 2800 - DNA, 50 bp, synthetic construct
  source 1..50: mol_type = other DNA
taacaaacccctttaccattacttaaatacctcaatttccctactcttac

SEQ ID NO: 2801 - DNA, 50 bp, synthetic construct
  source 1..50: mol_type = other DNA
taccattacttaaatacctcaatttccctactcttacrttaaactaatac

SEQ ID NO: 2802 - DNA, 50 bp, synthetic construct
  source 1..50: mol_type = other DNA
attaactcrctaaatttaacaactaattcttatatcttccaactatctac

SEQ ID NO: 2803 - DNA, 50 bp, synthetic construct
  source 1..50: mol_type = other DNA
atactacaaaaattaacccataaactccaaaaccaaaaactatcatcrcc

SEQ ID NO: 2804 - DNA, 50 bp, synthetic construct
  source 1..50: mol_type = other DNA
caatttctaatcctaaaatctataaattaacccctataacattaaccccc

SEQ ID NO: 2805 - DNA, 50 bp, synthetic construct
  source 1..50: mol_type = other DNA
cccccrtcacaataacatcaaaataaaaacaaactatcccaactaataac

SEQ ID NO: 2806 - DNA, 50 bp, synthetic construct
  source 1..50: mol_type = other DNA
tctacctaatactctatcttccttaaatacctcactctaaccraactcac

SEQ ID NO: 2807 - DNA, 50 bp, synthetic construct
  source 1..50: mol_type = other DNA
aactttaacactaattcccaacacrttctataaaaatatttaaattctac

SEQ ID NO: 2808 - DNA, 50 bp, synthetic construct
  source 1..50: mol_type = other DNA
ttaacactaattcccaacacrttctataaaaatatttaaattctacraac

SEQ ID NO: 2809 - DNA, 50 bp, synthetic construct
  source 1..50: mol_type = other DNA
taaattctacraacraatatctaaaacccraatacatactacttatatcc

SEQ ID NO: 2810 - DNA, 50 bp, synthetic construct
  source 1..50: mol_type = other DNA
tataaccactaaaaaacaatactaaataataaaaactccaaacctatatc

SEQ ID NO: 2811 - DNA, 50 bp, synthetic construct
  source 1..50: mol_type = other DNA
ctaaaaaaactctccttaataaaaactataccacattcaataacacttcc

SEQ ID NO: 2812 - DNA, 50 bp, synthetic construct
  source 1..50: mol_type = other DNA
attaaatacttcttctactattacaaccccaatatcaattatccratttc

SEQ ID NO: 2813 - DNA, 50 bp, synthetic construct
  source 1..50: mol_type = other DNA
accataattaaatacttcttctactattacaaccccaatatcaattatcc

SEQ ID NO: 2814 - DNA, 50 bp, synthetic construct
  source 1..50: mol_type = other DNA
aataaataaataaacataaaaaaaccctaaaactaatcctctccaacccc

SEQ ID NO: 2815 - DNA, 50 bp, synthetic construct
  source 1..50: mol_type = other DNA
taattccctcctttcttattaccttcttacttcattccaaacttttctcc

SEQ ID NO: 2816 - DNA, 50 bp, synthetic construct
  source 1..50: mol_type = other DNA
tcaacataacraaacccratttctaccaaaaatacttaacttaaccraac

SEQ ID NO: 2817 - DNA, 50 bp, synthetic construct
  source 1..50: mol_type = other DNA
ctaatcaacataacraaacccratttctaccaaaaatacttaacttaacc

SEQ ID NO: 2818 - DNA, 50 bp, synthetic construct
  source 1..50: mol_type = other DNA
ctataaaacttcaaaaaccttcccatttctacctctatttctcaactaac

SEQ ID NO: 2819 - DNA, 50 bp, synthetic construct
  source 1..50: mol_type = other DNA
aaatacaaattttctacctctaaaacccatactttcctttatacctcaac

SEQ ID NO: 2820 - DNA, 50 bp, synthetic construct
  source 1..50: mol_type = other DNA
caactctatcacttaactctataactctaaataaattacttaacttttcc

SEQ ID NO: 2821 - DNA, 50 bp, synthetic construct
  source 1..50: mol_type = other DNA
taactctataactctaaataaattacttaacttttccraaccttaatttc

SEQ ID NO: 2822 - DNA, 50 bp, synthetic construct
  source 1..50: mol_type = other DNA
actaacatcratcaaatactttttattctacaacactctttcacacacac

SEQ ID NO: 2823 - DNA, 50 bp, synthetic construct
  source 1..50: mol_type = other DNA
caaaaaaccaataaaaaacatataactaacrtcaatcaattactaacatc

SEQ ID NO: 2824 - DNA, 50 bp, synthetic construct
  source 1..50: mol_type = other DNA
aaactactctcaccccrtatcaaaaaaccaataaaaaacatataactaac

SEQ ID NO: 2825 - DNA, 50 bp, synthetic construct
  source 1..50: mol_type = other DNA
caatttaaaaaatcaaatcaaatctaaactccaaaaactactctcacccc

SEQ ID NO: 2826 - DNA, 50 bp, synthetic construct
  source 1..50: mol_type = other DNA
aaaaataataaaataacraaatcttctctcaacaataattcatcctccac

SEQ ID NO: 2827 - DNA, 50 bp, synthetic construct
  source 1..50: mol_type = other DNA
ctctcaacaataattcatcctccacrccaaaaacaactattttaattttc

SEQ ID NO: 2828 - DNA, 50 bp, synthetic construct
  source 1..50: mol_type = other DNA
acaataattcatcctccacrccaaaaacaactattttaattttcractcc

SEQ ID NO: 2829 - DNA, 50 bp, synthetic construct
  source 1..50: mol_type = other DNA
accttataaccaaaaaaaactaaacaatccaccccttccataataaaacc

SEQ ID NO: 2830 - DNA, 50 bp, synthetic construct
  source 1..50: mol_type = other DNA
atccaccccttccataataaaaccraaactcatattcctttatttaattc

SEQ ID NO: 2831 - DNA, 50 bp, synthetic construct
  source 1..50: mol_type = other DNA
attaaataacraaactaaatccaaacccaaatcatttatactaattaccc

SEQ ID NO: 2832 - DNA, 50 bp, synthetic construct
  source 1..50: mol_type = other DNA
aaaaaataaaattataaaaacatacccaaaatccccttatattaaataac

SEQ ID NO: 2833 - DNA, 50 bp, synthetic construct
  source 1..50: mol_type = other DNA
aacactataaattacttaaccttacaaaaaataaatataaaacaaaccac

SEQ ID NO: 2834 - DNA, 50 bp, synthetic construct
  source 1..50: mol_type = other DNA
ctataaattacttaaccttacaaaaaataaatataaaacaaaccacrcac

SEQ ID NO: 2835 - DNA, 50 bp, synthetic construct
  source 1..50: mol_type = other DNA
aaccttacaaaaaataaatataaaacaaaccacrcacrataataactcac

SEQ ID NO: 2836 - DNA, 50 bp, synthetic construct
  source 1..50: mol_type = other DNA
aaacraaatttcaccatcttaatcaaactaatctaaaacaccctaacctc

SEQ ID NO: 2837 - DNA, 50 bp, synthetic construct
  source 1..50: mol_type = other DNA
ccrctatcctctatcattttaaaaatatactacttcacaacaaaaaccac

SEQ ID NO: 2838 - DNA, 50 bp, synthetic construct
  source 1..50: mol_type = other DNA
aaacaaaacrataaaaaaacctaatccttaccaaaatttaacactactac

SEQ ID NO: 2839 - DNA, 50 bp, synthetic construct
  source 1..50: mol_type = other DNA
aaacacactaaaacaaacaaataccatctcctttaactaaacaaaaaaac

SEQ ID NO: 2840 - DNA, 50 bp, synthetic construct
  source 1..50: mol_type = other DNA
aatttatccattcttttattcaacaacaatatattaaaccctttctatac

SEQ ID NO: 2841 - DNA, 50 bp, synthetic construct
  source 1..50: mol_type = other DNA
aatttcaaaaccaaatcataaaaaacattaccttccaaactaaaaaaatc

SEQ ID NO: 2842 - DNA, 50 bp, synthetic construct
  source 1..50: mol_type = other DNA
ctaacctaaaactttaaaataaaaactatattcaaattctcaaacatacc

SEQ ID NO: 2843 - DNA, 50 bp, synthetic construct
  source 1..50: mol_type = other DNA
catatttaaaaatttaaacacaaccctcactccaaaactccaaaccaacc

SEQ ID NO: 2844 - DNA, 50 bp, synthetic construct
  source 1..50: mol_type = other DNA
aaacaaataacatcaacattttctacatccaacaactttaaacaaatacc

SEQ ID NO: 2845 - DNA, 50 bp, synthetic construct
  source 1..50: mol_type = other DNA
ccacaaaaaaaaattttacttattatcaaccctaaaaacctctaataaac

SEQ ID NO: 2846 - DNA, 50 bp, synthetic construct
  source 1..50: mol_type = other DNA
atcccacctaaaaactcaaactatataattaaaaaatatcttcatctctc

SEQ ID NO: 2847 - DNA, 50 bp, synthetic construct
  source 1..50: mol_type = other DNA
aatatttccttttaaaacctcctccaatatccaaattctatcattctttc

SEQ ID NO: 2848 - DNA, 50 bp, synthetic construct
  source 1..50: mol_type = other DNA
rtattaatttacaactccttaattaaccrtatattatctcaactatattc

SEQ ID NO: 2849 - DNA, 50 bp, synthetic construct
  source 1..50: mol_type = other DNA
actccaaattatattatttaattcatttcattaccataaaacaacaactc

SEQ ID NO: 2850 - DNA, 50 bp, synthetic construct
  source 1..50: mol_type = other DNA
aataaaataaattaaataatataatctaaaattactacaaaaaccctccc

SEQ ID NO: 2851 - DNA, 50 bp, synthetic construct
  source 1..50: mol_type = other DNA
taaaacatacaacaaaatccataacaaactaaacttcaaataactttacc

SEQ ID NO: 2852 - DNA, 50 bp, synthetic construct
  source 1..50: mol_type = other DNA
taaattttacttttccacacctatccccatctaataaaccatactatctc

SEQ ID NO: 2853 - DNA, 50 bp, synthetic construct
  source 1..50: mol_type = other DNA
aataaaccatactatctcrtaaccaacctacaaatcaattaaataaaacc

SEQ ID NO: 2854 - DNA, 50 bp, synthetic construct
  source 1..50: mol_type = other DNA
ttaaataaaaccraataacctcaacctaatacaaaccacaaaaacaaaac

SEQ ID NO: 2855 - DNA, 50 bp, synthetic construct
  source 1..50: mol_type = other DNA
actaaaatcctaataaaacaaaaataaaaaccaaaattcctaaactacac

SEQ ID NO: 2856 - DNA, 50 bp, synthetic construct
  source 1..50: mol_type = other DNA
ctaaacrttcccaatcataacactcaaaacactaaactaaaattatctac

SEQ ID NO: 2857 - DNA, 50 bp, synthetic construct
  source 1..50: mol_type = other DNA
cactccrtaaacaattccaattcaatatcttaaatactataattaaaaac

SEQ ID NO: 2858 - DNA, 50 bp, synthetic construct
  source 1..50: mol_type = other DNA
tctcaaaattaactaaaacttaacctaaacctcactacctccaaaaaacc

SEQ ID NO: 2859 - DNA, 50 bp, synthetic construct
  source 1..50: mol_type = other DNA
aacatattactcaaactaatctcraactcctaaacttaaataatcctccc

SEQ ID NO: 2860 - DNA, 50 bp, synthetic construct
  source 1..50: mol_type = other DNA
ttccaccatttatttaaactcaacttacataaaataatttattttctctc

SEQ ID NO: 2861 - DNA, 50 bp, synthetic construct
  source 1..50: mol_type = other DNA
tccaacccatttctctaaaaaaataaacacccaatttctaaaatatcttc

SEQ ID NO: 2862 - DNA, 50 bp, synthetic construct
  source 1..50: mol_type = other DNA
taattaaaattcaaaaatatctcaacaacrtaatttcaaccattataaac

SEQ ID NO: 2863 - DNA, 50 bp, synthetic construct
  source 1..50: mol_type = other DNA
taaaaaaacaaactccraacacaccatctttaaaaactataacactcacc

SEQ ID NO: 2864 - DNA, 50 bp, synthetic construct
  source 1..50: mol_type = other DNA
aaacacaaacacaaacacaactactaactactacaatacaacaacactcc

SEQ ID NO: 2865 - DNA, 50 bp, synthetic construct
  source 1..50: mol_type = other DNA
taactataaaaataattactacactactaatcacaaaacttaatataatc

SEQ ID NO: 2866 - DNA, 50 bp, synthetic construct
  source 1..50: mol_type = other DNA
actcaacaaatacataacctaacaactacttacctataactaaaaaattc

SEQ ID NO: 2867 - DNA, 50 bp, synthetic construct
  source 1..50: mol_type = other DNA
acaaataaacaactaccaaaccatacacctactaaacacataaaaaaccc

SEQ ID NO: 2868 - DNA, 50 bp, synthetic construct
  source 1..50: mol_type = other DNA
atatcaattttctttaaaataactcctttccttaaaaaccttcaataacc

SEQ ID NO: 2869 - DNA, 50 bp, synthetic construct
  source 1..50: mol_type = other DNA
aataataaacaacttacctaccctttctaatccaatcaaaaaatcccccc

SEQ ID NO: 2870 - DNA, 50 bp, synthetic construct
  source 1..50: mol_type = other DNA
aaccataactattaaaacccctaaaaatttaaaattccaacaaaaaccac

SEQ ID NO: 2871 - DNA, 50 bp, synthetic construct
  source 1..50: mol_type = other DNA
taaacaacrtataaacaaaaaatatccraaaattatacacaacaactaac

SEQ ID NO: 2872 - DNA, 50 bp, synthetic construct
  source 1..50: mol_type = other DNA
tctactcacacrctatctattctaatacctaaataccaaaccaacctttc

SEQ ID NO: 2873 - DNA, 50 bp, synthetic construct
  source 1..50: mol_type = other DNA
aaaaaaaccctacaacacracaccaacttatcaaatacaaaaaaacaaac

SEQ ID NO: 2874 - DNA, 50 bp, synthetic construct
  source 1..50: mol_type = other DNA
aatacracaatataaataatatcacacacracaaataaaccraacatccc

SEQ ID NO: 2875 - DNA, 50 bp, synthetic construct
  source 1..50: mol_type = other DNA
caaatacatcctacracccraaatacracaatataaataatatcacacac

SEQ ID NO: 2876 - DNA, 50 bp, synthetic construct
  source 1..50: mol_type = other DNA
aaaacaaaacaattcctaaaaacraacacataaacacaaatacatcctac

SEQ ID NO: 2877 - DNA, 50 bp, synthetic construct
  source 1..50: mol_type = other DNA
tactaaaatactactacrtcattacaaaacacaaaccataaataaaaaac

SEQ ID NO: 2878 - DNA, 50 bp, synthetic construct
  source 1..50: mol_type = other DNA
aaaacaaaataaaaaacrttttccatccataacctataccctataataac

SEQ ID NO: 2879 - DNA, 50 bp, synthetic construct
  source 1..50: mol_type = other DNA
rcaacaatatcctaatacattaacraatttttcctatcctaccactatcc

SEQ ID NO: 2880 - DNA, 50 bp, synthetic construct
  source 1..50: mol_type = other DNA
attcacttcacrctttcaacraataacaaaatcatctttataaaaacctc

SEQ ID NO: 2881 - DNA, 50 bp, synthetic construct
  source 1..50: mol_type = other DNA
aatcttcctacraaaccttcacaaaaataattttatcattcrctaaaaac

SEQ ID NO: 2882 - DNA, 50 bp, synthetic construct
  source 1..50: mol_type = other DNA
tttatcattcrctaaaaacrtaaaataaatcaacracctcctcttactcc

SEQ ID NO: 2883 - DNA, 50 bp, synthetic construct
  source 1..50: mol_type = other DNA
aatctattcatcttctaacccctataacacataatacaattcaataatac

SEQ ID NO: 2884 - DNA, 50 bp, synthetic construct
  source 1..50: mol_type = other DNA
acaaactattatccctacactctttaaaaaaatatactcccaaaacttac

SEQ ID NO: 2885 - DNA, 50 bp, synthetic construct
  source 1..50: mol_type = other DNA
aaaaataaaccraattataaatacttcatcctatatctcataatctaaac

SEQ ID NO: 2886 - DNA, 50 bp, synthetic construct
  source 1..50: mol_type = other DNA
aaacrtctacaaatctaacctttaaataataaaatcccctaactattaac

SEQ ID NO: 2887 - DNA, 50 bp, synthetic construct
  source 1..50: mol_type = other DNA
ataaaatcccctaactattaacraaaaaacaaaacctacatataaaaaac

SEQ ID NO: 2888 - DNA, 50 bp, synthetic construct
  source 1..50: mol_type = other DNA
aaatcccctaactattaacraaaaaacaaaacctacatataaaaaacrtc

SEQ ID NO: 2889 - DNA, 50 bp, synthetic construct
  source 1..50: mol_type = other DNA
catataaaaaacrtcrtaaatatccttaataactatactaaaaccctaac

SEQ ID NO: 2890 - DNA, 50 bp, synthetic construct
  source 1..50: mol_type = other DNA
aaaaccaaccttataaacctattcrtaaccaaaaaaacactaaaatcacc

SEQ ID NO: 2891 - DNA, 50 bp, synthetic construct
  source 1..50: mol_type = other DNA
aaaaaaacaaacattccaacaaatttaaaaccaaccttataaacctattc

SEQ ID NO: 2892 - DNA, 50 bp, synthetic construct
  source 1..50: mol_type = other DNA
aacraattatcatttccctccttctaactcccataaactattcataactc

SEQ ID NO: 2893 - DNA, 50 bp, synthetic construct
  source 1..50: mol_type = other DNA
tatacaaactaaacacratcaaactacttctctaaaacataatccccaac

SEQ ID NO: 2894 - DNA, 50 bp, synthetic construct
  source 1..50: mol_type = other DNA
aaaccttaatcttaccccttatcaaataataccccttccactaaaaaaac

SEQ ID NO: 2895 - DNA, 50 bp, synthetic construct
  source 1..50: mol_type = other DNA
tataaaaaaatacactcaaaaaacttcaacacccaaaacaaaaacccctc

SEQ ID NO: 2896 - DNA, 50 bp, synthetic construct
  source 1..50: mol_type = other DNA
aaataaaaaaactcaaattttaatctaaccatacttcctactaaataaac

SEQ ID NO: 2897 - DNA, 50 bp, synthetic construct
  source 1..50: mol_type = other DNA
acaaaataaaaactaacatttcttcaaacactaccttaaatataatcatc

SEQ ID NO: 2898 - DNA, 50 bp, synthetic construct
  source 1..50: mol_type = other DNA
aactactaaaaatcaatcctaaactacctataaccrtatactctaaaccc

SEQ ID NO: 2899 - DNA, 50 bp, synthetic construct
  source 1..50: mol_type = other DNA
ttcaaaacacacratcacaaacaacccaaaactaatccctaacaattctc

SEQ ID NO: 2900 - DNA, 50 bp, synthetic construct
  source 1..50: mol_type = other DNA
cractacctttaaatcatctacttccataattcrtcaaaaaaaccaaaac

SEQ ID NO: 2901 - DNA, 50 bp, synthetic construct
  source 1..50: mol_type = other DNA
aaaaataaaaacactaacractacctttaaatcatctacttccataattc

SEQ ID NO: 2902 - DNA, 50 bp, synthetic construct
  source 1..50: mol_type = other DNA
crttttaacctccctaacraactataaaaacaaataattcaaaaacaacc

SEQ ID NO: 2903 - DNA, 50 bp, synthetic construct
  source 1..50: mol_type = other DNA
atcataacccaaaaaactccatacaaaaatacaaaacctaattcaattac

SEQ ID NO: 2904 - DNA, 50 bp, synthetic construct
  source 1..50: mol_type = other DNA
ttactcaataattacacaataacaacaccaaaacttaaattacaattatc

SEQ ID NO: 2905 - DNA, 50 bp, synthetic construct
  source 1..50: mol_type = other DNA
acaatccaaatcctaatattactactatataatcactaaataatcacaac

SEQ ID NO: 2906 - DNA, 50 bp, synthetic construct
  source 1..50: mol_type = other DNA
cataaactactataattcatattaattccatcaatacctacaaactaaac

SEQ ID NO: 2907 - DNA, 50 bp, synthetic construct
  source 1..50: mol_type = other DNA
taataattataaccactaattaaaaatttattctaaaccaaaaaccacac

SEQ ID NO: 2908 - DNA, 50 bp, synthetic construct
  source 1..50: mol_type = other DNA
acaaaacctaacttctcrtccaaactctaacacataaactatttaactac

SEQ ID NO: 2909 - DNA, 50 bp, synthetic construct
  source 1..50: mol_type = other DNA
aataaaataactctcccrcaatcaaacaactcatatatcaaaacctaaac

SEQ ID NO: 2910 - DNA, 50 bp, synthetic construct
  source 1..50: mol_type = other DNA
caatcaaacaactcatatatcaaaacctaaacraaaaaccaaatcttacc

SEQ ID NO: 2911 - DNA, 50 bp, synthetic construct
  source 1..50: mol_type = other DNA
caaaacctaaacraaaaaccaaatcttaccraacctttattctttctcac

SEQ ID NO: 2912 - DNA, 50 bp, synthetic construct
  source 1..50: mol_type = other DNA
ctcaaattttactcttaaaaattaacaccatttcaaaaaaatctactttc

SEQ ID NO: 2913 - DNA, 50 bp, synthetic construct
  source 1..50: mol_type = other DNA
atatccatcaactaaaaacctaataaattttaatatattcatatataacc

SEQ ID NO: 2914 - DNA, 50 bp, synthetic construct
  source 1..50: mol_type = other DNA
cccracaaatcatcaccaaaaatatactaaaccaaaactaaacrcaaaac

SEQ ID NO: 2915 - DNA, 50 bp, synthetic construct
  source 1..50: mol_type = other DNA
tccaaaccccracaaatcatcaccaaaaatatactaaaccaaaactaaac

SEQ ID NO: 2916 - DNA, 50 bp, synthetic construct
  source 1..50: mol_type = other DNA
aaataccattatcrtaaaaattctatataactaaaatccttccaaacccc

SEQ ID NO: 2917 - DNA, 50 bp, synthetic construct
  source 1..50: mol_type = other DNA
tataaactaaaaaccctctaaaccttaaaaactcaaactacctaaacaac

SEQ ID NO: 2918 - DNA, 50 bp, synthetic construct
  source 1..50: mol_type = other DNA
acraatttcttccraaaaaactacraaaaccacaaaaactctaaaaaaac

SEQ ID NO: 2919 - DNA, 50 bp, synthetic construct
  source 1..50: mol_type = other DNA
rtatcrataacrattttaaaatccaaataacatttcctctcccaacctcc

SEQ ID NO: 2920 - DNA, 50 bp, synthetic construct
  source 1..50: mol_type = other DNA
taaaactcrtctctttaaaatcccaacraaatattcacctataacrtatc

SEQ ID NO: 2921 - DNA, 50 bp, synthetic construct
  source 1..50: mol_type = other DNA
taccacttaaattttaaaaccrtcaccratacrctataaataaatatttc

SEQ ID NO: 2922 - DNA, 50 bp, synthetic construct
  source 1..50: mol_type = other DNA
ataaatatttcrctaaaattttaaaaaaacraacttcaacctactaaacc

SEQ ID NO: 2923 - DNA, 50 bp, synthetic construct
  source 1..50: mol_type = other DNA
aaatatttcrctaaaattttaaaaaaacraacttcaacctactaaaccrc

SEQ ID NO: 2924 - DNA, 50 bp, synthetic construct
  source 1..50: mol_type = other DNA
ctaaaaaaccctaatatcraactcctttaatatctaaaaaccaaaccctc

SEQ ID NO: 2925 - DNA, 50 bp, synthetic construct
  source 1..50: mol_type = other DNA
actccracrctaaaaaccraaaatctaatttttaaatatcaaaaaaaccc

SEQ ID NO: 2926 - DNA, 50 bp, synthetic construct
  source 1..50: mol_type = other DNA
aaaacccracctaaaacctaccttcrataataaacacaataaccaaaatc

SEQ ID NO: 2927 - DNA, 50 bp, synthetic construct
  source 1..50: mol_type = other DNA
ttccraaaataacaaatttaacracatttaaaatccccctatataaaaac

SEQ ID NO: 2928 - DNA, 50 bp, synthetic construct
  source 1..50: mol_type = other DNA
aaaaaacrccaaaaatctctccrttctcacataaaaaaactccaaatatc

SEQ ID NO: 2929 - DNA, 50 bp, synthetic construct
  source 1..50: mol_type = other DNA
rctaaattttatcttcccttctaaaataaaacattcctatataaaactcc

SEQ ID NO: 2930 - DNA, 50 bp, synthetic construct
  source 1..50: mol_type = other DNA
ttcccttctaaaataaaacattcctatataaaactccraaaatacatacc

SEQ ID NO: 2931 - DNA, 50 bp, synthetic construct
  source 1..50: mol_type = other DNA
attctaaacraaacaaatcttcaaacaaccrtattaaatataatatcccc

SEQ ID NO: 2932 - DNA, 50 bp, synthetic construct
  source 1..50: mol_type = other DNA
tcrtaaaataaatcraacacaaaatcattataaaccrttaactaaccccc

SEQ ID NO: 2933 - DNA, 50 bp, synthetic construct
  source 1..50: mol_type = other DNA
taaaaattcacctaaaaaaaactaccaaatttctacraaaaccaaccaac

SEQ ID NO: 2934 - DNA, 50 bp, synthetic construct
  source 1..50: mol_type = other DNA
aaaaactacttcttttacttaatccaactctctctaaaaaataaacaatc

SEQ ID NO: 2935 - DNA, 50 bp, synthetic construct
  source 1..50: mol_type = other DNA
rccraaccatcccaaaaacccttcctaaattctatttataacttttctac

SEQ ID NO: 2936 - DNA, 50 bp, synthetic construct
  source 1..50: mol_type = other DNA
aacaattcctacaccaaaacaaataatataacctcctatactaaccaacc

SEQ ID NO: 2937 - DNA, 50 bp, synthetic construct
  source 1..50: mol_type = other DNA
ttcttaatctccaaacaaaccaaatacaaacaacaaactcaaaaacccac

SEQ ID NO: 2938 - DNA, 50 bp, synthetic construct
  source 1..50: mol_type = other DNA
acrataaattttaaaaatacaccrcaataaacatctataataaatcttcc

SEQ ID NO: 2939 - DNA, 50 bp, synthetic construct
  source 1..50: mol_type = other DNA
aaatctttattaacaaacttaaaatccacrataaattttaaaaatacacc

SEQ ID NO: 2940 - DNA, 50 bp, synthetic construct
  source 1..50: mol_type = other DNA
ttttaaaatttatcrtaaactccaaacttattaacaaaaatttaccattc

SEQ ID NO: 2941 - DNA, 50 bp, synthetic construct
  source 1..50: mol_type = other DNA
ctaatttcaaaattaacataatctacttttctacracccttcatacaaac

SEQ ID NO: 2942 - DNA, 50 bp, synthetic construct
  source 1..50: mol_type = other DNA
aaaccataccttactttcccacctaaaaactctcattttccatttaaaac

SEQ ID NO: 2943 - DNA, 50 bp, synthetic construct
  source 1..50: mol_type = other DNA
aattctattaaattaaattattactactttccaacctacttctttacctc

SEQ ID NO: 2944 - DNA, 50 bp, synthetic construct
  source 1..50: mol_type = other DNA
ttccctccccaaaacactaaaacaaattaatacaaaacacaaccctaaac

SEQ ID NO: 2945 - DNA, 50 bp, synthetic construct
  source 1..50: mol_type = other DNA
aaaaaacttcaaaaacaaaaaaacaactaaactctctaaaataccactcc

SEQ ID NO: 2946 - DNA, 50 bp, synthetic construct
  source 1..50: mol_type = other DNA
ttaaaaaatccaattatcttcttacttctaaaatccttcctatatctatc

SEQ ID NO: 2947 - DNA, 50 bp, synthetic construct
  source 1..50: mol_type = other DNA
tatcrcatcttcttccataactttctaaaaactccccttactaatcaatc

SEQ ID NO: 2948 - DNA, 50 bp, synthetic construct
  source 1..50: mol_type = other DNA
attattttaatatttcaccrtaaaacactaaaaaaaacacccacaacctc

SEQ ID NO: 2949 - DNA, 50 bp, synthetic construct
  source 1..50: mol_type = other DNA
ccaccctctcactaaaccatatattaactactaattaaaactaataaacc

SEQ ID NO: 2950 - DNA, 50 bp, synthetic construct
  source 1..50: mol_type = other DNA
aataaaccrtaattaaaaattacacaacctctaaaactaaaatttaactc

SEQ ID NO: 2951 - DNA, 50 bp, synthetic construct
  source 1..50: mol_type = other DNA
aatatctactaaataaaaaccaatataaaaataaaaatcccacaaaacac

SEQ ID NO: 2952 - DNA, 50 bp, synthetic construct
  source 1..50: mol_type = other DNA
taaaacctaaactaaacccttaaaatctcactccccaaattccccctatc

SEQ ID NO: 2953 - DNA, 50 bp, synthetic construct
  source 1..50: mol_type = other DNA
ccctaataaaattaccraactactaaaccrccaatattcaaatttcccac

SEQ ID NO: 2954 - DNA, 50 bp, synthetic construct
  source 1..50: mol_type = other DNA
ccaaaatactttctcttacraccctaataaaattaccraactactaaacc

SEQ ID NO: 2955 - DNA, 50 bp, synthetic construct
  source 1..50: mol_type = other DNA
aatttctctaaaaccaaaatactttctcttacraccctaataaaattacc

SEQ ID NO: 2956 - DNA, 50 bp, synthetic construct
  source 1..50: mol_type = other DNA
aaaaaatctaaacactaacractcaacaacccrataatcttatcaaaacc

SEQ ID NO: 2957 - DNA, 50 bp, synthetic construct
  source 1..50: mol_type = other DNA
tcctaaaacaatcctattaataataacaactcaatattcatcctatatcc

SEQ ID NO: 2958 - DNA, 50 bp, synthetic construct
  source 1..50: mol_type = other DNA
aacaaaattaccctaaaaatctcctaaaactcatcaccaaaaccaaaccc

SEQ ID NO: 2959 - DNA, 50 bp, synthetic construct
  source 1..50: mol_type = other DNA
ccraataaacactatcctaattctttaatcttctaaacaatcaacctccc

SEQ ID NO: 2960 - DNA, 50 bp, synthetic construct
  source 1..50: mol_type = other DNA
caacaatcccctaaaatactaaaaaattaaaatatacaaacaacacactc

SEQ ID NO: 2961 - DNA, 50 bp, synthetic construct
  source 1..50: mol_type = other DNA
aatacratccttttattccaaattaacaaactaaaaccaaccrttctttc

SEQ ID NO: 2962 - DNA, 50 bp, synthetic construct
  source 1..50: mol_type = other DNA
cccaatataatacratccttttattccaaattaacaaactaaaaccaacc

SEQ ID NO: 2963 - DNA, 50 bp, synthetic construct
  source 1..50: mol_type = other DNA
taaaactccctacctttcttaaatcaaaaataaaatacccaatataatac

SEQ ID NO: 2964 - DNA, 50 bp, synthetic construct
  source 1..50: mol_type = other DNA
aaaactataacaaacrctaaatttacttaacatccctaaattccctaacc

SEQ ID NO: 2965 - DNA, 50 bp, synthetic construct
  source 1..50: mol_type = other DNA
aaacrctaaatttacttaacatccctaaattccctaaccraatttcttac

SEQ ID NO: 2966 - DNA, 50 bp, synthetic construct
  source 1..50: mol_type = other DNA
tttcatctacataaaaaaaataacccaaattttcccaattttcttcttac

SEQ ID NO: 2967 - DNA, 50 bp, synthetic construct
  source 1..50: mol_type = other DNA
acttcatctataaaataaaaaacttacaaaaaacrcttcctaaaacccac

SEQ ID NO: 2968 - DNA, 50 bp, synthetic construct
  source 1..50: mol_type = other DNA
accctaataaccttctacttcatctataaaataaaaaacttacaaaaaac

SEQ ID NO: 2969 - DNA, 50 bp, synthetic construct
  source 1..50: mol_type = other DNA
cccctcatctcacaaataaaacaaaaaatcatcaaaaccaataaattcac

SEQ ID NO: 2970 - DNA, 50 bp, synthetic construct
  source 1..50: mol_type = other DNA
ctcatctcacaaataaaacaaaaaatcatcaaaaccaataaattcacrcc

SEQ ID NO: 2971 - DNA, 50 bp, synthetic construct
  source 1..50: mol_type = other DNA
caaaaccaataaattcacrccrctcctctaactactaaatcaataacctc

SEQ ID NO: 2972 - DNA, 50 bp, synthetic construct
  source 1..50: mol_type = other DNA
aactacttataacttctacaaattaaaaaaaatcttaccrttacccaaac

SEQ ID NO: 2973 - DNA, 50 bp, synthetic construct
  source 1..50: mol_type = other DNA
aatcaacaaaaatcaaatttaatcaccacacatatctaaaactaaacaac

SEQ ID NO: 2974 - DNA, 50 bp, synthetic construct
  source 1..50: mol_type = other DNA
tatcactctcttaaactaaacctataaacataaaaaacaacaaaacaaac

SEQ ID NO: 2975 - DNA, 50 bp, synthetic construct
  source 1..50: mol_type = other DNA
tattttttcactactttctcaacaattcctataaataaataaaacatttc

SEQ ID NO: 2976 - DNA, 50 bp, synthetic construct
  source 1..50: mol_type = other DNA
ataaaacatttcraaactccctaaaaacaaaaaccttcacttcttcttac

SEQ ID NO: 2977 - DNA, 50 bp, synthetic construct
  source 1..50: mol_type = other DNA
ataccraaaccatatattaataaaactaatactataaaaaccactcactc

SEQ ID NO: 2978 - DNA, 50 bp, synthetic construct
  source 1..50: mol_type = other DNA
aaaacraaaacataaaaaaaacaaatctaccctttaaacaaccttaattc

SEQ ID NO: 2979 - DNA, 50 bp, synthetic construct
  source 1..50: mol_type = other DNA
craacctacaatccaacctcaacataacctccaaaaaaatctttcaaaac

SEQ ID NO: 2980 - DNA, 50 bp, synthetic construct
  source 1..50: mol_type = other DNA
crctctaaaaaatttctctaaaaaccatattaaaactaaattacaaatcc

SEQ ID NO: 2981 - DNA, 50 bp, synthetic construct
  source 1..50: mol_type = other DNA
aaaaatctatactaataacaaaatctctaacttaaatttttacatatatc

SEQ ID NO: 2982 - DNA, 50 bp, synthetic construct
  source 1..50: mol_type = other DNA
acttaaaaacttacaaaatcccaaaacaaacaaacattaaaaatacctac

SEQ ID NO: 2983 - DNA, 50 bp, synthetic construct
  source 1..50: mol_type = other DNA
aataccaaaataaaattcaaataaaacccaaaataactcatactcrccac

SEQ ID NO: 2984 - DNA, 50 bp, synthetic construct
  source 1..50: mol_type = other DNA
aacaaaataccaaaataaaattcaaataaaacccaaaataactcatactc

SEQ ID NO: 2985 - DNA, 50 bp, synthetic construct
  source 1..50: mol_type = other DNA
aaatcaccatttattcccccttaaaataaataataattttctttaacaac

SEQ ID NO: 2986 - DNA, 50 bp, synthetic construct
  source 1..50: mol_type = other DNA
taacttaaaactttccaattaatttcacaacataattaacttcaaactcc

SEQ ID NO: 2987 - DNA, 50 bp, synthetic construct
  source 1..50: mol_type = other DNA
acaaaaattactcactcaaaaaactcractcttaaaacaaaaatcttacc

SEQ ID NO: 2988 - DNA, 50 bp, synthetic construct
  source 1..50: mol_type = other DNA
ctaacctaaaactatcactatcaataacaaaaattaaatacatcccatcc

SEQ ID NO: 2989 - DNA, 50 bp, synthetic construct
  source 1..50: mol_type = other DNA
ataccctcattaacaatcaaataaatttatatattaaactcctaactaac

SEQ ID NO: 2990 - DNA, 50 bp, synthetic construct
  source 1..50: mol_type = other DNA
tatttctatattctcctatacttaacaataatactatatacatctaaacc

SEQ ID NO: 2991 - DNA, 50 bp, synthetic construct
  source 1..50: mol_type = other DNA
caaacttacaaaaacatactactcaccctcraactttccaatatttaatc

SEQ ID NO: 2992 - DNA, 50 bp, synthetic construct
  source 1..50: mol_type = other DNA
cttctttaaaaaaatattatttacrctaacaccttaaaaatcaaaaaccc

SEQ ID NO: 2993 - DNA, 50 bp, synthetic construct
  source 1..50: mol_type = other DNA
taattataaatacttcctaccccaaaatttttacatataccrttcccaac

SEQ ID NO: 2994 - DNA, 50 bp, synthetic construct
  source 1..50: mol_type = other DNA
taaaaaatataaaaacatacaacatataattctctattccrtttcctacc

SEQ ID NO: 2995 - DNA, 50 bp, synthetic construct
  source 1..50: mol_type = other DNA
aatataaaaacatacaacatataattctctattccrtttcctaccratac

SEQ ID NO: 2996 - DNA, 50 bp, synthetic construct
  source 1..50: mol_type = other DNA
tataaattaaaccattctcataccatatataaattttacaaactaatcac

SEQ ID NO: 2997 - DNA, 50 bp, synthetic construct
  source 1..50: mol_type = other DNA
taacataccctatattaaaaactaaacttctctaataaactcaacrtatc

SEQ ID NO: 2998 - DNA, 50 bp, synthetic construct
  source 1..50: mol_type = other DNA
caaatttctatatcaaattcctaaacatcccataaaaactacctattacc

SEQ ID NO: 2999 - DNA, 50 bp, synthetic construct
  source 1..50: mol_type = other DNA
aaacccaactaatcaacatcacaaataaaaccacaccctactctcctaac

SEQ ID NO: 3000 - DNA, 50 bp, synthetic construct
  source 1..50: mol_type = other DNA
ctaaaatatcctcacttaatatacacrtaaccaaaactctacaataactc

SEQ ID NO: 3001 - DNA, 50 bp, synthetic construct
  source 1..50: mol_type = other DNA
aaaaaatatcacccaatatcacttcccccattttttaatattttaaaacc

SEQ ID NO: 3002 - DNA, 50 bp, synthetic construct
  source 1..50: mol_type = other DNA
ctaactaaaactctaaaatctactccttactacataaataacaaaaactc

SEQ ID NO: 3003 - DNA, 50 bp, synthetic construct
  source 1..50: mol_type = other DNA
taccctataaaaccaaaacacaaaataaaatttctcaattttattttctc

SEQ ID NO: 3004 - DNA, 50 bp, synthetic construct
  source 1..50: mol_type = other DNA
ccccaacattttaatacataaaaaaactttctatctaaactttaatttac

SEQ ID NO: 3005 - DNA, 50 bp, synthetic construct
  source 1..50: mol_type = other DNA
aaaaaaactttctatctaaactttaatttacrcttaaatttaaactaaac

SEQ ID NO: 3006 - DNA, 50 bp, synthetic construct
  source 1..50: mol_type = other DNA
tactcataactcaaaataacactaaaaactcaaataacactctaaaaaac

SEQ ID NO: 3007 - DNA, 50 bp, synthetic construct
  source 1..50: mol_type = other DNA
ccattcacaatacataatctctccctctttatattaaatcaattacctac

SEQ ID NO: 3008 - DNA, 50 bp, synthetic construct
  source 1..50: mol_type = other DNA
ttctattttcactaaaacccaaaaacacrcaaaactacctcctctctttc

SEQ ID NO: 3009 - DNA, 50 bp, synthetic construct
  source 1..50: mol_type = other DNA
taaaactctaccaaaaacaattcatacaactttatttcccttctaacctc

SEQ ID NO: 3010 - DNA, 50 bp, synthetic construct
  source 1..50: mol_type = other DNA
tacaatctatattcctttaacctcaatcaactatttcttaaccttacatc

SEQ ID NO: 3011 - DNA, 50 bp, synthetic construct
  source 1..50: mol_type = other DNA
atttcttaaccttacatcrcctctaactataccctaattcttctcctttc

SEQ ID NO: 3012 - DNA, 50 bp, synthetic construct
  source 1..50: mol_type = other DNA
caatacaaaattcattaataacctttaaaaataaatctaaactccraacc

SEQ ID NO: 3013 - DNA, 50 bp, synthetic construct
  source 1..50: mol_type = other DNA
aaactatattcataactataattcatttacacttcaacacatcacrattc

SEQ ID NO: 3014 - DNA, 50 bp, synthetic construct
  source 1..50: mol_type = other DNA
attcraaacctaaactcacttctaaaaatcaccaataaactttatattac

SEQ ID NO: 3015 - DNA, 50 bp, synthetic construct
  source 1..50: mol_type = other DNA
aatcaccaataaactttatattacraaacccaaaaatactttctcaatcc

SEQ ID NO: 3016 - DNA, 50 bp, synthetic construct
  source 1..50: mol_type = other DNA
taaactttatattacraaacccaaaaatactttctcaatccrtatcttac

SEQ ID NO: 3017 - DNA, 50 bp, synthetic construct
  source 1..50: mol_type = other DNA
aaaaactactatttcatcttctatctctcctcaaaatatcataatccaac

SEQ ID NO: 3018 - DNA, 50 bp, synthetic construct
  source 1..50: mol_type = other DNA
atcacaaaactctttccaacatccrtaatacttctaaaaaaaataacctc

SEQ ID NO: 3019 - DNA, 50 bp, synthetic construct
  source 1..50: mol_type = other DNA
caaactaatcaaacctcctaaacctcatcacaaaactctttccaacatcc

SEQ ID NO: 3020 - DNA, 50 bp, synthetic construct
  source 1..50: mol_type = other DNA
aaaataactttatccaataacatcraaaatccatattcccaaaaacatac

SEQ ID NO: 3021 - DNA, 50 bp, synthetic construct
  source 1..50: mol_type = other DNA
cctcaaaaaatacacataactcaacctattacctttacttataaaaaatc

SEQ ID NO: 3022 - DNA, 50 bp, synthetic construct
  source 1..50: mol_type = other DNA
tcacaactcacaaattatttttcaccraacrcatctaaacttctaatatc

SEQ ID NO: 3023 - DNA, 50 bp, synthetic construct
  source 1..50: mol_type = other DNA
cacaaaattattttacaatttcacaactcacaaattatttttcaccraac

SEQ ID NO: 3024 - DNA, 50 bp, synthetic construct
  source 1..50: mol_type = other DNA
aatccacaaaattattttacaatttcacaactcacaaattatttttcacc

SEQ ID NO: 3025 - DNA, 50 bp, synthetic construct
  source 1..50: mol_type = other DNA
cttctaccttaaatcttaaaccactactaatcttcttaaaaccacacacc

SEQ ID NO: 3026 - DNA, 50 bp, synthetic construct
  source 1..50: mol_type = other DNA
tatcttccacctttaaataacttaaaacatattataactaaaattcattc

SEQ ID NO: 3027 - DNA, 50 bp, synthetic construct
  source 1..50: mol_type = other DNA
aaaaatatattactacttccaacaaactcactttccaaaaaaaaatcttc

SEQ ID NO: 3028 - DNA, 50 bp, synthetic construct
  source 1..50: mol_type = other DNA
atacactaaatccctataactcactaacaaaacacrattaaaaaaatatc

SEQ ID NO: 3029 - DNA, 50 bp, synthetic construct
  source 1..50: mol_type = other DNA
ctaaatcatactaaccaaataactatcaaaaaaatttcctatttacctac

SEQ ID NO: 3030 - DNA, 50 bp, synthetic construct
  source 1..50: mol_type = other DNA
caaatctattaatctaatttcaaaacttacacccttaataactatactac

SEQ ID NO: 3031 - DNA, 50 bp, synthetic construct
  source 1..50: mol_type = other DNA
aaaattacaataaacctcaactttattttcctcctaacattattcatatc

SEQ ID NO: 3032 - DNA, 50 bp, synthetic construct
  source 1..50: mol_type = other DNA
tatcttactcttaatcatttttcaaaaccccrcttaaacatcatcaattc

SEQ ID NO: 3033 - DNA, 50 bp, synthetic construct
  source 1..50: mol_type = other DNA
aattaaaactttcacattcctaaaacctaaaacaatacctaactaaaatc

SEQ ID NO: 3034 - DNA, 50 bp, synthetic construct
  source 1..50: mol_type = other DNA
taccrctattaccacrtcacactattaaaaactatacaaaaaaaattcac

SEQ ID NO: 3035 - DNA, 50 bp, synthetic construct
  source 1..50: mol_type = other DNA
ccctcaaaaaaaatacccaaaataactttataatcactttaaactaaaac

SEQ ID NO: 3036 - DNA, 50 bp, synthetic construct
  source 1..50: mol_type = other DNA
tttaaaaccccacacacttcctatttaaacatctatatttactaacacac

SEQ ID NO: 3037 - DNA, 50 bp, synthetic construct
  source 1..50: mol_type = other DNA
tatcaaatcctaaaatataacatataatcctaataacttacaccaaaatc

SEQ ID NO: 3038 - DNA, 50 bp, synthetic construct
  source 1..50: mol_type = other DNA
cccaaaaacttcatactcaaatatctaaaccaaaaacraaccataaaccc

SEQ ID NO: 3039 - DNA, 50 bp, synthetic construct
  source 1..50: mol_type = other DNA
aataacaactaccaataaatttaccatctaaccaaattaaaaccttatcc

SEQ ID NO: 3040 - DNA, 50 bp, synthetic construct
  source 1..50: mol_type = other DNA
ataaatttaccatctaaccaaattaaaaccttatccrcaaaaaaacaaac

SEQ ID NO: 3041 - DNA, 50 bp, synthetic construct
  source 1..50: mol_type = other DNA
aaataatcttacaaaacacatatctatcaaatcaacaattctattttaac

SEQ ID NO: 3042 - DNA, 50 bp, synthetic construct
  source 1..50: mol_type = other DNA
ataaataaaaacacaactacaaaacaaaaaatctaaattctaattcactc

SEQ ID NO: 3043 - DNA, 50 bp, synthetic construct
  source 1..50: mol_type = other DNA
aactcaaatttcctactctacaactatatctccattcattaaacaaatac

SEQ ID NO: 3044 - DNA, 50 bp, synthetic construct
  source 1..50: mol_type = other DNA
ttttaaaattaattacaacctaaaaaaactaacaaaaataatatccctcc

SEQ ID NO: 3045 - DNA, 50 bp, synthetic construct
  source 1..50: mol_type = other DNA
aaaaacccaattccactctcaaacctttattaatctacctttaattcccc

SEQ ID NO: 3046 - DNA, 50 bp, synthetic construct
  source 1..50: mol_type = other DNA
ctttattaatctacctttaattccccraactacctattctctaataatcc

SEQ ID NO: 3047 - DNA, 50 bp, synthetic construct
  source 1..50: mol_type = other DNA
caataccttaacaacccttccccaacaaaaacatatcaaattcaaaatcc

SEQ ID NO: 3048 - DNA, 50 bp, synthetic construct
  source 1..50: mol_type = other DNA
aaaaattacacctaaaaaatttccctttcattattaatacaaatcaatac

SEQ ID NO: 3049 - DNA, 50 bp, synthetic construct
  source 1..50: mol_type = other DNA
cactaataacttcaatcaaacatattccattaacacctacccacacaaac

SEQ ID NO: 3050 - DNA, 50 bp, synthetic construct
  source 1..50: mol_type = other DNA
aatcatttaccttctaacaaattttcttccaaaacattacccttaaacac

SEQ ID NO: 3051 - DNA, 50 bp, synthetic construct
  source 1..50: mol_type = other DNA
taaattaacacaatacctacctacctaacattaacactctatcactacac

SEQ ID NO: 3052 - DNA, 50 bp, synthetic construct
  source 1..50: mol_type = other DNA
acraaaaaaatcacatatactttactcactcactacctatcaacatcatc

SEQ ID NO: 3053 - DNA, 50 bp, synthetic construct
  source 1..50: mol_type = other DNA
ataaatcaacttcctccaaattaatctactaaaaatctaaactccaacac

SEQ ID NO: 3054 - DNA, 50 bp, synthetic construct
  source 1..50: mol_type = other DNA
aaacttacaataaaattactaataaaaatttctaaccacttcacaaaacc

SEQ ID NO: 3055 - DNA, 50 bp, synthetic construct
  source 1..50: mol_type = other DNA
aaaatttttaccaataatcttactacaaatcctaaatcactaaaaaactc

SEQ ID NO: 3056 - DNA, 50 bp, synthetic construct
  source 1..50: mol_type = other DNA
ctacaaatcctaaatcactaaaaaactcrataaatataattaacatacac

SEQ ID NO: 3057 - DNA, 50 bp, synthetic construct
  source 1..50: mol_type = other DNA
taaataaaaaaacrtattattttaaacacatcataccaacttttaaattc

SEQ ID NO: 3058 - DNA, 50 bp, synthetic construct
  source 1..50: mol_type = other DNA
atcaacataactaatcactacatctatacctttattataaataaaaaaac

SEQ ID NO: 3059 - DNA, 50 bp, synthetic construct
  source 1..50: mol_type = other DNA
aataatcttcattccaaaatacctcttttccctcctaatctattcactac

SEQ ID NO: 3060 - DNA, 50 bp, synthetic construct
  source 1..50: mol_type = other DNA
ctcrctaccrccttacaatttaatctcaaactactatactaacaatcaac

SEQ ID NO: 3061 - DNA, 50 bp, synthetic construct
  source 1..50: mol_type = other DNA
ctcactaccrccttacaatttaatctcaaactactatactaacaatcaac

SEQ ID NO: 3062 - DNA, 50 bp, synthetic construct
  source 1..50: mol_type = other DNA
crccttacaatttaatctcaaactactatactaacaatcaacraaactcc

SEQ ID NO: 3063 - DNA, 50 bp, synthetic construct
  source 1..50: mol_type = other DNA
crccttacaatttaatctcaaactactatactaacaatcaacaaaactcc

SEQ ID NO: 3064 - DNA, 50 bp, synthetic construct
  source 1..50: mol_type = other DNA
caaactactatactaacaatcaacaaaactccrtaaacrtaaaaccctcc

SEQ ID NO: 3065 - DNA, 50 bp, synthetic construct
  source 1..50: mol_type = other DNA
atattataatccaaaaaaactactacacaatataaactttctaactaaac

SEQ ID NO: 3066 - DNA, 50 bp, synthetic construct
  source 1..50: mol_type = other DNA
aaaaaaactactacacaatataaactttctaactaaacrtaataactcac

SEQ ID NO: 3067 - DNA, 50 bp, synthetic construct
  source 1..50: mol_type = other DNA
aactaaaataataccactacaccccaacctaaacracaaaataaaatacc

SEQ ID NO: 3068 - DNA, 50 bp, synthetic construct
  source 1..50: mol_type = other DNA
craaaaaattacattaaactaaaataataccactacaccccaacctaaac

SEQ ID NO: 3069 - DNA, 50 bp, synthetic construct
  source 1..50: mol_type = other DNA
aaaaatactacaaacaaaaacaccttcaaattttcaaacacttaaacttc

SEQ ID NO: 3070 - DNA, 50 bp, synthetic construct
  source 1..50: mol_type = other DNA
acctcctcctccatctataataaaaaaaccaaaatacctacaacaaccac

SEQ ID NO: 3071 - DNA, 50 bp, synthetic construct
  source 1..50: mol_type = other DNA
acrcatttaataaacaacaactaataacccctataaatatataattatac

SEQ ID NO: 3072 - DNA, 50 bp, synthetic construct
  source 1..50: mol_type = other DNA
ccrcacaaccacacatccacaaaaaccattaactactatttaccaaatac

SEQ ID NO: 3073 - DNA, 50 bp, synthetic construct
  source 1..50: mol_type = other DNA
tttaccaaatacrtactttactctcacttaaaaccctaaaatacaatccc

SEQ ID NO: 3074 - DNA, 50 bp, synthetic construct
  source 1..50: mol_type = other DNA
aaaaatataatcctttaaaaacttccrtatcaatttaactataaaccctc

SEQ ID NO: 3075 - DNA, 50 bp, synthetic construct
  source 1..50: mol_type = other DNA
aactctttctaatttccttttccaataaataccctaaaatacttaactcc

SEQ ID NO: 3076 - DNA, 50 bp, synthetic construct
  source 1..50: mol_type = other DNA
ttaactaaaaacaaccaaattctcttttcaaaaacctaaaaacttaaaac

SEQ ID NO: 3077 - DNA, 50 bp, synthetic construct
  source 1..50: mol_type = other DNA
ctaaataacatatttacacatataatcctaaaactaacctttaaccattc

SEQ ID NO: 3078 - DNA, 50 bp, synthetic construct
  source 1..50: mol_type = other DNA
aacccaaacccttaactaaactaacaaacaaaatatctatatcactatac

SEQ ID NO: 3079 - DNA, 50 bp, synthetic construct
  source 1..50: mol_type = other DNA
actaaactaacaaacaaaatatctatatcactatacrttattcatccatc

SEQ ID NO: 3080 - DNA, 50 bp, synthetic construct
  source 1..50: mol_type = other DNA
atattttacttctcccctttcaacataaaaattttcattacaattttccc

SEQ ID NO: 3081 - DNA, 50 bp, synthetic construct
  source 1..50: mol_type = other DNA
ccacccccaataaccaattactaaataattaaaataataaaaaacccaac

SEQ ID NO: 3082 - DNA, 50 bp, synthetic construct
  source 1..50: mol_type = other DNA
acattcacacaactttatttacaacactaatataaaccttatctcaatcc

SEQ ID NO: 3083 - DNA, 50 bp, synthetic construct
  source 1..50: mol_type = other DNA
ctatcaaaacctaattttccctaataaaccttcrtcaaacaaataacctc

SEQ ID NO: 3084 - DNA, 50 bp, synthetic construct
  source 1..50: mol_type = other DNA
acaaaatacaaactaattaacaaaactattccaaatcctaaaaaacrcrc

SEQ ID NO: 3085 - DNA, 50 bp, synthetic construct
  source 1..50: mol_type = other DNA
aaacaaaatacaaactaattaacaaaactattccaaatcctaaaaaacrc

SEQ ID NO: 3086 - DNA, 50 bp, synthetic construct
  source 1..50: mol_type = other DNA
ataaacaaaatacaaactaattaacaaaactattccaaatcctaaaaaac

SEQ ID NO: 3087 - DNA, 50 bp, synthetic construct
  source 1..50: mol_type = other DNA
raaccrccttcrcccttaatattctaaaaacccattatctaattttactc

SEQ ID NO: 3088 - DNA, 50 bp, synthetic construct
  source 1..50: mol_type = other DNA
aacccraacaaaattaaacaataaactcccaaaacaccaaaaacraaaac

SEQ ID NO: 3089 - DNA, 50 bp, synthetic construct
  source 1..50: mol_type = other DNA
raacaaaattaaacaataaactcccaaaacaccaaaaacraaaacraccc

SEQ ID NO: 3090 - DNA, 50 bp, synthetic construct
  source 1..50: mol_type = other DNA
atcaattataccacttacctccccacattttaaatatccaaaacaaacac

SEQ ID NO: 3091 - DNA, 50 bp, synthetic construct
  source 1..50: mol_type = other DNA
tatccctaactacaataccaaatataacctttcctataacaacaaatcac

SEQ ID NO: 3092 - DNA, 50 bp, synthetic construct
  source 1..50: mol_type = other DNA
aaatttttctaacccatacctaaaaacatatcacctcacaatataacttc

SEQ ID NO: 3093 - DNA, 50 bp, synthetic construct
  source 1..50: mol_type = other DNA
aaaaaaaaatttcactatattaaccaaaataatctcratttcctaacctc

SEQ ID NO: 3094 - DNA, 50 bp, synthetic construct
  source 1..50: mol_type = other DNA
tatataattctaccaaatacttataaacaaatatacaacrcctattctac

SEQ ID NO: 3095 - DNA, 50 bp, synthetic construct
  source 1..50: mol_type = other DNA
craacacrattatacaaaaatctatctaaatccctactttccattctttc

SEQ ID NO: 3096 - DNA, 50 bp, synthetic construct
  source 1..50: mol_type = other DNA
actaaacrcatttttaccaaataaaatcacccaataactaaaaacaaacc

SEQ ID NO: 3097 - DNA, 50 bp, synthetic construct
  source 1..50: mol_type = other DNA
aaaaaataattactaactaacaacacttaaatatactactacaactaaac

SEQ ID NO: 3098 - DNA, 50 bp, synthetic construct
  source 1..50: mol_type = other DNA
atacttcctcaaaaaaaaacctacaaaaaaaattctatatattaacttac

SEQ ID NO: 3099 - DNA, 50 bp, synthetic construct
  source 1..50: mol_type = other DNA
aacaataactcaaactcaaaaattaacttacatttactaactaacaactc

SEQ ID NO: 3100 - DNA, 50 bp, synthetic construct
  source 1..50: mol_type = other DNA
ctaaccaacaaatataaattaactcttaaacttaaaccattactaacatc

SEQ ID NO: 3101 - DNA, 50 bp, synthetic construct
  source 1..50: mol_type = other DNA
taactacaatctaatccccctcaaacaaactactcttttattaaataaac

SEQ ID NO: 3102 - DNA, 50 bp, synthetic construct
  source 1..50: mol_type = other DNA
aatttataactttttacacaaatcctaataaaattctaactccaaaaaac

SEQ ID NO: 3103 - DNA, 50 bp, synthetic construct
  source 1..50: mol_type = other DNA
taactaaaaaaaactaatatcaaaacaacttccctcactatatacaaaac

SEQ ID NO: 3104 - DNA, 50 bp, synthetic construct
  source 1..50: mol_type = other DNA
attatctctttcatcatcttacattcctacttttcaaaataaaacaccac

SEQ ID NO: 3105 - DNA, 50 bp, synthetic construct
  source 1..50: mol_type = other DNA
aaaaaaccaaaataaccraataaaaacaactccratctacaactcccaac

SEQ ID NO: 3106 - DNA, 50 bp, synthetic construct; identical to SEQ ID NO: 3105
  source 1..50: mol_type = other DNA

SEQ ID NO: 3107 - DNA, 50 bp, synthetic construct
  source 1..50: mol_type = other DNA
attacataataaccacaaaaataaacacacttattttcaaaattcaaacc

SEQ ID NO: 3108 - DNA, 50 bp, synthetic construct
  source 1..50: mol_type = other DNA
tctaactaatcatactcacatctattttctaccaaccttttctaataccc

SEQ ID NO: 3109 - DNA, 50 bp, synthetic construct
  source 1..50: mol_type = other DNA
ttttatactatattttaaacttccctaatatcccactactaaatcccacc

SEQ ID NO: 3110 - DNA, 50 bp, synthetic construct
  source 1..50: mol_type = other DNA
caaaaatatttcctatttattcaacaacactatcaccacatataaaatac

SEQ ID NO: 3111 - DNA, 50 bp, synthetic construct
  source 1..50: mol_type = other DNA
aacataatcaaccctatctcraaattaaaaccacaacttctctaattaac

SEQ ID NO: 3112 - DNA, 50 bp, synthetic construct
  source 1..50: mol_type = other DNA
ccaaataatacaataaattaccataacaccaacataatcaaccctatctc

SEQ ID NO: 3113 - DNA, 50 bp, synthetic construct
  source 1..50: mol_type = other DNA
taaaactaattatactaatactataacaacctattacaccatttaataac

SEQ ID NO: 3114 - DNA, 50 bp, synthetic construct
  source 1..50: mol_type = other DNA
aatactataacaacctattacaccatttaataacrcctatatacttaacc

SEQ ID NO: 3115 - DNA, 50 bp, synthetic construct
  source 1..50: mol_type = other DNA
aaaaaaaactatttcctataattctctaaaatcataatacctaacttatc

SEQ ID NO: 3116 - DNA, 50 bp, synthetic construct
  source 1..50: mol_type = other DNA
actaaatcrcttaaaccaaacaatccaatctaaaaaacatacaaaacctc

SEQ ID NO: 3117 - DNA, 50 bp, synthetic construct
  source 1..50: mol_type = other DNA
atcataaataattcttaacattcacttattcttaaactttctacttatac

SEQ ID NO: 3118 - DNA, 50 bp, synthetic construct
  source 1..50: mol_type = other DNA
ttacataaccttaaaaaatttcctaaactaaatacaaccataaaaaattc

SEQ ID NO: 3119 - DNA, 50 bp, synthetic construct
  source 1..50: mol_type = other DNA
aaacacattttaacaaattcaattacttcacaatttaataaactataatc

SEQ ID NO: 3120 - DNA, 50 bp, synthetic construct
  source 1..50: mol_type = other DNA
tacaaataatcrtcatatacttttcatatttacacaaatctaaaaaaccc

SEQ ID NO: 3121 - DNA, 50 bp, synthetic construct
  source 1..50: mol_type = other DNA
attaaataaataattaaatttcctcacaccattcttaaatacaaataatc

SEQ ID NO: 3122 - DNA, 50 bp, synthetic construct
  source 1..50: mol_type = other DNA
ataaaatatcaatctacccctactaaaaatacctcccaattaaactactc

SEQ ID NO: 3123 - DNA, 50 bp, synthetic construct
  source 1..50: mol_type = other DNA
tcctcaataccataataatcatcaatcctactactactactaaataatac

SEQ ID NO: 3124 - DNA, 50 bp, synthetic construct
  source 1..50: mol_type = other DNA
actaattactactaaacatactaataaaaaatactaaaatcctaaataac

SEQ ID NO: 3125 - DNA, 50 bp, synthetic construct
  source 1..50: mol_type = other DNA
aattactactaaacatactaataaaaaatactaaaatcctaaataacrcc

SEQ ID NO: 3126 - DNA, 50 bp, synthetic construct
  source 1..50: mol_type = other DNA
acttccaactaaaaaataacctactttctaaatatatatcaaacaaattc

SEQ ID NO: 3127 - DNA, 50 bp, synthetic construct
  source 1..50: mol_type = other DNA
taaataaaaaacacactacctacatcaaaaacttattatcaatctctaac

SEQ ID NO: 3128 - DNA, 50 bp, synthetic construct
  source 1..50: mol_type = other DNA
aatataaattctaactcaaccacctttattaaatatataacctaaaccac

SEQ ID NO: 3129 - DNA, 50 bp, synthetic construct
  source 1..50: mol_type = other DNA
acctttattaaatatataacctaaaccacrttactcaactcctctaaaac

SEQ ID NO: 3130 - DNA, 50 bp, synthetic construct
  source 1..50: mol_type = other DNA
aaaacrtaatttcctcaactatcacttacaaataataatatctaccttac

SEQ ID NO: 3131 - DNA, 50 bp, synthetic construct
  source 1..50: mol_type = other DNA
attattactttttcctcatcttcattctcaaacacaattaaaaatatttc

SEQ ID NO: 3132 - DNA, 50 bp, synthetic construct
  source 1..50: mol_type = other DNA
attccatccaaatcactttaaacttattctcaaaatctaaaaacctaacc

SEQ ID NO: 3133 - DNA, 50 bp, synthetic construct
  source 1..50: mol_type = other DNA
tttaaacttattctcaaaatctaaaaacctaaccraatataataactcac

SEQ ID NO: 3134 - DNA, 50 bp, synthetic construct
  source 1..50: mol_type = other DNA
cttacaactatactatatcaaaaacccaacctaacatctacctaatatac

SEQ ID NO: 3135 - DNA, 50 bp, synthetic construct
  source 1..50: mol_type = other DNA
tatcaaaaacccaacctaacatctacctaatatacratcttaaacaaatc

SEQ ID NO: 3136 - DNA, 50 bp, synthetic construct
  source 1..50: mol_type = other DNA
taaaaataaattttataactctctaactctacaaaccatttacccaaacc

SEQ ID NO: 3137 - DNA, 50 bp, synthetic construct
  source 1..50: mol_type = other DNA
caacaactattctaccaaaaaactcttccccttaaaacataccactcatc

SEQ ID NO: 3138 - DNA, 50 bp, synthetic construct
  source 1..50: mol_type = other DNA
ctaccaaaaaactcttccccttaaaacataccactcatcrtatctctctc

SEQ ID NO: 3139 - DNA, 50 bp, synthetic construct
  source 1..50: mol_type = other DNA
rtaccatctttcatactcactaaatcaaaatctctaaaaataaaactcac

SEQ ID NO: 3140 - DNA, 50 bp, synthetic construct
  source 1..50: mol_type = other DNA
cccctacattcaaaaccttacacaaaaatcaacttctcctaaaaataacc

SEQ ID NO: 3141 - DNA, 50 bp, synthetic construct
  source 1..50: mol_type = other DNA
aacracaaactaattctttcttatatcatcratacaactcaaactttctc

SEQ ID NO: 3142 - DNA, 50 bp, synthetic construct
  source 1..50: mol_type = other DNA
ttccctttaataccttaaacaacracaaactaattctttcttatatcatc

SEQ ID NO: 3143 - DNA, 50 bp, synthetic construct
  source 1..50: mol_type = other DNA
caaatcaccaatatcctaacacactacttccctttaataccttaaacaac

SEQ ID NO: 3144 - DNA, 50 bp, synthetic construct
  source 1..50: mol_type = other DNA
taattttacatccrcrttttaaaatataaaaccatctcaaaaaatctacc

SEQ ID NO: 3145 - DNA, 50 bp, synthetic construct
  source 1..50: mol_type = other DNA
ccactttcccaaatatacaaacaacacaacctactctatccacataactc

SEQ ID NO: 3146 - DNA, 50 bp, synthetic construct
  source 1..50: mol_type = other DNA
accactaaaacctaaatcacaacaaataaaacttcaacaaaaaaaatatc

SEQ ID NO: 3147 - DNA, 50 bp, synthetic construct
  source 1..50: mol_type = other DNA
aaactactaaataaacaaacacccctacccctttaaaaaaattctcracc

SEQ ID NO: 3148 - DNA, 50 bp, synthetic construct
  source 1..50: mol_type = other DNA
tattaaacaaaactaacccatcacaaaaaacacctcrcaaataacttaac

SEQ ID NO: 3149 - DNA, 50 bp, synthetic construct
  source 1..50: mol_type = other DNA
aaaaaaaaaccctttatctacaccctaccctaaattaattttaaaatatc

SEQ ID NO: 3150 - DNA, 50 bp, synthetic construct
  source 1..50: mol_type = other DNA
taaactaactaactaaataccctaatcaaaaaccttatccttttctcccc

SEQ ID NO: 3151 - DNA, 50 bp, synthetic construct
  source 1..50: mol_type = other DNA
tcaacaaaacctcctaaactaaaaaaaaccrtactaaaatataacaacac

SEQ ID NO: 3152 - DNA, 50 bp, synthetic construct
  source 1..50: mol_type = other DNA
aaaaaaactataaatcactatcaacaaaacctcctaaactaaaaaaaacc

SEQ ID NO: 3153 - DNA, 50 bp, synthetic construct
  source 1..50: mol_type = other DNA
ctctataacaacctaaatttcttttccaaaacactaaattccctccattc

SEQ ID NO: 3154 - DNA, 50 bp, synthetic construct
  source 1..50: mol_type = other DNA
cttaaaaaccraactccttaactctatttacaacccttaataataccttc

SEQ ID NO: 3155 - DNA, 50 bp, synthetic construct
  source 1..50: mol_type = other DNA
cccaaactataaacctctactttccacrcaaaacaaaactcctaaacttc

SEQ ID NO: 3156 - DNA, 50 bp, synthetic construct
  source 1..50: mol_type = other DNA
aaaatcacctaaaaaacttattcaaacacraattactaaactccaaaccc

SEQ ID NO: 3157 - DNA, 50 bp, synthetic construct
  source 1..50: mol_type = other DNA
taattctcacacrtaaacrtcaaaatcacctaaaaaacttattcaaacac

SEQ ID NO: 3158 - DNA, 50 bp, synthetic construct
  source 1..50: mol_type = other DNA
tttaaaacccaacaatccrtatttaaacaaaccctccaaataattctaac

SEQ ID NO: 3159 - DNA, 50 bp, synthetic construct
  source 1..50: mol_type = other DNA
acaaacctaaacraatcractacaaaattactacccacttaaaatctatc

SEQ ID NO: 3160 - DNA, 50 bp, synthetic construct
  source 1..50: mol_type = other DNA
aaaaaatttccactaaaaaaaccaaacccaaaaacaaacctaaacraatc

SEQ ID NO: 3161 - DNA, 50 bp, synthetic construct
  source 1..50: mol_type = other DNA
rtaaaaaaaaatttccactaaaaaaaccaaacccaaaaacaaacctaaac

SEQ ID NO: 3162 - DNA, 50 bp, synthetic construct
  source 1..50: mol_type = other DNA
taatcactttccaacccaataactttcctaattcaccaaaaatccctttc

SEQ ID NO: 3163 - DNA, 50 bp, synthetic construct
  source 1..50: mol_type = other DNA
ctaataaaaacctccrttataatataacctacrcttaacaaaaacatccc

SEQ ID NO: 3164 - DNA, 50 bp, synthetic construct
  source 1..50: mol_type = other DNA
ttataatataacctacrcttaacaaaaacatcccrcattacaaaaaaaac

SEQ ID NO: 3165 - DNA, 50 bp, synthetic construct
  source 1..50: mol_type = other DNA
cccraaacacaactaaaactccacttcctctataaatcccraataaaaac

SEQ ID NO: 3166 - DNA, 50 bp, synthetic construct
  source 1..50: mol_type = other DNA
cttccattaaccacaaaacaaaaacttcccratcaaacaaaaatctcrac

SEQ ID NO: 3167 - DNA, 50 bp, synthetic construct
  source 1..50: mol_type = other DNA
cracttccattaaccacaaaacaaaaacttcccratcaaacaaaaatctc

SEQ ID NO: 3168 - DNA, 50 bp, synthetic construct
  source 1..50: mol_type = other DNA
ctatttaaccraaaaacctttaccctataactaataaaaaccraacaaac

SEQ ID NO: 3169 - DNA, 50 bp, synthetic construct
  source 1..50: mol_type = other DNA
ttttttacataaactcttcaaacacraaaaacaataaaacaactctacrc

SEQ ID NO: 3170 - DNA, 50 bp, synthetic construct
  source 1..50: mol_type = other DNA
atttttttacataaactcttcaaacacraaaaacaataaaacaactctac

SEQ ID NO: 3171 - DNA, 50 bp, synthetic construct
  source 1..50: mol_type = other DNA
taaatactaaaaaaatattaaaccccaccccctaaaattattaaaacatc

SEQ ID NO: 3172 - DNA, 50 bp, synthetic construct
  source 1..50: mol_type = other DNA
aaaaatattaaaccccaccccctaaaattattaaaacatcraaaaatcrc

SEQ ID NO: 3173 - DNA, 50 bp, synthetic construct
  source 1..50: mol_type = other DNA
taaaaatacatattaccacaaattaactcacracccttctactcacaacc

SEQ ID NO: 3174 - DNA, 50 bp, synthetic construct
  source 1..50: mol_type = other DNA
ctataaacaaaaaaatcrtaaaccaacctataataatatacacccctatc

SEQ ID NO: 3175 - DNA, 50 bp, synthetic construct
  source 1..50: mol_type = other DNA
cctaaaaaaacaaaactaaaccttcacttataaaaaacctcctctaccrc

SEQ ID NO: 3176 - DNA, 50 bp, synthetic construct
  source 1..50: mol_type = other DNA
cattttaacattcaacccaacaaaaaatctccaccaaaaccccraataac

SEQ ID NO: 3177 - DNA, 50 bp, synthetic construct
  source 1..50: mol_type = other DNA
ctcaaaacattttaacattcaacccaacaaaaaatctccaccaaaacccc

SEQ ID NO: 3178 - DNA, 50 bp, synthetic construct
  source 1..50: mol_type = other DNA
ctcaactaacctcaaacatattttcaactctacatttattttctaaattc

SEQ ID NO: 3179 - DNA, 50 bp, synthetic construct
  source 1..50: mol_type = other DNA
aactatacraaactaattccraacracaatatttaaaaccaacccaatac

SEQ ID NO: 3180 - DNA, 50 bp, synthetic construct
  source 1..50: mol_type = other DNA
taactaacatcctataccaattaccaatttattactctctaactccaaac

SEQ ID NO: 3181 - DNA, 50 bp, synthetic construct
  source 1..50: mol_type = other DNA
caattaccaatttattactctctaactccaaacrtttctcccttaccaac

SEQ ID NO: 3182 - DNA, 50 bp, synthetic construct
  source 1..50: mol_type = other DNA
crtttctcccttaccaacraacacaatattaaactatatcaataaaaaac

SEQ ID NO: 3183 - DNA, 50 bp, synthetic construct
  source 1..50: mol_type = other DNA
aaaaaaacttctcttacratttctttaaactttccttcctacttactttc

SEQ ID NO: 3184 - DNA, 50 bp, synthetic construct
  source 1..50: mol_type = other DNA
taaccrtaaaaatacctacraaaataccctaaaactaaactaaaaacccc

SEQ ID NO: 3185 - DNA, 50 bp, synthetic construct
  source 1..50: mol_type = other DNA
actaaaaaactaaataaaacacccacaaaactaaccrtaaaaatacctac

SEQ ID NO: 3186 - DNA, 50 bp, synthetic construct
  source 1..50: mol_type = other DNA
aacatcttcacractaattctataaatatcccacttaatttcccaataac

SEQ ID NO: 3187 - DNA, 50 bp, synthetic construct
  source 1..50: mol_type = other DNA
cractaattctataaatatcccacttaatttcccaataacraattcaacc

SEQ ID NO: 3188 - DNA, 50 bp, synthetic construct
  source 1..50: mol_type = other DNA
aattctataaatatcccacttaatttcccaataacraattcaaccrcacc

SEQ ID NO: 3189 - DNA, 50 bp, synthetic construct
  source 1..50: mol_type = other DNA
taaattcctaataaaaccracttaacccaaccaatttcctacraaatccc

SEQ ID NO: 3190 - DNA, 50 bp, synthetic construct
  source 1..50: mol_type = other DNA
cacctaaaactcacrcaaaacttactaaaaaactacccccraaaaaatac

SEQ ID NO: 3191 - DNA, 50 bp, synthetic construct
  source 1..50: mol_type = other DNA
ttactattaaaaaatacrctaaactcataacaaaaccacctaaaactcac

SEQ ID NO: 3192 - DNA, 50 bp, synthetic construct
  source 1..50: mol_type = other DNA
aaaaaaaatcttaacttaaaacacctcataacaaaatctacctaaattac

SEQ ID NO: 3193 - DNA, 50 bp, synthetic construct
  source 1..50: mol_type = other DNA
acaaataatataccctcaatactaacaacccatctaacatcccaaactcc

SEQ ID NO: 3194 - DNA, 50 bp, synthetic construct
  source 1..50: mol_type = other DNA
aacccccttaaccacaaaaactattaaataaacaaataactttcactctc

SEQ ID NO: 3195 - DNA, 50 bp, synthetic construct
  source 1..50: mol_type = other DNA
ctacaaattaaccaaatcctatataaacacactcacacccccaattcctc

SEQ ID NO: 3196 - DNA, 50 bp, synthetic construct
  source 1..50: mol_type = other DNA
ctatataaacacactcacacccccaattcctcraatctaataacttaccc

SEQ ID NO: 3197 - DNA, 50 bp, synthetic construct
  source 1..50: mol_type = other DNA
aacacrtcccatattatcaaccttactcctttccttattttaaaatttcc

SEQ ID NO: 3198 - DNA, 50 bp, synthetic construct
  source 1..50: mol_type = other DNA
ctaaataaactatccctacaaccaccttttaaatatccaatccttaaatc

SEQ ID NO: 3199 - DNA, 50 bp, synthetic construct
  source 1..50: mol_type = other DNA
ccaaatactaactactaacctaaaaataccaactaacattcaaaattcac

SEQ ID NO: 3200 - DNA, 50 bp, synthetic construct
  source 1..50: mol_type = other DNA
tctactcaatatcaaaataaaactacaactccaaaaaacaaatcaaaacc

SEQ ID NO: 3201 - DNA, 50 bp, synthetic construct
  source 1..50: mol_type = other DNA
ctactctctaaaactacaatttcattctaacactaaataaattacttccc

SEQ ID NO: 3202 - DNA, 50 bp, synthetic construct
  source 1..50: mol_type = other DNA
taaacttaacaactcaaaacaatatccccaactataaccctaaaaaacrc

SEQ ID NO: 3203 - DNA, 50 bp, synthetic construct
  source 1..50: mol_type = other DNA
ataaaactaccatctcctaaaaaaataaacatactatacataccaacttc

SEQ ID NO: 3204 - DNA, 50 bp, synthetic construct
  source 1..50: mol_type = other DNA
aaaaaataaacatactatacataccaacttcrcatactacataaaaaccc

SEQ ID NO: 3205 - DNA, 50 bp, synthetic construct
  source 1..50: mol_type = other DNA
acatacttacttattctcactaaacaaaacccrtaataactaacaaaacc

SEQ ID NO: 3206 - DNA, 50 bp, synthetic construct
  source 1..50: mol_type = other DNA
acctaaccctatccataaacatacttacttattctcactaaacaaaaccc

SEQ ID NO: 3207 - DNA, 50 bp, synthetic construct
  source 1..50: mol_type = other DNA
atccataaataaaaccaaatactccaattcctaaaatctcaacaaacacc

SEQ ID NO: 3208 - DNA, 50 bp, synthetic construct
  source 1..50: mol_type = other DNA
aaatatttcttcatccacaactaaaaccrctataaaaccaaaacctttcc

SEQ ID NO: 3209 - DNA, 50 bp, synthetic construct
  source 1..50: mol_type = other DNA
acctattcatttaacacaaaaaaaatatttcttcatccacaactaaaacc

SEQ ID NO: 3210 - DNA, 50 bp, synthetic construct
  source 1..50: mol_type = other DNA
tacttacaaaacactccctaatctaaataaatataactttaaactcaacc

SEQ ID NO: 3211 - DNA, 50 bp, synthetic construct
  source 1..50: mol_type = other DNA
atctaaataaatataactttaaactcaaccraacaaactaccaaataacc

SEQ ID NO: 3212 - DNA, 50 bp, synthetic construct
  source 1..50: mol_type = other DNA
aacrcaatacaaatataaaaaatttccctatttccaaaatactttcaacc

SEQ ID NO: 3213 - DNA, 50 bp, synthetic construct
  source 1..50: mol_type = other DNA
tcaaaaataatttaaaaaactacaaacctcaacttccccttacccaatcc

SEQ ID NO: 3214 - DNA, 50 bp, synthetic construct
  source 1..50: mol_type = other DNA
acaattaattcattcattctctcaataaacaataactcaacccatccccc

SEQ ID NO: 3215 - DNA, 50 bp, synthetic construct
  source 1..50: mol_type = other DNA
aaaaaataaaaactcraaaaaccaaaactaatatcactctctctccctcc

SEQ ID NO: 3216 - DNA, 50 bp, synthetic construct
  source 1..50: mol_type = other DNA
catctcrttctaataaaactcaatcaaatcrttaaactactcctccaacc

SEQ ID NO: 3217 - DNA, 50 bp, synthetic construct
  source 1..50: mol_type = other DNA
aactcctacttcaaattcrtcatctcrttctaataaaactcaatcaaatc

SEQ ID NO: 3218 - DNA, 50 bp, synthetic construct
  source 1..50: mol_type = other DNA
ctaaaaaaacaactcaacracctaactaaacttcatcaaaacraaataac

SEQ ID NO: 3219 - DNA, 50 bp, synthetic construct
  source 1..50: mol_type = other DNA
caacacatctaaaacctcccaaaattaccctaaccatacctaaatatccc

SEQ ID NO: 3220 - DNA, 50 bp, synthetic construct
  source 1..50: mol_type = other DNA
taaaattcttatcacrtaaaacataataaacacaaactaacctattaacc

SEQ ID NO: 3221 - DNA, 50 bp, synthetic construct
  source 1..50: mol_type = other DNA
tcttatcacrtaaaacataataaacacaaactaacctattaaccraaacc

SEQ ID NO: 3222 - DNA, 50 bp, synthetic construct
  source 1..50: mol_type = other DNA
taaaaaacataataacctctaccctataaacttacctctacacaatacac

SEQ ID NO: 3223 - DNA, 50 bp, synthetic construct
  source 1..50: mol_type = other DNA
aataaacatttccttacattttacttaaaacaaaacaacrtttctaacac

SEQ ID NO: 3224 - DNA, 50 bp, synthetic construct
  source 1..50: mol_type = other DNA
tctcttcctactttccatacrattatctacrctaaactcttaaaataaac

SEQ ID NO: 3225 - DNA, 50 bp, synthetic construct
  source 1..50: mol_type = other DNA
caaattcacaatccatacccctctactaataaaaaaaccataaatcaacc

SEQ ID NO: 3226 - DNA, 50 bp, synthetic construct
  source 1..50: mol_type = other DNA
acaaaaaaataaccaattaaaccrttaaactaaattccaaccaaaaaatc

SEQ ID NO: 3227 - DNA, 50 bp, synthetic construct
  source 1..50: mol_type = other DNA
aaaatctccrcctaaacaccttctcttaaaaactaactttacacacaacc

SEQ ID NO: 3228 - DNA, 50 bp, synthetic construct
  source 1..50: mol_type = other DNA
aacctttatactaaacrtttaaaacrtaaatatattcacccactaaaaac

SEQ ID NO: 3229 - DNA, 50 bp, synthetic construct
  source 1..50: mol_type = other DNA
ctaaaaaaacaaacattcaccatccrctctcaataaataaacatatctac

SEQ ID NO: 3230 - DNA, 50 bp, synthetic construct
  source 1..50: mol_type = other DNA
attaatactattttaaaaaccacctttccttctaaacctttatactaaac

SEQ ID NO: 3231 - DNA, 50 bp, synthetic construct
  source 1..50: mol_type = other DNA
aatcaccaacacraccatactatttcaaaaaactaaataataataaaaac

SEQ ID NO: 3232 - DNA, 50 bp, synthetic construct
  source 1..50: mol_type = other DNA
taaaaccccctaccaaaaacaattaaaaattataaaaatctacacactac

SEQ ID NO: 3233 - DNA, 50 bp, synthetic construct
  source 1..50: mol_type = other DNA
aatctacacactacrctactctattcaaactaacaataaacatctaattc

SEQ ID NO: 3234 - DNA, 50 bp, synthetic construct
  source 1..50: mol_type = other DNA
aactcccaaaacaaactattttccaaaaatacactacaattaacaatacc

SEQ ID NO: 3235 - DNA, 50 bp, synthetic construct
  source 1..50: mol_type = other DNA
ttacttccctcacaacacaaaaccctactcaaaactacacttatatcttc

SEQ ID NO: 3236 - DNA, 50 bp, synthetic construct
  source 1..50: mol_type = other DNA
tcctatttacaatttaaaatatcaaattccctctaattataataactcac

SEQ ID NO: 3237 - DNA, 50 bp, synthetic construct
  source 1..50: mol_type = other DNA
aaaataaaacaaaaatttatatcccactataaacaacccaaaaccaattc

SEQ ID NO: 3238 - DNA, 50 bp, synthetic construct
  source 1..50: mol_type = other DNA
taaacttccatataaacaaaaacacacattttcaatttttccattaatac

SEQ ID NO: 3239 - DNA, 50 bp, synthetic construct
  source 1..50: mol_type = other DNA
ataaaacatttctacctctaaaaaaataattaaatccaaaaaccacaccc

SEQ ID NO: 3240 - DNA, 50 bp, synthetic construct
  source 1..50: mol_type = other DNA
aatcaacraacaaaaacacaactcatcaaccctcataaacatctaactac

SEQ ID NO: 3241 - DNA, 50 bp, synthetic construct
  source 1..50: mol_type = other DNA
acacaactcatcaaccctcataaacatctaactacrtaaccaaaaaactc

SEQ ID NO: 3242 - DNA, 50 bp, synthetic construct
  source 1..50: mol_type = other DNA
aatcaacaaaaacaactaaaatcctctataaaacctcctaattaaatacc

SEQ ID NO: 3243 - DNA, 50 bp, synthetic construct
  source 1..50: mol_type = other DNA
atttattacaaacrtactataaacttaaatctccaacctttcaactatcc

SEQ ID NO: 3244 - DNA, 50 bp, synthetic construct
  source 1..50: mol_type = other DNA
aataatataattaccraatatttaatttacacrcctctcttaaatttccc

SEQ ID NO: 3245 - DNA, 50 bp, synthetic construct
  source 1..50: mol_type = other DNA
atactatctaaaaacctaaataatataattaccraatatttaatttacac

SEQ ID NO: 3246 - DNA, 50 bp, synthetic construct
  source 1..50: mol_type = other DNA
acataattcctaataaaataaacttatttatacctaacccatacttcttc

SEQ ID NO: 3247 - DNA, 50 bp, synthetic construct
  source 1..50: mol_type = other DNA
aacraaaaactttcatttactcccraaacaacaataaccatccatacatc

SEQ ID NO: 3248 - DNA, 50 bp, synthetic construct
  source 1..50: mol_type = other DNA
aaaaataaaaccaaattaaactacaatttaaaaccttcccraacactaac

SEQ ID NO: 3249 - DNA, 50 bp, synthetic construct
  source 1..50: mol_type = other DNA
aaacctaactttactaccatattcataaaatctaataactcataaacccc

SEQ ID NO: 3250 - DNA, 50 bp, synthetic construct
  source 1..50: mol_type = other DNA
ctccataaacataataacaaaaccaaacctctaaaaacaatttccctacc

SEQ ID NO: 3251 - DNA, 50 bp, synthetic construct
  source 1..50: mol_type = other DNA
ataactaaaacrtaaacaactacacacaccaaaactaaatcccaacacac

SEQ ID NO: 3252 - DNA, 50 bp, synthetic construct
  source 1..50: mol_type = other DNA
aaaatacacaaaaacctacaaacactatccaaatcatctatatatcttcc

SEQ ID NO: 3253 - DNA, 50 bp, synthetic construct
  source 1..50: mol_type = other DNA
aaaaaaaatcatactcacaaaaaaaatcttcactctactaaaaacatctc

SEQ ID NO: 3254 - DNA, 50 bp, synthetic construct
  source 1..50: mol_type = other DNA
tacaacaaaaataaaaacctcaactctttccctaaataacaaactaaccc

SEQ ID NO: 3255 - DNA, 50 bp, synthetic construct
  source 1..50: mol_type = other DNA
aataacaaactaacccraaattaatcacttcccttccccaacaacactac

SEQ ID NO: 3256 - DNA, 50 bp, synthetic construct
  source 1..50: mol_type = other DNA
catataaccctacatttactaaatataactttttttcaaatcattaacac

SEQ ID NO: 3257 - DNA, 50 bp, synthetic construct
  source 1..50: mol_type = other DNA
taaacaataactcattatattatatcaataacttcaataatatatccaac

SEQ ID NO: 3258 - DNA, 50 bp, synthetic construct
  source 1..50: mol_type = other DNA
atacttaaactcaaatctctccctcccattcatcttaaaccctaaattac

SEQ ID NO: 3259 - DNA, 50 bp, synthetic construct
  source 1..50: mol_type = other DNA
ataaaacatatatctcttcttattcaaccaaaacaaaatctatactaatc

SEQ ID NO: 3260 - DNA, 50 bp, synthetic construct
  source 1..50: mol_type = other DNA
ttcattaaaaacaccctttaaaaaaatcttaacactaacacaaaaaaaac

SEQ ID NO: 3261 - DNA, 50 bp, synthetic construct
  source 1..50: mol_type = other DNA
cctaaaacaaaaacaaaactccaaacrcctatcctaccaaaaacaaaacc

SEQ ID NO: 3262 - DNA, 50 bp, synthetic construct
  source 1..50: mol_type = other DNA
actccaaatcaaccaacttacctacctaaatacctacaaaatctttcccc

SEQ ID NO: 3263 - DNA, 50 bp, synthetic construct
  source 1..50: mol_type = other DNA
aaaaaactccttcttaaacaaaatctcrcccaatatcttacrtaattctc

SEQ ID NO: 3264 - DNA, 50 bp, synthetic construct
  source 1..50: mol_type = other DNA
ttctctaaaaaaaaactccttcttaaacaaaatctcrcccaatatcttac

SEQ ID NO: 3265 - DNA, 50 bp, synthetic construct
  source 1..50: mol_type = other DNA
attttacttcaaaataaaaattaactattatcaacttcaaaaaatcttcc

SEQ ID NO: 3266 - DNA, 50 bp, synthetic construct
  source 1..50: mol_type = other DNA
tataatatataaaaaatacaaactaacaatctacatactacttccaaaac

SEQ ID NO: 3267 - DNA, 50 bp, synthetic construct
  source 1..50: mol_type = other DNA
actttatacrcacattaaacaactataatccttcaaaattaactactctc

SEQ ID NO: 3268 - DNA, 50 bp, synthetic construct
  source 1..50: mol_type = other DNA
tcatacttctactttataccaaaaactaaaaccattaaccatttaatacc

SEQ ID NO: 3269 - DNA, 50 bp, synthetic construct
  source 1..50: mol_type = other DNA
aaacttactaaacrccccaaataaaaacttactctaaaatacacaaatac

SEQ ID NO: 3270 - DNA, 50 bp, synthetic construct
  source 1..50: mol_type = other DNA
taaaaacttactctaaaatacacaaatacrtaaaattattactaaaaccc

SEQ ID NO: 3271 - DNA, 50 bp, synthetic construct
  source 1..50: mol_type = other DNA
tctaaaatacacaaatacrtaaaattattactaaaacccrtactataccc

SEQ ID NO: 3272 - DNA, 50 bp, synthetic construct
  source 1..50: mol_type = other DNA
cccttaataccttaataaataaaatattcattaaaacttaaacaataccc

SEQ ID NO: 3273 - DNA, 50 bp, synthetic construct
  source 1..50: mol_type = other DNA
cttaataccttaataaataaaatattcattaaaacttaaacaatacccrc

SEQ ID NO: 3274 - DNA, 50 bp, synthetic construct
  source 1..50: mol_type = other DNA
acctaaactaaactaaacraacaaaaacctaaccaaatattactaaaaac

SEQ ID NO: 3275 - DNA, 50 bp, synthetic construct
  source 1..50: mol_type = other DNA
ctacctaccaacctttcaaataacaaacccactttcttaatttactattc

SEQ ID NO: 3276 - DNA, 50 bp, synthetic construct
  source 1..50: mol_type = other DNA
acttaacttttaccaaaccctataacaattcaaaacccccctctttaaac

SEQ ID NO: 3277 - DNA, 50 bp, synthetic construct
  source 1..50: mol_type = other DNA
atattacataaatacacacaaaacccaaacaacaccacaattaaaatacc

SEQ ID NO: 3278 - DNA, 50 bp, synthetic construct
  source 1..50: mol_type = other DNA
aacacaaacctaccacaaaaaccatacctaacttcttaaacattctaaac

SEQ ID NO: 3279 - DNA, 50 bp, synthetic construct
  source 1..50: mol_type = other DNA
caaccacataaaataacaacataaaaacataaacaccaaactataaaaac

SEQ ID NO: 3280 - DNA, 50 bp, synthetic construct
  source 1..50: mol_type = other DNA
ataaacaccaaactataaaaacrtaacaaatctacctacacaaaaataac

SEQ ID NO: 3281 - DNA, 50 bp, synthetic construct
  source 1..50: mol_type = other DNA
taaaacttacaatttaaccacaaaaaaactactacttaacaattttcccc

SEQ ID NO: 3282 - DNA, 50 bp, synthetic construct
  source 1..50: mol_type = other DNA
aaaaatttatattttacaattctaccttttaaatttacttaactacccac

SEQ ID NO: 3283 - DNA, 50 bp, synthetic construct
  source 1..50: mol_type = other DNA
caaaatatctacacaaaaaacctcaaacccttcctaattcctactccctc

SEQ ID NO: 3284 - DNA, 50 bp, synthetic construct
  source 1..50: mol_type = other DNA
aaaaataaaactaaacrcractaaaatcataaaaccraatatacacaacc

SEQ ID NO: 3285 - DNA, 50 bp, synthetic construct
  source 1..50: mol_type = other DNA
ccaaaaccataaaacttaccaataaaaaacaaaccaaaccacrtaaaacc

SEQ ID NO: 3286 - DNA, 50 bp, synthetic construct
  source 1..50: mol_type = other DNA
cacattacccaaaaccataaaacttaccaataaaaaacaaaccaaaccac

SEQ ID NO: 3287 - DNA, 50 bp, synthetic construct
  source 1..50: mol_type = other DNA
aaaatttcaaactcaaaacaaaaaacrattccaaaactcaaccaaacacc

SEQ ID NO: 3288 - DNA, 50 bp, synthetic construct
  source 1..50: mol_type = other DNA
atactacttctatttttcttctcatcratacctaactaaactctaaaatc

SEQ ID NO: 3289 - DNA, 50 bp, synthetic construct
  source 1..50: mol_type = other DNA
tctaaaatcrtttcctactctaaacctaaaacttcaaacaataaaaaaac

SEQ ID NO: 3290 - DNA, 50 bp, synthetic construct
  source 1..50: mol_type = other DNA
tcctactctaaacctaaaacttcaaacaataaaaaaacratccacaaccc

SEQ ID NO: 3291 - DNA, 50 bp, synthetic construct
  source 1..50: mol_type = other DNA
attcaaacaataataaataaaaccaattccctaaacaattttttcacttc

SEQ ID NO: 3292 - DNA, 50 bp, synthetic construct
  source 1..50: mol_type = other DNA
taaaatattcacatataataaattaataacaaactacccctaaataaaac

SEQ ID NO: 3293 - DNA, 50 bp, synthetic construct
  source 1..50: mol_type = other DNA
taacaattcaaaaactaaaatatttaatccctaaaacaaccttttccccc

SEQ ID NO: 3294 - DNA, 50 bp, synthetic construct
  source 1..50: mol_type = other DNA
attcaaaaactaaaatatttaatccctaaaacaaccttttcccccraccc

SEQ ID NO: 3295 - DNA, 50 bp, synthetic construct
  source 1..50: mol_type = other DNA
aaattacaaaaatcaataatacaatcttacaacaacctttacaatcratc

SEQ ID NO: 3296 - DNA, 50 bp, synthetic construct
  source 1..50: mol_type = other DNA
caaaaaattacaaaaatcaataatacaatcttacaacaacctttacaatc

SEQ ID NO: 3297 - DNA, 50 bp, synthetic construct
  source 1..50: mol_type = other DNA
cataacracaaacccaacattcttaatataaaattcatatttcataactc

SEQ ID NO: 3298 - DNA, 50 bp, synthetic construct
  source 1..50: mol_type = other DNA
aaataactatttataaattccttaactaacccaactactaaacaccaccc

SEQ ID NO: 3299 - DNA, 50 bp, synthetic construct
  source 1..50: mol_type = other DNA
atacrattcttatcaattctaataaccatctactattcctaattaaattc

SEQ ID NO: 3300 - DNA, 50 bp, synthetic construct
  source 1..50: mol_type = other DNA
ccctaatactatatcacaccataaaaattataataaaaccattaaaatac

SEQ ID NO: 3301 - DNA, 50 bp, synthetic construct
  source 1..50: mol_type = other DNA
tatacaactataatattaattaacaacaaaaatacaaataacatatcctc

SEQ ID NO: 3302 - DNA, 50 bp, synthetic construct
  source 1..50: mol_type = other DNA
acaaacattattaccttatcaacactaataaactaatcaacccaaattac

SEQ ID NO: 3303 - DNA, 50 bp, synthetic construct
  source 1..50: mol_type = other DNA
crtaccrcaataactcattaatcctctctaccaattatacctcaatatcc

SEQ ID NO: 3304 - DNA, 50 bp, synthetic construct
  source 1..50: mol_type = other DNA
attaatcctctctaccaattatacctcaatatccrctactatttcaattc

SEQ ID NO: 3305 - DNA, 50 bp, synthetic construct
  source 1..50: mol_type = other DNA
cctaatttactcttcaccaataataaaaaacttcttaactttaacaatac

SEQ ID NO: 3306 - DNA, 50 bp, synthetic construct
  source 1..50: mol_type = other DNA
ctacttcaccacataaaaaccaaacaccctacattaaaaaacaaaacttc

SEQ ID NO: 3307 - DNA, 50 bp, synthetic construct
  source 1..50: mol_type = other DNA
cacatttatctcaatcacaattttaataaacccacaaactaaccctaacc

SEQ ID NO: 3308 - DNA, 50 bp, synthetic construct
  source 1..50: mol_type = other DNA
aacaaactttcaatcaaaatccracacttattttaatccactcataaccc

SEQ ID NO: 3309 - DNA, 50 bp, synthetic construct
  source 1..50: mol_type = other DNA
ctcatttttctaatctctatcctttaaaaactttttcctaaaactcaaac

SEQ ID NO: 3310 - DNA, 50 bp, synthetic construct
  source 1..50: mol_type = other DNA
tttatctacaactcrtcctactacatttcttaattccctaaccaaaaaac

SEQ ID NO: 3311 - DNA, 50 bp, synthetic construct
  source 1..50: mol_type = other DNA
acccatactaataccaacatactataccrccttactaataaaataaacac

SEQ ID NO: 3312 - DNA, 50 bp, synthetic construct
  source 1..50: mol_type = other DNA
caaatattttaacctctctaaacttcaattatctaaacaaacaaccaaac

SEQ ID NO: 3313 - DNA, 50 bp, synthetic construct
  source 1..50: mol_type = other DNA
taactctcaaatattccaaaaaatatttccaaatcttatctctacctccc

SEQ ID NO: 3314 - DNA, 50 bp, synthetic construct
  source 1..50: mol_type = other DNA
tatactataaaatcaaaataaaaaacttttccccccaatcattacccccc

SEQ ID NO: 3315 - DNA, 50 bp, synthetic construct
  source 1..50: mol_type = other DNA
tcacrctaaatacraataattctacacaaaaacrtactaaataatcaaac

SEQ ID NO: 3316 - DNA, 50 bp, synthetic construct
  source 1..50: mol_type = other DNA
ccraattcccaaaaaaatcacrctaaatacraataattctacacaaaaac

SEQ ID NO: 3317 - DNA, 50 bp, synthetic construct
  source 1..50: mol_type = other DNA
aaaattattatacctaccctatctacctcccraattcccaaaaaaatcac

SEQ ID NO: 3318 - DNA, 50 bp, synthetic construct
  source 1..50: mol_type = other DNA
crtaactcatctaacaaaaaaaattattatacctaccctatctacctccc

SEQ ID NO: 3319 - DNA, 50 bp, synthetic construct
  source 1..50: mol_type = other DNA
ccaactcttcraaactccrtaaccttaaacaaactccttaattttctatc

SEQ ID NO: 3320 - DNA, 50 bp, synthetic construct
  source 1..50: mol_type = other DNA
taatcctaattcaaaaccaaaaatacrcaaatccaactcttcraaactcc

SEQ ID NO: 3321 - DNA, 50 bp, synthetic construct
  source 1..50: mol_type = other DNA
aaaacacttaatcctaattcaaaaccaaaaatacrcaaatccaactcttc

SEQ ID NO: 3322 - DNA, 50 bp, synthetic construct
  source 1..50: mol_type = other DNA
ttaacaaactcccattaatctaaaatctaaactaaacactcaaacaaacc

SEQ ID NO: 3323 - DNA, 50 bp, synthetic construct
  source 1..50: mol_type = other DNA
aaaatatttccctaaaattcctatttcctatacctaaatccttccccctc

SEQ ID NO: 3324 - DNA, 50 bp, synthetic construct
  source 1..50: mol_type = other DNA
ttctaaaaaataaactaacaaactacccaaaccaaaacccctaaatcttc

SEQ ID NO: 3325 - DNA, 50 bp, synthetic construct
  source 1..50: mol_type = other DNA
atataactactcccctaaacaattactcctcaaacacaaataatacaatc

SEQ ID NO: 3326 - DNA, 50 bp, synthetic construct
  source 1..50: mol_type = other DNA
cataaactccrcaatctacccctaaataaaataatcttcatttaattacc

SEQ ID NO: 3327 - DNA, 50 bp, synthetic construct
  source 1..50: mol_type = other DNA
aaacctaaaaatactcctacccctaaaataataaaaaaaacataaactcc

SEQ ID NO: 3328 - DNA, 50 bp, synthetic construct
  source 1..50: mol_type = other DNA
rcttaaaacttcttctataactaaacaacractttaaactttctctacac

SEQ ID NO: 3329 - DNA, 50 bp, synthetic construct
  source 1..50: mol_type = other DNA
aaatttaacrccacatctaacrcttaaaacttcttctataactaaacaac

SEQ ID NO: 3330 - DNA, 50 bp, synthetic construct
  source 1..50: mol_type = other DNA
rtacaaaaaaaacctaaaaccrctattcaaccacaaaaaaaacctcaaac

SEQ ID NO: 3331 - DNA, 50 bp, synthetic construct
  source 1..50: mol_type = other DNA
aaatataatcttcaaatccaccctaccacaaaaccaacaccaaatttaac

SEQ ID NO: 3332 - DNA, 50 bp, synthetic construct
  source 1..50: mol_type = other DNA
tctacaaaaccaaaaaaacatcatctctaaaccaaatcattactcaccac

SEQ ID NO: 3333 - DNA, 50 bp, synthetic construct
  source 1..50: mol_type = other DNA
tttaattctacaaaaaatttaaaatatacttccattttcctaaaccaatc

SEQ ID NO: 3334 - DNA, 50 bp, synthetic construct
  source 1..50: mol_type = other DNA
caatcttcrtcrtaaaacaaataaccaaaacccaaacaaaatttccaaac

SEQ ID NO: 3335 - DNA, 50 bp, synthetic construct
  source 1..50: mol_type = other DNA
aaaaatttccaccaactaaaaacraaatcraccctttataaattccctcc

SEQ ID NO: 3336 - DNA, 50 bp, synthetic construct
  source 1..50: mol_type = other DNA
ttcttcccccaaaaaacrcaaaaactaactcaaaaaccattccaaaaacc

SEQ ID NO: 3337 - DNA, 50 bp, synthetic construct
  source 1..50: mol_type = other DNA
craaaaaaacactaacraccacaaactataatctacatactataaacacc

SEQ ID NO: 3338 - DNA, 50 bp, synthetic construct
  source 1..50: mol_type = other DNA
aacraccacaaactataatctacatactataaacaccraaaaaaataacc

SEQ ID NO: 3339 - DNA, 50 bp, synthetic construct
  source 1..50: mol_type = other DNA
craccacaaactataatctacatactataaacaccraaaaaaataaccrc

SEQ ID NO: 3340 - DNA, 50 bp, synthetic construct
  source 1..50: mol_type = other DNA
acaaactataatctacatactataaacaccraaaaaaataaccrcrattc

SEQ ID NO: 3341 - DNA, 50 bp, synthetic construct
  source 1..50: mol_type = other DNA
caatcatttccrattcctttttaaatcttaaataaatacacrtacccccc

SEQ ID NO: 3342 - DNA, 50 bp, synthetic construct
  source 1..50: mol_type = other DNA
raacraaaattcttatctatataatcaaaaacttcraccaactaaaaaac

SEQ ID NO: 3343 - DNA, 50 bp, synthetic construct
  source 1..50: mol_type = other DNA
actactataaaatataacrctacaactctaaaaaactacrtccaccctcc

SEQ ID NO: 3344 - DNA, 50 bp, synthetic construct
  source 1..50: mol_type = other DNA
ccaacrtaacrctaactctactacrcaaccttactactataaaatataac

SEQ ID NO: 3345 - DNA, 50 bp, synthetic construct
  source 1..50: mol_type = other DNA
aaaaaaaattaatccraacaaataacccaacrtaacrctaactctactac

SEQ ID NO: 3346 - DNA, 50 bp, synthetic construct
  source 1..50: mol_type = other DNA
aaatcacttctaaaaataataaccccttaacccaaatattttcctaactc

SEQ ID NO: 3347 - DNA, 50 bp, synthetic construct
  source 1..50: mol_type = other DNA
aaaacccttacrtaacacaaaacaataaactatacctatataaaaaattc

SEQ ID NO: 3348 - DNA, 50 bp, synthetic construct
  source 1..50: mol_type = other DNA
ccaacacacacraactctttatataaacataatctactatcttatattac

SEQ ID NO: 3349 - DNA, 50 bp, synthetic construct
  source 1..50: mol_type = other DNA
acccacctactacactaaaaaaatctaaaaaaaatacccctacaactcac

SEQ ID NO: 3350 - DNA, 50 bp, synthetic construct
  source 1..50: mol_type = other DNA
aaaacctactaaactacattcccaaaaaattaaacattcttaatcacaac

SEQ ID NO: 3351 - DNA, 50 bp, synthetic construct
  source 1..50: mol_type = other DNA
cratctaaaatctaaacraattccrcaaccttaaaataaatctaaaaccc

SEQ ID NO: 3352 - DNA, 50 bp, synthetic construct
  source 1..50: mol_type = other DNA
ctttattttcccatcacaatattacacaaatcctaccctactattccaac

SEQ ID NO: 3353 - DNA, 50 bp, synthetic construct
  source 1..50: mol_type = other DNA
ctttacaaacaatcaaaaatctttccactacaattattatctataactcc

SEQ ID NO: 3354 - DNA, 50 bp, synthetic construct
  source 1..50: mol_type = other DNA
actaccrctacaaaacaataatatctacaaaaaaaaccacaacaaacccc

SEQ ID NO: 3355 - DNA, 50 bp, synthetic construct
  source 1..50: mol_type = other DNA
taactcraaacctactataaccttttctacaaacatcactaccctacaac

SEQ ID NO: 3356 - DNA, 50 bp, synthetic construct
  source 1..50: mol_type = other DNA
tactataaccttttctacaaacatcactaccctacaacracaacattaac

SEQ ID NO: 3357 - DNA, 50 bp, synthetic construct
  source 1..50: mol_type = other DNA
aacaaacctaaaacaatactcctaaaaactaattcctctaacaaaaacac

SEQ ID NO: 3358 - DNA, 50 bp, synthetic construct
  source 1..50: mol_type = other DNA
aatttcactatattacccaaaataatctcratctcctaacctcrtaatcc

SEQ ID NO: 3359 - DNA, 50 bp, synthetic construct
  source 1..50: mol_type = other DNA
tcacccactaatctcrtctaaaacctaaatttaaataaatattcacttac

SEQ ID NO: 3360 - DNA, 50 bp, synthetic construct
  source 1..50: mol_type = other DNA
actatacttcccttaaaataaaaatcacaataaaactacacaaaaccatc

SEQ ID NO: 3361 - DNA, 50 bp, synthetic construct
  source 1..50: mol_type = other DNA
ctacatctaccaaatatcataaacaataaatcatccrctcaacaaaaaac

SEQ ID NO: 3362 - DNA, 50 bp, synthetic construct
  source 1..50: mol_type = other DNA
tacactaatacaaactacatctaccaaatatcataaacaataaatcatcc

SEQ ID NO: 3363 - DNA, 50 bp, synthetic construct
  source 1..50: mol_type = other DNA
aataataaatatacaccctccatacraataaatttcctaacatttttacc

SEQ ID NO: 3364 - DNA, 50 bp, synthetic construct
  source 1..50: mol_type = other DNA
acrtctccraaactcaattttctcatctataaaataaaaacaatatcaac

SEQ ID NO: 3365 - DNA, 50 bp, synthetic construct
  source 1..50: mol_type = other DNA
ccttctattaccctaaatccaacccataaataacaaaaactacaaaaaac

SEQ ID NO: 3366 - DNA, 50 bp, synthetic construct
  source 1..50: mol_type = other DNA
ctcaaaacacttaaattcttcttcttactaacctactaataaccttaaac

SEQ ID NO: 3367 - DNA, 50 bp, synthetic construct
  source 1..50: mol_type = other DNA
aacatactacctaaatattttctctcttttataacccactaaaccctacc

SEQ ID NO: 3368 - DNA, 50 bp, synthetic construct
  source 1..50: mol_type = other DNA
ctcaaaaaaccrattctttcctacataaaaccttctcaccaacaaaacac

SEQ ID NO: 3369 - DNA, 50 bp, synthetic construct
  source 1..50: mol_type = other DNA
attcacatactcattcacttattctttcattcattcaataaacatttctc

SEQ ID NO: 3370 - DNA, 50 bp, synthetic construct
  source 1..50: mol_type = other DNA
cactcttccttaattatacaatacacaacccrcctaccctaaacaataac

SEQ ID NO: 3371 - DNA, 50 bp, synthetic construct
  source 1..50: mol_type = other DNA
ataaaaatcrtaaaaatcacactcttccttaattatacaatacacaaccc

SEQ ID NO: 3372 - DNA, 50 bp, synthetic construct
  source 1..50: mol_type = other DNA
aatatttaaccttcccaaacctcaatttcttcaactaacaaataaaaatc

SEQ ID NO: 3373 - DNA, 50 bp, synthetic construct
  source 1..50: mol_type = other DNA
tccaaaactatatataatctatacatattaaacctaccccttataactac

SEQ ID NO: 3374 - DNA, 50 bp, synthetic construct
  source 1..50: mol_type = other DNA
aaaattactctactaaactcaccaataacttactaatattcaaatccaac

SEQ ID NO: 3375 - DNA, 50 bp, synthetic construct
  source 1..50: mol_type = other DNA
craaaaaaaaatttcacaacactaacaaaaataactccaatacctaaaac

SEQ ID NO: 3376 - DNA, 50 bp, synthetic construct
  source 1..50: mol_type = other DNA
tacccttactcctaacaaactaattactaaaaaaatctaatataccaccc

SEQ ID NO: 3377 - DNA, 50 bp, synthetic construct
  source 1..50: mol_type = other DNA
attatctcatttaacactcaaaacaatcctctataataaatattttcatc

SEQ ID NO: 3378 - DNA, 50 bp, synthetic construct
  source 1..50: mol_type = other DNA
ttctaataacctaaatttaaatcctaactctaccacttattatataaatc

SEQ ID NO: 3379 - DNA, 50 bp, synthetic construct
  source 1..50: mol_type = other DNA
ctaaaaacrcttaaacaatcatttaccccatttaaaaaaaactaacctac

SEQ ID NO: 3380 - DNA, 50 bp, synthetic construct
  source 1..50: mol_type = other DNA
ttcaccttcttcactaactccaaaatatacacrtaaacctacctaaaaac

SEQ ID NO: 3381 - DNA, 50 bp, synthetic construct
  source 1..50: mol_type = other DNA
tacaaacaaacaacttacatctaaaatcttctataatccraaaaaaaaac

SEQ ID NO: 3382 - DNA, 50 bp, synthetic construct
  source 1..50: mol_type = other DNA
tctaacaataaaaataattcatatacaaatacaacctaccccrcaatcac

SEQ ID NO: 3383 - DNA, 50 bp, synthetic construct
  source 1..50: mol_type = other DNA
aatacaattaaaatatttcttccctaactccttctctaaaaacrtaactc

SEQ ID NO: 3384 - DNA, 50 bp, synthetic construct
  source 1..50: mol_type = other DNA
aaaaaaaaatacaattaaaatatttcttccctaactccttctctaaaaac

SEQ ID NO: 3385 - DNA, 50 bp, synthetic construct
  source 1..50: mol_type = other DNA
tacaccctccatcctactacctaaaaactaatctctataaatatctcacc

SEQ ID NO: 3386 - DNA, 50 bp, synthetic construct
  source 1..50: mol_type = other DNA
atcttaaaaacttaaatacctaaatcrtaataaactaaaactaaataccc

SEQ ID NO: 3387 - DNA, 50 bp, synthetic construct
  source 1..50: mol_type = other DNA
acataaaaaaacaactaaaatatatcraacactcaactccaactcaccac

SEQ ID NO: 3388 - DNA, 50 bp, synthetic construct
  source 1..50: mol_type = other DNA
ctaaaacaccattaaatcacctctatttaaaatacttattccctaatacc

SEQ ID NO: 3389 - DNA, 50 bp, synthetic construct
  source 1..50: mol_type = other DNA
aaacrcrtcaaattataaataaccctatctcctttatttaatatactctc

SEQ ID NO: 3390 - DNA, 50 bp, synthetic construct
  source 1..50: mol_type = other DNA
aaaaaatcctattccaaccaataaaaactaaacacaacaataaaataaac

SEQ ID NO: 3391 - DNA, 50 bp, synthetic construct
  source 1..50: mol_type = other DNA
aaacctttacacctcttaaaaacaaaaatccccaaaacctatccaatttc

SEQ ID NO: 3392 - DNA, 50 bp, synthetic construct
  source 1..50: mol_type = other DNA
taatatataaccaaaacaatctcctctacaaaaaaactaatatcaatttc

SEQ ID NO: 3393 - DNA, 50 bp, synthetic construct
  source 1..50: mol_type = other DNA
aaaacctatactttacaaataaacctaacaaccactaattaactaaaaac

SEQ ID NO: 3394 - DNA, 50 bp, synthetic construct
  source 1..50: mol_type = other DNA
ctaacctaaattttaactccaaaaaccaaaacttcttatctctatccccc

SEQ ID NO: 3395 - DNA, 50 bp, synthetic construct
  source 1..50: mol_type = other DNA
ctaaatcaaactccctaaacaaaaattctcaaaatttatcaacaaaacac

SEQ ID NO: 3396 - DNA, 50 bp, synthetic construct
  source 1..50: mol_type = other DNA
atctaacccaacccaactataaaatttatactaaaacrattatttattcc

SEQ ID NO: 3397 - DNA, 50 bp, synthetic construct
  source 1..50: mol_type = other DNA
aacrttcttaaaacaaaaacaaattctaactcaaaccraaataaacaacc

SEQ ID NO: 3398 - DNA, 50 bp, synthetic construct
  source 1..50: mol_type = other DNA
ataaacaaccrtcctaatataaaccctacaactaaactaaaccaaaccac

SEQ ID NO: 3399 - DNA, 50 bp, synthetic construct
  source 1..50: mol_type = other DNA
ccctacaactaaactaaaccaaaccacraaacataaactaataataaaac

SEQ ID NO: 3400 - DNA, 50 bp, synthetic construct
  source 1..50: mol_type = other DNA
caatatccctaaaccactcaaaactatctaaatatcaaccctacrccatc

SEQ ID NO: 3401 - DNA, 50 bp, synthetic construct
  source 1..50: mol_type = other DNA
acacaatacctaccccataactaatattcaataaatattactctaccttc

SEQ ID NO: 3402 - DNA, 50 bp, synthetic construct
  source 1..50: mol_type = other DNA
ctaccctttcaatcaactccccaaacctactaaaactcaaaaatcttatc

SEQ ID NO: 3403 - DNA, 50 bp, synthetic construct
  source 1..50: mol_type = other DNA
caaatttatattaaaccacattcaaaactatcctaaaccacatacaaccc

SEQ ID NO: 3404 - DNA, 50 bp, synthetic construct
  source 1..50: mol_type = other DNA
aacctaaaaacaacaaatttccraaacctaaacacatatctattctcctc

SEQ ID NO: 3405 - DNA, 50 bp, synthetic construct
  source 1..50: mol_type = other DNA
aactctataactaaacaaaataaatcctatcaatcctcaccctacraatc

SEQ ID NO: 3406 - DNA, 50 bp, synthetic construct
  source 1..50: mol_type = other DNA
tattcaactctataactaaacaaaataaatcctatcaatcctcaccctac

SEQ ID NO: 3407 - DNA, 50 bp, synthetic construct
  source 1..50: mol_type = other DNA
aacaccaacaaaaacccraaataaaataaacrataccaaaaacaactacc

SEQ ID NO: 3408 - DNA, 50 bp, synthetic construct
  source 1..50: mol_type = other DNA
aataacaaataataactatctacaccctaaactacaaaaaaaataacccc

SEQ ID NO: 3409 - DNA, 50 bp, synthetic construct
  source 1..50: mol_type = other DNA
cctatcccaactattctttcttaccatacttcaaaaaaatctaatctacc

SEQ ID NO: 3410 - DNA, 50 bp, synthetic construct
  source 1..50: mol_type = other DNA
accrtaaaaacaacaaccacaactataaaaactaaaccaaataccacctc

SEQ ID NO: 3411 - DNA, 50 bp, synthetic construct
  source 1..50: mol_type = other DNA
caccttttatacaaaaaatacatccctatcttccraactaaaaaaaaacc

SEQ ID NO: 3412 - DNA, 50 bp, synthetic construct
  source 1..50: mol_type = other DNA
atccaataataaaatttttaactatacraattacracccccttttaatcc

SEQ ID NO: 3413 - DNA, 50 bp, synthetic construct
  source 1..50: mol_type = other DNA
accataactccraatcactacttctataaaactattaatctaaaactacc

SEQ ID NO: 3414 - DNA, 50 bp, synthetic construct
  source 1..50: mol_type = other DNA
atcccaaacrcctttacccaaattcattttcaatttaaaccaaaatcccc

SEQ ID NO: 3415 - DNA, 50 bp, synthetic construct
  source 1..50: mol_type = other DNA
ctcattatttacaacacatctctttaataaatccataacacactataaac

SEQ ID NO: 3416 - DNA, 50 bp, synthetic construct
  source 1..50: mol_type = other DNA
aacctctcaccttaaactattctcaataaataaaacaacrctccaccttc

SEQ ID NO: 3417 - DNA, 50 bp, synthetic construct
  source 1..50: mol_type = other DNA
atctataatttaacctctcaccttaaactattctcaataaataaaacaac

SEQ ID NO: 3418 - DNA, 50 bp, synthetic construct
  source 1..50: mol_type = other DNA
ctattttaaaaactttaaaactacatattcatctaaaaaccaatatattc

SEQ ID NO: 3419 - DNA, 50 bp, synthetic construct
  source 1..50: mol_type = other DNA
aaataaaaactaaaactcaaaaaactcatataacacaacaaatcaaaaac

SEQ ID NO: 3420 - DNA, 50 bp, synthetic construct
  source 1..50: mol_type = other DNA
atcaaacccaataaactccattaaaataaaactcaaaacctactaatacc

SEQ ID NO: 3421 - DNA, 50 bp, synthetic construct
  source 1..50: mol_type = other DNA
aaataaaattattacttcttaaaaaacraaaaactctctaacctcatatc

SEQ ID NO: 3422 - DNA, 50 bp, synthetic construct
  source 1..50: mol_type = other DNA
atcaactcatcatccttaaccaaaaataaaattattacttcttaaaaaac

SEQ ID NO: 3423 - DNA, 50 bp, synthetic construct
  source 1..50: mol_type = other DNA
tctacaatacrataattactcacaaatacrattccactactaatcaaaac

SEQ ID NO: 3424 - DNA, 50 bp, synthetic construct
  source 1..50: mol_type = other DNA
ttctaacccacattcctttttctaaaatcattaaaaccaaatatatctcc

SEQ ID NO: 3425 - DNA, 50 bp, synthetic construct
  source 1..50: mol_type = other DNA
acaaaaatattcacrtacctaataataaacraaatattccacactctacc

SEQ ID NO: 3426 - DNA, 50 bp, synthetic construct
  source 1..50: mol_type = other DNA
aactcccaattaataaaactaatcacatatttctctacaaaaatattcac

SEQ ID NO: 3427 - DNA, 50 bp, synthetic construct
  source 1..50: mol_type = other DNA
aactctacraatactcraaaattccaaaacttcaataccaattatctacc

SEQ ID NO: 3428 - DNA, 50 bp, synthetic construct
  source 1..50: mol_type = other DNA
aaaaccttcactaatcracaaacaattaacactaaaattctaaaacctcc

SEQ ID NO: 3429 - DNA, 50 bp, synthetic construct
  source 1..50: mol_type = other DNA
cactaatcracaaacaattaacactaaaattctaaaacctccraacaccc

SEQ ID NO: 3430 - DNA, 50 bp, synthetic construct
  source 1..50: mol_type = other DNA
acctcccccaaaaacctaaaatctaaaataaataactctacctattcccc

SEQ ID NO: 3431 - DNA, 50 bp, synthetic construct
  source 1..50: mol_type = other DNA
tatataaaactaaaactattatctcactcttactaaatttccaccctcrc

SEQ ID NO: 3432 - DNA, 50 bp, synthetic construct
  source 1..50: mol_type = other DNA
tatatataaaactaaaactattatctcactcttactaaatttccaccctc

SEQ ID NO: 3433 - DNA, 50 bp, synthetic construct
  source 1..50: mol_type = other DNA
rataaaaaaataatttaaaccctacccttaccccatactctaaaatctcc

SEQ ID NO: 3434 - DNA, 50 bp, synthetic construct
  source 1..50: mol_type = other DNA
raaaacctcaaaacataaaataaaaacaaaatttaaaccaccttcccacc

SEQ ID NO: 3435 - DNA, 50 bp, synthetic construct
  source 1..50: mol_type = other DNA
tacctacaataaccacraaaactaaaaaaccaaataactataaacctcac

SEQ ID NO: 3436 - DNA, 50 bp, synthetic construct
  source 1..50: mol_type = other DNA
cacttacccttcacrtatcctaaaatcaaaactatacctacaataaccac

SEQ ID NO: 3437 - DNA, 50 bp, synthetic construct
  source 1..50: mol_type = other DNA
tcaattatccattcaaataaaataactataaacacccacttacccttcac

SEQ ID NO: 3438 - DNA, 50 bp, synthetic construct
  source 1..50: mol_type = other DNA
aaatacccaaactctaaaaatttaaataaaaaaaaccctttatcaataac

SEQ ID NO: 3439 - DNA, 50 bp, synthetic construct
  source 1..50: mol_type = other DNA
cttacaaacacttcctacataactatatacaacatacccattttacaacc

SEQ ID NO: 3440 - DNA, 50 bp, synthetic construct
  source 1..50: mol_type = other DNA
cctacataactatatacaacatacccattttacaaccraaaaacaaaaac

SEQ ID NO: 3441 - DNA, 50 bp, synthetic construct
  source 1..50: mol_type = other DNA
caaaaaatacaaaactaaaacaataccaacccacttccttccaaccraac

SEQ ID NO: 3442 - DNA, 50 bp, synthetic construct
  source 1..50: mol_type = other DNA
actctaatatttcttacttaaaaacaaaatcttccaactttatctaatac

SEQ ID NO: 3443 - DNA, 50 bp, synthetic construct
  source 1..50: mol_type = other DNA
aaattaaaaaaccctacctttaaataaaaaacatcaaaataatcttcccc

SEQ ID NO: 3444 - DNA, 50 bp, synthetic construct
  source 1..50: mol_type = other DNA
atataccaaatacaatactaaacacttttataaacataacataattaaac

SEQ ID NO: 3445 - DNA, 50 bp, synthetic construct
  source 1..50: mol_type = other DNA
taactaaaaaacctctcacatcccacaaactcaaataacttataatcctc

SEQ ID NO: 3446 - DNA, 50 bp, synthetic construct
  source 1..50: mol_type = other DNA
acaacttcaacaatataatacaacctcccraaaactaaaacaataacacc

SEQ ID NO: 3447 - DNA, 50 bp, synthetic construct
  source 1..50: mol_type = other DNA
ctatacctaataataataacaactaaaaaaacaataacacctaccaacac

SEQ ID NO: 3448 - DNA, 50 bp, synthetic construct
  source 1..50: mol_type = other DNA
caataacacctaccaacacractaataccaaatctacatcacaataaaac

SEQ ID NO: 3449 - DNA, 50 bp, synthetic construct
  source 1..50: mol_type = other DNA
atcacaataaaacrtctcctctctaaacatcaactacaattaaaaaccac

SEQ ID NO: 3450 - DNA, 50 bp, synthetic construct
  source 1..50: mol_type = other DNA
crtccataaacraatacctaatcactctaaaataaactaaaaaacctatc

SEQ ID NO: 3451 - DNA, 50 bp, synthetic construct
  source 1..50: mol_type = other DNA
cacaaacctaaaaatcatcttttcaaataccctctcctttacttataacc

SEQ ID NO: 3452 - DNA, 50 bp, synthetic construct
  source 1..50: mol_type = other DNA
actactaattccactttcaaaatatttctcaaatcttttcctatttctcc

SEQ ID NO: 3453 - DNA, 50 bp, synthetic construct
  source 1..50: mol_type = other DNA
ctccaaatccttattccctctcaaataaactactacaactcaattactac

SEQ ID NO: 3454 - DNA, 50 bp, synthetic construct
  source 1..50: mol_type = other DNA
taaaatacactaaatataaataactaccrctttatctacrcraaacctac

SEQ ID NO: 3455 - DNA, 50 bp, synthetic construct
  source 1..50: mol_type = other DNA
aataaattctaaaatacactaaatataaataactaccrctttatctacrc

SEQ ID NO: 3456 - DNA, 50 bp, synthetic construct
  source 1..50: mol_type = other DNA
taaataaattctaaaatacactaaatataaataactaccrctttatctac

SEQ ID NO: 3457 - DNA, 50 bp, synthetic construct
  source 1..50: mol_type = other DNA
rtccractaactaaataaattctaaaatacactaaatataaataactacc

SEQ ID NO: 3458 - DNA, 50 bp, synthetic construct
  source 1..50: mol_type = other DNA
aaacrataatcatccacatccaatacatcccaaaactcattcaaccaatc

SEQ ID NO: 3459 - DNA, 50 bp, synthetic construct
  source 1..50: mol_type = other DNA
caaaactcattcaaccaatcraacraaaaatacacaaacaaaataaaaac

SEQ ID NO: 3460 - DNA, 50 bp, synthetic construct
  source 1..50: mol_type = other DNA
cacaaacaaaataaaaacrtcctccaccraaaaatccctataaaaaaaac

SEQ ID NO: 3461 - DNA, 50 bp, synthetic construct
  source 1..50: mol_type = other DNA
caaccatctaaaaactccactaaaaccrattaatctcaattaccccactc

SEQ ID NO: 3462 - DNA, 50 bp, synthetic construct
  source 1..50: mol_type = other DNA
aatctaaaactctttaaaaactacaaccatctaaaaactccactaaaacc

SEQ ID NO: 3463 - DNA, 50 bp, synthetic construct
  source 1..50: mol_type = other DNA
aaaatatttactaaaatacttccctctacccacaaaaaaacacctttaac

SEQ ID NO: 3464 - DNA, 50 bp, synthetic construct
  source 1..50: mol_type = other DNA
ccacaaaaaaacacctttaacrcatatattctaatcaaaacaaaaactcc

SEQ ID NO: 3465 - DNA, 50 bp, synthetic construct
  source 1..50: mol_type = other DNA
acctttaacrcatatattctaatcaaaacaaaaactccrtaatttccacc

SEQ ID NO: 3466 - DNA, 50 bp, synthetic construct
  source 1..50: mol_type = other DNA
ccacaattttctcccttaaatatactccataaaaaataactttaataacc

SEQ ID NO: 3467 - DNA, 50 bp, synthetic construct
  source 1..50: mol_type = other DNA
aatactaaatactaaactactaaatctaaaataaaaatatccctatcccc

SEQ ID NO: 3468 - DNA, 50 bp, synthetic construct
  source 1..50: mol_type = other DNA
cctaacaaacaatactatctactctaataacaccctacctaaaaactacc

SEQ ID NO: 3469 - DNA, 50 bp, synthetic construct
  source 1..50: mol_type = other DNA
cacatccaacraactattatcatttctaccctaaactctaaaactactcc

SEQ ID NO: 3470 - DNA, 50 bp, synthetic construct
  source 1..50: mol_type = other DNA
ctattatcatttctaccctaaactctaaaactactccraataataccctc

SEQ ID NO: 3471 - DNA, 50 bp, synthetic construct
  source 1..50: mol_type = other DNA
taccaatccctaaacaaacaaaatctatctacrctaacccctataaactc

SEQ ID NO: 3472 - DNA, 50 bp, synthetic construct
  source 1..50: mol_type = other DNA
caaaatctatctacrctaacccctataaactcrtctttacctacttaaac

SEQ ID NO: 3473 - DNA, 50 bp, synthetic construct
  source 1..50: mol_type = other DNA
caaaactttccatacrctaatccaaatataccctacctaacctactatac

SEQ ID NO: 3474 - DNA, 50 bp, synthetic construct
  source 1..50: mol_type = other DNA
atacrctaatccaaatataccctacctaacctactatacrttatctacac

SEQ ID NO: 3475 - DNA, 50 bp, synthetic construct
  source 1..50: mol_type = other DNA
cacttacccttaaccttataataactctccrtcttcttaaacaacaatac

SEQ ID NO: 3476 - DNA, 50 bp, synthetic construct
  source 1..50: mol_type = other DNA
tcttcttaaacaacaatacracctaaatattaaacaaaacaccrccctac

SEQ ID NO: 3477 - DNA, 50 bp, synthetic construct
  source 1..50: mol_type = other DNA
caacaacttattaaactcctcrtcrttacraataaccaactacaaataac

SEQ ID NO: 3478 - DNA, 50 bp, synthetic construct
  source 1..50: mol_type = other DNA
cacttaaaactaatatacttaataacraccttaataccctcraacacrac

SEQ ID NO: 3479 - DNA, 50 bp, synthetic construct
  source 1..50: mol_type = other DNA
aaaaataaaaaccttcacaaatccaattacattatacaaaaaaatacaac

SEQ ID NO: 3480 - DNA, 50 bp, synthetic construct
  source 1..50: mol_type = other DNA
catttaaaccaataaccrcctctaaatcatttaactataataaaataaac

SEQ ID NO: 3481 - DNA, 50 bp, synthetic construct
  source 1..50: mol_type = other DNA
taaccccaaaacraaaccaatacatatcttttaaaccactcataaactcc

SEQ ID NO: 3482 - DNA, 50 bp, synthetic construct
  source 1..50: mol_type = other DNA
ataacttaaaaaacatacactaactccrccctaaaaccaaaaaaaccatc

SEQ ID NO: 3483 - DNA, 50 bp, synthetic construct
  source 1..50: mol_type = other DNA
aaaccaaaaaaaccatcrcctacttaataactacaaaactacctacctcc

SEQ ID NO: 3484 - DNA, 50 bp, synthetic construct
  source 1..50: mol_type = other DNA
ttaataactacaaaactacctacctccrtatactaccrtttttctatacc

SEQ ID NO: 3485 - DNA, 50 bp, synthetic construct
  source 1..50: mol_type = other DNA
catatcttatttttcaaaacattcctaaataaatttaccaatacaaaatc

SEQ ID NO: 3486 - DNA, 50 bp, synthetic construct
  source 1..50: mol_type = other DNA
aactaaaaaaaatctaatataatacactcccaaataatctaaaataatcc

SEQ ID NO: 3487 - DNA, 50 bp, synthetic construct
  source 1..50: mol_type = other DNA
atcacraaatcaaaaattcaataccaacctaaccaaaataataaaacccc

SEQ ID NO: 3488 - DNA, 50 bp, synthetic construct
  source 1..50: mol_type = other DNA
acraacttataaataataaaaaactcrcccaaataataaccaatcatctc

SEQ ID NO: 3489 - DNA, 50 bp, synthetic construct
  source 1..50: mol_type = other DNA
ccaactactaaacatatcctacraacaactaatacaactatacaatacrc

SEQ ID NO: 3490 - DNA, 50 bp, synthetic construct
  source 1..50: mol_type = other DNA
aaccaactactaaacatatcctacraacaactaatacaactatacaatac

SEQ ID NO: 3491 - DNA, 50 bp, synthetic construct
  source 1..50: mol_type = other DNA
aacttcaccattctcattttttacaattcaaaaatttcaaaataataaac

SEQ ID NO: 3492 - DNA, 50 bp, synthetic construct
  source 1..50: mol_type = other DNA
ttccatacattaaaataaattaaaaccctaaactctaacraaatatttcc

SEQ ID NO: 3493 - DNA, 50 bp, synthetic construct
  source 1..50: mol_type = other DNA
tataaaaaacatctttcctatactaattcaaataaaatactttaaattac

SEQ ID NO: 3494 - DNA, 50 bp, synthetic construct
  source 1..50: mol_type = other DNA
aacttaaatatttatctactaaaattactaaatacctccacaacaaaacc

SEQ ID NO: 3495 - DNA, 50 bp, synthetic construct
  source 1..50: mol_type = other DNA
cctaaactacaacaacttactctaaatatttttaccacaacccttatcac

SEQ ID NO: 3496 - DNA, 50 bp, synthetic construct
  source 1..50: mol_type = other DNA
acccaactacctaatttaaaatctcccaaaaaatttatttacttttatac

SEQ ID NO: 3497 - DNA, 50 bp, synthetic construct
  source 1..50: mol_type = other DNA
aaaacacactattctaacacaacttctaaaaaaccttctaaaaaaaactc

SEQ ID NO: 3498 - DNA, 50 bp, synthetic construct
  source 1..50: mol_type = other DNA
tccaaaaaactcttcaaaaactatattaaaacaatatatttctcataatc

SEQ ID NO: 3499 - DNA, 50 bp, synthetic construct
  source 1..50: mol_type = other DNA
ctaattcctaattatacaaaatttacctaaaacaaaataaccacaaaaac

SEQ ID NO: 3500 - DNA, 50 bp, synthetic construct
  source 1..50: mol_type = other DNA
aaataaaaccaaaaaccrtaataccttaaaaacccaaaaccataaatccc

SEQ ID NO: 3501 - DNA, 50 bp, synthetic construct
  source 1..50: mol_type = other DNA
ctttaaatcaactaaactctaataccaaacacaaaaataaacaaacactc

SEQ ID NO: 3502 - DNA, 50 bp, synthetic construct
  source 1..50: mol_type = other DNA
ttcttatcattaatctaattcctccaccrtaacaaaacttccataaaaac

SEQ ID NO: 3503 - DNA, 50 bp, synthetic construct
  source 1..50: mol_type = other DNA
aatctaattcctccaccrtaacaaaacttccataaaaacraaaatttttc

SEQ ID NO: 3504 - DNA, 50 bp, synthetic construct
  source 1..50: mol_type = other DNA
atctctattcraaaaaaaatttctattctatattttactcaattaccccc

SEQ ID NO: 3505 - DNA, 50 bp, synthetic construct
  source 1..50: mol_type = other DNA
actacactaactttcaaatccctccaacctaccatccttaaaattcttac

SEQ ID NO: 3506 - DNA, 50 bp, synthetic construct
  source 1..50: mol_type = other DNA
tccctccaacctaccatccttaaaattcttacraatattaaaataatctc

SEQ ID NO: 3507 - DNA, 50 bp, synthetic construct
  source 1..50: mol_type = other DNA
aacctaccatccttaaaattcttacraatattaaaataatctcrattctc

SEQ ID NO: 3508 - DNA, 50 bp, synthetic construct
  source 1..50: mol_type = other DNA
ttaccatataatccaataattccacttctaaaaatatactcaaaaaaatc

SEQ ID NO: 3509 - DNA, 50 bp, synthetic construct
  source 1..50: mol_type = other DNA
caaaacatcaataatctttactcaaaaacacractaacaaacaaataaac

SEQ ID NO: 3510 - DNA, 50 bp, synthetic construct
  source 1..50: mol_type = other DNA
aaaacacraaaataataaccccaatttctacacccatattacaaattatc

SEQ ID NO: 3511 - DNA, 50 bp, synthetic construct
  source 1..50: mol_type = other DNA
tcaccatattaaccaaaataatctaaatctcctaaccttataatcctccc

SEQ ID NO: 3512 - DNA, 50 bp, synthetic construct
  source 1..50: mol_type = other DNA
aattatccaacccctaacaaaaaactttcttaaataaacacctttaaaac

SEQ ID NO: 3513 - DNA, 50 bp, synthetic construct
  source 1..50: mol_type = other DNA
ttaaaacatcctaaattacataccataaccratctaaaaaaaatacttcc

SEQ ID NO: 3514 - DNA, 50 bp, synthetic construct
  source 1..50: mol_type = other DNA
aaaacctacaaaccaatacccaaaaaacctacaaaccaaatacaaaaacc

SEQ ID NO: 3515 - DNA, 50 bp, synthetic construct
  source 1..50: mol_type = other DNA
atatttatttataaccraatataacaaccatataataaatcacctcttcc

SEQ ID NO: 3516 - DNA, 50 bp, synthetic construct
  source 1..50: mol_type = other DNA
acaaaaacacaattacccaacrtaaaataaaaaacaaactaaaaactccc

SEQ ID NO: 3517 - DNA, 50 bp, synthetic construct
  source 1..50: mol_type = other DNA
aataaatttttccccrattctaaatactaccaataaaatacttcaatctc

SEQ ID NO: 3518 - DNA, 50 bp, synthetic construct
  source 1..50: mol_type = other DNA
atttcactcaactccraaactaaaacattttattaacaacatttaaaatc

SEQ ID NO: 3519 - DNA, 50 bp, synthetic construct
  source 1..50: mol_type = other DNA
ccaattacaaataaatactttattaccaaacacacaaaaaacaaaaccac

SEQ ID NO: 3520 - DNA, 50 bp, synthetic construct
  source 1..50: mol_type = other DNA
aaacacacaaaaaacaaaaccacrttttaacttaaccaaacaaaaacaac

SEQ ID NO: 3521 - DNA, 50 bp, synthetic construct
  source 1..50: mol_type = other DNA
attaccttcaaaaaaattaactaaaaccacccacraaaacaataaaatac

SEQ ID NO: 3522 - DNA, 50 bp, synthetic construct
  source 1..50: mol_type = other DNA
acraaaacaataaaatacraaacccraacaaatctcctataaacaaaaac

SEQ ID NO: 3523 - DNA, 50 bp, synthetic construct
  source 1..50: mol_type = other DNA
accaacctttactactactttattcccaaaccaaccaaaaataacaaccc

SEQ ID NO: 3524 - DNA, 50 bp, synthetic construct
  source 1..50: mol_type = other DNA
aaaactaatcttcatttcctacaccatctttattaaactcttccaccttc

SEQ ID NO: 3525 - DNA, 50 bp, synthetic construct
  source 1..50: mol_type = other DNA
tttataattaatacattaacaattatctcaacaatttaaacatatattcc

SEQ ID NO: 3526 - DNA, 50 bp, synthetic construct
  source 1..50: mol_type = other DNA
ttccaaaaacatcaaatcaaattaatccataacttcaaaactactttctc

SEQ ID NO: 3527 - DNA, 50 bp, synthetic construct
  source 1..50: mol_type = other DNA
aaatatcaaaatatcaataaaaaaaacacacaaacctcaacctctctccc

SEQ ID NO: 3528 - DNA, 50 bp, synthetic construct
  source 1..50: mol_type = other DNA
atcttacattcaaatctaatcatactataaaaaaaacrtatccraatacc

SEQ ID NO: 3529 - DNA, 50 bp, synthetic construct
  source 1..50: mol_type = other DNA
accttttatcttacattcaaatctaatcatactataaaaaaaacrtatcc

SEQ ID NO: 3530 - DNA, 50 bp, synthetic construct
  source 1..50: mol_type = other DNA
ttacctaccttttatcttacattcaaatctaatcatactataaaaaaaac

SEQ ID NO: 3531 - DNA, 50 bp, synthetic construct
  source 1..50: mol_type = other DNA
cactttataccttaacaatcttcaaaatattaccattaaattcctacccc

SEQ ID NO: 3532 - DNA, 50 bp, synthetic construct
  source 1..50: mol_type = other DNA
taaaaaactaaatacaaatactacaaatattctctaatttaccttatttc

SEQ ID NO: 3533 - DNA, 50 bp, synthetic construct
  source 1..50: mol_type = other DNA
ttaaaaccccacaaaacaataaaatttttcccctttctaattctaaattc

SEQ ID NO: 3534 - DNA, 50 bp, synthetic construct
  source 1..50: mol_type = other DNA
acttctcaaacctctaacaaaaacatcaaatataactatactaccacaac

SEQ ID NO: 3535 - DNA, 50 bp, synthetic construct
  source 1..50: mol_type = other DNA
aacaaaaacatcaaatataactatactaccacaacrccatctaataaaac

SEQ ID NO: 3536 - DNA, 50 bp, synthetic construct
  source 1..50: mol_type = other DNA
actaataaaactcctatttactaaatatttctactactaaactaaaaacc

SEQ ID NO: 3537 - DNA, 50 bp, synthetic construct
  source 1..50: mol_type = other DNA
cctatttactaaatatttctactactaaactaaaaaccrcttaaataacc

SEQ ID NO: 3538 - DNA, 50 bp, synthetic construct
  source 1..50: mol_type = other DNA
tttactaaatatttctactactaaactaaaaaccrcttaaataaccraac

SEQ ID NO: 3539 - DNA, 50 bp, synthetic construct
  source 1..50: mol_type = other DNA
ctaccaaattcaataaacaatattctttcctcatcraatttaatcttaac

SEQ ID NO: 3540 - DNA, 50 bp, synthetic construct
  source 1..50: mol_type = other DNA
taatctaaaatctcattaactaccataacctattcaaaaactaaaataac

SEQ ID NO: 3541 - DNA, 50 bp, synthetic construct
  source 1..50: mol_type = other DNA
actcaaaccatcaaataaaacctaaccctaaaaaacaatctaatctttcc

SEQ ID NO: 3542 - DNA, 50 bp, synthetic construct
  source 1..50: mol_type = other DNA
raacttccaaactactttatttacctaaacaaacctaaacaataacraac

SEQ ID NO: 3543 - DNA, 50 bp, synthetic construct
  source 1..50: mol_type = other DNA
rtctttaacaataataaacrtacttacraatccaaaaaaacccctctccc

SEQ ID NO: 3544 - DNA, 50 bp, synthetic construct
  source 1..50: mol_type = other DNA
aaaactctactctacacactaatatctcctacraaaaaacaactaaacac

SEQ ID NO: 3545 - DNA, 50 bp, synthetic construct
  source 1..50: mol_type = other DNA
caaaaattaaaccccttactcaaaatcrctcttaaaaactacccaaaacc

SEQ ID NO: 3546 - DNA, 50 bp, synthetic construct
  source 1..50: mol_type = other DNA
ataataataattaaccraatataataacacctactcataatcccaactcc

SEQ ID NO: 3547 - DNA, 50 bp, synthetic construct
  source 1..50: mol_type = other DNA
atcacccaacttaaaatacaataatttaatcactatctcactacaacctc

SEQ ID NO: 3548 - DNA, 50 bp, synthetic construct
  source 1..50: mol_type = other DNA
cattttccccraaacaaaaaacaccaaaattatacraaaatcaaaactcc

SEQ ID NO: 3549 - DNA, 50 bp, synthetic construct
  source 1..50: mol_type = other DNA
aaaatacaaattaatttctatatctaactaacaaatcraacataacctac

SEQ ID NO: 3550 - DNA, 50 bp, synthetic construct
  source 1..50: mol_type = other DNA
attaactataaaaattttcttacttataaaaacaaccrcaaaccatatcc

SEQ ID NO: 3551 - DNA, 50 bp, synthetic construct
  source 1..50: mol_type = other DNA
ttataaaaatataactaaacctataaacacacraacrccctcccrattac

SEQ ID NO: 3552 - DNA, 50 bp, synthetic construct
  source 1..50: mol_type = other DNA
tattcrtctttcccaactttataaaaatataactaaacctataaacacac

SEQ ID NO: 3553 - DNA, 50 bp, synthetic construct
  source 1..50: mol_type = other DNA
ctcrctaccrccttacaattaaatctcaaactactatattaacaataaac

SEQ ID NO: 3554 - DNA, 50 bp, synthetic construct
  source 1..50: mol_type = other DNA
caaactactatattaacaataaacraaactctataaatataaaaccctcc

SEQ ID NO: 3555 - DNA, 50 bp, synthetic construct
  source 1..50: mol_type = other DNA
atattaacaataaacraaactctataaatataaaaccctccraaccaaac

SEQ ID NO: 3556 - DNA, 50 bp, synthetic construct
  source 1..50: mol_type = other DNA
ctataacaaacracaactaaaaaatcraatcactcccaccataatactac

SEQ ID NO: 3557 - DNA, 50 bp, synthetic construct
  source 1..50: mol_type = other DNA
attccctttcataaccaaacaaaactataacaaacracaactaaaaaatc

SEQ ID NO: 3558 - DNA, 50 bp, synthetic construct
  source 1..50: mol_type = other DNA
aaaactcctacratctccctaactatttcttaaaactctacataaacctc

SEQ ID NO: 3559 - DNA, 50 bp, synthetic construct
  source 1..50: mol_type = other DNA
cctattaatactaaaacctaaacaccaaccaatataaaactatatattcc

SEQ ID NO: 3560 - DNA, 50 bp, synthetic construct
  source 1..50: mol_type = other DNA
aaataatatatacccrtcttcraaataaaatattactctaaaccaacccc

SEQ ID NO: 3561 - DNA, 50 bp, synthetic construct
  source 1..50: mol_type = other DNA
aaaacctaacaaaacraaactaactcaaaacaacactctactccraaaac

SEQ ID NO: 3562 - DNA, 50 bp, synthetic construct
  source 1..50: mol_type = other DNA
tactattaaaaaaaatatatcccccactcactctactctaacactttacc

SEQ ID NO: 3563 - DNA, 50 bp, synthetic construct
  source 1..50: mol_type = other DNA
ttattttaaaaaaatcccraatctataaaaccaactaataaaatcacctc

SEQ ID NO: 3564 - DNA, 50 bp, synthetic construct
  source 1..50: mol_type = other DNA
tcaactaatttcacaaacccraaactcttccaaaacaaccctcctaatac

SEQ ID NO: 3565 - DNA, 50 bp, synthetic construct
  source 1..50: mol_type = other DNA
aaacttaacaacrtacttactccctaaataacrttatatcctaaaaatac

SEQ ID NO: 3566 - DNA, 50 bp, synthetic construct
  source 1..50: mol_type = other DNA
caaataaaccataaaaaaaaacttaacaacrtacttactccctaaataac

SEQ ID NO: 3567 - DNA, 50 bp, synthetic construct
  source 1..50: mol_type = other DNA
caaacccaatccctctacaacaaataaaccataaaaaaaaacttaacaac

SEQ ID NO: 3568 - DNA, 50 bp, synthetic construct
  source 1..50: mol_type = other DNA
caaaacaaataaacctactataacctaatcaacactccaaaaaacttcac

SEQ ID NO: 3569 - DNA, 50 bp, synthetic construct
  source 1..50: mol_type = other DNA
taaaattatttccttaaactataattcctcttaaaccctacaaccctatc

SEQ ID NO: 3570 - DNA, 50 bp, synthetic construct
  source 1..50: mol_type = other DNA
accaaaaccttttcttcctcctccataacctaaataacraaattaaacac

SEQ ID NO: 3571 - DNA, 50 bp, synthetic construct
  source 1..50: mol_type = other DNA
actaaaactcttccctaaaaatataacttaactaaaacrtattcaacccc

SEQ ID NO: 3572 - DNA, 50 bp, synthetic construct
  source 1..50: mol_type = other DNA
tacaactcattcaaaaacatatacaacataacttaataatcracctcaac

SEQ ID NO: 3573 - DNA, 50 bp, synthetic construct
  source 1..50: mol_type = other DNA
aacraacattacaactcattcaaaaacatatacaacataacttaataatc

SEQ ID NO: 3574 - DNA, 50 bp, synthetic construct
  source 1..50: mol_type = other DNA
actatacatactcctaaataaactacaatatccrttcaaaaatttctccc

SEQ ID NO: 3575 - DNA, 50 bp, synthetic construct
  source 1..50: mol_type = other DNA
taaatttctaataatcttttccaaaaaatacaatcaaatatacatatctc

SEQ ID NO: 3576 - DNA, 50 bp, synthetic construct
  source 1..50: mol_type = other DNA
aaaacaaccattatcacataacattaataaaaacaaataatacatcatcc

SEQ ID NO: 3577 - DNA, 50 bp, synthetic construct
  source 1..50: mol_type = other DNA
tctttttttctataacttcaattaatttttaattaattactaactaactc

SEQ ID NO: 3578 - DNA, 50 bp, synthetic construct
  source 1..50: mol_type = other DNA
atataaaaaacaaccatataccactccccataaacccaaatacaaaatac

SEQ ID NO: 3579 - DNA, 50 bp, synthetic construct
  source 1..50: mol_type = other DNA
ctatatcccaaatcataaaaaactacaccctacaccctacatcccaaatc

SEQ ID NO: 3580 - DNA, 50 bp, synthetic construct
  source 1..50: mol_type = other DNA
atacaaaatacaactccccataacctaaaatacaaaatacaactacccac

SEQ ID NO: 3581 - DNA, 50 bp, synthetic construct
  source 1..50: mol_type = other DNA
aaaatacaaaatacaactacccacracctaaaacacaaaatacaaaatac

SEQ ID NO: 3582 - DNA, 50 bp, synthetic construct
  source 1..50: mol_type = other DNA
ctacrttccaaatcataaaaaactacatcctacactctacrtcccaaatc

SEQ ID NO: 3583 - DNA, 50 bp, synthetic construct
  source 1..50: mol_type = other DNA
ccacracctaaaatacaaaatacaaaatacaactacccacracctaaaac

SEQ ID NO: 3584 - DNA, 50 bp, synthetic construct
  source 1..50: mol_type = other DNA
ccacracctaaaacrcaaaatacaaaatacaactccccataacctaaaac

SEQ ID NO: 3585 - DNA, 50 bp, synthetic construct
  source 1..50: mol_type = other DNA
aaaatacaaaatacaactccccataacctaaaacrcaaaatacaaaatac

SEQ ID NO: 3586 - DNA, 50 bp, synthetic construct
  source 1..50: mol_type = other DNA
rattaaaccccaaacaaaaaatttctaattaacraaatcrtaaaaacacc

SEQ ID NO: 3587 - DNA, 50 bp, synthetic construct
  source 1..50: mol_type = other DNA
atatacatacrtataaacctacrtacctatatatacacrtatacttctac

SEQ ID NO: 3588 - DNA, 50 bp, synthetic construct
  source 1..50: mol_type = other DNA
ttacatcrtcatacatataattaaacttatatacatacrtataaacctac

SEQ ID NO: 3589 - DNA, 50 bp, synthetic construct
  source 1..50: mol_type = other DNA
tcatttctacrcttacatcrtcatacatataattaaacttatatacatac

SEQ ID NO: 3590 - DNA, 50 bp, synthetic construct
  source 1..50: mol_type = other DNA
aaatccacacrcatacacacaaatccaaccacatacataacratataaac

SEQ ID NO: 3591 - DNA, 50 bp, synthetic construct
  source 1..50: mol_type = other DNA
acacaaaataactactaatttactaatttacaaaaaattaaacccaatcc

SEQ ID NO: 3592 - DNA, 50 bp, synthetic construct
  source 1..50: mol_type = other DNA
aaatacaaaataacactacaaaataccracactacaaaaatctaacraac

SEQ ID NO: 3593 - DNA, 50 bp, synthetic construct
  source 1..50: mol_type = other DNA
taaaaaatacaaaataacactacaaaataccracactacaaaaatctaac

SEQ ID NO: 3594 - DNA, 50 bp, synthetic construct
  source 1..50: mol_type = other DNA
aaatcaatcaactaccctcrtttctatctaattaataccaaataataaac

SEQ ID NO: 3595 - DNA, 50 bp, synthetic construct
  source 1..50: mol_type = other DNA
ctaaaaacttaaatcaactctacctaaccttaactacttcaatacctacc

SEQ ID NO: 3596 - DNA, 50 bp, synthetic construct
  source 1..50: mol_type = other DNA
caactctacctaaccttaactacttcaatacctaccraatatataacttc

SEQ ID NO: 3597 - DNA, 50 bp, synthetic construct
  source 1..50: mol_type = other DNA
rtataactaaattaaacacaaacracccrccaaaatttaaaacaacaccc

SEQ ID NO: 3598 - DNA, 50 bp, synthetic construct
  source 1..50: mol_type = other DNA
acccaaaaatctaaaactaaccraaataaactaaaaaataaactcattac

SEQ ID NO: 3599 - DNA, 50 bp, synthetic construct
  source 1..50: mol_type = other DNA
tcccaaaacrcaaaaaacractaaactaacccaaaaatctaaaactaacc

SEQ ID NO: 3600 - DNA, 50 bp, synthetic construct
  source 1..50: mol_type = other DNA
aaaccacattttaaaatcaacctataacrtcatcaaaactaactataatc

SEQ ID NO: 3601 - DNA, 50 bp, synthetic construct
  source 1..50: mol_type = other DNA
acaaactataaaaaccaaaacacttccttaacaacatttaaaaaaacccc

SEQ ID NO: 3602 - DNA, 50 bp, synthetic construct
  source 1..50: mol_type = other DNA
aatactctaactttcacaatttacctaaaaccaataataaatcatcctac

SEQ ID NO: 3603 - DNA, 50 bp, synthetic construct
  source 1..50: mol_type = other DNA
ccatctcaaactctatttctaaaaaaactttcaaacaactaacactaaac

SEQ ID NO: 3604 - DNA, 50 bp, synthetic construct
  source 1..50: mol_type = other DNA
atacacacacacrcatttaaaatttttctttccaacaaaaaaaattctac

SEQ ID NO: 3605 - DNA, 50 bp, synthetic construct
  source 1..50: mol_type = other DNA
aaaatatacaactacctatacctctctatttaataataataccactcaac

SEQ ID NO: 3606 - DNA, 50 bp, synthetic construct
  source 1..50: mol_type = other DNA
aaacaaaacactaaatcctcattttaccrctcactaattactttaacttc

SEQ ID NO: 3607 - DNA, 50 bp, synthetic construct
  source 1..50: mol_type = other DNA
taaataacaaaaccaaaaatcacacctaaactatctacatcaaaacccrc

SEQ ID NO: 3608 - DNA, 50 bp, synthetic construct
  source 1..50: mol_type = other DNA
aataaataacaaaaccaaaaatcacacctaaactatctacatcaaaaccc

SEQ ID NO: 3609 - DNA, 50 bp, synthetic construct
  source 1..50: mol_type = other DNA
ataacccctaactctaccattcactaactttatatcctctaaaaaaccac

SEQ ID NO: 3610 - DNA, 50 bp, synthetic construct
  source 1..50: mol_type = other DNA
tcaaaacactcaatccacataaaatcattcaaaactcaaaataaccctcc

SEQ ID NO: 3611 - DNA, 50 bp, synthetic construct
  source 1..50: mol_type = other DNA
cacaaaaactaattcactctctctataaaactataaataactaaataacc

SEQ ID NO: 3612 - DNA, 50 bp, synthetic construct
  source 1..50: mol_type = other DNA
cataacaacactaaaaatcaaatacraatacacatcacaaaacacctcac

SEQ ID NO: 3613 - DNA, 50 bp, synthetic construct
  source 1..50: mol_type = other DNA
tttctacaattaaaaaattttctttatatactattcccaccataaaaaac

SEQ ID NO: 3614 - DNA, 50 bp, synthetic construct
  source 1..50: mol_type = other DNA
caattaaaaaattttctttatatactattcccaccataaaaaacraaaac

SEQ ID NO: 3615 - DNA, 50 bp, synthetic construct
  source 1..50: mol_type = other DNA
caaaaaattacccaatctaaacaaactttaccttttttcaaaaataaaac

SEQ ID NO: 3616 - DNA, 50 bp, synthetic construct
  source 1..50: mol_type = other DNA
aacttctataaccacatttctaaaatataattcaaaaccaaccatctaac

SEQ ID NO: 3617 - DNA, 50 bp, synthetic construct
  source 1..50: mol_type = other DNA
aacattcctttctattaattctaaatctttaaacaataacttaccttttc

SEQ ID NO: 3618 - DNA, 50 bp, synthetic construct
  source 1..50: mol_type = other DNA
aataaataaaaactacctaacacraaaccaacctacctaaccacttcttc

SEQ ID NO: 3619 - DNA, 50 bp, synthetic construct
  source 1..50: mol_type = other DNA
ccttctataacctacacttaatttctaaatctttttaatatatattactc

SEQ ID NO: 3620 - DNA, 50 bp, synthetic construct
  source 1..50: mol_type = other DNA
aaattacaaaacrtaaatcactatacctaaccttaatctatttactaaac

SEQ ID NO: 3621 - DNA, 50 bp, synthetic construct
  source 1..50: mol_type = other DNA
ttaacacacaacrctcaataaataaattaaaaccaaacacaataactcac

SEQ ID NO: 3622 - DNA, 50 bp, synthetic construct
  source 1..50: mol_type = other DNA
tttaaatcatttacaaaaacaaaatctcactatattaccaaactaatctc

SEQ ID NO: 3623 - DNA, 50 bp, synthetic construct
  source 1..50: mol_type = other DNA
taacaacataataaaactctatctctacaaataatttaaaaactaacaac

SEQ ID NO: 3624 - DNA, 50 bp, synthetic construct
  source 1..50: mol_type = other DNA
ttcatactaaacacctactaaacacctaacattatactaaaaaaacactc

SEQ ID NO: 3625 - DNA, 50 bp, synthetic construct
  source 1..50: mol_type = other DNA
cctaaatcatcattccatacattcacttccaaaaaaacacataaccracc

SEQ ID NO: 3626 - DNA, 50 bp, synthetic construct
  source 1..50: mol_type = other DNA
aatcatcattccatacattcacttccaaaaaaacacataaccraccraac

SEQ ID NO: 3627 - DNA, 50 bp, synthetic construct
  source 1..50: mol_type = other DNA
atcacraaatcaaaaaattaaaaccatcttaactaacacrataaaacccc

SEQ ID NO: 3628 - DNA, 50 bp, synthetic construct
  source 1..50: mol_type = other DNA
acccrctacactcaatctccaacaactatataactcattcaacaaaaatc

SEQ ID NO: 3629 - DNA, 50 bp, synthetic construct
  source 1..50: mol_type = other DNA
catcratctctactaaataaaccatataactattaaaaattaaatacaac

SEQ ID NO: 3630 - DNA, 50 bp, synthetic construct
  source 1..50: mol_type = other DNA
acacatacctacctaaatcaataaaacccatactataaacttccctacac

SEQ ID NO: 3631 - DNA, 50 bp, synthetic construct
  source 1..50: mol_type = other DNA
aacractacaacctacaaaaactaatcacrcaatctaaaaaaacaacaac

SEQ ID NO: 3632 - DNA, 50 bp, synthetic construct
  source 1..50: mol_type = other DNA
actacaacctacaaaaactaatcacrcaatctaaaaaaacaacaacrttc

SEQ ID NO: 3633 - DNA, 50 bp, synthetic construct
  source 1..50: mol_type = other DNA
taccactaaccctaacaaatatttcacaaacctacactatcttaccaacc

SEQ ID NO: 3634 - DNA, 50 bp, synthetic construct
  source 1..50: mol_type = other DNA
ctaacaaatatttcacaaacctacactatcttaccaaccractaacctcc

SEQ ID NO: 3635 - DNA, 50 bp, synthetic construct
  source 1..50: mol_type = other DNA
taaaaaatacaacctataaatttatcaatacaacaacctaataaaacttc

SEQ ID NO: 3636 - DNA, 50 bp, synthetic construct
  source 1..50: mol_type = other DNA
attcctcattacttacatctataatcttcaaaaccaataaactttttccc

SEQ ID NO: 3637 - DNA, 50 bp, synthetic construct
  source 1..50: mol_type = other DNA
tacacaaacatactctctacttaataatccraataatatattacrataac

SEQ ID NO: 3638 - DNA, 50 bp, synthetic construct
  source 1..50: mol_type = other DNA
atattttacacaaacatactctctacttaataatccraataatatattac

SEQ ID NO: 3639 - DNA, 50 bp, synthetic construct
  source 1..50: mol_type = other DNA
ctaacttctacaaaatattttacacaaacatactctctacttaataatcc

SEQ ID NO: 3640 - DNA, 50 bp, synthetic construct
  source 1..50: mol_type = other DNA
aaaaaaatatatcatcaaaactaacaaacatttaaaaatcctaatctctc

SEQ ID NO: 3641 - DNA, 50 bp, synthetic construct
  source 1..50: mol_type = other DNA
caatttaaatcactacactcctaacttactaaaatctaaaaacattaccc

SEQ ID NO: 3642 - DNA, 50 bp, synthetic construct
  source 1..50: mol_type = other DNA
aaccaaaaatacaataatctaaactaactatcccaatatctatacccacc

SEQ ID NO: 3643 - DNA, 50 bp, synthetic construct
  source 1..50: mol_type = other DNA
tactttctttacctctttaccaattatttccatcaaccataattttatcc

SEQ ID NO: 3644 - DNA, 50 bp, synthetic construct
  source 1..50: mol_type = other DNA
tctttacctctttaccaattatttccatcaaccataattttatccraatc

SEQ ID NO: 3645 - DNA, 50 bp, synthetic construct
  source 1..50: mol_type = other DNA
tttaccaattatttccatcaaccataattttatccraatcrcctatcatc

SEQ ID NO: 3646 - DNA, 50 bp, synthetic construct
  source 1..50: mol_type = other DNA
aacactcctaaatataatactaatatttcaattttaaaaacttatcctac

SEQ ID NO: 3647 - DNA, 50 bp, synthetic construct
  source 1..50: mol_type = other DNA
tctcactaataaaaataaatcacaacaaccacctactccacccaacaatc

SEQ ID NO: 3648 - DNA, 50 bp, synthetic construct
  source 1..50: mol_type = other DNA
ttccttactattacacacctatacttaaacactaatattaaaataaattc

SEQ ID NO: 3649 - DNA, 50 bp, synthetic construct
  source 1..50: mol_type = other DNA
accaaaacattatattcttcaaatacaactatatccttttcacatttccc

SEQ ID NO: 3650 - DNA, 50 bp, synthetic construct
  source 1..50: mol_type = other DNA
acttaatcacctaccaaacctaattcctcrtttcaaataaataaaacacc

SEQ ID NO: 3651 - DNA, 50 bp, synthetic construct
  source 1..50: mol_type = other DNA
attttcctacctatactttttcacaaaaactatcaaaaacctaaaattcc

SEQ ID NO: 3652 - DNA, 50 bp, synthetic construct
  source 1..50: mol_type = other DNA
aaacaaaaaaaccactatatactccaaaattcttcraaaataaattcatc

SEQ ID NO: 3653 - DNA, 50 bp, synthetic construct
  source 1..50: mol_type = other DNA
aattcatcrctaaccaaaatttcaaatacaaaatcattctcttaattaac

SEQ ID NO: 3654 - DNA, 50 bp, synthetic construct
  source 1..50: mol_type = other DNA
taaacaaaactttaaactaaaaaacacttttattaatcaattactataac

SEQ ID NO: 3655 - DNA, 50 bp, synthetic construct
  source 1..50: mol_type = other DNA
ataactcaaattaaattaccacrataacaaaaaataaatataccaaaacc

SEQ ID NO: 3656 - DNA, 50 bp, synthetic construct
  source 1..50: mol_type = other DNA
acrtattactatctcttctatccccatccttactctataacraaaaaatc

SEQ ID NO: 3657 - DNA, 50 bp, synthetic construct
  source 1..50: mol_type = other DNA
ctcraaatcctaactataaaaatacactatactacttctcacaactatcc

SEQ ID NO: 3658 - DNA, 50 bp, synthetic construct
  source 1..50: mol_type = other DNA
catcttcacaaccaaaaccccraaaaaattattataacacacccaaaaac

SEQ ID NO: 3659 - DNA, 50 bp, synthetic construct
  source 1..50: mol_type = other DNA
cccaaacactcaaaaaaaacaaacctctaacaataactaaacaaattccc

SEQ ID NO: 3660 - DNA, 50 bp, synthetic construct
  source 1..50: mol_type = other DNA
ttaataattaataatcaccacccatatatcataatccctaaacatccccc

SEQ ID NO: 3661 - DNA, 50 bp, synthetic construct
  source 1..50: mol_type = other DNA
caacaaaaccraaacataaaaacacraaaatcaacctaaactccctaacc

SEQ ID NO: 3662 - DNA, 50 bp, synthetic construct
  source 1..50: mol_type = other DNA
taatttccaattctcttaaaatatcaatacctttaatcctctaaaccccc

SEQ ID NO: 3663 - DNA, 50 bp, synthetic construct
  source 1..50: mol_type = other DNA
cccraaaaaactcaaccctctcacatctaccttcctcctaaaaatataac

SEQ ID NO: 3664 - DNA, 50 bp, synthetic construct
  source 1..50: mol_type = other DNA
ctctccrttacctatactcaaaaccaaaaactctactatttataaacccc

SEQ ID NO: 3665 - DNA, 50 bp, synthetic construct
  source 1..50: mol_type = other DNA
ctaataactttcaaataaaaactaaactcatccttaaccaacaaaactcc

SEQ ID NO: 3666 - DNA, 50 bp, synthetic construct
  source 1..50: mol_type = other DNA
atctctcaaatctctactcccataacccaacctcaaaaaactaaaaatac

SEQ ID NO: 3667 - DNA, 50 bp, synthetic construct
  source 1..50: mol_type = other DNA
aaacraactataacccaaaacaaatttaaaactatactttataactcaac

SEQ ID NO: 3668 - DNA, 50 bp, synthetic construct
  source 1..50: mol_type = other DNA
aaatataataaaaataatactacttttaatcaaaacaactacaaaactcc

SEQ ID NO: 3669 - DNA, 50 bp, synthetic construct
  source 1..50: mol_type = other DNA
aaataatactacttttaatcaaaacaactacaaaactccraaaacaaatc

SEQ ID NO: 3670 - DNA, 50 bp, synthetic construct
  source 1..50: mol_type = other DNA
aatactacttttaatcaaaacaactacaaaactccraaaacaaatcracc

SEQ ID NO: 3671 - DNA, 50 bp, synthetic construct
  source 1..50: mol_type = other DNA
crttttctacatctaaactaaccraactccttctcraatttatcacaaac

SEQ ID NO: 3672 - DNA, 50 bp, synthetic construct
  source 1..50: mol_type = other DNA
taaactctcccraaaactaacctctcaataaataaaaacaaacaacaccc

SEQ ID NO: 3673 - DNA, 50 bp, synthetic construct
  source 1..50: mol_type = other DNA
acaaacataaaaatctaaaacaaaaaataccrtatatatattcraaaccc

SEQ ID NO: 3674 - DNA, 50 bp, synthetic construct
  source 1..50: mol_type = other DNA
ttccaatttacttttcaaaaaaataaactcatttcaaacccaaaaaaaac

SEQ ID NO: 3675 - DNA, 50 bp, synthetic construct
  source 1..50: mol_type = other DNA
aattctacraactctaaaatctacraattccaaacaacctcaaacaactc

SEQ ID NO: 3676 - DNA, 50 bp, synthetic construct
  source 1..50: mol_type = other DNA
ctaaactcccaaaacctaaactaccttaaaattaaaactattttaactac

SEQ ID NO: 3677 - DNA, 50 bp, synthetic construct
  source 1..50: mol_type = other DNA
atcttaaaaaccatattctacttatattataattacttttctttcttatc

SEQ ID NO: 3678 - DNA, 50 bp, synthetic construct
  source 1..50: mol_type = other DNA
aaaataaaaacatcctaaaacacaaaaccaatacttttcataaactattc

SEQ ID NO: 3679 - DNA, 50 bp, synthetic construct
  source 1..50: mol_type = other DNA
cccttaatcccccaaaaaaatcacraaattaaaataaccaactcttcttc

SEQ ID NO: 3680 - DNA, 50 bp, synthetic construct
  source 1..50: mol_type = other DNA
aattaaaataaccaactcttcttcrttaaatataatcaaaattaataaac

SEQ ID NO: 3681 - DNA, 50 bp, synthetic construct
  source 1..50: mol_type = other DNA
attaataaacrcttatcataaacttaaaaatcttaaccraaaaacccaac

SEQ ID NO: 3682 - DNA, 50 bp, synthetic construct
  source 1..50: mol_type = other DNA
tacaaatatactacaaaccttcaaaataaaacaaaccattatccctaccc

SEQ ID NO: 3683 - DNA, 50 bp, synthetic construct
  source 1..50: mol_type = other DNA
tctatattaccaaataacttttctaaaaaattatacaaatttacattccc

SEQ ID NO: 3684 - DNA, 50 bp, synthetic construct
  source 1..50: mol_type = other DNA
taccaaataacttttctaaaaaattatacaaatttacattcccrctacac

SEQ ID NO: 3685 - DNA, 50 bp, synthetic construct
  source 1..50: mol_type = other DNA
aacatatataatacaaaaaacrctactaaacaactacctatacaaacacc

SEQ ID NO: 3686 - DNA, 50 bp, synthetic construct
  source 1..50: mol_type = other DNA
tattccccctaaccctaaatattccttctcctctataaaaatacratcac

SEQ ID NO: 3687 - DNA, 50 bp, synthetic construct
  source 1..50: mol_type = other DNA
caaaaatattccccctaaccctaaatattccttctcctctataaaaatac

SEQ ID NO: 3688 - DNA, 50 bp, synthetic construct
  source 1..50: mol_type = other DNA
atattctaaaaaaaattcaaaaacccaaatatccatccacacttatccac

SEQ ID NO: 3689 - DNA, 50 bp, synthetic construct
  source 1..50: mol_type = other DNA
caaaacttctaaatacaacctaaaaatacaacaaacccacccctacattc

SEQ ID NO: 3690 - DNA, 50 bp, synthetic construct
  source 1..50: mol_type = other DNA
aaaactaaaaaaaccraaactacaaaaaaaacacaaacaacaaacttccc

SEQ ID NO: 3691 - DNA, 50 bp, synthetic construct
  source 1..50: mol_type = other DNA
aaaattaaaatttcactcaccctaccccaactaaatatatctaaaccacc

SEQ ID NO: 3692 - DNA, 50 bp, synthetic construct
  source 1..50: mol_type = other DNA
taatcccaaactctctacccaactaaacctcaaaaccaaattttaatacc

SEQ ID NO: 3693 - DNA, 50 bp, synthetic construct
  source 1..50: mol_type = other DNA
acccaactaaacctcaaaaccaaattttaataccrctacttaaatatacc

SEQ ID NO: 3694 - DNA, 50 bp, synthetic construct
  source 1..50: mol_type = other DNA
aactaaacctcaaaaccaaattttaataccrctacttaaatataccraac

SEQ ID NO: 3695 - DNA, 50 bp, synthetic construct
  source 1..50: mol_type = other DNA
aaaaataaaaactacracctaaactcrataaaatctctacactacctaac

SEQ ID NO: 3696 - DNA, 50 bp, synthetic construct
  source 1..50: mol_type = other DNA
acctaaaatattaacacaactttacaaaaaaaacraccatcttaaaaacc

SEQ ID NO: 3697 - DNA, 50 bp, synthetic construct
  source 1..50: mol_type = other DNA
aaaacaccaatcaaatacctaaaatattaacacaactttacaaaaaaaac

SEQ ID NO: 3698 - DNA, 50 bp, synthetic construct
  source 1..50: mol_type = other DNA
taaaaacraaacaaactaaacaaaacccccaacaaaacccctaaatctac

SEQ ID NO: 3699 - DNA, 50 bp, synthetic construct
  source 1..50: mol_type = other DNA
aaccataccctaaaatcaaacaaaactaaactaaaattaccaatatcaac

SEQ ID NO: 3700 - DNA, 50 bp, synthetic construct
  source 1..50: mol_type = other DNA
ataacccctccaaaacrtactaaatactaacaaaacaaactaaaacactc

SEQ ID NO: 3701 - DNA, 50 bp, synthetic construct
  source 1..50: mol_type = other DNA
actaaaacactcracaacaaaattaaccccrtaatctcaattttactccc

SEQ ID NO: 3702 - DNA, 50 bp, synthetic construct
  source 1..50: mol_type = other DNA
taacctaaaacatcaaaataaaatttacaaacraaattctaccatctaac

SEQ ID NO: 3703 - DNA, 50 bp, synthetic construct
  source 1..50: mol_type = other DNA
taccaaatcaccaaacrtcatcaacacaaccaaaccaaaataaaaacctc

SEQ ID NO: 3704 - DNA, 50 bp, synthetic construct
  source 1..50: mol_type = other DNA
caatccctctaaatataacccctcrtacaatcaaccaaaactaacaaaac

SEQ ID NO: 3705 - DNA, 50 bp, synthetic construct
  source 1..50: mol_type = other DNA
tactaaaactttaaacrccccttcatcaatccctctaaatataacccctc

SEQ ID NO: 3706 - DNA, 50 bp, synthetic construct
  source 1..50: mol_type = other DNA
ctctaactaactacacraaaaaccacatctaaaaaaactaataaaaaaac

SEQ ID NO: 3707 - DNA, 50 bp, synthetic construct
  source 1..50: mol_type = other DNA
actataccctcttacattttctcccaaaaaacaatcaacttacaatatac

SEQ ID NO: 3708 - DNA, 50 bp, synthetic construct
  source 1..50: mol_type = other DNA
ttacattttctcccaaaaaacaatcaacttacaatatacrccaaatcccc

SEQ ID NO: 3709 - DNA, 50 bp, synthetic construct
  source 1..50: mol_type = other DNA
cccaaaaaacaatcaacttacaatatacrccaaatccccrcaaataaaac

SEQ ID NO: 3710 - DNA, 50 bp, synthetic construct
  source 1..50: mol_type = other DNA
aatcttacacaacctattcttcaatatctacctaataccaaaaaatactc

SEQ ID NO: 3711 - DNA, 50 bp, synthetic construct
  source 1..50: mol_type = other DNA
cctattcttcaatatctacctaataccaaaaaatactcrtaaaaataaac

SEQ ID NO: 3712 - DNA, 50 bp, synthetic construct
  source 1..50: mol_type = other DNA
tacaatccaaaataaataaatccaacttctaacaacrtacaaactaccac

SEQ ID NO: 3713 - DNA, 50 bp, synthetic construct
  source 1..50: mol_type = other DNA
tcaatccacaaacactaacctcaatccacaatcttattataccaaaaatc

SEQ ID NO: 3714 - DNA, 50 bp, synthetic construct
  source 1..50: mol_type = other DNA
caatacctataaactaaaactaatactatctaaaaatcaccctcccttcc

SEQ ID NO: 3715 - DNA, 50 bp, synthetic construct
  source 1..50: mol_type = other DNA
actaaatcattactaaacraaaaacacraccactcacraaaaaccattac

SEQ ID NO: 3716 - DNA, 50 bp, synthetic construct
  source 1..50: mol_type = other DNA
catttaaccaataacratctaaaactaatcttaaacacctaacrctaatc

SEQ ID NO: 3717 - DNA, 50 bp, synthetic construct
  source 1..50: mol_type = other DNA
ataacratctaaaactaatcttaaacacctaacrctaatcrtaaaaaccc

SEQ ID NO: 3718 - DNA, 50 bp, synthetic construct
  source 1..50: mol_type = other DNA
atatataaactataatataacaaacctactacaactactaaataacaaac

SEQ ID NO: 3719 - DNA, 50 bp, synthetic construct
  source 1..50: mol_type = other DNA
ctactaaataacaaacractcactctcctcctctatcataactttaaatc

SEQ ID NO: 3720 - DNA, 50 bp, synthetic construct
  source 1..50: mol_type = other DNA
aaatcraaaaataactaataaacctctaaacctaaccractatcttaacc

SEQ ID NO: 3721 - DNA, 50 bp, synthetic construct
  source 1..50: mol_type = other DNA
aatacaaaacccacctattcaaacratctaaaaacaaaatataaaactac

SEQ ID NO: 3722 - DNA, 50 bp, synthetic construct
  source 1..50: mol_type = other DNA
attaattcaaaatctaaactttatcttcctttcttccacatcratatttc

SEQ ID NO: 3723 - DNA, 50 bp, synthetic construct
  source 1..50: mol_type = other DNA
acctaccaattaattcaaaatctaaactttatcttcctttcttccacatc

SEQ ID NO: 3724 - DNA, 50 bp, synthetic construct
  source 1..50: mol_type = other DNA
aaaaacaaaacccaaactctaaatcaactaataaatatctacrtttcaac

SEQ ID NO: 3725 - DNA, 50 bp, synthetic construct
  source 1..50: mol_type = other DNA
aaaactatttttatctattaaaatatctacatctatatttctatatcacc

SEQ ID NO: 3726 - DNA, 50 bp, synthetic construct
  source 1..50: mol_type = other DNA
aaaaaatactattccaaaccactaacaaaaaaatacctataaccaaaccc

SEQ ID NO: 3727 - DNA, 50 bp, synthetic construct
  source 1..50: mol_type = other DNA
aaacaccatatatttcacaataaaataaaccttataaatatactcacccc

SEQ ID NO: 3728 - DNA, 50 bp, synthetic construct
  source 1..50: mol_type = other DNA
aataaaactaacaactataaatactacaatcaatcaaattctaacctccc

SEQ ID NO: 3729 - DNA, 50 bp, synthetic construct
  source 1..50: mol_type = other DNA
acaaaacaaaacraatatttttctataacctaaaaccaaaataaactacc

SEQ ID NO: 3730 - DNA, 50 bp, synthetic construct
  source 1..50: mol_type = other DNA
ttctaaaactacracaacccactctaactctaaactataaaaaaatattc

SEQ ID NO: 3731 - DNA, 50 bp, synthetic construct
  source 1..50: mol_type = other DNA
accaaacaaaaattacaatactaaaaaatatacccaatttaaatacaacc

SEQ ID NO: 3732 - DNA, 50 bp, synthetic construct
  source 1..50: mol_type = other DNA
caaaatcaaactaattaaaaatcttaattacatcatcaaaatccctttac

SEQ ID NO: 3733 - DNA, 50 bp, synthetic construct
  source 1..50: mol_type = other DNA
aaaaaaaacctaacctaatcaaataaacctctaaacaaataacttaaacc

SEQ ID NO: 3734 - DNA, 50 bp, synthetic construct
  source 1..50: mol_type = other DNA
cctaaataaattccacaactacaaaaacataaattctactacataaacac

SEQ ID NO: 3735 - DNA, 50 bp, synthetic construct
  source 1..50: mol_type = other DNA
taaaacaaaaatctaaacacaacttaactaaatcctttactcaaaacctc

SEQ ID NO: 3736 - DNA, 50 bp, synthetic construct
  source 1..50: mol_type = other DNA
taaactaatacaattaaacratactactcttaacaaaaataaactctacc

SEQ ID NO: 3737 - DNA, 50 bp, synthetic construct
  source 1..50: mol_type = other DNA
accraataaaaaacaaatcrataaaatccacccctactaaaaacaacatc

SEQ ID NO: 3738 - DNA, 50 bp, synthetic construct
  source 1..50: mol_type = other DNA
actacattaattcatataaaacatttcttcctaccctaataatatcctcc

SEQ ID NO: 3739 - DNA, 50 bp, synthetic construct
  source 1..50: mol_type = other DNA
ctacccctcaaacctcaaaatttaacctctaaactaacrtcttaaaaaac

SEQ ID NO: 3740 - DNA, 50 bp, synthetic construct
  source 1..50: mol_type = other DNA
ctaaaccaacaactacccctcaaacctcaaaatttaacctctaaactaac

SEQ ID NO: 3741 - DNA, 50 bp, synthetic construct
  source 1..50: mol_type = other DNA
aaaaataaaacttcatttcaattctctttataaaaactcactaattaaac

SEQ ID NO: 3742 - DNA, 50 bp, synthetic construct
  source 1..50: mol_type = other DNA
ctacaataaactttaatcccaccactacaacccaacctaaaccacaaaac

SEQ ID NO: 3743 - DNA, 50 bp, synthetic construct
  source 1..50: mol_type = other DNA
aactaaattacaataataaaatcaaaactcactacaaccttaacctcctc

SEQ ID NO: 3744 - DNA, 50 bp, synthetic construct
  source 1..50: mol_type = other DNA
aaacraaaaccaaactcttaacaaaaaacaacattataaaaatcataaac

SEQ ID NO: 3745 - DNA, 50 bp, synthetic construct
  source 1..50: mol_type = other DNA
aatttaacctccataccttaacaacaatataatttttccctttaaaactc

SEQ ID NO: 3746 - DNA, 50 bp, synthetic construct
  source 1..50: mol_type = other DNA
aaaatcacattattattaaaacataaaaaccaaatcctaccaacttatac

SEQ ID NO: 3747 - DNA, 50 bp, synthetic construct
  source 1..50: mol_type = other DNA
attaaaacataaaaaccaaatcctaccaacttatacrcatctaaaactac

SEQ ID NO: 3748 - DNA, 50 bp, synthetic construct
  source 1..50: mol_type = other DNA
cataaaaaccaaatcctaccaacttatacrcatctaaaactacractaac

SEQ ID NO: 3749 - DNA, 50 bp, synthetic construct
  source 1..50: mol_type = other DNA
aacratcaacaacttaaaaacaactaactaaaaacatacctcaacacrac

SEQ ID NO: 3750 - DNA, 50 bp, synthetic construct
  source 1..50: mol_type = other DNA
ctaaacratcaacaacttaaaaacaactaactaaaaacatacctcaacac

SEQ ID NO: 3751 - DNA, 50 bp, synthetic construct
  source 1..50: mol_type = other DNA
aaaacatacctctaaccaactactcccaaactactaaccrctcaaaaatc

SEQ ID NO: 3752 - DNA, 50 bp, synthetic construct
  source 1..50: mol_type = other DNA
aaaaacaaaaccaaaaattaaaaaactactaaaactctaaaaataaaacc

SEQ ID NO: 3753 - DNA, 50 bp, synthetic construct
  source 1..50: mol_type = other DNA
caataactcaaataccctatatatatacacrcattaacatatacatacac

SEQ ID NO: 3754 - DNA, 50 bp, synthetic construct
  source 1..50: mol_type = other DNA
ataaaccaaaataacacatacaataactcaaataccctatatatatacac

SEQ ID NO: 3755 - DNA, 50 bp, synthetic construct
  source 1..50: mol_type = other DNA
tctcttcctcaaactaaaaaaatccatcactacctctctaaaaaactatc

SEQ ID NO: 3756 - DNA, 50 bp, synthetic construct
  source 1..50: mol_type = other DNA
aaaacaaacttactatatctttaataaaaacccaaactcccaaaaaaacc

SEQ ID NO: 3757 - DNA, 50 bp, synthetic construct
  source 1..50: mol_type = other DNA
accaaaaactaacracctcctaataatataaaaaaacaccaaaaaaacac

SEQ ID NO: 3758 - DNA, 50 bp, synthetic construct
  source 1..50: mol_type = other DNA
actctcaacctatttaaaaaacaaacttaatacaaaaatcaaatttcctc

SEQ ID NO: 3759 - DNA, 50 bp, synthetic construct
  source 1..50: mol_type = other DNA
aatatcaatcactccaaaaaccccaaccctaaactataaaaataaccrac

SEQ ID NO: 3760 - DNA, 50 bp, synthetic construct
  source 1..50: mol_type = other DNA
aataatatcaatcactccaaaaaccccaaccctaaactataaaaataacc

SEQ ID NO: 3761 - DNA, 50 bp, synthetic construct
  source 1..50: mol_type = other DNA
tatctcttcctcttaccccractccaaatataaataacttaccaaacctc

SEQ ID NO: 3762 - DNA, 50 bp, synthetic construct
  source 1..50: mol_type = other DNA
taaaaaaacatctattaacactaaacacaacacactaaaaaaatactatc

SEQ ID NO: 3763 - DNA, 50 bp, synthetic construct
  source 1..50: mol_type = other DNA
actccccactaaataccaaaaatcccctaaacatacttttctaaaaaacc

SEQ ID NO: 3764 - DNA, 50 bp, synthetic construct
  source 1..50: mol_type = other DNA
caaatcctattcatacttaaacraaaatctaacccaacctaaaccaaaac

SEQ ID NO: 3765 - DNA, 50 bp, synthetic construct
  source 1..50: mol_type = other DNA
ttaaaaataataataaataaacrctctaacccaaactaaaccaaactccc

SEQ ID NO: 3766 - DNA, 50 bp, synthetic construct
  source 1..50: mol_type = other DNA
catttacaactaacttaaaaaaaacacaacttcaacacaacctctcctac

SEQ ID NO: 3767 - DNA, 50 bp, synthetic construct
  source 1..50: mol_type = other DNA
taacttaaaaaaaacacaacttcaacacaacctctcctacraaccaaccc

SEQ ID NO: 3768 - DNA, 50 bp, synthetic construct
  source 1..50: mol_type = other DNA
acttctaaaacaaacacaaaattcrcttataacaaaaacaaccccacaac

SEQ ID NO: 3769 - DNA, 50 bp, synthetic construct
  source 1..50: mol_type = other DNA
tttttttattctttacacaattatttcattatttaacacttaatacactc

SEQ ID NO: 3770 - DNA, 50 bp, synthetic construct
  source 1..50: mol_type = other DNA
tacacaattatttcattatttaacacttaatacactcrtcatttacatac

SEQ ID NO: 3771 - DNA, 50 bp, synthetic construct
  source 1..50: mol_type = other DNA
aatacactcrtcatttacatacracaataacattctaaccacacttatac

SEQ ID NO: 3772 - DNA, 50 bp, synthetic construct
  source 1..50: mol_type = other DNA
aaacttctattaaatccaaaaaactctacaaaacacaactaaaactaaac

SEQ ID NO: 3773 - DNA, 50 bp, synthetic construct
  source 1..50: mol_type = other DNA
ccctaaattccataaacacaaaaaccttttcctccaaactaactccatcc

SEQ ID NO: 3774 - DNA, 50 bp, synthetic construct
  source 1..50: mol_type = other DNA
taaccttaaaacaattcccraaaacaccctataaatactaaacaactacc

SEQ ID NO: 3775 - DNA, 50 bp, synthetic construct
  source 1..50: mol_type = other DNA
raaaactatctcaaaaccaaaacatccaacctcctaactattaataaacc

SEQ ID NO: 3776 - DNA, 50 bp, synthetic construct
  source 1..50: mol_type = other DNA
aaataatctcatcaaactaaatctaaaaaaaccctatctctcraaatccc

SEQ ID NO: 3777 - DNA, 50 bp, synthetic construct
  source 1..50: mol_type = other DNA
aaaataacaaataatctcatcaaactaaatctaaaaaaaccctatctctc

SEQ ID NO: 3778 - DNA, 50 bp, synthetic construct
  source 1..50: mol_type = other DNA
aaacttccaaaacaaacaataactctctatatctaatttctctaaaaacc

SEQ ID NO: 3779 - DNA, 50 bp, synthetic construct
  source 1..50: mol_type = other DNA
cctcaaaaaaaccaaacacaaaaaaccattatttaccttaaaaacccccc

SEQ ID NO: 3780 - DNA, 50 bp, synthetic construct
  source 1..50: mol_type = other DNA
cattctacatcctccrcctaaacccctccaaaacttttactataacttac

SEQ ID NO: 3781 - DNA, 50 bp, synthetic construct
  source 1..50: mol_type = other DNA
taaacccctccaaaacttttactataacttacrctctcctaaactacctc

SEQ ID NO: 3782 - DNA, 50 bp, synthetic construct
  source 1..50: mol_type = other DNA
accccaacaaataataactcaacaaaactaaataataaaatatataaatc

SEQ ID NO: 3783 - DNA, 50 bp, synthetic construct
  source 1..50: mol_type = other DNA
acccaatcacaaactaaccaaacttcttcctatataactcactctataac

SEQ ID NO: 3784 - DNA, 50 bp, synthetic construct
  source 1..50: mol_type = other DNA
aaacacraattataaaatataaatcccacactaaaaatactaaacttacc

SEQ ID NO: 3785 - DNA, 50 bp, synthetic construct
  source 1..50: mol_type = other DNA
caataacaacaaacraattcaacaaaaaaccraaacctctttaaaacaac

SEQ ID NO: 3786 - DNA, 50 bp, synthetic construct
  source 1..50: mol_type = other DNA
cctctaaataaccccraaacaataacaacaaacraattcaacaaaaaacc

SEQ ID NO: 3787 - DNA, 50 bp, synthetic construct
  source 1..50: mol_type = other DNA
aactaactctctacrttatctcaaaaaaatctcrattccctactaaactc

SEQ ID NO: 3788 - DNA, 50 bp, synthetic construct
  source 1..50: mol_type = other DNA
acaataaccctatcataaataaaaacctacaacccaacaaaaacctcaac

SEQ ID NO: 3789 - DNA, 50 bp, synthetic construct
  source 1..50: mol_type = other DNA
ctcrctaattactaacacaacaatctaaaatcaaactacaaaacracaac

SEQ ID NO: 3790 - DNA, 50 bp, synthetic construct
  source 1..50: mol_type = other DNA
ccaaaaaataacaaaccaaaaaatacctttaaatcctaccccraactccc

SEQ ID NO: 3791 - DNA, 50 bp, synthetic construct
  source 1..50: mol_type = other DNA
ataacaaaccaaaaaatacctttaaatcctaccccraactcccraaaaac

SEQ ID NO: 3792 - DNA, 50 bp, synthetic construct
  source 1..50: mol_type = other DNA
aaaaacaaaacaacaactataaatcacrataataaatattcataactcac

SEQ ID NO: 3793 - DNA, 50 bp, synthetic construct
  source 1..50: mol_type = other DNA
aacaacaactataaatcacrataataaatattcataactcacraataaac

SEQ ID NO: 3794 - DNA, 50 bp, synthetic construct
  source 1..50: mol_type = other DNA
caacaaaaaaacraaacaaatcraatcaaaaatatcctctcaaccacctc

SEQ ID NO: 3795 - DNA, 50 bp, synthetic construct
  source 1..50: mol_type = other DNA
aaaaaacacatacacaacactaaaaaaaataacaaaaccaacaaaaaaac

SEQ ID NO: 3796 - DNA, 50 bp, synthetic construct
  source 1..50: mol_type = other DNA
aaaacaaccaaaatataaaaccttttcatcctaacacacaaaaacaaccc

SEQ ID NO: 3797 - DNA, 50 bp, synthetic construct
  source 1..50: mol_type = other DNA
ataactcaaaaaatactctaaaaaacacaaaaacracrtcatatcttacc

SEQ ID NO: 3798 - DNA, 50 bp, synthetic construct
  source 1..50: mol_type = other DNA
ttaaaaccraccaaaacaaaatatctccaaaaaacctctatacaaaaacc

SEQ ID NO: 3799 - DNA, 50 bp, synthetic construct
  source 1..50: mol_type = other DNA
ctaactacractcctacacaaaaacctcctaaaaacattctatcctaatc

SEQ ID NO: 3800 - DNA, 50 bp, synthetic construct
  source 1..50: mol_type = other DNA
atatacttatcttaaatttattaaaatttccaaataaaaatcccctcctc

SEQ ID NO: 3801 - DNA, 50 bp, synthetic construct
  source 1..50: mol_type = other DNA
ccctatataaaatactatttctttaaaaaaaactaaactcttttctcatc

SEQ ID NO: 3802 - DNA, 50 bp, synthetic construct
  source 1..50: mol_type = other DNA
ccracaaaatattcctacaacctctataacactcaacaaaaacccrttac

SEQ ID NO: 3803 - DNA, 50 bp, synthetic construct
  source 1..50: mol_type = other DNA
rtaacraatcaaaaaatcaaacraatctcaatactaatcaacaaatcacc

SEQ ID NO: 3804 - DNA, 50 bp, synthetic construct
  source 1..50: mol_type = other DNA
ttccaacttataataacctattaacctcttaaatctaaacaaccccaatc

SEQ ID NO: 3805 - DNA, 50 bp, synthetic construct
  source 1..50: mol_type = other DNA
craaaataacccataacrtacttccraaaattctcratcaaaaactactc

SEQ ID NO: 3806 - DNA, 50 bp, synthetic construct
  source 1..50: mol_type = other DNA
aattatccrtaaaaataattaaataccataaaaaatcccaaataaaaaac

SEQ ID NO: 3807 - DNA, 50 bp, synthetic construct
  source 1..50: mol_type = other DNA
acrtaaaaatacctccttctcaaatctatacacrtaacrataaaaaatcc

SEQ ID NO: 3808 - DNA, 50 bp, synthetic construct
  source 1..50: mol_type = other DNA
aaatatctacaaacrtaaaaatacctccttctcaaatctatacacrtaac

SEQ ID NO: 3809 - DNA, 50 bp, synthetic construct
  source 1..50: mol_type = other DNA
aacttccttacacccctctatcctataactaacaataaatatctacaaac

SEQ ID NO: 3810 - DNA, 50 bp, synthetic construct
  source 1..50: mol_type = other DNA
ctaaatttttccaaattaactctaatttcaaaaaacaactacatatccac

SEQ ID NO: 3811 - DNA, 50 bp, synthetic construct
  source 1..50: mol_type = other DNA
caaatacccccttactcraccttcctaaaataaataaaacaaactccaac

SEQ ID NO: 3812 - DNA, 50 bp, synthetic construct
  source 1..50: mol_type = other DNA
acccttaaaaaaaccaaaaactctatcttcaaaaaactcractcttaaac

SEQ ID NO: 3813 - DNA, 50 bp, synthetic construct
  source 1..50: mol_type = other DNA
aacacrtaatcttccttctattcttctctacatctatttcttctacttcc

SEQ ID NO: 3814 - DNA, 50 bp, synthetic construct
  source 1..50: mol_type = other DNA
aacaaaatacaataaaaaaaccaaccaaaacccaccaaaaccaaaataac

SEQ ID NO: 3815 - DNA, 50 bp, synthetic construct
  source 1..50: mol_type = other DNA
aaaacaactattaccaccatataccatacaaacatctacctcctcctacc

SEQ ID NO: 3816 - DNA, 50 bp, synthetic construct
  source 1..50: mol_type = other DNA
aatacaccrtaaccaatatcatctctatcractcraaactactaataaac

SEQ ID NO: 3817 - DNA, 50 bp, synthetic construct
  source 1..50: mol_type = other DNA
rctctataaaaaacacaaaacctttaacctactaaactctccraaaaccc

SEQ ID NO: 3818 - DNA, 50 bp, synthetic construct
  source 1..50: mol_type = other DNA
acraaaacrctctataaaaaacacaaaacctttaacctactaaactctcc

SEQ ID NO: 3819 - DNA, 50 bp, synthetic construct
  source 1..50: mol_type = other DNA
ccraaaaacccaacaaaccaaaaactttatatcttccacaaaacrtttcc

SEQ ID NO: 3820 - DNA, 50 bp, synthetic construct
  source 1..50: mol_type = other DNA
actttatatcttccacaaaacrtttccrtaaaacttataaccctcctaac

SEQ ID NO: 3821 - DNA, 50 bp, synthetic construct
  source 1..50: mol_type = other DNA
aaacctactcrttaaaaactccaaaaaaatccctctcaccaataaaaaac

SEQ ID NO: 3822 - DNA, 50 bp, synthetic construct
  source 1..50: mol_type = other DNA
aaccttcttcrccctccactaataaaaaaaacttccctaaaacttttaac

SEQ ID NO: 3823 - DNA, 50 bp, synthetic construct
  source 1..50: mol_type = other DNA
accaacactaaatcctactaacactaactctaataaacctactcttatcc

SEQ ID NO: 3824 - DNA, 50 bp, synthetic construct
  source 1..50: mol_type = other DNA
taataccaaaaaatccaacaatcctaaataacaatcaacaataaaacrac

SEQ ID NO: 3825 - DNA, 50 bp, synthetic construct
  source 1..50: mol_type = other DNA
caataataccaaaaaatccaacaatcctaaataacaatcaacaataaaac

SEQ ID NO: 3826 - DNA, 50 bp, synthetic construct
  source 1..50: mol_type = other DNA
aacaaatataaatcacccttctactcccccaacctatatccttaaatttc

SEQ ID NO: 3827 - DNA, 50 bp, synthetic construct
  source 1..50: mol_type = other DNA
aataaccaataacratattaccttctaaaacrtcccaaaacacaataacc

SEQ ID NO: 3828 - DNA, 50 bp, synthetic construct
  source 1..50: mol_type = other DNA
ctaaaacrtcccaaaacacaataaccraattaactctaaaataaataacc

SEQ ID NO: 3829 - DNA, 50 bp, synthetic construct
  source 1..50: mol_type = other DNA
acaactaatcaataaataaaacctattaaacaccctaactcccrcaaacc

SEQ ID NO: 3830 - DNA, 50 bp, synthetic construct
  source 1..50: mol_type = other DNA
atcaaccacaactaatcaataaataaaacctattaaacaccctaactccc

SEQ ID NO: 3831 - DNA, 50 bp, synthetic construct
  source 1..50: mol_type = other DNA
atatttaacaaatttcacccattaactaactataattaaccctcaacccc

SEQ ID NO: 3832 - DNA, 50 bp, synthetic construct
  source 1..50: mol_type = other DNA
aaataataaaaatttaacatcttatcttaaaattacattcacatacaatc

SEQ ID NO: 3833 - DNA, 50 bp, synthetic construct
  source 1..50: mol_type = other DNA
ctcttacrcataacaacactataatacaccccaaatatacaaatatttac

SEQ ID NO: 3834 - DNA, 50 bp, synthetic construct
  source 1..50: mol_type = other DNA
aaatcaaaaatcacttaaccaaaaacactaatcctttaatacaataaacc

SEQ ID NO: 3835 - DNA, 50 bp, synthetic construct
  source 1..50: mol_type = other DNA
aaaccaaaccatactaaataacaacaatacattctaattcaacaacratc

SEQ ID NO: 3836 - DNA, 50 bp, synthetic construct
  source 1..50: mol_type = other DNA
accctaaaaataaaattcattccctcaaatatcatcctaaaatcacracc

SEQ ID NO: 3837 - DNA, 50 bp, synthetic construct
  source 1..50: mol_type = other DNA
cccccaactaaacaactctatcttaatttatatttaatattaactcrtcc

SEQ ID NO: 3838 - DNA, 50 bp, synthetic construct
  source 1..50: mol_type = other DNA
ctataccaataaacccraaaatcaaccacatatcacactaaaaataaatc

SEQ ID NO: 3839 - DNA, 50 bp, synthetic construct
  source 1..50: mol_type = other DNA
aatttataatcccaaaaattaacctaacattcttctataccaataaaccc

SEQ ID NO: 3840 - DNA, 50 bp, synthetic construct
  source 1..50: mol_type = other DNA
atcttatctcaactcccaacatattattcaaaaacrtattattcaaaaac

SEQ ID NO: 3841 - DNA, 50 bp, synthetic construct
  source 1..50: mol_type = other DNA
aaatctaacaaataaatcttatctcaactcccaacatattattcaaaaac

SEQ ID NO: 3842 - DNA, 50 bp, synthetic construct
  source 1..50: mol_type = other DNA
ctccaaaaaaaactcctcttaaaaacaaaaaccttctttatcaaaacccc

SEQ ID NO: 3843 - DNA, 50 bp, synthetic construct
  source 1..50: mol_type = other DNA
atatattatccaaataactttacctcctatctaaaacaaaatatacatac

SEQ ID NO: 3844 - DNA, 50 bp, synthetic construct
  source 1..50: mol_type = other DNA
aaaacaaatccrtaatatatactccccratatacatcaaccaaattcctc

SEQ ID NO: 3845 - DNA, 50 bp, synthetic construct
  source 1..50: mol_type = other DNA
attttatctaaaccaaaccattactacraaaaatctaactaatatatacc

SEQ ID NO: 3846 - DNA, 50 bp, synthetic construct
  source 1..50: mol_type = other DNA
accattactacraaaaatctaactaatatataccraaaaacacacaccac

SEQ ID NO: 3847 - DNA, 50 bp, synthetic construct
  source 1..50: mol_type = other DNA
aaaaacacctaaaaaaatcactcctcattccaacaaataaaaatactccc

SEQ ID NO: 3848 - DNA, 50 bp, synthetic construct
  source 1..50: mol_type = other DNA
cattactctaaacaactctcctcctaaatctcaaaataatacattacacc

SEQ ID NO: 3849 - DNA, 50 bp, synthetic construct
  source 1..50: mol_type = other DNA
ctaaaacccttaacctaaacccccraaataatctaattaataaaacaacc

SEQ ID NO: 3850 - DNA, 50 bp, synthetic construct
  source 1..50: mol_type = other DNA
aaaaccctccctatactaatccaatcaaaccaactaaaataaaaacattc

SEQ ID NO: 3851 - DNA, 50 bp, synthetic construct
  source 1..50: mol_type = other DNA
aaaaactctaacctctttatcaaactaaactaaatttaaatcctaacccc

SEQ ID NO: 3852 - DNA, 50 bp, synthetic construct
  source 1..50: mol_type = other DNA
cttaatctcactaaacctaaatttctatccctaaaataaaactaataatc

SEQ ID NO: 3853 - DNA, 50 bp, synthetic construct
  source 1..50: mol_type = other DNA
caactaatcctaacctttctccaaaacaactactaaaaactacaaaaaac

SEQ ID NO: 3854 - DNA, 50 bp, synthetic construct
  source 1..50: mol_type = other DNA
atattttaaataaaatacttcctacaacatattccaaaaaactctacaac

SEQ ID NO: 3855 - DNA, 50 bp, synthetic construct
  source 1..50: mol_type = other DNA
acaaatatttctataaaaaactctaatactactaatacaattttctcccc

SEQ ID NO: 3856 - DNA, 50 bp, synthetic construct
  source 1..50: mol_type = other DNA
aaccaaatccrtaaaaaaatatcctctaacccaaaaaactaacaaataac

SEQ ID NO: 3857 - DNA, 50 bp, synthetic construct
  source 1..50: mol_type = other DNA
caaaaaaattcaaaacaaaactataactccatcaaaacacaaccaaatcc

SEQ ID NO: 3858 - DNA, 50 bp, synthetic construct
  source 1..50: mol_type = other DNA
aatcccttcaaaatatcctaaactaataccctaaaaaacaattaacaaac

SEQ ID NO: 3859 - DNA, 50 bp, synthetic construct
  source 1..50: mol_type = other DNA
ttaactattcaaattaccaaccctcaaaactttactctaaaacttactcc

SEQ ID NO: 3860 - DNA, 50 bp, synthetic construct
  source 1..50: mol_type = other DNA
ctattcaaattaccaaccctcaaaactttactctaaaacttactccracc

SEQ ID NO: 3861 - DNA, 50 bp, synthetic construct
  source 1..50: mol_type = other DNA
acaaaacacaaaaaaaacctcccaaaaaaaaacctataaaacaccaaacc

SEQ ID NO: 3862 - DNA, 50 bp, synthetic construct
  source 1..50: mol_type = other DNA
ctaatacctcataaacctcctcttaaaaaattccctctataccctataac

SEQ ID NO: 3863 - DNA, 50 bp, synthetic construct
  source 1..50: mol_type = other DNA
atacctcataaacctcctcttaaaaaattccctctataccctataacrac

SEQ ID NO: 3864 - DNA, 50 bp, synthetic construct
  source 1..50: mol_type = other DNA
aacttaaactaaatcaaaaccaacctccttcttttctacctctcattaac

SEQ ID NO: 3865 - DNA, 50 bp, synthetic construct
  source 1..50: mol_type = other DNA
aaaacaaaaaatattcaaaaccttaaccaaataacctcataacctcaacc

SEQ ID NO: 3866 - DNA, 50 bp, synthetic construct
  source 1..50: mol_type = other DNA
taaataaataaactttccctttatattactttctactttaacccacaacc

SEQ ID NO: 3867 - DNA, 50 bp, synthetic construct
  source 1..50: mol_type = other DNA
ataaaaccaaaacatttaccctactcaataaaacaaaattcatactttcc

SEQ ID NO: 3868 - DNA, 50 bp, synthetic construct
  source 1..50: mol_type = other DNA
aaaaactaaatcctaaactctttacaaaaaaatcttcctttatttaattc

SEQ ID NO: 3869 - DNA, 50 bp, synthetic construct
  source 1..50: mol_type = other DNA
ctttacaaaaaaatcttcctttatttaattcrcaaataaatcccaaaccc

SEQ ID NO: 3870 - DNA, 50 bp, synthetic construct
  source 1..50: mol_type = other DNA
ccattactatcctatttaaacataaactttaaacttaaacatcaccttcc

SEQ ID NO: 3871 - DNA, 50 bp, synthetic construct
  source 1..50: mol_type = other DNA
ccacaaaaaattattcatttcttccctctaaaccctaactaatactaaac

SEQ ID NO: 3872 - DNA, 50 bp, synthetic construct
  source 1..50: mol_type = other DNA
aacccccacaattctataaacaaaaaacactcaaatactacrtaaaaacc

SEQ ID NO: 3873 - DNA, 50 bp, synthetic construct
  source 1..50: mol_type = other DNA
tcacccaaaaacccccacaattctataaacaaaaaacactcaaatactac

SEQ ID NO: 3874 - DNA, 50 bp, synthetic construct
  source 1..50: mol_type = other DNA
caaactaaaccactcctaataacracaaacataaaaataactaaaacctc

SEQ ID NO: 3875 - DNA, 50 bp, synthetic construct
  source 1..50: mol_type = other DNA
caacaaaattatattttcttaaaattttctcatttcctttataaacaaac

SEQ ID NO: 3876 - DNA, 50 bp, synthetic construct
  source 1..50: mol_type = other DNA
aaacraattccccacctctatcataaactcaaaactataaccataatacc

SEQ ID NO: 3877 - DNA, 50 bp, synthetic construct
  source 1..50: mol_type = other DNA
tcaaaactataaccataataccrcrtactactcttataaatcactctccc

SEQ ID NO: 3878 - DNA, 50 bp, synthetic construct
  source 1..50: mol_type = other DNA
caacacacracccttcctacaaaaccaaactctaaaaaaaattacrtaac

SEQ ID NO: 3879 - DNA, 50 bp, synthetic construct
  source 1..50: mol_type = other DNA
ccacacaacacacracccttcctacaaaaccaaactctaaaaaaaattac

SEQ ID NO: 3880 - DNA, 50 bp, synthetic construct
  source 1..50: mol_type = other DNA
tcaaaacctaaccctacaaaaaaaaccrtatactatataaaaaaaacccc

SEQ ID NO: 3881 - DNA, 50 bp, synthetic construct
  source 1..50: mol_type = other DNA
aaaaattcttcattcccaaataaaacaaatccacaatccacttcctcaac

SEQ ID NO: 3882 - DNA, 50 bp, synthetic construct
  source 1..50: mol_type = other DNA
atattccraaataaaaaacaatttccrtctatctcaaaaatctaacraac

SEQ ID NO: 3883 - DNA, 50 bp, synthetic construct
  source 1..50: mol_type = other DNA
aaacttcrttcaacaaaaaacaacatattccraaataaaaaacaatttcc

SEQ ID NO: 3884 - DNA, 50 bp, synthetic construct
  source 1..50: mol_type = other DNA
aataaaaacatacraacaaaaacttcrttcaacaaaaaacaacatattcc

SEQ ID NO: 3885 - DNA, 50 bp, synthetic construct
  source 1..50: mol_type = other DNA
ccctaacataaattcctattcatcaataaaaacatacraacaaaaacttc

SEQ ID NO: 3886 - DNA, 50 bp, synthetic construct
  source 1..50: mol_type = other DNA
ctccccacrttttccctaacataaattcctattcatcaataaaaacatac

SEQ ID NO: 3887 - DNA, 50 bp, synthetic construct
  source 1..50: mol_type = other DNA
ccttacccrtatatcctcactaataaacaaaaatccatattaaaaaaaac

SEQ ID NO: 3888 - DNA, 50 bp, synthetic construct
  source 1..50: mol_type = other DNA
aaaataacrtaacaacccraaaaaacctataaaaataccaaaatcacccc

SEQ ID NO: 3889 - DNA, 50 bp, synthetic construct
  source 1..50: mol_type = other DNA
aaccctcaaaaaacatttaattcaaccaccacrcttaacacaaaaataac

SEQ ID NO: 3890 - DNA, 50 bp, synthetic construct
  source 1..50: mol_type = other DNA
atatttcaaaactcccaaaaccctcaaaaaacatttaattcaaccaccac

SEQ ID NO: 3891 - DNA, 50 bp, synthetic construct
  source 1..50: mol_type = other DNA
caacaatactaataaacttaataacaaaacrctaaaccttatccaacccc

SEQ ID NO: 3892 - DNA, 50 bp, synthetic construct
  source 1..50: mol_type = other DNA
ctcctcaccrtaaaaacccccaacaatactaataaacttaataacaaaac

SEQ ID NO: 3893 - DNA, 50 bp, synthetic construct
  source 1..50: mol_type = other DNA
acaacaaatataaaaatcaccacrataaaaatatacaaaaactcctcacc

SEQ ID NO: 3894 - DNA, 50 bp, synthetic construct
  source 1..50: mol_type = other DNA
aaaacraaattcraaatacccraaataacaacaaatataaaaatcaccac

SEQ ID NO: 3895 - DNA, 50 bp, synthetic construct
  source 1..50: mol_type = other DNA
cacacraatatcctaaccaacttcccttcacctaatatcttaaataaaac

SEQ ID NO: 3896 - DNA, 50 bp, synthetic construct
  source 1..50: mol_type = other DNA
ctaaataaaaactaataacattaaaatactccrttcctctctctcttctc

SEQ ID NO: 3897 - DNA, 50 bp, synthetic construct
  source 1..50: mol_type = other DNA
atcaaaacaaaatcttccactatattctcttacaatataaatatcttaac

SEQ ID NO: 3898 - DNA, 50 bp, synthetic construct
  source 1..50: mol_type = other DNA
aaaccaatttacccacatccttaacatcatctataccctataaaaaaccc

SEQ ID NO: 3899 - DNA, 50 bp, synthetic construct
  source 1..50: mol_type = other DNA
ccctataaaaaacccrcttaaaaccatacatatctaaacctaaaaataac

SEQ ID NO: 3900 - DNA, 50 bp, synthetic construct
  source 1..50: mol_type = other DNA
aaacccrcttaaaaccatacatatctaaacctaaaaataacratacctac

SEQ ID NO: 3901 - DNA, 50 bp, synthetic construct
  source 1..50: mol_type = other DNA
aaccatacatatctaaacctaaaaataacratacctacrtaaaaccctac

SEQ ID NO: 3902 - DNA, 50 bp, synthetic construct
  source 1..50: mol_type = other DNA
aaaacacttaaccactattaaaactaaaaaaaacctaacccaactcaccc

SEQ ID NO: 3903 - DNA, 50 bp, synthetic construct
  source 1..50: mol_type = other DNA
aaacaaacaaaaaaactacctataactaaacccaaacctactatacacac

SEQ ID NO: 3904 - DNA, 50 bp, synthetic construct
  source 1..50: mol_type = other DNA
cccttctaaatataaatccctatataactcataaatcacacacccacaac

SEQ ID NO: 3905 - DNA, 50 bp, synthetic construct
  source 1..50: mol_type = other DNA
taaatcaaacaatactctaaactctacactcataaccaccccaaattctc

SEQ ID NO: 3906 - DNA, 50 bp, synthetic construct
  source 1..50: mol_type = other DNA
taaaaaccctttctaaaatataaacctaatcrttaaactataacttcctc

SEQ ID NO: 3907 - DNA, 50 bp, synthetic construct
  source 1..50: mol_type = other DNA
acaaaataaattaaacaaaatttctaccctcraaaaaatcacaatccaac

SEQ ID NO: 3908 - DNA, 50 bp, synthetic construct
  source 1..50: mol_type = other DNA
cactaaaaatcactcctcaaaactctaaaaaactccaaaacraaataatc

SEQ ID NO: 3909 - DNA, 50 bp, synthetic construct
  source 1..50: mol_type = other DNA
acctataaacactaaaaatcactcctcaaaactctaaaaaactccaaaac

SEQ ID NO: 3910 - DNA, 50 bp, synthetic construct
  source 1..50: mol_type = other DNA
aaaaataaaatattacctcaaataataactatcaatataatacttaacac

SEQ ID NO: 3911 - DNA, 50 bp, synthetic construct
  source 1..50: mol_type = other DNA
actaacaactatcatttaaaacaatatttcactcttataatataatcacc

SEQ ID NO: 3912 - DNA, 50 bp, synthetic construct
  source 1..50: mol_type = other DNA
ctaaaaaataacaacacctaacaacatcaataactctaccaaataacttc

SEQ ID NO: 3913 - DNA, 50 bp, synthetic construct
  source 1..50: mol_type = other DNA
aaaataataaataaaactccaaaaaacctaatctttaatataaatcaatc

SEQ ID NO: 3914 - DNA, 50 bp, synthetic construct
  source 1..50: mol_type = other DNA
tcaaaaataatcaaaaactaaaaacaatcaaactaatacataactaaacc

SEQ ID NO: 3915 - DNA, 50 bp, synthetic construct
  source 1..50: mol_type = other DNA
tttctctaataacatcatacacatataatataccatttaaaattatactc

SEQ ID NO: 3916 - DNA, 50 bp, synthetic construct
  source 1..50: mol_type = other DNA
catttaaaattatactcrataattatattttacaaaccacaaaatctaac

SEQ ID NO: 3917 - DNA, 50 bp, synthetic construct
  source 1..50: mol_type = other DNA
acaactctaacaccaacatttacaaacaccataatcatattacaacatcc

SEQ ID NO: 3918 - DNA, 50 bp, synthetic construct
  source 1..50: mol_type = other DNA
tcaaaccattctccaacctcaaccttctaaacaactaaaactacaaacac

SEQ ID NO: 3919 - DNA, 50 bp, synthetic construct
  source 1..50: mol_type = other DNA
acaataacacaatcttaattcactacaacctccaactccctaattcaaac

SEQ ID NO: 3920 - DNA, 50 bp, synthetic construct
  source 1..50: mol_type = other DNA
aacaaaacatcaaattcaataaaaaccatttaatttatatttacaatacc

SEQ ID NO: 3921 - DNA, 50 bp, synthetic construct
  source 1..50: mol_type = other DNA
acactacaaatacaaactaaataatttttattaaatttaatatcttaccc

SEQ ID NO: 3922 - DNA, 50 bp, synthetic construct
  source 1..50: mol_type = other DNA
taaataatttttattaaatttaatatcttacccraatccccrttttcctc

SEQ ID NO: 3923 - DNA, 50 bp, synthetic construct
  source 1..50: mol_type = other DNA
aactactaaaaacacattattaatttacactaaacttccaatatacctac

SEQ ID NO: 3924 - DNA, 50 bp, synthetic construct
  source 1..50: mol_type = other DNA
attattatctcaaaaaatccccraacctccttaaacaaatattatctaac

SEQ ID NO: 3925 - DNA, 50 bp, synthetic construct
  source 1..50: mol_type = other DNA
aaccaaaacctacccaaaaccacrtaaataaacttaaaaataacctaaac

SEQ ID NO: 3926 - DNA, 50 bp, synthetic construct
  source 1..50: mol_type = other DNA
acaataaaaacaaaaaataaatcrttcaaaccacttccaaacttactcac

SEQ ID NO: 3927 - DNA, 50 bp, synthetic construct
  source 1..50: mol_type = other DNA
cttattacttaaaaatacaactaactaaatctatactttattttaatacc

SEQ ID NO: 3928 - DNA, 50 bp, synthetic construct
  source 1..50: mol_type = other DNA
ctttatttttattaaccactccaaaaacaacaaaaaatactctatactcc

SEQ ID NO: 3929 - DNA, 50 bp, synthetic construct
  source 1..50: mol_type = other DNA
tttcatcctcatctattacctatctcracataattctcataaaaacacac

SEQ ID NO: 3930 - DNA, 50 bp, synthetic construct
  source 1..50: mol_type = other DNA
aaacataaaaaaacacracaaattcaaaaacataaccatttactataacc

SEQ ID NO: 3931 - DNA, 50 bp, synthetic construct
  source 1..50: mol_type = other DNA
ctcatacctcctaatattcrtatttactattctttctaaaaaaaaaaccc

SEQ ID NO: 3932 - DNA, 50 bp, synthetic construct
  source 1..50: mol_type = other DNA
aaccattacccactctaaaaaaccatcctttactttcctatcacaacatc

SEQ ID NO: 3933 - DNA, 50 bp, synthetic construct
  source 1..50: mol_type = other DNA
ctttacacaatttatataaaattttcttcctattcrtaacttcccaaaac

SEQ ID NO: 3934 - DNA, 50 bp, synthetic construct
  source 1..50: mol_type = other DNA
tctatcttatttaatccatctccatcttttcaccttaaaacacttaaaac

SEQ ID NO: 3935 - DNA, 50 bp, synthetic construct
  source 1..50: mol_type = other DNA
aataaatctcttaaaaacaatataatcctatttacaaaacactataaccc

SEQ ID NO: 3936 - DNA, 50 bp, synthetic construct
  source 1..50: mol_type = other DNA
ctcrtctctacaaaaactaacttaaaaattaataaaacrtaataacacac

SEQ ID NO: 3937 - DNA, 50 bp, synthetic construct
  source 1..50: mol_type = other DNA
acaacaaaaaacctcrtctctacaaaaactaacttaaaaattaataaaac

SEQ ID NO: 3938 - DNA, 50 bp, synthetic construct
  source 1..50: mol_type = other DNA
aacrtataccaccacrccccactaacttttaaattaatttttataaaaac

SEQ ID NO: 3939 - DNA, 50 bp, synthetic construct
  source 1..50: mol_type = other DNA
raaatctcttactatattacccaaactaatctcctaacctcaaaaaatcc

SEQ ID NO: 3940 - DNA, 50 bp, synthetic construct
  source 1..50: mol_type = other DNA
tttctttctattcttaaaaactaccctcttaactaaacrcratatctcac

SEQ ID NO: 3941 - DNA, 50 bp, synthetic construct
  source 1..50: mol_type = other DNA
attctttaaccattaactataacatttatccaataaataaaatataattc

SEQ ID NO: 3942 - DNA, 50 bp, synthetic construct
  source 1..50: mol_type = other DNA
aataaaataaactcctctttccctcaatctaaacaataaaattatttcac

SEQ ID NO: 3943 - DNA, 50 bp, synthetic construct
  source 1..50: mol_type = other DNA
aatattaattcactaaaaataataacctccracttcattcatatccctac

SEQ ID NO: 3944 - DNA, 50 bp, synthetic construct
  source 1..50: mol_type = other DNA
caaaacttaatttctattccaatattaattcactaaaaataataacctcc

SEQ ID NO: 3945 - DNA, 50 bp, synthetic construct
  source 1..50: mol_type = other DNA
tctctatattaccaaactatcttaaactcctaaactcaaatcatcctccc

SEQ ID NO: 3946 - DNA, 50 bp, synthetic construct
  source 1..50: mol_type = other DNA
attaatttaatttacattttcctaataacatacrtcrtaaaacatctttc

SEQ ID NO: 3947 - DNA, 50 bp, synthetic construct
  source 1..50: mol_type = other DNA
caccrcaaaaaacatacaaataacaaataaacatacraaaaataccccac

SEQ ID NO: 3948 - DNA, 50 bp, synthetic construct
  source 1..50: mol_type = other DNA
caaactattccttaaccraaacacttccaaataccttacatcaatattcc

SEQ ID NO: 3949 - DNA, 50 bp, synthetic construct
  source 1..50: mol_type = other DNA
taaaacaaccaaaatccraaacactaatataaaatacctaaaaatacttc

SEQ ID NO: 3950 - DNA, 50 bp, synthetic construct
  source 1..50: mol_type = other DNA
aataatctaaaacraatatccaaacctacacraatcaacaaatttaacac

SEQ ID NO: 3951 - DNA, 50 bp, synthetic construct
  source 1..50: mol_type = other DNA
cttaaaaccacaattatctataaaaaatataactaccctattaacactac

SEQ ID NO: 3952 - DNA, 50 bp, synthetic construct
  source 1..50: mol_type = other DNA
acataactctaaaactcractcrcctaaaataacttatcataataaacrc

SEQ ID NO: 3953 - DNA, 50 bp, synthetic construct
  source 1..50: mol_type = other DNA
ctctttctctctctaaaaataaataaactaaactatatcctaactcaaac

SEQ ID NO: 3954 - DNA, 50 bp, synthetic construct
  source 1..50: mol_type = other DNA
ataaaaactactactaaataaaatcatctttcaactacctacaacccccc

SEQ ID NO: 3955 - DNA, 50 bp, synthetic construct
  source 1..50: mol_type = other DNA
atattatcaattatcaaattcataactacaccacatattatattaaatcc

SEQ ID NO: 3956 - DNA, 50 bp, synthetic construct
  source 1..50: mol_type = other DNA
acaacatatttaattttataaaaaattaccaatctatccttaaaataacc

SEQ ID NO: 3957 - DNA, 50 bp, synthetic construct
  source 1..50: mol_type = other DNA
taaaaataaattaacaatttcttacaaaactaaacatactattaccatac

SEQ ID NO: 3958 - DNA, 50 bp, synthetic construct
  source 1..50: mol_type = other DNA
atcacctctcaaaaaaatcaaaactaaaactaccaacrccaaaaaaaccc

SEQ ID NO: 3959 - DNA, 50 bp, synthetic construct
  source 1..50: mol_type = other DNA
ctaccaacacrctatcacctctcaaaaaaatcaaaactaaaactaccaac

SEQ ID NO: 3960 - DNA, 50 bp, synthetic construct
  source 1..50: mol_type = other DNA
acactaaataacaataaattaacttaaacataccataaaaataaccctac

SEQ ID NO: 3961 - DNA, 50 bp, synthetic construct
  source 1..50: mol_type = other DNA
atatataaaaaataaatcrccaaattaatcacttccraattcctaaactc

SEQ ID NO: 3962 - DNA, 50 bp, synthetic construct
  source 1..50: mol_type = other DNA
ttcaaatattcctcatatataaaaaataaatcrccaaattaatcacttcc

SEQ ID NO: 3963 - DNA, 50 bp, synthetic construct
  source 1..50: mol_type = other DNA
atatatattaaaaattccraactcaaaaatccraaaataaccaacctaac

SEQ ID NO: 3964 - DNA, 50 bp, synthetic construct
  source 1..50: mol_type = other DNA
ctaaacaaaaaaactactactatttataaaaaacatacaacttatatcrc

SEQ ID NO: 3965 - DNA, 50 bp, synthetic construct
  source 1..50: mol_type = other DNA
aactaaacaaaaaaactactactatttataaaaaacatacaacttatatc

SEQ ID NO: 3966 - DNA, 50 bp, synthetic construct
  source 1..50: mol_type = other DNA
tacaaacaataacaattctcctattcaacctactaccattaaaccacccc

SEQ ID NO: 3967 - DNA, 50 bp, synthetic construct
  source 1..50: mol_type = other DNA
tcactaacctctcatacataatactatcccttttaaaatcaataaaaatc

SEQ ID NO: 3968 - DNA, 50 bp, synthetic construct
  source 1..50: mol_type = other DNA
rctaaaaactataaaccraaactattcctattcraccatcttaactcctc

SEQ ID NO: 3969 - DNA, 50 bp, synthetic construct
  source 1..50: mol_type = other DNA
attctacctccttatcrccccraaacactaaaataattacatcaataaac

SEQ ID NO: 3970 - DNA, 50 bp, synthetic construct
  source 1..50: mol_type = other DNA
attcccttaaaaaattaacacrcctactaatacaattacctcaatacccc

SEQ ID NO: 3971 - DNA, 50 bp, synthetic construct
  source 1..50: mol_type = other DNA
tcaaaacacacccttaaaaaccccaaaaataaacattctacctccttatc

SEQ ID NO: 3972 - DNA, 50 bp, synthetic construct
  source 1..50: mol_type = other DNA
crctctttataaaaaatataaaccccaactacaattcatcttcatctctc

SEQ ID NO: 3973 - DNA, 50 bp, synthetic construct
  source 1..50: mol_type = other DNA
aataaatacaaacaacaaaataccttcctcrcrataaaattcaaaaaacc

SEQ ID NO: 3974 - DNA, 50 bp, synthetic construct
  source 1..50: mol_type = other DNA
tacaaactcttaaatacaaataaatacaaacaacaaaataccttcctcrc

SEQ ID NO: 3975 - DNA, 50 bp, synthetic construct
  source 1..50: mol_type = other DNA
aaaaaaaactaattattaaatatcactttcaaaaaatccrccttaaaatc

SEQ ID NO: 3976 - DNA, 50 bp, synthetic construct
  source 1..50: mol_type = other DNA
aaaaaaaacacccaataaacttaaaaatctaactaaaacratttcaaaac

SEQ ID NO: 3977 - DNA, 50 bp, synthetic construct
  source 1..50: mol_type = other DNA
tctacattcctacttacaacattcctatacaaccttaaacaaaaaactcc

SEQ ID NO: 3978 - DNA, 50 bp, synthetic construct
  source 1..50: mol_type = other DNA
aaactctttatataaacttaataaacatatttctccctcaaaactaatcc

SEQ ID NO: 3979 - DNA, 50 bp, synthetic construct
  source 1..50: mol_type = other DNA
aaaacaaatcctcctaaaaacttctcaaaactaaatactcaacctccccc

SEQ ID NO: 3980 - DNA, 50 bp, synthetic construct
  source 1..50: mol_type = other DNA
actaaccrataaaactctctaaacccraaccaaatctttaaaactcttcc

SEQ ID NO: 3981 - DNA, 50 bp, synthetic construct
  source 1..50: mol_type = other DNA
ctaaaaaacaaaaaccctaaacraactaaccrataaaactctctaaaccc

SEQ ID NO: 3982 - DNA, 50 bp, synthetic construct
  source 1..50: mol_type = other DNA
ccctttatactaccaaacccaaaaaaacaataaaaatctatttcctcccc

SEQ ID NO: 3983 - DNA, 50 bp, synthetic construct
  source 1..50: mol_type = other DNA
raaaatattattatttctaaaaactacaaccaactaaaccrcaaaaaaac

SEQ ID NO: 3984 - DNA, 50 bp, synthetic construct
  source 1..50: mol_type = other DNA
ctacaaccaactaaaccrcaaaaaaacrtcaactctataaaaaaataaac

SEQ ID NO: 3985 - DNA, 50 bp, synthetic construct
  source 1..50: mol_type = other DNA
ctaaaccaatcacraaaaactcttaccttataaacacatacttaacrttc

SEQ ID NO: 3986 - DNA, 50 bp, synthetic construct
  source 1..50: mol_type = other DNA
actcctaaaccaatcacraaaaactcttaccttataaacacatacttaac

SEQ ID NO: 3987 - DNA, 50 bp, synthetic construct
  source 1..50: mol_type = other DNA
caactatatctacraacrctaaacatatacctataaaacaaaaacccttc

SEQ ID NO: 3988 - DNA, 50 bp, synthetic construct
  source 1..50: mol_type = other DNA
ataaacaataattcccaaaatataatctaaaaacctctaaaaattcctac

SEQ ID NO: 3989 - DNA, 50 bp, synthetic construct
  source 1..50: mol_type = other DNA
tataacaacctctctatccataataataacttacttcttccctatttaac

SEQ ID NO: 3990 - DNA, 50 bp, synthetic construct
  source 1..50: mol_type = other DNA
tattctaaaaaactaataaataattcacattctttcttttccttactttc

SEQ ID NO: 3991 - DNA, 50 bp, synthetic construct
  source 1..50: mol_type = other DNA
ttcttttccttactttcrtttctctacaaaataatacaaaattaaactac

SEQ ID NO: 3992 - DNA, 50 bp, synthetic construct
  source 1..50: mol_type = other DNA
aaaataatctcaacaaaaactacaacaaaaacacaacacraataaatccc

SEQ ID NO: 3993 - DNA, 50 bp, synthetic construct
  source 1..50: mol_type = other DNA
ttaaacrctaatacactaatcacataaatattaacaactccctaaacctc

SEQ ID NO: 3994 - DNA, 50 bp, synthetic construct
  source 1..50: mol_type = other DNA
taaaaaaatccaaatttactcctaaaatttccttaaactaacaaataaac

SEQ ID NO: 3995 - DNA, 50 bp, synthetic construct
  source 1..50: mol_type = other DNA
ctactaacattccattaacataaataacccaaaacraattttctcaaccc

SEQ ID NO: 3996 - DNA, 50 bp, synthetic construct
  source 1..50: mol_type = other DNA
acttctttaccaaacacataatataatcraatctaccctaaacccattcc

SEQ ID NO: 3997 - DNA, 50 bp, synthetic construct
  source 1..50: mol_type = other DNA
aacaatttactctaccaaaaaacaaattccctttaaaattctttccttcc

SEQ ID NO: 3998 - DNA, 50 bp, synthetic construct
  source 1..50: mol_type = other DNA
ctcattctcaaaaaaaataactacccattcataaaaacactcactcaccc

SEQ ID NO: 3999 - DNA, 50 bp, synthetic construct
  source 1..50: mol_type = other DNA
tacactcctttaaaaccttatatactaaactttatacctaatatataatc

SEQ ID NO: 4000 - DNA, 50 bp, synthetic construct
  source 1..50: mol_type = other DNA
taaaaaataatccaaacacrataacccataataacattacttaaaactac

SEQ ID NO: 4001 - DNA, 50 bp, synthetic construct
  source 1..50: mol_type = other DNA
caatcaatactttcacaattattataaaaacctaaaaatcttaccactac

SEQ ID NO: 4002 - DNA, 50 bp, synthetic construct
  source 1..50: mol_type = other DNA
cataaaacacaaaacaaacacaccctccaatactactctattcactaaac

SEQ ID NO: 4003 - DNA, 50 bp, synthetic construct
  source 1..50: mol_type = other DNA
aaatattctttactcttattatctaaattcacrttttctatacacaaacc

SEQ ID NO: 4004 - DNA, 50 bp, synthetic construct
  source 1..50: mol_type = other DNA
tttacttatatcccrtaaaaatattctttactcttattatctaaattcac

SEQ ID NO: 4005 - DNA, 50 bp, synthetic construct
  source 1..50: mol_type = other DNA
atcctactatcaacactcactttatacttaacccatacataaataaaaac

SEQ ID NO: 4006 - DNA, 50 bp, synthetic construct
  source 1..50: mol_type = other DNA
tatactaaacccaataaaaaaaccaaataaatcaaatactactaccttac

SEQ ID NO: 4007 - DNA, 50 bp, synthetic construct
  source 1..50: mol_type = other DNA
aaaaaccaaataaatcaaatactactaccttacraaaactcataaaattc

SEQ ID NO: 4008 - DNA, 50 bp, synthetic construct
  source 1..50: mol_type = other DNA
aaaccttctctaaactataaattccacaatcaaatatttaaaaaaatatc

SEQ ID NO: 4009 - DNA, 50 bp, synthetic construct
  source 1..50: mol_type = other DNA
tctaaatatctaactataaaatccataacccaaaaaaaatcttatatatc

SEQ ID NO: 4010 - DNA, 50 bp, synthetic construct
  source 1..50: mol_type = other DNA
caaaaactaaacaactttatacctctccactaaacaaaaaacactacccc

SEQ ID NO: 4011 - DNA, 50 bp, synthetic construct
  source 1..50: mol_type = other DNA
tactaccttaaacaaccttcaatacaacttaaaaaccttatacattcatc

SEQ ID NO: 4012 - DNA, 50 bp, synthetic construct
  source 1..50: mol_type = other DNA
aacctcaatttattcttctaaataaaaaatattaaaattccaactaaacc

SEQ ID NO: 4013 - DNA, 50 bp, synthetic construct
  source 1..50: mol_type = other DNA
ctcaaaaacttatattttcctatctaaaaaccaaccttatttctttaccc

SEQ ID NO: 4014 - DNA, 50 bp, synthetic construct
  source 1..50: mol_type = other DNA
aaacttatattttcctatctaaaaaccaaccttatttctttacccraaac

SEQ ID NO: 4015 - DNA, 50 bp, synthetic construct
  source 1..50: mol_type = other DNA
caaacacttctacacttcacatacaacttccaaaaatcaaaactccccac

SEQ ID NO: 4016 - DNA, 50 bp, synthetic construct
  source 1..50: mol_type = other DNA
taaaaccraaaacaactcaaaacaaaatataattaaaaactaaactatac

SEQ ID NO: 4017 - DNA, 50 bp, synthetic construct
  source 1..50: mol_type = other DNA
aaaataacataataccacraaaaaccccrccctaaaaatactcaaaaaac

SEQ ID NO: 4018 - DNA, 50 bp, synthetic construct
  source 1..50: mol_type = other DNA
caaacactataaataatacaaaaaaataacataataccacraaaaacccc

SEQ ID NO: 4019 - DNA, 50 bp, synthetic construct
  source 1..50: mol_type = other DNA
ctactatatacaaacactataaataatacaaaaaaataacataataccac

SEQ ID NO: 4020 - DNA, 50 bp, synthetic construct
  source 1..50: mol_type = other DNA
ttcacttattatctaaatcatctcttacttctcaacctcttaaaaattcc

SEQ ID NO: 4021 - DNA, 50 bp, synthetic construct
  source 1..50: mol_type = other DNA
acatctaaatctcctaaaaatcttattccaacacatattctaattccatc

SEQ ID NO: 4022 - DNA, 50 bp, synthetic construct
  source 1..50: mol_type = other DNA
ccatcratctaaaataaaacctaaaattctccatttctaacaaattcctc

SEQ ID NO: 4023 - DNA, 50 bp, synthetic construct
  source 1..50: mol_type = other DNA
cccatatactcaatataataacacacractctaaatttaaaaacttctac

SEQ ID NO: 4024 - DNA, 50 bp, synthetic construct
  source 1..50: mol_type = other DNA
actatcataaattccaataaataataaataaacatcctaacctaaaaaac

SEQ ID NO: 4025 - DNA, 50 bp, synthetic construct
  source 1..50: mol_type = other DNA
acactcaaaatctattatctccctaaactttctaaacactacaaaaaaac

SEQ ID NO: 4026 - DNA, 50 bp, synthetic construct
  source 1..50: mol_type = other DNA
taaatacaataaaatacttaaacatcaacataaacttttaaatataaacc

SEQ ID NO: 4027 - DNA, 50 bp, synthetic construct
  source 1..50: mol_type = other DNA
actttaaaataatacatctaaaactctacaaaccacatttctcctttacc

SEQ ID NO: 4028 - DNA, 50 bp, synthetic construct
  source 1..50: mol_type = other DNA
ttactcatttataacttaaaacaaaaccttatacattttataaaactccc

SEQ ID NO: 4029 - DNA, 50 bp, synthetic construct
  source 1..50: mol_type = other DNA
actataaactccaaataaaaataactttataacacatataataaaatttc

SEQ ID NO: 4030 - DNA, 50 bp, synthetic construct
  source 1..50: mol_type = other DNA
tataacacatataataaaatttcrccaactttcaacaacccctacttatc

SEQ ID NO: 4031 - DNA, 50 bp, synthetic construct
  source 1..50: mol_type = other DNA
caaaccaaccrctaaaaacaaaaatttataacaaaaacacatatctaacc

SEQ ID NO: 4032 - DNA, 50 bp, synthetic construct
  source 1..50: mol_type = other DNA
aaaaatcataaaaaaataacccctctaattaaacaaacaacaaaccaacc

SEQ ID NO: 4033 - DNA, 50 bp, synthetic construct
  source 1..50: mol_type = other DNA
ctaacttactatctatctaaccaaaaaaaccatctttccataattctttc

SEQ ID NO: 4034 - DNA, 50 bp, synthetic construct
  source 1..50: mol_type = other DNA
aaaccactaaaaaaaccaacrcctatctaataaaaaaattctatatctcc

SEQ ID NO: 4035 - DNA, 50 bp, synthetic construct
  source 1..50: mol_type = other DNA
cactctctacctttaaaaacraaaacacaaaatctcctcaccaaacaaac

SEQ ID NO: 4036 - DNA, 50 bp, synthetic construct
  source 1..50: mol_type = other DNA
acrctatactaaaaaaaccactactctcttcaaaactatcaaacaaaaac

SEQ ID NO: 4037 - DNA, 50 bp, synthetic construct
  source 1..50: mol_type = other DNA
acaaaataaacaacctaaaaaaacccrcaaaaacctccctaaatccctac

SEQ ID NO: 4038 - DNA, 50 bp, synthetic construct
  source 1..50: mol_type = other DNA
atatataaaaaactatcacataatataccaactcaaattcaaaatataac

SEQ ID NO: 4039 - DNA, 50 bp, synthetic construct
  source 1..50: mol_type = other DNA
ttaaattaatataccatataacaattctttatatatatattttcaacacc

SEQ ID NO: 4040 - DNA, 50 bp, synthetic construct
  source 1..50: mol_type = other DNA
atatatatattttcaacaccrctataacaaaaatatctttctatttttac

SEQ ID NO: 4041 - DNA, 50 bp, synthetic construct
  source 1..50: mol_type = other DNA
tacaactaaaatttaacaactataaaaaacaaaacatacactaaaaatac

SEQ ID NO: 4042 - DNA, 50 bp, synthetic construct
  source 1..50: mol_type = other DNA
acaataataaaaacaaaaaccacttaaaaaactactccaaaaataataac

SEQ ID NO: 4043 - DNA, 50 bp, synthetic construct
  source 1..50: mol_type = other DNA
ccatcatttctaaaataacctcccaaataacccctacttccattattacc

SEQ ID NO: 4044 - DNA, 50 bp, synthetic construct
  source 1..50: mol_type = other DNA
acraacccaaatataacraaaaacaactacaaaattttaaactaataacc

SEQ ID NO: 4045 - DNA, 50 bp, synthetic construct
  source 1..50: mol_type = other DNA
cactcaaaaataatatcrattattaacttaaaatcctacaattacttccc

SEQ ID NO: 4046 - DNA, 50 bp, synthetic construct
  source 1..50: mol_type = other DNA
tacrtaactcattcctcttaacattaaattctcaatttcaaaacccactc

SEQ ID NO: 4047 - DNA, 50 bp, synthetic construct
  source 1..50: mol_type = other DNA
cactattatctctataaacaaaaacactcrcrattaaaaaaactatattc

SEQ ID NO: 4048 - DNA, 50 bp, synthetic construct
  source 1..50: mol_type = other DNA
aattttctttcaaatatatcttcaatttaaaaaaccaaatttacacattc

SEQ ID NO: 4049 - DNA, 50 bp, synthetic construct
  source 1..50: mol_type = other DNA
ctaactacctttatatttaccacaacrtactaaaaatcaaataaaaaaac

SEQ ID NO: 4050 - DNA, 50 bp, synthetic construct
  source 1..50: mol_type = other DNA
rcaacractttctccacaaaataaaacatcctatattctaaaatctaaac

SEQ ID NO: 4051 - DNA, 50 bp, synthetic construct
  source 1..50: mol_type = other DNA
actttctccaataaaactaaaaccaaatcttaactcacaacatttctccc

SEQ ID NO: 4052 - DNA, 50 bp, synthetic construct
  source 1..50: mol_type = other DNA
aaccaaatcttaactcacaacatttctcccraaaaatctactccatcttc

SEQ ID NO: 4053 - DNA, 50 bp, synthetic construct
  source 1..50: mol_type = other DNA
ctcacaacatttctcccraaaaatctactccatcttcratcatcatttac

SEQ ID NO: 4054 - DNA, 50 bp, synthetic construct
  source 1..50: mol_type = other DNA
aaacattcccctaaaataaaaaattaaaaccttaaacractatttcctcc

SEQ ID NO: 4055 - DNA, 50 bp, synthetic construct
  source 1..50: mol_type = other DNA
ttttaatcttccatcttaaaaaaatatccacaaccctaattaaaataacc

SEQ ID NO: 4056 - DNA, 50 bp, synthetic construct
  source 1..50: mol_type = other DNA
tcttccatcttaaaaaaatatccacaaccctaattaaaataaccrtaacc

SEQ ID NO: 4057 - DNA, 50 bp, synthetic construct
  source 1..50: mol_type = other DNA
aatatccacaaccctaattaaaataaccrtaaccraacttaataactcac

SEQ ID NO: 4058 - DNA, 50 bp, synthetic construct
  source 1..50: mol_type = other DNA
ttattactattatatactaaataaaactaaaccaaataaacrccraaatc

SEQ ID NO: 4059 - DNA, 50 bp, synthetic construct
  source 1..50: mol_type = other DNA
ctaatttataaacctcttaacacaaacaaaatcaactattttacracccc

SEQ ID NO: 4060 - DNA, 50 bp, synthetic construct
  source 1..50: mol_type = other DNA
atttataaacctcttaacacaaacaaaatcaactattttacraccccrac

SEQ ID NO: 4061 - DNA, 50 bp, synthetic construct
  source 1..50: mol_type = other DNA
aaaattttcacraatatataacttaacaaaatactaaaccatcaattctc

SEQ ID NO: 4062 - DNA, 50 bp, synthetic construct
  source 1..50: mol_type = other DNA
tttaacaacccraaaactaataacctaatattctactaaattacatatcc

SEQ ID NO: 4063 - DNA, 50 bp, synthetic construct
  source 1..50: mol_type = other DNA
craaattctataacacatattaacaatacaaaacacaccttaaaaaacac

SEQ ID NO: 4064 - DNA, 50 bp, synthetic construct
  source 1..50: mol_type = other DNA
crtatttcttaaaatatatcctacactattaatatatactataaaacccc

SEQ ID NO: 4065 - DNA, 50 bp, synthetic construct
  source 1..50: mol_type = other DNA
aaacctcaaccatctaaaccttctttaaatctcatattttcaaaactccc

SEQ ID NO: 4066 - DNA, 50 bp, synthetic construct
  source 1..50: mol_type = other DNA
cttcccacaatatactacaatatcccccaaaactcaaaacaactttatcc

SEQ ID NO: 4067 - DNA, 50 bp, synthetic construct
  source 1..50: mol_type = other DNA
aaaaaaaattttaaaacaattacatttctaaaccaaacacaataactcac

SEQ ID NO: 4068 - DNA, 50 bp, synthetic construct
  source 1..50: mol_type = other DNA
aataaactaaaactataccactacaccactcctacctaaacaacaaaaac

SEQ ID NO: 4069 - DNA, 50 bp, synthetic construct
  source 1..50: mol_type = other DNA
tctctctaaaattccatcatctaattaaaaaaaattcttccaaaaaaaac

SEQ ID NO: 4070 - DNA, 50 bp, synthetic construct
  source 1..50: mol_type = other DNA
attccaccattataatttattcctaccccaccttaactaaataattaacc

SEQ ID NO: 4071 - DNA, 50 bp, synthetic construct
  source 1..50: mol_type = other DNA
acaaaaccttttcacttttataattcttcaattacttaaaccatctaaac

SEQ ID NO: 4072 - DNA, 50 bp, synthetic construct
  source 1..50: mol_type = other DNA
ttcaattacttaaaccatctaaacrtatacctacaactcacaaaaaatac

SEQ ID NO: 4073 - DNA, 50 bp, synthetic construct
  source 1..50: mol_type = other DNA
aattacttaaaccatctaaacrtatacctacaactcacaaaaaatacrac

SEQ ID NO: 4074 - DNA, 50 bp, synthetic construct
  source 1..50: mol_type = other DNA
ctctacatttctcataacttccaaaatctattttcttcctcatacctaac

SEQ ID NO: 4075 - DNA, 50 bp, synthetic construct
  source 1..50: mol_type = other DNA
ttatcccttatctttctctctaatacttactcctataaccttatccaaac

SEQ ID NO: 4076 - DNA, 50 bp, synthetic construct
  source 1..50: mol_type = other DNA
aaaaacraatttcccccttactattctcrtaataataaataaattctcac

SEQ ID NO: 4077 - DNA, 50 bp, synthetic construct
  source 1..50: mol_type = other DNA
tctaaatatcaactaatatctacataacccrttcaccataaattaaatac

SEQ ID NO: 4078 - DNA, 50 bp, synthetic construct
  source 1..50: mol_type = other DNA
aattcttctccaaactaataattaaaaaacctacaaatccaaattcccac

SEQ ID NO: 4079 - DNA, 50 bp, synthetic construct
  source 1..50: mol_type = other DNA
ttaaatcctatctcaactaatatacaaatcaaactaaaaataacaacttc

SEQ ID NO: 4080 - DNA, 50 bp, synthetic construct
  source 1..50: mol_type = other DNA
aaatcaaactaaaaataacaacttcraaaaaccacrtatcccaacttacc

SEQ ID NO: 4081 - DNA, 50 bp, synthetic construct
  source 1..50: mol_type = other DNA
cccaattttaaacacttatataacaaactaatattccccattacctctcc

SEQ ID NO: 4082 - DNA, 50 bp, synthetic construct
  source 1..50: mol_type = other DNA
tttatcaacattctaaaatactatatattaaaataacttctctaaacccc

SEQ ID NO: 4083 - DNA, 50 bp, synthetic construct
  source 1..50: mol_type = other DNA
ttaaataatacctactatacatcaaataatatccatacttaatctataac

SEQ ID NO: 4084 - DNA, 50 bp, synthetic construct
  source 1..50: mol_type = other DNA
aacraaattatcctaaatcctttaatacactaaatatatactccatttcc

SEQ ID NO: 4085 - DNA, 50 bp, synthetic construct
  source 1..50: mol_type = other DNA
ttttacctactaaaacccrtttaaactcaaaaaatccrcacttaaaattc

SEQ ID NO: 4086 - DNA, 50 bp, synthetic construct
  source 1..50: mol_type = other DNA
actacctaataaaacaacraactccaaatacraaccttttaaatttaaac

SEQ ID NO: 4087 - DNA, 50 bp, synthetic construct
  source 1..50: mol_type = other DNA
ractaattttttttcctccatctaaattacraaaatactataaactttac

SEQ ID NO: 4088 - DNA, 50 bp, synthetic construct
  source 1..50: mol_type = other DNA
aatttaaacraatttcaataaataaaatacrtaaaattcacaataccctc

SEQ ID NO: 4089 - DNA, 50 bp, synthetic construct
  source 1..50: mol_type = other DNA
ccctcctccaaattattcttccraatataatttaaaattcaaaaacraac

SEQ ID NO: 4090 - DNA, 50 bp, synthetic construct
  source 1..50: mol_type = other DNA
aaaaaatcctaccrcaataaatttaaaaaactcaatttttactaaaacrc

SEQ ID NO: 4091 - DNA, 50 bp, synthetic construct
  source 1..50: mol_type = other DNA
cttttaaaaaaattacctacttcaaaatttacrtacaaaatccaaaccac

SEQ ID NO: 4092 - DNA, 50 bp, synthetic construct
  source 1..50: mol_type = other DNA
ttacctacttcaaaatttacrtacaaaatccaaaccacrctctataattc

SEQ ID NO: 4093 - DNA, 50 bp, synthetic construct
  source 1..50: mol_type = other DNA
ttcrtcctcctttaattcrcttataacttccctaatcctaaaatcaaatc

SEQ ID NO: 4094 - DNA, 50 bp, synthetic construct
  source 1..50: mol_type = other DNA
cttcaatacatatacatttttaataaaaactcttcrtcctcctttaattc

SEQ ID NO: 4095 - DNA, 50 bp, synthetic construct
  source 1..50: mol_type = other DNA
acataaaaccaccatcttcaatacatatacatttttaataaaaactcttc

SEQ ID NO: 4096 - DNA, 50 bp, synthetic construct
  source 1..50: mol_type = other DNA
ccacaattaaaaataactaactaaactacatatctctcataaaaatcctc

SEQ ID NO: 4097 - DNA, 50 bp, synthetic construct
  source 1..50: mol_type = other DNA
cacaaattcaaattacaaataaccaaaattactttacctaatttactcac

SEQ ID NO: 4098 - DNA, 50 bp, synthetic construct
  source 1..50: mol_type = other DNA
crtcaatataaaattctaaaataaccacttcaaaaatatctacctcccac

SEQ ID NO: 4099 - DNA, 50 bp, synthetic construct
  source 1..50: mol_type = other DNA
rcattcccctctacctaaattattcaattatctctatatacraattatac

SEQ ID NO: 4100 - DNA, 50 bp, synthetic construct
  source 1..50: mol_type = other DNA
aatctcactaacctcctcctttttaaaaacttttcaaatacrtataaccc

SEQ ID NO: 4101 - DNA, 50 bp, synthetic construct
  source 1..50: mol_type = other DNA
actaactcrctctcttctttaccttccataataacattaccatttaccac

SEQ ID NO: 4102 - DNA, 50 bp, synthetic construct
  source 1..50: mol_type = other DNA
ttaatcctacctccttacttaaaataaaactttatacatacctatattac

SEQ ID NO: 4103 - DNA, 50 bp, synthetic construct
  source 1..50: mol_type = other DNA
atacatacctatattacraacatcctcttatttaaatatttatctctttc

SEQ ID NO: 4104 - DNA, 50 bp, synthetic construct
  source 1..50: mol_type = other DNA
ctattctcaataaaactactttcaatctcaaaaaactataatatatatac

SEQ ID NO: 4105 - DNA, 50 bp, synthetic construct
  source 1..50: mol_type = other DNA
ttaaaaacaaaaatttttatcttattcacctctatataatttccaacatc

SEQ ID NO: 4106 - DNA, 50 bp, synthetic construct
  source 1..50: mol_type = other DNA
cattttcttatcraaacaactcttcctaatttccataattcttaaatacc

SEQ ID NO: 4107 - DNA, 50 bp, synthetic construct
  source 1..50: mol_type = other DNA
aaaccattaactcaccactttaataaaaacaatcacaccctttcaaatac

SEQ ID NO: 4108 - DNA, 50 bp, synthetic construct
  source 1..50: mol_type = other DNA
aattaatacaaaaataattacaatttttacctcraaaaataaatcctccc

SEQ ID NO: 4109 - DNA, 50 bp, synthetic construct
  source 1..50: mol_type = other DNA
taaataaaaactctactactacctttcaccttcraaaaaacttatcttcc

SEQ ID NO: 4110 - DNA, 50 bp, synthetic construct
  source 1..50: mol_type = other DNA
ttttaaaaaatcraattctcrccctattccccaaactacaatacaataac

SEQ ID NO: 4111 - DNA, 50 bp, synthetic construct
  source 1..50: mol_type = other DNA
ccccctccaaacratatctaaaacraattttaaaaattaatactaaaaac

SEQ ID NO: 4112 - DNA, 50 bp, synthetic construct
  source 1..50: mol_type = other DNA
tacatcaacaaatattcaacacctaaccccctccaaacratatctaaaac

SEQ ID NO: 4113 - DNA, 50 bp, synthetic construct
  source 1..50: mol_type = other DNA
ctaactaaattctaaacaaaaaccaaaaccaaaaccataaaatatacacc

SEQ ID NO: 4114 - DNA, 50 bp, synthetic construct
  source 1..50: mol_type = other DNA
ccaactactccraaaactaaaacaattttataaccacaaaactaactacc

SEQ ID NO: 4115 - DNA, 50 bp, synthetic construct
  source 1..50: mol_type = other DNA
caatcaaacacracaaccaattttataactacaaaactacctcaacctcc

SEQ ID NO: 4116 - DNA, 50 bp, synthetic construct
  source 1..50: mol_type = other DNA
ttataatccacacctccaacatacataataaaacaaacrtctctatccac

SEQ ID NO: 4117 - DNA, 50 bp, synthetic construct
  source 1..50: mol_type = other DNA
aaacataaataacctaacctcctctaaactttttaccaaaaacctcatac

SEQ ID NO: 4118 - DNA, 50 bp, synthetic construct
  source 1..50: mol_type = other DNA
tacaacctcaatattactctaactaaatcactttaatcaatcaccaatac

SEQ ID NO: 4119 - DNA, 50 bp, synthetic construct
  source 1..50: mol_type = other DNA
aacaaaacacaaaaactttatataatcttccaaaatccccttaaatacrc

SEQ ID NO: 4120 - DNA, 50 bp, synthetic construct
  source 1..50: mol_type = other DNA
ctaacaaaacacaaaaactttatataatcttccaaaatccccttaaatac

SEQ ID NO: 4121 - DNA, 50 bp, synthetic construct
  source 1..50: mol_type = other DNA
ttcaaaaaaatcctaaaaaaccacacaaaacttctatattctaccaacac

SEQ ID NO: 4122 - DNA, 50 bp, synthetic construct
  source 1..50: mol_type = other DNA
aatcctaaaaaaccacacaaaacttctatattctaccaacacraaataac

SEQ ID NO: 4123 - DNA, 50 bp, synthetic construct
  source 1..50: mol_type = other DNA
cctaaaaacaaaacaaaaaaccaaactcactctttaacacccaaaaatcc

SEQ ID NO: 4124 - DNA, 50 bp, synthetic construct
  source 1..50: mol_type = other DNA
atctaacctacccttcattcaaattatctactaaaaaaaattcccctaac

SEQ ID NO: 4125 - DNA, 50 bp, synthetic construct
  source 1..50: mol_type = other DNA
aaaaaaacctcctccaacaaataacttaaataaaaaacaaaccaaacacc

SEQ ID NO: 4126 - DNA, 50 bp, synthetic construct
  source 1..50: mol_type = other DNA
racaaatattacrccctcatatatatccacttacaacttctaattacacc

SEQ ID NO: 4127 - DNA, 50 bp, synthetic construct
  source 1..50: mol_type = other DNA
aataacaattaatttccttcactctcttaattataattaaaaaaatcaac

SEQ ID NO: 4128 - DNA, 50 bp, synthetic construct
  source 1..50: mol_type = other DNA
aaaaaaaactcccttctaaaaactaatcccacaaaacccraaactaaaac

SEQ ID NO: 4129 - DNA, 50 bp, synthetic construct
  source 1..50: mol_type = other DNA
ccaccctaccaccttaactttaaaatatatcaaaaacatcttttcctcac

SEQ ID NO: 4130 - DNA, 50 bp, synthetic construct
  source 1..50: mol_type = other DNA
aaataaatctctttctccataaacattccattcactccctatacatatac

SEQ ID NO: 4131 - DNA, 50 bp, synthetic construct
  source 1..50: mol_type = other DNA
tctctttctccataaacattccattcactccctatacatatacrtatttc

SEQ ID NO: 4132 - DNA, 50 bp, synthetic construct
  source 1..50: mol_type = other DNA
attactattaaacaaatctcaaaaccctaaaatacttcactttccttctc

SEQ ID NO: 4133 - DNA, 50 bp, synthetic construct
  source 1..50: mol_type = other DNA
aaaaaataacctactacctaaaaaatacaaatacctccctccacaacctc

SEQ ID NO: 4134 - DNA, 50 bp, synthetic construct
  source 1..50: mol_type = other DNA
ataaatattcacccatcataaaccaaaaatatacttcctcctatcaatac

SEQ ID NO: 4135 - DNA, 50 bp, synthetic construct
  source 1..50: mol_type = other DNA
aaaaatcttaaataactacaaaaaccrcatatttttctaccaaaatcccc

SEQ ID NO: 4136 - DNA, 50 bp, synthetic construct
  source 1..50: mol_type = other DNA
ccacccaaaatcttctaaataaaaacccctacaccaacaaactaaatatc

SEQ ID NO: 4137 - DNA, 50 bp, synthetic construct
  source 1..50: mol_type = other DNA
ctaaataaaaacccctacaccaacaaactaaatatcrtaaacctccaaac

SEQ ID NO: 4138 - DNA, 50 bp, synthetic construct
  source 1..50: mol_type = other DNA
aacccctacaccaacaaactaaatatcrtaaacctccaaacrattttaac

SEQ ID NO: 4139 - DNA, 50 bp, synthetic construct
  source 1..50: mol_type = other DNA
cctttccttaatttcttcacaaaaacaattatctttaaatctcaaattac

SEQ ID NO: 4140 - DNA, 50 bp, synthetic construct
  source 1..50: mol_type = other DNA
aaaaaacaaattaaacactatatctctactcaaattcacttaaaataccc

SEQ ID NO: 4141 - DNA, 50 bp, synthetic construct
  source 1..50: mol_type = other DNA
cctaatacttttctacctaacccataaactccaatcaactacctactcac

SEQ ID NO: 4142 - DNA, 50 bp, synthetic construct
  source 1..50: mol_type = other DNA
caaacraatcccatctaacctcttctaccttttaataactaacttttcac

SEQ ID NO: 4143 - DNA, 50 bp, synthetic construct
  source 1..50: mol_type = other DNA
aaaactaaacaaaatcctaaaacaaattcrataacaaccrcaaaaccctc

SEQ ID NO: 4144 - DNA, 50 bp, synthetic construct
  source 1..50: mol_type = other DNA
aacctatctaccaactaaaaatatcaaatacaactcctaaaaaacactac

SEQ ID NO: 4145 - DNA, 50 bp, synthetic construct
  source 1..50: mol_type = other DNA
aaaacraaaactaaacatcccaaaacccataaataaaaaacaacccccac

SEQ ID NO: 4146 - DNA, 50 bp, synthetic construct
  source 1..50: mol_type = other DNA
aactctctattaacatcactaacctataactaataaactctaaaaaaacc

SEQ ID NO: 4147 - DNA, 50 bp, synthetic construct
  source 1..50: mol_type = other DNA
ataataacaaaaaacaaaccactaaatacaaactcaaacctctcaactac

SEQ ID NO: 4148 - DNA, 50 bp, synthetic construct
  source 1..50: mol_type = other DNA
aacaataaatccatctacaatcttaccttaatacctacctaactttcccc

SEQ ID NO: 4149 - DNA, 50 bp, synthetic construct
  source 1..50: mol_type = other DNA
ataataatttctattttacraattcaactaaaaaactaaacctcaaaacc

SEQ ID NO: 4150 - DNA, 50 bp, synthetic construct
  source 1..50: mol_type = other DNA
taatttctattttacraattcaactaaaaaactaaacctcaaaaccracc

SEQ ID NO: 4151 - DNA, 50 bp, synthetic construct
  source 1..50: mol_type = other DNA
raattcaactaaaaaactaaacctcaaaaccraccraaaaaactatccac

SEQ ID NO: 4152 - DNA, 50 bp, synthetic construct
  source 1..50: mol_type = other DNA
caaacaaatcaccaaatctttcaaaccctcaatatcattaaaaaataacc

SEQ ID NO: 4153 - DNA, 50 bp, synthetic construct
  source 1..50: mol_type = other DNA
aaaattctaaaactaaaaaataactacaataaccaacattcrcttttctc

SEQ ID NO: 4154 - DNA, 50 bp, synthetic construct
  source 1..50: mol_type = other DNA
cccccactttaaaataaaccctaaaaacccttaaaaatctcraaaaaaac

SEQ ID NO: 4155 - DNA, 50 bp, synthetic construct
  source 1..50: mol_type = other DNA
ctaatcactataaccattctctaattccaaaacctcttaaaaacctcaac

SEQ ID NO: 4156 - DNA, 50 bp, synthetic construct
  source 1..50: mol_type = other DNA
aaacctcttaaaaacctcaacraaatccaaaactaaataaattttaaaac

SEQ ID NO: 4157 - DNA, 50 bp, synthetic construct
  source 1..50: mol_type = other DNA
aaataaataattcaacttttaatcttttaaacattaaaatatattcctcc

SEQ ID NO: 4158 - DNA, 50 bp, synthetic construct
  source 1..50: mol_type = other DNA
aaaaataacaataataaacrcaaataataaacataacrttatacattccc

SEQ ID NO: 4159 - DNA, 50 bp, synthetic construct
  source 1..50: mol_type = other DNA
acctttttctctaaaaacactattttcaaaacaacaaacctccctaaaac

SEQ ID NO: 4160 - DNA, 50 bp, synthetic construct
  source 1..50: mol_type = other DNA
aaaaacctctccttttacataataaactaccaataaaaacccttctaacc

SEQ ID NO: 4161 - DNA, 50 bp, synthetic construct
  source 1..50: mol_type = other DNA
aatatatactatttaaccccccttacaaataaaacattataaattaaaac

SEQ ID NO: 4162 - DNA, 50 bp, synthetic construct
  source 1..50: mol_type = other DNA
tctaaaattattctccccaataaaaacctaaaatactaatattacatacc

SEQ ID NO: 4163 - DNA, 50 bp, synthetic construct
  source 1..50: mol_type = other DNA
tactacttaaaacaaaatcccaaactcatacacactttcctatatcacac

SEQ ID NO: 4164 - DNA, 50 bp, synthetic construct
  source 1..50: mol_type = other DNA
ctcaaatcaaactaaaaactatacttaaattacattatcttactaccctc

SEQ ID NO: 4165 - DNA, 50 bp, synthetic construct
  source 1..50: mol_type = other DNA
taactaccaaaaaacaaaactaaatttaaaactaaatcacaacttctaac

SEQ ID NO: 4166 - DNA, 50 bp, synthetic construct
  source 1..50: mol_type = other DNA
tatatcaaaatcacctaaaacacttttacaaaaatacacatacttaaccc

SEQ ID NO: 4167 - DNA, 50 bp, synthetic construct
  source 1..50: mol_type = other DNA
tacaaaaataccccaaataattctaacacatactcctaattaaaaaccac

SEQ ID NO: 4168 - DNA, 50 bp, synthetic construct
  source 1..50: mol_type = other DNA
aataccccaaataattctaacacatactcctaattaaaaaccacrattac

SEQ ID NO: 4169 - DNA, 50 bp, synthetic construct
  source 1..50: mol_type = other DNA
ccccaaataattctaacacatactcctaattaaaaaccacrattacracc

SEQ ID NO: 4170 - DNA, 50 bp, synthetic construct
  source 1..50: mol_type = other DNA
taataaattacctattcrtatctttttcacctttttctattaaaatattc

SEQ ID NO: 4171 - DNA, 50 bp, synthetic construct
  source 1..50: mol_type = other DNA
aaccacatattttcccttcttaaattattcaataaatatcattaaacaac

SEQ ID NO: 4172 - DNA, 50 bp, synthetic construct
  source 1..50: mol_type = other DNA
aaatttaaccaaaaattctacatttaattaaaaatatcttccraaaaccc

SEQ ID NO: 4173 - DNA, 50 bp, synthetic construct
  source 1..50: mol_type = other DNA
cctaatctaaatttaaccaaaaattctacatttaattaaaaatatcttcc

SEQ ID NO: 4174 - DNA, 50 bp, synthetic construct
  source 1..50: mol_type = other DNA
tataacaaacaatatattctcccacttaaaaactaaacctaattaactac

SEQ ID NO: 4175 - DNA, 50 bp, synthetic construct
  source 1..50: mol_type = other DNA
acaatatattctcccacttaaaaactaaacctaattaactacrcatatac

SEQ ID NO: 4176 - DNA, 50 bp, synthetic construct
  source 1..50: mol_type = other DNA
taacttcaaactcaaaaccrcttttatttttcaattaaatcracaacccc

SEQ ID NO: 4177 - DNA, 50 bp, synthetic construct
  source 1..50: mol_type = other DNA
attaaaccttaacttcaaactcaaaaccrcttttatttttcaattaaatc

SEQ ID NO: 4178 - DNA, 50 bp, synthetic construct
  source 1..50: mol_type = other DNA
cacaatactactaaattcttaactttcaaaaaccactacctaacttcccc

SEQ ID NO: 4179 - DNA, 50 bp, synthetic construct
  source 1..50: mol_type = other DNA
taaaccaaaaaacaacataaacaaactaaactactcaacaaaaaacaaac

SEQ ID NO: 4180 - DNA, 50 bp, synthetic construct
  source 1..50: mol_type = other DNA
actaaactactcaacaaaaaacaaacrctataaatttccrttttcatccc

SEQ ID NO: 4181 - DNA, 50 bp, synthetic construct
  source 1..50: mol_type = other DNA
acaactctacccaaattatcttaataacaaccctacctcacctaatttcc

SEQ ID NO: 4182 - DNA, 50 bp, synthetic construct
  source 1..50: mol_type = other DNA
caatacctacttaccaaaaacctaccctaaatcactctatctttaatacc

SEQ ID NO: 4183 - DNA, 50 bp, synthetic construct
  source 1..50: mol_type = other DNA
accacaataaaacaaacatattaacratcaaattcatataaaaactaaac

SEQ ID NO: 4184 - DNA, 50 bp, synthetic construct
  source 1..50: mol_type = other DNA
atatttaatatcaaaattcccrtacctaaaaacracaaaaataaaacccc

SEQ ID NO: 4185 - DNA, 50 bp, synthetic construct
  source 1..50: mol_type = other DNA
aaataaaaaataccraatacrcatcctataaacraaactctacccttacc

SEQ ID NO: 4186 - DNA, 50 bp, synthetic construct
  source 1..50: mol_type = other DNA
atcattcacaccaccatacatataaaaacatatttaatatcaaaattccc

SEQ ID NO: 4187 - DNA, 50 bp, synthetic construct
  source 1..50: mol_type = other DNA
cacctcattcctcaacacaaccaaccaaaatccatcaaaacatactttcc

SEQ ID NO: 4188 - DNA, 50 bp, synthetic construct
  source 1..50: mol_type = other DNA
taataaaaaacrattaaatcataaaaacraatttcccccttactattctc

SEQ ID NO: 4189 - DNA, 50 bp, synthetic construct
  source 1..50: mol_type = other DNA
aaaaacaaacrcccaaaactcacaaccraaacaaattacaacaaaaatac

SEQ ID NO: 4190 - DNA, 50 bp, synthetic construct
  source 1..50: mol_type = other DNA
aaaaaaaaacaataaatactaaaaacctcttcctattctaccttctacac

SEQ ID NO: 4191 - DNA, 50 bp, synthetic construct
  source 1..50: mol_type = other DNA
aaaaatataaaaccttttatatttctaaaaatctcttaaaatacataacc

SEQ ID NO: 4192 - DNA, 50 bp, synthetic construct
  source 1..50: mol_type = other DNA
acaataaacactaacaaattccatcccaacaccaaacccaaaaatatccc

SEQ ID NO: 4193 - DNA, 50 bp, synthetic construct
  source 1..50: mol_type = other DNA
accaaaaattcaattcaaattaatcaaatcctttaccattaaaaaactcc

SEQ ID NO: 4194 - DNA, 50 bp, synthetic construct
  source 1..50: mol_type = other DNA
ctccaaaacraaaataccracraaataaaatatcttcattcacctctacc

SEQ ID NO: 4195 - DNA, 50 bp, synthetic construct
  source 1..50: mol_type = other DNA
accttcctcaaaataaataaataccattcraataatctcaactccaaaac

SEQ ID NO: 4196 - DNA, 50 bp, synthetic construct
  source 1..50: mol_type = other DNA
aaaaaaaacaacattaaacataccttcatcctctataacaaatatatcac

SEQ ID NO: 4197 - DNA, 50 bp, synthetic construct
  source 1..50: mol_type = other DNA
caacattaatcatttttactaacaactcctacatattaactatccttacc

SEQ ID NO: 4198 - DNA, 50 bp, synthetic construct
  source 1..50: mol_type = other DNA
acattacrtaaaactctccttccctccctataaacaaaataaataatcac

SEQ ID NO: 4199 - DNA, 50 bp, synthetic construct
  source 1..50: mol_type = other DNA
taaaatttcctctcctacttttaattttaaacatacccttataactccac

SEQ ID NO: 4200 - DNA, 50 bp, synthetic construct
  source 1..50: mol_type = other DNA
atctcaattatcttttacttacctcaaattacttccatcaaatctctatc

SEQ ID NO: 4201 - DNA, 50 bp, synthetic construct
  source 1..50: mol_type = other DNA
tacccaatcaaccaacatttatacctacactaacrctaatattactaatc

SEQ ID NO: 4202 - DNA, 50 bp, synthetic construct
  source 1..50: mol_type = other DNA
aacaataacttataaactccaactaccttcttcraaccaccaaaaaaaac

SEQ ID NO: 4203 - DNA, 50 bp, synthetic construct
  source 1..50: mol_type = other DNA
ataaaatacaaaactctaacaataccaacaataccaacrctctaataacc

SEQ ID NO: 4204 - DNA, 50 bp, synthetic construct
  source 1..50: mol_type = other DNA
aaaactaatattataaaatacaaaactctaacaataccaacaataccaac

SEQ ID NO: 4205 - DNA, 50 bp, synthetic construct
  source 1..50: mol_type = other DNA
ctcatctttaaattcrcacaacttaacataatatctaatacacaataaac

SEQ ID NO: 4206 - DNA, 50 bp, synthetic construct
  source 1..50: mol_type = other DNA
tatcaaaaacataaactccattaaaaacaatttttctcatctttaaattc

SEQ ID NO: 4207 - DNA, 50 bp, synthetic construct
  source 1..50: mol_type = other DNA
aaaaaaactaaaaacaaaactctaataaaaatttcccaaatcratcccac

SEQ ID NO: 4208 - DNA, 50 bp, synthetic construct
  source 1..50: mol_type = other DNA
tattaatacctcataacaaatttatccctttttaaatacccaaaaccrac

SEQ ID NO: 4209 - DNA, 50 bp, synthetic construct
  source 1..50: mol_type = other DNA
taatattaatacctcataacaaatttatccctttttaaatacccaaaacc

SEQ ID NO: 4210 - DNA, 50 bp, synthetic construct
  source 1..50: mol_type = other DNA
aaatataaaaactatatcaaatctcttaccaattattatactctttaaac

SEQ ID NO: 4211 - DNA, 50 bp, synthetic construct
  source 1..50: mol_type = other DNA
aaaacaacacrtctaaaattattcrttcctcccrataaatttataatctc

SEQ ID NO: 4212 - DNA, 50 bp, synthetic construct
  source 1..50: mol_type = other DNA
atcaaaacaaatctccctccctatcacaacaaaactaaataaaaaccrcc

SEQ ID NO: 4213 - DNA, 50 bp, synthetic construct
  source 1..50: mol_type = other DNA
tcctctaaaatcttatcccaattaattcctaccaatccaatttcttttac

SEQ ID NO: 4214 - DNA, 50 bp, synthetic construct
  source 1..50: mol_type = other DNA
atccttttccacttaaaaaataacctaaatatcaaacataaaataaaccc

SEQ ID NO: 4215 - DNA, 50 bp, synthetic construct
  source 1..50: mol_type = other DNA
atttttacccraccccaaaaaactaaacactaaataaaaacaattaattc

SEQ ID NO: 4216 - DNA, 50 bp, synthetic construct
  source 1..50: mol_type = other DNA
actataactatctcactcaccaaattttaaattcctcrtaaacaaaaacc

SEQ ID NO: 4217 - DNA, 50 bp, synthetic construct
  source 1..50: mol_type = other DNA
ctaactctaatctactataactatctcactcaccaaattttaaattcctc

SEQ ID NO: 4218 - DNA, 50 bp, synthetic construct
  source 1..50: mol_type = other DNA
ttttaaaacraaatttcrctcttatctcccaaactaaactacaataatac

SEQ ID NO: 4219 - DNA, 50 bp, synthetic construct
  source 1..50: mol_type = other DNA
atcaccaatatcaattaataaaaatctttcaaccraacataataactcac

SEQ ID NO: 4220 - DNA, 50 bp, synthetic construct
  source 1..50: mol_type = other DNA
actaactactataaaaatcaccaatatcaattaataaaaatctttcaacc

SEQ ID NO: 4221 - DNA, 50 bp, synthetic construct
  source 1..50: mol_type = other DNA
aaacactcataaatactcactaaattataactaaaatatcatataacctc

SEQ ID NO: 4222 - DNA, 50 bp, synthetic construct
  source 1..50: mol_type = other DNA
atatctaattacaaaaatcaaccaatcaaaaatactttcaattttccrtc

SEQ ID NO: 4223 - DNA, 50 bp, synthetic construct
  source 1..50: mol_type = other DNA
caaactaataataaaccactatttcttttacttaaaatatacaccaaatc

SEQ ID NO: 4224 - DNA, 50 bp, synthetic construct
  source 1..50: mol_type = other DNA
aacctctaaaaaatatttaaaccccaaaaaatcctatacttaatctattc

SEQ ID NO: 4225 - DNA, 50 bp, synthetic construct
  source 1..50: mol_type = other DNA
aaaatattcaacrctaaatcctctccacctacccacaaatttaaaaaacc

SEQ ID NO: 4226 - DNA, 50 bp, synthetic construct
  source 1..50: mol_type = other DNA
tctcaaaaatccaaataattaatccttccacttaaaacaatactatctcc

SEQ ID NO: 4227 - DNA, 50 bp, synthetic construct
  source 1..50: mol_type = other DNA
crtaaaaattaaaccctaattctaaaacattaacaaaaattcaacaaaac

SEQ ID NO: 4228 - DNA, 50 bp, synthetic construct
  source 1..50: mol_type = other DNA
cctactaaaaaccccaaaaatactccaaccaaatataaaaaactaatcac

SEQ ID NO: 4229 - DNA, 50 bp, synthetic construct
  source 1..50: mol_type = other DNA
aacaacctataacaaaacacacattaaccaaccttaacaaaataacaaac

SEQ ID NO: 4230 - DNA, 50 bp, synthetic construct
  source 1..50: mol_type = other DNA
ttacttaaacctaaaaaattaaaactataataaactataatcacaacacc

SEQ ID NO: 4231 - DNA, 50 bp, synthetic construct
  source 1..50: mol_type = other DNA
aaccaaaaaccrtatcaaatcatccttacaatcccaacaccctacataac

SEQ ID NO: 4232 - DNA, 50 bp, synthetic construct
  source 1..50: mol_type = other DNA
taaccataaccttataaatcaataaaatttcattcttatataattaattc

SEQ ID NO: 4233 - DNA, 50 bp, synthetic construct
  source 1..50: mol_type = other DNA
ccaaacctttaaaaacttcccaaacaaaaataaacatacttaaaaaccac

SEQ ID NO: 4234 - DNA, 50 bp, synthetic construct
  source 1..50: mol_type = other DNA
aacttaaaaacaactattaactcaatccctaaactctttaataaaaaccc

SEQ ID NO: 4235 - DNA, 50 bp, synthetic construct
  source 1..50: mol_type = other DNA
ttaacacactacatatcccaaaaatcattactaacttaaaaatctaatac

SEQ ID NO: 4236 - DNA, 50 bp, synthetic construct
  source 1..50: mol_type = other DNA
aatactatacaatccatcrccatctacrtaactttaactaactatataac

SEQ ID NO: 4237 - DNA, 50 bp, synthetic construct
  source 1..50: mol_type = other DNA
ctacctcaaataaattataaaaccttaaaatactcaaacaaaacaacaac

SEQ ID NO: 4238 - DNA, 50 bp, synthetic construct
  source 1..50: mol_type = other DNA
cctcaaataaattataaaaccttaaaatactcaaacaaaacaacaacrac

SEQ ID NO: 4239 - DNA, 50 bp, synthetic construct
  source 1..50: mol_type = other DNA
caataaatacaataataaatcctaaataaatttctacatatcctaacaac

SEQ ID NO: 4240 - DNA, 50 bp, synthetic construct
  source 1..50: mol_type = other DNA
taacaacrtctaaaaccacaacaattccttatcctcttttatttcaactc

SEQ ID NO: 4241 - DNA, 50 bp, synthetic construct
  source 1..50: mol_type = other DNA
tcttaaaaacttcctcaaaacttatcccacatctttaaataaattaaacc

SEQ ID NO: 4242 - DNA, 50 bp, synthetic construct
  source 1..50: mol_type = other DNA
taatcacactacttcctctcttcattacaactcctaaaaatacracactc

SEQ ID NO: 4243 - DNA, 50 bp, synthetic construct
  source 1..50: mol_type = other DNA
tacttacccataactcacaactcaaaaaaaaatacctcaaaacraatacc

SEQ ID NO: 4244 - DNA, 50 bp, synthetic construct
  source 1..50: mol_type = other DNA
atataactaaactataaaaactccaaaactcccaaaaaaacctcaaaaac

SEQ ID NO: 4245 - DNA, 50 bp, synthetic construct
  source 1..50: mol_type = other DNA
tcactaaaaaccaaaaactaataactctctcrtaaaatacaaaaactccc

SEQ ID NO: 4246 - DNA, 50 bp, synthetic construct
  source 1..50: mol_type = other DNA
taaaaaccaaaaactaataactctctcrtaaaatacaaaaactcccrttc

SEQ ID NO: 4247 - DNA, 50 bp, synthetic construct
  source 1..50: mol_type = other DNA
ttaataccaaacacaaattttctttcaatctaaatactctaccctattcc

SEQ ID NO: 4248 - DNA, 50 bp, synthetic construct
  source 1..50: mol_type = other DNA
caaatataaaaaataaaaattccacaaaatcactaatacccccaaatcac

SEQ ID NO: 4249 - DNA, 50 bp, synthetic construct
  source 1..50: mol_type = other DNA
taaccttataaaactttcatttcccacacctataaactctaatactaatc

SEQ ID NO: 4250 - DNA, 50 bp, synthetic construct
  source 1..50: mol_type = other DNA
taaaactttcatttcccacacctataaactctaatactaatcrcttcttc

SEQ ID NO: 4251 - DNA, 50 bp, synthetic construct
  source 1..50: mol_type = other DNA
atatataaaaacttatataatatcacacaaaaacaataactaaaaatcac

SEQ ID NO: 4252 - DNA, 50 bp, synthetic construct
  source 1..50: mol_type = other DNA
crccrcattcctaacccattacctcataaaaattacctcataataattcc

SEQ ID NO: 4253 - DNA, 50 bp, synthetic construct
  source 1..50: mol_type = other DNA
aaataccaaaactttaataataaataaaaatccccaaacttaaaaatctc

SEQ ID NO: 4254 - DNA, 50 bp, synthetic construct
  source 1..50: mol_type = other DNA
cccaaaaccttcttaaaaaactacraatacraataaaccaacraaaaacc

SEQ ID NO: 4255 - DNA, 50 bp, synthetic construct
  source 1..50: mol_type = other DNA
ctatcacttaaataatttaacacttactcattttctaaactaattattcc

SEQ ID NO: 4256 - DNA, 50 bp, synthetic construct
  source 1..50: mol_type = other DNA
atcttacctctacaactaaaaataccaaataaaaaacaaaattctaaatc

SEQ ID NO: 4257 - DNA, 50 bp, synthetic construct
  source 1..50: mol_type = other DNA
aaaattctacttttcatttaacacttttaactacaaaaacaaaacatatc

SEQ ID NO: 4258 - DNA, 50 bp, synthetic construct
  source 1..50: mol_type = other DNA
attaaactactctataaaaactccaaacataaaataaaaacccraactac

SEQ ID NO: 4259 - DNA, 50 bp, synthetic construct
  source 1..50: mol_type = other DNA
aaactaacatcaaatatcctacctcctccaatcacataaataccccaaac

SEQ ID NO: 4260 - DNA, 50 bp, synthetic construct
  source 1..50: mol_type = other DNA
taaactaatacccttacatacaaccracacactaacactaataacaaatc

SEQ ID NO: 4261 - DNA, 50 bp, synthetic construct
  source 1..50: mol_type = other DNA
aactcaaattaaaactttcaaaaacratttatcatcaatatcaatatatc

SEQ ID NO: 4262 - DNA, 50 bp, synthetic construct
  source 1..50: mol_type = other DNA
aaaaatctataactaattttaaaaataatcctaaaacccataaactcrac

SEQ ID NO: 4263 - DNA, 50 bp, synthetic construct
  source 1..50: mol_type = other DNA
atactatattaacttactcctttcattcctctccataaatactacaaacc

SEQ ID NO: 4264 - DNA, 50 bp, synthetic construct
  source 1..50: mol_type = other DNA
atccataaaaaaaacataatttcccraataaaatcacacaattactcacc

SEQ ID NO: 4265 - DNA, 50 bp, synthetic construct
  source 1..50: mol_type = other DNA
atctcctaatccacaaattacaaaaatccataaaaaaaacataatttccc

SEQ ID NO: 4266 - DNA, 50 bp, synthetic construct
  source 1..50: mol_type = other DNA
ccatacttctcccataaatctttacaacttataaatcaaaaaatcccctc

SEQ ID NO: 4267 - DNA, 50 bp, synthetic construct
  source 1..50: mol_type = other DNA
acataacracaaaacactatatacacatacaaataccaataaaactaaac

SEQ ID NO: 4268 - DNA, 50 bp, synthetic construct
  source 1..50: mol_type = other DNA
aaaacattcaataacacacrataaatctaaaacaaattaaaatactctac

SEQ ID NO: 4269 - DNA, 50 bp, synthetic construct
  source 1..50: mol_type = other DNA
aaacaatactaccccttaaacctaataacccaaaacattcaataacacac

SEQ ID NO: 4270 - DNA, 50 bp, synthetic construct
  source 1..50: mol_type = other DNA
racraacctcctatacaccacaattaaatatacractcaaaaactattcc

SEQ ID NO: 4271 - DNA, 50 bp, synthetic construct
  source 1..50: mol_type = other DNA
aaacaacactacttatacttaacctacacctacraaacaacctctaaacc

SEQ ID NO: 4272 - DNA, 50 bp, synthetic construct
  source 1..50: mol_type = other DNA
tacraaacaacctctaaaccrcacatttaactataatacacaaaaaaccc

SEQ ID NO: 4273 - DNA, 50 bp, synthetic construct
  source 1..50: mol_type = other DNA
catataacaaaaaccccaaataacaataacttaatcaaaacaaatacatc

SEQ ID NO: 4274 - DNA, 50 bp, synthetic construct
  source 1..50: mol_type = other DNA
ttaatcaaaacaaatacatcractcctatataaaaaacataaaataaaac

SEQ ID NO: 4275 - DNA, 50 bp, synthetic construct
  source 1..50: mol_type = other DNA
aaaaacataaaataaaacrataactaacactaatttaacaactaaaaaac

SEQ ID NO: 4276 - DNA, 50 bp, synthetic construct
  source 1..50: mol_type = other DNA
taatttaacaactaaaaaacrtcaatatcaatatcttaaattcttctacc

SEQ ID NO: 4277 - DNA, 50 bp, synthetic construct
  source 1..50: mol_type = other DNA
aaaaacaaatacttccattccactaaccaaaaataaactaccctcactac

SEQ ID NO: 4278 - DNA, 50 bp, synthetic construct
  source 1..50: mol_type = other DNA
cttcctaaatttcaccaacaaaattcaaatactattaaaaataaaaatac

SEQ ID NO: 4279 - DNA, 50 bp, synthetic construct
  source 1..50: mol_type = other DNA
aactccaatcataaatttaactctcccttctactcctcaacaaaaaaacc

SEQ ID NO: 4280 - DNA, 50 bp, synthetic construct
  source 1..50: mol_type = other DNA
accrtataaacaaatcctataacctctattaattacaattataacaactc

SEQ ID NO: 4281 - DNA, 50 bp, synthetic construct
  source 1..50: mol_type = other DNA
ctaaatcctcccaacttccttaaaacaaaaataaaacttaaataaaaaac

SEQ ID NO: 4282 - DNA, 50 bp, synthetic construct
  source 1..50: mol_type = other DNA
ccctactactttctaactcaaaccccaaaattataattcccaaatcattc

SEQ ID NO: 4283 - DNA, 50 bp, synthetic construct
  source 1..50: mol_type = other DNA
aatctataaaaatctctaaacataaacatttctttatttaaacttaaacc

SEQ ID NO: 4284 - DNA, 50 bp, synthetic construct
  source 1..50: mol_type = other DNA
atcctcatattttataatactaacrcaaaatattctcaaatcacatcctc

SEQ ID NO: 4285 - DNA, 50 bp, synthetic construct
  source 1..50: mol_type = other DNA
caaaaatcttcacaaatcaccaacraaaatataacttaaaaacactttac

SEQ ID NO: 4286 - DNA, 50 bp, synthetic construct
  source 1..50: mol_type = other DNA
ccaatctaaactaacaccctctacacaaaatatatacaaaaaacacracc

SEQ ID NO: 4287 - DNA, 50 bp, synthetic construct
  source 1..50: mol_type = other DNA
rtataaataaaacraataccaaaaaaacacaaactctaaattaaccracc

SEQ ID NO: 4288 - DNA, 50 bp, synthetic construct
  source 1..50: mol_type = other DNA
caaaatcctataaaacatactaactaatacratactattctaaccccccc

SEQ ID NO: 4289 - DNA, 50 bp, synthetic construct
  source 1..50: mol_type = other DNA
ccatacaaatatactataaacaaaatcctataaaacatactaactaatac

SEQ ID NO: 4290 - DNA, 50 bp, synthetic construct
  source 1..50: mol_type = other DNA
aaaaaaaaaatacccractaaccaccttaaaaataaactacacaacaaac

SEQ ID NO: 4291 - DNA, 50 bp, synthetic construct
  source 1..50: mol_type = other DNA
ataattttctaacrcaaccaacttatttctctcaaatctatataaaatac

SEQ ID NO: 4292 - DNA, 50 bp, synthetic construct
  source 1..50: mol_type = other DNA
aataaaatctccacaaaaatctaaaaataatacctctataattttctaac

SEQ ID NO: 4293 - DNA, 50 bp, synthetic construct
  source 1..50: mol_type = other DNA
ttctccaaaaatttacaaaattattaaaaacataatttaatcaccataac

SEQ ID NO: 4294 - DNA, 50 bp, synthetic construct
  source 1..50: mol_type = other DNA
tttacttttcttaatttcacacacraaaattaaaaaccaattcccaaaac

SEQ ID NO: 4295 - DNA, 50 bp, synthetic construct
  source 1..50: mol_type = other DNA
acaataacctttttataataatacattttacttttcttaatttcacacac

SEQ ID NO: 4296 - DNA, 50 bp, synthetic construct
  source 1..50: mol_type = other DNA
ttaaaatcaacttttcaatctttttcttcaccaattaaataaccctctac

SEQ ID NO: 4297 - DNA, 50 bp, synthetic construct
  source 1..50: mol_type = other DNA
ctttttcttcaccaattaaataaccctctacrattttcccctttccacac

SEQ ID NO: 4298 - DNA, 50 bp, synthetic construct
  source 1..50: mol_type = other DNA
cacacrtcctactatctaaataaaataaattatctacttttcatttacac

SEQ ID NO: 4299 - DNA, 50 bp, synthetic construct
  source 1..50: mol_type = other DNA
ttaccaacaacccttaaaaaccccaactcacataatactttcrtactacc

SEQ ID NO: 4300 - DNA, 50 bp, synthetic construct
  source 1..50: mol_type = other DNA
tcataactataccaaaccttaaaatacccacccaaataccaataataccc

SEQ ID NO: 4301 - DNA, 50 bp, synthetic construct
  source 1..50: mol_type = other DNA
actccaaaacttaacataactataatccaaaaaaaccaaatccaactccc

SEQ ID NO: 4302 - DNA, 50 bp, synthetic construct
  source 1..50: mol_type = other DNA
aataactaacttaataacttaataattaaataaacaaatcaacttaatcc

SEQ ID NO: 4303 - DNA, 50 bp, synthetic construct
  source 1..50: mol_type = other DNA
rtttcataatttcctatattctcaaaaacaaattaataatatacaataac

SEQ ID NO: 4304 - DNA, 50 bp, synthetic construct
  source 1..50: mol_type = other DNA
accttaatttatacaaaaccccctaaccccacaataaacrctaaatttac

SEQ ID NO: 4305 - DNA, 50 bp, synthetic construct
  source 1..50: mol_type = other DNA
atttatacaaaaccccctaaccccacaataaacrctaaatttacraaatc

SEQ ID NO: 4306 - DNA, 50 bp, synthetic construct
  source 1..50: mol_type = other DNA
craaaaaccctatttaccttcaacataaaaaccctaaaactacaaaaaac

SEQ ID NO: 4307 - DNA, 50 bp, synthetic construct
  source 1..50: mol_type = other DNA
aactctacaaaaataaacataactactaataaacaaaacccctaaaactc

SEQ ID NO: 4308 - DNA, 50 bp, synthetic construct
  source 1..50: mol_type = other DNA
aatcaaaaaatttaactaacatctacttataacataaaatactaactctc

SEQ ID NO: 4309 - DNA, 50 bp, synthetic construct
  source 1..50: mol_type = other DNA
accattaaccctaaaaacaaaaaccatcaatctaataacttcctctaacc

SEQ ID NO: 4310 - DNA, 50 bp, synthetic construct
  source 1..50: mol_type = other DNA
cctactacccactacctctatcaaaatccaacaaaacaaaaaacacaaac

SEQ ID NO: 4311 - DNA, 50 bp, synthetic construct
  source 1..50: mol_type = other DNA
caaaaaacccttcactccaacaaaaccccaatccaaactaccaaaaatac

SEQ ID NO: 4312 - DNA, 50 bp, synthetic construct
  source 1..50: mol_type = other DNA
aactataaaccaaaccaaaaaaatccraaaaaaccaaaaactcaaaaaac

SEQ ID NO: 4313 - DNA, 50 bp, synthetic construct
  source 1..50: mol_type = other DNA
ctaatataaaaatcacrtaactatataaatatcrtaataccctacatacc

SEQ ID NO: 4314 - DNA, 50 bp, synthetic construct
  source 1..50: mol_type = other DNA
aaaactaaaacctaaaaaatcttactaccacccracatacaaaacactac

SEQ ID NO: 4315 - DNA, 50 bp, synthetic construct
  source 1..50: mol_type = other DNA
atacatcaccaacaaaccaactaaactaaacraatcraatatccacaacc

SEQ ID NO: 4316 - DNA, 50 bp, synthetic construct
  source 1..50: mol_type = other DNA
taatattaaaaatacrcttcttcccctaaaccaaaaccacctaactaacc

SEQ ID NO: 4317 - DNA, 50 bp, synthetic construct
  source 1..50: mol_type = other DNA
caaaaaataaataaaacaaaacatcttacrcctacctttcaaacaaccac

SEQ ID NO: 4318 - DNA, 50 bp, synthetic construct
  source 1..50: mol_type = other DNA
rataaccraataattaaaacrttaaactcraaatccaataaaatttcccc

SEQ ID NO: 4319 - DNA, 50 bp, synthetic construct
  source 1..50: mol_type = other DNA
aaaacrcccaccacccracctatatatataaaataatacttataattacc

SEQ ID NO: 4320 - DNA, 50 bp, synthetic construct
  source 1..50: mol_type = other DNA
raaactaaaaaatcccaaaaacaaactctcttcctatacatctcractac

SEQ ID NO: 4321 - DNA, 50 bp, synthetic construct
  source 1..50: mol_type = other DNA
taacccraaactaaaaaatcccaaaaacaaactctcttcctatacatctc

SEQ ID NO: 4322 - DNA, 50 bp, synthetic construct
  source 1..50: mol_type = other DNA
ataccaaacacactaacrcttaacctttaaataaataactatcttcatac

SEQ ID NO: 4323 - DNA, 50 bp, synthetic construct
  source 1..50: mol_type = other DNA
ttccctatactaaaaacrcataaaaacaatcattcactcaaaaactaaac

SEQ ID NO: 4324 - DNA, 50 bp, synthetic construct
  source 1..50: mol_type = other DNA
tattttaaattcactaaacacccactacaaaccaaaatactaaataccac

SEQ ID NO: 4325 - DNA, 50 bp, synthetic construct
  source 1..50: mol_type = other DNA
aactaactacaaatctataaccaataatatattataacaaccccaaaacc

SEQ ID NO: 4326 - DNA, 50 bp, synthetic construct
  source 1..50: mol_type = other DNA
tataaccaataatatattataacaaccccaaaaccractaatcctaaaac

SEQ ID NO: 4327 - DNA, 50 bp, synthetic construct
  source 1..50: mol_type = other DNA
cttcactcaaaacatatcaactataccataaaaatcccaaatataaacac

SEQ ID NO: 4328 - DNA, 50 bp, synthetic construct
  source 1..50: mol_type = other DNA
aatacattacrtttcttaaacraccttttctactatatacctatacaccc

SEQ ID NO: 4329 - DNA, 50 bp, synthetic construct
  source 1..50: mol_type = other DNA
ctccttaaacraatacacaaacacacaacaaaaaaaaccrtctaaaaaac

SEQ ID NO: 4330 - DNA, 50 bp, synthetic construct
  source 1..50: mol_type = other DNA
tacacaaacacacaacaaaaaaaaccrtctaaaaaacrcaatacacttcc

SEQ ID NO: 4331 - DNA, 50 bp, synthetic construct
  source 1..50: mol_type = other DNA
ataatcaaaactcttcatatcttatcttatatttctactcaaatatcatc

SEQ ID NO: 4332 - DNA, 50 bp, synthetic construct
  source 1..50: mol_type = other DNA
ctaaataactaactttcaacaacctaccccaatcccataatcattttacc

SEQ ID NO: 4333 - DNA, 50 bp, synthetic construct
  source 1..50: mol_type = other DNA
aacacctcttaactataaaaatttctcaaattttccttatttttaataac

SEQ ID NO: 4334 - DNA, 50 bp, synthetic construct
  source 1..50: mol_type = other DNA
catatatcctacaccaattttctctcctcttaacatcttacataaacatc

SEQ ID NO: 4335 - DNA, 50 bp, synthetic construct
  source 1..50: mol_type = other DNA
tttacccrattctttttcaatttaaaccaaaatacccacaaaataataac

SEQ ID NO: 4336 - DNA, 50 bp, synthetic construct
  source 1..50: mol_type = other DNA
aaaaaacctaatattaaccaaaactaaactaccaaaatacctacaaatac

SEQ ID NO: 4337 - DNA, 50 bp, synthetic construct
  source 1..50: mol_type = other DNA
ataacratatcataaacaaaaccaaacccraatcaaataaattaactttc

SEQ ID NO: 4338 - DNA, 50 bp, synthetic construct
  source 1..50: mol_type = other DNA
tatatatacrtttcaatataactcaaccactaaaaacttccatccataac

SEQ ID NO: 4339 - DNA, 50 bp, synthetic construct
  source 1..50: mol_type = other DNA
tcccrattataaatatatctctccaaaaaacrctatatcccattaaacrc

SEQ ID NO: 4340 - DNA, 50 bp, synthetic construct
  source 1..50: mol_type = other DNA
ctaatcttttaaactccttaaacatcaatttcctcatctatatatactcc

SEQ ID NO: 4341 - DNA, 50 bp, synthetic construct
  source 1..50: mol_type = other DNA
cataatattcataaaaaatccacttcttcraaacttctcttcccattatc

SEQ ID NO: 4342 - DNA, 50 bp, synthetic construct
  source 1..50: mol_type = other DNA
atccaaaaccaaaaaaacaaccataatattcataaaaaatccacttcttc

SEQ ID NO: 4343 - DNA, 50 bp, synthetic construct
  source 1..50: mol_type = other DNA
aaaaaaattaatataccattaattctctaatactaaattcttatacaccc

SEQ ID NO: 4344 - DNA, 50 bp, synthetic construct
  source 1..50: mol_type = other DNA
atacrattattccaataattacaaatctattatcacratacccaaactac

SEQ ID NO: 4345 - DNA, 50 bp, synthetic construct
  source 1..50: mol_type = other DNA
atctaacaaaacctttcataacattcttatacaaacrcaacctaaatacc

SEQ ID NO: 4346 - DNA, 50 bp, synthetic construct
  source 1..50: mol_type = other DNA
ctaaataccrtaacaataaatttataatcactaaaataaccrcactaaac

SEQ ID NO: 4347 - DNA, 50 bp, synthetic construct
  source 1..50: mol_type = other DNA
tcattcccataccctcctttctactacractaaaaaactatccttaaacc

SEQ ID NO: 4348 - DNA, 50 bp, synthetic construct
  source 1..50: mol_type = other DNA
caaacctccaatattctaaactcaaccttcttaccttctaaaaaactctc

SEQ ID NO: 4349 - DNA, 50 bp, synthetic construct
  source 1..50: mol_type = other DNA
rtccaaaaactttcaataattccctattacctaacaaatattctcaaaac

SEQ ID NO: 4350 - DNA, 50 bp, synthetic construct
  source 1..50: mol_type = other DNA
aatcrataattaaacactttaataccaataaatcaacaatcatttatatc

SEQ ID NO: 4351 - DNA, 50 bp, synthetic construct
  source 1..50: mol_type = other DNA
caaataacacraaactaaactaaaccracactaaaaaaccataaaccctc

SEQ ID NO: 4352 - DNA, 50 bp, synthetic construct
  source 1..50: mol_type = other DNA
taaaaaacrcraaaatccataacctcttaatatcratccaactcaatttc

SEQ ID NO: 4353 - DNA, 50 bp, synthetic construct
  source 1..50: mol_type = other DNA
ataacctcttaatatcratccaactcaatttcrtatcatttattattaac

SEQ ID NO: 4354 - DNA, 50 bp, synthetic construct
  source 1..50: mol_type = other DNA
aacctcttaatatcratccaactcaatttcrtatcatttattattaacrc

SEQ ID NO: 4355 - DNA, 50 bp, synthetic construct
  source 1..50: mol_type = other DNA
ctacaaaattcattttaccccaataaatatctttacctccaattaaaaac

SEQ ID NO: 4356 - DNA, 50 bp, synthetic construct
  source 1..50: mol_type = other DNA
taaattatatcacttaaatatacacactcaacctcaaacaatattcaacc

SEQ ID NO: 4357 - DNA, 50 bp, synthetic construct
  source 1..50: mol_type = other DNA
aaaaaataaacttcrtttactctcctaaacaaccaataaaaaaaccrcac

SEQ ID NO: 4358 - DNA, 50 bp, synthetic construct
  source 1..50: mol_type = other DNA
acccaactatcaacrtacraccttctcattaattatttaaaaaaacaaac

SEQ ID NO: 4359 - DNA, 50 bp, synthetic construct
  source 1..50: mol_type = other DNA
ctaaacaacactctacctcctaaatcaaactaaacccaacccaaaaatac

SEQ ID NO: 4360 - DNA, 50 bp, synthetic construct
  source 1..50: mol_type = other DNA
atcaaaacctacctatacctacctaaaaaacctccaaaaaaaatttcaac

SEQ ID NO: 4361 - DNA, 50 bp, synthetic construct
  source 1..50: mol_type = other DNA
aaaaaaaacaacrccaatcctaaaaaaccactaaaaacaaaaaacacacc

SEQ ID NO: 4362 - DNA, 50 bp, synthetic construct
  source 1..50: mol_type = other DNA
aacctttaaaataaattacctctttcctactccttaacttcctaaaccac

SEQ ID NO: 4363 - DNA, 50 bp, synthetic construct
  source 1..50: mol_type = other DNA
taaaaacaaataaaatacccaatctaccctacctacaaatatctataatc

SEQ ID NO: 4364 - DNA, 50 bp, synthetic construct
  source 1..50: mol_type = other DNA
aaaacaataccaatatatacrtaaataaaacacactatccaaaccacaac

SEQ ID NO: 4365 - DNA, 50 bp, synthetic construct
  source 1..50: mol_type = other DNA
ccttcaaaatataaatcttcrctataatctaaacaatatatcccatttac

SEQ ID NO: 4366 - DNA, 50 bp, synthetic construct
  source 1..50: mol_type = other DNA
tacatcaaaacacaataacaactactataaacaaatatacacctactaac

SEQ ID NO: 4367 - DNA, 50 bp, synthetic construct
  source 1..50: mol_type = other DNA
aataaatacacatctatctataataactattactatattttaatacatac

SEQ ID NO: 4368 - DNA, 50 bp, synthetic construct
  source 1..50: mol_type = other DNA
ttttaactaccaccctctattacttaaatttctaccataacctctatcac

SEQ ID NO: 4369 - DNA, 50 bp, synthetic construct
  source 1..50: mol_type = other DNA
taaaaaaccaatcaaataaaaccctatcatatcaaccactataaaaaccc

SEQ ID NO: 4370 - DNA, 50 bp, synthetic construct
  source 1..50: mol_type = other DNA
caaacacaataaacaaacaacaaataacaaatctctaaacraaatcaaac

SEQ ID NO: 4371 - DNA, 50 bp, synthetic construct
  source 1..50: mol_type = other DNA
aataacattccaaacacaataaacaaacaacaaataacaaatctctaaac

SEQ ID NO: 4372 - DNA, 50 bp, synthetic construct
  source 1..50: mol_type = other DNA
cacaatataacraacaataacraccaaaacttactatcataaaacacatc

SEQ ID NO: 4373 - DNA, 50 bp, synthetic construct
  source 1..50: mol_type = other DNA
tatactctctacacacacacatcaacatacacaatataacraacaataac

SEQ ID NO: 4374 - DNA, 50 bp, synthetic construct
  source 1..50: mol_type = other DNA
aattttatcttatactctctacacacacacatcaacatacacaatataac

SEQ ID NO: 4375 - DNA, 50 bp, synthetic construct
  source 1..50: mol_type = other DNA
ctcactaaatattaaatttaaacatcttaatcattataatcaaacccttc

SEQ ID NO: 4376 - DNA, 50 bp, synthetic construct
  source 1..50: mol_type = other DNA
ataattaaaaacaaaacacctcctctcaacttaatataacttcaaacaac

SEQ ID NO: 4377 - DNA, 50 bp, synthetic construct
  source 1..50: mol_type = other DNA
aacaaaacttattcracaactctatttatttttcacaacacaaaatatac

SEQ ID NO: 4378 - DNA, 50 bp, synthetic construct
  source 1..50: mol_type = other DNA
tcaaaacattcatttactaatctatctataaaacaaaacaaaacttattc

SEQ ID NO: 4379 - DNA, 50 bp, synthetic construct
  source 1..50: mol_type = other DNA
rataacctcaaaaaccatccaataaaaaatacctataaacrtatttctcc

SEQ ID NO: 4380 - DNA, 50 bp, synthetic construct
  source 1..50: mol_type = other DNA
ataaaaacccaaataccacctataattacaaaataaaaaacacctactcc

SEQ ID NO: 4381 - DNA, 50 bp, synthetic construct
  source 1..50: mol_type = other DNA
aaataaaaaacacctactccrtaaacctttacaaaaccactaacataccc

SEQ ID NO: 4382 - DNA, 50 bp, synthetic construct
  source 1..50: mol_type = other DNA
ctaataaacccattaactcatttcattcattcacttttcatcaaaaaacc

SEQ ID NO: 4383 - DNA, 50 bp, synthetic construct
  source 1..50: mol_type = other DNA
taataatacctaaaacctaaaaaaacctcattcctcctctaaaaacaaac

SEQ ID NO: 4384 - DNA, 50 bp, synthetic construct
  source 1..50: mol_type = other DNA
cctaaaacctaaaaaaacctcattcctcctctaaaaacaaacrtaacacc

SEQ ID NO: 4385 - DNA, 50 bp, synthetic construct
  source 1..50: mol_type = other DNA
aatcctacaatatataacatacracttcttataaaaacataaaacacctc

SEQ ID NO: 4386 - DNA, 50 bp, synthetic construct
  source 1..50: mol_type = other DNA
acraaaaatacaaccaatcractacacraatcctacaatatataacatac

SEQ ID NO: 4387 - DNA, 50 bp, synthetic construct
  source 1..50: mol_type = other DNA
aaatatttcatatccccacaaaaaatcrcataccacatactataaaatcc

SEQ ID NO: 4388 - DNA, 50 bp, synthetic construct
  source 1..50: mol_type = other DNA
rattaactacacttcccrtaacaaataataaatattataaacaaaatacc

SEQ ID NO: 4389 - DNA, 50 bp, synthetic construct
  source 1..50: mol_type = other DNA
tataaaaaatctctaacaacttcatttccaaacaaaataaactccacctc

SEQ ID NO: 4390 - DNA, 50 bp, synthetic construct
  source 1..50: mol_type = other DNA
aatttctaccacataaatctatattcctttccttcttttacrtattatac

SEQ ID NO: 4391 - DNA, 50 bp, synthetic construct
  source 1..50: mol_type = other DNA
taatcactaactaaaaaaatattaaatatccattcttcctacatcactcc

SEQ ID NO: 4392 - DNA, 50 bp, synthetic construct
  source 1..50: mol_type = other DNA
cactccrtactacaaaaaaaactcaaaaaatctcctaaaaatccaaactc

SEQ ID NO: 4393 - DNA, 50 bp, synthetic construct
  source 1..50: mol_type = other DNA
aaacaaatcaaaaaccaaaaaactaatcctaatacctaaaaaataaaaac

SEQ ID NO: 4394 - DNA, 50 bp, synthetic construct
  source 1..50: mol_type = other DNA
ttaaaaaaccccaaacaactaactcaaaatctcrtcaacctaaccaaacc

SEQ ID NO: 4395 - DNA, 50 bp, synthetic construct
  source 1..50: mol_type = other DNA
aaaaataaaacttaacaaaaacaaaatcaacacracctaatcaaactaac

SEQ ID NO: 4396 - DNA, 50 bp, synthetic construct
  source 1..50: mol_type = other DNA
taaaactccctaaattccctctaaccaaaataaactaaaaccaacacctc

SEQ ID NO: 4397 - DNA, 50 bp, synthetic construct
  source 1..50: mol_type = other DNA
ccaatccttactatctccaaataaaatccaccttatactaaatatttctc

SEQ ID NO: 4398 - DNA, 50 bp, synthetic construct
  source 1..50: mol_type = other DNA
cattaaatatcaacaactataacaaaaccaacatataaactaataaatac

SEQ ID NO: 4399 - DNA, 50 bp, synthetic construct
  source 1..50: mol_type = other DNA
aatacractctatactaattaatcrctaaacacaaacttcacctctctac

SEQ ID NO: 4400 - DNA, 50 bp, synthetic construct
  source 1..50: mol_type = other DNA
tattcrtaaatttcaaatacaacraaaatacractctatactaattaatc

SEQ ID NO: 4401 - DNA, 50 bp, synthetic construct
  source 1..50: mol_type = other DNA
aaaacrcaaaaaaataaaacctatacccaacraccaaccaatacaaaatc

SEQ ID NO: 4402 - DNA, 50 bp, synthetic construct
  source 1..50: mol_type = other DNA
ttcaatccaacctaaaaaccatttcttaattctttattccrtctttattc

SEQ ID NO: 4403 - DNA, 50 bp, synthetic construct
  source 1..50: mol_type = other DNA
cratcactaattcaatccaacctaaaaaccatttcttaattctttattcc

SEQ ID NO: 4404 - DNA, 50 bp, synthetic construct
  source 1..50: mol_type = other DNA
actcctaaaacaaataaaaaactatactttcatctaacacccaacacccc

SEQ ID NO: 4405 - DNA, 50 bp, synthetic construct
  source 1..50: mol_type = other DNA
aacctcttacaaacaaacccctccctaaacttaatcaacacaaaatcrac

SEQ ID NO: 4406 - DNA, 50 bp, synthetic construct
  source 1..50: mol_type = other DNA
aaaaacctcttacaaacaaacccctccctaaacttaatcaacacaaaatc

SEQ ID NO: 4407 - DNA, 50 bp, synthetic construct
  source 1..50: mol_type = other DNA
ataaataattttaactactcctaccaaacraaataaaaccaaaaccaaac

SEQ ID NO: 4408 - DNA, 50 bp, synthetic construct
  source 1..50: mol_type = other DNA
cctattcccttccatcaaaaaataaataattttaactactcctaccaaac

SEQ ID NO: 4409 - DNA, 50 bp, synthetic construct
  source 1..50: mol_type = other DNA
aaaactataaaacaaacacaatcaaaacacctcaatccrtaaaaaaatac

SEQ ID NO: 4410 - DNA, 50 bp, synthetic construct
  source 1..50: mol_type = other DNA
acraactaaaatatcctaattatatttattttacaatcctataaaaattc

SEQ ID NO: 4411 - DNA, 50 bp, synthetic construct
  source 1..50: mol_type = other DNA
aactccttacttctaaacaaaccactaactcaaatctcctaaaactttcc

SEQ ID NO: 4412 - DNA, 50 bp, synthetic construct
  source 1..50: mol_type = other DNA
tacttctaaacaaaccactaactcaaatctcctaaaactttccrtaaacc

SEQ ID NO: 4413 - DNA, 50 bp, synthetic construct
  source 1..50: mol_type = other DNA
cacaaacaaacatataaaacractaccccctaatattcatacacaatatc

SEQ ID NO: 4414 - DNA, 50 bp, synthetic construct
  source 1..50: mol_type = other DNA
cracacratcctatctctacratactatacataaacactaaaaaacaacc

SEQ ID NO: 4415 - DNA, 50 bp, synthetic construct
  source 1..50: mol_type = other DNA
tccacraaacccraaatttacatatctattaaatacccaaataataaaac

SEQ ID NO: 4416 - DNA, 50 bp, synthetic construct
  source 1..50: mol_type = other DNA
taaaccaacaacrcctcatcacctaaatactcaacaaacatacaaatctc

SEQ ID NO: 4417 - DNA, 50 bp, synthetic construct
  source 1..50: mol_type = other DNA
actccaaataaaaacaaaacactctttaaaaaacatatctacaacacaac

SEQ ID NO: 4418 - DNA, 50 bp, synthetic construct
  source 1..50: mol_type = other DNA
aaaccccraacaaactacacatatattaaccaaaaataacataactcaac

SEQ ID NO: 4419 - DNA, 50 bp, synthetic construct
  source 1..50: mol_type = other DNA
aataatcrctaaatcataccactcttaactaacacatatacaacctaccc

SEQ ID NO: 4420 - DNA, 50 bp, synthetic construct
  source 1..50: mol_type = other DNA
ctcttcttcaaaaaacatttaccaaatatataacttaaatatccattccc

SEQ ID NO: 4421 - DNA, 50 bp, synthetic construct
  source 1..50: mol_type = other DNA
aaaacatttaccaaatatataacttaaatatccattcccrcaacaaaaac

SEQ ID NO: 4422 - DNA, 50 bp, synthetic construct
  source 1..50: mol_type = other DNA
aaaactaataaaaaattcaaaatattaaccatatataactttaatcatac

SEQ ID NO: 4423 - DNA, 50 bp, synthetic construct
  source 1..50: mol_type = other DNA
tttaaaactcttaacaatctctaaaaatacccaaccaacraaattacaac

SEQ ID NO: 4424 - DNA, 50 bp, synthetic construct
  source 1..50: mol_type = other DNA
taaaattttaaaaataactatatcacaacctcttaaaactttaatccctc

SEQ ID NO: 4425 - DNA, 50 bp, synthetic construct
  source 1..50: mol_type = other DNA
atactttttaaaatcaaccctaactaaaattattaattcaaatctatacc

SEQ ID NO: 4426 - DNA, 50 bp, synthetic construct
  source 1..50: mol_type = other DNA
caaacctaaattaacaactctaactaaaactaacttcaaaaaacactttc

SEQ ID NO: 4427 - DNA, 50 bp, synthetic construct
  source 1..50: mol_type = other DNA
aaatacaaaaacaaaaaacctacaatacaattaatcatcttaccrtctcc

SEQ ID NO: 4428 - DNA, 50 bp, synthetic construct
  source 1..50: mol_type = other DNA
catataacttcaaaaaatccttaaaatattatttcracaaacaatataac

SEQ ID NO: 4429 - DNA, 50 bp, synthetic construct
  source 1..50: mol_type = other DNA
acatacctacaaaaccatataacttcaaaaaatccttaaaatattatttc

SEQ ID NO: 4430 - DNA, 50 bp, synthetic construct
  source 1..50: mol_type = other DNA
atatatttcccatatatttcataattaatcttccataaataatcacaatc

SEQ ID NO: 4431 - DNA, 50 bp, synthetic construct
  source 1..50: mol_type = other DNA
aacaaacaactaatactatttataaaaccaaatttccccatacattccac

SEQ ID NO: 4432 - DNA, 50 bp, synthetic construct
  source 1..50: mol_type = other DNA
tttcacaaataatatcaactatctactaaaaaatctataaaaccacatac

SEQ ID NO: 4433 - DNA, 50 bp, synthetic construct
  source 1..50: mol_type = other DNA
accataacaacctctttaaataaatttccctcaaaatttaaacatttctc

SEQ ID NO: 4434 - DNA, 50 bp, synthetic construct
  source 1..50: mol_type = other DNA
acctctttaaataaatttccctcaaaatttaaacatttctcraaattaac

SEQ ID NO: 4435 - DNA, 50 bp, synthetic construct
  source 1..50: mol_type = other DNA
ctatacttaaatctttatcatcaacctcaaactctaaaatttatataacc

SEQ ID NO: 4436 - DNA, 50 bp, synthetic construct
  source 1..50: mol_type = other DNA
aacaaaaaataattccattcaaaaaacatttcccctatttatatatcacc

SEQ ID NO: 4437 - DNA, 50 bp, synthetic construct
  source 1..50: mol_type = other DNA
acttcttatttacttaaataatttactaactcracaactatctacttctc

SEQ ID NO: 4438 - DNA, 50 bp, synthetic construct
  source 1..50: mol_type = other DNA
acaaacttaatctaaccaacttcttatttacttaaataatttactaactc

SEQ ID NO: 4439 - DNA, 50 bp, synthetic construct
  source 1..50: mol_type = other DNA
crcatatccaattttaaattaaaaaaacattcttactatacttataatac

SEQ ID NO: 4440 - DNA, 50 bp, synthetic construct
  source 1..50: mol_type = other DNA
tacaatcataatacctcctctatctatttttaaattaaccaaataacaac

SEQ ID NO: 4441 - DNA, 50 bp, synthetic construct
  source 1..50: mol_type = other DNA
actccaataacatttacttatttacataataaaaatactatcaaatacac

SEQ ID NO: 4442 - DNA, 50 bp, synthetic construct
  source 1..50: mol_type = other DNA
ctcaattcrcraatcrcaaccaaactccataaaaataataaaaccaaatc

SEQ ID NO: 4443 - DNA, 50 bp, synthetic construct
  source 1..50: mol_type = other DNA
aaatcrtaataactaaataaattatctcaactaactctaataaaaccrcc

SEQ ID NO: 4444 - DNA, 50 bp, synthetic construct
  source 1..50: mol_type = other DNA
cttacacaacacactctaacaaccaaatacaacttaaaaaaaacrctcac

SEQ ID NO: 4445 - DNA, 50 bp, synthetic construct
  source 1..50: mol_type = other DNA
cctaaacctataaaacrtaaccraataaaaaacctaaaaaccattcacac

SEQ ID NO: 4446 - DNA, 50 bp, synthetic construct
  source 1..50: mol_type = other DNA
taaataactttcaaattttctatccractacrttctacaaattcaaaaac

SEQ ID NO: 4447 - DNA, 50 bp, synthetic construct
  source 1..50: mol_type = other DNA
ctccctacaatcttataaaaaaaatactatcatcacccctattttacaac

SEQ ID NO: 4448 - DNA, 50 bp, synthetic construct
  source 1..50: mol_type = other DNA
acaataaaaaaacaacccaacaaaaaccaacatctacrtaccttcccaac

SEQ ID NO: 4449 - DNA, 50 bp, synthetic construct
  source 1..50: mol_type = other DNA
ccccaaaaataaaacaataaaaaaacaacccaacaaaaaccaacatctac

SEQ ID NO: 4450 - DNA, 50 bp, synthetic construct
  source 1..50: mol_type = other DNA
aaaaacaccataaacttaaactcttaaaatcataaaacaaaaatccattc

SEQ ID NO: 4451 - DNA, 50 bp, synthetic construct
  source 1..50: mol_type = other DNA
caccataaacttaaactcttaaaatcataaaacaaaaatccattcrtcac

SEQ ID NO: 4452 - DNA, 50 bp, synthetic construct
  source 1..50: mol_type = other DNA
tcataaaacaaaaatccattcrtcacraaaatataataaatatctcaatc

SEQ ID NO: 4453 - DNA, 50 bp, synthetic construct
  source 1..50: mol_type = other DNA
cataaaattctatttcatacattcaatatccaaaaacctaacaccaaacc

SEQ ID NO: 4454 - DNA, 50 bp, synthetic construct
  source 1..50: mol_type = other DNA
ccaattccttaccccaaaatcctaaaaattaacataaatcccaaaaaccc

SEQ ID NO: 4455 - DNA, 50 bp, synthetic construct
  source 1..50: mol_type = other DNA
cttaaaacacacttcacrcaatcacaaaaaaaactcataaaccaaactac

SEQ ID NO: 4456 - DNA, 50 bp, synthetic construct
  source 1..50: mol_type = other DNA
atctaccttttaatttttacraaaaattaaatttacctatattcttatcc

SEQ ID NO: 4457 - DNA, 50 bp, synthetic construct
  source 1..50: mol_type = other DNA
ataaaccatataattctatactttaaaaacatctaccttttaatttttac

SEQ ID NO: 4458 - DNA, 50 bp, synthetic construct
  source 1..50: mol_type = other DNA
aaaaaaataacaacaacattaaaattaaattaaataaatttccccttatc

SEQ ID NO: 4459 - DNA, 50 bp, synthetic construct
  source 1..50: mol_type = other DNA
catttaaatttccccaaatctaatctacatccaaaatcaactatacactc

SEQ ID NO: 4460 - DNA, 50 bp, synthetic construct
  source 1..50: mol_type = other DNA
caaaaatattacttttccaacaaatctctaaaactaaatataccaacacc

SEQ ID NO: 4461 - DNA, 50 bp, synthetic construct
  source 1..50: mol_type = other DNA
tatttaaaatacataaaataccttccctaacaaaatcatttctcatactc

SEQ ID NO: 4462 - DNA, 50 bp, synthetic construct
  source 1..50: mol_type = other DNA
aacctcctaatcataaacctatactactaaaaattcctctcaacatcttc

SEQ ID NO: 4463 - DNA, 50 bp, synthetic construct
  source 1..50: mol_type = other DNA
accaaatatttttttatactacaactaaactaacaatcaaaccacaaaac

SEQ ID NO: 4464 - DNA, 50 bp, synthetic construct
  source 1..50: mol_type = other DNA
ccttaaatatccaatacaacctaaaatactactaatactataaataatcc

SEQ ID NO: 4465 - DNA, 50 bp, synthetic construct
  source 1..50: mol_type = other DNA
ataaaaaaaaaatctctaattttaactctaacatctacaaaaaccrcccc

SEQ ID NO: 4466 - DNA, 50 bp, synthetic construct
  source 1..50: mol_type = other DNA
aaaaaacacaccataaaacctaaacttccaaaaaaaatacrtaaaataac

SEQ ID NO: 4467 - DNA, 50 bp, synthetic construct
  source 1..50: mol_type = other DNA
aattcaattactttctactttttaactaacaaaaacctacrtcactttac

SEQ ID NO: 4468 - DNA, 50 bp, synthetic construct
  source 1..50: mol_type = other DNA
acactacacaacacccataaatcacaactataatcacrctcctaaaaatc

SEQ ID NO: 4469 - DNA, 50 bp, synthetic construct
  source 1..50: mol_type = other DNA
actaactctatcaataactctctcactaaatcattacractcccaaaaac

SEQ ID NO: 4470 - DNA, 50 bp, synthetic construct
  source 1..50: mol_type = other DNA
ccactactccrtataaatcactattcctattttctcttcctactaaactc

SEQ ID NO: 4471 - DNA, 50 bp, synthetic construct
  source 1..50: mol_type = other DNA
tctacccactattacaaaatctaaactacrtcccaatctcaacaaaaaac

SEQ ID NO: 4472 - DNA, 50 bp, synthetic construct
  source 1..50: mol_type = other DNA
ttaacctccatcrccaaatcctctacccactattacaaaatctaaactac

SEQ ID NO: 4473 - DNA, 50 bp, synthetic construct
  source 1..50: mol_type = other DNA
taaaactaaaacrcaacccaaattctacaacaataaacaaaaaatttaac

SEQ ID NO: 4474 - DNA, 50 bp, synthetic construct
  source 1..50: mol_type = other DNA
tatcctacraaaaacattatttctctctttctcattttcatccattaatc

SEQ ID NO: 4475 - DNA, 50 bp, synthetic construct
  source 1..50: mol_type = other DNA
ttaaataatacaacttaactaacctaatcaaaataaataacttatcctac

SEQ ID NO: 4476 - DNA, 50 bp, synthetic construct
  source 1..50: mol_type = other DNA
aaaaaaaaataaacatttcctctcttaaaacacaaaacaaacaaaatcac

SEQ ID NO: 4477 - DNA, 50 bp, synthetic construct
  source 1..50: mol_type = other DNA
aaacatttcctctcttaaaacacaaaacaaacaaaatcacrcctaaactc

SEQ ID NO: 4478 - DNA, 50 bp, synthetic construct
  source 1..50: mol_type = other DNA
aaaacacaaaacaaacaaaatcacrcctaaactcracaaacaaaaacttc

SEQ ID NO: 4479 - DNA, 50 bp, synthetic construct
  source 1..50: mol_type = other DNA
acttcraactaaacaacrattcctcaacaaccactaaaaaacrcaataac

SEQ ID NO: 4480 - DNA, 50 bp, synthetic construct
  source 1..50: mol_type = other DNA
ataaattacracaacctaaacraaactctataaacttcraactaaacaac

SEQ ID NO: 4481 - DNA, 50 bp, synthetic construct
  source 1..50: mol_type = other DNA
ctaaccrcctaaataaattacracaacctaaacraaactctataaacttc

SEQ ID NO: 4482 - DNA, 50 bp, synthetic construct
  source 1..50: mol_type = other DNA
ccttaaattaaaaaaccccraaaaaataatatatacaccccraaataccc

SEQ ID NO: 4483 - DNA, 50 bp, synthetic construct
  source 1..50: mol_type = other DNA
aaactaccrcaacctacctaaacraccaaaataaaaacttacaaataaac

SEQ ID NO: 4484 - DNA, 50 bp, synthetic construct
  source 1..50: mol_type = other DNA
caacctacctaaacraccaaaataaaaacttacaaataaacraacatccc

SEQ ID NO: 4485 - DNA, 50 bp, synthetic construct
  source 1..50: mol_type = other DNA
aaaaaacraaacaactttcraatcattttcaacraatacaaaactccctc

SEQ ID NO: 4486 - DNA, 50 bp, synthetic construct
  source 1..50: mol_type = other DNA
acttttatctcctcaaaacrttccaaaacraaacrtactttataacctac

SEQ ID NO: 4487 - DNA, 50 bp, synthetic construct
  source 1..50: mol_type = other DNA
ataaaaattactatatccccccatttcctttatcttccatttccccrttc

SEQ ID NO: 4488 - DNA, 50 bp, synthetic construct
  source 1..50: mol_type = other DNA
ctcctttaaaaaaattaaataatataaaaaacatacaaaacacctacctc

SEQ ID NO: 4489 - DNA, 50 bp, synthetic construct
  source 1..50: mol_type = other DNA
aaaaaaattctacctcaaaactacaacacaaaaaccccrcctaaaattcc

SEQ ID NO: 4490 - DNA, 50 bp, synthetic construct
  source 1..50: mol_type = other DNA
ttataatcttaactctaaattccataaaacaaccaatcraaatttcaaac

SEQ ID NO: 4491 - DNA, 50 bp, synthetic construct
  source 1..50: mol_type = other DNA
aactataaactataactattcctatttaaccatcttaactccacaatatc

SEQ ID NO: 4492 - DNA, 50 bp, synthetic construct
  source 1..50: mol_type = other DNA
ataaaaccaaaataaccaaataaaaacaactacaatctacaactcccaac

SEQ ID NO: 4493 - DNA, 50 bp, synthetic construct
  source 1..50: mol_type = other DNA
ccaaaataaccaaataaaaacaactacaatctacaactcccaacrtaaac

SEQ ID NO: 4494 - DNA, 50 bp, synthetic construct
  source 1..50: mol_type = other DNA
aaataatttctacatttccaactaaaatactaaattcatctcactaaaac

SEQ ID NO: 4495 - DNA, 50 bp, synthetic construct
  source 1..50: mol_type = other DNA
aaacaataaatacaaaacactaaacrtaaaccaaaacaaaacraaacatc

SEQ ID NO: 4496 - DNA, 50 bp, synthetic construct
  source 1..50: mol_type = other DNA
aacacaccaaaaaattatatcctacacctaacttaaaaaatcctacaccc

SEQ ID NO: 4497 - DNA, 50 bp, synthetic construct
  source 1..50: mol_type = other DNA
aaaattatatcctacacctaacttaaaaaatcctacacccrtaaaacctc

SEQ ID NO: 4498 - DNA, 50 bp, synthetic construct
  source 1..50: mol_type = other DNA
caacctcrctaccaacttacaatttaatctcaaactactctactaacaac

SEQ ID NO: 4499 - DNA, 50 bp, synthetic construct
  source 1..50: mol_type = other DNA
acttcccractactttatttacccactcaaacctcaacaataataaacac

SEQ ID NO: 4500 - DNA, 50 bp, synthetic construct
  source 1..50: mol_type = other DNA
aaaaaacrtacccaccattactaaaacttaaataaataaacaaaacaacc

SEQ ID NO: 4501 - DNA, 50 bp, synthetic construct
  source 1..50: mol_type = other DNA
ctacaaaaacaaacaaacctccttaaactacaataaactctacccaattc

SEQ ID NO: 4502 - DNA, 50 bp, synthetic construct
  source 1..50: mol_type = other DNA
caaaaacctacttaaaaaaacaatctatccrttctcaaatctccaactac

SEQ ID NO: 4503 - DNA, 50 bp, synthetic construct
  source 1..50: mol_type = other DNA
aaaatatcaaactaccccctactaaaaaatacctcccaattaaactactc

SEQ ID NO: 4504 - DNA, 50 bp, synthetic construct
  source 1..50: mol_type = other DNA
aaactacaaaacaacraatattaataaacaacaaatattactacctaatc

SEQ ID NO: 4505 - DNA, 50 bp, synthetic construct
  source 1..50: mol_type = other DNA
ctaaaacctaaacaaaaaatttctaaattccaaaaaatactacttacttc

SEQ ID NO: 4506 - DNA, 50 bp, synthetic construct
  source 1..50: mol_type = other DNA
ccaaatattccttaactcctcatttaacaaacaccactcaaaaaaactcc

SEQ ID NO: 4507 - DNA, 50 bp, synthetic construct
  source 1..50: mol_type = other DNA
cacaataaacacttaaaaaataacaactattattatcatttatttcaatc

SEQ ID NO: 4508 - DNA, 50 bp, synthetic construct
  source 1..50: mol_type = other DNA
ractctcaccaaaacaaatccctaaacacctacccttcataaataataac

SEQ ID NO: 4509 - DNA, 50 bp, synthetic construct
  source 1..50: mol_type = other DNA
ttcataaataataacracctatctaatatccaataataccaacaaccttc

SEQ ID NO: 4510 - DNA, 50 bp, synthetic construct
  source 1..50: mol_type = other DNA
aaaacctaaaatacattcccaaaaaacaactcttaaaaaacaattaaaac

SEQ ID NO: 4511 - DNA, 50 bp, synthetic construct
  source 1..50: mol_type = other DNA
tttcaatatcatataaaaacacaaatttaaaaccataccccataccrttc

SEQ ID NO: 4512 - DNA, 50 bp, synthetic construct
  source 1..50: mol_type = other DNA
tattttcaattctctctcaaaaacaaaacttcctttaattcaaaatatcc

SEQ ID NO: 4513 - DNA, 50 bp, synthetic construct
  source 1..50: mol_type = other DNA
cttattatcttaataaactattctcaaacctataaaacaatcttatcccc

SEQ ID NO: 4514 - DNA, 50 bp, synthetic construct
  source 1..50: mol_type = other DNA
tcaaaatctcrctaacrctactcaacatcttcataaaatacttaataatc

SEQ ID NO: 4515 - DNA, 50 bp, synthetic construct
  source 1..50: mol_type = other DNA
cccaaacatcatacacraccatcaaatacttcataaaaatactaaacaac

SEQ ID NO: 4516 - DNA, 50 bp, synthetic construct
  source 1..50: mol_type = other DNA
catcatacacraccatcaaatacttcataaaaatactaaacaacrtcaac

SEQ ID NO: 4517 - DNA, 50 bp, synthetic construct
  source 1..50: mol_type = other DNA
aaaccttaatcttcatcttcataaatatatccactataaacaaaaatcac

SEQ ID NO: 4518 - DNA, 50 bp, synthetic construct
  source 1..50: mol_type = other DNA
ctacttcaccctaaccttctaccaaatctaaaaaaccatcaataaaaaac

SEQ ID NO: 4519 - DNA, 50 bp, synthetic construct
  source 1..50: mol_type = other DNA
accaaatctaaaaaaccatcaataaaaaacracaaaactccaaaatctcc

SEQ ID NO: 4520 - DNA, 50 bp, synthetic construct
  source 1..50: mol_type = other DNA
aaccrataaaaccaattaacatctactcaatcctccaattttaacattac

SEQ ID NO: 4521 - DNA, 50 bp, synthetic construct
  source 1..50: mol_type = other DNA
caaacaaaaaaaattcctactcacraccaaattcctaatctaccctaacc

SEQ ID NO: 4522 - DNA, 50 bp, synthetic construct
  source 1..50: mol_type = other DNA
aaataaatactaactaattttaccrattaaaataaactaaaaacctaatc

SEQ ID NO: 4523 - DNA, 50 bp, synthetic construct
  source 1..50: mol_type = other DNA
acaaatattcaaaaataccataaatcaacttactaaactttccattctac

SEQ ID NO: 4524 - DNA, 50 bp, synthetic construct
  source 1..50: mol_type = other DNA
tttccattctacrtaaaaaattaacactcaaaaaacaaaccaaaacacrc

SEQ ID NO: 4525 - DNA, 50 bp, synthetic construct
  source 1..50: mol_type = other DNA
ctacctttaaacaaaaaatatacattacacaataacratttaatttcatc

SEQ ID NO: 4526 - DNA, 50 bp, synthetic construct
  source 1..50: mol_type = other DNA
aaaaaaatctctatctcctcrcacatatctccaatcacaaaattctcaac

SEQ ID NO: 4527 - DNA, 50 bp, synthetic construct
  source 1..50: mol_type = other DNA
tttacactcccacccacaatatataaatattcccttttctctacaacctc

SEQ ID NO: 4528 - DNA, 50 bp, synthetic construct
  source 1..50: mol_type = other DNA
cctcccttacacataaatatataaaaatacttacaaaaacccctctaccc

SEQ ID NO: 4529 - DNA, 50 bp, synthetic construct
  source 1..50: mol_type = other DNA
cacataaatatataaaaatacttacaaaaacccctctacccraaccttcc

SEQ ID NO: 4530 - DNA, 50 bp, synthetic construct
  source 1..50: mol_type = other DNA
caaactaacctactataactcaaaacttaatcttcaactcttccattccc

SEQ ID NO: 4531 - DNA, 50 bp, synthetic construct
  source 1..50: mol_type = other DNA
aaaaaacccaataaaaactaacrcaactccraataaactttaacractac

SEQ ID NO: 4532 - DNA, 50 bp, synthetic construct
  source 1..50: mol_type = other DNA
taaatactcatactcaaatacttcatatacctaataataaacatcacrtc

SEQ ID NO: 4533 - DNA, 50 bp, synthetic construct
  source 1..50: mol_type = other DNA
actataccrtaactactactcaatcacataaaaacaacaaaaaaacaacc

SEQ ID NO: 4534 - DNA, 50 bp, synthetic construct
  source 1..50: mol_type = other DNA
tactactcaatcacataaaaacaacaaaaaaacaaccrtaaaaaactccc

SEQ ID NO: 4535 - DNA, 50 bp, synthetic construct
  source 1..50: mol_type = other DNA
aaccaaaccaaactaaaaaacccacatccaaaaacctcrcaaataactac

SEQ ID NO: 4536 - DNA, 50 bp, synthetic construct
  source 1..50: mol_type = other DNA
acaacatctacraaccaaaccaaactaaaaaacccacatccaaaaacctc

SEQ ID NO: 4537 - DNA, 50 bp, synthetic construct
  source 1..50: mol_type = other DNA
taactcaatatccttcctaaaactacaatcractaaactacaacatctac

SEQ ID NO: 4538 - DNA, 50 bp, synthetic construct
  source 1..50: mol_type = other DNA
acractccrctaaataattctaactcaatatccttcctaaaactacaatc

SEQ ID NO: 4539 - DNA, 50 bp, synthetic construct
  source 1..50: mol_type = other DNA
aatataaccatcccacaaattttaaaaatcaaaaatcaaaaaacractcc

SEQ ID NO: 4540 - DNA, 50 bp, synthetic construct
  source 1..50: mol_type = other DNA
acaacaaatataaccatcccacaaattttaaaaatcaaaaatcaaaaaac

SEQ ID NO: 4541 - DNA, 50 bp, synthetic construct
  source 1..50: mol_type = other DNA
aaacaattacatttaaaaatcatttattacacaacacaaataactaatac

SEQ ID NO: 4542 - DNA, 50 bp, synthetic construct
  source 1..50: mol_type = other DNA
tttaatcatcattatctatattcaatcctaaacttatcraaaactaaacc

SEQ ID NO: 4543 - DNA, 50 bp, synthetic construct
  source 1..50: mol_type = other DNA
acrttaacataaaaaccaaccaaaaaaattaaacaaaaactccaaaaccc

SEQ ID NO: 4544 - DNA, 50 bp, synthetic construct
  source 1..50: mol_type = other DNA
aaccaatttataaactaccccracttatctaaacaaatcatttctctacc

SEQ ID NO: 4545 - DNA, 50 bp, synthetic construct
  source 1..50: mol_type = other DNA
tctaacttcaacatccaacaaaacacttcaactaccccaaaaaaaccacc

SEQ ID NO: 4546 - DNA, 50 bp, synthetic construct
  source 1..50: mol_type = other DNA
aaactacctaaactccacccractacttactcttctaaaatttactcatc

SEQ ID NO: 4547 - DNA, 50 bp, synthetic construct
  source 1..50: mol_type = other DNA
aaaccaccrtaataataaccrataaacaaatcctaaaaaaacaaacaacc

SEQ ID NO: 4548 - DNA, 50 bp, synthetic construct
  source 1..50: mol_type = other DNA
actacctttctaaaaaccrtaaaaacatacccacattaaaacccttctcc

SEQ ID NO: 4549 - DNA, 50 bp, synthetic construct
  source 1..50: mol_type = other DNA
aaacacttaataaaacaacataaaccaaacttactacctttctaaaaacc

SEQ ID NO: 4550 - DNA, 50 bp, synthetic construct
  source 1..50: mol_type = other DNA
cttacaactctaaaatttaattaaaacttaaactcaacatcaaactaacc

SEQ ID NO: 4551 - DNA, 50 bp, synthetic construct
  source 1..50: mol_type = other DNA
acttaaactcaacatcaaactaaccraaccaaattctaaacttatataac

SEQ ID NO: 4552 - DNA, 50 bp, synthetic construct
  source 1..50: mol_type = other DNA
rtaattttctaaatccacaacaaaaactccrtatttaccaactcaaaacc

SEQ ID NO: 4553 - DNA, 50 bp, synthetic construct
  source 1..50: mol_type = other DNA
cctaatctatattttataacrtaattttctaaatccacaacaaaaactcc

SEQ ID NO: 4554 - DNA, 50 bp, synthetic construct
  source 1..50: mol_type = other DNA
rcacacccraaactacrttttcctaacaaccctaatctatattttataac

SEQ ID NO: 4555 - DNA, 50 bp, synthetic construct
  source 1..50: mol_type = other DNA
aaaaccacrttataaaacacaaaccaaaactattaaaaaaacrcaacccc

SEQ ID NO: 4556 - DNA, 50 bp, synthetic construct
  source 1..50: mol_type = other DNA
ttcactaaccctaaaaacrataaacraataaactacaactataaacactc

SEQ ID NO: 4557 - DNA, 50 bp, synthetic construct
  source 1..50: mol_type = other DNA
tccataaaaatctaaactatacacaatcataattcactaaccctaaaaac

SEQ ID NO: 4558 - DNA, 50 bp, synthetic construct
  source 1..50: mol_type = other DNA
acacaactcaaacctccataaataaaaaacaaactcacaaaaccctatac

SEQ ID NO: 4559 - DNA, 50 bp, synthetic construct
  source 1..50: mol_type = other DNA
tacaaaccaaacraaataccrcaaaaaaaccctaatataaaaccaaaacc

SEQ ID NO: 4560 - DNA, 50 bp, synthetic construct
  source 1..50: mol_type = other DNA
cacttctttcctaccctacctccttcttaaccccaaacaatcaataattc

SEQ ID NO: 4561 - DNA, 50 bp, synthetic construct
  source 1..50: mol_type = other DNA
aaatcaataaaaacaccataaccaataaaaaaaactaaatctatacaccc

SEQ ID NO: 4562 - DNA, 50 bp, synthetic construct
  source 1..50: mol_type = other DNA
aaaccaccttacataccratatctattaaaaaaataaacrtataaacaac

SEQ ID NO: 4563 - DNA, 50 bp, synthetic construct
  source 1..50: mol_type = other DNA
aatattacaaaaaaccaccttacataccratatctattaaaaaaataaac

SEQ ID NO: 4564 - DNA, 50 bp, synthetic construct
  source 1..50: mol_type = other DNA
cacacacaaaacaaaactaataaatattacaaaaaaccaccttacatacc

SEQ ID NO: 4565 - DNA, 50 bp, synthetic construct
  source 1..50: mol_type = other DNA
tcctacaaataataccrattcataaatacractaataaatccrataaaac

SEQ ID NO: 4566 - DNA, 50 bp, synthetic construct
  source 1..50: mol_type = other DNA
acttacaaaactcaaaaaactacaataacraaatatccrctatacctacc

SEQ ID NO: 4567 - DNA, 50 bp, synthetic construct
  source 1..50: mol_type = other DNA
ccccaacctaaaacttacaaaactcaaaaaactacaataacraaatatcc

SEQ ID NO: 4568 - DNA, 50 bp, synthetic construct
  source 1..50: mol_type = other DNA
ctacaaataaaatccataacaaaaaaaacracaaacacaacraacacccc

SEQ ID NO: 4569 - DNA, 50 bp, synthetic construct
  source 1..50: mol_type = other DNA
acaaatccacrtcttcacttaaaaaaacttaaacaccccaaaattctaac

SEQ ID NO: 4570 - DNA, 50 bp, synthetic construct
  source 1..50: mol_type = other DNA
aacacaaataacacraaaaatccccttattttaaatataaaatatttatc

SEQ ID NO: 4571 - DNA, 50 bp, synthetic construct
  source 1..50: mol_type = other DNA
taaacatctcaacrtaaacatttacaataacccrataacacaaataacac

SEQ ID NO: 4572 - DNA, 50 bp, synthetic construct
  source 1..50: mol_type = other DNA
aaaaaaactttccrtatcatttataccatcraaccattacaaatatccac

SEQ ID NO: 4573 - DNA, 50 bp, synthetic construct
  source 1..50: mol_type = other DNA
aacctaaaaaaacccaataaaaactaacrcaactccraataaactttaac

SEQ ID NO: 4574 - DNA, 50 bp, synthetic construct
  source 1..50: mol_type = other DNA
rcracraaaatcrtacctccttaacctaaaaaaacccaataaaaactaac

SEQ ID NO: 4575 - DNA, 50 bp, synthetic construct
  source 1..50: mol_type = other DNA
aatttcttcccatatcctaaacatttactttatataccrcracraaaatc

SEQ ID NO: 4576 - DNA, 50 bp, synthetic construct
  source 1..50: mol_type = other DNA
tatatcracraatttcttcccatatcctaaacatttactttatataccrc

SEQ ID NO: 4577 - DNA, 50 bp, synthetic construct
  source 1..50: mol_type = other DNA
aatatcraccaacaaaaaacrctaactaacaaaacaaataaaacccaaac

SEQ ID NO: 4578 - DNA, 50 bp, synthetic construct
  source 1..50: mol_type = other DNA
acccttcaaaaaaataccrctaccctttaaaatatcraccaacaaaaaac

SEQ ID NO: 4579 - DNA, 50 bp, synthetic construct
  source 1..50: mol_type = other DNA
tcaaactcaactcaacccttcaaaaaaataccrctaccctttaaaatatc

SEQ ID NO: 4580 - DNA, 50 bp, synthetic construct
  source 1..50: mol_type = other DNA
aaaaacaaaacctacaaatcaaactcaactcaacccttcaaaaaaatacc

SEQ ID NO: 4581 - DNA, 50 bp, synthetic construct
  source 1..50: mol_type = other DNA
aaactaactaatcaatcaataaaaacccaactaacacrcaaacacttccc

SEQ ID NO: 4582 - DNA, 50 bp, synthetic construct
  source 1..50: mol_type = other DNA
acatttcctatcaaaactaactaatcaatcaataaaaacccaactaacac

SEQ ID NO: 4583 - DNA, 50 bp, synthetic construct
  source 1..50: mol_type = other DNA
atttcrttatataaaaataccacattttacttcttaatccatccctctcc

SEQ ID NO: 4584 - DNA, 50 bp, synthetic construct
  source 1..50: mol_type = other DNA
aaaaaactcaaacaaaacaaatacaaacttccaactttaaaaccaaaaac

SEQ ID NO: 4585 - DNA, 50 bp, synthetic construct
  source 1..50: mol_type = other DNA
atacaaacttccaactttaaaaccaaaaacrtcaatttctatatttatcc

SEQ ID NO: 4586 - DNA, 50 bp, synthetic construct
  source 1..50: mol_type = other DNA
aacctaaatatccatcaactaataaataacaaataaaatattatatatcc

SEQ ID NO: 4587 - DNA, 50 bp, synthetic construct
  source 1..50: mol_type = other DNA
taacattcacttacctccaactataaaataaacttatcatctttcaacac

SEQ ID NO: 4588 - DNA, 50 bp, synthetic construct
  source 1..50: mol_type = other DNA
tttcccctcaaaaacctaaaaatttctcaaaacctcataacaataaaaac

SEQ ID NO: 4589 - DNA, 50 bp, synthetic construct
  source 1..50: mol_type = other DNA
ttaaaatatcaactattaaataaacaatatccattcccaaaatatttccc

SEQ ID NO: 4590 - DNA, 50 bp, synthetic construct
  source 1..50: mol_type = other DNA
ttatcaaatctaaaacccaaactctaaataactaatttcctctaattacc

SEQ ID NO: 4591 - DNA, 50 bp, synthetic construct
  source 1..50: mol_type = other DNA
tatacatcaatacraccaaaacatttaaaatacaaccaatacaattaaac

SEQ ID NO: 4592 - DNA, 50 bp, synthetic construct
  source 1..50: mol_type = other DNA
tacatcaatacraccaaaacatttaaaatacaaccaatacaattaaacrc

SEQ ID NO: 4593 - DNA, 50 bp, synthetic construct
  source 1..50: mol_type = other DNA
aacccaaaaacttaccraaatccttctaaaaatctaatttcataaatcac

SEQ ID NO: 4594 - DNA, 50 bp, synthetic construct
  source 1..50: mol_type = other DNA
aatatacccataaaacrtaactcataaaatcaaattcttaaaaaaacctc

SEQ ID NO: 4595 - DNA, 50 bp, synthetic construct
  source 1..50: mol_type = other DNA
aacaaacactacctaaacaaataatactacaaacaaacatttaaacaatc

SEQ ID NO: 4596 - DNA, 50 bp, synthetic construct
  source 1..50: mol_type = other DNA
tacttctactctatctaaattaaacaaaatcaaaaacctaaccccaatac

SEQ ID NO: 4597 - DNA, 50 bp, synthetic construct
  source 1..50: mol_type = other DNA
caaaacctcacttaatatcctaaaaaaacaactccaaattattaattcac

SEQ ID NO: 4598 - DNA, 50 bp, synthetic construct
  source 1..50: mol_type = other DNA
aaaacatcacacrcaaaaataacaaaacaaacatcaacaaaacaaaccac

SEQ ID NO: 4599 - DNA, 50 bp, synthetic construct
  source 1..50: mol_type = other DNA
ctaaaaaaactaactaatcacrataactacaacaatcaaaaaatcrtccc

SEQ ID NO: 4600 - DNA, 50 bp, synthetic construct
  source 1..50: mol_type = other DNA
aaaaattaaatatttcctctataacatacccacacatctccaaaaaaaac

SEQ ID NO: 4601 - DNA, 50 bp, synthetic construct
  source 1..50: mol_type = other DNA
taatacttttccttaaatcttcctttaatcaaaactaccccttcataaac

SEQ ID NO: 4602 - DNA, 50 bp, synthetic construct
  source 1..50: mol_type = other DNA
ctattaaaaacaaaaacttcaatcccaaaaacctcacacrtaaaaaaccc

SEQ ID NO: 4603 - DNA, 50 bp, synthetic construct
  source 1..50: mol_type = other DNA
accccaaaaaactattaaaaacaaaaacttcaatcccaaaaacctcacac

SEQ ID NO: 4604 - DNA, 50 bp, synthetic construct
  source 1..50: mol_type = other DNA
atctttcctacrtaacaataaccctcctaacttataatttcctatatatc

SEQ ID NO: 4605 - DNA, 50 bp, synthetic construct
  source 1..50: mol_type = other DNA
ccttcctatctaaccatttaaatcacrattaaataaataatttccaactc

SEQ ID NO: 4606 - DNA, 50 bp, synthetic construct
  source 1..50: mol_type = other DNA
ttcatctttccttaaataaacraaccttcctatctaaccatttaaatcac

SEQ ID NO: 4607 - DNA, 50 bp, synthetic construct
  source 1..50: mol_type = other DNA
tcaaacccaacttccctctatacctaactaaataattctaaacaaatcac

SEQ ID NO: 4608 - DNA, 50 bp, synthetic construct
  source 1..50: mol_type = other DNA
ctccaacatttaaaccacattaaaaaaaccatataactactttcaacctc

SEQ ID NO: 4609 - DNA, 50 bp, synthetic construct
  source 1..50: mol_type = other DNA
taataaattttccaaataaaaccaaaaaataaatcaacaaacaaacaacc

SEQ ID NO: 4610 - DNA, 50 bp, synthetic construct
  source 1..50: mol_type = other DNA
aactttctacactatcactaaaatacaatacraaactcttctaaccacac

SEQ ID NO: 4611 - DNA, 50 bp, synthetic construct
  source 1..50: mol_type = other DNA
acccctaaaatcttaaattatatcaccatcctacctatattcaatctatc

SEQ ID NO: 4612 - DNA, 50 bp, synthetic construct
  source 1..50: mol_type = other DNA
tactaaaataccttaaaccaaaaaacaaactaataatatactaataaccc

SEQ ID NO: 4613 - DNA, 50 bp, synthetic construct
  source 1..50: mol_type = other DNA
aaccttcatttacacaaaaaacctatataaaaccatttactataaaaccc

SEQ ID NO: 4614 - DNA, 50 bp, synthetic construct
  source 1..50: mol_type = other DNA
acccttaataacactatctaatttctatttctataactatataaaacacc

SEQ ID NO: 4615 - DNA, 50 bp, synthetic construct
  source 1..50: mol_type = other DNA
aaactaaacaaccrcrtataatactaaaaaataccactaacatttaaaac

SEQ ID NO: 4616 - DNA, 50 bp, synthetic construct
  source 1..50: mol_type = other DNA
raacrttatacctaccaccacraaataaatctaataaatcraaaaattac

SEQ ID NO: 4617 - DNA, 50 bp, synthetic construct
  source 1..50: mol_type = other DNA
ctaccaccacraaataaatctaataaatcraaaaattacrccccaataac

SEQ ID NO: 4618 - DNA, 50 bp, synthetic construct
  source 1..50: mol_type = other DNA
aaatcaaaataaccttcccrtcrtccaaaatactattaaacaaaaacaac

SEQ ID NO: 4619 - DNA, 50 bp, synthetic construct
  source 1..50: mol_type = other DNA
cacaaactcaaaatctacaaaaaaatcracttattaaatcrtctctatac

SEQ ID NO: 4620 - DNA, 50 bp, synthetic construct
  source 1..50: mol_type = other DNA
aatcctaaaacacaaactcaaaatctacaaaaaaatcracttattaaatc

SEQ ID NO: 4621 - DNA, 50 bp, synthetic construct
  source 1..50: mol_type = other DNA
ataaaaactaccaaatcctaaaacacaaactcaaaatctacaaaaaaatc

SEQ ID NO: 4622 - DNA, 50 bp, synthetic construct
  source 1..50: mol_type = other DNA
ctcccrcatccctaaaattcaaaaccaactaataacataaatacccaaac

SEQ ID NO: 4623 - DNA, 50 bp, synthetic construct
  source 1..50: mol_type = other DNA
tcctttaactatatcctaattaataataacaaaaacacacattaaacaac

SEQ ID NO: 4624 - DNA, 50 bp, synthetic construct
  source 1..50: mol_type = other DNA
ctctttactaaaaaataacttataaaacaactcacatatcataaacctcc

SEQ ID NO: 4625 - DNA, 50 bp, synthetic construct
  source 1..50: mol_type = other DNA
ttactatcattttttcccaaaattatactctcctacaacrttttacraac

SEQ ID NO: 4626 - DNA, 50 bp, synthetic construct
  source 1..50: mol_type = other DNA
ttaattactatcattttttcccaaaattatactctcctacaacrttttac

SEQ ID NO: 4627 - DNA, 50 bp, synthetic construct
  source 1..50: mol_type = other DNA
atatcccaatataattaattctaaataaaataaccaaccrtccrcaaaac

SEQ ID NO: 4628 - DNA, 50 bp, synthetic construct
  source 1..50: mol_type = other DNA
taaaaactaaaattataaattctataatattcactaccttaacaaatttc

SEQ ID NO: 4629 - DNA, 50 bp, synthetic construct
  source 1..50: mol_type = other DNA
tattaaaactattatacaacctacattttaacaaaaacatacaaacrcac

SEQ ID NO: 4630 - DNA, 50 bp, synthetic construct
  source 1..50: mol_type = other DNA
aaatacatatttttactcaaatttctccatcattcaaaccaaataaaaac

SEQ ID NO: 4631 - DNA, 50 bp, synthetic construct
  source 1..50: mol_type = other DNA
ccatcattcaaaccaaataaaaacrctccttattaactccttattatatc

SEQ ID NO: 4632 - DNA, 50 bp, synthetic construct
  source 1..50: mol_type = other DNA
aaccctacaaattctatttaatattcttaaaaataaaaactccrtaaatc

SEQ ID NO: 4633 - DNA, 50 bp, synthetic construct
  source 1..50: mol_type = other DNA
cacaaaaaaccctacaaattctatttaatattcttaaaaataaaaactcc

SEQ ID NO: 4634 - DNA, 50 bp, synthetic construct
  source 1..50: mol_type = other DNA
taaaataaaacaaaaataccattaaaaatatttacaaccaacccctctcc

SEQ ID NO: 4635 - DNA, 50 bp, synthetic construct
  source 1..50: mol_type = other DNA
tcccccrattatttacctatataaactaaaaaaaataactaatattcacc

SEQ ID NO: 4636 - DNA, 50 bp, synthetic construct
  source 1..50: mol_type = other DNA
ttaacaactaccttcctacctttaacaataacaataaaacaaacccaaac

SEQ ID NO: 4637 - DNA, 50 bp, synthetic construct
  source 1..50: mol_type = other DNA
aaatcctcacrcaaattcaataaactaaacratttaaaataataaatacc

SEQ ID NO: 4638 - DNA, 50 bp, synthetic construct
  source 1..50: mol_type = other DNA
tcttcaccacttcaaattaaaccactcctaactatctcccatcaataaac

SEQ ID NO: 4639 - DNA, 50 bp, synthetic construct
  source 1..50: mol_type = other DNA
aaaatcaaatcactcaaatttaattattcacttccttatttaaaaaatcc

SEQ ID NO: 4640 - DNA, 50 bp, synthetic construct
  source 1..50: mol_type = other DNA
aaaaactcttttaataaaccctccaaatataaacttctataacaaccaac

SEQ ID NO: 4641 - DNA, 50 bp, synthetic construct
  source 1..50: mol_type = other DNA
accaacrcactcattatataataaacataattatccctcataaataatcc

SEQ ID NO: 4642 - DNA, 50 bp, synthetic construct
  source 1..50: mol_type = other DNA
aatatattactcactaaattttaatatattcactatattatacaaccatc

SEQ ID NO: 4643 - DNA, 50 bp, synthetic construct
  source 1..50: mol_type = other DNA
ctcactaaattttaatatattcactatattatacaaccatcrctattatc

SEQ ID NO: 4644 - DNA, 50 bp, synthetic construct
  source 1..50: mol_type = other DNA
aaacaaaacaaataatacatatcttaaaaatcccaaaaacctatccctac

SEQ ID NO: 4645 - DNA, 50 bp, synthetic construct
  source 1..50: mol_type = other DNA
taaataaattacataactcctctataccttaattccctcacctttaaaac

SEQ ID NO: 4646 - DNA, 50 bp, synthetic construct
  source 1..50: mol_type = other DNA
cctaactataaaaacrattttaaaaatatcctataaataaaatttctccc

SEQ ID NO: 4647 - DNA, 50 bp, synthetic construct
  source 1..50: mol_type = other DNA
taacaaaaaataatttcratccatcracctctaaattataaacccaacac

SEQ ID NO: 4648 - DNA, 50 bp, synthetic construct
  source 1..50: mol_type = other DNA
acaaaaccctcaaaaaatcccacaaatttctaaatttcctaaactaaccc

SEQ ID NO: 4649 - DNA, 50 bp, synthetic construct
  source 1..50: mol_type = other DNA
ttttccaccttttattccaaaaaaaacactataaaactacaacraaaaac

SEQ ID NO: 4650 - DNA, 50 bp, synthetic construct
  source 1..50: mol_type = other DNA
actctcattttccaccttttattccaaaaaaaacactataaaactacaac

SEQ ID NO: 4651 - DNA, 50 bp, synthetic construct
  source 1..50: mol_type = other DNA
taaaactaccattcaacttacctaaacaaaaaaaataataactaaaaacc

SEQ ID NO: 4652 - DNA, 50 bp, synthetic construct
  source 1..50: mol_type = other DNA
atataaaaactaaaaaaatcacacaaaaaaactaccacctccccaaccac

SEQ ID NO: 4653 - DNA, 50 bp, synthetic construct
  source 1..50: mol_type = other DNA
ccaataaacatttcaaaatatccctatcctaaatctccccaacaactccc

SEQ ID NO: 4654 - DNA, 50 bp, synthetic construct
  source 1..50: mol_type = other DNA
aacaaaaacatcctaaaatacccattaattatacctctaaaacaaattac

SEQ ID NO: 4655 - DNA, 50 bp, synthetic construct
  source 1..50: mol_type = other DNA
taataaaaatctacctatacttatttccaaataaaatatacctttaatac

SEQ ID NO: 4656 - DNA, 50 bp, synthetic construct
  source 1..50: mol_type = other DNA
ataaaaatctacctatacttatttccaaataaaatatacctttaatacrc

SEQ ID NO: 4657 - DNA, 50 bp, synthetic construct
  source 1..50: mol_type = other DNA
aaaaattaaacaaatcactcccactcactaacaatatctaccctacctac

SEQ ID NO: 4658 - DNA, 50 bp, synthetic construct
  source 1..50: mol_type = other DNA
aaaaaaactcaaaaccaaaccccttcattcctcaaaacaaaaaaaactac

SEQ ID NO: 4659 - DNA, 50 bp, synthetic construct
  source 1..50: mol_type = other DNA
cacacttacaatctctatcattctctataaaaaatctcaaatatctcttc

SEQ ID NO: 4660 - DNA, 50 bp, synthetic construct
  source 1..50: mol_type = other DNA
aatctcatcaattcttaataaaattcctctcaactaacatcacaaaaatc

SEQ ID NO: 4661 - DNA, 50 bp, synthetic construct
  source 1..50: mol_type = other DNA
aaaaaataaaataaccaaaaaaacatctctcatcctccatcttctcaatc

SEQ ID NO: 4662 - DNA, 50 bp, synthetic construct
  source 1..50: mol_type = other DNA
tccatcttctcaatcrcctaatacaaaaactttaattattaatactttac

SEQ ID NO: 4663 - DNA, 50 bp, synthetic construct
  source 1..50: mol_type = other DNA
cctaacractacaatccaacccttccraataaataaaatttactactcac

SEQ ID NO: 4664 - DNA, 50 bp, synthetic construct
  source 1..50: mol_type = other DNA
caaccccacaacaacctttcaaaccrtcctatttaaataaattcaaaaac

SEQ ID NO: 4665 - DNA, 50 bp, synthetic construct
  source 1..50: mol_type = other DNA
tataaaattccaaaccctttaaaaacraccrcttattctaaaaaccttac

SEQ ID NO: 4666 - DNA, 50 bp, synthetic construct
  source 1..50: mol_type = other DNA
aacttctaaaacactacctttataaaattccaaaccctttaaaaacracc

SEQ ID NO: 4667 - DNA, 50 bp, synthetic construct
  source 1..50: mol_type = other DNA
rctaaacttctaaaacactacctttataaaattccaaaccctttaaaaac

SEQ ID NO: 4668 - DNA, 50 bp, synthetic construct
  source 1..50: mol_type = other DNA
aatccraaaaaaacccacataccaattttctccttaatttcacacaaaac

SEQ ID NO: 4669 - DNA, 50 bp, synthetic construct
  source 1..50: mol_type = other DNA
ttcccccacaaattacactaataaaaaccctatcaaaataaatcaaatcc

SEQ ID NO: 4670 - DNA, 50 bp, synthetic construct
  source 1..50: mol_type = other DNA
ctaaaaatataattttcttccttaatccaaaaaactaaatacccrctctc

SEQ ID NO: 4671 - DNA, 50 bp, synthetic construct
  source 1..50: mol_type = other DNA
aatttataaattcrctctacttttaccataaaaatctccacrtaaatttc

SEQ ID NO: 4672 - DNA, 50 bp, synthetic construct
  source 1..50: mol_type = other DNA
aactacactatatctaacaacttcaaacaaaaacaataaaaacaaatcac

SEQ ID NO: 4673 - DNA, 50 bp, synthetic construct
  source 1..50: mol_type = other DNA
aacccccaaaaaccaacaaaacaaaaactctctccaaaaacaaatacccc

SEQ ID NO: 4674 - DNA, 50 bp, synthetic construct
  source 1..50: mol_type = other DNA
cttacacaaaccaaataaactcctctaaaaactaatacttcctaaactac

SEQ ID NO: 4675 - DNA, 50 bp, synthetic construct
  source 1..50: mol_type = other DNA
aactactaacttctaaattaaacactactactctaaaaacrcctctatac

SEQ ID NO: 4676 - DNA, 50 bp, synthetic construct
  source 1..50: mol_type = other DNA
rtcaccaaaaaactactaacttctaaattaaacactactactctaaaaac

SEQ ID NO: 4677 - DNA, 50 bp, synthetic construct
  source 1..50: mol_type = other DNA
ctaaaaaatatactatatattctaaacttacttcctaaaactcacttccc

SEQ ID NO: 4678 - DNA, 50 bp, synthetic construct
  source 1..50: mol_type = other DNA
atacataaccraacttatactactatataaaaccctaaaaactaaaaaac

SEQ ID NO: 4679 - DNA, 50 bp, synthetic construct
  source 1..50: mol_type = other DNA
rtatataaacrtcatctcacactaaaaatacttactacatatacataacc

SEQ ID NO: 4680 - DNA, 50 bp, synthetic construct
  source 1..50: mol_type = other DNA
acacaaactcraccatatacatacaacaaacacctccaatataaaataac

SEQ ID NO: 4681 - DNA, 50 bp, synthetic construct
  source 1..50: mol_type = other DNA
raccatatacatacaacaaacacctccaatataaaataacrcccacacac

SEQ ID NO: 4682 - DNA, 50 bp, synthetic construct
  source 1..50: mol_type = other DNA
aaaaaaaccccattcccccaaaaatactaaacccttcctactaaaaatac

SEQ ID NO: 4683 - DNA, 50 bp, synthetic construct
  source 1..50: mol_type = other DNA
cttataaaaactctcaccttcctacaacccctctaaaaactcccaatttc

SEQ ID NO: 4684 - DNA, 50 bp, synthetic construct
  source 1..50: mol_type = other DNA
acacraaacaaaaaatcacaactaactcacttactaccttctcaccaaac

SEQ ID NO: 4685 - DNA, 50 bp, synthetic construct
  source 1..50: mol_type = other DNA
atacrcttaataaaaaaacaacaaataaatcaattataactctctactcc

SEQ ID NO: 4686 - DNA, 50 bp, synthetic construct
  source 1..50: mol_type = other DNA
aataaaaactacactaaactaaaattacaccactacactacaacctaaac

SEQ ID NO: 4687 - DNA, 50 bp, synthetic construct
  source 1..50: mol_type = other DNA
taattaactttaaaaaataaatcaactttaccccraactacaatttcctc

SEQ ID NO: 4688 - DNA, 50 bp, synthetic construct
  source 1..50: mol_type = other DNA
tcttctaaatacaaattaattaactttaaaaaataaatcaactttacccc

SEQ ID NO: 4689 - DNA, 50 bp, synthetic construct
  source 1..50: mol_type = other DNA
ataaacrttacaataataaaatacacaaaactctaaaccacaaaaacccc

SEQ ID NO: 4690 - DNA, 50 bp, synthetic construct
  source 1..50: mol_type = other DNA
taaaccraaacctctataatttaaaaccctatatatcttatcactataac

SEQ ID NO: 4691 - DNA, 50 bp, synthetic construct
  source 1..50: mol_type = other DNA
atacctacccatccraaaaatacaaaacttataaattcctaaactcaccc

SEQ ID NO: 4692 - DNA, 50 bp, synthetic construct
  source 1..50: mol_type = other DNA
acctcattcctaaaaccatccraaacaaaacttttctaactaaaacacac

SEQ ID NO: 4693 - DNA, 50 bp, synthetic construct
  source 1..50: mol_type = other DNA
aaaacaaactaaaataaacaaacaactacacctcattcctaaaaccatcc

SEQ ID NO: 4694 - DNA, 50 bp, synthetic construct
  source 1..50: mol_type = other DNA
cctattaaataactcaaatatataacaaaaaattaacatctcaaataaac

SEQ ID NO: 4695 - DNA, 50 bp, synthetic construct
  source 1..50: mol_type = other DNA
aactacaaaaatcccttatttaaatcaatataataaatctaaatctaacc

SEQ ID NO: 4696 - DNA, 50 bp, synthetic construct
  source 1..50: mol_type = other DNA
aaacaaaatcraaaataccataaaataaatcrccccaaataactctaaac

SEQ ID NO: 4697 - DNA, 50 bp, synthetic construct
  source 1..50: mol_type = other DNA
cttcctaaaaaacctatcctaaattaaacccrcccaaaaccacctaaaac

SEQ ID NO: 4698 - DNA, 50 bp, synthetic construct
  source 1..50: mol_type = other DNA
attttatatctaacttcatcaccaaactaaacctcttaaaaacaataacc

SEQ ID NO: 4699 - DNA, 50 bp, synthetic construct
  source 1..50: mol_type = other DNA
aacctcttaaaaacaataaccraatcttaaatcttaattaacccttaaac

SEQ ID NO: 4700 - DNA, 50 bp, synthetic construct
  source 1..50: mol_type = other DNA
ctaatacttctaaatacrcraacaataatattcaaaaacttttaccacac

SEQ ID NO: 4701 - DNA, 50 bp, synthetic construct
  source 1..50: mol_type = other DNA
aaaaaaaaattctataacaatcttcttaattcctattacaaacttaatac

SEQ ID NO: 4702 - DNA, 50 bp, synthetic construct
  source 1..50: mol_type = other DNA
ttcttaattcctattacaaacttaatacrcttatctactattaaaaacac

SEQ ID NO: 4703 - DNA, 50 bp, synthetic construct
  source 1..50: mol_type = other DNA
tcttccaaataccatattttaaaattttcaactaaaaaaaccrtcactcc

SEQ ID NO: 4704 - DNA, 50 bp, synthetic construct
  source 1..50: mol_type = other DNA
atttcaaataaaacttaattccatcatttaattcctaacaacccaataac

SEQ ID NO: 4705 - DNA, 50 bp, synthetic construct
  source 1..50: mol_type = other DNA
caaaatcccrtaaaaactaaaaccaaacaactaaaaaactacataaaacc

SEQ ID NO: 4706 - DNA, 50 bp, synthetic construct
  source 1..50: mol_type = other DNA
ttccacatatacacatatacccaaatatacacacacatatacacacacac

SEQ ID NO: 4707 - DNA, 50 bp, synthetic construct
  source 1..50: mol_type = other DNA
acatatacacatatacccaaatatacacacacatatacacacacacrccc

SEQ ID NO: 4708 - DNA, 50 bp, synthetic construct
  source 1..50: mol_type = other DNA
aaccttataacrcaaaatcaaacaaacrtaaaaaaactataaatatacac

SEQ ID NO: 4709 - DNA, 50 bp, synthetic construct
  source 1..50: mol_type = other DNA
accaaaaaactaaacrtactcttccctacaatcttctttctctactcctc

SEQ ID NO: 4710 - DNA, 50 bp, synthetic construct
  source 1..50: mol_type = other DNA
aaaaaactctttttcttaacaaaccaccrtctataaaaaatataataacc

SEQ ID NO: 4711 - DNA, 50 bp, synthetic construct
  source 1..50: mol_type = other DNA
cctcccccttaataactaacaaaaaaaactctttttcttaacaaaccacc

SEQ ID NO: 4712 - DNA, 50 bp, synthetic construct
  source 1..50: mol_type = other DNA
cctaacaaaaaccctcacaaaaaacctacraaaaccaaacccactaaacc

SEQ ID NO: 4713 - DNA, 50 bp, synthetic construct
  source 1..50: mol_type = other DNA
aacctaaaaatatcctaacttacccaaaactaataccccaccatcaacac

SEQ ID NO: 4714 - DNA, 50 bp, synthetic construct
  source 1..50: mol_type = other DNA
acraaatcttctctatatatttcccraaaaatttataattcctttttccc

SEQ ID NO: 4715 - DNA, 50 bp, synthetic construct
  source 1..50: mol_type = other DNA
aatttaaccrtattaaccaaaataatctcratctcctaaccttataatcc

SEQ ID NO: 4716 - DNA, 50 bp, synthetic construct
  source 1..50: mol_type = other DNA
aaataacttacacaacaaacatctatttcccccaaatctaaaaactaaac

SEQ ID NO: 4717 - DNA, 50 bp, synthetic construct
  source 1..50: mol_type = other DNA
aaaaactcccttccaaattacaaaaaaccaccttctcactatatccccac

SEQ ID NO: 4718 - DNA, 50 bp, synthetic construct
  source 1..50: mol_type = other DNA
aaaatatcrccctcataaataaaattaatacctttatacaaaaaaccacc

SEQ ID NO: 4719 - DNA, 50 bp, synthetic construct
  source 1..50: mol_type = other DNA
aactttccrataactttttacataaaaacactaatcccactcataaaaac

SEQ ID NO: 4720 - DNA, 50 bp, synthetic construct
  source 1..50: mol_type = other DNA
tcaaaataaaactccccatctacaaaatccctacaaacctaataaatttc

SEQ ID NO: 4721 - DNA, 50 bp, synthetic construct
  source 1..50: mol_type = other DNA
ataccccaaaaatacttctatatctctctctcatcaacaactcttaatac

SEQ ID NO: 4722 - DNA, 50 bp, synthetic construct
  source 1..50: mol_type = other DNA
ctactaaactaccrtaaaaacttaaccctaataaataacttactttcctc

SEQ ID NO: 4723 - DNA, 50 bp, synthetic construct
  source 1..50: mol_type = other DNA
atatatactcaacraaaaaaacaaatcacctaccaaaaccaaattcccac

SEQ ID NO: 4724 - DNA, 50 bp, synthetic construct
  source 1..50: mol_type = other DNA
aacrcccacacctaaacraactaaatacctacttcctaaaacatataaac

SEQ ID NO: 4725 - DNA, 50 bp, synthetic construct
  source 1..50: mol_type = other DNA
cacacaaaaacaaaaaccatcctaaaactatcctaaaaaatacraacaac

SEQ ID NO: 4726 - DNA, 50 bp, synthetic construct
  source 1..50: mol_type = other DNA
atttcrccacacaaaaacaaaaaccatcctaaaactatcctaaaaaatac

SEQ ID NO: 4727 - DNA, 50 bp, synthetic construct
  source 1..50: mol_type = other DNA
ttcctaccaaatcaacaaccaactatataaccttactcaaatccatctcc

SEQ ID NO: 4728 - DNA, 50 bp, synthetic construct
  source 1..50: mol_type = other DNA
catctccrtacaccataacaacaaacaccaacratttataaacraataac

SEQ ID NO: 4729 - DNA, 50 bp, synthetic construct
  source 1..50: mol_type = other DNA
ccaaaaccaaatacttctccaaatcccraacttctaaaaaaaacaacrac

SEQ ID NO: 4730 - DNA, 50 bp, synthetic construct
  source 1..50: mol_type = other DNA
aacaaaaacraaaacttataaatattcctaatatcaaacaacttaacrtc

SEQ ID NO: 4731 - DNA, 50 bp, synthetic construct
  source 1..50: mol_type = other DNA
aatattcctaatatcaaacaacttaacrtcrttactcctcctaaaaatcc

SEQ ID NO: 4732 - DNA, 50 bp, synthetic construct
  source 1..50: mol_type = other DNA
cctcctaaaaatccraaatttaaaaaaacacctaattctaaataaaaacc

SEQ ID NO: 4733 - DNA, 50 bp, synthetic construct
  source 1..50: mol_type = other DNA
caaaatctacttcccaatcccaaaaaaaacaatttcraaaaatctttaac

SEQ ID NO: 4734 - DNA, 50 bp, synthetic construct
  source 1..50: mol_type = other DNA
accccaaaaaaacccaaaatctacttcccaatcccaaaaaaaacaatttc

SEQ ID NO: 4735 - DNA, 50 bp, synthetic construct
  source 1..50: mol_type = other DNA
aaacaaatcctaaacctccctaaaacctataacrctaacaacaactccac

SEQ ID NO: 4736 - DNA, 50 bp, synthetic construct
  source 1..50: mol_type = other DNA
cracccaaaaataaaataacaaccacaaaaataataacatctataacaac

SEQ ID NO: 4737 - DNA, 50 bp, synthetic construct
  source 1..50: mol_type = other DNA
aatatcaatttaatacttattccctaaaatctccccaaaactattaaaac

SEQ ID NO: 4738 - DNA, 50 bp, synthetic construct
  source 1..50: mol_type = other DNA
aaacraaactacrttctcctcaacacaaactttaaaaatacaataaaaac

SEQ ID NO: 4739 - DNA, 50 bp, synthetic construct
  source 1..50: mol_type = other DNA
taaaaatacaataaaaacraaacaatattcttctcaacacaaacctaaac

SEQ ID NO: 4740 - DNA, 50 bp, synthetic construct
  source 1..50: mol_type = other DNA
atacaataaaaacraaacaatattcttctcaacacaaacctaaacraatc

SEQ ID NO: 4741 - DNA, 50 bp, synthetic construct
  source 1..50: mol_type = other DNA
aaacraaacaatattcttctcaacacaaacctaaacraatcraaaacacc

SEQ ID NO: 4742 - DNA, 50 bp, synthetic construct
  source 1..50: mol_type = other DNA
raaacaataccccccaaaatctatactaaaaaaaaccctactctaccttc

SEQ ID NO: 4743 - DNA, 50 bp, synthetic construct
  source 1..50: mol_type = other DNA
acctctatctattaaatataaatcccctcctacttccccttatcaaatac

SEQ ID NO: 4744 - DNA, 50 bp, synthetic construct
  source 1..50: mol_type = other DNA
tcttaaataatttaaacacacacctttactcaaaaaaattcacaaaaacc

SEQ ID NO: 4745 - DNA, 50 bp, synthetic construct
  source 1..50: mol_type = other DNA
ccraaacattttttaaaaactattttaacccataacaaatacataaaatc

SEQ ID NO: 4746 - DNA, 50 bp, synthetic construct
  source 1..50: mol_type = other DNA
ttaacccttattacccaaaccraaatacaatatcaccatctcaactcacc

SEQ ID NO: 4747 - DNA, 50 bp, synthetic construct
  source 1..50: mol_type = other DNA
tttaaccatttttaaatataaaatccaataacactaaatacattcacctc

SEQ ID NO: 4748 - DNA, 50 bp, synthetic construct
  source 1..50: mol_type = other DNA
aaaaaacttcaaaaaccattccaaactactaacccttcatcctaaaaacc

SEQ ID NO: 4749 - DNA, 50 bp, synthetic construct
  source 1..50: mol_type = other DNA
taacccttcatcctaaaaaccrtaatatatctactccaaaaaaaataacc

SEQ ID NO: 4750 - DNA, 50 bp, synthetic construct
  source 1..50: mol_type = other DNA
taataaaaccccrtctccactaaaaatacacaaaaaaaatttaactaaac

SEQ ID NO: 4751 - DNA, 50 bp, synthetic construct
  source 1..50: mol_type = other DNA
ccccrtctccactaaaaatacacaaaaaaaatttaactaaacrtaataac

SEQ ID NO: 4752 - DNA, 50 bp, synthetic construct
  source 1..50: mol_type = other DNA
acaataacacaatcttaactctctacaacctctacctcccaaattaaaac

SEQ ID NO: 4753 - DNA, 50 bp, synthetic construct
  source 1..50: mol_type = other DNA
aatcaaaattataccactacattccaacctaaataacaaaacraaactcc

SEQ ID NO: 4754 - DNA, 50 bp, synthetic construct
  source 1..50: mol_type = other DNA
taaattaaatattcctaaaacaaacaatttaaaacaaaataattaactcc

SEQ ID NO: 4755 - DNA, 50 bp, synthetic construct
  source 1..50: mol_type = other DNA
aacaaaaaataaacacttcaaatttaatatctaaaataaatactaaaatc

SEQ ID NO: 4756 - DNA, 50 bp, synthetic construct
  source 1..50: mol_type = other DNA
aaaaataaatcaacaaacaaacaaccracaaatatcctccacacctaaac

SEQ ID NO: 4757 - DNA, 50 bp, synthetic construct
  source 1..50: mol_type = other DNA
tctcaaactaaaaataaaaacaacacaaaactattatactaataattcac

SEQ ID NO: 4758 - DNA, 50 bp, synthetic construct
  source 1..50: mol_type = other DNA
atcctattcttatttaaatttaaacrataaaattaaatcaaactccaaac

SEQ ID NO: 4759 - DNA, 50 bp, synthetic construct
  source 1..50: mol_type = other DNA
tactacraatatatatttcatatctaaaatataaattacttactaaacac

SEQ ID NO: 4760 - DNA, 50 bp, synthetic construct
  source 1..50: mol_type = other DNA
cttaacrtattcaacaaataattcatatcctaaatataaaatatacactc

SEQ ID NO: 4761 - DNA, 50 bp, synthetic construct
  source 1..50: mol_type = other DNA
tcaatatacatattatttttccttttttctttactaataaaaaactacac

SEQ ID NO: 4762 - DNA, 50 bp, synthetic construct
  source 1..50: mol_type = other DNA
aacaaaaaaatctatttaaaacaaacracctaactaaaaactcccraacc

SEQ ID NO: 4763 - DNA, 50 bp, synthetic construct
  source 1..50: mol_type = other DNA
ataacaaataaatacacaacattaacrtctaacrtacttactaaacaccc

SEQ ID NO: 4764 - DNA, 50 bp, synthetic construct
  source 1..50: mol_type = other DNA
ataccttaccaattattaacatccccraatactcaacaaacacrtcaaac

SEQ ID NO: 4765 - DNA, 50 bp, synthetic construct
  source 1..50: mol_type = other DNA
tacaaaaaaccaacctcaaccactaaaatccctaacataaaactacccac

SEQ ID NO: 4766 - DNA, 50 bp, synthetic construct
  source 1..50: mol_type = other DNA
aaaaacraacaataccraacaaaatatacaaacacaactacraactaaac

SEQ ID NO: 4767 - DNA, 50 bp, synthetic construct
  source 1..50: mol_type = other DNA
aaaattttcctcacacattaaaatacattcaaaaccttaatatttaaaac

SEQ ID NO: 4768 - DNA, 50 bp, synthetic construct
  source 1..50: mol_type = other DNA
atataaaaaaaaacaacttctatctatttcttaaataccttctaaattcc

SEQ ID NO: 4769 - DNA, 50 bp, synthetic construct
  source 1..50: mol_type = other DNA
aaattactaaatccaaaaaacaaaccactaaaaaaactataaccaaacac

SEQ ID NO: 4770 - DNA, 50 bp, synthetic construct
  source 1..50: mol_type = other DNA
caaaatattttcttacccacctttttacaaattttcrtctactaccaaac

SEQ ID NO: 4771 - DNA, 50 bp, synthetic construct
  source 1..50: mol_type = other DNA
aattttcrtctactaccaaacraccaactaatataattttcttttccttc

SEQ ID NO: 4772 - DNA, 50 bp, synthetic construct
  source 1..50: mol_type = other DNA
taattttcaacatattctataacacactccaaaattacctacccaataac

SEQ ID NO: 4773 - DNA, 50 bp, synthetic construct
  source 1..50: mol_type = other DNA
tactacatactattttatcaacaaaatctttataacctatatcttatacc

SEQ ID NO: 4774 - DNA, 50 bp, synthetic construct
  source 1..50: mol_type = other DNA
cattactaaatatttactcttttcaaccttaatatttcctttaaaaatac

SEQ ID NO: 4775 - DNA, 50 bp, synthetic construct
  source 1..50: mol_type = other DNA
ttattcattaatttccaaatcataacttatctattctaaaccttaactcc

SEQ ID NO: 4776 - DNA, 50 bp, synthetic construct
  source 1..50: mol_type = other DNA
ataaataaaaaaataacatcttctctattaacactaaccactataacccc

SEQ ID NO: 4777 - DNA, 50 bp, synthetic construct
  source 1..50: mol_type = other DNA
tacaatccttaacacatttccatcaacactaaactttaaaacacacacrc

SEQ ID NO: 4778 - DNA, 50 bp, synthetic construct
  source 1..50: mol_type = other DNA
tcttctatattactcacrctaaaaactataaaccraaactattcctattc

SEQ ID NO: 4779 - DNA, 50 bp, synthetic construct
  source 1..50: mol_type = other DNA
actaaaactaaactactaacaccaaaacaaaaaacacactccraaatccc

SEQ ID NO: 4780 - DNA, 50 bp, synthetic construct
  source 1..50: mol_type = other DNA
rcacctataaaaactacaaaaacttctttaaaataaacaataacraaaac

SEQ ID NO: 4781 - DNA, 50 bp, synthetic construct
  source 1..50: mol_type = other DNA
crtcccacataaaactatactacacctaaaaacccraaataataaacrtc

SEQ ID NO: 4782 - DNA, 50 bp, synthetic construct
  source 1..50: mol_type = other DNA
ctattcaacaaaatctctaaaacccaatacctaaaaatctacacctttac

SEQ ID NO: 4783 - DNA, 50 bp, synthetic construct
  source 1..50: mol_type = other DNA
rtcrattaatcatcracatcatctactcctaacatctaaccatcaaaatc

SEQ ID NO: 4784 - DNA, 50 bp, synthetic construct
  source 1..50: mol_type = other DNA
tatcaaaaacaaataatatcrataactaaccracraataacatatacaac

SEQ ID NO: 4785 - DNA, 50 bp, synthetic construct
  source 1..50: mol_type = other DNA
atacccttctaaataatataataaaatctcacaccttcccactccatccc

SEQ ID NO: 4786 - DNA, 50 bp, synthetic construct
  source 1..50: mol_type = other DNA
ccaattcacratttcacttcccataatttcaattacctacaatcaaccac

SEQ ID NO: 4787 - DNA, 50 bp, synthetic construct
  source 1..50: mol_type = other DNA
tactatttctaaaatctaacaattctcctccatataccatataaataccc

SEQ ID NO: 4788 - DNA, 50 bp, synthetic construct
  source 1..50: mol_type = other DNA
aaaaaaattataataactataaaataaaacacccctatctctaaaaccac

SEQ ID NO: 4789 - DNA, 50 bp, synthetic construct
  source 1..50: mol_type = other DNA
cractttcttcataacttataacttatcaaaactacaaaaaacctttaac

SEQ ID NO: 4790 - DNA, 50 bp, synthetic construct
  source 1..50: mol_type = other DNA
tctacctctacaactaaaaaatttcccctaataaattccctcatattaac

SEQ ID NO: 4791 - DNA, 50 bp, synthetic construct
  source 1..50: mol_type = other DNA
aaattaaatcactataactctaaactatataaactaaacataataaattc

SEQ ID NO: 4792 - DNA, 50 bp, synthetic construct
  source 1..50: mol_type = other DNA
cccccatctcctacccaaaaaaataataaaccactattcataactaacac

SEQ ID NO: 4793 - DNA, 50 bp, synthetic construct
  source 1..50: mol_type = other DNA
aaaaaaaccaattctaaatataaaacttaaaaactataataccaacaacc

SEQ ID NO: 4794 - DNA, 50 bp, synthetic construct
  source 1..50: mol_type = other DNA
taaaacactctatataaaaaaccaaaaataactcccatttaacaactacc

SEQ ID NO: 4795 - DNA, 50 bp, synthetic construct
  source 1..50: mol_type = other DNA
atatttcaaattaaaccaaaaactaaacattctaaaacataatcacaatc

SEQ ID NO: 4796 - DNA, 50 bp, synthetic construct
  source 1..50: mol_type = other DNA
acaaacaaaaacacacccaaaaaataaaaccctcaaaacaaaataacacc

SEQ ID NO: 4797 - DNA, 50 bp, synthetic construct
  source 1..50: mol_type = other DNA
atcaattttacaaatcatacacccaaaataacaactacaaaaaaaactac

SEQ ID NO: 4798 - DNA, 50 bp, synthetic construct
  source 1..50: mol_type = other DNA
aatattaccrttaaactacaacaacaccaacaaaaatcaatactcacttc

SEQ ID NO: 4799 - DNA, 50 bp, synthetic construct
  source 1..50: mol_type = other DNA
aaataaaaaaatattcaaaaatatcctaacccataactttcataattacc

SEQ ID NO: 4800 - DNA, 50 bp, synthetic construct
  source 1..50: mol_type = other DNA
ttatctctaaactatcacttaaaattttcaaaaaaaaaactctctttaac

SEQ ID NO: 4801 - DNA, 50 bp, synthetic construct
  source 1..50: mol_type = other DNA
rtaaaaaaaacacttatcaatttcraaaccaaaaatatcctaacaatccc

SEQ ID NO: 4802 - DNA, 50 bp, synthetic construct
  source 1..50: mol_type = other DNA
tacracataaccctatatttatctacrtaaaaaaaacacttatcaatttc

SEQ ID NO: 4803 - DNA, 50 bp, synthetic construct
  source 1..50: mol_type = other DNA
atataatccacrttttcatatacttacracataaccctatatttatctac

SEQ ID NO: 4804 - DNA, 50 bp, synthetic construct
  source 1..50: mol_type = other DNA
caaccttttctttcttaaaatatatataatccacrttttcatatacttac

SEQ ID NO: 4805 - DNA, 50 bp, synthetic construct
  source 1..50: mol_type = other DNA
caaaaaatctctaattcaaccttttctttcttaaaatatatataatccac

SEQ ID NO: 4806 - DNA, 50 bp, synthetic construct
  source 1..50: mol_type = other DNA
tctttaaaaaattataatcatactctacttactaataattaaacatttcc

SEQ ID NO: 4807 - DNA, 50 bp, synthetic construct
  source 1..50: mol_type = other DNA
actaaaactaacctatctacaactccctaaccctacccaataaaaatcrc

SEQ ID NO: 4808 - DNA, 50 bp, synthetic construct
  source 1..50: mol_type = other DNA
aacttccaaaaaaacratcaaacaacaacattcrcrattcataaaaatcc

SEQ ID NO: 4809 - DNA, 50 bp, synthetic construct
  source 1..50: mol_type = other DNA
tatataaatataccaaattataattaactatcacttactatatcctatcc

SEQ ID NO: 4810 - DNA, 50 bp, synthetic construct
  source 1..50: mol_type = other DNA
actatttcrctaatctttctcactattatttttctccctaaatttccacc

SEQ ID NO: 4811 - DNA, 50 bp, synthetic construct
  source 1..50: mol_type = other DNA
aaaaataataacttaataaccaacacaaaatattcttcacrtattcaaac

SEQ ID NO: 4812 - DNA, 50 bp, synthetic construct
  source 1..50: mol_type = other DNA
aataaatacccaattaacaaaaacatccccaaattaaaacrtttaaacac

SEQ ID NO: 4813 - DNA, 50 bp, synthetic construct
  source 1..50: mol_type = other DNA
ttatttataacactaaaactaaaactctaaaaccatatttctcctttacc

SEQ ID NO: 4814 - DNA, 50 bp, synthetic construct
  source 1..50: mol_type = other DNA
tacccaactctaaccttatactaaatcaaaatccraaaacrctttaaaac

SEQ ID NO: 4815 - DNA, 50 bp, synthetic construct
  source 1..50: mol_type = other DNA
taactaatataaataactaaataaaaacttaccaaaaacataaaatttac

SEQ ID NO: 4816 - DNA, 50 bp, synthetic construct
  source 1..50: mol_type = other DNA
atcttaactttaacrtttctcaacacttaataacccaaccracatttccc

SEQ ID NO: 4817 - DNA, 50 bp, synthetic construct
  source 1..50: mol_type = other DNA
aaaataactaaaaaactccataccattaatccaaaaatcttaactttaac

SEQ ID NO: 4818 - DNA, 50 bp, synthetic construct
  source 1..50: mol_type = other DNA
aactaaaattcctaaattaataacataaaacttcttaactacttcttatc

SEQ ID NO: 4819 - DNA, 50 bp, synthetic construct
  source 1..50: mol_type = other DNA
aactaaaatttcaactacccctaatcrctacctctaacttactacctctc

SEQ ID NO: 4820 - DNA, 50 bp, synthetic construct
  source 1..50: mol_type = other DNA
aaataccataaaaacaaattaaccaccttaaactaaaatacttcataaac

SEQ ID NO: 4821 - DNA, 50 bp, synthetic construct
  source 1..50: mol_type = other DNA
raacaacaacaaataataaaataccaaaaaaatccaaccrtacttcccac

SEQ ID NO: 4822 - DNA, 50 bp, synthetic construct
  source 1..50: mol_type = other DNA
caaataataaaataccaaaaaaatccaaccrtacttcccacrctaacatc

SEQ ID NO: 4823 - DNA, 50 bp, synthetic construct
  source 1..50: mol_type = other DNA
taacaatacctactatcctttcaatactaaaaaaatatataatctatacc

SEQ ID NO: 4824 - DNA, 50 bp, synthetic construct
  source 1..50: mol_type = other DNA
actctcctaaacttactacaaaaaaactctctaaaaccaaaaaaaataac

SEQ ID NO: 4825 - DNA, 50 bp, synthetic construct
  source 1..50: mol_type = other DNA
tcctcrtttaattttccccttaaaattatttacaaaatacctacaaatac

SEQ ID NO: 4826 - DNA, 50 bp, synthetic construct
  source 1..50: mol_type = other DNA
aaaataaattacaacaaaattatcaataaaaaattacctactaacacaac

SEQ ID NO: 4827 - DNA, 50 bp, synthetic construct
  source 1..50: mol_type = other DNA
acaaaatcaacaaaactataattaaaataacaaacaactttaacctaaac

SEQ ID NO: 4828 - DNA, 50 bp, synthetic construct
  source 1..50: mol_type = other DNA
attcctttctaatttaaaaaacccaaaaaatatatctaaaaatacactac

SEQ ID NO: 4829 - DNA, 50 bp, synthetic construct
  source 1..50: mol_type = other DNA
aatatatctaaaaatacactacrtctaacaataaaacaaaacataaaacc

SEQ ID NO: 4830 - DNA, 50 bp, synthetic construct
  source 1..50: mol_type = other DNA
aaccaccaaaaacattactctctttctctatacaaacactaaatataaac

SEQ ID NO: 4831 - DNA, 50 bp, synthetic construct
  source 1..50: mol_type = other DNA
aaaacaaaaaaaacataactttaaaccatccacttcactaaaatacaaac

SEQ ID NO: 4832 - DNA, 50 bp, synthetic construct
  source 1..50: mol_type = other DNA
aaaaaccrtcttaaattaaaccactaaaattctccaacaacraaataatc

SEQ ID NO: 4833 - DNA, 50 bp, synthetic construct
  source 1..50: mol_type = other DNA
caaccaaaaaaaaaccrtcttaaattaaaccactaaaattctccaacaac

SEQ ID NO: 4834 - DNA, 50 bp, synthetic construct
  source 1..50: mol_type = other DNA
aacctccctcctattcacaaacacctctaaaatttcctaactaacacatc

SEQ ID NO: 4835 - DNA, 50 bp, synthetic construct
  source 1..50: mol_type = other DNA
aaaaacccctcaaatacaaccaaaataaacrccaaaacccaaaaaacacc

SEQ ID NO: 4836 - DNA, 50 bp, synthetic construct
  source 1..50: mol_type = other DNA
aaactataaaaacraaaaataacaatatactaacaacccttacacccctc

SEQ ID NO: 4837 - DNA, 50 bp, synthetic construct
  source 1..50: mol_type = other DNA
aaaccttaataaatcacttaaaccraaaaaaattacctttttacacatac

SEQ ID NO: 4838 - DNA, 50 bp, synthetic construct
  source 1..50: mol_type = other DNA
caaacattatctaaacttactttattctttacaaacacattaaaactacc

SEQ ID NO: 4839 - DNA, 50 bp, synthetic construct
  source 1..50: mol_type = other DNA
tattctaataaaaaacattacaactactttactacactaaaacaaacatc

SEQ ID NO: 4840 - DNA, 50 bp, synthetic construct
  source 1..50: mol_type = other DNA
taaataactatacttaccaaacccttaaaaacttacaactttataaaaac

SEQ ID NO: 4841 - DNA, 50 bp, synthetic construct
  source 1..50: mol_type = other DNA
ccaataacctataaaaccaaattaataaaaaaacactttaattccaactc

SEQ ID NO: 4842 - DNA, 50 bp, synthetic construct
  source 1..50: mol_type = other DNA
tacatttctcaaccccccaacrcaaaatttactatattaactttctcaac

SEQ ID NO: 4843 - DNA, 50 bp, synthetic construct
  source 1..50: mol_type = other DNA
crttaaaaaacttctaaaatcrttaaaaaaaccaacacaacaaattctac

SEQ ID NO: 4844 - DNA, 50 bp, synthetic construct
  source 1..50: mol_type = other DNA
ccattttcaaaaaaaaatatccttactttctcrtaatttctctcacccac

SEQ ID NO: 4845 - DNA, 50 bp, synthetic construct
  source 1..50: mol_type = other DNA
aaaaaacacacttcataaaaaaactactaaataaaaaccaaaacatatcc

SEQ ID NO: 4846 - DNA, 50 bp, synthetic construct
  source 1..50: mol_type = other DNA
ccaatttcaaacaatatcataataactacactccrcctttaaccaaactc

SEQ ID NO: 4847 - DNA, 50 bp, synthetic construct
  source 1..50: mol_type = other DNA
tcaaaataaaatcataaaaacaaaaaacrtacacacataaacacacatac

SEQ ID NO: 4848 - DNA, 50 bp, synthetic construct
  source 1..50: mol_type = other DNA
aacataataatactaccaaaaaaactacraaacaaccacraacaaaaaac

SEQ ID NO: 4849 - DNA, 50 bp, synthetic construct
  source 1..50: mol_type = other DNA
actaaaacacaaacataataatactaccaaaaaaactacraaacaaccac

SEQ ID NO: 4850 - DNA, 50 bp, synthetic construct
  source 1..50: mol_type = other DNA
ctaaaatattaataactcattctacttataaacccttacttatacaacac

SEQ ID NO: 4851 - DNA, 50 bp, synthetic construct
  source 1..50: mol_type = other DNA
ataaaataaaaataaaaacctccctataaaaatcaatcataacaactcac

SEQ ID NO: 4852 - DNA, 50 bp, synthetic construct
  source 1..50: mol_type = other DNA
aaccaatttctttccctctccrttacctctatttcaattaattaccaaac

SEQ ID NO: 4853 - DNA, 50 bp, synthetic construct
  source 1..50: mol_type = other DNA
aaaccattcacaaaccraaatactttcctcaacraaacaaaaacacaaac

SEQ ID NO: 4854 - DNA, 50 bp, synthetic construct
  source 1..50: mol_type = other DNA
acaatcatcctcccttattaatatccaatctcaacrataaaaataaaaac

SEQ ID NO: 4855 - DNA, 50 bp, synthetic construct
  source 1..50: mol_type = other DNA
taaaacaaataactaacaatcatcctcccttattaatatccaatctcaac

SEQ ID NO: 4856 - DNA, 50 bp, synthetic construct
  source 1..50: mol_type = other DNA
cttcatcacaattttaaatttaaatatataaaccraacrctataactcac

SEQ ID NO: 4857 - DNA, 50 bp, synthetic construct
  source 1..50: mol_type = other DNA
catcacttcaactaaattaaaatccaaaacaattccaaaatcaaaaaatc

SEQ ID NO: 4858 - DNA, 50 bp, synthetic construct
  source 1..50: mol_type = other DNA
ccaaaatcatatcattacactccaacctaaaccataaaaacraaaactcc

SEQ ID NO: 4859 - DNA, 50 bp, synthetic construct
  source 1..50: mol_type = other DNA
tataacaattaacactttatccaattaaaactttaaccaaacaccracrc

SEQ ID NO: 4860 - DNA, 50 bp, synthetic construct
  source 1..50: mol_type = other DNA
cctataacaattaacactttatccaattaaaactttaaccaaacaccrac

SEQ ID NO: 4861 - DNA, 50 bp, synthetic construct
  source 1..50: mol_type = other DNA
attcctataacaattaacactttatccaattaaaactttaaccaaacacc

SEQ ID NO: 4862 - DNA, 50 bp, synthetic construct
  source 1..50: mol_type = other DNA
aaaaaaccaatactcttaaattaccttacaataaataaattaaaatacac

SEQ ID NO: 4863 - DNA, 50 bp, synthetic construct
  source 1..50: mol_type = other DNA
aaaaacaactctctttaattccactacacrcccatcaaccttatataatc

SEQ ID NO: 4864 - DNA, 50 bp, synthetic construct
  source 1..50: mol_type = other DNA
atattattaaaatacctctctaaaaacaactctctttaattccactacac

SEQ ID NO: 4865 - DNA, 50 bp, synthetic construct
  source 1..50: mol_type = other DNA
tataaaataaatcracrtcraccttccactataaaattaaatctcatccc

SEQ ID NO: 4866 - DNA, 50 bp, synthetic construct
  source 1..50: mol_type = other DNA
atacaaaaaaaaacrtactctaattccaaaataattccaaaaaataactc

SEQ ID NO: 4867 - DNA, 50 bp, synthetic construct
  source 1..50: mol_type = other DNA
tctcttaaaattaccctaaaattaaaacacrttcttttttacactacccc

SEQ ID NO: 4868 - DNA, 50 bp, synthetic construct
  source 1..50: mol_type = other DNA
ttaaaacacrttcttttttacactaccccraaaacacaatttataaaaac

SEQ ID NO: 4869 - DNA, 50 bp, synthetic construct
  source 1..50: mol_type = other DNA
ttttcctcattaacctctaaaaaccaccaaattaaaaattcctactcrcc

SEQ ID NO: 4870 - DNA, 50 bp, synthetic construct
  source 1..50: mol_type = other DNA
cctttttcctcattaacctctaaaaaccaccaaattaaaaattcctactc

SEQ ID NO: 4871 - DNA, 50 bp, synthetic construct
  source 1..50: mol_type = other DNA
aatcttaattaatactaaaaaaatttcrattttaaatccaaatatctccc

SEQ ID NO: 4872 - DNA, 50 bp, synthetic construct
  source 1..50: mol_type = other DNA
actaaaaaaatttcrattttaaatccaaatatctcccrctcttttttccc

SEQ ID NO: 4873 - DNA, 50 bp, synthetic construct
  source 1..50: mol_type = other DNA
ctcccrctcttttttcccrtaacaacaaatattactaaatatatattaac

SEQ ID NO: 4874 - DNA, 50 bp, synthetic construct
  source 1..50: mol_type = other DNA
caaatattactaaatatatattaacrtttacccttaaccatccccattac

SEQ ID NO: 4875 - DNA, 50 bp, synthetic construct
  source 1..50: mol_type = other DNA
taaccatccccattacrctaaaattccaactttcactactaaataaaaac

SEQ ID NO: 4876 - DNA, 50 bp, synthetic construct
  source 1..50: mol_type = other DNA
atctcaaatatccaataaccattacrtaacacaatattaacctaaacctc

SEQ ID NO: 4877 - DNA, 50 bp, synthetic construct
  source 1..50: mol_type = other DNA
aaacaactataaaaaacaaactctaaaactaaaacctctcatctcaaatc

SEQ ID NO: 4878 - DNA, 50 bp, synthetic construct
  source 1..50: mol_type = other DNA
accraatcatattacaattacatatctacattcaaaaccctaaaaacccc

SEQ ID NO: 4879 - DNA, 50 bp, synthetic construct
  source 1..50: mol_type = other DNA
aacraaaccctcaaaattttaaatacaaacatataattacaacataattc

SEQ ID NO: 4880 - DNA, 50 bp, synthetic construct
  source 1..50: mol_type = other DNA
aaaacccataaacaaacttcactatcatcctaccccttttttttattcac

SEQ ID NO: 4881 - DNA, 50 bp, synthetic construct
  source 1..50: mol_type = other DNA
aaaacracaaaaaacaccaaaccraaacrtactttttaattccaatctac

SEQ ID NO: 4882 - DNA, 50 bp, synthetic construct
  source 1..50: mol_type = other DNA
aaaacrtaaattaaaaccaaaaaacacrcctcracttaatactccctatc

SEQ ID NO: 4883 - DNA, 50 bp, synthetic construct
  source 1..50: mol_type = other DNA
acraatctaactcraaaataacrccataatactaaaaaaccactcctaac

SEQ ID NO: 4884 - DNA, 50 bp, synthetic construct
  source 1..50: mol_type = other DNA
atatatccrtataaccacaccrtactactttcaaaaacaataaacttttc

SEQ ID NO: 4885 - DNA, 50 bp, synthetic construct
  source 1..50: mol_type = other DNA
ccaaaaccraaaacaaaatttcrcacttactaaaattaaaactcccaaac

SEQ ID NO: 4886 - DNA, 50 bp, synthetic construct
  source 1..50: mol_type = other DNA
caaacccaaattaaatctcaacrcctaaaaactccaactttaacaaatac

SEQ ID NO: 4887 - DNA, 50 bp, synthetic construct
  source 1..50: mol_type = other DNA
atatcctatccrtaactaatataatctatacraataaaaattccaaaacc

SEQ ID NO: 4888 - DNA, 50 bp, synthetic construct
  source 1..50: mol_type = other DNA
actttattcatccaataaaactcccaaaaatatactaaaaccatataaac

SEQ ID NO: 4889 - DNA, 50 bp, synthetic construct
  source 1..50: mol_type = other DNA
tcacrttataaaaaaactaaacaatttacttaaactccctactattttac

SEQ ID NO: 4890 - DNA, 50 bp, synthetic construct
  source 1..50: mol_type = other DNA
taaataaaccctatacctccaaccrtaaataccaaactttaaaattaccc

SEQ ID NO: 4891 - DNA, 50 bp, synthetic construct
  source 1..50: mol_type = other DNA
tctaaaaatttaaatacctaaatatacaactatactaatacatttccctc

SEQ ID NO: 4892 - DNA, 50 bp, synthetic construct
  source 1..50: mol_type = other DNA
caaatatatactaaaaaatataataattcatcacrtcttctccaaaaatc

SEQ ID NO: 4893 - DNA, 50 bp, synthetic construct
  source 1..50: mol_type = other DNA
aaaatatattattataataaacaatctacacaacaatcratcttcttccc

SEQ ID NO: 4894 - DNA, 50 bp, synthetic construct
  source 1..50: mol_type = other DNA
atcrtaaactctatatacttactatcattattttccacaaatatcaatcc

SEQ ID NO: 4895 - DNA, 50 bp, synthetic construct
  source 1..50: mol_type = other DNA
ctactaaaacaacccttcracatcaataaatataaaaacraatacratcc

SEQ ID NO: 4896 - DNA, 50 bp, synthetic construct
  source 1..50: mol_type = other DNA
aaaaattctcattacaaaaaaaacctcttatttaaaccccaaatacaacc

SEQ ID NO: 4897 - DNA, 50 bp, synthetic construct
  source 1..50: mol_type = other DNA
aatcatactttacaaatacccacactttattactatttatctccttaaac

SEQ ID NO: 4898 - DNA, 50 bp, synthetic construct
  source 1..50: mol_type = other DNA
ctatttatctccttaaacraaatttactacaacttcaattccttaacttc

SEQ ID NO: 4899 - DNA, 50 bp, synthetic construct
  source 1..50: mol_type = other DNA
tacrtttctactttaattccataacccaaatccatactaactaaaaatac

SEQ ID NO: 4900 - DNA, 50 bp, synthetic construct
  source 1..50: mol_type = other DNA
ctatttatcaaaatcacttttaataaacacaaaaaaatcataccraatac

SEQ ID NO: 4901 - DNA, 50 bp, synthetic construct
  source 1..50: mol_type = other DNA
caaaatctatttatcaaaatcacttttaataaacacaaaaaaatcatacc

SEQ ID NO: 4902 - DNA, 50 bp, synthetic construct
  source 1..50: mol_type = other DNA
cctaaatccccaaaatctccrcctaaatccaaaacttttataaccaaaac

SEQ ID NO: 4903 - DNA, 50 bp, synthetic construct
  source 1..50: mol_type = other DNA
ttaaaactctacaccaaaaaaaccattcacaataaaaactataaaatttc

SEQ ID NO: 4904 - DNA, 50 bp, synthetic construct
  source 1..50: mol_type = other DNA
aaaattatataacccaactctttaattttataacatctaataatatcacc

SEQ ID NO: 4905 - DNA, 50 bp, synthetic construct
  source 1..50: mol_type = other DNA
aactacaattcacaaataatttatataaaaataactatctcattttttcc

SEQ ID NO: 4906 - DNA, 50 bp, synthetic construct
  source 1..50: mol_type = other DNA
tctctttaatatttacatcttttaaacattttaactcrtcctctttcaac

SEQ ID NO: 4907 - DNA, 50 bp, synthetic construct
  source 1..50: mol_type = other DNA
tttctaaatcttttctctttaatatttacatcttttaaacattttaactc

SEQ ID NO: 4908 - DNA, 50 bp, synthetic construct
  source 1..50: mol_type = other DNA
ataaaatcccrttccaaccaataaaaaccraacacaacaataaaataaac

SEQ ID NO: 4909 - DNA, 50 bp, synthetic construct
  source 1..50: mol_type = other DNA
ttcaattttattatttttaccattttacactaaaattaatataccatttc

SEQ ID NO: 4910 - DNA, 50 bp, synthetic construct
  source 1..50: mol_type = other DNA
tattacattattattaataccttcacaaataacaaaaaaccatcaaaatc

SEQ ID NO: 4911 - DNA, 50 bp, synthetic construct
  source 1..50: mol_type = other DNA
ttactaatatcactctaaaattcataaattcacaattttcttaaataccc

SEQ ID NO: 4912 - DNA, 50 bp, synthetic construct
  source 1..50: mol_type = other DNA
aatatcactctaaaattcataaattcacaattttcttaaatacccrttac

SEQ ID NO: 4913 - DNA, 50 bp, synthetic construct
  source 1..50: mol_type = other DNA
cattttactaactaaaaatttcrtatcatataccactttaaaaatttcac

SEQ ID NO: 4914 - DNA, 50 bp, synthetic construct
  source 1..50: mol_type = other DNA
taattcacaaataaacatatacrtaaaatctccaaaataacatataacac

SEQ ID NO: 4915 - DNA, 50 bp, synthetic construct
  source 1..50: mol_type = other DNA
ttccaaaaaatcataactaatacccaaaaaaccacttccctaaaaattac

SEQ ID NO: 4916 - DNA, 50 bp, synthetic construct
  source 1..50: mol_type = other DNA
acaatattttctcatttatttaataaataattatatatcatttaacacac

SEQ ID NO: 4917 - DNA, 50 bp, synthetic construct
  source 1..50: mol_type = other DNA
taatacttaaccacaccaatttcatcaattcacataactaaaatatctac

SEQ ID NO: 4918 - DNA, 50 bp, synthetic construct
  source 1..50: mol_type = other DNA
tcacaaactctttaaactaatatcactttaaactatactatttccatcac

SEQ ID NO: 4919 - DNA, 50 bp, synthetic construct
  source 1..50: mol_type = other DNA
ctttaaactatactatttccatcacrcaactttaatataatttaaaatac

SEQ ID NO: 4920 - DNA, 50 bp, synthetic construct
  source 1..50: mol_type = other DNA
aaactatactatttccatcacrcaactttaatataatttaaaatacraac

SEQ ID NO: 4921 - DNA, 50 bp, synthetic construct
  source 1..50: mol_type = other DNA
attataattcattctattatcttaaaaaccaactttacttacctctcttc

SEQ ID NO: 4922 - DNA, 50 bp, synthetic construct
  source 1..50: mol_type = other DNA
ctaaaactaaaacctttatccctttcccacttatctaccttctcaacaac

SEQ ID NO: 4923 - DNA, 50 bp, synthetic construct
  source 1..50: mol_type = other DNA
tataaataatacttcacctcttaatccaaaactctattcttaaatttatc

SEQ ID NO: 4924 - DNA, 50 bp, synthetic construct
  source 1..50: mol_type = other DNA
taaatctataccctaatattcattcttttctccaattcaacctattttac

SEQ ID NO: 4925 - DNA, 50 bp, synthetic construct
  source 1..50: mol_type = other DNA
tatatactaatataaatcctaaattacataataatcataaaaaactctcc

SEQ ID NO: 4926 - DNA, 50 bp, synthetic construct
  source 1..50: mol_type = other DNA
aaaccaaacatttcctcacactcctttaaaaaaacatttataaaataaac

SEQ ID NO: 4927 - DNA, 50 bp, synthetic construct
  source 1..50: mol_type = other DNA
aaaaaatcaaattacttcaacaaaaataccaaaaaactaaacttaaatcc

SEQ ID NO: 4928 - DNA, 50 bp, synthetic construct
  source 1..50: mol_type = other DNA
tccctacttaataactaataaaaatctacctaaaacaaatatactaaacc

SEQ ID NO: 4929 - DNA, 50 bp, synthetic construct
  source 1..50: mol_type = other DNA
aatctacctaaaacaaatatactaaaccrtcaaacaataaaaactacaac

SEQ ID NO: 4930 - DNA, 50 bp, synthetic construct
  source 1..50: mol_type = other DNA
tctaatccaaaaattaaaaactacaataaactacrctccactaccactac

SEQ ID NO: 4931 - DNA, 50 bp, synthetic construct
  source 1..50: mol_type = other DNA
aaacaaaaacttactctatcatccaaattaaaacrcaataacaataaaac

SEQ ID NO: 4932 - DNA, 50 bp, synthetic construct
  source 1..50: mol_type = other DNA
attacctccactaatcccrcccttaacacataaaaattatattacaattc

SEQ ID NO: 4933 - DNA, 50 bp, synthetic construct
  source 1..50: mol_type = other DNA
ccacccaaatcttacctcraattataatataattcccatatattaaaaac

SEQ ID NO: 4934 - DNA, 50 bp, synthetic construct
  source 1..50: mol_type = other DNA
accaataaaaataactaaatcataaaaacaatctcccccatactattctc

SEQ ID NO: 4935 - DNA, 50 bp, synthetic construct
  source 1..50: mol_type = other DNA
aaaaaatttaattaactcacaattctacataacaaaaaacatctcttcac

SEQ ID NO: 4936 - DNA, 50 bp, synthetic construct
  source 1..50: mol_type = other DNA
caaaactataaatcaattaaacctcttcactttataaattacctaatctc

SEQ ID NO: 4937 - DNA, 50 bp, synthetic construct
  source 1..50: mol_type = other DNA
ctcraacaattctttataacaacataaaaacaaactaatacaataaacac

SEQ ID NO: 4938 - DNA, 50 bp, synthetic construct
  source 1..50: mol_type = other DNA
ctaactcaaccaaccttaaaaaccaactataacaaaatacraaaactcac

SEQ ID NO: 4939 - DNA, 50 bp, synthetic construct
  source 1..50: mol_type = other DNA
tacatatatactaactcaaccaaccttaaaaaccaactataacaaaatac

SEQ ID NO: 4940 - DNA, 50 bp, synthetic construct
  source 1..50: mol_type = other DNA
tttactatttttcaactatacccaacatttctactttactccaactactc

SEQ ID NO: 4941 - DNA, 50 bp, synthetic construct
  source 1..50: mol_type = other DNA
ttcataaaattatctaaaacttactcacaattaaactttctttaacttac

SEQ ID NO: 4942 - DNA, 50 bp, synthetic construct
  source 1..50: mol_type = other DNA
actttctttaacttacrtctcactaaattctatacctctattaaaacatc

SEQ ID NO: 4943 - DNA, 50 bp, synthetic construct
  source 1..50: mol_type = other DNA
catcrattccaattttccttataaaactctataatacctccaaaatcccc

SEQ ID NO: 4944 - DNA, 50 bp, synthetic construct
  source 1..50: mol_type = other DNA
crattccaattttccttataaaactctataatacctccaaaatccccrac

SEQ ID NO: 4945 - DNA, 50 bp, synthetic construct
  source 1..50: mol_type = other DNA
ttacaaaccccccaccccaaaataatataatcttaaaaaaatttctaacc

SEQ ID NO: 4946 - DNA, 50 bp, synthetic construct
  source 1..50: mol_type = other DNA
acacctcaaccaaataatcctcatctcacccaataaataaatttaaatac

SEQ ID NO: 4947 - DNA, 50 bp, synthetic construct
  source 1..50: mol_type = other DNA
actttaaccaaaaacctctaactctcaaattataaaactcccaaacctac

SEQ ID NO: 4948 - DNA, 50 bp, synthetic construct
  source 1..50: mol_type = other DNA
acctttactcaaaaaaattcacaaaaaccrccactactatacatcttatc

SEQ ID NO: 4949 - DNA, 50 bp, synthetic construct
  source 1..50: mol_type = other DNA
tccatctaaaataacraattcatctcactaaaaaataccaaacaataaac

SEQ ID NO: 4950 - DNA, 50 bp, synthetic construct
  source 1..50: mol_type = other DNA
tcattattccrtccacaactaaactcaaaactataaatattctccaaacc

SEQ ID NO: 4951 - DNA, 50 bp, synthetic construct
  source 1..50: mol_type = other DNA
aaaaaactacracttaaaaaacactcacaattctaaattcaactataaac

SEQ ID NO: 4952 - DNA, 50 bp, synthetic construct
  source 1..50: mol_type = other DNA
aaattaattttatttctccaaatacacttaatacataacaatttatcacc

SEQ ID NO: 4953 - DNA, 50 bp, synthetic construct
  source 1..50: mol_type = other DNA
taaatctcctccaatatcctctaattactaaaataaatcctcacacttcc

SEQ ID NO: 4954 - DNA, 50 bp, synthetic construct
  source 1..50: mol_type = other DNA
aatatttctccraaacctctaaaaaattaaaacaacaatcctaaacatcc

SEQ ID NO: 4955 - DNA, 50 bp, synthetic construct
  source 1..50: mol_type = other DNA
ctacataaaaaataatatactaaacacaaatataaccaaaacatccattc

SEQ ID NO: 4956 - DNA, 50 bp, synthetic construct
  source 1..50: mol_type = other DNA
aaattaattaatactttatattctcactaaaaactaccattcttaacacc

SEQ ID NO: 4957 - DNA, 50 bp, synthetic construct
  source 1..50: mol_type = other DNA
aaaaaactaatccataaaaacratacaaaaattttaaactcatctacctc

SEQ ID NO: 4958 - DNA, 50 bp, synthetic construct
  source 1..50: mol_type = other DNA
acacccaaaaccaaaaacrctataactttacaaaatatactcccacaccc

SEQ ID NO: 4959 - DNA, 50 bp, synthetic construct
  source 1..50: mol_type = other DNA
tctctaaaacaaacaaaaacacacrtcctctctaccaaatattctataac

SEQ ID NO: 4960 - DNA, 50 bp, synthetic construct
  source 1..50: mol_type = other DNA
aatattacttattcctctcttactcatctctaaaacaaacaaaaacacac

SEQ ID NO: 4961 - DNA, 50 bp, synthetic construct
  source 1..50: mol_type = other DNA
aaattccacratcttctatatatcacaaaaatctttacccacaaaaaaac

SEQ ID NO: 4962 - DNA, 50 bp, synthetic construct
  source 1..50: mol_type = other DNA
taaaatactaaaaactaccrcctaaataattatcatataattctaatatc

SEQ ID NO: 4963 - DNA, 50 bp, synthetic construct
  source 1..50: mol_type = other DNA
caacctaaaatactatataaacaccctataataaaatactaaaaactacc

SEQ ID NO: 4964 - DNA, 50 bp, synthetic construct
  source 1..50: mol_type = other DNA
ttataatattattcaaaaaatactaaaaatcccaaacaacttaaatactc

SEQ ID NO: 4965 - DNA, 50 bp, synthetic construct
  source 1..50: mol_type = other DNA
aaattcacttttctcaaaaataaaactaacttctatataaaaaataacac

SEQ ID NO: 4966 - DNA, 50 bp, synthetic construct
  source 1..50: mol_type = other DNA
ctaaattctacccacatctactacctaaatcattcccttcctcaaatacc

SEQ ID NO: 4967 - DNA, 50 bp, synthetic construct
  source 1..50: mol_type = other DNA
ctacaaaaatcaaaatatttctatcacattacacctacaaatcctaaacc

SEQ ID NO: 4968 - DNA, 50 bp, synthetic construct
  source 1..50: mol_type = other DNA
aatatataataaccacatatccaaatttacccaaaacaatcctaactcac

SEQ ID NO: 4969 - DNA, 50 bp, synthetic construct
  source 1..50: mol_type = other DNA
aactcaaacatcctcccacttcaacctccccaataactaaaactataaac

SEQ ID NO: 4970 - DNA, 50 bp, synthetic construct
  source 1..50: mol_type = other DNA
caatatatccrctacctcctaacattaaacaaaaaaaacatcataattac

SEQ ID NO: 4971 - DNA, 50 bp, synthetic construct
  source 1..50: mol_type = other DNA
tataaaaatcaataaaaactaataaaaacacccaaaaaacccatcaactc

SEQ ID NO: 4972 - DNA, 50 bp, synthetic construct
  source 1..50: mol_type = other DNA
atatactaaatccctaccttatcaaacactaactaaacacraaaataaac

SEQ ID NO: 4973 - DNA, 50 bp, synthetic construct
  source 1..50: mol_type = other DNA
craaaaacataaataaaataacctactctcaaaaaataccaacataaacc

SEQ ID NO: 4974 - DNA, 50 bp, synthetic construct
  source 1..50: mol_type = other DNA
aacccaacttataacacttcttcctccttaatttttatttttcatttttc

SEQ ID NO: 4975 - DNA, 50 bp, synthetic construct
  source 1..50: mol_type = other DNA
ttcaatctaatccctaaataatatctactctccttcaaccaaatataacc

SEQ ID NO: 4976 - DNA, 50 bp, synthetic construct
  source 1..50: mol_type = other DNA
taccrtatttcaatacttttctaaccctcttctacacaaactataaaaac

SEQ ID NO: 4977 - DNA, 50 bp, synthetic construct
  source 1..50: mol_type = other DNA
tcaatacttttctaaccctcttctacacaaactataaaaacracaatatc

SEQ ID NO: 4978 - DNA, 50 bp, synthetic construct
  source 1..50: mol_type = other DNA
ttttctaaccctcttctacacaaactataaaaacracaatatcraaaaac

SEQ ID NO: 4979 - DNA, 50 bp, synthetic construct
  source 1..50: mol_type = other DNA
caaactataaaaacracaatatcraaaaacraataaaaccttctccccac

SEQ ID NO: 4980 - DNA, 50 bp, synthetic construct
  source 1..50: mol_type = other DNA
aaaaacctcrtttaaacracttcctcaataaaattcrtaaacaaaaaatc

SEQ ID NO: 4981 - DNA, 50 bp, synthetic construct
  source 1..50: mol_type = other DNA
aaaaactactctaaaataacaaatcccaaacactaaacaaaacrcctatc

SEQ ID NO: 4982 - DNA, 50 bp, synthetic construct
  source 1..50: mol_type = other DNA
aattctacctttttctataatttctttcrtaaaaactaaacccrcrtttc

SEQ ID NO: 4983 - DNA, 50 bp, synthetic construct
  source 1..50: mol_type = other DNA
cctaaaattctacctttttctataatttctttcrtaaaaactaaacccrc

SEQ ID NO: 4984 - DNA, 50 bp, synthetic construct
  source 1..50: mol_type = other DNA
taataaaaaccttttttcctaaaattctacctttttctataatttctttc

SEQ ID NO: 4985 - DNA, 50 bp, synthetic construct
  source 1..50: mol_type = other DNA
rccaaaactcacraaaataaacratctttccctacttacrtattttcttc

SEQ ID NO: 4986 - DNA, 50 bp, synthetic construct
  source 1..50: mol_type = other DNA
cctcaacctccaaaattactaaaactcaatatctattcttaactcccttc

SEQ ID NO: 4987 - DNA, 50 bp, synthetic construct
  source 1..50: mol_type = other DNA
aaaaaaattaaaaacaaacactaaatcccaacaactctaaaaactaaaac

SEQ ID NO: 4988 - DNA, 50 bp, synthetic construct
  source 1..50: mol_type = other DNA
aaaaacctcaaacattcaatcccttttcccaaaattcactaaaaaaactc

SEQ ID NO: 4989 - DNA, 50 bp, synthetic construct
  source 1..50: mol_type = other DNA
ttatctaaactctcaatccaataccattatccatatatctcccacctacc

SEQ ID NO: 4990 - DNA, 50 bp, synthetic construct
  source 1..50: mol_type = other DNA
aattccrtctaccttcttcctacrtatcccacattttaattaatattctc

SEQ ID NO: 4991 - DNA, 50 bp, synthetic construct
  source 1..50: mol_type = other DNA
ttaaaaaaaactcaattatccaacaacaattccrtctaccttcttcctac

SEQ ID NO: 4992 - DNA, 50 bp, synthetic construct
  source 1..50: mol_type = other DNA
aacataaaatcctatcattaaaaaaaactcaattatccaacaacaattcc

SEQ ID NO: 4993 - DNA, 50 bp, synthetic construct
  source 1..50: mol_type = other DNA
actaaatctttcctaataacaaaaccttatattaccctcacaattacccc

SEQ ID NO: 4994 - DNA, 50 bp, synthetic construct
  source 1..50: mol_type = other DNA
taaaataaacaaaacaaacattatattaaacaatcattaacaaacaaaac

SEQ ID NO: 4995 - DNA, 50 bp, synthetic construct
  source 1..50: mol_type = other DNA
acattatattaaacaatcattaacaaacaaaacrctaacaaccaaacttc

SEQ ID NO: 4996 - DNA, 50 bp, synthetic construct
  source 1..50: mol_type = other DNA
aaccccaaaacttaaatattaattctataactatccraacccrtaaatac

SEQ ID NO: 4997 - DNA, 50 bp, synthetic construct
  source 1..50: mol_type = other DNA
craaaactacraaaaaccccaaaacttaaatattaattctataactatcc

SEQ ID NO: 4998 - DNA, 50 bp, synthetic construct
  source 1..50: mol_type = other DNA
aaactattcctaaattaaccaactacctaattctcctaaaatccrcttcc

SEQ ID NO: 4999 - DNA, 50 bp, synthetic construct
  source 1..50: mol_type = other DNA
ccaaaaaaaccaaacaattaattaatccaaaaacaactcctacrcraaac

SEQ ID NO: 5000 - DNA, 50 bp, synthetic construct
  source 1..50: mol_type = other DNA
ctaaaaaactcaaaaacracrcrcatcaccttaaacccaaaactatattc

SEQ ID NO: 5001 - DNA, 50 bp, synthetic construct
  source 1..50: mol_type = other DNA
caataacttcccattctctcctccaccccaaaatactaattttacccatc

SEQ ID NO: 5002 - DNA, 50 bp, synthetic construct
  source 1..50: mol_type = other DNA
aataataacttacaactcaaaataaattcttaaactcraaataaaatttc

SEQ ID NO: 5003 - DNA, 50 bp, synthetic construct
  source 1..50: mol_type = other DNA
ttttttcttaaacataatcttaaaacttaaactacttcaaccaaattttc

SEQ ID NO: 5004 - DNA, 50 bp, synthetic construct
  source 1..50: mol_type = other DNA
rttacttactctattacacaaataaacatatttattctacaacrcaccac

SEQ ID NO: 5005 - DNA, 50 bp, synthetic construct
  source 1..50: mol_type = other DNA
atctcacrttacttactctattacacaaataaacatatttattctacaac

SEQ ID NO: 5006 - DNA, 50 bp, synthetic construct
  source 1..50: mol_type = other DNA
rtaatacrctacaaaacaaacatacccacctatacaacaaaacaaacaac

SEQ ID NO: 5007 - DNA, 50 bp, synthetic construct
  source 1..50: mol_type = other DNA
acctatacaacaaaacaaacaacrtaaaatactaaacctaactaacctcc

SEQ ID NO: 5008 - DNA, 50 bp, synthetic construct
  source 1..50: mol_type = other DNA
attaaaataaatctacccacaaaaccrttttcrcrataaaaaattaactc

SEQ ID NO: 5009 - DNA, 50 bp, synthetic construct
  source 1..50: mol_type = other DNA
tttctcaaaaaccacaattaaaataaatctacccacaaaaccrttttcrc

SEQ ID NO: 5010 - DNA, 50 bp, synthetic construct
  source 1..50: mol_type = other DNA
aaatacttttaacttccctaatcacttaaatttataacttacctctctcc

SEQ ID NO: 5011 - DNA, 50 bp, synthetic construct
  source 1..50: mol_type = other DNA
taaccttaaataaatccataaaaacactttactaaacractttttacacc

SEQ ID NO: 5012 - DNA, 50 bp, synthetic construct
  source 1..50: mol_type = other DNA
tactctaatacaataaccttaaataaatccataaaaacactttactaaac

SEQ ID NO: 5013 - DNA, 50 bp, synthetic construct
  source 1..50: mol_type = other DNA
atctccataaatccacccaaaactactatatcaaaacaaccaacaaaacc

SEQ ID NO: 5014 - DNA, 50 bp, synthetic construct
  source 1..50: mol_type = other DNA
ctccataaatccacccaaaactactatatcaaaacaaccaacaaaaccrc

SEQ ID NO: 5015 - DNA, 50 bp, synthetic construct
  source 1..50: mol_type = other DNA
tttaaaaaattataaccacttaaacccrctaatacaacctacrcctaacc

SEQ ID NO: 5016 - DNA, 50 bp, synthetic construct
  source 1..50: mol_type = other DNA
aatttaaatttaaaaaattataaccacttaaacccrctaatacaacctac

SEQ ID NO: 5017 - DNA, 50 bp, synthetic construct
  source 1..50: mol_type = other DNA
ttttctaaaaaattctaaaaccraacraaacccraaaactaaactaaacc

SEQ ID NO: 5018 - DNA, 50 bp, synthetic construct
  source 1..50: mol_type = other DNA
ctcttttattaaactaaacraaaaaaattaataaccactcaataaccaac

SEQ ID NO: 5019 - DNA, 50 bp, synthetic construct
  source 1..50: mol_type = other DNA
tattacccaaactaattttaaactcctaattttaaatcctaaactcaaac

SEQ ID NO: 5020 - DNA, 50 bp, synthetic construct
  source 1..50: mol_type = other DNA
caaattaatcaatcttatccaatctacaacctaaaacaactctaaatacc

SEQ ID NO: 5021 - DNA, 50 bp, synthetic construct
  source 1..50: mol_type = other DNA
atcaatcttatccaatctacaacctaaaacaactctaaataccrcctaac

SEQ ID NO: 5022 - DNA, 50 bp, synthetic construct
  source 1..50: mol_type = other DNA
taaccccaacracrtttactatatattttaactaaaatctttaaaaaccc

SEQ ID NO: 5023 - DNA, 50 bp, synthetic construct
  source 1..50: mol_type = other DNA
cctttattacaaattttaaatattctctcttaaaaaaccacaacattttc

SEQ ID NO: 5024 - DNA, 50 bp, synthetic construct
  source 1..50: mol_type = other DNA
aaacraataaaatctactaataatacctacctaccraaaccctaaactac

SEQ ID NO: 5025 - DNA, 50 bp, synthetic construct
  source 1..50: mol_type = other DNA
taaataacaaaaaacraataaatacttcccaaaccaaataaaaactaaac

SEQ ID NO: 5026 - DNA, 50 bp, synthetic construct
  source 1..50: mol_type = other DNA
caacttaataataaaaacttactaaaccaaaaaacaactccaaaaaaaac

SEQ ID NO: 5027 - DNA, 50 bp, synthetic construct
  source 1..50: mol_type = other DNA
tatctataacataaatctaaaaaaataatcaatacctatatacccccttc

SEQ ID NO: 5028 - DNA, 50 bp, synthetic construct
  source 1..50: mol_type = other DNA
tcaattattcctactaacaattttattttcatactactaaaaatttatcc

SEQ ID NO: 5029 - DNA, 50 bp, synthetic construct
  source 1..50: mol_type = other DNA
catctttacaaaaaattaaaaacttaaccraaactataatctcaactacc

SEQ ID NO: 5030 - DNA, 50 bp, synthetic construct
  source 1..50: mol_type = other DNA
taaaatctcaccatattacccaaactaatcttaaactactaatctcaaac

SEQ ID NO: 5031 - DNA, 50 bp, synthetic construct
  source 1..50: mol_type = other DNA
rtaaaaccrtacacactaaaacaaaaaacaacactcattaaaaaaactcc

SEQ ID NO: 5032 - DNA, 50 bp, synthetic construct
  source 1..50: mol_type = other DNA
aaacaaaaaacaacactcattaaaaaaactccrataatacaaaaacccac

SEQ ID NO: 5033 - DNA, 50 bp, synthetic construct
  source 1..50: mol_type = other DNA
taaaacraaaaaactcaaacataacraactacaaatcctaaaccctaccc

SEQ ID NO: 5034 - DNA, 50 bp, synthetic construct
  source 1..50: mol_type = other DNA
cctccataactactaacctaaatactaacaatacctaaaaccaaccracc

SEQ ID NO: 5035 - DNA, 50 bp, synthetic construct
  source 1..50: mol_type = other DNA
ctacrcacaatacttacaaaccaaaacraattccaaataaacrtaaactc

SEQ ID NO: 5036 - DNA, 50 bp, synthetic construct
  source 1..50: mol_type = other DNA
aaccaattctacrcacaatacttacaaaccaaaacraattccaaataaac

SEQ ID NO: 5037 - DNA, 50 bp, synthetic construct
  source 1..50: mol_type = other DNA
aaaacacraaacaaaaaccaattctacrcacaatacttacaaaccaaaac

SEQ ID NO: 5038 - DNA, 50 bp, synthetic construct
  source 1..50: mol_type = other DNA
cataatacaacracraactaaaaaactcctcaaatataaccaaaataaac

SEQ ID NO: 5039 - DNA, 50 bp, synthetic construct
  source 1..50: mol_type = other DNA
ctaaaaaactcctcaaatataaccaaaataaacrcccaaactaaaaaaac

SEQ ID NO: 5040 - DNA, 50 bp, synthetic construct
  source 1..50: mol_type = other DNA
aaaaaactcctcaaatataaccaaaataaacrcccaaactaaaaaaacrc

SEQ ID NO: 5041 - DNA, 50 bp, synthetic construct
  source 1..50: mol_type = other DNA
aacacaaaacaatactattattaaaaaataacaaaatactaacaaccctc

SEQ ID NO: 5042 - DNA, 50 bp, synthetic construct
  source 1..50: mol_type = other DNA
accaacataaaaaaaccccttctctactaaaaatacacaattaactaaac

SEQ ID NO: 5043 - DNA, 50 bp, synthetic construct
  source 1..50: mol_type = other DNA
tttttccatattaatcaaacraatcttaaactcccracctcaaataatcc

SEQ ID NO: 5044 - DNA, 50 bp, synthetic construct
  source 1..50: mol_type = other DNA
taaaatctaacctttaaaaaaaatttcttcaaccaaacacaataactcac

SEQ ID NO: 5045 - DNA, 50 bp, synthetic construct
  source 1..50: mol_type = other DNA
atctttaatttaccaatttattcctaacctaacttatctaaaatataaac

SEQ ID NO: 5046 - DNA, 50 bp, synthetic construct
  source 1..50: mol_type = other DNA
acacaatttctaacaacaaccccaaattataaaaaaatatctctaccaac

SEQ ID NO: 5047 - DNA, 50 bp, synthetic construct
  source 1..50: mol_type = other DNA
ttctaacaacaaccccaaattataaaaaaatatctctaccaacraatccc

SEQ ID NO: 5048 - DNA, 50 bp, synthetic construct
  source 1..50: mol_type = other DNA
aaaaaaaatcctatttcaaacatacaaacaataattctcaacccaaaatc

SEQ ID NO: 5049 - DNA, 50 bp, synthetic construct
  source 1..50: mol_type = other DNA
ataccacatatttcacctctctacatactatattaaatatcaaataaaac

SEQ ID NO: 5050 - DNA, 50 bp, synthetic construct
  source 1..50: mol_type = other DNA
aaataaatttaacaatactcttacctcactaaaataactataaaaaattc

SEQ ID NO: 5051 - DNA, 50 bp, synthetic construct
  source 1..50: mol_type = other DNA
accactaaaaaacattactcrtcaatttcaaccraacaattttaaaactc

SEQ ID NO: 5052 - DNA, 50 bp, synthetic construct
  source 1..50: mol_type = other DNA
ctacctcttaaaaacrtcctcataatcaaatccttaatttaaaatatatc

SEQ ID NO: 5053 - DNA, 50 bp, synthetic construct
  source 1..50: mol_type = other DNA
ctataaaacttcaaacctctttcccttaaatctaccrtaattaaaacctc

SEQ ID NO: 5054 - DNA, 50 bp, synthetic construct
  source 1..50: mol_type = other DNA
aaataaacrtccctctataaaacttcaaacctctttcccttaaatctacc

SEQ ID NO: 5055 - DNA, 50 bp, synthetic construct
  source 1..50: mol_type = other DNA
tcaaaaaccactaaaaaccataaaaaacttacttactttaccaaataaac

SEQ ID NO: 5056 - DNA, 50 bp, synthetic construct
  source 1..50: mol_type = other DNA
tttaaaaaaaacaataattctcccaacacrcaactaaaaatctaaaaacc

SEQ ID NO: 5057 - DNA, 50 bp, synthetic construct
  source 1..50: mol_type = other DNA
ctacaaaaacaaacaaacctccttaaactataataaactccaccctattc

SEQ ID NO: 5058 - DNA, 50 bp, synthetic construct
  source 1..50: mol_type = other DNA
raacttcctaactactttatttacctaaacaaacctaaacaataacraac

SEQ ID NO: 5059 - DNA, 50 bp, synthetic construct
  source 1..50: mol_type = other DNA
ratctaaaaaacrcaatattcraataaaaataaccaaattttccaaatac

SEQ ID NO: 5060 - DNA, 50 bp, synthetic construct
  source 1..50: mol_type = other DNA
taaaaaacrcaatattcraataaaaataaccaaattttccaaatacrtcc

SEQ ID NO: 5061 - DNA, 50 bp, synthetic construct
  source 1..50: mol_type = other DNA
ctcaccaaaaaaaaccaaacaataaacacaaaccaataaacacrcccacc

SEQ ID NO: 5062 - DNA, 50 bp, synthetic construct
  source 1..50: mol_type = other DNA
tacaaaattaaccaaccrtaataatacatacctataatcacaactactcc

SEQ ID NO: 5063 - DNA, 50 bp, synthetic construct
  source 1..50: mol_type = other DNA
cataacattccraaacctaaaaaactaaacaacccaaaactaaaaaccac

SEQ ID NO: 5064 - DNA, 50 bp, synthetic construct
  source 1..50: mol_type = other DNA
actaaaattaccaacctaaactaaactataaactccataaaacaaatacc

SEQ ID NO: 5065 - DNA, 50 bp, synthetic construct
  source 1..50: mol_type = other DNA
ataaaaaacctaccaaataccraccctaacctaaaactaaacttaaaacc

SEQ ID NO: 5066 - DNA, 50 bp, synthetic construct
  source 1..50: mol_type = other DNA
tataccraacattcattcaaaaaacactcataaaaaacctaccaaatacc

SEQ ID NO: 5067 - DNA, 50 bp, synthetic construct
  source 1..50: mol_type = other DNA
aaaaccracacctaataaactcttcataaatacttcctaaataaatactc

SEQ ID NO: 5068 - DNA, 50 bp, synthetic construct
  source 1..50: mol_type = other DNA
ttactacttattattaatctattcaatttctatttcttcctaatttaatc

SEQ ID NO: 5069 - DNA, 50 bp, synthetic construct
  source 1..50: mol_type = other DNA
aactaataccacaaaaatacaaaaaatcattcaaaactactataaacrcc

SEQ ID NO: 5070 - DNA, 50 bp, synthetic construct
  source 1..50: mol_type = other DNA
tacaactaataccacaaaaatacaaaaaatcattcaaaactactataaac

SEQ ID NO: 5071 - DNA, 50 bp, synthetic construct
  source 1..50: mol_type = other DNA
ttcataaatataaaattacaatccaaaacaaaaaacacaatatattatac

SEQ ID NO: 5072 - DNA, 50 bp, synthetic construct
  source 1..50: mol_type = other DNA
rcctactaaaacrcacraaaactaataaactatctctcctaaaaaacttc

SEQ ID NO: 5073 - DNA, 50 bp, synthetic construct
  source 1..50: mol_type = other DNA
ctactacaattcraactccctcaataccracrataatacttataatatac

SEQ ID NO: 5074 - DNA, 50 bp, synthetic construct
  source 1..50: mol_type = other DNA
ccactaataccracraacacraactaaaaattcaacaaacaacaactacc

SEQ ID NO: 5075 - DNA, 50 bp, synthetic construct
  source 1..50: mol_type = other DNA
aaaataccracctcctaaaaaaactactaaaactactcaaaaactcratc

SEQ ID NO: 5076 - DNA, 50 bp, synthetic construct
  source 1..50: mol_type = other DNA
acaaaaaataccracctcctaaaaaaactactaaaactactcaaaaactc

SEQ ID NO: 5077 - DNA, 50 bp, synthetic construct
  source 1..50: mol_type = other DNA
attccaacaacttttccaaaaaaccratatctcctacacaaatttcatcc

SEQ ID NO: 5078 - DNA, 50 bp, synthetic construct
  source 1..50: mol_type = other DNA
aacccracaccraataactatacaacacttctaaaaaatacttaaatccc

SEQ ID NO: 5079 - DNA, 50 bp, synthetic construct
  source 1..50: mol_type = other DNA
rtaataaaataattcraaaataatcrcctaaaaattaccccrcaaccacc

SEQ ID NO: 5080 - DNA, 50 bp, synthetic construct
  source 1..50: mol_type = other DNA
aaaaactacrtaataaaataattcraaaataatcrcctaaaaattacccc

SEQ ID NO: 5081 - DNA, 50 bp, synthetic construct
  source 1..50: mol_type = other DNA
caatacaaataactacttctacraaacacraacaaatcraacaactcctc

SEQ ID NO: 5082 - DNA, 50 bp, synthetic construct
  source 1..50: mol_type = other DNA
ttcatcacrtaattcttcaataactaaacraaaaactacccracctatcc

SEQ ID NO: 5083 - DNA, 50 bp, synthetic construct
  source 1..50: mol_type = other DNA
crtaattcttcaataactaaacraaaaactacccracctatccrtatctc

SEQ ID NO: 5084 - DNA, 50 bp, synthetic construct
  source 1..50: mol_type = other DNA
crcaaaaataaccacttacactaaaacattccratacccraaaataattc

SEQ ID NO: 5085 - DNA, 50 bp, synthetic construct
  source 1..50: mol_type = other DNA
tacctcactataattaactacccaaatactaaattcaaatcttaataacc

SEQ ID NO: 5086 - DNA, 50 bp, synthetic construct
  source 1..50: mol_type = other DNA
caaactatccaataaaaataaacacaaatacrctataacraactcatacc

SEQ ID NO: 5087 - DNA, 50 bp, synthetic construct
  source 1..50: mol_type = other DNA
tcttttaaccacaaactatccaataaaaataaacacaaatacrctataac

SEQ ID NO: 5088 - DNA, 50 bp, synthetic construct
  source 1..50: mol_type = other DNA
cttaaacatcttttaaccacaaactatccaataaaaataaacacaaatac

SEQ ID NO: 5089 - DNA, 50 bp, synthetic construct
  source 1..50: mol_type = other DNA
attcccactaaacaatctataaccaaaaaatatccaaaaacttaaacaac

SEQ ID NO: 5090 - DNA, 50 bp, synthetic construct
  source 1..50: mol_type = other DNA
attttacaaactatataacrctaaccaaattacttaatctctatacctcc

SEQ ID NO: 5091 - DNA, 50 bp, synthetic construct
  source 1..50: mol_type = other DNA
atacaacaaaccccaataataaatttataacaaatctacacrtatacccc

SEQ ID NO: 5092 - DNA, 50 bp, synthetic construct
  source 1..50: mol_type = other DNA
aaataatctatacaacaaaccccaataataaatttataacaaatctacac

SEQ ID NO: 5093 - DNA, 50 bp, synthetic construct
  source 1..50: mol_type = other DNA
aaaatttattatataaattattttaacacccaaatactaaacctaatacc

SEQ ID NO: 5094 - DNA, 50 bp, synthetic construct
  source 1..50: mol_type = other DNA
ccttaacrtaaaaataatttcaaactttaaacttcttttccctaccccrc

SEQ ID NO: 5095 - DNA, 50 bp, synthetic construct
  source 1..50: mol_type = other DNA
crccaaaaaacraaaatcccaaacaaaacaaacaacrctactaccttaac

SEQ ID NO: 5096 - DNA, 50 bp, synthetic construct
  source 1..50: mol_type = other DNA
raataacttaatcaaaacctaccattcaacccaatcraactccratactc

SEQ ID NO: 5097 - DNA, 50 bp, synthetic construct
  source 1..50: mol_type = other DNA
tattacatctcaaactcatttcrcaaatctaaacttcctaaaatatacac

SEQ ID NO: 5098 - DNA, 50 bp, synthetic construct
  source 1..50: mol_type = other DNA
caaatctaaacttcctaaaatatacacraaacrcctccraatttacacac

SEQ ID NO: 5099 - DNA, 50 bp, synthetic construct
  source 1..50: mol_type = other DNA
aataaataaatcaaaaacccraacaaaatatacratatccraaaacatcc

SEQ ID NO: 5100 - DNA, 50 bp, synthetic construct
  source 1..50: mol_type = other DNA
aaaaaatcacttatacrtctcrtaactaacaactaaatctaaaaacctcc

SEQ ID NO: 5101 - DNA, 50 bp, synthetic construct
  source 1..50: mol_type = other DNA
aataaatttttaaaaaattttctttttaaactttccttccttccaccctc

SEQ ID NO: 5102 - DNA, 50 bp, synthetic construct
  source 1..50: mol_type = other DNA
tttctccttctttatatatattaacttaaaacttcacttcaaaattttcc

SEQ ID NO: 5103 - DNA, 50 bp, synthetic construct
  source 1..50: mol_type = other DNA
accataatttcacatcttttttactcattacctatacaaaaaaataaaac

SEQ ID NO: 5104 - DNA, 50 bp, synthetic construct
  source 1..50: mol_type = other DNA
acactatttaatttttaaaaacctccaaataacaaaacaccaaataaaac

SEQ ID NO: 5105 - DNA, 50 bp, synthetic construct
  source 1..50: mol_type = other DNA
atttttaaaaacctccaaataacaaaacaccaaataaaacrtactacctc

SEQ ID NO: 5106 - DNA, 50 bp, synthetic construct
  source 1..50: mol_type = other DNA
tttaacttaactaatctaaattaacaaaccacaaaccaaacctaaaaacc

SEQ ID NO: 5107 - DNA, 50 bp, synthetic construct
  source 1..50: mol_type = other DNA
atattttatttaatccaatctatcaaatactatcatttcaacatataatc

SEQ ID NO: 5108 - DNA, 50 bp, synthetic construct
  source 1..50: mol_type = other DNA
attaataaaacaacttatattcctttttttatactcaatctttaaaactc

SEQ ID NO: 5109 - DNA, 50 bp, synthetic construct
  source 1..50: mol_type = other DNA
tttttcaaaactccctaattaaatctattaattaaccaaaaaatcaaatc

SEQ ID NO: 5110 - DNA, 50 bp, synthetic construct
  source 1..50: mol_type = other DNA
caacratctctaaaaaacaacacttattaaaatcctctctaaataatacc

SEQ ID NO: 5111 - DNA, 50 bp, synthetic construct
  source 1..50: mol_type = other DNA
taacctcacttacraaatttaaacttttaaaatttattactccraacaac

SEQ ID NO: 5112 - DNA, 50 bp, synthetic construct
  source 1..50: mol_type = other DNA
tttcttaaaatcaattctcactccacaaactaattactttattaaaccac

SEQ ID NO: 5113 - DNA, 50 bp, synthetic construct
  source 1..50: mol_type = other DNA
accctaatatataactcctccttatttaacaataaaaatcctaactactc

SEQ ID NO: 5114 - DNA, 50 bp, synthetic construct
  source 1..50: mol_type = other DNA
taaaaaaactcactaaccttaccaatcaaataacaaaaatacaactaacc

SEQ ID NO: 5115 - DNA, 50 bp, synthetic construct
  source 1..50: mol_type = other DNA
cacaaaccrcatactttctaatcttcaccattacactacrttcatacttc

SEQ ID NO: 5116 - DNA, 50 bp, synthetic construct
  source 1..50: mol_type = other DNA
tatacatataaacacatccacaaatatatatacacacacraaacataaac

SEQ ID NO: 5117 - DNA, 50 bp, synthetic construct
  source 1..50: mol_type = other DNA
taaccaaaatcaatttctattacttatcaataaaaaaatctaataaatac

SEQ ID NO: 5118 - DNA, 50 bp, synthetic construct
  source 1..50: mol_type = other DNA
ataaacrtaacccaaataaaaaccaatcaaaacctctctcttaaaaatcc

SEQ ID NO: 5119 - DNA, 50 bp, synthetic construct
  source 1..50: mol_type = other DNA
acacaaaaactaactactaataaattataaaaccaaccccaatccaaaac

SEQ ID NO: 5120 - DNA, 50 bp, synthetic construct
  source 1..50: mol_type = other DNA
taaacatctatccatctcaaaacttaactacrataacacaacaacacccc

SEQ ID NO: 5121 - DNA, 50 bp, synthetic construct
  source 1..50: mol_type = other DNA
ttacaataaatcaaaatcrcaccactatactattacctaaacaacrcacc

SEQ ID NO: 5122 - DNA, 50 bp, synthetic construct
  source 1..50: mol_type = other DNA
cctaaaacattccaaacccaatttaacctaaaaatatttacatttattcc

SEQ ID NO: 5123 - DNA, 50 bp, synthetic construct
  source 1..50: mol_type = other DNA
caaaaccctaactaatctaactcctacctacctctccttaataattatac

SEQ ID NO: 5124 - DNA, 50 bp, synthetic construct
  source 1..50: mol_type = other DNA
taaataaaaatttaaaaaaattccccccacctttctttctaccctaaaac

SEQ ID NO: 5125 - DNA, 50 bp, synthetic construct
  source 1..50: mol_type = other DNA
tcaaccttctattaaacacaaactaacccrtacctttaacrattcacatc

SEQ ID NO: 5126 - DNA, 50 bp, synthetic construct
  source 1..50: mol_type = other DNA
tcacaacaatctctactaatctcaaccttctattaaacacaaactaaccc

SEQ ID NO: 5127 - DNA, 50 bp, synthetic construct
  source 1..50: mol_type = other DNA
tatacctaataaaaaattaaaaccaacaaaaactactataaatttctccc

SEQ ID NO: 5128 - DNA, 50 bp, synthetic construct
  source 1..50: mol_type = other DNA
raaacctcacaaaaatctaaacaaaccactcrccctacaacaaaaaaatc

SEQ ID NO: 5129 - DNA, 50 bp, synthetic construct
  source 1..50: mol_type = other DNA
taaaaccaaactaaaacccaaataaattaatttccaaaatcaaacattac

SEQ ID NO: 5130 - DNA, 50 bp, synthetic construct
  source 1..50: mol_type = other DNA
aacctcccaaaacttccaaatacttattttacaaaacctaaaaacaatac

SEQ ID NO: 5131 - DNA, 50 bp, synthetic construct
  source 1..50: mol_type = other DNA
aacaacaaatcatcacttcttttcaaaatattaaaccaaataaaacaccc

SEQ ID NO: 5132 - DNA, 50 bp, synthetic construct
  source 1..50: mol_type = other DNA
ccaacraaaaacctcaaatttacrctactttacctataaaaattactttc

SEQ ID NO: 5133 - DNA, 50 bp, synthetic construct
  source 1..50: mol_type = other DNA
aaatatttatctcaaccaaattaacaaccaacraaaaacctcaaatttac

SEQ ID NO: 5134 - DNA, 50 bp, synthetic construct
  source 1..50: mol_type = other DNA
ataacraaaacaacttttataaacaaaacaacrcaaatctaaaatttccc

SEQ ID NO: 5135 - DNA, 50 bp, synthetic construct
  source 1..50: mol_type = other DNA
aatcaaatcaaaaaaactattatcaaatcaaaaaaactaattaacccatc

SEQ ID NO: 5136 - DNA, 50 bp, synthetic construct
  source 1..50: mol_type = other DNA
cccaaatttataaaataccaaaacctaacctatatcactacctcctatac

SEQ ID NO: 5137 - DNA, 50 bp, synthetic construct
  source 1..50: mol_type = other DNA
taattataaaataatactaaataatccactccacattccattcctttaac

SEQ ID NO: 5138 - DNA, 50 bp, synthetic construct
  source 1..50: mol_type = other DNA
acataaaacatcctaaataaatcaataatataaccaaaaatctcaacttc

SEQ ID NO: 5139 - DNA, 50 bp, synthetic construct
  source 1..50: mol_type = other DNA
aaacttccctataaaccaaaaatataaactcacaaaatactaaaaaacac

SEQ ID NO: 5140 - DNA, 50 bp, synthetic construct
  source 1..50: mol_type = other DNA
aaaatccttaaaaatcttaaattaaaacaattctaaaccctctctaaacc

SEQ ID NO: 5141 - DNA, 50 bp, synthetic construct
  source 1..50: mol_type = other DNA
acaattaaacaaaaaataaatctcaaatttccatccctaaaaactcaaac

SEQ ID NO: 5142 - DNA, 50 bp, synthetic construct
  source 1..50: mol_type = other DNA
aattacctacactataacttttcatttttcaacratatcctacaaaaaac

SEQ ID NO: 5143 - DNA, 50 bp, synthetic construct
  source 1..50: mol_type = other DNA
aattttattcctaacctaattacctacactataacttttcatttttcaac

SEQ ID NO: 5144 - DNA, 50 bp, synthetic construct
  source 1..50: mol_type = other DNA
tttaatttactttactaatctatttaactattccttcattcattataaac

SEQ ID NO: 5145 - DNA, 50 bp, synthetic construct
  source 1..50: mol_type = other DNA
actaatttataaccaaatattccaaaaacaacaaaacrttactctctacc

SEQ ID NO: 5146 - DNA, 50 bp, synthetic construct
  source 1..50: mol_type = other DNA
actaactaaaaaaacacacccaacaacttcccaatcacaacaaccraaac

SEQ ID NO: 5147 - DNA, 50 bp, synthetic construct
  source 1..50: mol_type = other DNA
aaaaccacacaattcaaaaaaacctaaaccaaataaaacttcattacaac

SEQ ID NO: 5148 - DNA, 50 bp, synthetic construct
  source 1..50: mol_type = other DNA
ctatcccaaatcttctccaaaaaacccaactcacrtatattctattttac

SEQ ID NO: 5149 - DNA, 50 bp, synthetic construct
  source 1..50: mol_type = other DNA
rttttcraaaaaaaacctatcccaaatcttctccaaaaaacccaactcac

SEQ ID NO: 5150 - DNA, 50 bp, synthetic construct
  source 1..50: mol_type = other DNA
atacacrtaaactaaaccccttaaaaaaaacctaaaacaaattcttcctc

SEQ ID NO: 5151 - DNA, 50 bp, synthetic construct
  source 1..50: mol_type = other DNA
rtaaactaaaccccttaaaaaaaacctaaaacaaattcttcctcraaaac

SEQ ID NO: 5152 - DNA, 50 bp, synthetic construct
  source 1..50: mol_type = other DNA
ttttaccaaaatcacttccrtttaccttcataatactattaccccctccc

SEQ ID NO: 5153 - DNA, 50 bp, synthetic construct
  source 1..50: mol_type = other DNA
acaccataaaaataaacraaaataaccttaacaaaactaccaaacaaaac

SEQ ID NO: 5154 - DNA, 50 bp, synthetic construct
  source 1..50: mol_type = other DNA
tacttcatatacctaataataaacatcacrtcraacrtctaaatctaatc

SEQ ID NO: 5155 - DNA, 50 bp, synthetic construct
  source 1..50: mol_type = other DNA
accaaacacataaaatacttaaacataaacacccaatactcraacttaac

SEQ ID NO: 5156 - DNA, 50 bp, synthetic construct
  source 1..50: mol_type = other DNA
caaacacataaaatacttaaacataaacacccaatactcraacttaacrc

SEQ ID NO: 5157 - DNA, 50 bp, synthetic construct
  source 1..50: mol_type = other DNA
ctaatctacttcttcracataaccaactccatctaataaatcatcctatc

SEQ ID NO: 5158 - DNA, 50 bp, synthetic construct
  source 1..50: mol_type = other DNA
aaaaaccaaataaacracaaaataacccaccaaataaaactaaccatacc

SEQ ID NO: 5159 - DNA, 50 bp, synthetic construct
  source 1..50: mol_type = other DNA
ataatacacaatacaaaacccrtaatctcrtaataaatataattatactc

SEQ ID NO: 5160 - DNA, 50 bp, synthetic construct
  source 1..50: mol_type = other DNA
aatacacaatacaaaacccrtaatctcrtaataaatataattatactcrc

SEQ ID NO: 5161 - DNA, 50 bp, synthetic construct
  source 1..50: mol_type = other DNA
tatctacaaaaaatcctttttacccaaaaattattataattcataaactc

SEQ ID NO: 5162 - DNA, 50 bp, synthetic construct
  source 1..50: mol_type = other DNA
ttaaaattcrttattaaaaatattcctcactcattcccttacaatacctc

SEQ ID NO: 5163 - DNA, 50 bp, synthetic construct
  source 1..50: mol_type = other DNA
atcaccccaattcctcccaatcttacaaactcaactaaatataatttatc

SEQ ID NO: 5164 - DNA, 50 bp, synthetic construct
  source 1..50: mol_type = other DNA
taacrcaaaatcctcrccaaacrctctaaaaaacaaatattacaaaaaac

SEQ ID NO: 5165 - DNA, 50 bp, synthetic construct
  source 1..50: mol_type = other DNA
tcttcctaaaacccaaaaaaaacttccaaactcaccaatttaacraacac

SEQ ID NO: 5166 - DNA, 50 bp, synthetic construct
  source 1..50: mol_type = other DNA
acaataatataatcataactcactacaccctcaaacttctaacttcaaac

SEQ ID NO: 5167 - DNA, 50 bp, synthetic construct
  source 1..50: mol_type = other DNA
aacatacaaacrcaaatactcaataaaaataattttccaaaaccaaaaac

SEQ ID NO: 5168 - DNA, 50 bp, synthetic construct
  source 1..50: mol_type = other DNA
acatactaccaaaatattaacaactaacattcataaccaaacatacaaac

SEQ ID NO: 5169 - DNA, 50 bp, synthetic construct
  source 1..50: mol_type = other DNA
ctataatttcctaatctcctaaaacctccttctcaataaaaccatcttcc

SEQ ID NO: 5170 - DNA, 50 bp, synthetic construct
  source 1..50: mol_type = other DNA
aacctcccaactcctaaatataccttaatacttccaaactcactacaaac

SEQ ID NO: 5171 - DNA, 50 bp, synthetic construct
  source 1..50: mol_type = other DNA
tacttccaaactcactacaaacrtcactaacacataatataaaacaaaac

SEQ ID NO: 5172 - DNA, 50 bp, synthetic construct
  source 1..50: mol_type = other DNA
tcataaaaattatttcaataatatcacaatctactaaaaaaaccaaaaac

SEQ ID NO: 5173 - DNA, 50 bp, synthetic construct
  source 1..50: mol_type = other DNA
tatatccraaattaataaattcttaatctcactaacttcaaaaataaaac

SEQ ID NO: 5174 - DNA, 50 bp, synthetic construct
  source 1..50: mol_type = other DNA
cacttaaatataaaaatacrtcaacaaattatacaaccaacaaaaatcac

SEQ ID NO: 5175 - DNA, 50 bp, synthetic construct
  source 1..50: mol_type = other DNA
acaaaaaacaaatattttaatcttaaattacctcaaaaaatctatatatc

SEQ ID NO: 5176 - DNA, 50 bp, synthetic construct
  source 1..50: mol_type = other DNA
ctaccaaataattacattatataaactatcaaacatttcatcttaatttc

SEQ ID NO: 5177 - DNA, 50 bp, synthetic construct
  source 1..50: mol_type = other DNA
aaataaccraataaaaacaactccaatctacaactcccaacrtaaacaac

SEQ ID NO: 5178 - DNA, 50 bp, synthetic construct
  source 1..50: mol_type = other DNA
aaacacttaaatatcaactaaaaaactacracaaaaaaccaaacraaaac

SEQ ID NO: 5179 - DNA, 50 bp, synthetic construct
  source 1..50: mol_type = other DNA
ctaaataaacacttaaatatcaactaaaaaactacracaaaaaaccaaac

SEQ ID NO: 5180 - DNA, 50 bp, synthetic construct
  source 1..50: mol_type = other DNA
atttccacttaaaaaaatacctcttacctattctcaatccatatctaaac

SEQ ID NO: 5181 - DNA, 50 bp, synthetic construct
  source 1..50: mol_type = other DNA
aaaaaacaacttcctactaacattataactaaacctaacataccctttcc

SEQ ID NO: 5182 - DNA, 50 bp, synthetic construct
  source 1..50: mol_type = other DNA
ccacaccaaatctactacaaaaaaaactctaaaaacaaaacrcaaccrtc

SEQ ID NO: 5183 - DNA, 50 bp, synthetic construct
  source 1..50: mol_type = other DNA
accccacaccaaatctactacaaaaaaaactctaaaaacaaaacrcaacc

SEQ ID NO: 5184 - DNA, 50 bp, synthetic construct
  source 1..50: mol_type = other DNA
tatccaaccccacaccaaatctactacaaaaaaaactctaaaaacaaaac

SEQ ID NO: 5185 - DNA, 50 bp, synthetic construct
  source 1..50: mol_type = other DNA
acaaaaaattaactaaacataataacacatacctataattccaactactc

SEQ ID NO: 5186 - DNA, 50 bp, synthetic construct
  source 1..50: mol_type = other DNA
tatactaaacacaataactaataactacaataataacrataataacaacc

SEQ ID NO: 5187 - DNA, 50 bp, synthetic construct
  source 1..50: mol_type = other DNA
tcccaaacaaccatactaacttaacaactcttaataaaaaatatctcccc

SEQ ID NO: 5188 - DNA, 50 bp, synthetic construct
  source 1..50: mol_type = other DNA
taccaaattaatataactatctaaaatatcctctaaaaacaaccractcc

SEQ ID NO: 5189 - DNA, 50 bp, synthetic construct
  source 1..50: mol_type = other DNA
tataattctccaaaaatttaaccaaacactaaatcctaaaaacctaaaac

SEQ ID NO: 5190 - DNA, 50 bp, synthetic construct
  source 1..50: mol_type = other DNA
caaaaacctaaacaatactactaaaatacccctacatcatcattataacc

SEQ ID NO: 5191 - DNA, 50 bp, synthetic construct
  source 1..50: mol_type = other DNA
cacraaatccttaacccrataataaaaataacctaaaaactactaaacac

SEQ ID NO: 5192 - DNA, 50 bp, synthetic construct
  source 1..50: mol_type = other DNA
ttactactattacaatatacctaaaacccttaaaaccccacaatatctcc

SEQ ID NO: 5193 - DNA, 50 bp, synthetic construct
  source 1..50: mol_type = other DNA
taaacttctttcacrtatcaaactcccttaataaacratatccctaaacc

SEQ ID NO: 5194 - DNA, 50 bp, synthetic construct
  source 1..50: mol_type = other DNA
attaataaaacatttaaacttctttcacrtatcaaactcccttaataaac

SEQ ID NO: 5195 - DNA, 50 bp, synthetic construct
  source 1..50: mol_type = other DNA
ccctcttataatcraataactataatacaaaaaaaatacccattactacc

SEQ ID NO: 5196 - DNA, 50 bp, synthetic construct
  source 1..50: mol_type = other DNA
aactaaacatctaactaactcaaattctaaacttctccttcccccaaccc

SEQ ID NO: 5197 - DNA, 50 bp, synthetic construct
  source 1..50: mol_type = other DNA
aaaaaacaccaaaacatcaaacccttaaactaaaacttaacaactccccc

SEQ ID NO: 5198 - DNA, 50 bp, synthetic construct
  source 1..50: mol_type = other DNA
aaaaaactatcaaaccccaacccaaaaacctaataccttaataccccctc

SEQ ID NO: 5199 - DNA, 50 bp, synthetic construct
  source 1..50: mol_type = other DNA
aaaatcaataaactaaccraccaataaacctaaaatacacractataaac

SEQ ID NO: 5200 - DNA, 50 bp, synthetic construct
  source 1..50: mol_type = other DNA
aacacacaacaaaatcaataaactaaccraccaataaacctaaaatacac

SEQ ID NO: 5201 - DNA, 50 bp, synthetic construct
  source 1..50: mol_type = other DNA
aaaccctcrtctacatacaaaactcacactaacttaaattccacatcaac

SEQ ID NO: 5202 - DNA, 50 bp, synthetic construct
  source 1..50: mol_type = other DNA
aactacrcrctaatataaaattcaaaccaatataaattctatatacaaac

SEQ ID NO: 5203 - DNA, 50 bp, synthetic construct
  source 1..50: mol_type = other DNA
cctactaaccctatatattcccctcccctacaattatttatctctactcc

SEQ ID NO: 5204 - DNA, 50 bp, synthetic construct
  source 1..50: mol_type = other DNA
atccaccaaccaacaaaccaaaacaactccactaaataactataattcrc

SEQ ID NO: 5205 - DNA, 50 bp, synthetic construct
  source 1..50: mol_type = other DNA
aaatccaccaaccaacaaaccaaaacaactccactaaataactataattc

SEQ ID NO: 5206 - DNA, 50 bp, synthetic construct
  source 1..50: mol_type = other DNA
aacctactacttaactatttaaaaaaaccaataaacaaaacataaccacc

SEQ ID NO: 5207 - DNA, 50 bp, synthetic construct
  source 1..50: mol_type = other DNA
ttttttaaaataaaatctcactctattaccccaaactatactacaataac

SEQ ID NO: 5208 - DNA, 50 bp, synthetic construct
  source 1..50: mol_type = other DNA
acatacaccrctacacctaactaattttttatacttttcataaaaataac

SEQ ID NO: 5209 - DNA, 50 bp, synthetic construct
  source 1..50: mol_type = other DNA
attaaccaaactactctcaaacttctaacctcaaataatctacctacctc

SEQ ID NO: 5210 - DNA, 50 bp, synthetic construct
  source 1..50: mol_type = other DNA
accaaaacraaaaccttccaaatcctaaatccaaatccttcatattatac

SEQ ID NO: 5211 - DNA, 50 bp, synthetic construct
  source 1..50: mol_type = other DNA
taaaaaacccctacatccccaataaaaacaaaccctaacaatctaaactc

SEQ ID NO: 5212 - DNA, 50 bp, synthetic construct
  source 1..50: mol_type = other DNA
cacaaaaatacaccctaaaaaaatactaaaacacrtcataataacatcac

SEQ ID NO: 5213 - DNA, 50 bp, synthetic construct
  source 1..50: mol_type = other DNA
aaccraaaaaactctataaacaaaaaccccaaccrtaatatcaccataac

SEQ ID NO: 5214 - DNA, 50 bp, synthetic construct
  source 1..50: mol_type = other DNA
aaaaacaaaaacaactctctaaccraacaaaaatcaaaccctacaaaacc

SEQ ID NO: 5215 - DNA, 50 bp, synthetic construct
  source 1..50: mol_type = other DNA
aacaaactataattctaaaaactcractctacaaaacctaacctttactc

SEQ ID NO: 5216 - DNA, 50 bp, synthetic construct
  source 1..50: mol_type = other DNA
aaaactctaaatcaacacccrctaaactacaccaaaaccttaaaatcccc

SEQ ID NO: 5217 - DNA, 50 bp, synthetic construct
  source 1..50: mol_type = other DNA
atcaacctcraataaaccacraaaactccaaaattctaatacaactcaac

SEQ ID NO: 5218 - DNA, 50 bp, synthetic construct
  source 1..50: mol_type = other DNA
actaataaacctacctacactacacacaacaatttccaaaccaatccttc

SEQ ID NO: 5219 - DNA, 50 bp, synthetic construct
  source 1..50: mol_type = other DNA
cacaatatccaataaactcaacataatctctacattaccctcaaaaatcc

SEQ ID NO: 5220 - DNA, 50 bp, synthetic construct
  source 1..50: mol_type = other DNA
aaaaataaaaacaaaattctaacctcccttcttcctaaaatactaactcc

SEQ ID NO: 5221 - DNA, 50 bp, synthetic construct
  source 1..50: mol_type = other DNA
craatactcaataacaaactttaaacaaactcccctaaaaaaataataac

SEQ ID NO: 5222 - DNA, 50 bp, synthetic construct
  source 1..50: mol_type = other DNA
cactaaaaaacaaaacrtctctaaaatctacaacaacaaatctaacraac

SEQ ID NO: 5223 - DNA, 50 bp, synthetic construct
  source 1..50: mol_type = other DNA
crtccactaaaaaacaaaacrtctctaaaatctacaacaacaaatctaac

SEQ ID NO: 5224 - DNA, 50 bp, synthetic construct
  source 1..50: mol_type = other DNA
caacccaaccttataaatatctaatcataccrtccactaaaaaacaaaac

SEQ ID NO: 5225 - DNA, 50 bp, synthetic construct
  source 1..50: mol_type = other DNA
actctctaataaacratataaccaaacacctacaaaactaaattaaatac

SEQ ID NO: 5226 - DNA, 50 bp, synthetic construct
  source 1..50: mol_type = other DNA
aaaaaaaacraaatcattttactctctctacctaaaaacaactactcaac

SEQ ID NO: 5227 - DNA, 50 bp, synthetic construct
  source 1..50: mol_type = other DNA
aaaaacaatactcataaaaaaaccaaaccccrtaaaaacccataacttcc

SEQ ID NO: 5228 - DNA, 50 bp, synthetic construct
  source 1..50: mol_type = other DNA
catatttctccaatataacctaaaaactaatattaaattcaaataaaccc

SEQ ID NO: 5229 - DNA, 50 bp, synthetic construct
  source 1..50: mol_type = other DNA
attctaaaattaacttatccatctctcaaaatctaattatatcttctccc

SEQ ID NO: 5230 - DNA, 50 bp, synthetic construct
  source 1..50: mol_type = other DNA
cttatccatctctcaaaatctaattatatcttctcccraattttatcttc

SEQ ID NO: 5231 - DNA, 50 bp, synthetic construct
  source 1..50: mol_type = other DNA
tttaaaatttaaacttttaaatacactttcacttaaaatatttaaacctc

SEQ ID NO: 5232 - DNA, 50 bp, synthetic construct
  source 1..50: mol_type = other DNA
actttcacttaaaatatttaaacctcrtaacaactctaacaaattccttc

SEQ ID NO: 5233 - DNA, 50 bp, synthetic construct
  source 1..50: mol_type = other DNA
ctaaaacrtaaaaaattaaaccacctcattctcaattcttcataccttcc

SEQ ID NO: 5234 - DNA, 50 bp, synthetic construct
  source 1..50: mol_type = other DNA
accrtacccaaaataatcaaaaccacttaaaaaaatacttactttctacc

SEQ ID NO: 5235 - DNA, 50 bp, synthetic construct
  source 1..50: mol_type = other DNA
atatcaacrcaatatacaaataatatcttcaaattctaaccttttaaacc

SEQ ID NO: 5236 - DNA, 50 bp, synthetic construct
  source 1..50: mol_type = other DNA
tactctacaaaaaataacttcaaaaataccaaataaacaatatcactcac

SEQ ID NO: 5237 - DNA, 50 bp, synthetic construct
  source 1..50: mol_type = other DNA
aacccttatccaacttactatactacacatcataaaaactatattaattc

SEQ ID NO: 5238 - DNA, 50 bp, synthetic construct
  source 1..50: mol_type = other DNA
tatccaacttactatactacacatcataaaaactatattaattcrttctc

SEQ ID NO: 5239 - DNA, 50 bp, synthetic construct
  source 1..50: mol_type = other DNA
tcacaatattaaatcataaaaatactttcttttatattcctttacacttc

SEQ ID NO: 5240 - DNA, 50 bp, synthetic construct
  source 1..50: mol_type = other DNA
ttaccttacaaataaccaaaaaatttctataatcctcctaaaattatttc

SEQ ID NO: 5241 - DNA, 50 bp, synthetic construct
  source 1..50: mol_type = other DNA
aactcaaacacaaaataaacrattaaaactctaacaccaaaacccttctc

SEQ ID NO: 5242 - DNA, 50 bp, synthetic construct
  source 1..50: mol_type = other DNA
cacraccactcrtcctaacttataacaaaaaactcaaacacaaaataaac

SEQ ID NO: 5243 - DNA, 50 bp, synthetic construct
  source 1..50: mol_type = other DNA
tctaaatacctcctatctctacaaacaattactactaaacacraccactc

SEQ ID NO: 5244 - DNA, 50 bp, synthetic construct
  source 1..50: mol_type = other DNA
attactcctctaaatacctcctatctctacaaacaattactactaaacac

SEQ ID NO: 5245 - DNA, 50 bp, synthetic construct
  source 1..50: mol_type = other DNA
aacactcaaaaaaataatcctaaacaaaacccaactcaacccaacccaac

SEQ ID NO: 5246 - DNA, 50 bp, synthetic construct
  source 1..50: mol_type = other DNA
acataccctacctaaactcaaaaaaaccaaaatccaaacaataaatctcc

SEQ ID NO: 5247 - DNA, 50 bp, synthetic construct
  source 1..50: mol_type = other DNA
taaataaaatattctttccctaaaatcctaacctcactcccttctccacc

SEQ ID NO: 5248 - DNA, 50 bp, synthetic construct
  source 1..50: mol_type = other DNA
aactacccaaaccaatctcaaatcaacttaccttctacaacttcaaatac

SEQ ID NO: 5249 - DNA, 50 bp, synthetic construct
  source 1..50: mol_type = other DNA
aatactaaaaaacacrtaccccraacaatttttataaatctaaaacctac

SEQ ID NO: 5250 - DNA, 50 bp, synthetic construct
  source 1..50: mol_type = other DNA
aacttataaatataaaactcatactatatcccctctctctatccctcaac

SEQ ID NO: 5251 - DNA, 50 bp, synthetic construct
  source 1..50: mol_type = other DNA
acctacattactaaatacctccaaataaaaaatcctatacctaaaaaccc

SEQ ID NO: 5252 - DNA, 50 bp, synthetic construct
  source 1..50: mol_type = other DNA
aacacrcctaacttcaaaactatattatcaccattctctccttctaaaac

SEQ ID NO: 5253 - DNA, 50 bp, synthetic construct
  source 1..50: mol_type = other DNA
aaaaaaaaacaaactaaataataccrcctcattaaccctaaaccraaatc

SEQ ID NO: 5254 - DNA, 50 bp, synthetic construct
  source 1..50: mol_type = other DNA
aaacrcccatttcttaaataaactaaacctaatacaaaaaaacacacacc

SEQ ID NO: 5255 - DNA, 50 bp, synthetic construct
  source 1..50: mol_type = other DNA
ctacratatatattcctctacaccaaacccaactcacccaaaaaataaac

SEQ ID NO: 5256 - DNA, 50 bp, synthetic construct
  source 1..50: mol_type = other DNA
ttatatctaatcrtctttccttaaaatcaatattacataaaaccaccaac

SEQ ID NO: 5257 - DNA, 50 bp, synthetic construct
  source 1..50: mol_type = other DNA
tccraaccaaatacraaatataatctcctaatataccrttttttaaaccc

SEQ ID NO: 5258 - DNA, 50 bp, synthetic construct
  source 1..50: mol_type = other DNA
aatcaaaacaactaaaaactcaaaaaaactttccacaaccaaatattttc

SEQ ID NO: 5259 - DNA, 50 bp, synthetic construct
  source 1..50: mol_type = other DNA
ttcrtttttatcttaactaaactcctaatactatcactctcaataactac

SEQ ID NO: 5260 - DNA, 50 bp, synthetic construct
  source 1..50: mol_type = other DNA
ctatcactctcaataactacraacaaaccratattccaaaaatattctac

SEQ ID NO: 5261 - DNA, 50 bp, synthetic construct
  source 1..50: mol_type = other DNA
acraaatacraaaatttacctctaacttataaatcaacracaatataaac

SEQ ID NO: 5262 - DNA, 50 bp, synthetic construct
  source 1..50: mol_type = other DNA
tctttacactatcttaaaactaaaacrcctaaaaaacttctactttaaac

SEQ ID NO: 5263 - DNA, 50 bp, synthetic construct
  source 1..50: mol_type = other DNA
actaaaccaataaacacctatttttctttacactatcttaaaactaaaac

SEQ ID NO: 5264 - DNA, 50 bp, synthetic construct
  source 1..50: mol_type = other DNA
taaaaaactactaaaataaaatatataaataaccccaatccttcatcctc

SEQ ID NO: 5265 - DNA, 50 bp, synthetic construct
  source 1..50: mol_type = other DNA
ataaccccaatccttcatcctcrccctaattacatcctttacaatataac

SEQ ID NO: 5266 - DNA, 50 bp, synthetic construct
  source 1..50: mol_type = other DNA
attcttcacttcctaactttccctacttaatattccacttatactaaatc

SEQ ID NO: 5267 - DNA, 50 bp, synthetic construct
  source 1..50: mol_type = other DNA
tattaactaaaaaataaatcaacaataccctaaaaaaatataataccctc

SEQ ID NO: 5268 - DNA, 50 bp, synthetic construct
  source 1..50: mol_type = other DNA
actactaactcattcttcaatcaacacacaatcaaaaatcatcttctccc

SEQ ID NO: 5269 - DNA, 50 bp, synthetic construct
  source 1..50: mol_type = other DNA
acaaaacaacaaatacaacaacaaaaaatactcctaaaaaaccctaaaac

SEQ ID NO: 5270 - DNA, 50 bp, synthetic construct
  source 1..50: mol_type = other DNA
aatatcaaatactattaaaatataacrcaactaaactctaacacaatacc

SEQ ID NO: 5271 - DNA, 50 bp, synthetic construct
  source 1..50: mol_type = other DNA
taacccaacaattccactaaataactaaaaaactcattcataacttatac

SEQ ID NO: 5272 - DNA, 50 bp, synthetic construct
  source 1..50: mol_type = other DNA
actaaataactaaaaaactcattcataacttatacrcaaaaaacttacac

SEQ ID NO: 5273 - DNA, 50 bp, synthetic construct
  source 1..50: mol_type = other DNA
caccctcactaccaaaatcttaaacttaataaccaacraaacctaatacc

SEQ ID NO: 5274 - DNA, 50 bp, synthetic construct
  source 1..50: mol_type = other DNA
taaattctactatcttaacctcacaacccttcctattaattacaaaaccc

SEQ ID NO: 5275 - DNA, 50 bp, synthetic construct
  source 1..50: mol_type = other DNA
tattctttcttacaataataattaacaattaactcrcaatataaatcrac

SEQ ID NO: 5276 - DNA, 50 bp, synthetic construct
  source 1..50: mol_type = other DNA
ttcrtaatctcaccactaaactacttttactaaaaaataccaacttctac

SEQ ID NO: 5277 - DNA, 50 bp, synthetic construct
  source 1..50: mol_type = other DNA
ataaaactataaccattaaaactaccattcaaaaaaatatattaaccrac

SEQ ID NO: 5278 - DNA, 50 bp, synthetic construct
  source 1..50: mol_type = other DNA
tattctcaaaatatatacattcataaatactaaaaccattcraatttaac

SEQ ID NO: 5279 - DNA, 50 bp, synthetic construct
  source 1..50: mol_type = other DNA
attcataaatactaaaaccattcraatttaacraccacactcctattcac

SEQ ID NO: 5280 - DNA, 50 bp, synthetic construct
  source 1..50: mol_type = other DNA
aaaaaaaaaattcttttttcctaaactacaacaaataaacaataaaaccc

SEQ ID NO: 5281 - DNA, 50 bp, synthetic construct
  source 1..50: mol_type = other DNA
acaatacccttatatttcctttactttcaaaaacttataacaaaacttac

SEQ ID NO: 5282 - DNA, 50 bp, synthetic construct
  source 1..50: mol_type = other DNA
ttaaaactcaatatattaacaaaaacctaattaatttaataacaaccacc

SEQ ID NO: 5283 - DNA, 50 bp, synthetic construct
  source 1..50: mol_type = other DNA
acccccaccccataatttttaacttatataaaaactaaaccaactaattc

SEQ ID NO: 5284 - DNA, 50 bp, synthetic construct
  source 1..50: mol_type = other DNA
aaccaattaatccaacctttatacaaactaaaaattataaaataaaaacc

SEQ ID NO: 5285 - DNA, 50 bp, synthetic construct
  source 1..50: mol_type = other DNA
ccacaactacaacacaaaataaacaaaaactaaaacctcaactaaccaac

SEQ ID NO: 5286 - DNA, 50 bp, synthetic construct
  source 1..50: mol_type = other DNA
actacaaaataaatatctcaactacatattaaacatactaaacctttttc

SEQ ID NO: 5287 - DNA, 50 bp, synthetic construct
  source 1..50: mol_type = other DNA
atccccaaaaatcttactcaaaaaatattttaaatattactacaacattc

SEQ ID NO: 5288 - DNA, 50 bp, synthetic construct
  source 1..50: mol_type = other DNA
cctttaataaatcactaaatcataacacrtctttattcattcaattctac

SEQ ID NO: 5289 - DNA, 50 bp, synthetic construct
  source 1..50: mol_type = other DNA
aaaactaaataaaataccttaaaatatcaccaacaatataaaccccactc

SEQ ID NO: 5290 - DNA, 50 bp, synthetic construct
  source 1..50: mol_type = other DNA
accaatatacttttatattccttaccctacaaaatcctatacatataacc

SEQ ID NO: 5291 - DNA, 50 bp, synthetic construct
  source 1..50: mol_type = other DNA
cacaacaaaaatcaaaaaccacactaccttaaccaaacaaaataactcac

SEQ ID NO: 5292 - DNA, 50 bp, synthetic construct
  source 1..50: mol_type = other DNA
taatattaaccataataatttattttcacattatcataaatacrtatcac

SEQ ID NO: 5293 - DNA, 50 bp, synthetic construct
  source 1..50: mol_type = other DNA
tttttcttaatattaaccataataatttattttcacattatcataaatac

SEQ ID NO: 5294 - DNA, 50 bp, synthetic construct
  source 1..50: mol_type = other DNA
ataacaatataaaaacaaaccaccataactaacaccaaaaaaaaacccac

SEQ ID NO: 5295 - DNA, 50 bp, synthetic construct
  source 1..50: mol_type = other DNA
tctcccttcaaaaaaattacaaaaacctaaacacaacaaaaacctcaaac

SEQ ID NO: 5296 - DNA, 50 bp, synthetic construct
  source 1..50: mol_type = other DNA
aacactactcctaaccaacaatctcaaatatttaacaacttacccaaaac

SEQ ID NO: 5297 - DNA, 50 bp, synthetic construct
  source 1..50: mol_type = other DNA
tatttaacaacttacccaaaacrcataattcataaataaaatatttaacc

SEQ ID NO: 5298 - DNA, 50 bp, synthetic construct
  source 1..50: mol_type = other DNA
cctaactcaacaaccatcaatcaaaaataataaataaaaatcatcactac

SEQ ID NO: 5299 - DNA, 50 bp, synthetic construct
  source 1..50: mol_type = other DNA
ctcttcaaaaccaataacactcattctctaatctattataaaatctaaac

SEQ ID NO: 5300 - DNA, 50 bp, synthetic construct
  source 1..50: mol_type = other DNA
aaactatcatacaataacaccatcttaactcactacaatatctacctccc

SEQ ID NO: 5301 - DNA, 50 bp, synthetic construct
  source 1..50: mol_type = other DNA
ctacaatatctacctcccraattcaaaaaattctcaaacctcatcctctc

SEQ ID NO: 5302 - DNA, 50 bp, synthetic construct
  source 1..50: mol_type = other DNA
cacttaaaatcaaaaattcraaaccaaactaaccaaaataacaaaacccc

SEQ ID NO: 5303 - DNA, 50 bp, synthetic construct
  source 1..50: mol_type = other DNA
aaacctaccctccaactatccrtattattaaaaactttttcttttacctc

SEQ ID NO: 5304 - DNA, 50 bp, synthetic construct
  source 1..50: mol_type = other DNA
ctctaccaaaaactaaataaccctaaacaaaacacraaatacctctatac

SEQ ID NO: 5305 - DNA, 50 bp, synthetic construct
  source 1..50: mol_type = other DNA
atccttaacaaaactaacatttaaaatcaaacaactaaactcctaaaccc

SEQ ID NO: 5306 - DNA, 50 bp, synthetic construct
  source 1..50: mol_type = other DNA
aaaaaccractcctaactaacctaaactcacctccattattacrtatatc

SEQ ID NO: 5307 - DNA, 50 bp, synthetic construct
  source 1..50: mol_type = other DNA
taaaatatctttcctaatttctacttcaaattcacatcctccaaaaaacc

SEQ ID NO: 5308 - DNA, 50 bp, synthetic construct
  source 1..50: mol_type = other DNA
tctcttactcctcatacataaaacaataactactatttttataccttaac

SEQ ID NO: 5309 - DNA, 50 bp, synthetic construct
  source 1..50: mol_type = other DNA
ctatccacttaatttttctttcrtttcrataacaaaatttcttcaaaaac

SEQ ID NO: 5310 - DNA, 50 bp, synthetic construct
  source 1..50: mol_type = other DNA
tttaaaaaacaaaactctacttactatccacttaatttttctttcrtttc

SEQ ID NO: 5311 - DNA, 50 bp, synthetic construct
  source 1..50: mol_type = other DNA
tctaaaaccratatatatttaacattcactttcccaaacaatatctttcc

SEQ ID NO: 5312 - DNA, 50 bp, synthetic construct
  source 1..50: mol_type = other DNA
cctcctcattttccraatcttcatttaaaaatcatactaacttttctccc

SEQ ID NO: 5313 - DNA, 50 bp, synthetic construct
  source 1..50: mol_type = other DNA
aatcttcatttaaaaatcatactaacttttctcccrcatcctaaatcccc

SEQ ID NO: 5314 - DNA, 50 bp, synthetic construct
  source 1..50: mol_type = other DNA
atcacaccttaaaacttaaaatatatcaacatactaacctattaattaac

SEQ ID NO: 5315 - DNA, 50 bp, synthetic construct
  source 1..50: mol_type = other DNA
atcaattaaaacacaaactaaaaaccraaacctacrttccttcataacac

SEQ ID NO: 5316 - DNA, 50 bp, synthetic construct
  source 1..50: mol_type = other DNA
tactaaaaaatactaatcaattaaaacacaaactaaaaaccraaacctac

SEQ ID NO: 5317 - DNA, 50 bp, synthetic construct
  source 1..50: mol_type = other DNA
aattcttaactctaacctaaaactacrtactataaaaaaacrcaaacctc

SEQ ID NO: 5318 - DNA, 50 bp, synthetic construct
  source 1..50: mol_type = other DNA
tataccttaactaatcaacattccttaataaattattctctacrtaatcc

SEQ ID NO: 5319 - DNA, 50 bp, synthetic construct
  source 1..50: mol_type = other DNA
aatctattaaataaatatactcracacccaaaaactcctttaaaaaatac

SEQ ID NO: 5320 - DNA, 50 bp, synthetic construct
  source 1..50: mol_type = other DNA
aaatataccacaccctaaactcttaaaataaatattttaccaaaaaaatc

SEQ ID NO: 5321 - DNA, 50 bp, synthetic construct
  source 1..50: mol_type = other DNA
ttcttctcataaatataaatctaaaatataacaaaaacctcaacrctatc

SEQ ID NO: 5322 - DNA, 50 bp, synthetic construct
  source 1..50: mol_type = other DNA
tacatcttcttctcataaatataaatctaaaatataacaaaaacctcaac

SEQ ID NO: 5323 - DNA, 50 bp, synthetic construct
  source 1..50: mol_type = other DNA
ccraaccraataaaccacttccttctttaatccratatctaaaaaatttc

SEQ ID NO: 5324 - DNA, 50 bp, synthetic construct
  source 1..50: mol_type = other DNA
ataaaaactattataacaaaataaaccacaaacraaactcctcaaacacc

SEQ ID NO: 5325 - DNA, 50 bp, synthetic construct
  source 1..50: mol_type = other DNA
aaacttcctattcaattaactaataaatataacccccaatcacrttcccc

SEQ ID NO: 5326 - DNA, 50 bp, synthetic construct
  source 1..50: mol_type = other DNA
aactttctcaacctaataaaaatcatctataaccacctcacaactaatac

SEQ ID NO: 5327 - DNA, 50 bp, synthetic construct
  source 1..50: mol_type = other DNA
aaaatttactcctaactactttaatatcaatactactactccacctctac

SEQ ID NO: 5328 - DNA, 50 bp, synthetic construct
  source 1..50: mol_type = other DNA
aaataaaaccattttaaaatataaaaaatcctcctatatccccaactttc

SEQ ID NO: 5329 - DNA, 50 bp, synthetic construct
  source 1..50: mol_type = other DNA
tttttttttaacaacaaacaactttaactactatcttaaatacacaaacc

SEQ ID NO: 5330 - DNA, 50 bp, synthetic construct
  source 1..50: mol_type = other DNA
aataacttacataataacattaatatcacaaccttcattaaccaactacc

SEQ ID NO: 5331 - DNA, 50 bp, synthetic construct
  source 1..50: mol_type = other DNA
tttctaaaaaattatatcctccacttacttctaattattccctttatctc

SEQ ID NO: 5332 - DNA, 50 bp, synthetic construct
  source 1..50: mol_type = other DNA
caaacatcacttcttccatccttctatcaccaaccaaaatctcaacatac

SEQ ID NO: 5333 - DNA, 50 bp, synthetic construct
  source 1..50: mol_type = other DNA
taattaacaaaacaaccactaaaaactctctaaataatcattttcctttc

SEQ ID NO: 5334 - DNA, 50 bp, synthetic construct
  source 1..50: mol_type = other DNA
catcctaattactaaactcttaccaaatttcacacrtctaaaaactcccc

SEQ ID NO: 5335 - DNA, 50 bp, synthetic construct
  source 1..50: mol_type = other DNA
aattcaaaatcttttcatcctaattactaaactcttaccaaatttcacac

SEQ ID NO: 5336 - DNA, 50 bp, synthetic construct
  source 1..50: mol_type = other DNA
ccaataattactatcactacattcatacatcaaaattcacaaaatacctc

SEQ ID NO: 5337 - DNA, 50 bp, synthetic construct
  source 1..50: mol_type = other DNA
atacttaccaccaaatattataaaaactactttactcattcctacctctc

SEQ ID NO: 5338 - DNA, 50 bp, synthetic construct
  source 1..50: mol_type = other DNA
aactacttaatataattcaactacataatacttcttctaaaaaccctcac

SEQ ID NO: 5339 - DNA, 50 bp, synthetic construct
  source 1..50: mol_type = other DNA
taaatacttattatactcaccctcaaacattataacaactacacataccc

SEQ ID NO: 5340 - DNA, 50 bp, synthetic construct
  source 1..50: mol_type = other DNA
acrcrattaacrtttaaaataaaacaattcttcattatacaaaaccatcc

SEQ ID NO: 5341 - DNA, 50 bp, synthetic construct
  source 1..50: mol_type = other DNA
ttacatatactcctcttcatccratattactcaaaaataacrcrattaac

SEQ ID NO: 5342 - DNA, 50 bp, synthetic construct
  source 1..50: mol_type = other DNA
caacraataattctacacaataaaaaattatcccaccccaaacrccaatc

SEQ ID NO: 5343 - DNA, 50 bp, synthetic construct
  source 1..50: mol_type = other DNA
ctaccccacttacatatactcctcttcatccratattactcaaaaataac

SEQ ID NO: 5344 - DNA, 50 bp, synthetic construct
  source 1..50: mol_type = other DNA
ctttacaataatttcccaaaaactccataatcaaacccaaaccaccacac

SEQ ID NO: 5345 - DNA, 50 bp, synthetic construct
  source 1..50: mol_type = other DNA
aaacccttaaaaaaccactataaaaatcaaaatacatattatctctacac

SEQ ID NO: 5346 - DNA, 50 bp, synthetic construct
  source 1..50: mol_type = other DNA
acctaaattatttaacaacaattacttcacatctcaaaccaaaaaataac

SEQ ID NO: 5347 - DNA, 50 bp, synthetic construct
  source 1..50: mol_type = other DNA
aaattatttaacaacaattacttcacatctcaaaccaaaaaataacrcac

SEQ ID NO: 5348 - DNA, 50 bp, synthetic construct
  source 1..50: mol_type = other DNA
cctttctaattacrtttaacaacatacccaaaaaataccacraaactacc

SEQ ID NO: 5349 - DNA, 50 bp, synthetic construct
  source 1..50: mol_type = other DNA
accaccctctataacaacaaaaactctttatcctattttacracaattcc

SEQ ID NO: 5350 - DNA, 50 bp, synthetic construct
  source 1..50: mol_type = other DNA
tatcctattttacracaattccrtaacattccctaaacatattatcaaac

SEQ ID NO: 5351 - DNA, 50 bp, synthetic construct
  source 1..50: mol_type = other DNA
attccrtaacattccctaaacatattatcaaacrcaattaaaaaaaacac

SEQ ID NO: 5352 - DNA, 50 bp, synthetic construct
  source 1..50: mol_type = other DNA
tccatttaacccaaatactatttcacttattaaaataattccatttcctc

SEQ ID NO: 5353 - DNA, 50 bp, synthetic construct
  source 1..50: mol_type = other DNA
ccattctactcaacttaacaaaactaatttatctaaacctaacttaactc

SEQ ID NO: 5354 - DNA, 50 bp, synthetic construct
  source 1..50: mol_type = other DNA
ataaaaatcaaccrcactttctatttaataaaatctacttaccaataaac

SEQ ID NO: 5355 - DNA, 50 bp, synthetic construct
  source 1..50: mol_type = other DNA
aaccctacaccccaaactaaaaacttaataaataataaatacccaaaaac

SEQ ID NO: 5356 - DNA, 50 bp, synthetic construct
  source 1..50: mol_type = other DNA
attaataacccaatttaaaactacaataaacaatacttctaaaaacattc

SEQ ID NO: 5357 - DNA, 50 bp, synthetic construct
  source 1..50: mol_type = other DNA
aattttccttaattttctcttcttttctttacatcttccttaatttttcc

SEQ ID NO: 5358 - DNA, 50 bp, synthetic construct
  source 1..50: mol_type = other DNA
tttctctcatttatctctcccctttttcatctaaaaaaaatcttaaaaac

SEQ ID NO: 5359 - DNA, 50 bp, synthetic construct
  source 1..50: mol_type = other DNA
ccttattttctctaacatcataactcttacaaaatttttaattctttcrc

SEQ ID NO: 5360 - DNA, 50 bp, synthetic construct
  source 1..50: mol_type = other DNA
ttccttattttctctaacatcataactcttacaaaatttttaattctttc

SEQ ID NO: 5361 - DNA, 50 bp, synthetic construct
  source 1..50: mol_type = other DNA
aaaataaaacttacctttccaatcraataaatataataccataaaaaaac

SEQ ID NO: 5362 - DNA, 50 bp, synthetic construct
  source 1..50: mol_type = other DNA
atcacttccttactacttcatttactaaaataaaacttacctttccaatc

SEQ ID NO: 5363 - DNA, 50 bp, synthetic construct
  source 1..50: mol_type = other DNA
taccacatcttaacctaattaaaaactaaatcaaactatttttcttaaac

SEQ ID NO: 5364 - DNA, 50 bp, synthetic construct
  source 1..50: mol_type = other DNA
ctaacaaaaattactcaaaccaattaaaaaccctaaacccaaaatccatc

SEQ ID NO: 5365 - DNA, 50 bp, synthetic construct
  source 1..50: mol_type = other DNA
aactaattatcacttaaattaacacccaataccccaccaaaaaaaaaacc

SEQ ID NO: 5366 - DNA, 50 bp, synthetic construct
  source 1..50: mol_type = other DNA
tttattcaatcacactaaaaactaactaactactaacttcaaactataac

SEQ ID NO: 5367 - DNA, 50 bp, synthetic construct
  source 1..50: mol_type = other DNA
ttaattaatatcacaatacttaccctaaatataccacctaaaaaaacccc

SEQ ID NO: 5368 - DNA, 50 bp, synthetic construct
  source 1..50: mol_type = other DNA
crtttaaataccaattcttccacttactaacaaatcccttttaaaacctc

SEQ ID NO: 5369 - DNA, 50 bp, synthetic construct
  source 1..50: mol_type = other DNA
cctaataacctacccraaaaaaacacaaatataaatcaaaaaaacttaac

SEQ ID NO: 5370 - DNA, 50 bp, synthetic construct
  source 1..50: mol_type = other DNA
taatattactaataaattcrtcctctttaaaaaaacctaataacctaccc

SEQ ID NO: 5371 - DNA, 50 bp, synthetic construct
  source 1..50: mol_type = other DNA
attacatcaaacctaccaaaaatcaaacttttaatattactaataaattc

SEQ ID NO: 5372 - DNA, 50 bp, synthetic construct
  source 1..50: mol_type = other DNA
acaaaactaatctaaaaaaaacctacaataatcaactaccccctaaacac

SEQ ID NO: 5373 - DNA, 50 bp, synthetic construct
  source 1..50: mol_type = other DNA
aactactttataaaacttactaaatttccaaaatcacctcaaaaaaactc

SEQ ID NO: 5374 - DNA, 50 bp, synthetic construct
  source 1..50: mol_type = other DNA
aaccaataacaaccaaaactaataatttcaaaccttttctccattaatcc

SEQ ID NO: 5375 - DNA, 50 bp, synthetic construct
  source 1..50: mol_type = other DNA
caaattccttaaaaaaaattaacaaactaattaactaactctatctctcc

SEQ ID NO: 5376 - DNA, 50 bp, synthetic construct
  source 1..50: mol_type = other DNA
taaacccaaattaaaaacacaaatataaactttctaatataaattccrac

SEQ ID NO: 5377 - DNA, 50 bp, synthetic construct
  source 1..50: mol_type = other DNA
caaatataaactttctaatataaattccracrcacctaccttccattccc

SEQ ID NO: 5378 - DNA, 50 bp, synthetic construct
  source 1..50: mol_type = other DNA
caacttaatattttacatttcctaactctataccctacattactttaaac

SEQ ID NO: 5379 - DNA, 50 bp, synthetic construct
  source 1..50: mol_type = other DNA
crcaatatactaaaaaaatacatacaacccaaactataacctaaaccrtc

SEQ ID NO: 5380 - DNA, 50 bp, synthetic construct
  source 1..50: mol_type = other DNA
aactcttaaacttcattttcttactctcttatccccraccrataaacttc

SEQ ID NO: 5381 - DNA, 50 bp, synthetic construct
  source 1..50: mol_type = other DNA
craaacaaaaaactcttaaacttcattttcttactctcttatccccracc

SEQ ID NO: 5382 - DNA, 50 bp, synthetic construct
  source 1..50: mol_type = other DNA
ataccraaacaaaaaactcttaaacttcattttcttactctcttatcccc

SEQ ID NO: 5383 - DNA, 50 bp, synthetic construct
  source 1..50: mol_type = other DNA
caacctaaaattcaaatcccacccctcataaaactattcttaacaaaacc

SEQ ID NO: 5384 - DNA, 50 bp, synthetic construct
  source 1..50: mol_type = other DNA
ttaaatatctcacttttccctacaacacatccaactacttaatcaacatc

SEQ ID NO: 5385 - DNA, 50 bp, synthetic construct
  source 1..50: mol_type = other DNA
ctaaccaatataataaaactttatctccactaaaaacacaaaaattaacc

SEQ ID NO: 5386 - DNA, 50 bp, synthetic construct
  source 1..50: mol_type = other DNA
ctcctacctcaacrtccttaataactaaaattataaacatataccatcac

SEQ ID NO: 5387 - DNA, 50 bp, synthetic construct
  source 1..50: mol_type = other DNA
aatacaataacataaacctataaccctaactacttaaaaaactaaatcac

SEQ ID NO: 5388 - DNA, 50 bp, synthetic construct
  source 1..50: mol_type = other DNA
actacraaaaaaatatttttacaaccaaccttcttcctaaaaactccrtc

SEQ ID NO: 5389 - DNA, 50 bp, synthetic construct
  source 1..50: mol_type = other DNA
ctccatcaaaaaatcccccaaattttacaaaaacracacattctccaacc

SEQ ID NO: 5390 - DNA, 50 bp, synthetic construct
  source 1..50: mol_type = other DNA
caacctactaataacataaatttaaacaatctaacaaaaacctacatctc

SEQ ID NO: 5391 - DNA, 50 bp, synthetic construct
  source 1..50: mol_type = other DNA
atatacttactacttctaaaaaaccattcttaattctcttttcataaaac

SEQ ID NO: 5392 - DNA, 50 bp, synthetic construct
  source 1..50: mol_type = other DNA
tttttaatcttcaaaaattctactatcataatctttcatttctattcaac

SEQ ID NO: 5393 - DNA, 50 bp, synthetic construct
  source 1..50: mol_type = other DNA
acctttaaattaattccatatatatttattaaatacttacctctaatttc

SEQ ID NO: 5394 - DNA, 50 bp, synthetic construct
  source 1..50: mol_type = other DNA
actttatactttcattattaaaactatctcraccraacacaataactcac

SEQ ID NO: 5395 - DNA, 50 bp, synthetic construct
  source 1..50: mol_type = other DNA
tcaaaaaataccctctcaataactctaactctaaatcacctaataatacc

SEQ ID NO: 5396 - DNA, 50 bp, synthetic construct
  source 1..50: mol_type = other DNA
ctctaaatcacctaataataccratacctactactataaataaatacacc

SEQ ID NO: 5397 - DNA, 50 bp, synthetic construct
  source 1..50: mol_type = other DNA
atcaccttaacaaaaaaacctcaaataaaaacctctaccctattccccac

SEQ ID NO: 5398 - DNA, 50 bp, synthetic construct
  source 1..50: mol_type = other DNA
cratataaactccctccccractaacttctcttctataaaaataaaatcc

SEQ ID NO: 5399 - DNA, 50 bp, synthetic construct
  source 1..50: mol_type = other DNA
aataaaaatacaaaactcctactcaacaataactcaaacrtcaaaataac

SEQ ID NO: 5400 - DNA, 50 bp, synthetic construct
  source 1..50: mol_type = other DNA
acctaacrcaaaataaaaatacaaaactcctactcaacaataactcaaac

SEQ ID NO: 5401 - DNA, 50 bp, synthetic construct
  source 1..50: mol_type = other DNA
tcttaacrtctaaattactactaaacaaaaaccctacattttcattttac

SEQ ID NO: 5402 - DNA, 50 bp, synthetic construct
  source 1..50: mol_type = other DNA
rataaactaaaaacaaacataatcaaaaaaccccraaaaaactaaacaac

SEQ ID NO: 5403 - DNA, 50 bp, synthetic construct
  source 1..50: mol_type = other DNA
aaacttctaaaaaaccrataaactaaaaacaaacataatcaaaaaacccc

SEQ ID NO: 5404 - DNA, 50 bp, synthetic construct
  source 1..50: mol_type = other DNA
cctaaattaaacaatactaaactctcrtcraaaaatcaaataacrctaac

SEQ ID NO: 5405 - DNA, 50 bp, synthetic construct
  source 1..50: mol_type = other DNA
ataacaaataacrtcaaatctacacracraatactaaaaaacctacaaac

SEQ ID NO: 5406 - DNA, 50 bp, synthetic construct
  source 1..50: mol_type = other DNA
ctttccccacctaaaaacataactaccttctaccraactataaaaaaaac

SEQ ID NO: 5407 - DNA, 50 bp, synthetic construct
  source 1..50: mol_type = other DNA
ctacctctataaaatttttaaaatcccaaataacrcccttcctacaaccc

SEQ ID NO: 5408 - DNA, 50 bp, synthetic construct
  source 1..50: mol_type = other DNA
aaaccaaatcctactaaaaccttaaacaatccaacactcaaacacaaaac

SEQ ID NO: 5409 - DNA, 50 bp, synthetic construct
  source 1..50: mol_type = other DNA
aaaacctaactcataactaaaaatttaaaaaataaaacttacccttccac

SEQ ID NO: 5410 - DNA, 50 bp, synthetic construct
  source 1..50: mol_type = other DNA
ctatcactataatcaaatccacccaatacccaaaactaacccccaaaaac

SEQ ID NO: 5411 - DNA, 50 bp, synthetic construct
  source 1..50: mol_type = other DNA
aatcraaaatacaataaactataattacaccactacaccccaacctaaac

SEQ ID NO: 5412 - DNA, 50 bp, synthetic construct
  source 1..50: mol_type = other DNA
taaacttattttaaaaaatattcttttcaaaactaaacacaataaatcac

SEQ ID NO: 5413 - DNA, 50 bp, synthetic construct
  source 1..50: mol_type = other DNA
aataaatactaccctatacctaccracttcctacaaaaatctataaactc

SEQ ID NO: 5414 - DNA, 50 bp, synthetic construct
  source 1..50: mol_type = other DNA
acccccaaccaccacttacataaaaaacattttataacctactttctaac

SEQ ID NO: 5415 - DNA, 50 bp, synthetic construct
  source 1..50: mol_type = other DNA
tcccatataaataataactaaaaataatcaaaaaacctaattacaacccc

SEQ ID NO: 5416 - DNA, 50 bp, synthetic construct
  source 1..50: mol_type = other DNA
ataaaactaccctaaactcccaaaaaaaacactaaactaaataaataaac

SEQ ID NO: 5417 - DNA, 50 bp, synthetic construct
  source 1..50: mol_type = other DNA
aaaacactaaactaaataaataaacrctcttcaaaaaataaattcctccc

SEQ ID NO: 5418 - DNA, 50 bp, synthetic construct
  source 1..50: mol_type = other DNA
caactcctaatctcttaaatataataactccaaaatctcaaaacccaatc

SEQ ID NO: 5419 - DNA, 50 bp, synthetic construct
  source 1..50: mol_type = other DNA
ctcctaatctcttaaatataataactccaaaatctcaaaacccaatcrcc

SEQ ID NO: 5420 - DNA, 50 bp, synthetic construct
  source 1..50: mol_type = other DNA
aataatttccraccaacacaaacaaaaccaaacaaaaaatcccctaaaac

SEQ ID NO: 5421 - DNA, 50 bp, synthetic construct
  source 1..50: mol_type = other DNA
aaaatcccctaaaacracrcaacaaaaaaaccaccaaatataacccatac

SEQ ID NO: 5422 - DNA, 50 bp, synthetic construct
  source 1..50: mol_type = other DNA
ctccctaccttatcctcaactaaaacctaaaataaattataaactaaacc

SEQ ID NO: 5423 - DNA, 50 bp, synthetic construct
  source 1..50: mol_type = other DNA
aaattaaccccacacccaaacctacactactaactccaaacaaaaactac

SEQ ID NO: 5424 - DNA, 50 bp, synthetic construct
  source 1..50: mol_type = other DNA
acaaactatatactctaaaaaaaccctaaaattccaaaacaaaacccacc

SEQ ID NO: 5425 - DNA, 50 bp, synthetic construct
  source 1..50: mol_type = other DNA
taaaaaccractaacaaaataaactaccccaaactctctaaccaataaac

SEQ ID NO: 5426 - DNA, 50 bp, synthetic construct
  source 1..50: mol_type = other DNA
caaaaaaattacatactaactaacaaaactaaaactaaacactaaaaacc

SEQ ID NO: 5427 - DNA, 50 bp, synthetic construct
  source 1..50: mol_type = other DNA
ctcaatcccaactctaccaaccaacatataatttttctacctataaaaac

SEQ ID NO: 5428 - DNA, 50 bp, synthetic construct
  source 1..50: mol_type = other DNA
ccaaccaacatataatttttctacctataaaaacrtaaaccacctaaacc

SEQ ID NO: 5429 - DNA, 50 bp, synthetic construct
  source 1..50: mol_type = other DNA
caattatttattccttctctcctaacaaaaaccaaccacacccaaatacc

SEQ ID NO: 5430 - DNA, 50 bp, synthetic construct
  source 1..50: mol_type = other DNA
aataaaacacaacaacrctaacctctaaaacaaaacccaactaaacaaac

SEQ ID NO: 5431 - DNA, 50 bp, synthetic construct
  source 1..50: mol_type = other DNA
cctattacacratctaaaaaaataaatactaaaacttaaaaatcacctac

SEQ ID NO: 5432 - DNA, 50 bp, synthetic construct
  source 1..50: mol_type = other DNA
ataatactcaacaataactcaacaaaaactaaacttcraaaactcaactc

SEQ ID NO: 5433 - DNA, 50 bp, synthetic construct
  source 1..50: mol_type = other DNA
tcracaacratatataaacaaacctaataaactactaattactaaataac

SEQ ID NO: 5434 - DNA, 50 bp, synthetic construct
  source 1..50: mol_type = other DNA
ttccaaacctaactaaacaactctaaacttatcaaactctaacccatccc

SEQ ID NO: 5435 - DNA, 50 bp, synthetic construct
  source 1..50: mol_type = other DNA
cratctcractcaattctaaaaatattaataactcrattaaaaacttacc

SEQ ID NO: 5436 - DNA, 50 bp, synthetic construct
  source 1..50: mol_type = other DNA
ccccaaacatttttccratctcractcaattctaaaaatattaataactc

SEQ ID NO: 5437 - DNA, 50 bp, synthetic construct
  source 1..50: mol_type = other DNA
tacacccrataaactcttaaccraactattaatatttccaaaattaaacc

SEQ ID NO: 5438 - DNA, 50 bp, synthetic construct
  source 1..50: mol_type = other DNA
aaaacrcataaaatatatttaccctccrcrtaaaaattctatttaaaaac

SEQ ID NO: 5439 - DNA, 50 bp, synthetic construct
  source 1..50: mol_type = other DNA
atataaccaaatctataaatcaaatacacaattaaataatttcacccaac

SEQ ID NO: 5440 - DNA, 50 bp, synthetic construct
  source 1..50: mol_type = other DNA
cacaattaaataatttcacccaacraaaaactataacaaaataaacccac

SEQ ID NO: 5441 - DNA, 50 bp, synthetic construct
  source 1..50: mol_type = other DNA
aaattattcttatatcacaaaacaaaataatctaacatacacacttcccc

SEQ ID NO: 5442 - DNA, 50 bp, synthetic construct
  source 1..50: mol_type = other DNA
acttcccataaactatataaaccttataacttccttaaaatctaaaaacc

SEQ ID NO: 5443 - DNA, 50 bp, synthetic construct
  source 1..50: mol_type = other DNA
acataaattcacacacatataaacacacactcataaatataaaataatac

SEQ ID NO: 5444 - DNA, 50 bp, synthetic construct
  source 1..50: mol_type = other DNA
cacacatacaaacactcacacacataaatataaataatacactcatacac

SEQ ID NO: 5445 - DNA, 50 bp, synthetic construct
  source 1..50: mol_type = other DNA
atacataaacacacacacactcataaatacraaataatacactcacacac

SEQ ID NO: 5446 - DNA, 50 bp, synthetic construct
  source 1..50: mol_type = other DNA
atacacrtaaaataatatacacacaaaactccaaaactaacatcaaaaac

SEQ ID NO: 5447 - DNA, 50 bp, synthetic construct
  source 1..50: mol_type = other DNA
ttactacaatcraacrtacaaaactctctcaacttttctactaacaaacc

SEQ ID NO: 5448 - DNA, 50 bp, synthetic construct
  source 1..50: mol_type = other DNA
raaacrattactaaacaacaaaaaaacrtaaacrcaaccaaaataaccac

SEQ ID NO: 5449 - DNA, 50 bp, synthetic construct
  source 1..50: mol_type = other DNA
aaaaaacrataaaatccacacccraaacrattactaaacaacaaaaaaac

SEQ ID NO: 5450 - DNA, 50 bp, synthetic construct
  source 1..50: mol_type = other DNA
caaacaaaaactctactcatataaacctaacacacattacataaacaaac

SEQ ID NO: 5451 - DNA, 50 bp, synthetic construct
  source 1..50: mol_type = other DNA
aaaactaaaactctaaccaaacctttctcctcacccctcaaataccaatc

SEQ ID NO: 5452 - DNA, 50 bp, synthetic construct
  source 1..50: mol_type = other DNA
aataactcccaaccataattaacacaaaacaaaaacaacaaatactaatc

SEQ ID NO: 5453 - DNA, 50 bp, synthetic construct
  source 1..50: mol_type = other DNA
aattaacacaaaacaaaaacaacaaatactaatcratataataaactcac

SEQ ID NO: 5454 - DNA, 50 bp, synthetic construct
  source 1..50: mol_type = other DNA
aaaacttaaatcaaattctacacraacaccaaacaataaacctacaaaac

SEQ ID NO: 5455 - DNA, 50 bp, synthetic construct
  source 1..50: mol_type = other DNA
tattcraatacccttcaaaaaataaataattaacaaactataatacaccc

SEQ ID NO: 5456 - DNA, 50 bp, synthetic construct
  source 1..50: mol_type = other DNA
tccacraatataccacaatttattaatcatttaccccctaaaaaacatcc

SEQ ID NO: 5457 - DNA, 50 bp, synthetic construct
  source 1..50: mol_type = other DNA
ctaaatcatatactaatcacatacttaattttttaaaaaactaccaaacc

SEQ ID NO: 5458 - DNA, 50 bp, synthetic construct
  source 1..50: mol_type = other DNA
tcacatacttaattttttaaaaaactaccaaaccrttttacaaaataacc

SEQ ID NO: 5459 - DNA, 50 bp, synthetic construct
  source 1..50: mol_type = other DNA
ttcatttccrttttaacaaaataactaacttaaaaaatcaacacaaaaac

SEQ ID NO: 5460 - DNA, 50 bp, synthetic construct
  source 1..50: mol_type = other DNA
actctcccaaactcactcaatacaaacratatctaacacatttcatttcc

SEQ ID NO: 5461 - DNA, 50 bp, synthetic construct
  source 1..50: mol_type = other DNA
cctccaaaccaatcaccctaccaaaacraaaataaaatataccaaacacc

SEQ ID NO: 5462 - DNA, 50 bp, synthetic construct
  source 1..50: mol_type = other DNA
aaataaaatataccaaacaccrcttatactaaataaacttaaaaaaactc

SEQ ID NO: 5463 - DNA, 50 bp, synthetic construct
  source 1..50: mol_type = other DNA
aaataaacttaaaaaaactcrtaataaataccaattacttccctacctcc

SEQ ID NO: 5464 - DNA, 50 bp, synthetic construct
  source 1..50: mol_type = other DNA
acaacaaataaactaatataaccaaaacaccaaacaaaaaaactccaaac

SEQ ID NO: 5465 - DNA, 50 bp, synthetic construct
  source 1..50: mol_type = other DNA
ctaaccacatcaactcatttactataaaactataaacaaacccctcaacc

SEQ ID NO: 5466 - DNA, 50 bp, synthetic construct
  source 1..50: mol_type = other DNA
acaatttaactaatataaacraaacacaaaaaaaatctcracaatccacc

SEQ ID NO: 5467 - DNA, 50 bp, synthetic construct
  source 1..50: mol_type = other DNA
aaataacctaaaaaacacrcrataaattaccraaaccttctttatacctc

SEQ ID NO: 5468 - DNA, 50 bp, synthetic construct
  source 1..50: mol_type = other DNA
ccatatatatataaaccaaaatccaccctcttttccatttaaaaaatcac

SEQ ID NO: 5469 - DNA, 50 bp, synthetic construct
  source 1..50: mol_type = other DNA
acrcatattatttccrtaaatactatccacaaaaaaaacrcctcaaaaac

SEQ ID NO: 5470 - DNA, 50 bp, synthetic construct
  source 1..50: mol_type = other DNA
aaaaacacaacrcaaaatctacraaattcrtactaaaaattacccaaatc

SEQ ID NO: 5471 - DNA, 50 bp, synthetic construct
  source 1..50: mol_type = other DNA
aaaaaattaaccaaactctacaaaaaaatctaactacttctcaatacccc

SEQ ID NO: 5472 - DNA, 50 bp, synthetic construct
  source 1..50: mol_type = other DNA
caaaaaaatctaactacttctcaataccccrcctctactaaaaacatatc

SEQ ID NO: 5473 - DNA, 50 bp, synthetic construct
  source 1..50: mol_type = other DNA
actaaacaacataaaaaaacctcrtcaaaacaaaaaattaacctaatatc

SEQ ID NO: 5474 - DNA, 50 bp, synthetic construct
  source 1..50: mol_type = other DNA
cctttctttccttttctttcttttcttaataaacaaaatctaactctatc

SEQ ID NO: 5475 - DNA, 50 bp, synthetic construct
  source 1..50: mol_type = other DNA
cctctttatacaaaaacaacaaaactcactaataataacttctacccatc

SEQ ID NO: 5476 - DNA, 50 bp, synthetic construct
  source 1..50: mol_type = other DNA
aaaaaaaacataaacaaatacaaacatattatcttactcaacactcaacc

SEQ ID NO: 5477 - DNA, 50 bp, synthetic construct
  source 1..50: mol_type = other DNA
aacattaataaaatctacaatcatctctacaaaatcccaactaaacaccc

SEQ ID NO: 5478 - DNA, 50 bp, synthetic construct
  source 1..50: mol_type = other DNA
ttcatttcttactcaatttattaaaacaaaccttacrcttaaccaacatc

SEQ ID NO: 5479 - DNA, 50 bp, synthetic construct
  source 1..50: mol_type = other DNA
ctcaacaaaattcaaacaaacatcacaattaattccaaaaatcctctctc

SEQ ID NO: 5480 - DNA, 50 bp, synthetic construct
  source 1..50: mol_type = other DNA
acttttttatctttttccaaaaaacataaataatcaaactctctcaattc

SEQ ID NO: 5481 - DNA, 50 bp, synthetic construct
  source 1..50: mol_type = other DNA
aaaaaccracctaaccaaaaacaaatttcacttcctcctttctaaataac

SEQ ID NO: 5482 - DNA, 50 bp, synthetic construct
  source 1..50: mol_type = other DNA
aaaccaatttcactttatcaccacaaaatctaaccttacctcaaaaaacc

SEQ ID NO: 5483 - DNA, 50 bp, synthetic construct
  source 1..50: mol_type = other DNA
attaaattttataataataaaataaaactaattttacaatatccccaccc

SEQ ID NO: 5484 - DNA, 50 bp, synthetic construct
  source 1..50: mol_type = other DNA
taaaacaaccaattttcaaaatctcctaataaacracctaaaaaaaatcc

SEQ ID NO: 5485 - DNA, 50 bp, synthetic construct
  source 1..50: mol_type = other DNA
catcatcttaaccaaacttataaaaaccacaaacraatttctcccaaatc

SEQ ID NO: 5486 - DNA, 50 bp, synthetic construct
  source 1..50: mol_type = other DNA
ttctcccaaatcrtttattaaaaaaccctaaaaactaactattctattcc

SEQ ID NO: 5487 - DNA, 50 bp, synthetic construct
  source 1..50: mol_type = other DNA
aaccctaaaaactaactattctattccrcttatcatcacaaaactaccac

SEQ ID NO: 5488 - DNA, 50 bp, synthetic construct
  source 1..50: mol_type = other DNA
aactaactattctattccrcttatcatcacaaaactaccacratttctac

SEQ ID NO: 5489 - DNA, 50 bp, synthetic construct
  source 1..50: mol_type = other DNA
actaatataattatctaaaaatatatctacctatatacccaaaaaaaccc

SEQ ID NO: 5490 - DNA, 50 bp, synthetic construct
  source 1..50: mol_type = other DNA
aattatctaaaaatatatctacctatatacccaaaaaaacccrccctctc

SEQ ID NO: 5491 - DNA, 50 bp, synthetic construct
  source 1..50: mol_type = other DNA
aaccratttcctaaaacacttaaaaaccaaaaactaactaaaccccctac

SEQ ID NO: 5492 - DNA, 50 bp, synthetic construct
  source 1..50: mol_type = other DNA
aaccrcaaaaaactcaaccaactcctaaccctcaaatattctaaaaaacc

SEQ ID NO: 5493 - DNA, 50 bp, synthetic construct
  source 1..50: mol_type = other DNA
actctttataactaactacctaacaacctaaactcaaaacaattcctaac

SEQ ID NO: 5494 - DNA, 50 bp, synthetic construct
  source 1..50: mol_type = other DNA
ccttcraatataaaaataacccattaaaaacattttaacttaacctttac

SEQ ID NO: 5495 - DNA, 50 bp, synthetic construct
  source 1..50: mol_type = other DNA
crtaaattataatatctaactttatatcctcctctttttcaaataccttc

SEQ ID NO: 5496 - DNA, 50 bp, synthetic construct
  source 1..50: mol_type = other DNA
tttatatcctcctctttttcaaataccttcrtaaacaaccaaaaataaac

SEQ ID NO: 5497 - DNA, 50 bp, synthetic construct
  source 1..50: mol_type = other DNA
ctcctctttttcaaataccttcrtaaacaaccaaaaataaacrctaaatc

SEQ ID NO: 5498 - DNA, 50 bp, synthetic construct
  source 1..50: mol_type = other DNA
aaatacccctaaaacaactataacaaccataactaccactcaaccaaaac

SEQ ID NO: 5499 - DNA, 50 bp, synthetic construct
  source 1..50: mol_type = other DNA
atatctcatatacaaaacaaaaaccatcatcatcctctctctcacatctc

SEQ ID NO: 5500 - DNA, 50 bp, synthetic construct
  source 1..50: mol_type = other DNA
ttcaaaaataataaataccaaaacttaataactcataacaaaaaccttcc

SEQ ID NO: 5501 - DNA, 50 bp, synthetic construct
  source 1..50: mol_type = other DNA
tataactataacccccattctaccctctaaacataaatcacaaataacac

SEQ ID NO: 5502 - DNA, 50 bp, synthetic construct
  source 1..50: mol_type = other DNA
ctccctaactaaccttaaaaatataattcaataccrataacrattcaacc

SEQ ID NO: 5503 - DNA, 50 bp, synthetic construct
  source 1..50: mol_type = other DNA
aaacataaatcacaaataacacrcctaaaaataacatccacractaaatc

SEQ ID NO: 5504 - DNA, 50 bp, synthetic construct
  source 1..50: mol_type = other DNA
ctacacttccaaaattaatcaaaaaaactttcctttaacataacttaccc

SEQ ID NO: 5505 - DNA, 50 bp, synthetic construct
  source 1..50: mol_type = other DNA
aataaaaacaaaacaccaaacaaaccaaataaaacaaaacccaaaccacc

SEQ ID NO: 5506 - DNA, 50 bp, synthetic construct
  source 1..50: mol_type = other DNA
aaaaaaaccacaaacaaaaacacccaatttcccactatttccttaaaaac

SEQ ID NO: 5507 - DNA, 50 bp, synthetic construct
  source 1..50: mol_type = other DNA
caattacaaaacaaaaactaaaatcaaccaataaataaaccaaataaacc

SEQ ID NO: 5508 - DNA, 50 bp, synthetic construct
  source 1..50: mol_type = other DNA
taaaattaaaattaaaaataaaacrcaaccctaactaaaaaaccccaaac

SEQ ID NO: 5509 - DNA, 50 bp, synthetic construct
  source 1..50: mol_type = other DNA
aaaataacaactataataccctctaccttaatcctttataactatttccc

SEQ ID NO: 5510 - DNA, 50 bp, synthetic construct
  source 1..50: mol_type = other DNA
aaactaacaacaacaaaaatactctctctaactcaaaaccaaaatatatc

SEQ ID NO: 5511 - DNA, 50 bp, synthetic construct
  source 1..50: mol_type = other DNA
caaaaaaaacattcctactattattaacttaccaatttatttacccaaac

SEQ ID NO: 5512 - DNA, 50 bp, synthetic construct
  source 1..50: mol_type = other DNA
aacaaccaaccttccccaacaattaaataaccataataaaacaaaaaaac

SEQ ID NO: 5513 - DNA, 50 bp, synthetic construct
  source 1..50: mol_type = other DNA
attcctaaacaaaacacttccacttactacctattccactactcaaattc

SEQ ID NO: 5514 - DNA, 50 bp, synthetic construct
  source 1..50: mol_type = other DNA
ctactctatctactccttattccatttctatttaaataacrcctactcac

SEQ ID NO: 5515 - DNA, 50 bp, synthetic construct
  source 1..50: mol_type = other DNA
aaacrccaccctactctatctactccttattccatttctatttaaataac

SEQ ID NO: 5516 - DNA, 50 bp, synthetic construct
  source 1..50: mol_type = other DNA
taaccaactctaaataaattctaattcactatcaatactaaattactccc

SEQ ID NO: 5517 - DNA, 50 bp, synthetic construct
  source 1..50: mol_type = other DNA
atacaactataactctaaacaaaaaacccrcraaacaaaccaaatactac

SEQ ID NO: 5518 - DNA, 50 bp, synthetic construct
  source 1..50: mol_type = other DNA
aaccaaactctacraaaaaatacaactataactctaaacaaaaaacccrc

SEQ ID NO: 5519 - DNA, 50 bp, synthetic construct
  source 1..50: mol_type = other DNA
aaaaccaaactctacraaaaaatacaactataactctaaacaaaaaaccc

SEQ ID NO: 5520 - DNA, 50 bp, synthetic construct
  source 1..50: mol_type = other DNA
aaaaaatacttatccctaaccaacttccctaaatccctattactaataac

SEQ ID NO: 5521 - DNA, 50 bp, synthetic construct
  source 1..50: mol_type = other DNA
aaaccaccaaatatcraaaatattcaatacaataaataaatcacrtcccc

SEQ ID NO: 5522 - DNA, 50 bp, synthetic construct
  source 1..50: mol_type = other DNA
caaactaaaccaccaaatatcraaaatattcaatacaataaataaatcac

SEQ ID NO: 5523 - DNA, 50 bp, synthetic construct
  source 1..50: mol_type = other DNA
caaaaattactattcataaaaacttcraccaaactaaaccaccaaatatc

SEQ ID NO: 5524 - DNA, 50 bp, synthetic construct
  source 1..50: mol_type = other DNA
taataattcaatttaaccraaatttccataaacaacaacttctaactatc

SEQ ID NO: 5525 - DNA, 50 bp, synthetic construct
  source 1..50: mol_type = other DNA
tactattaaaaataaaccaaatatccttaaaaaactctcttataaacaac

SEQ ID NO: 5526 - DNA, 50 bp, synthetic construct
  source 1..50: mol_type = other DNA
aaaaaaaatcaaactcctaaaaaaaccrtaatatacccaaactataacac

SEQ ID NO: 5527 - DNA, 50 bp, synthetic construct
  source 1..50: mol_type = other DNA
acctaaaataaccacaaaaaccaatttattcacaaacaaacaaaaacctc

SEQ ID NO: 5528 - DNA, 50 bp, synthetic construct
  source 1..50: mol_type = other DNA
acccctacttatctataaacaaactaacctttataaccacttcaaacttc

SEQ ID NO: 5529 - DNA, 50 bp, synthetic construct
  source 1..50: mol_type = other DNA
ctttataaccacttcaaacttcractacatcatattcctatcacattcac

SEQ ID NO: 5530 - DNA, 50 bp, synthetic construct
  source 1..50: mol_type = other DNA
aaaattctcctattaattacacacattcattttcrcctccaaattttaac

SEQ ID NO: 5531 - DNA, 50 bp, synthetic construct
  source 1..50: mol_type = other DNA
ataatactactactttttcacttctctacttaacrctaaaacctaaaaac

SEQ ID NO: 5532 - DNA, 50 bp, synthetic construct
  source 1..50: mol_type = other DNA
ttaataaaaaaacttcctcctatttacaaaatactttacaactaacaaac

SEQ ID NO: 5533 - DNA, 50 bp, synthetic construct
  source 1..50: mol_type = other DNA
ttacaaaatactttacaactaacaaacracttctctccctaaacaacccc

SEQ ID NO: 5534 - DNA, 50 bp, synthetic construct
  source 1..50: mol_type = other DNA
aaaactaaaccataaacaacaactctcctcaaatatcaaataaaaataac

SEQ ID NO: 5535 - DNA, 50 bp, synthetic construct
  source 1..50: mol_type = other DNA
ttcataatccaatcctctatccattaacccactaaatatccctaatatac

SEQ ID NO: 5536 - DNA, 50 bp, synthetic construct
  source 1..50: mol_type = other DNA
cattaacccactaaatatccctaatatacrctaacaaactcctaacaaac

SEQ ID NO: 5537 - DNA, 50 bp, synthetic construct
  source 1..50: mol_type = other DNA
aaaaaacccaaaacatacaactcatatacaaattcrtaactaccataccc

SEQ ID NO: 5538 - DNA, 50 bp, synthetic construct
  source 1..50: mol_type = other DNA
ccccrcaaaacccaaaaaaaacccaaaacatacaactcatatacaaattc

SEQ ID NO: 5539 - DNA, 50 bp, synthetic construct
  source 1..50: mol_type = other DNA
ccacraatctacacataaactatataccctaaatctcccctaaactctac

SEQ ID NO: 5540 - DNA, 50 bp, synthetic construct
  source 1..50: mol_type = other DNA
aaactaaaaaaaccctacaacctaaaaaacaccrcatataaaccaaaaac

SEQ ID NO: 5541 - DNA, 50 bp, synthetic construct
  source 1..50: mol_type = other DNA
acaaaaaccctaactactaacaaaaaaacaacaaatactacraaaaactc

SEQ ID NO: 5542 - DNA, 50 bp, synthetic construct
  source 1..50: mol_type = other DNA
aactaaaaccatacraaaataaaaacacatataaactaaaccaaaaaaac

SEQ ID NO: 5543 - DNA, 50 bp, synthetic construct
  source 1..50: mol_type = other DNA
aaaaataataaccrtcccttcttccraatcaaaaaactcaaaaacaaccc

SEQ ID NO: 5544 - DNA, 50 bp, synthetic construct
  source 1..50: mol_type = other DNA
atctttaaataactatcttcttataactaaaaatctctaaaactctaaac

SEQ ID NO: 5545 - DNA, 50 bp, synthetic construct
  source 1..50: mol_type = other DNA
caaaaaaccctaaaaaactctaattctaaacaaaaccacacaacaaaaac

SEQ ID NO: 5546 - DNA, 50 bp, synthetic construct
  source 1..50: mol_type = other DNA
aaacatcaaaataaaaactaactcattcaaacaaaaccacatataaactc

SEQ ID NO: 5547 - DNA, 50 bp, synthetic construct
  source 1..50: mol_type = other DNA
tcctaaaaattatactctataaacatctattactacccaatacrtaatac

SEQ ID NO: 5548 - DNA, 50 bp, synthetic construct
  source 1..50: mol_type = other DNA
acaactaacaaaactaaaaaataaaaccaaattaaaacttttaaattcac

SEQ ID NO: 5549 - DNA, 50 bp, synthetic construct
  source 1..50: mol_type = other DNA
aatcctaatttaaccccatctcctaattttatcaattacctaacccaacc

SEQ ID NO: 5550 - DNA, 50 bp, synthetic construct
  source 1..50: mol_type = other DNA
taattttatcaattacctaacccaaccrtctttatttccttctaaccctc

SEQ ID NO: 5551 - DNA, 50 bp, synthetic construct
  source 1..50: mol_type = other DNA
aaaacraaaacacttaactttatccaccctccccactaaaaactaaacac

SEQ ID NO: 5552 - DNA, 50 bp, synthetic construct
  source 1..50: mol_type = other DNA
ataaatctcacctctatacccccaacacataacaaatactcaacacattc

SEQ ID NO: 5553 - DNA, 50 bp, synthetic construct
  source 1..50: mol_type = other DNA
ctctatacccccaacacataacaaatactcaacacattcrcraaaaaaac

SEQ ID NO: 5554 - DNA, 50 bp, synthetic construct
  source 1..50: mol_type = other DNA
tcttcrattacccraatatattcaaacatcttttacttttccactaaacc

SEQ ID NO: 5555 - DNA, 50 bp, synthetic construct
  source 1..50: mol_type = other DNA
ratactactatccacrattacaacccaatttccaaaaacrtataaacttc

SEQ ID NO: 5556 - DNA, 50 bp, synthetic construct
  source 1..50: mol_type = other DNA
aaaaaaacttaacaaaaaaaactataacaaaactacacaacctaccctac

SEQ ID NO: 5557 - DNA, 50 bp, synthetic construct
  source 1..50: mol_type = other DNA
caacctaccctacrttaaaattaataatctctataactttttccacttac

SEQ ID NO: 5558 - DNA, 50 bp, synthetic construct
  source 1..50: mol_type = other DNA
ctaaaaaaacrattaaaaaacrtaactactaaccttacctattaacraac

SEQ ID NO: 5559 - DNA, 50 bp, synthetic construct
  source 1..50: mol_type = other DNA
tactaaccttacctattaacraacrctataattacracataaaaaataac

SEQ ID NO: 5560 - DNA, 50 bp, synthetic construct
  source 1..50: mol_type = other DNA
tccccacatattatcctttcctattacaaataaaatactttaataataac

SEQ ID NO: 5561 - DNA, 50 bp, synthetic construct
  source 1..50: mol_type = other DNA
aaaaacaaataccaactctaatattaactcaaattaaaatcatatcatac

SEQ ID NO: 5562 - DNA, 50 bp, synthetic construct
  source 1..50: mol_type = other DNA
tctaatattaactcaaattaaaatcatatcatacrttttaaacaaaaatc

SEQ ID NO: 5563 - DNA, 50 bp, synthetic construct
  source 1..50: mol_type = other DNA
rcaaaaaaaaattatattcrcattcccctcttatcaaactacrtataatc

SEQ ID NO: 5564 - DNA, 50 bp, synthetic construct
  source 1..50: mol_type = other DNA
aaacraaacataacaaacaccaccttaatcaaataacraaaataaatatc

SEQ ID NO: 5565 - DNA, 50 bp, synthetic construct
  source 1..50: mol_type = other DNA
aataactttacraaaacraaacataacaaacaccaccttaatcaaataac

SEQ ID NO: 5566 - DNA, 50 bp, synthetic construct
  source 1..50: mol_type = other DNA
tactcacttccrttatttaattaaaataatacctaccatatttcrctccc

SEQ ID NO: 5567 - DNA, 50 bp, synthetic construct
  source 1..50: mol_type = other DNA
aaaacaaaaataacttaaaacaactctcaataaacaaactaaaacaatac

SEQ ID NO: 5568 - DNA, 50 bp, synthetic construct
  source 1..50: mol_type = other DNA
taatcattctataaacaactcctcactttctcctataacaaaatattctc

SEQ ID NO: 5569 - DNA, 50 bp, synthetic construct
  source 1..50: mol_type = other DNA
catcacaaaataatttaaacaaaaaaacacaccaaacttaaaaatcaaac

SEQ ID NO: 5570 - DNA, 50 bp, synthetic construct
  source 1..50: mol_type = other DNA
aaactacttaaaaacaaaatattttataatcaccaaataaaatccatttc

SEQ ID NO: 5571 - DNA, 50 bp, synthetic construct
  source 1..50: mol_type = other DNA
ttccctaaaatctcttacaaaatctttctctaaaaaactcaatacctccc

SEQ ID NO: 5572 - DNA, 50 bp, synthetic construct
  source 1..50: mol_type = other DNA
ctactacrtaaccacaaaaaaacratacatacaataaattttatcaacac

SEQ ID NO: 5573 - DNA, 50 bp, synthetic construct
  source 1..50: mol_type = other DNA
rtataacttacctttaaaatatatcacctactacrtaaccacaaaaaaac

SEQ ID NO: 5574 - DNA, 50 bp, synthetic construct
  source 1..50: mol_type = other DNA
accaaacrcaaaatccrtataacttacctttaaaatatatcacctactac

SEQ ID NO: 5575 - DNA, 50 bp, synthetic construct
  source 1..50: mol_type = other DNA
rccctcttataatcacrcaacaaataacacacttcaaaaacaaattacac

SEQ ID NO: 5576 - DNA, 50 bp, synthetic construct
  source 1..50: mol_type = other DNA
aaataaaaaaatattcaaaaacrcttttcctaacaaaaaacctattcccc

SEQ ID NO: 5577 - DNA, 50 bp, synthetic construct
  source 1..50: mol_type = other DNA
ttctctattaaaaaaaacrtttctaaacattcctttattcacatatacac

SEQ ID NO: 5578 - DNA, 50 bp, synthetic construct
  source 1..50: mol_type = other DNA
aaaaaaaacctcaatacataaacttataaaaccrtactatccaaaaatcc

SEQ ID NO: 5579 - DNA, 50 bp, synthetic construct
  source 1..50: mol_type = other DNA
ctctaacatataaatctaactatctctcacrtacaatctcctccctatac

SEQ ID NO: 5580 - DNA, 50 bp, synthetic construct
  source 1..50: mol_type = other DNA
tatacrtaaaaaaaattctactctaacacrcraatctaactatctctcac

SEQ ID NO: 5581 - DNA, 50 bp, synthetic construct
  source 1..50: mol_type = other DNA
aaattcactatcaaactataaccaaaaaacaatcaaaacaaaacaaaacc

SEQ ID NO: 5582 - DNA, 50 bp, synthetic construct
  source 1..50: mol_type = other DNA
acttcctaaccacaacctaataataaacttatatctacacttattcttac

SEQ ID NO: 5583 - DNA, 50 bp, synthetic construct
  source 1..50: mol_type = other DNA
aactctacctataactccattcctatacrcatacatttaaatacataatc

SEQ ID NO: 5584 - DNA, 50 bp, synthetic construct
  source 1..50: mol_type = other DNA
aactcctcacaactatcaccaaaactctacctataactccattcctatac

SEQ ID NO: 5585 - DNA, 50 bp, synthetic construct
  source 1..50: mol_type = other DNA
acrtttcrtaacctaaacttaataattataactccaaaccacaaaaaacc

SEQ ID NO: 5586 - DNA, 50 bp, synthetic construct
  source 1..50: mol_type = other DNA
aactaatcrtttacaaaacttcaaaccctatcaccaaactaaaacrtttc

SEQ ID NO: 5587 - DNA, 50 bp, synthetic construct
  source 1..50: mol_type = other DNA
aataaaactaatcrtttacaaaacttcaaaccctatcaccaaactaaaac

SEQ ID NO: 5588 - DNA, 50 bp, synthetic construct
  source 1..50: mol_type = other DNA
ctcatatcaactaacaaaatactacatccraacaaaactaaacccctaac

SEQ ID NO: 5589 - DNA, 50 bp, synthetic construct
  source 1..50: mol_type = other DNA
aaaaatcacrtaactcatctactcatatcaactaacaaaatactacatcc

SEQ ID NO: 5590 - DNA, 50 bp, synthetic construct
  source 1..50: mol_type = other DNA
aacaccctaccaactaacataaacaaataaaccacrtaactttcaataac

SEQ ID NO: 5591 - DNA, 50 bp, synthetic construct
  source 1..50: mol_type = other DNA
cacacataaaacrtaactaaattaactcrtaaacctaaaacaaactaacc

SEQ ID NO: 5592 - DNA, 50 bp, synthetic construct
  source 1..50: mol_type = other DNA
cctttctaatataataaaataccacacataaaacrtaactaaattaactc

SEQ ID NO: 5593 - DNA, 50 bp, synthetic construct
  source 1..50: mol_type = other DNA
aaaaaccttcatatttcctttctaatataataaaataccacacataaaac

SEQ ID NO: 5594 - DNA, 50 bp, synthetic construct
  source 1..50: mol_type = other DNA
aataattctatctattatttctaaaaatcatacttatctttcataactac

SEQ ID NO: 5595 - DNA, 50 bp, synthetic construct
  source 1..50: mol_type = other DNA
ccccaaaaataacaaacaaaaccatccrtctaaaatactactacaatcac

SEQ ID NO: 5596 - DNA, 50 bp, synthetic construct
  source 1..50: mol_type = other DNA
tacraatatatacccctaaccacaaaattacacrtaaaaaaccaacacac

SEQ ID NO: 5597 - DNA, 50 bp, synthetic construct
  source 1..50: mol_type = other DNA
atatatacccctaaccacaaaattacacrtaaaaaaccaacacacrctac

SEQ ID NO: 5598 - DNA, 50 bp, synthetic construct
  source 1..50: mol_type = other DNA
aaaccctatacttaaacaattataaatcatttacttacctcttaatttac

SEQ ID NO: 5599 - DNA, 50 bp, synthetic construct
  source 1..50: mol_type = other DNA
aaaacccaaacttactaattcaccaaaaaacractttatataccraaaac

SEQ ID NO: 5600 - DNA, 50 bp, synthetic construct
  source 1..50: mol_type = other DNA
tacctattaataaaattaaaatctactatcactccrtaaaccataacatc

SEQ ID NO: 5601 - DNA, 50 bp, synthetic construct
  source 1..50: mol_type = other DNA
acraccctacattactacctattaataaaattaaaatctactatcactcc

SEQ ID NO: 5602 - DNA, 50 bp, synthetic construct
  source 1..50: mol_type = other DNA
acaaacaaaaacrataactactattcttccatatatatccccctcrtaac

SEQ ID NO: 5603 - DNA, 50 bp, synthetic construct
  source 1..50: mol_type = other DNA
accrtacaaacaaaaacrataactactattcttccatatatatccccctc

SEQ ID NO: 5604 - DNA, 50 bp, synthetic construct
  source 1..50: mol_type = other DNA
caatacaaaaccrccacraaaaaaacacacataaaaaaacaacaaccacc

SEQ ID NO: 5605 - DNA, 50 bp, synthetic construct
  source 1..50: mol_type = other DNA
ttaaaaataatatcctttaaaaattcctacaaaaattccrttttttattc

SEQ ID NO: 5606 - DNA, 50 bp, synthetic construct
  source 1..50: mol_type = other DNA
aataatatcctttaaaaataatatcctttaaaaattcctacaaaaattcc

SEQ ID NO: 5607 - DNA, 50 bp, synthetic construct
  source 1..50: mol_type = other DNA
taaaaaacaataaccataaaaaactataacaataaaaacaacacacracc

SEQ ID NO: 5608 - DNA, 50 bp, synthetic construct
  source 1..50: mol_type = other DNA
taaccataaaaaactataacaataaaaacaacacacraccrcaacctccc

SEQ ID NO: 5609 - DNA, 50 bp, synthetic construct
  source 1..50: mol_type = other DNA
tcaatatcttctaacataaatcacccatttttatatttattattaatttc

SEQ ID NO: 5610 - DNA, 50 bp, synthetic construct
  source 1..50: mol_type = other DNA
crtcttaaacctaataccaatatcttcaaactaaccaaaacrccttactc

SEQ ID NO: 5611 - DNA, 50 bp, synthetic construct
  source 1..50: mol_type = other DNA
craccacaccrtcttaaacctaataccaatatcttcaaactaaccaaaac

SEQ ID NO: 5612 - DNA, 50 bp, synthetic construct
  source 1..50: mol_type = other DNA
craacaaaacrccctaatcaacctaaaaacactaacactaaatctaaaac

SEQ ID NO: 5613 - DNA, 50 bp, synthetic construct
  source 1..50: mol_type = other DNA
taaaaacactaacactaaatctaaaacratataaccrtactaaaaatcac

SEQ ID NO: 5614 - DNA, 50 bp, synthetic construct
  source 1..50: mol_type = other DNA
actctcaaacataatattataaacattcttttatatattttctaacacac

SEQ ID NO: 5615 - DNA, 50 bp, synthetic construct
  source 1..50: mol_type = other DNA
cttaacatctactcatcaaaccttaaaatataacataaaactaaaacttc

SEQ ID NO: 5616 - DNA, 50 bp, synthetic construct
  source 1..50: mol_type = other DNA
cctctataaatacctaacctactcttcttccatccttaaaaatcaaaaac

SEQ ID NO: 5617 - DNA, 50 bp, synthetic construct
  source 1..50: mol_type = other DNA
taaaatcaaataaattaaatcctaacctaactcctccacctaccatttac

SEQ ID NO: 5618 - DNA, 50 bp, synthetic construct
  source 1..50: mol_type = other DNA
aacaaaataaaacaacrccccrtaaactaacctaactaaaacccaacttc

SEQ ID NO: 5619 - DNA, 50 bp, synthetic construct
  source 1..50: mol_type = other DNA
ccaactccatataataaataatcaatacccatttaacaaaataaaacaac

SEQ ID NO: 5620 - DNA, 50 bp, synthetic construct
  source 1..50: mol_type = other DNA
tactactttaaccaaaaaaatccacctaatataatactataaaaaattcc

SEQ ID NO: 5621 - DNA, 50 bp, synthetic construct
  source 1..50: mol_type = other DNA
acattttaaattctactctctaaatcacaaacctcctaatttcttatttc

SEQ ID NO: 5622 - DNA, 50 bp, synthetic construct
  source 1..50: mol_type = other DNA
aaaaatctaactattataaaacrccaacatccttcaaaaacataaaaatc

SEQ ID NO: 5623 - DNA, 50 bp, synthetic construct
  source 1..50: mol_type = other DNA
atttcttatttcraaaaccctcratttccatacctttaaaaaatactaac

SEQ ID NO: 5624 - DNA, 50 bp, synthetic construct
  source 1..50: mol_type = other DNA
atttccatacctttaaaaaatactaacrtttcataacaatcaaacttctc

SEQ ID NO: 5625 - DNA, 50 bp, synthetic construct
  source 1..50: mol_type = other DNA
rttacatctaattaaccactattttatcttccaacaatacttaaactttc

SEQ ID NO: 5626 - DNA, 50 bp, synthetic construct
  source 1..50: mol_type = other DNA
tccaaacttcraataaacrctatccctaaaaaaatatcccaaataaaatc

SEQ ID NO: 5627 - DNA, 50 bp, synthetic construct
  source 1..50: mol_type = other DNA
acaaatataaacataacctataataataacaacaattttaatcactactc

SEQ ID NO: 5628 - DNA, 50 bp, synthetic construct
  source 1..50: mol_type = other DNA
aactctaaccctatacaactctaccaacaactaatcctcctaaaaaaaac

SEQ ID NO: 5629 - DNA, 50 bp, synthetic construct
  source 1..50: mol_type = other DNA
ctaactcaatccaaataaaaaacaataaatacattcaatataacaaaaac

SEQ ID NO: 5630 - DNA, 50 bp, synthetic construct
  source 1..50: mol_type = other DNA
tttctatcacactaaatacatttactatttcccatttaaactaaaccaac

SEQ ID NO: 5631 - DNA, 50 bp, synthetic construct
  source 1..50: mol_type = other DNA
tacatttactatttcccatttaaactaaaccaacraaacactaaaaccac

SEQ ID NO: 5632 - DNA, 50 bp, synthetic construct
  source 1..50: mol_type = other DNA
ctaaaccaaatctaaaaatacctccaaaaaaaatcttcaaccactaactc

SEQ ID NO: 5633 - DNA, 50 bp, synthetic construct
  source 1..50: mol_type = other DNA
ataatattctaaaaccactaaactaacacraaactaaacrctctatcctc

SEQ ID NO: 5634 - DNA, 50 bp, synthetic construct
  source 1..50: mol_type = other DNA
aaaacrtaactataatattctaaaaccactaaactaacacraaactaaac

SEQ ID NO: 5635 - DNA, 50 bp, synthetic construct
  source 1..50: mol_type = other DNA
aataactcttaaaatatcccraaaactactaaaccttaaacaaaaaaaac

SEQ ID NO: 5636 - DNA, 50 bp, synthetic construct
  source 1..50: mol_type = other DNA
ccacaaaaaaataaaactatctctaataacaataccrctatcactacctc

SEQ ID NO: 5637 - DNA, 50 bp, synthetic construct
  source 1..50: mol_type = other DNA
aaaaaaataaaactatctctaataacaataccrctatcactacctcraac

SEQ ID NO: 5638 - DNA, 50 bp, synthetic construct
  source 1..50: mol_type = other DNA
caccaacaataaactaatcaaaaacaataaccctacaaaaccccaaacac

SEQ ID NO: 5639 - DNA, 50 bp, synthetic construct
  source 1..50: mol_type = other DNA
atcctacaaaaccactacctctaaccaacccactattaataaaatctacc

SEQ ID NO: 5640 - DNA, 50 bp, synthetic construct
  source 1..50: mol_type = other DNA
aaactaacctcaaattcctatatacaaatataaaaaaaactcccaaaccc

SEQ ID NO: 5641 - DNA, 50 bp, synthetic construct
  source 1..50: mol_type = other DNA
tctaaaacacttaacccctttataatcaaaactacccaaccrtccaaaac

SEQ ID NO: 5642 - DNA, 50 bp, synthetic construct
  source 1..50: mol_type = other DNA
ctaaaaacctctaaaacacttaacccctttataatcaaaactacccaacc

SEQ ID NO: 5643 - DNA, 50 bp, synthetic construct
  source 1..50: mol_type = other DNA
cactaaccacaatacacccaaaactccaactctaaccccaaaaaaataac

SEQ ID NO: 5644 - DNA, 50 bp, synthetic construct
  source 1..50: mol_type = other DNA
accacaaataccaaaaaaccccttcttaaattaccaaaaccccaaaacac

SEQ ID NO: 5645 - DNA, 50 bp, synthetic construct
  source 1..50: mol_type = other DNA
aaccctaaactctactaaaaaactaaatcaacacccatctaaacatttac

SEQ ID NO: 5646 - DNA, 50 bp, synthetic construct
  source 1..50: mol_type = other DNA
ctcaaataaatattaattcaatctctcaataaaactcaaaaccaaaacac

SEQ ID NO: 5647 - DNA, 50 bp, synthetic construct
  source 1..50: mol_type = other DNA
aaaccactaaaaaccaaaaaccataaccccctaaaataaacaccataaac

SEQ ID NO: 5648 - DNA, 50 bp, synthetic construct
  source 1..50: mol_type = other DNA
aaataaacaccataaacraatacaattactaccctctctaaaccaatctc

SEQ ID NO: 5649 - DNA, 50 bp, synthetic construct
  source 1..50: mol_type = other DNA
ctaaaacctcaacracraaaacccraataaaaaattttctctaaaaactc

SEQ ID NO: 5650 - DNA, 50 bp, synthetic construct
  source 1..50: mol_type = other DNA
aaacrcatcratcaccacaaactcaaactacaaaaaaatatacaactaac

SEQ ID NO: 5651 - DNA, 50 bp, synthetic construct
  source 1..50: mol_type = other DNA
acaaactaaacatacctacaaaaaaaatataaccaaccacraccaaaaac

SEQ ID NO: 5652 - DNA, 50 bp, synthetic construct
  source 1..50: mol_type = other DNA
tataaacctaaaccacaaaccctaaatccctccctaaaatcccataaaac

SEQ ID NO: 5653 - DNA, 50 bp, synthetic construct
  source 1..50: mol_type = other DNA
ctatcaaaaaacratccccccttaaaacratccctaatcattaactaaac

SEQ ID NO: 5654 - DNA, 50 bp, synthetic construct
  source 1..50: mol_type = other DNA
aacraaattcaaatcctaatcttaaccatctctctccctacaaacatcac

SEQ ID NO: 5655 - DNA, 50 bp, synthetic construct
  source 1..50: mol_type = other DNA
atctctctccctacaaacatcacrtaaaacaaaataatatccctatatac

SEQ ID NO: 5656 - DNA, 50 bp, synthetic construct
  source 1..50: mol_type = other DNA
tccctacaaacatcacrtaaaacaaaataatatccctatatacrataacc

SEQ ID NO: 5657 - DNA, 50 bp, synthetic construct
  source 1..50: mol_type = other DNA
craaactaaccrtaaactatataaaacaaacccaacctaccataatccac

SEQ ID NO: 5658 - DNA, 50 bp, synthetic construct
  source 1..50: mol_type = other DNA
taacaaaacttctaaaacacaaactctaaaaaaaattatcaaaaaaatac

SEQ ID NO: 5659 - DNA, 50 bp, synthetic construct
  source 1..50: mol_type = other DNA
ctaaaataaactaaactcacaaaaccttaaaaaaatttaaaccctaccrc

SEQ ID NO: 5660 - DNA, 50 bp, synthetic construct
  source 1..50: mol_type = other DNA
ctaaactcacaaaaccttaaaaaaatttaaaccctaccrcraaaacccac

SEQ ID NO: 5661 - DNA, 50 bp, synthetic construct
  source 1..50: mol_type = other DNA
taaaaattaaaaaacttccatcccttcacrctcaactacraaaaaactac

SEQ ID NO: 5662 - DNA, 50 bp, synthetic construct
  source 1..50: mol_type = other DNA
caataacttcataaaaattaaaaaacttccatcccttcacrctcaactac

SEQ ID NO: 5663 - DNA, 50 bp, synthetic construct
  source 1..50: mol_type = other DNA
caacaaaaccatctacataaaacatattaaccactactctaccttaaacc

SEQ ID NO: 5664 - DNA, 50 bp, synthetic construct
  source 1..50: mol_type = other DNA
tatatcccaaaaacacaacrtatcataccaaaaaaatcraataaaacccc

SEQ ID NO: 5665 - DNA, 50 bp, synthetic construct
  source 1..50: mol_type = other DNA
aacaccacacatacaaaaaccctaaaactaatatatcccaaaaacacaac

SEQ ID NO: 5666 - DNA, 50 bp, synthetic construct
  source 1..50: mol_type = other DNA
aataccaaaaaatacctaaacaaacataaaacrcaacccaaacaaatatc

SEQ ID NO: 5667 - DNA, 50 bp, synthetic construct
  source 1..50: mol_type = other DNA
aaccacaaaaaaaaccttaataccaaaaaatacctaaacaaacataaaac

SEQ ID NO: 5668 - DNA, 50 bp, synthetic construct
  source 1..50: mol_type = other DNA
tcaacactacaaaaaacaataacrcaaaaacraaaaataacactactaac

SEQ ID NO: 5669 - DNA, 50 bp, synthetic construct
  source 1..50: mol_type = other DNA
cctttaacaccaaaatcttccctataactacrttaataataccactcccc

SEQ ID NO: 5670 - DNA, 50 bp, synthetic construct
  source 1..50: mol_type = other DNA
acactaacaaaactaacctaacraaaaacaaacaaaaaaacaacaaccac

SEQ ID NO: 5671 - DNA, 50 bp, synthetic construct
  source 1..50: mol_type = other DNA
caaaatacaacraacttttacctattcctaccaccacctaaaattttctc

SEQ ID NO: 5672 - DNA, 50 bp, synthetic construct
  source 1..50: mol_type = other DNA
aatatataacctaccacrtcacaaacaccctactatcaacaaaatacaac

SEQ ID NO: 5673 - DNA, 50 bp, synthetic construct
  source 1..50: mol_type = other DNA
aaaataaacaaaaacccrttacaccctattaacaacaaaatatttataac

SEQ ID NO: 5674 - DNA, 50 bp, synthetic construct
  source 1..50: mol_type = other DNA
crtaataaatcacacactcaatactaaactctaaaaacacaaaaacaacc

SEQ ID NO: 5675 - DNA, 50 bp, synthetic construct
  source 1..50: mol_type = other DNA
ttacctacacaaaccctactatctcaaaaatataatcraacacataaatc

SEQ ID NO: 5676 - DNA, 50 bp, synthetic construct
  source 1..50: mol_type = other DNA
aactaatactttattacctacacaaaccctactatctcaaaaatataatc

SEQ ID NO: 5677 - DNA, 50 bp, synthetic construct
  source 1..50: mol_type = other DNA
ataaaatctatacaaataacaaaacaccaatcaacaaaaaactcaccacc

SEQ ID NO: 5678 - DNA, 50 bp, synthetic construct
  source 1..50: mol_type = other DNA
ccraaaaacctttctatcaaaacataacttcaaaatcaataaaataaacc

SEQ ID NO: 5679 - DNA, 50 bp, synthetic construct
  source 1..50: mol_type = other DNA
tataatcccaacttcaaaaccaataaaataaaccraacrcrataactcac

SEQ ID NO: 5680 - DNA, 50 bp, synthetic construct
  source 1..50: mol_type = other DNA
cataatctcaactcactataacctctacctcccaaattcaaacaattctc

SEQ ID NO: 5681 - DNA, 50 bp, synthetic construct
  source 1..50: mol_type = other DNA
tcataaaaattcccaaacacactctactatcacaatctaaaatttaacac

SEQ ID NO: 5682 - DNA, 50 bp, synthetic construct
  source 1..50: mol_type = other DNA
aaacaacaaatataaaccactataccccctaacttttcttttttaaaacc

SEQ ID NO: 5683 - DNA, 50 bp, synthetic construct
  source 1..50: mol_type = other DNA
aaaaaaaaatcaaaaaacacaataacccacacctattattccaactactc

SEQ ID NO: 5684 - DNA, 50 bp, synthetic construct
  source 1..50: mol_type = other DNA
aactataattacaccactacactacaacctaaataacaaaataaaacccc

SEQ ID NO: 5685 - DNA, 50 bp, synthetic construct
  source 1..50: mol_type = other DNA
actctcaaaaacactctcattcrtaaaaaacttactcataaaaaccaaac

SEQ ID NO: 5686 - DNA, 50 bp, synthetic construct
  source 1..50: mol_type = other DNA
acctcttttataataataaaactatataactctcaaaaacactctcattc

SEQ ID NO: 5687 - DNA, 50 bp, synthetic construct
  source 1..50: mol_type = other DNA
taaaaatattcctaaaaaccacacaacctcatcaccacaaaaaaaataac

SEQ ID NO: 5688 - DNA, 50 bp, synthetic construct
  source 1..50: mol_type = other DNA
cacraattattccctaaacaacaaaaaaccaaaacraaccctaataaatc

SEQ ID NO: 5689 - DNA, 50 bp, synthetic construct
  source 1..50: mol_type = other DNA
tatccaaaaaacaacccrtaccrctaatttatattcctaattaaaaatcc

SEQ ID NO: 5690 - DNA, 50 bp, synthetic construct
  source 1..50: mol_type = other DNA
taaaaaaacaaacaaatccaacrtataaaataatcaactaacctaaactc

SEQ ID NO: 5691 - DNA, 50 bp, synthetic construct
  source 1..50: mol_type = other DNA
actactttataacatttttaacraattcaaatcaactaaccatcccacac

SEQ ID NO: 5692 - DNA, 50 bp, synthetic construct
  source 1..50: mol_type = other DNA
ctataactaaaaataacctctaaataacaatatcctctactctcccatcc

SEQ ID NO: 5693 - DNA, 50 bp, synthetic construct
  source 1..50: mol_type = other DNA
taactcctacctaataataataatttttctaacctatcctttcctttcac

SEQ ID NO: 5694 - DNA, 50 bp, synthetic construct
  source 1..50: mol_type = other DNA
taataataatttttctaacctatcctttcctttcacrtttattaattaac

SEQ ID NO: 5695 - DNA, 50 bp, synthetic construct
  source 1..50: mol_type = other DNA
aaatcataaacataaataaatcacctactaactatacccacrcttccccc

SEQ ID NO: 5696 - DNA, 50 bp, synthetic construct
  source 1..50: mol_type = other DNA
aacttttctttctctatcttaaacaatacttctcactaatatcaaacccc

SEQ ID NO: 5697 - DNA, 50 bp, synthetic construct
  source 1..50: mol_type = other DNA
tacccctataatttaaaaaccccaataaaactaactaaatcraataaatc

SEQ ID NO: 5698 - DNA, 50 bp, synthetic construct
  source 1..50: mol_type = other DNA
ttatataaatacccctataatttaaaaaccccaataaaactaactaaatc

SEQ ID NO: 5699 - DNA, 50 bp, synthetic construct
  source 1..50: mol_type = other DNA
ctaatctaaatttattctctttcataaaaatatccaattattccaacaac

SEQ ID NO: 5700 - DNA, 50 bp, synthetic construct
  source 1..50: mol_type = other DNA
caaacrtaaaccaccrtaccaaacctataattcattttaaatttatattc

SEQ ID NO: 5701 - DNA, 50 bp, synthetic construct
  source 1..50: mol_type = other DNA
ccrtataccctccacraacataaattcaaaataaatcacaaacctaacac

SEQ ID NO: 5702 - DNA, 50 bp, synthetic construct
  source 1..50: mol_type = other DNA
cccactttttataaaaaacraaatctcactatattacccaaacaaatctc

SEQ ID NO: 5703 - DNA, 50 bp, synthetic construct
  source 1..50: mol_type = other DNA
tacttaaacccaaaaactcraaacctacctaaacaatataataaaacccc

SEQ ID NO: 5704 - DNA, 50 bp, synthetic construct
  source 1..50: mol_type = other DNA
ctatattacaatataatttaaactaaatttctcccraactcaaatctcac

SEQ ID NO: 5705 - DNA, 50 bp, synthetic construct
  source 1..50: mol_type = other DNA
caatccacaaattttataaatactttctttaaaatctctactttctaccc

SEQ ID NO: 5706 - DNA, 50 bp, synthetic construct
  source 1..50: mol_type = other DNA
ttccaaaacrcaatcrtactaaactccaaataaactttaaaaaaaacccc

SEQ ID NO: 5707 - DNA, 50 bp, synthetic construct
  source 1..50: mol_type = other DNA
ataaacatttatcratcccataattctcctacaattaccacrtaaccaac

SEQ ID NO: 5708 - DNA, 50 bp, synthetic construct
  source 1..50: mol_type = other DNA
ctaatatccctaaaataacaacaaacactactaaacrctttctaaatacc

SEQ ID NO: 5709 - DNA, 50 bp, synthetic construct
  source 1..50: mol_type = other DNA
taacttctttcactcaacaatatacatttaaaatcccaacrtacctttcc

SEQ ID NO: 5710 - DNA, 50 bp, synthetic construct
  source 1..50: mol_type = other DNA
cttttcaaaataacttctttcactcaacaatatacatttaaaatcccaac

SEQ ID NO: 5711 - DNA, 50 bp, synthetic construct
  source 1..50: mol_type = other DNA
ctaaactacaataaaccataatcaaaccactatactcttacctaaataac

SEQ ID NO: 5712 - DNA, 50 bp, synthetic construct
  source 1..50: mol_type = other DNA
atcttacracacacctttacacrccatcttattaactatatcatactacc

SEQ ID NO: 5713 - DNA, 50 bp, synthetic construct
  source 1..50: mol_type = other DNA
aataaaaacactaactcctttactaccacctctcraaacaaacaaaaccc

SEQ ID NO: 5714 - DNA, 50 bp, synthetic construct
  source 1..50: mol_type = other DNA
tacctcraaaaataacaacaaaaaaaccaataccctcactaatactaaac

SEQ ID NO: 5715 - DNA, 50 bp, synthetic construct
  source 1..50: mol_type = other DNA
cttactatccaaataatactccaaatacataacratcrccatcttcrtcc

SEQ ID NO: 5716 - DNA, 50 bp, synthetic construct
  source 1..50: mol_type = other DNA
aacraaaataacraccrccatatacttaaaacactatctaaacaataaac

SEQ ID NO: 5717 - DNA, 50 bp, synthetic construct
  source 1..50: mol_type = other DNA
craaaataacraccrccatatacttaaaacactatctaaacaataaacrc

SEQ ID NO: 5718 - DNA, 50 bp, synthetic construct
  source 1..50: mol_type = other DNA
craatcraccctaataaacraactatactatttccaaataacaacaaatc

SEQ ID NO: 5719 - DNA, 50 bp, synthetic construct
  source 1..50: mol_type = other DNA
atcraccctaataaacraactatactatttccaaataacaacaaatcrac

SEQ ID NO: 5720 - DNA, 50 bp, synthetic construct
  source 1..50: mol_type = other DNA
crcratatttaaaattataccraataactctaaaaaacccttataaaaac

SEQ ID NO: 5721 - DNA, 50 bp, synthetic construct
  source 1..50: mol_type = other DNA
caaaaaacaacraaacacataaacaaaatcraacrtccctctaaaacaac

SEQ ID NO: 5722 - DNA, 50 bp, synthetic construct
  source 1..50: mol_type = other DNA
ataacraataaaccrtaacctaaaactaaaaaccrctaccctaaaaaaac

SEQ ID NO: 5723 - DNA, 50 bp, synthetic construct
  source 1..50: mol_type = other DNA
acctcccaaaaaaaattaactttatatatatctaaaaaactataccaacc

SEQ ID NO: 5724 - DNA, 50 bp, synthetic construct
  source 1..50: mol_type = other DNA
acctaataatactaaaacacaaatcaaataacaactcaaaatatcaaatc

SEQ ID NO: 5725 - DNA, 50 bp, synthetic construct
  source 1..50: mol_type = other DNA
taacaactcaaaatatcaaatcraactttataaacaaaattaaactcrac

SEQ ID NO: 5726 - DNA, 50 bp, synthetic construct
  source 1..50: mol_type = other DNA
caaaaaatactaccctactctccrcraataaaaaataactcraaaaaacc

SEQ ID NO: 5727 - DNA, 50 bp, synthetic construct
  source 1..50: mol_type = other DNA
ctcaaataatcttcraatctctcctctaacaacaacacrcaaaaatctac

SEQ ID NO: 5728 - DNA, 50 bp, synthetic construct
  source 1..50: mol_type = other DNA
aaaaactatatacccraatccraaaaacaaattaatctatcccttcattc

SEQ ID NO: 5729 - DNA, 50 bp, synthetic construct
  source 1..50: mol_type = other DNA
ctatatacccraatccraaaaacaaattaatctatcccttcattcrtatc

SEQ ID NO: 5730 - DNA, 50 bp, synthetic construct
  source 1..50: mol_type = other DNA
taaaaaacatccaacrcttcaactaaccacraaattactaaatatcaacc

SEQ ID NO: 5731 - DNA, 50 bp, synthetic construct
  source 1..50: mol_type = other DNA
atttcccttccttttaaaactaccttattcrattaatacttaataactcc

SEQ ID NO: 5732 - DNA, 50 bp, synthetic construct
  source 1..50: mol_type = other DNA
ccttctatacraacaaactttaataattcttattctaaaaaacatccaac

SEQ ID NO: 5733 - DNA, 50 bp, synthetic construct
  source 1..50: mol_type = other DNA
taaatatttcctaaaacaaaaaccaccaaaacctattcrcacaaaaaaac

SEQ ID NO: 5734 - DNA, 50 bp, synthetic construct
  source 1..50: mol_type = other DNA
caaaaaccaccaaaacctattcrcacaaaaaaacraccttacaaaaactc

SEQ ID NO: 5735 - DNA, 50 bp, synthetic construct
  source 1..50: mol_type = other DNA
actataccraacaatcctaaaaaaccacaaaaaaactacrcraaaataac

SEQ ID NO: 5736 - DNA, 50 bp, synthetic construct
  source 1..50: mol_type = other DNA
ataaaacataaaaacraactaaaaacrtaaccactaaaacacaacatcac

SEQ ID NO: 5737 - DNA, 50 bp, synthetic construct
  source 1..50: mol_type = other DNA
ctcccttttccratctactaaataacraataatatttcttaacacttttc

SEQ ID NO: 5738 - DNA, 50 bp, synthetic construct
  source 1..50: mol_type = other DNA
tttccratctactaaataacraataatatttcttaacacttttcrctacc

SEQ ID NO: 5739 - DNA, 50 bp, synthetic construct
  source 1..50: mol_type = other DNA
actaaataacraataatatttcttaacacttttcrctaccrctaaaccac

SEQ ID NO: 5740 - DNA, 50 bp, synthetic construct
  source 1..50: mol_type = other DNA
aaccttctattatacccaaacaaaaccaccaaaaaactccttaatctaac

SEQ ID NO: 5741 - DNA, 50 bp, synthetic construct
  source 1..50: mol_type = other DNA
aaatctatatctaatataactattcttattttattatactaaaacaactc

SEQ ID NO: 5742 - DNA, 50 bp, synthetic construct
  source 1..50: mol_type = other DNA
atctaatataactattcttattttattatactaaaacaactcrtatcttc

SEQ ID NO: 5743 - DNA, 50 bp, synthetic construct
  source 1..50: mol_type = other DNA
attcttattttattatactaaaacaactcrtatcttcratctcttacctc

SEQ ID NO: 5744 - DNA, 50 bp, synthetic construct
  source 1..50: mol_type = other DNA
attaccacccataccatcccctaaaataactaatttttctaaccaaacac

SEQ ID NO: 5745 - DNA, 50 bp, synthetic construct
  source 1..50: mol_type = other DNA
aacctcrttctaaaaaaccctccaactactacttaaacrtcttaaactac

SEQ ID NO: 5746 - DNA, 50 bp, synthetic construct
  source 1..50: mol_type = other DNA
rctaactacrcrcctaaaaataaccaaaaataatttcatattttatacac

SEQ ID NO: 5747 - DNA, 50 bp, synthetic construct
  source 1..50: mol_type = other DNA
ttatacaacrtacataaaacataaaattacccttaaccacttccaaacrc

SEQ ID NO: 5748 - DNA, 50 bp, synthetic construct
  source 1..50: mol_type = other DNA
aaaacaaaattttatcrtattaaccaaaataatctcaatctcctaacatc

SEQ ID NO: 5749 - DNA, 50 bp, synthetic construct
  source 1..50: mol_type = other DNA
aattttatcrtattaaccaaaataatctcaatctcctaacatcrtaatcc

SEQ ID NO: 5750 - DNA, 50 bp, synthetic construct
  source 1..50: mol_type = other DNA
attattaaccaaaaaccctacatcttacctaataaactccaaaaaaatac

SEQ ID NO: 5751 - DNA, 50 bp, synthetic construct
  source 1..50: mol_type = other DNA
ctattaccaaaaaaaaataccaaccccaaaaactaaaaaatccctcattc

SEQ ID NO: 5752 - DNA, 50 bp, synthetic construct
  source 1..50: mol_type = other DNA
tctcactaacrtatttatataactacttattcacaataatataaactctc

SEQ ID NO: 5753 - DNA, 50 bp, synthetic construct
  source 1..50: mol_type = other DNA
ataaaaaaccraaaacccacatcactataaataaacaactacataaacac

SEQ ID NO: 5754 - DNA, 50 bp, synthetic construct
  source 1..50: mol_type = other DNA
aaacccacatcactataaataaacaactacataaacacrtcaataaaaac

SEQ ID NO: 5755 - DNA, 50 bp, synthetic construct
  source 1..50: mol_type = other DNA
ataaaatcttcttcctatcacaaactataacaaaatactactaaaaccac

SEQ ID NO: 5756 - DNA, 50 bp, synthetic construct
  source 1..50: mol_type = other DNA
cttcttcctatcacaaactataacaaaatactactaaaaccacraacrtc

SEQ ID NO: 5757 - DNA, 50 bp, synthetic construct
  source 1..50: mol_type = other DNA
tattacctataaatcatttcctcataaaacctataaacaactaaaataac

SEQ ID NO: 5758 - DNA, 50 bp, synthetic construct
  source 1..50: mol_type = other DNA
ttacctataaatcatttcctcataaaacctataaacaactaaaataacrc

SEQ ID NO: 5759 - DNA, 50 bp, synthetic construct
  source 1..50: mol_type = other DNA
accraaaaaccacaaaacaaacactaaaacacacaaaccaaaatatcatc

SEQ ID NO: 5760 - DNA, 50 bp, synthetic construct
  source 1..50: mol_type = other DNA
aaacacctactaaaaataatctaaaacactatccacaatcataaacaccc

SEQ ID NO: 5761 - DNA, 50 bp, synthetic construct
  source 1..50: mol_type = other DNA
taactataaacaatactttaaatcatcctcaacaaatactttaaaacaac

SEQ ID NO: 5762 - DNA, 50 bp, synthetic construct
  source 1..50: mol_type = other DNA
caactccttccattatctttaaaattctacratttcactctaatttaacc

SEQ ID NO: 5763 - DNA, 50 bp, synthetic construct
  source 1..50: mol_type = other DNA
ccaacaaaaccccaaaacccaaaaaataccaaacaaataaacactcaccc

SEQ ID NO: 5764 - DNA, 50 bp, synthetic construct
  source 1..50: mol_type = other DNA
aaaaaacrccaaactaaaaacactacaaataacatccaaacctaaaaaac

SEQ ID NO: 5765 - DNA, 50 bp, synthetic construct
  source 1..50: mol_type = other DNA
aaatcccrcctctcaaatttaaatactatttacaatatctccaacttaac

SEQ ID NO: 5766 - DNA, 50 bp, synthetic construct
  source 1..50: mol_type = other DNA
aaaatacatcataactaacctataaaccttaacaaacaaatctaacracc

SEQ ID NO: 5767 - DNA, 50 bp, synthetic construct
  source 1..50: mol_type = other DNA
actatttacaatatctccaacttaacrttctctaccrtatataatcracc

SEQ ID NO: 5768 - DNA, 50 bp, synthetic construct
  source 1..50: mol_type = other DNA
aaaccaaaaaatctaaccaaacaatttttaaatatccacrccaatcttcc

SEQ ID NO: 5769 - DNA, 50 bp, synthetic construct
  source 1..50: mol_type = other DNA
actaaaatccacaaaccaaccataatacatttcatctccraaaaattaac

SEQ ID NO: 5770 - DNA, 50 bp, synthetic construct
  source 1..50: mol_type = other DNA
aaacccacaaacacctcaaacrctatcatttccaaacacaaaacacaaac

SEQ ID NO: 5771 - DNA, 50 bp, synthetic construct
  source 1..50: mol_type = other DNA
ttatttctttacacataacacrtttatattctatatctaaaaataacaac

SEQ ID NO: 5772 - DNA, 50 bp, synthetic construct
  source 1..50: mol_type = other DNA
raatataaactcataccaaaaatcacacacacaaaaaaacaaaccaccac

SEQ ID NO: 5773 - DNA, 50 bp, synthetic construct
  source 1..50: mol_type = other DNA
acattctcaacctttaaaacccraaacaacrtaaattccraatacaaacc

SEQ ID NO: 5774 - DNA, 50 bp, synthetic construct
  source 1..50: mol_type = other DNA
ccrtaatactcacacaaaacraaaccacctaataacacatttctcaaaac

SEQ ID NO: 5775 - DNA, 50 bp, synthetic construct
  source 1..50: mol_type = other DNA
aaaactatcccatctaaatataaataccctccrtaatactcacacaaaac

SEQ ID NO: 5776 - DNA, 50 bp, synthetic construct
  source 1..50: mol_type = other DNA
cacaaccttaatataaaaaaaactatcccatctaaatataaataccctcc

SEQ ID NO: 5777 - DNA, 50 bp, synthetic construct
  source 1..50: mol_type = other DNA
aaaatctaaaataaaatacratcatctcctaaaccttcrcaacccctcac

SEQ ID NO: 5778 - DNA, 50 bp, synthetic construct
  source 1..50: mol_type = other DNA
ccacactaaactaatattaacaaataattatactacaacataataacatc

SEQ ID NO: 5779 - DNA, 50 bp, synthetic construct
  source 1..50: mol_type = other DNA
tttttcaactccattttaatattataaaaccaacatcatctctataatcc

SEQ ID NO: 5780 - DNA, 50 bp, synthetic construct
  source 1..50: mol_type = other DNA
caaatataaaccacrtacctaacrtccacaaaatatataaatacaatcac

SEQ ID NO: 5781 - DNA, 50 bp, synthetic construct
  source 1..50: mol_type = other DNA
crttattataaaacrtaactatattcacatactttataaacrccaaacac

SEQ ID NO: 5782 - DNA, 50 bp, synthetic construct
  source 1..50: mol_type = other DNA
taaaacaaaatctccctctatcacccaaaccraaaaacaataaaataatc

SEQ ID NO: 5783 - DNA, 50 bp, synthetic construct
  source 1..50: mol_type = other DNA
taaaaatcactcattccctaaccactcccaaataaacrtaaaacatacac

SEQ ID NO: 5784 - DNA, 50 bp, synthetic construct
  source 1..50: mol_type = other DNA
atcctatcatataacatccctaaaatttaactatttattaaaaacrccac

SEQ ID NO: 5785 - DNA, 50 bp, synthetic construct
  source 1..50: mol_type = other DNA
aaaaataaataattctcaaaaaactaactataaattcaaacccacrtaac

SEQ ID NO: 5786 - DNA, 50 bp, synthetic construct
  source 1..50: mol_type = other DNA
aaaaatatcacataacaaaacataaactataaatctccaaataacatctc

SEQ ID NO: 5787 - DNA, 50 bp, synthetic construct
  source 1..50: mol_type = other DNA
caaaaaactaacaaaaaacracaaaacctaaaactacctcracctttatc

SEQ ID NO: 5788 - DNA, 50 bp, synthetic construct
  source 1..50: mol_type = other DNA
taccrctctaaaacaaaacctaaattaaaaaaactttccttaaatctacc

SEQ ID NO: 5789 - DNA, 50 bp, synthetic construct
  source 1..50: mol_type = other DNA
tttataaaaaaacaaccctcaccccaacataacacaatttaaaataatac

SEQ ID NO: 5790 - DNA, 50 bp, synthetic construct
  source 1..50: mol_type = other DNA
taacacaatttaaaataatacrtcctaatttacctctaaaactcctcctc

SEQ ID NO: 5791 - DNA, 50 bp, synthetic construct
  source 1..50: mol_type = other DNA
aaccaaaaaccaactcaaaaactacccaaacaaaaacaacracttttaac

SEQ ID NO: 5792 - DNA, 50 bp, synthetic construct
  source 1..50: mol_type = other DNA
aactaccraacrcaaaccctcraacaaaaacatctaacaaaataaaaaac

SEQ ID NO: 5793 - DNA, 50 bp, synthetic construct
  source 1..50: mol_type = other DNA
craaataacracaactttacccacrtaaaaacraaataaatctcacttac

SEQ ID NO: 5794 - DNA, 50 bp, synthetic construct
  source 1..50: mol_type = other DNA
tacracctaaaaaacaaacrctaaataataattctacctacttactactc

SEQ ID NO: 5795 - DNA, 50 bp, synthetic construct
  source 1..50: mol_type = other DNA
taaaaaacaaacrctaaataataattctacctacttactactcrttcccc

SEQ ID NO: 5796 - DNA, 50 bp, synthetic construct
  source 1..50: mol_type = other DNA
aaacrctaaataataattctacctacttactactcrttccccraacatac

SEQ ID NO: 5797 - DNA, 50 bp, synthetic construct
  source 1..50: mol_type = other DNA
aaacccaactactaaaaacctccaaaaccaccaaaaattataaattaccc

SEQ ID NO: 5798 - DNA, 50 bp, synthetic construct
  source 1..50: mol_type = other DNA
aatataaccctcctaataaaaccaaaccacacactaaaacacataaacac

SEQ ID NO: 5799 - DNA, 50 bp, synthetic construct
  source 1..50: mol_type = other DNA
ccaataccrataaaaacraattcctaaacatataaacctatcccttactc

SEQ ID NO: 5800 - DNA, 50 bp, synthetic construct
  source 1..50: mol_type = other DNA
tcaaaaacaccaatcaaatacacacrttatttatcaaaacaaatacccac

SEQ ID NO: 5801 - DNA, 50 bp, synthetic construct
  source 1..50: mol_type = other DNA
aaaattaaaactctaccataaaaacrtaaacatctactctaacaaacaac

SEQ ID NO: 5802 - DNA, 50 bp, synthetic construct
  source 1..50: mol_type = other DNA
catttaattaatattcctaaatcaccrtaaaccaaacaaactaccaaaac

SEQ ID NO: 5803 - DNA, 50 bp, synthetic construct
  source 1..50: mol_type = other DNA
attaccaataaaaccctactaaaaaccccaaaaaatcaaaatatctaccc

SEQ ID NO: 5804 - DNA, 50 bp, synthetic construct
  source 1..50: mol_type = other DNA
aaaaaatccrtaacccaaattccccacaaaataaatctaaactcaccctc

SEQ ID NO: 5805 - DNA, 50 bp, synthetic construct
  source 1..50: mol_type = other DNA
aacacaaacraaaataaatccaaacccaccctataaaaaacctaaatcac

SEQ ID NO: 5806 - DNA, 50 bp, synthetic construct
  source 1..50: mol_type = other DNA
aaacataactttctacacctatataacracaaaaaaacraactacraacc

SEQ ID NO: 5807 - DNA, 50 bp, synthetic construct
  source 1..50: mol_type = other DNA
aaaaatatcrttaaacataactttctacacctatataacracaaaaaaac

SEQ ID NO: 5808 - DNA, 50 bp, synthetic construct
  source 1..50: mol_type = other DNA
aaaattataacccaaaatatcraccttaccraactaataaaaacrcaaac

SEQ ID NO: 5809 - DNA, 50 bp, synthetic construct
  source 1..50: mol_type = other DNA
craccraaaattataacccaaaatatcraccttaccraactaataaaaac

SEQ ID NO: 5810 - DNA, 50 bp, synthetic construct
  source 1..50: mol_type = other DNA
tctttttctcttacaaaacaaaaaatatccccattaaacactcacttccc

SEQ ID NO: 5811 - DNA, 50 bp, synthetic construct
  source 1..50: mol_type = other DNA
aaaaatcacacaatatttatccttttataacttatacccctcratataac

SEQ ID NO: 5812 - DNA, 50 bp, synthetic construct
  source 1..50: mol_type = other DNA
cacacaatatttatccttttataacttatacccctcratataacrtcctc

SEQ ID NO: 5813 - DNA, 50 bp, synthetic construct
  source 1..50: mol_type = other DNA
crccttatctctttttataaatatcratctaaactcatattctttttaac

SEQ ID NO: 5814 - DNA, 50 bp, synthetic construct
  source 1..50: mol_type = other DNA
taccaccctaccaaactaatttcttccattttttttaaaaacaaaatctc

SEQ ID NO: 5815 - DNA, 50 bp, synthetic construct
  source 1..50: mol_type = other DNA
atcataaataaaaacrcctcctaacaaaactacrtcctaaaaattaaatc

SEQ ID NO: 5816 - DNA, 50 bp, synthetic construct
  source 1..50: mol_type = other DNA
ttctccrtatactttaaatcataaataaaaacrcctcctaacaaaactac

SEQ ID NO: 5817 - DNA, 50 bp, synthetic construct
  source 1..50: mol_type = other DNA
acttaaccccttactaacttctccrtatactttaaatcataaataaaaac

SEQ ID NO: 5818 - DNA, 50 bp, synthetic construct
  source 1..50: mol_type = other DNA
ctactaaactctaaaccttcracaaaacttaaccccttactaacttctcc

SEQ ID NO: 5819 - DNA, 50 bp, synthetic construct
  source 1..50: mol_type = other DNA
tcaataaaaaaccaaatcctatcraaaacccaaaactcaacaataacaac

SEQ ID NO: 5820 - DNA, 50 bp, synthetic construct
  source 1..50: mol_type = other DNA
tattaaccccrtccraaaacaaaaacataaataaaaacctctactttaac

SEQ ID NO: 5821 - DNA, 50 bp, synthetic construct
  source 1..50: mol_type = other DNA
cttcccttatattttataaaatatccccaacccractacttattaacccc

SEQ ID NO: 5822 - DNA, 50 bp, synthetic construct
  source 1..50: mol_type = other DNA
cccacctcaaatatatacttcccttatattttataaaatatccccaaccc

SEQ ID NO: 5823 - DNA, 50 bp, synthetic construct
  source 1..50: mol_type = other DNA
atcttcattccaaaatacctcttttccctcctaatctattcactacrttc

SEQ ID NO: 5824 - DNA, 50 bp, synthetic construct
  source 1..50: mol_type = other DNA
aacataactaaaatcctataaatcctaacccaaatataaccaccccracc

SEQ ID NO: 5825 - DNA, 50 bp, synthetic construct
  source 1..50: mol_type = other DNA
aataaacataactaaaatcctataaatcctaacccaaatataaccacccc

SEQ ID NO: 5826 - DNA, 50 bp, synthetic construct
  source 1..50: mol_type = other DNA
aacatacctcratttccccactaataacaacacaaaacactcaacaaaac

SEQ ID NO: 5827 - DNA, 50 bp, synthetic construct
  source 1..50: mol_type = other DNA
aataaaaaaaccraaacataccacctataaaaatcttatccracacaaac

SEQ ID NO: 5828 - DNA, 50 bp, synthetic construct
  source 1..50: mol_type = other DNA
ctctttaccttttacccaaaatctccaattctaaatcctaaataacccac

SEQ ID NO: 5829 - DNA, 50 bp, synthetic construct
  source 1..50: mol_type = other DNA
tctccaattctaaatcctaaataacccacraaccaaccttaaaaaataac

SEQ ID NO: 5830 - DNA, 50 bp, synthetic construct
  source 1..50: mol_type = other DNA
aaaaaaacaccaaaacccccraaacaaaaacctcraaaaaatatcaaaac

SEQ ID NO: 5831 - DNA, 50 bp, synthetic construct
  source 1..50: mol_type = other DNA
caaaccttaacatccccaaatacaaactaactaaacacaaaaaaccaacc

SEQ ID NO: 5832 - DNA, 50 bp, synthetic construct
  source 1..50: mol_type = other DNA
aatccaaaaacraactataatcacaatatacacaaaaaacccaaaatcac

SEQ ID NO: 5833 - DNA, 50 bp, synthetic construct
  source 1..50: mol_type = other DNA
ccaaaacrcctataaaatctacatacctaaaacaaccccaccaaaatacc

SEQ ID NO: 5834 - DNA, 50 bp, synthetic construct
  source 1..50: mol_type = other DNA
aattcctaaactacaataaaaaataaactcaaccccactcccattctatc

SEQ ID NO: 5835 - DNA, 50 bp, synthetic construct
  source 1..50: mol_type = other DNA
aacaaaaaccaaacacctacccccaacaaaaacaaaaactataaacaacc

SEQ ID NO: 5836 - DNA, 50 bp, synthetic construct
  source 1..50: mol_type = other DNA
ccrattaaccataaacaattatcattcaataaaatcacctataccccaac

SEQ ID NO: 5837 - DNA, 50 bp, synthetic construct
  source 1..50: mol_type = other DNA
tcrctaaaacacaaataaccctactaaataacaactatccataactaatc

SEQ ID NO: 5838 - DNA, 50 bp, synthetic construct
  source 1..50: mol_type = other DNA
caccttataaataacctcacaccataaccacaattccaaatctttccacc

SEQ ID NO: 5839 - DNA, 50 bp, synthetic construct
  source 1..50: mol_type = other DNA
caaaataaaataattcaaaaaatccaatacctaaacctaactaacraccc

SEQ ID NO: 5840 - DNA, 50 bp, synthetic construct
  source 1..50: mol_type = other DNA
aataaaataattcaaaaaatccaatacctaaacctaactaacracccrac

SEQ ID NO: 5841 - DNA, 50 bp, synthetic construct
  source 1..50: mol_type = other DNA
acrcatctcatcactaatatcaacaatttcatttctcctattttccattc

SEQ ID NO: 5842 - DNA, 50 bp, synthetic construct
  source 1..50: mol_type = other DNA
aaatacrtcaaactcatcaacttaaaataaccraaacraaactaaaaacc

SEQ ID NO: 5843 - DNA, 50 bp, synthetic construct
  source 1..50: mol_type = other DNA
catcaacttaaaataaccraaacraaactaaaaaccrcctaacaactaac

SEQ ID NO: 5844 - DNA, 50 bp, synthetic construct
  source 1..50: mol_type = other DNA
tatttcratactttaatattttcccttcaaaaccraaccraatatctctc

SEQ ID NO: 5845 - DNA, 50 bp, synthetic construct
  source 1..50: mol_type = other DNA
tctttttccactatttcratactttaatattttcccttcaaaaccraacc

SEQ ID NO: 5846 - DNA, 50 bp, synthetic construct
  source 1..50: mol_type = other DNA
catctctaaaacccraaaataaccctttattcataaacraaaacttcctc

SEQ ID NO: 5847 - DNA, 50 bp, synthetic construct
  source 1..50: mol_type = other DNA
taactatctaacaacacaataaatactaccaaactccctaaaaacccccc

SEQ ID NO: 5848 - DNA, 50 bp, synthetic construct
  source 1..50: mol_type = other DNA
ccaaaaaacctaacaacacccactatactaccaaacaactaaaataaccc

SEQ ID NO: 5849 - DNA, 50 bp, synthetic construct
  source 1..50: mol_type = other DNA
taaaactaaaaaactattaattaataaatacctccataaccctatacctc

SEQ ID NO: 5850 - DNA, 50 bp, synthetic construct
  source 1..50: mol_type = other DNA
tattccaaaacaacaataaaccttcctcaaaactctaaactttataaaac

SEQ ID NO: 5851 - DNA, 50 bp, synthetic construct
  source 1..50: mol_type = other DNA
aaacataaatacaaaacttcacaaattattctaaaatcttaaatcaccac

SEQ ID NO: 5852 - DNA, 50 bp, synthetic construct
  source 1..50: mol_type = other DNA
aattccatttacattaacaataatcatttcactacttctaacctaaaaac

SEQ ID NO: 5853 - DNA, 50 bp, synthetic construct
  source 1..50: mol_type = other DNA
ataaaatccaaataaactctaataaacccccraacaaaactataccccrc

SEQ ID NO: 5854 - DNA, 50 bp, synthetic construct
  source 1..50: mol_type = other DNA
atataaaatccaaataaactctaataaacccccraacaaaactatacccc

SEQ ID NO: 5855 - DNA, 50 bp, synthetic construct
  source 1..50: mol_type = other DNA
caaaacccacctaaaccccacactaaatcaaccctaatacraaaaaaacc

SEQ ID NO: 5856 - DNA, 50 bp, synthetic construct
  source 1..50: mol_type = other DNA
aatcaaccctaatacraaaaaaaccrctataaataaacacraaacaacac

SEQ ID NO: 5857 - DNA, 50 bp, synthetic construct
  source 1..50: mol_type = other DNA
acccttactcctaactaaattcaattacttaactaaaccccaataaaaac

SEQ ID NO: 5858 - DNA, 50 bp, synthetic construct
  source 1..50: mol_type = other DNA
tcaactatattaaaacccaaattaaaaacaataacaaaacctataccaac

SEQ ID NO: 5859 - DNA, 50 bp, synthetic construct
  source 1..50: mol_type = other DNA
ccccaacctaaatttcaacacaactaaaacctaacataatctttctaaac

SEQ ID NO: 5860 - DNA, 50 bp, synthetic construct
  source 1..50: mol_type = other DNA
tctaactaactcratctaaaaaataaaacaaatacaactaaaacctcccc

SEQ ID NO: 5861 - DNA, 50 bp, synthetic construct
  source 1..50: mol_type = other DNA
aaaaacttattcttactatttaacataaaccctatctttataaatactcc

SEQ ID NO: 5862 - DNA, 50 bp, synthetic construct
  source 1..50: mol_type = other DNA
rtatacactcaaaaattacttatattctacaactataaaataaaatactc

SEQ ID NO: 5863 - DNA, 50 bp, synthetic construct
  source 1..50: mol_type = other DNA
actcrccaaaaattaataaaatacaactaattaacaatactctttaaacc

SEQ ID NO: 5864 - DNA, 50 bp, synthetic construct
  source 1..50: mol_type = other DNA
cactatcctaattaaaaatataacaactctctcraaactacaaacacaac

SEQ ID NO: 5865 - DNA, 50 bp, synthetic construct
  source 1..50: mol_type = other DNA
actattacatctccaactaaaacaataaatttctctattctttcaattcc

SEQ ID NO: 5866 - DNA, 50 bp, synthetic construct
  source 1..50: mol_type = other DNA
ttacatctccaactaaaacaataaatttctctattctttcaattccrtcc

SEQ ID NO: 5867 - DNA, 50 bp, synthetic construct
  source 1..50: mol_type = other DNA
actaaaacaataaatttctctattctttcaattccrtccrtttttacttc

SEQ ID NO: 5868 - DNA, 50 bp, synthetic construct
  source 1..50: mol_type = other DNA
aataaaatcataataaattaaaacratccctacatccaataacaaatacc

SEQ ID NO: 5869 - DNA, 50 bp, synthetic construct
  source 1..50: mol_type = other DNA
tccctatattctctactttataacracacctatcattaaatacaaaaacc

SEQ ID NO: 5870 - DNA, 50 bp, synthetic construct
  source 1..50: mol_type = other DNA
cctaaacttaattacatcaataaaaaccctttctccataaaatcccactc

SEQ ID NO: 5871 - DNA, 50 bp, synthetic construct
  source 1..50: mol_type = other DNA
aaaattcaaataaaaataccctcratctcactcaataaatatcaaaaaac

SEQ ID NO: 5872 - DNA, 50 bp, synthetic construct
  source 1..50: mol_type = other DNA
aacccaaaaaaacaaacccaactcataacaacaaatatacaaaaccaaac

SEQ ID NO: 5873 - DNA, 50 bp, synthetic construct
  source 1..50: mol_type = other DNA
aaaataaacacctaaaacaactacccraaaataactacataaaacctctc

SEQ ID NO: 5874 - DNA, 50 bp, synthetic construct
  source 1..50: mol_type = other DNA
actacataaaacctctcraaaaacatcaactactatctaactaaaactcc

SEQ ID NO: 5875 - DNA, 50 bp, synthetic construct
  source 1..50: mol_type = other DNA
taaaccaataaaataaacaactactaaaaacaaaacccttatctaatatc

SEQ ID NO: 5876 - DNA, 50 bp, synthetic construct
  source 1..50: mol_type = other DNA
aaatcaactccacaaattaccraattcacrataaacatttcractaaaac

SEQ ID NO: 5877 - DNA, 50 bp, synthetic construct
  source 1..50: mol_type = other DNA
taaaaataaaaatcaactccacaaattaccraattcacrataaacatttc

SEQ ID NO: 5878 - DNA, 50 bp, synthetic construct
  source 1..50: mol_type = other DNA
aatacaaaaacttcacattccctaaatacrtcccaaccraaatattcacc

SEQ ID NO: 5879 - DNA, 50 bp, synthetic construct
  source 1..50: mol_type = other DNA
aattaaacacaatttcctctaaaaacaaatttatctaaaaaaaatcaaac

SEQ ID NO: 5880 - DNA, 50 bp, synthetic construct
  source 1..50: mol_type = other DNA
ctaatacacatctttttaaaataaaaacctttccctacaaaaccaaaatc

SEQ ID NO: 5881 - DNA, 50 bp, synthetic construct
  source 1..50: mol_type = other DNA
ratacaatcaccttcccattaacaacaaaaatcccraccacaaaaacaac

SEQ ID NO: 5882 - DNA, 50 bp, synthetic construct
  source 1..50: mol_type = other DNA
aaaataattttatctaataatatcctcaaaacactattactatcaacacc

SEQ ID NO: 5883 - DNA, 50 bp, synthetic construct
  source 1..50: mol_type = other DNA
attaacaataataatattctaaaaatatcatcaaataaaatcactcctcc

SEQ ID NO: 5884 - DNA, 50 bp, synthetic construct
  source 1..50: mol_type = other DNA
tcatcaaataaaatcactcctccrcaacctaaaactttacaaaaattaac

SEQ ID NO: 5885 - DNA, 50 bp, synthetic construct
  source 1..50: mol_type = other DNA
cccaaacaataaccaaaaaacaccaaaacacataacacatacaaacacac

SEQ ID NO: 5886 - DNA, 50 bp, synthetic construct
  source 1..50: mol_type = other DNA
aaccaaaaaacaccaaaacacataacacatacaaacacacrcaaaaacac

SEQ ID NO: 5887 - DNA, 50 bp, synthetic construct
  source 1..50: mol_type = other DNA
crtctaccraatacctacrtaatactaaactctatactaaatccatatcc

SEQ ID NO: 5888 - DNA, 50 bp, synthetic construct
  source 1..50: mol_type = other DNA
aaaatatctttctctaacttatttttctaaaatcactacccttaaataac

SEQ ID NO: 5889 - DNA, 50 bp, synthetic construct
  source 1..50: mol_type = other DNA
taaaataatacccacctataaccataacaaattttaaaaaccaaaaactc

SEQ ID NO: 5890 - DNA, 50 bp, synthetic construct
  source 1..50: mol_type = other DNA
cctaaaaccctactctaaaaaaaatatcatcacaataccatataacatac

SEQ ID NO: 5891 - DNA, 50 bp, synthetic construct
  source 1..50: mol_type = other DNA
ccctactctaaaaaaaatatcatcacaataccatataacatacraatatc

SEQ ID NO: 5892 - DNA, 50 bp, synthetic construct
  source 1..50: mol_type = other DNA
aatatcatcacaataccatataacatacraatatcrtaataatactcccc

SEQ ID NO: 5893 - DNA, 50 bp, synthetic construct
  source 1..50: mol_type = other DNA
aaataaactcctttctttcctaatttatctacatctcattattaaacaac

SEQ ID NO: 5894 - DNA, 50 bp, synthetic construct
  source 1..50: mol_type = other DNA
ctaaaaaactctataattctaaatcratctaaaatattttccacrccttc

SEQ ID NO: 5895 - DNA, 50 bp, synthetic construct
  source 1..50: mol_type = other DNA
ccacaaacrtacaataaaccctcaaaaacctaaacaaataacctcacctc

SEQ ID NO: 5896 - DNA, 50 bp, synthetic construct
  source 1..50: mol_type = other DNA
aaaaccaaaaattaacttaaaaactacaacaactctaaaacctcaacaac

SEQ ID NO: 5897 - DNA, 50 bp, synthetic construct
  source 1..50: mol_type = other DNA
aaaaaccttcttaaaacaataattactaaaaataccaccatattcaatac

SEQ ID NO: 5898 - DNA, 50 bp, synthetic construct
  source 1..50: mol_type = other DNA
attaaatattatctatttaacaccactcccaataaaatataaacacatac

SEQ ID NO: 5899 - DNA, 50 bp, synthetic construct
  source 1..50: mol_type = other DNA
aaaaaataaaccaatccaaatctaaaatacrccaatccaaaccaaatacc

SEQ ID NO: 5900 - DNA, 50 bp, synthetic construct
  source 1..50: mol_type = other DNA
cctacatcttacctcttttaaaaaaaactaattcaatatcactcraaatc

SEQ ID NO: 5901 - DNA, 50 bp, synthetic construct
  source 1..50: mol_type = other DNA
ccatctaactcctatcttactaatttatacataaaccratcaatatcccc

SEQ ID NO: 5902 - DNA, 50 bp, synthetic construct
  source 1..50: mol_type = other DNA
raaaaatcacaccccatctaactcctatcttactaatttatacataaacc

SEQ ID NO: 5903 - DNA, 50 bp, synthetic construct
  source 1..50: mol_type = other DNA
tcaacaacccctaaaattataaaataattatctaaacaataattactaac

SEQ ID NO: 5904 - DNA, 50 bp, synthetic construct
  source 1..50: mol_type = other DNA
ccaaaaaaaacaataatttaatttactcaacactctataaaaatcaaaac

SEQ ID NO: 5905 - DNA, 50 bp, synthetic construct
  source 1..50: mol_type = other DNA
accaataaccactatcaaatcctattactacaaaaattcaaaaaaaatcc

SEQ ID NO: 5906 - DNA, 50 bp, synthetic construct
  source 1..50: mol_type = other DNA
tctttttttaatctcaaaaatacccctacctccattatctctaaataatc

SEQ ID NO: 5907 - DNA, 50 bp, synthetic construct
  source 1..50: mol_type = other DNA
aaaaaaatacaattattcatttattacrtacactcccattaatccctacc

SEQ ID NO: 5908 - DNA, 50 bp, synthetic construct
  source 1..50: mol_type = other DNA
aaaataaaactaaacaactttttctacracaaaaatcaataaaaatatac

SEQ ID NO: 5909 - DNA, 50 bp, synthetic construct
  source 1..50: mol_type = other DNA
aaaaatatacrtaataaataaataattacattccttctccctaaccaacc

SEQ ID NO: 5910 - DNA, 50 bp, synthetic construct
  source 1..50: mol_type = other DNA
aaataaataattacattccttctccctaaccaaccracaaaataaaaatc

SEQ ID NO: 5911 - DNA, 50 bp, synthetic construct
  source 1..50: mol_type = other DNA
taatccctaactcataataaactcrtaatcccrattacaaacttcaaacc

SEQ ID NO: 5912 - DNA, 50 bp, synthetic construct
  source 1..50: mol_type = other DNA
taaaatctatatcacctttaatccctaactcataataaactcrtaatccc

SEQ ID NO: 5913 - DNA, 50 bp, synthetic construct
  source 1..50: mol_type = other DNA
aaaaaaaataaaatctatatcacctttaatccctaactcataataaactc

SEQ ID NO: 5914 - DNA, 50 bp, synthetic construct
  source 1..50: mol_type = other DNA
acaaatttcacctcttttcattacctttaaaaaaaattctataccctaac

SEQ ID NO: 5915 - DNA, 50 bp, synthetic construct
  source 1..50: mol_type = other DNA
tacctttaaaaaaaattctataccctaacraaaaaactaaaaccaaactc

SEQ ID NO: 5916 - DNA, 50 bp, synthetic construct
  source 1..50: mol_type = other DNA
aaacactacrataaattcrtaccccaacttaaaaaccacaaaactaactc

SEQ ID NO: 5917 - DNA, 50 bp, synthetic construct
  source 1..50: mol_type = other DNA
cattacctacataaacatcataattctttatatcaatatcataattatcc

SEQ ID NO: 5918 - DNA, 50 bp, synthetic construct
  source 1..50: mol_type = other DNA
aataaaatttcccttttatcacccacrctaaaatataataacacaatctc

SEQ ID NO: 5919 - DNA, 50 bp, synthetic construct
  source 1..50: mol_type = other DNA
ccaaactataaataaaaaacacaaattctcraacraacacaatacctcac

SEQ ID NO: 5920 - DNA, 50 bp, synthetic construct
  source 1..50: mol_type = other DNA
aactacaaaaacaatcccaaactataaataaaaaacacaaattctcraac

SEQ ID NO: 5921 - DNA, 50 bp, synthetic construct
  source 1..50: mol_type = other DNA
attcaactacaaaaacaatcccaaactataaataaaaaacacaaattctc

SEQ ID NO: 5922 - DNA, 50 bp, synthetic construct
  source 1..50: mol_type = other DNA
aataataatcaataaatatttcattcaataaatatttactatcctcttcc

SEQ ID NO: 5923 - DNA, 50 bp, synthetic construct
  source 1..50: mol_type = other DNA
aaatcatcccattacttcttaaatatttaacattccaacaaacaaaaaac

SEQ ID NO: 5924 - DNA, 50 bp, synthetic construct
  source 1..50: mol_type = other DNA
atcacaccaaaacaaataaacttccaactaaaccaactaataacctaacc

SEQ ID NO: 5925 - DNA, 50 bp, synthetic construct
  source 1..50: mol_type = other DNA
tacttatttctaaacattatataaaaaccatatcttcraacacttctctc

SEQ ID NO: 5926 - DNA, 50 bp, synthetic construct
  source 1..50: mol_type = other DNA
cacacttctcaaatacttatttctaaacattatataaaaaccatatcttc

SEQ ID NO: 5927 - DNA, 50 bp, synthetic construct
  source 1..50: mol_type = other DNA
acataaaacctcaaaatttaaaaacaaaactatatcctcctctacaaaac

SEQ ID NO: 5928 - DNA, 50 bp, synthetic construct
  source 1..50: mol_type = other DNA
ataaaccataaccaccaataaataacttaaaacaacaaacacaactaaac

SEQ ID NO: 5929 - DNA, 50 bp, synthetic construct
  source 1..50: mol_type = other DNA
tatatctattattttaaaccacccattaataatcataacttacaacaacc

SEQ ID NO: 5930 - DNA, 50 bp, synthetic construct
  source 1..50: mol_type = other DNA
aaaaaaataaaattatataatctctaataacactttcactttaacaattc

SEQ ID NO: 5931 - DNA, 50 bp, synthetic construct
  source 1..50: mol_type = other DNA
ataaaaatatcattaaaaaccacacaaccccactttttcattttataaac

SEQ ID NO: 5932 - DNA, 50 bp, synthetic construct
  source 1..50: mol_type = other DNA
actaaaataacacaattactacaaaaaacctcaaaccaccaacccaaccc

SEQ ID NO: 5933 - DNA, 50 bp, synthetic construct
  source 1..50: mol_type = other DNA
acrataaatcatctataaaccactaataaatcaataaaaatataataacc

SEQ ID NO: 5934 - DNA, 50 bp, synthetic construct
  source 1..50: mol_type = other DNA
actttcaaaaataccacaaataccataaacrtaaacratacaaatacaac

SEQ ID NO: 5935 - DNA, 50 bp, synthetic construct
  source 1..50: mol_type = other DNA
caaaaaaacrttacactttcaaaaataccacaaataccataaacrtaaac

SEQ ID NO: 5936 - DNA, 50 bp, synthetic construct
  source 1..50: mol_type = other DNA
aaatcccaaaaaaacrttacactttcaaaaataccacaaataccataaac

SEQ ID NO: 5937 - DNA, 50 bp, synthetic construct
  source 1..50: mol_type = other DNA
acttataccrcccacrcccataacatttataacattcctaaaaatacaac

SEQ ID NO: 5938 - DNA, 50 bp, synthetic construct
  source 1..50: mol_type = other DNA
ctaataaaaaaccrtaaaatataaactaaaatataaaactcccaaaacac

SEQ ID NO: 5939 - DNA, 50 bp, synthetic construct
  source 1..50: mol_type = other DNA
acttaaaatatacrtatcaaaacrtaaactacaacacraaaaccaccaac

SEQ ID NO: 5940 - DNA, 50 bp, synthetic construct
  source 1..50: mol_type = other DNA
actattaatcatcttcattctttacattaccaaaaaattcctctttctcc

SEQ ID NO: 5941 - DNA, 50 bp, synthetic construct
  source 1..50: mol_type = other DNA
cctcaaataatctacacacttcracttcctaaactactaaaattacaatc

SEQ ID NO: 5942 - DNA, 50 bp, synthetic construct
  source 1..50: mol_type = other DNA
aaaaccaaacacaataactcacractataattccaacaatttaaaaaacc

SEQ ID NO: 5943 - DNA, 50 bp, synthetic construct
  source 1..50: mol_type = other DNA
aaactctactttcttataaaatctttttaaaacaaaatttcrctcttatc

SEQ ID NO: 5944 - DNA, 50 bp, synthetic construct
  source 1..50: mol_type = other DNA
craaccrcataaaacccaaaacaactttaaatacracccaacacaaattc

SEQ ID NO: 5945 - DNA, 50 bp, synthetic construct
  source 1..50: mol_type = other DNA
ctccattactaacttatactatttacaacaaattatctaacccrcraacc

SEQ ID NO: 5946 - DNA, 50 bp, synthetic construct
  source 1..50: mol_type = other DNA
craatttatattaaatcrcattcaaaactatcctaaatcccatacraccc

SEQ ID NO: 5947 - DNA, 50 bp, synthetic construct
  source 1..50: mol_type = other DNA
cttaattttcattttatcctttttccttaactaaaattctatccctaacc

SEQ ID NO: 5948 - DNA, 50 bp, synthetic construct
  source 1..50: mol_type = other DNA
actaaaacttaactcttacccaacaatacttttattcctccctaattcac

SEQ ID NO: 5949 - DNA, 50 bp, synthetic construct
  source 1..50: mol_type = other DNA
aaaaaacaacccacactccctttcaattcctttatctaaaacaaatctcc

SEQ ID NO: 5950 - DNA, 50 bp, synthetic construct
  source 1..50: mol_type = other DNA
ttctattccatcctacaccacaaaactctaatttaacctcaaaaattacc

SEQ ID NO: 5951 - DNA, 50 bp, synthetic construct
  source 1..50: mol_type = other DNA
aaaaaaaccacacaaaaacaatttaaaaaacaaactctaacaataccccc

SEQ ID NO: 5952 - DNA, 50 bp, synthetic construct
  source 1..50: mol_type = other DNA
tcttaacctaaaaaccaaacataactattataaactattacatttctttc

SEQ ID NO: 5953 - DNA, 50 bp, synthetic construct
  source 1..50: mol_type = other DNA
aaatcaaacctactaaacctaacaaataaacctaaaataaaatccttaac

SEQ ID NO: 5954 - DNA, 50 bp, synthetic construct
  source 1..50: mol_type = other DNA
tttccctaataactcctaactcctaacatttacaccttcaacttaaatac

SEQ ID NO: 5955 - DNA, 50 bp, synthetic construct
  source 1..50: mol_type = other DNA
ctacacrctcctaattttcctttctccctctttaactactacttttcaac

SEQ ID NO: 5956 - DNA, 50 bp, synthetic construct
  source 1..50: mol_type = other DNA
cctttaactatatccttaactaaatccaatcaatatactacaccctctcc

SEQ ID NO: 5957 - DNA, 50 bp, synthetic construct
  source 1..50: mol_type = other DNA
ttcaaattcatatcccaaaccaaactttaatcttcctacccaaacctatc

SEQ ID NO: 5958 - DNA, 50 bp, synthetic construct
  source 1..50: mol_type = other DNA
acaaatctaattccatcaacaaaaccacttatcatctccacctccaaaac

SEQ ID NO: 5959 - DNA, 50 bp, synthetic construct
  source 1..50: mol_type = other DNA
ctcaattaaccttttttactcataacactcttaatataaaatccaaatcc

SEQ ID NO: 5960 - DNA, 50 bp, synthetic construct
  source 1..50: mol_type = other DNA
aataaatattctatctacttctaacccattcctcaaaactaacacaaatc

SEQ ID NO: 5961 - DNA, 50 bp, synthetic construct
  source 1..50: mol_type = other DNA
aaaaataattaatcraacataataatacrcrcctacaataccaactactc

SEQ ID NO: 5962 - DNA, 50 bp, synthetic construct
  source 1..50: mol_type = other DNA
aaaacctcactatacctatcctaaaacccaattttaactttctaaaactc

SEQ ID NO: 5963 - DNA, 50 bp, synthetic construct
  source 1..50: mol_type = other DNA
aacccaattttaactttctaaaactcrcctataacaacatttctacaacc

SEQ ID NO: 5964 - DNA, 50 bp, synthetic construct
  source 1..50: mol_type = other DNA
aaacraaaaacaaaacrctaccaccttctctaaaattaacttccaaccac

SEQ ID NO: 5965 - DNA, 50 bp, synthetic construct
  source 1..50: mol_type = other DNA
cracrccataaaataataattatcrtctaacaatttacacaacaaatacc

SEQ ID NO: 5966 - DNA, 50 bp, synthetic construct
  source 1..50: mol_type = other DNA
tcaacctaacaaatacccacraaataaacaaacaaatctactccraaaac

SEQ ID NO: 5967 - DNA, 50 bp, synthetic construct
  source 1..50: mol_type = other DNA
ataccctcttttctttactcattactctaatcaacctaacaaatacccac

SEQ ID NO: 5968 - DNA, 50 bp, synthetic construct
  source 1..50: mol_type = other DNA
tttcaaactctatatttataaactaaaaactattaaccatataacrctac

SEQ ID NO: 5969 - DNA, 50 bp, synthetic construct
  source 1..50: mol_type = other DNA
cataaaatttaaaaaacaatacttaaaaaccaacttaattaactactacc

SEQ ID NO: 5970 - DNA, 50 bp, synthetic construct
  source 1..50: mol_type = other DNA
cataaaaacctacctaaccctttaaatattatctaaaccraaaacaactc

SEQ ID NO: 5971 - DNA, 50 bp, synthetic construct
  source 1..50: mol_type = other DNA
aaatatacatacataaaaacctacctaaccctttaaatattatctaaacc

SEQ ID NO: 5972 - DNA, 50 bp, synthetic construct
  source 1..50: mol_type = other DNA
ttcattcaacaaactctaaaacrtcacttacttaaaaaaccattataaac

SEQ ID NO: 5973 - DNA, 50 bp, synthetic construct
  source 1..50: mol_type = other DNA
tacctctaaaactaaataaaaatcactcttcattcaacaaactctaaaac

SEQ ID NO: 5974 - DNA, 50 bp, synthetic construct
  source 1..50: mol_type = other DNA
ttcaaaaacctatctatttctataaaataaaaaccacttataaatatacc

SEQ ID NO: 5975 - DNA, 50 bp, synthetic construct
  source 1..50: mol_type = other DNA
taaaaactcatatcccaaattcaaaaaaacctcaaacacaatctacctcc

SEQ ID NO: 5976 - DNA, 50 bp, synthetic construct
  source 1..50: mol_type = other DNA
aaaacctccacaaaacaaaaacttaactaacrctaattaaataaacaaac

SEQ ID NO: 5977 - DNA, 50 bp, synthetic construct
  source 1..50: mol_type = other DNA
actataaccctacaattctaaaacctccacaaaacaaaaacttaactaac

SEQ ID NO: 5978 - DNA, 50 bp, synthetic construct
  source 1..50: mol_type = other DNA
acaaaaaaacccraaaaaaactacaactcccaaataacaactctaaatcc

SEQ ID NO: 5979 - DNA, 50 bp, synthetic construct
  source 1..50: mol_type = other DNA
aataaacaataccttatataccacractttaactttaaacataaacaaac

SEQ ID NO: 5980 - DNA, 50 bp, synthetic construct
  source 1..50: mol_type = other DNA
rcaactaaatcatctacrtaactataccrtacccctaaaacataaaatac

SEQ ID NO: 5981 - DNA, 50 bp, synthetic construct
  source 1..50: mol_type = other DNA
taatctcataatcatacttaaatttcctaaaacrcaactaaatcatctac

SEQ ID NO: 5982 - DNA, 50 bp, synthetic construct
  source 1..50: mol_type = other DNA
aaatttaaatacaaaactaccccrtccttacctctaccctaacaactaac

SEQ ID NO: 5983 - DNA, 50 bp, synthetic construct
  source 1..50: mol_type = other DNA
ttaataaacctaaaaatccccttctccctactaccctacrtaaaataaac

SEQ ID NO: 5984 - DNA, 50 bp, synthetic construct
  source 1..50: mol_type = other DNA
tatctttccaattaataaacctaaaaatccccttctccctactaccctac

SEQ ID NO: 5985 - DNA, 50 bp, synthetic construct
  source 1..50: mol_type = other DNA
aatatataattttactaaaattaaccaaccaattctccaaaccttttctc

SEQ ID NO: 5986 - DNA, 50 bp, synthetic construct
  source 1..50: mol_type = other DNA
ttaataaaattatacattactcacatttccaactcattttcctaattccc

SEQ ID NO: 5987 - DNA, 50 bp, synthetic construct
  source 1..50: mol_type = other DNA
aatctatataaacaaaaaataaatctataactaccaaaaaccaacaaaac

SEQ ID NO: 5988 - DNA, 50 bp, synthetic construct
  source 1..50: mol_type = other DNA
aaaatcaaaatttaaaacattttcatcactcccraaaaaaaccttaaccc

SEQ ID NO: 5989 - DNA, 50 bp, synthetic construct
  source 1..50: mol_type = other DNA
attatacaattatcactaaaatcaaaatttaaaacattttcatcactccc

SEQ ID NO: 5990 - DNA, 50 bp, synthetic construct
  source 1..50: mol_type = other DNA
caactatcacaactacaataataaccaaatacraaaactaaatcaaatac

SEQ ID NO: 5991 - DNA, 50 bp, synthetic construct
  source 1..50: mol_type = other DNA
ttaaaaactacacaacaaaactctccaaaacaaatacctaaaaaaaacac

SEQ ID NO: 5992 - DNA, 50 bp, synthetic construct
  source 1..50: mol_type = other DNA
tcctcttatctcaacctcccaaaattctaaaattacataaataaaacacc

SEQ ID NO: 5993 - DNA, 50 bp, synthetic construct
  source 1..50: mol_type = other DNA
ctcttatctcaacctcccaaaattctaaaattacataaataaaacaccrc

SEQ ID NO: 5994 - DNA, 50 bp, synthetic construct
  source 1..50: mol_type = other DNA
tacaaacataataattatataaaaactttcacttttaaatattctaaacc

SEQ ID NO: 5995 - DNA, 50 bp, synthetic construct
  source 1..50: mol_type = other DNA
tctaatcctatcaatatcactaactaaatttataaccaaaaatattactc

SEQ ID NO: 5996 - DNA, 50 bp, synthetic construct
  source 1..50: mol_type = other DNA
aaacaaaatctatacaaccccacaaaaaccaaaaaaaacacctacttctc

SEQ ID NO: 5997 - DNA, 50 bp, synthetic construct
  source 1..50: mol_type = other DNA
aaaacaaatacctcttctaacctctataaaactacacaaactctatctcc

SEQ ID NO: 5998 - DNA, 50 bp, synthetic construct
  source 1..50: mol_type = other DNA
atcracctcattactactttaaaaaaaatcccaattaaaaaccaataatc

SEQ ID NO: 5999 - DNA, 50 bp, synthetic construct
  source 1..50: mol_type = other DNA
ttcratcactaactctcaactaaaatttctcccaaaataataataaaatc

SEQ ID NO: 6000 - DNA, 50 bp, synthetic construct
  source 1..50: mol_type = other DNA
taaactttacrtattttacctactaaaacccrtttaaactcaaaaaatcc

SEQ ID NO: 6001 - DNA, 50 bp, synthetic construct
  source 1..50: mol_type = other DNA
aacataaaaattctccaaatccccaccaaattaactaaatacaaaatacc

SEQ ID NO: 6002 - DNA, 50 bp, synthetic construct
  source 1..50: mol_type = other DNA
caaatctaaaaatcctcccattctattactaaaactttaaacaaaaactc

SEQ ID NO: 6003 - DNA, 50 bp, synthetic construct
  source 1..50: mol_type = other DNA
rtaaactctaaaatcaaacaatataaaataaacttcccracraaaccaac

SEQ ID NO: 6004 - DNA, 50 bp, synthetic construct
  source 1..50: mol_type = other DNA
tctcaaacttcaaaccccaaaacctcaaattacaaaaaaacrttaacctc

SEQ ID NO: 6005 - DNA, 50 bp, synthetic construct
  source 1..50: mol_type = other DNA
taaaacaaaaacrtaaactctaaaatcaaacaatataaaataaacttccc

SEQ ID NO: 6006 - DNA, 50 bp, synthetic construct
  source 1..50: mol_type = other DNA
aaaaccaaccrttattccctataatctatacctaaaaacacaaatttaac

SEQ ID NO: 6007 - DNA, 50 bp, synthetic construct
  source 1..50: mol_type = other DNA
ccaaacacaaatcacaaaaaacaacractaatccttaaaaaaatacaacc

SEQ ID NO: 6008 - DNA, 50 bp, synthetic construct
  source 1..50: mol_type = other DNA
aaatcacaaaaaacaacractaatccttaaaaaaatacaaccraacctcc

SEQ ID NO: 6009 - DNA, 50 bp, synthetic construct
  source 1..50: mol_type = other DNA
aaaaaccccttaataacccacaaactactactaaactactaaaaaacacc

SEQ ID NO: 6010 - DNA, 50 bp, synthetic construct
  source 1..50: mol_type = other DNA
aataaaattccttcaaacttaaaataaacattactcctccatcctaaatc

SEQ ID NO: 6011 - DNA, 50 bp, synthetic construct
  source 1..50: mol_type = other DNA
aaatttcacaacctactaaaaacctactaactaataacctttttctcatc

SEQ ID NO: 6012 - DNA, 50 bp, synthetic construct
  source 1..50: mol_type = other DNA
cctactaactaataacctttttctcatcrtcatcaccaacaaacacctcc

SEQ ID NO: 6013 - DNA, 50 bp, synthetic construct
  source 1..50: mol_type = other DNA
ctcattcccaattaacaaaaaaataaaccataaacctaaatatcatcctc

SEQ ID NO: 6014 - DNA, 50 bp, synthetic construct
  source 1..50: mol_type = other DNA
cataaaataataacaaaataaacrtatctaaactcaaactctccttaaac

SEQ ID NO: 6015 - DNA, 50 bp, synthetic construct
  source 1..50: mol_type = other DNA
aaccctcctataaacccraaatatcctaaaaatataaataatactaaccc

SEQ ID NO: 6016 - DNA, 50 bp, synthetic construct
  source 1..50: mol_type = other DNA
aaaacttttctaaatacaacattcaaaacttctaaccctcctataaaccc

SEQ ID NO: 6017 - DNA, 50 bp, synthetic construct
  source 1..50: mol_type = other DNA
aaatattatacctaaaaaaacctcaaaaatattcraaaaaactcaaactc

SEQ ID NO: 6018 - DNA, 50 bp, synthetic construct
  source 1..50: mol_type = other DNA
aacaaaaaatccacatactacaaacaaactaatctcctaactaccctctc

SEQ ID NO: 6019 - DNA, 50 bp, synthetic construct
  source 1..50: mol_type = other DNA
ttacaaataaaaaacttccctaacaaaaaaaaacacttacccaaactctc

SEQ ID NO: 6020 - DNA, 50 bp, synthetic construct
  source 1..50: mol_type = other DNA
aaaaaaacacttacccaaactctcrtaaccracttaacatactataacac

SEQ ID NO: 6021 - DNA, 50 bp, synthetic construct
  source 1..50: mol_type = other DNA
ataataaataaaacttaccatttctacacaaaaacatacccaaatttatc

SEQ ID NO: 6022 - DNA, 50 bp, synthetic construct
  source 1..50: mol_type = other DNA
aaaaactaaaaccctaatctcctaccttctttaaatttcctaacttatcc

SEQ ID NO: 6023 - DNA, 50 bp, synthetic construct
  source 1..50: mol_type = other DNA
tataaccatttcttaccaaaaacctaaataaaatataattttaaaaaccc

SEQ ID NO: 6024 - DNA, 50 bp, synthetic construct
  source 1..50: mol_type = other DNA
ctaaatctacctttaaaccaacaaaaaaatccaaatcaatacaaaaaacc

SEQ ID NO: 6025 - DNA, 50 bp, synthetic construct
  source 1..50: mol_type = other DNA
ataactaacacatcaaataaaaaatcctctaccatcccaaaatcacacac

SEQ ID NO: 6026 - DNA, 50 bp, synthetic construct
  source 1..50: mol_type = other DNA
acaaaaaatttttcatctaatataccaattataattaataataactaccc

SEQ ID NO: 6027 - DNA, 50 bp, synthetic construct
  source 1..50: mol_type = other DNA
ccraaactcctaacaaacattattaatcaatcacaacttcttttccctcc

SEQ ID NO: 6028 - DNA, 50 bp, synthetic construct
  source 1..50: mol_type = other DNA
crtaatccrtactctttctacaataaaatttaaccratacacracaaatc

SEQ ID NO: 6029 - DNA, 50 bp, synthetic construct
  source 1..50: mol_type = other DNA
ttcctcctaaaatacttaaaaaacacaaataaataacaaaacrccataac

SEQ ID NO: 6030 - DNA, 50 bp, synthetic construct
  source 1..50: mol_type = other DNA
tccctacccaacaataaaaacrtactcaataaactataaaatatcrtacc

SEQ ID NO: 6031 - DNA, 50 bp, synthetic construct
  source 1..50: mol_type = other DNA
accaatccctacccaacaataaaaacrtactcaataaactataaaatatc

SEQ ID NO: 6032 - DNA, 50 bp, synthetic construct
  source 1..50: mol_type = other DNA
aaaaaacaaccratcaaaatcccaaccaatccctacccaacaataaaaac

SEQ ID NO: 6033 - DNA, 50 bp, synthetic construct
  source 1..50: mol_type = other DNA
ttactaaacacrccctcactactaaataaaaattaactaaaatcctaatc

SEQ ID NO: 6034 - DNA, 50 bp, synthetic construct
  source 1..50: mol_type = other DNA
aaatacrtctatctaaatctatccctaacactataccaaacctaaatcac

SEQ ID NO: 6035 - DNA, 50 bp, synthetic construct
  source 1..50: mol_type = other DNA
aaaacttaacacacaaataacttcaaaaatcaaatccrcrttaactttac

SEQ ID NO: 6036 - DNA, 50 bp, synthetic construct
  source 1..50: mol_type = other DNA
tccttaaataaaaaacttaacacacaaataacttcaaaaatcaaatccrc

SEQ ID NO: 6037 - DNA, 50 bp, synthetic construct
  source 1..50: mol_type = other DNA
cttccttaaataaaaaacttaacacacaaataacttcaaaaatcaaatcc

SEQ ID NO: 6038 - DNA, 50 bp, synthetic construct
  source 1..50: mol_type = other DNA
aataaactaacctataacttcaacaactccaataaaaccctaaacracrc

SEQ ID NO: 6039 - DNA, 50 bp, synthetic construct
  source 1..50: mol_type = other DNA
taaataaactaacctataacttcaacaactccaataaaaccctaaacrac

SEQ ID NO: 6040 - DNA, 50 bp, synthetic construct
  source 1..50: mol_type = other DNA
aaataaataaactaacctataacttcaacaactccaataaaaccctaaac

SEQ ID NO: 6041 - DNA, 50 bp, synthetic construct
  source 1..50: mol_type = other DNA
aaaacaattcttaactcaacaatacttaattacccctacctaactctatc

SEQ ID NO: 6042 - DNA, 50 bp, synthetic construct
  source 1..50: mol_type = other DNA
ccatcataaataaaattaataaccttataaactcatataccccttccacc

SEQ ID NO: 6043 - DNA, 50 bp, synthetic construct
  source 1..50: mol_type = other DNA
atcattatattaaattctttactaactctcataaccacctctctaactac

SEQ ID NO: 6044 - DNA, 50 bp, synthetic construct
  source 1..50: mol_type = other DNA
taacataaaacccaacaaaccaaactataaataaaaatcacacacaatcc

SEQ ID NO: 6045 - DNA, 50 bp, synthetic construct
  source 1..50: mol_type = other DNA
cccaacccaaaaaacctatcrtaaatacacacctaattctaatctaatcc

SEQ ID NO: 6046 - DNA, 50 bp, synthetic construct
  source 1..50: mol_type = other DNA
tctataataaaaaaaccttaataaacaaccctaaataaaaactacacttc

SEQ ID NO: 6047 - DNA, 50 bp, synthetic construct
  source 1..50: mol_type = other DNA
attttccaaaatttactcccataaaaccccaacaatactaactaaatttc

SEQ ID NO: 6048 - DNA, 50 bp, synthetic construct
  source 1..50: mol_type = other DNA
aatacraaaccaatactccaaaataaatcacaatatctctccrtaacaac

SEQ ID NO: 6049 - DNA, 50 bp, synthetic construct
  source 1..50: mol_type = other DNA
ctctcrctatcacraaaaaacactataactcattctaaaacactaacttc

SEQ ID NO: 6050 - DNA, 50 bp, synthetic construct
  source 1..50: mol_type = other DNA
aaacaccctaaaaatcacaaattatcatctccrtataatctcttaactac

SEQ ID NO: 6051 - DNA, 50 bp, synthetic construct
  source 1..50: mol_type = other DNA
cccaaacatattacctaaaaacaccctaaaaatcacaaattatcatctcc

SEQ ID NO: 6052 - DNA, 50 bp, synthetic construct
  source 1..50: mol_type = other DNA
acaacatacctaaaaatcraatctattacctccrctcaaaaaaaaccaac

SEQ ID NO: 6053 - DNA, 50 bp, synthetic construct
  source 1..50: mol_type = other DNA
rccactcaaaaaatataaatcataaccraatatactataaaaatatacrc

SEQ ID NO: 6054 - DNA, 50 bp, synthetic construct
  source 1..50: mol_type = other DNA
cctaacaaaaaatactaaatcacrccactcaaaaaatataaatcataacc

SEQ ID NO: 6055 - DNA, 50 bp, synthetic construct
  source 1..50: mol_type = other DNA
aaaataacaaacracaattcractccrcctaacaaaaaatactaaatcac

SEQ ID NO: 6056 - DNA, 50 bp, synthetic construct
  source 1..50: mol_type = other DNA
ctcaaaaaaccacrcaaaacttccaaaaaaccacaaaaatactccrtacc

SEQ ID NO: 6057 - DNA, 50 bp, synthetic construct
  source 1..50: mol_type = other DNA
tcataaaaattctttctcacacaaactcaactaaaaactcaaaaaaccac

SEQ ID NO: 6058 - DNA, 50 bp, synthetic construct
  source 1..50: mol_type = other DNA
aactaatatatttatctcatccattaaacccaaaactataaaaattattc

SEQ ID NO: 6059 - DNA, 50 bp, synthetic construct
  source 1..50: mol_type = other DNA
ataaacacatcaacccttaaccaaaacctaacataacaaaccaacccatc

SEQ ID NO: 6060 - DNA, 50 bp, synthetic construct
  source 1..50: mol_type = other DNA
acttaccataaattaaaccacaaatctaaacaaaaaaaataacaaacctc

SEQ ID NO: 6061 - DNA, 50 bp, synthetic construct
  source 1..50: mol_type = other DNA
aacaaaaacaccttaataataaacaaataatatacacaaaatatttaacc

SEQ ID NO: 6062 - DNA, 50 bp, synthetic construct
  source 1..50: mol_type = other DNA
aaacttcrctaaaacttaaatactaataacaaatactaataataaaaccc

SEQ ID NO: 6063 - DNA, 50 bp, synthetic construct
  source 1..50: mol_type = other DNA
actatcatacttacaaataaaatcctataaattattatacacrcaacaac

SEQ ID NO: 6064 - DNA, 50 bp, synthetic construct
  source 1..50: mol_type = other DNA
ctataactactatcatacttacaaataaaatcctataaattattatacac

SEQ ID NO: 6065 - DNA, 50 bp, synthetic construct
  source 1..50: mol_type = other DNA
ctaaccttttactcaatccattaacaaacaactattaaactcccacccac

SEQ ID NO: 6066 - DNA, 50 bp, synthetic construct
  source 1..50: mol_type = other DNA
aaaaactccttccctcccaactcccttaaaataattaaaccccataatac

SEQ ID NO: 6067 - DNA, 50 bp, synthetic construct
  source 1..50: mol_type = other DNA
aaaactactaaataaaatcctctcaaccaaaaacataattaacatcacac

SEQ ID NO: 6068 - DNA, 50 bp, synthetic construct
  source 1..50: mol_type = other DNA
tactataccrtaatcacctaaacctatacaaaaacaacctcaatatctcc

SEQ ID NO: 6069 - DNA, 50 bp, synthetic construct
  source 1..50: mol_type = other DNA
tataacaacraaaacactaaaactatccctacacaaactcaaataatcac

SEQ ID NO: 6070 - DNA, 50 bp, synthetic construct
  source 1..50: mol_type = other DNA
aaaaataaacaataacttaaaactcccrtccactcractttaaaatcccc

SEQ ID NO: 6071 - DNA, 50 bp, synthetic construct
  source 1..50: mol_type = other DNA
ccaatcctttaatatttataacaatacttctaaaacrcttactaaatacc

SEQ ID NO: 6072 - DNA, 50 bp, synthetic construct
  source 1..50: mol_type = other DNA
ataaatattctaactaaattcaaattttttctaatataattttttcacac

SEQ ID NO: 6073 - DNA, 50 bp, synthetic construct
  source 1..50: mol_type = other DNA
ataaaaaacttactcaactatacrtcattaaattttatcaacatataaac

SEQ ID NO: 6074 - DNA, 50 bp, synthetic construct
  source 1..50: mol_type = other DNA
actcaaaaaccaaaatttttttcrcctatatattaataaaacccaataac

SEQ ID NO: 6075 - DNA, 50 bp, synthetic construct
  source 1..50: mol_type = other DNA
aataaactactatcrttacccrttcraaattaattactaaaataaaacac

SEQ ID NO: 6076 - DNA, 50 bp, synthetic construct
  source 1..50: mol_type = other DNA
atactatatctataaaaacacaaaattattttacattatcattacataac

SEQ ID NO: 6077 - DNA, 50 bp, synthetic construct
  source 1..50: mol_type = other DNA
aacaaacraaaaaccaaacaacctttttattcaaattaacaatctctttc

SEQ ID NO: 6078 - DNA, 50 bp, synthetic construct
  source 1..50: mol_type = other DNA
aataaacraaaaaaactaccaatctaaacaaaaaaactatctaacctccc

SEQ ID NO: 6079 - DNA, 50 bp, synthetic construct
  source 1..50: mol_type = other DNA
taaaacaaaaatttataaatctaaatacccacaatatcctcacaacctcc

SEQ ID NO: 6080 - DNA, 50 bp, synthetic construct
  source 1..50: mol_type = other DNA
tacaatcracracattatacaattaaaataatttaaactttaaacaaccc

SEQ ID NO: 6081 - DNA, 50 bp, synthetic construct
  source 1..50: mol_type = other DNA
tctaaaaaacraactattcaaaattcaaatcatcttaattacacaatacc

SEQ ID NO: 6082 - DNA, 50 bp, synthetic construct
  source 1..50: mol_type = other DNA
aaaaaacraactattcaaaattcaaatcatcttaattacacaataccrcc

SEQ ID NO: 6083 - DNA, 50 bp, synthetic construct
  source 1..50: mol_type = other DNA
aactattcaaaattcaaatcatcttaattacacaataccrccractatac

SEQ ID NO: 6084 - DNA, 50 bp, synthetic construct
  source 1..50: mol_type = other DNA
atacrcccataaaataccttaacccratacacttcaaaaacaatattctc

SEQ ID NO: 6085 - DNA, 50 bp, synthetic construct
  source 1..50: mol_type = other DNA
aaaatcaatttaatattcttccactaaattatcaaaacaatttttttaac

SEQ ID NO: 6086 - DNA, 50 bp, synthetic construct
  source 1..50: mol_type = other DNA
aaatataatataaaattcaactaaaacaacacatcttcaataaatccccc

SEQ ID NO: 6087 - DNA, 50 bp, synthetic construct
  source 1..50: mol_type = other DNA
aaattcaactaaaacaacacatcttcaataaatcccccrtaaaaaataac

SEQ ID NO: 6088 - DNA, 50 bp, synthetic construct
  source 1..50: mol_type = other DNA
taacraacatcttaaattatctttcaccaaaattatattcaacaactcac

SEQ ID NO: 6089 - DNA, 50 bp, synthetic construct
  source 1..50: mol_type = other DNA
ttatctttcaccaaaattatattcaacaactcacrttctaaaaccaaccc

SEQ ID NO: 6090 - DNA, 50 bp, synthetic construct
  source 1..50: mol_type = other DNA
craatctttcattctaaaactaacttattaatcrtctattccctacattc

SEQ ID NO: 6091 - DNA, 50 bp, synthetic construct
  source 1..50: mol_type = other DNA
cattaaattcttacactcraatctttcattctaaaactaacttattaatc

SEQ ID NO: 6092 - DNA, 50 bp, synthetic construct
  source 1..50: mol_type = other DNA
ttactatactaaacrctttacaaaaattatcccattaaattcttacactc

SEQ ID NO: 6093 - DNA, 50 bp, synthetic construct
  source 1..50: mol_type = other DNA
crcrtctcaaacacttctataaaatattctcaaaaccctataataactac

SEQ ID NO: 6094 - DNA, 50 bp, synthetic construct
  source 1..50: mol_type = other DNA
tactctctcctaactctactaaaatatttcrcaaatttttaccattctcc

SEQ ID NO: 6095 - DNA, 50 bp, synthetic construct
  source 1..50: mol_type = other DNA
taataactataaaacatacaaatcaatactacrtttaaaaataatatacc

SEQ ID NO: 6096 - DNA, 50 bp, synthetic construct
  source 1..50: mol_type = other DNA
acttttaaaacctacttaaaaaaacratcaacratacaccactttcaaac

SEQ ID NO: 6097 - DNA, 50 bp, synthetic construct
  source 1..50: mol_type = other DNA
tctaaataccactcaaatatcttcacacccatctcactcattaacactac

SEQ ID NO: 6098 - DNA, 50 bp, synthetic construct
  source 1..50: mol_type = other DNA
tatcttctttctcatcatccatcctaatttctacatactataacaacatc

SEQ ID NO: 6099 - DNA, 50 bp, synthetic construct
  source 1..50: mol_type = other DNA
tataaacataacaaatcaaacattaaatattattatacatacaattaaac

SEQ ID NO: 6100 - DNA, 50 bp, synthetic construct
  source 1..50: mol_type = other DNA
aaataatttaacatatttaataacatactaaaacctacctaatttacaac

SEQ ID NO: 6101 - DNA, 50 bp, synthetic construct
  source 1..50: mol_type = other DNA
tttaacatactactaaacatatcaaaccacttttcacaaacatcttttac

SEQ ID NO: 6102 - DNA, 50 bp, synthetic construct
  source 1..50: mol_type = other DNA
cctacccttaaaatccttcccttaacctacaaaaaaacaaccccaacatc

SEQ ID NO: 6103 - DNA, 50 bp, synthetic construct
  source 1..50: mol_type = other DNA
ctattaccacaaacaaataacaacataacactaacttcaataaaacaaac

SEQ ID NO: 6104 - DNA, 50 bp, synthetic construct
  source 1..50: mol_type = other DNA
craaattacctttctcaaaacaaataaccactacaataaaaccccaactc

SEQ ID NO: 6105 - DNA, 50 bp, synthetic construct
  source 1..50: mol_type = other DNA
tccaactaaatatattaaaaaaacaatatctaaacctacatcaacctaac

SEQ ID NO: 6106 - DNA, 50 bp, synthetic construct
  source 1..50: mol_type = other DNA
caacataataaaaccctatccctactaaaaacacaaaaattaatccraac

SEQ ID NO: 6107 - DNA, 50 bp, synthetic construct
  source 1..50: mol_type = other DNA
ttaccaacataataaaaccctatccctactaaaaacacaaaaattaatcc

SEQ ID NO: 6108 - DNA, 50 bp, synthetic construct
  source 1..50: mol_type = other DNA
aaactttataacaataaaaccacaaattaaacatattaaatttcttaacc

SEQ ID NO: 6109 - DNA, 50 bp, synthetic construct
  source 1..50: mol_type = other DNA
tactcrtaaactaatttattcaaacacaccraaataactttctaaacttc

SEQ ID NO: 6110 - DNA, 50 bp, synthetic construct
  source 1..50: mol_type = other DNA
ctatccacaaaccaaaacacttaaacacaaaaaccattcacaaaaaccac

SEQ ID NO: 6111 - DNA, 50 bp, synthetic construct
  source 1..50: mol_type = other DNA
tctcctaaacracctctaaacctacaaattactaaaaccacccttaacac

SEQ ID NO: 6112 - DNA, 50 bp, synthetic construct
  source 1..50: mol_type = other DNA
atatcaaaatataaaacaaacctaataacttacractataatcccaatac

SEQ ID NO: 6113 - DNA, 50 bp, synthetic construct
  source 1..50: mol_type = other DNA
actataccttacraacaatacttaaaatcatatatctaccracccaaacc

SEQ ID NO: 6114 - DNA, 50 bp, synthetic construct
  source 1..50: mol_type = other DNA
ccacaataaactcaccrttttccaaatctaccactaactccataaacatc

SEQ ID NO: 6115 - DNA, 50 bp, synthetic construct
  source 1..50: mol_type = other DNA
aaaaaccttaacatactaacacctacccaacccttctttacataaaaaac

SEQ ID NO: 6116 - DNA, 50 bp, synthetic construct
  source 1..50: mol_type = other DNA
aaacttaatacaccaaaaaacrctataatctcatattccaactttccttc

SEQ ID NO: 6117 - DNA, 50 bp, synthetic construct
  source 1..50: mol_type = other DNA
caaaaaactctacaaaacctaccccaaaccatattaatacacaatacaac

SEQ ID NO: 6118 - DNA, 50 bp, synthetic construct
  source 1..50: mol_type = other DNA
acctataaaattaaaaaataaaccccacraatataacaaacaccaccctc

SEQ ID NO: 6119 - DNA, 50 bp, synthetic construct
  source 1..50: mol_type = other DNA
atccraaataacaaaattaaacaaatacacatcaatcataaacctaaacc

SEQ ID NO: 6120 - DNA, 50 bp, synthetic construct
  source 1..50: mol_type = other DNA
ccataactaatatatacctactcaaccttaccatctcraatctactcttc

SEQ ID NO: 6121 - DNA, 50 bp, synthetic construct
  source 1..50: mol_type = other DNA
ctaataataaccccataaatcaaaatccttaccctcaaaaaaaacaccrc

SEQ ID NO: 6122 - DNA, 50 bp, synthetic construct
  source 1..50: mol_type = other DNA
aactaataataaccccataaatcaaaatccttaccctcaaaaaaaacacc

SEQ ID NO: 6123 - DNA, 50 bp, synthetic construct
  source 1..50: mol_type = other DNA
atcacccaaaaattaaaaactaaaaccaataactaaacccaataactcac

SEQ ID NO: 6124 - DNA, 50 bp, synthetic construct
  source 1..50: mol_type = other DNA
caaaactactactataccattacttcaccacatactatacatataaactc

SEQ ID NO: 6125 - DNA, 50 bp, synthetic construct
  source 1..50: mol_type = other DNA
tataacaaaacaacaacacacaacccraaataaaaataacaacaataaac

SEQ ID NO: 6126 - DNA, 50 bp, synthetic construct
  source 1..50: mol_type = other DNA
tctccacttcraattatatattactatcttaccataaaaaacttaaaaac

SEQ ID NO: 6127 - DNA, 50 bp, synthetic construct
  source 1..50: mol_type = other DNA
tccaaatatcccctttactttaaatccttctaaatttcctacctaaattc

SEQ ID NO: 6128 - DNA, 50 bp, synthetic construct
  source 1..50: mol_type = other DNA
acattaaaacaccaacatcttttcactttaatcatataaaaaatactacc

SEQ ID NO: 6129 - DNA, 50 bp, synthetic construct
  source 1..50: mol_type = other DNA
crtcctctttctaaataacttaatccaacaaacaaataatttttaatcac

SEQ ID NO: 6130 - DNA, 50 bp, synthetic construct
  source 1..50: mol_type = other DNA
ccrcaaaaataaaatactactattctctaatactacaaaaacaaaacacc

SEQ ID NO: 6131 - DNA, 50 bp, synthetic construct
  source 1..50: mol_type = other DNA
aaccataacataaaacctatataatacrtaccattccttaactactactc

SEQ ID NO: 6132 - DNA, 50 bp, synthetic construct
  source 1..50: mol_type = other DNA
aaaattaacttaacctatatcctaaccataacataaaacctatataatac

SEQ ID NO: 6133 - DNA, 50 bp, synthetic construct
  source 1..50: mol_type = other DNA
cccaactaaaaccaacaaaaccactacttaatctaccaatactcaaaatc

SEQ ID NO: 6134 - DNA, 50 bp, synthetic construct
  source 1..50: mol_type = other DNA
actacttaatctaccaatactcaaaatcrtaaactaaataaactattatc

SEQ ID NO: 6135 - DNA, 50 bp, synthetic construct
  source 1..50: mol_type = other DNA
aacaccttctaaccataaaaatatatatcaattaacttctactacataac

SEQ ID NO: 6136 - DNA, 50 bp, synthetic construct
  source 1..50: mol_type = other DNA
atttaacatataacaaaaatccccaaaccccaaaccacaaactaatctac

SEQ ID NO: 6137 - DNA, 50 bp, synthetic construct
  source 1..50: mol_type = other DNA
taacaaaaaataacrctcaaacaataatactcrctcacctctcactatac

SEQ ID NO: 6138 - DNA, 50 bp, synthetic construct
  source 1..50: mol_type = other DNA
ctaatactactaccratctaacaaaaaataacrctcaaacaataatactc

SEQ ID NO: 6139 - DNA, 50 bp, synthetic construct
  source 1..50: mol_type = other DNA
tcctactcctataaaaatctaatactactaccratctaacaaaaaataac

SEQ ID NO: 6140 - DNA, 50 bp, synthetic construct
  source 1..50: mol_type = other DNA
crcaattcacaataaaattcctactcctataaaaatctaatactactacc

SEQ ID NO: 6141 - DNA, 50 bp, synthetic construct
  source 1..50: mol_type = other DNA
cracaacaacatcaaattctcataaaaacaaaaaccctattataaactac

SEQ ID NO: 6142 - DNA, 50 bp, synthetic construct
  source 1..50: mol_type = other DNA
tcaaacattaattaaattctcataaaaaatacacaacctatatccctcrc

SEQ ID NO: 6143 - DNA, 50 bp, synthetic construct
  source 1..50: mol_type = other DNA
catcaaacattaattaaattctcataaaaaatacacaacctatatccctc

SEQ ID NO: 6144 - DNA, 50 bp, synthetic construct
  source 1..50: mol_type = other DNA
atcctatataccaataatccccaaccttattaatatcaaaaactaatttc

SEQ ID NO: 6145 - DNA, 50 bp, synthetic construct
  source 1..50: mol_type = other DNA
ttaacctcactaaattcttatctaactaaaaaatccattaaataaaaaac

SEQ ID NO: 6146 - DNA, 50 bp, synthetic construct
  source 1..50: mol_type = other DNA
atcccaattaatattcattcacatctaacattaaccaaaaaaccacatcc

SEQ ID NO: 6147 - DNA, 50 bp, synthetic construct
  source 1..50: mol_type = other DNA
accttaaaaacaactaaaacttcaaaaatcattttatccaaccccacacc

SEQ ID NO: 6148 - DNA, 50 bp, synthetic construct
  source 1..50: mol_type = other DNA
taattcaccaatcactaaacacaactaaaaaacttctcaacrcattcatc

SEQ ID NO: 6149 - DNA, 50 bp, synthetic construct
  source 1..50: mol_type = other DNA
tatctctactaattcaccaatcactaaacacaactaaaaaacttctcaac

SEQ ID NO: 6150 - DNA, 50 bp, synthetic construct
  source 1..50: mol_type = other DNA
ttctcccaacaactaaaactattatctactaacatttctcaaatatatcc

SEQ ID NO: 6151 - DNA, 50 bp, synthetic construct
  source 1..50: mol_type = other DNA
aataacctcatccaatcttaaaaaaaactctacaactaaattaactattc

SEQ ID NO: 6152 - DNA, 50 bp, synthetic construct
  source 1..50: mol_type = other DNA
aaaacccatctcaaaacaaataattatcaaaaaatcttaactaaaaccac

SEQ ID NO: 6153 - DNA, 50 bp, synthetic construct
  source 1..50: mol_type = other DNA
aaacacaatcataatcaccttcaatttattcctcccaacaaaaaaatacc

SEQ ID NO: 6154 - DNA, 50 bp, synthetic construct
  source 1..50: mol_type = other DNA
atcaccttcaatttattcctcccaacaaaaaaataccrtactttttcatc

SEQ ID NO: 6155 - DNA, 50 bp, synthetic construct
  source 1..50: mol_type = other DNA
aaaaccataacaaaaaccacaattacttttacaccaacctaatacaaaac

SEQ ID NO: 6156 - DNA, 50 bp, synthetic construct
  source 1..50: mol_type = other DNA
atctaattatttaaaaatatataacacttcccttcctatctcttcctccc

SEQ ID NO: 6157 - DNA, 50 bp, synthetic construct
  source 1..50: mol_type = other DNA
taaaaaactctaccttaaaacaatcaccttttaaactatatctaaaacrc

SEQ ID NO: 6158 - DNA, 50 bp, synthetic construct
  source 1..50: mol_type = other DNA
tataaaaaactctaccttaaaacaatcaccttttaaactatatctaaaac

SEQ ID NO: 6159 - DNA, 50 bp, synthetic construct
  source 1..50: mol_type = other DNA
accaaaaacaaacacaacatatttatttaacctactatcacacacacacc

SEQ ID NO: 6160 - DNA, 50 bp, synthetic construct
  source 1..50: mol_type = other DNA
ataaccacatatcccctataaaactaaaaaactcctaattaaaaaccacc

SEQ ID NO: 6161 - DNA, 50 bp, synthetic construct
  source 1..50: mol_type = other DNA
acactattatattacaaatacaaaaaaccaaatctatacttttattcatc

SEQ ID NO: 6162 - DNA, 50 bp, synthetic construct
  source 1..50: mol_type = other DNA
taaccatatccttttccattccaaaattatctaactatcaaaacaatacc

SEQ ID NO: 6163 - DNA, 50 bp, synthetic construct
  source 1..50: mol_type = other DNA
cactcrctctaactaaaaaaactaaccctactactcactcataaaacaac

SEQ ID NO: 6164 - DNA, 50 bp, synthetic construct
  source 1..50: mol_type = other DNA
ccaacrctaccctataaataaacaacaaaattaacctctccaatcaaaac

SEQ ID NO: 6165 - DNA, 50 bp, synthetic construct
  source 1..50: mol_type = other DNA
aacaaaaaaccaacccaaccctatcttctcaataaaaccttttctaacac

SEQ ID NO: 6166 - DNA, 50 bp, synthetic construct
  source 1..50: mol_type = other DNA
tataaaaaatttaaaactaaaaaccaaatcttatacctcccaataaaaac

SEQ ID NO: 6167 - DNA, 50 bp, synthetic construct
  source 1..50: mol_type = other DNA
taaaaattcaaaaaactttacctcccttatctcattttatacaacccttc

SEQ ID NO: 6168 - DNA, 50 bp, synthetic construct
  source 1..50: mol_type = other DNA
aaataaacaaaatcaatctatctaatataaactcatcaatcttatacaac

SEQ ID NO: 6169 - DNA, 50 bp, synthetic construct
  source 1..50: mol_type = other DNA
taattcccctaccccaatatataaacaaaattttcttatccaaaaaaccc

SEQ ID NO: 6170 - DNA, 50 bp, synthetic construct
  source 1..50: mol_type = other DNA
cattttaaaaaaaaatcaacacaaattatttactactccctcttcacccc

SEQ ID NO: 6171 - DNA, 50 bp, synthetic construct
  source 1..50: mol_type = other DNA
attcaatcttaattataaataaatataccacttttctctaccctaaacac

SEQ ID NO: 6172 - DNA, 50 bp, synthetic construct
  source 1..50: mol_type = other DNA
ttataaataaatataccacttttctctaccctaaacacrttattaaaaac

SEQ ID NO: 6173 - DNA, 50 bp, synthetic construct
  source 1..50: mol_type = other DNA
aaactaaacctacaatatactttaaataaaaactaataacatttaacacc

SEQ ID NO: 6174 - DNA, 50 bp, synthetic construct
  source 1..50: mol_type = other DNA
catactacaaactcaacccacctacaccctaaaaaaaccaaaattaatcc

SEQ ID NO: 6175 - DNA, 50 bp, synthetic construct
  source 1..50: mol_type = other DNA
taactaaaaaactccaaaacrctacctaaaaaaatttacatcacacctac

SEQ ID NO: 6176 - DNA, 50 bp, synthetic construct
  source 1..50: mol_type = other DNA
aaataaacaaactaccraaaaataccatcrttaatcraaacaaaactaac

SEQ ID NO: 6177 - DNA, 50 bp, synthetic construct
  source 1..50: mol_type = other DNA
ccctttaacttaaatttttctttatatttataaaaccrttttccttcrac

SEQ ID NO: 6178 - DNA, 50 bp, synthetic construct
  source 1..50: mol_type = other DNA
cttacaataaaaacattaaattatttcccctctaaatactctccctcttc

SEQ ID NO: 6179 - DNA, 50 bp, synthetic construct
  source 1..50: mol_type = other DNA
aaattccaaattacrcraattaaaaaatacctccractctaatttaaaac

SEQ ID NO: 6180 - DNA, 50 bp, synthetic construct
  source 1..50: mol_type = other DNA
tacrcttaaatccacttccccatctataacraaatattaaaacraaatac

SEQ ID NO: 6181 - DNA, 50 bp, synthetic construct
  source 1..50: mol_type = other DNA
ttaaaatcccctcccraaaaaccaacttaaaaaatatttacacrcacctc

SEQ ID NO: 6182 - DNA, 50 bp, synthetic construct
  source 1..50: mol_type = other DNA
crccractacaaaaccraaaaactaataatcataccraaattcctaattc

SEQ ID NO: 6183 - DNA, 50 bp, synthetic construct
  source 1..50: mol_type = other DNA
ttcccaaaaaaaacrcctacaaaacccaaataatactatcctaaaatcac

SEQ ID NO: 6184 - DNA, 50 bp, synthetic construct
  source 1..50: mol_type = other DNA
aaattttacaaacrtcttccctaaaaaaaaaccctttaaaactacaatcc

SEQ ID NO: 6185 - DNA, 50 bp, synthetic construct
  source 1..50: mol_type = other DNA
ttaaaattattcaaaaaacccrtatataaaacrcraattccatctaaaac

SEQ ID NO: 6186 - DNA, 50 bp, synthetic construct
  source 1..50: mol_type = other DNA
ctaaataaaatccrcrtctcatatacraactctttaaataactctaaacc

SEQ ID NO: 6187 - DNA, 50 bp, synthetic construct
  source 1..50: mol_type = other DNA
ttttcattctaacaaattccaaataaattaatacaataactccaaaaacc

SEQ ID NO: 6188 - DNA, 50 bp, synthetic construct
  source 1..50: mol_type = other DNA
ttaaaaaccraatattactctatcttctcccraattcaaaccttactccc

SEQ ID NO: 6189 - DNA, 50 bp, synthetic construct
  source 1..50: mol_type = other DNA
taaccttacrtaacaactataatccctaaaaacttaaacaaaaaaacaac

SEQ ID NO: 6190 - DNA, 50 bp, synthetic construct
  source 1..50: mol_type = other DNA
aaaaacaaaataaaaacatatacctaatcaaaacctaataataaccttac

SEQ ID NO: 6191 - DNA, 50 bp, synthetic construct
  source 1..50: mol_type = other DNA
aaacaatattccctctaaaattatttcccracttaaaaaacrataattac

SEQ ID NO: 6192 - DNA, 50 bp, synthetic construct
  source 1..50: mol_type = other DNA
tttccttttatttttaaccaaatccrtcaaacctaacaaacraataattc

SEQ ID NO: 6193 - DNA, 50 bp, synthetic construct
  source 1..50: mol_type = other DNA
taacaaataatacaactaaatttctaaacctacrtaatccatacacattc

SEQ ID NO: 6194 - DNA, 50 bp, synthetic construct
  source 1..50: mol_type = other DNA
caccccaatccctcttctcctaaaattctttcttttaaatccacrtcatc

SEQ ID NO: 6195 - DNA, 50 bp, synthetic construct
  source 1..50: mol_type = other DNA
aacactaaatacacraaaattctactaaaactccctctaattattctcac

SEQ ID NO: 6196 - DNA, 50 bp, synthetic construct
  source 1..50: mol_type = other DNA
ttaaaactatcaacrtaaaaacaattaaaaaaaatcctaataaaatctcc

SEQ ID NO: 6197 - DNA, 50 bp, synthetic construct
  source 1..50: mol_type = other DNA
tcttctataaattttctcctacttataaaaaaacctttttctctcctccc

SEQ ID NO: 6198 - DNA, 50 bp, synthetic construct
  source 1..50: mol_type = other DNA
ccaatatccccttaaataaaaaacctttttctctaaactcctaaattaac

SEQ ID NO: 6199 - DNA, 50 bp, synthetic construct
  source 1..50: mol_type = other DNA
aaaataaaaaacataactaaaaaaccaataaaatcaccctctctataacc

SEQ ID NO: 6200 - DNA, 50 bp, synthetic construct
  source 1..50: mol_type = other DNA
caaacaacaacaaaaactacaaaaaaataacttttaatccccaaataaac

SEQ ID NO: 6201 - DNA, 50 bp, synthetic construct
  source 1..50: mol_type = other DNA
aactaacccaacataacacacaaatatacractaaataaaaaccataccc

SEQ ID NO: 6202 - DNA, 50 bp, synthetic construct
  source 1..50: mol_type = other DNA
ctctctaaaaacaaaaactataactaacccaacataacacacaaatatac

SEQ ID NO: 6203 - DNA, 50 bp, synthetic construct
  source 1..50: mol_type = other DNA
aacaacataaacaaaaattaataatattaaatcatatcataaacttacac

SEQ ID NO: 6204 - DNA, 50 bp, synthetic construct
  source 1..50: mol_type = other DNA
aataaaaaacttaacacctaaaccaacaactactatactcratttctcrc

SEQ ID NO: 6205 - DNA, 50 bp, synthetic construct
  source 1..50: mol_type = other DNA
tccaactaccccaaaccaaatttaataataaaatacaatctccaacattc

SEQ ID NO: 6206 - DNA, 50 bp, synthetic construct
  source 1..50: mol_type = other DNA
aacccatcaaaaacractacaattaacaaaaaactaaaaacattaacrac

SEQ ID NO: 6207 - DNA, 50 bp, synthetic construct
  source 1..50: mol_type = other DNA
ttaaataattaaaaatttataaacttctatcatttaaactttccaacrcc

SEQ ID NO: 6208 - DNA, 50 bp, synthetic construct
  source 1..50: mol_type = other DNA
atttatcacctaaaattccctcccctacattaatttcccttactaaaatc

SEQ ID NO: 6209 - DNA, 50 bp, synthetic construct
  source 1..50: mol_type = other DNA
tccatccataaaacaaatccctacttttcaaactaaacatcaaataaatc

SEQ ID NO: 6210 - DNA, 50 bp, synthetic construct
  source 1..50: mol_type = other DNA
ttaactctaaatctaaaacctacaatcctaactaactaaataaaaactac

SEQ ID NO: 6211 - DNA, 50 bp, synthetic construct
  source 1..50: mol_type = other DNA
aaaaattataacctttaaacttttacaaaactaatttaaatctcaattcc

SEQ ID NO: 6212 - DNA, 50 bp, synthetic construct
  source 1..50: mol_type = other DNA
acactaaaattcctaactcaactttccctaaaatatattcatcacctacc

SEQ ID NO: 6213 - DNA, 50 bp, synthetic construct
  source 1..50: mol_type = other DNA
tcraaacatctaatcttaaaccattttttttaaacccactatttcaatcc

SEQ ID NO: 6214 - DNA, 50 bp, synthetic construct
  source 1..50: mol_type = other DNA
cttactactccatacctaacttaaccttaacaaacataaaatccaaaccc

SEQ ID NO: 6215 - DNA, 50 bp, synthetic construct
  source 1..50: mol_type = other DNA
tacctaacttaaccttaacaaacataaaatccaaacccrtaatataaacc

SEQ ID NO: 6216 - DNA, 50 bp, synthetic construct
  source 1..50: mol_type = other DNA
accaataatacctttacccrtattttattcaaacctactaaacttattcc

SEQ ID NO: 6217 - DNA, 50 bp, synthetic construct
  source 1..50: mol_type = other DNA
aatattaattttctaactaaaaacctctataaccaataatacctttaccc

SEQ ID NO: 6218 - DNA, 50 bp, synthetic construct
  source 1..50: mol_type = other DNA
actaataatttcataaaacacaaataaaacaattacacraccrcactcac

SEQ ID NO: 6219 - DNA, 50 bp, synthetic construct
  source 1..50: mol_type = other DNA
taaattttactaataatttcataaaacacaaataaaacaattacacracc

SEQ ID NO: 6220 - DNA, 50 bp, synthetic construct
  source 1..50: mol_type = other DNA
tttacaaacttacccaaatatcttctataactatcccttttattccatcc

SEQ ID NO: 6221 - DNA, 50 bp, synthetic construct
  source 1..50: mol_type = other DNA
atttaaataaaccaatccacaaaaaacccataaaacctaactaaccccac

SEQ ID NO: 6222 - DNA, 50 bp, synthetic construct
  source 1..50: mol_type = other DNA
ccttatacaacccacrtactctaaaaaactcctacctatacttatatttc

SEQ ID NO: 6223 - DNA, 50 bp, synthetic construct
  source 1..50: mol_type = other DNA
cctttctacaactctcttaaaccaaaacacaaaacccttatacaacccac

SEQ ID NO: 6224 - DNA, 50 bp, synthetic construct
  source 1..50: mol_type = other DNA
aatatccatcraaatctaccccaaacataaactcaaaacaatccctttac

SEQ ID NO: 6225 - DNA, 50 bp, synthetic construct
  source 1..50: mol_type = other DNA
atacaaaatcrcaaaaaaactattctaaacccatacttaaaacaaattcc

SEQ ID NO: 6226 - DNA, 50 bp, synthetic construct
  source 1..50: mol_type = other DNA
aattacccacratatcaattatcaacttactacttctcaactttaaatac

SEQ ID NO: 6227 - DNA, 50 bp, synthetic construct
  source 1..50: mol_type = other DNA
aaaaacaaattaaaatttaaaatcaaaactcaaccaaattaattacccac

SEQ ID NO: 6228 - DNA, 50 bp, synthetic construct
  source 1..50: mol_type = other DNA
cctaccttctataaaatataatccccatatcaaatctattttcaatcttc

SEQ ID NO: 6229 - DNA, 50 bp, synthetic construct
  source 1..50: mol_type = other DNA
caacactccaaaaaaattaaacctaaacactaaaataaaccttcaaccac

SEQ ID NO: 6230 - DNA, 50 bp, synthetic construct
  source 1..50: mol_type = other DNA
ccaatatccaaatctaacttctttaaaatactaattaaaatcaaatccac

SEQ ID NO: 6231 - DNA, 50 bp, synthetic construct
  source 1..50: mol_type = other DNA
tccaaatctaacttctttaaaatactaattaaaatcaaatccacrcatac

SEQ ID NO: 6232 - DNA, 50 bp, synthetic construct
  source 1..50: mol_type = other DNA
aaaacaatcaaaatcccctaaaactaaaacaacaataaaatattccccac

SEQ ID NO: 6233 - DNA, 50 bp, synthetic construct
  source 1..50: mol_type = other DNA
aactattaatttaaatcccaaacactataattctatccctaaactaaacc

SEQ ID NO: 6234 - DNA, 50 bp, synthetic construct
  source 1..50: mol_type = other DNA
aataataatataatacaccaaaactccaacrttactatcttaccaatacc

SEQ ID NO: 6235 - DNA, 50 bp, synthetic construct
  source 1..50: mol_type = other DNA
attcccaatatataacccaaaataataatataatacaccaaaactccaac

SEQ ID NO: 6236 - DNA, 50 bp, synthetic construct
  source 1..50: mol_type = other DNA
cacctcttactcaaacaacttccracrttcctctataaaaaatttattac

SEQ ID NO: 6237 - DNA, 50 bp, synthetic construct
  source 1..50: mol_type = other DNA
aaacaacttccracrttcctctataaaaaatttattacratctttaattc

SEQ ID NO: 6238 - DNA, 50 bp, synthetic construct
  source 1..50: mol_type = other DNA
ataaaaataacctcctcaaaacacactattatacaaataataattcactc

SEQ ID NO: 6239 - DNA, 50 bp, synthetic construct
  source 1..50: mol_type = other DNA
tatatcaaaaacctaaactttttaacrtttttatattaaaaactaacctc

SEQ ID NO: 6240 - DNA, 50 bp, synthetic construct
  source 1..50: mol_type = other DNA
ccccttccataaattaacaacaacctaatataactcaaaaaaaccacctc

SEQ ID NO: 6241 - DNA, 50 bp, synthetic construct
  source 1..50: mol_type = other DNA
acctcrctccacaaaatttaacctaaattaactataaatcaaaatacccc

SEQ ID NO: 6242 - DNA, 50 bp, synthetic construct
  source 1..50: mol_type = other DNA
rctccacaaaatttaacctaaattaactataaatcaaaataccccrtacc

SEQ ID NO: 6243 - DNA, 50 bp, synthetic construct
  source 1..50: mol_type = other DNA
tattctaactcccatcctttctaaaaactaactcatcaacttttttttcc

SEQ ID NO: 6244 - DNA, 50 bp, synthetic construct
  source 1..50: mol_type = other DNA
tacaatcaaaccaaaaaatatatctaaacaaattccctctaacacaaacc

SEQ ID NO: 6245 - DNA, 50 bp, synthetic construct
  source 1..50: mol_type = other DNA
aaaaatcacaccacaaccaactcaaaaaccaaaaaaaatacctattactc

SEQ ID NO: 6246 - DNA, 50 bp, synthetic construct
  source 1..50: mol_type = other DNA
aaaaattcctaaattaaaaacttacatatacrcttaacrcttctactttc

SEQ ID NO: 6247 - DNA, 50 bp, synthetic construct
  source 1..50: mol_type = other DNA
acctttcattaccctacctataataatataaacatttcttcctaaaaaac

SEQ ID NO: 6248 - DNA, 50 bp, synthetic construct
  source 1..50: mol_type = other DNA
cttcccaaacaaattccaccaatacctcaaacaaacttactaataatacc

SEQ ID NO: 6249 - DNA, 50 bp, synthetic construct
  source 1..50: mol_type = other DNA
tatcaacatctactaatttcaaccaaatcttattccaatcaacaaaatac

SEQ ID NO: 6250 - DNA, 50 bp, synthetic construct
  source 1..50: mol_type = other DNA
cataacactaataaaaatatctttatactaataaaccctaaaaacaactc

SEQ ID NO: 6251 - DNA, 50 bp, synthetic construct
  source 1..50: mol_type = other DNA
tactacttcttactaaacaaaactaacccataaacaatatacccaaaatc

SEQ ID NO: 6252 - DNA, 50 bp, synthetic construct
  source 1..50: mol_type = other DNA
aacaaaataacaaactttaatataaaaatacaaaccattaaaaactaaac

SEQ ID NO: 6253 - DNA, 50 bp, synthetic construct
  source 1..50: mol_type = other DNA
aaaaaaatacttctatactacctccccrataaaaaacccaaaacttccac

SEQ ID NO: 6254 - DNA, 50 bp, synthetic construct
  source 1..50: mol_type = other DNA
craaaatccraaaaatacttactctacaaacaaaaattaaacaatcttac

SEQ ID NO: 6255 - DNA, 50 bp, synthetic construct
  source 1..50: mol_type = other DNA
acccctctacaaatacraaataacraaatttataaaccccttttattatc

SEQ ID NO: 6256 - DNA, 50 bp, synthetic construct
  source 1..50: mol_type = other DNA
acaaaacaaatataaactatcctataacccctctacaaatacraaataac

SEQ ID NO: 6257 - DNA, 50 bp, synthetic construct
  source 1..50: mol_type = other DNA
actaacaaacaaaacaaatataaactatcctataacccctctacaaatac

SEQ ID NO: 6258 - DNA, 50 bp, synthetic construct
  source 1..50: mol_type = other DNA
aaaccataaaacaacccacatttaccttacctaccaattaataaaaaacc

SEQ ID NO: 6259 - DNA, 50 bp, synthetic construct
  source 1..50: mol_type = other DNA
aacaacccacatttaccttacctaccaattaataaaaaaccraccttccc

SEQ ID NO: 6260 - DNA, 50 bp, synthetic construct
  source 1..50: mol_type = other DNA
ccaaaattcactacaaaaataaattattcattaacaatacaataataccc

SEQ ID NO: 6261 - DNA, 50 bp, synthetic construct
  source 1..50: mol_type = other DNA
tcactacaaaaataaattattcattaacaatacaataatacccrctaccc

SEQ ID NO: 6262 - DNA, 50 bp, synthetic construct
  source 1..50: mol_type = other DNA
ccaaaacaaactccaaaaaaaatacctaatccaacaaaacccacaaatcc

SEQ ID NO: 6263 - DNA, 50 bp, synthetic construct
  source 1..50: mol_type = other DNA
cctaactaaatctccaaaaaccacrtactataacaaactatttccaaacc

SEQ ID NO: 6264 - DNA, 50 bp, synthetic construct
  source 1..50: mol_type = other DNA
ataaccctaaaacataactacatcracctaaaaacaatctaccataacac

SEQ ID NO: 6265 - DNA, 50 bp, synthetic construct
  source 1..50: mol_type = other DNA
aacttcactctactaacaacctcraaatatataatatcctaatcaaaccc

SEQ ID NO: 6266 - DNA, 50 bp, synthetic construct
  source 1..50: mol_type = other DNA
aaaaatcacttaatatctctatctctaaacttcactctactaacaacctc

SEQ ID NO: 6267 - DNA, 50 bp, synthetic construct
  source 1..50: mol_type = other DNA
taaaaatcaaaaaacatttataccataaactcaacctaaacaacctcacc

SEQ ID NO: 6268 - DNA, 50 bp, synthetic construct
  source 1..50: mol_type = other DNA
aacttatacccaaaatccrcccactcctaaaataaacctataaaaaaatc

SEQ ID NO: 6269 - DNA, 50 bp, synthetic construct
  source 1..50: mol_type = other DNA
ctcactaaatcaataaccraccctcctacaaactcactccaaaaataaac

SEQ ID NO: 6270 - DNA, 50 bp, synthetic construct
  source 1..50: mol_type = other DNA
cccctacccacccataaaaaaccaaaaacccttttaaaataaataacttc

SEQ ID NO: 6271 - DNA, 50 bp, synthetic construct
  source 1..50: mol_type = other DNA
ccccattcccaaaaaaattaaatctaacacacaacaaccataatatccac

SEQ ID NO: 6272 - DNA, 50 bp, synthetic construct
  source 1..50: mol_type = other DNA
caaaaaaaataaaccctaaaaacctaaaaacttcctcataaacccttaac

SEQ ID NO: 6273 - DNA, 50 bp, synthetic construct
  source 1..50: mol_type = other DNA
caaaacccatccttcctaataaaaccaaataacacttccaaatttatccc

SEQ ID NO: 6274 - DNA, 50 bp, synthetic construct
  source 1..50: mol_type = other DNA
tcccaattcctatttccctaaaaataaccctactacraaaattaaaatac

SEQ ID NO: 6275 - DNA, 50 bp, synthetic construct
  source 1..50: mol_type = other DNA
ttaaatcataattctttcatataccaataaataataattccataaaaccc

SEQ ID NO: 6276 - DNA, 50 bp, synthetic construct
  source 1..50: mol_type = other DNA
aaaaataaccaaccaaatataataatacatacctattatcccaactactc

SEQ ID NO: 6277 - DNA, 50 bp, synthetic construct
  source 1..50: mol_type = other DNA
caaaactcaaaattataataaacaaaaattataccaccatactccaaccc

SEQ ID NO: 6278 - DNA, 50 bp, synthetic construct
  source 1..50: mol_type = other DNA
acattacccactaacaaaaaacatataatcttatctaaaactaataaacc

SEQ ID NO: 6279 - DNA, 50 bp, synthetic construct
  source 1..50: mol_type = other DNA
tattcctactccaacaaatacaacactcaaatacttacctaaacaaatcc

SEQ ID NO: 6280 - DNA, 50 bp, synthetic construct
  source 1..50: mol_type = other DNA
ctacraccaaaaaaactctaacaatttcctctaaatcctttcaacatctc

SEQ ID NO: 6281 - DNA, 50 bp, synthetic construct
  source 1..50: mol_type = other DNA
aacaatttcctctaaatcctttcaacatctcrcttaaacaaatactcctc

SEQ ID NO: 6282 - DNA, 50 bp, synthetic construct
  source 1..50: mol_type = other DNA
acactcaaaccaaataaattaaataatacaaactaccaaattactaccac

SEQ ID NO: 6283 - DNA, 50 bp, synthetic construct
  source 1..50: mol_type = other DNA
aaattatatttatcctctaattacccrttttctctacacacaataatatc

SEQ ID NO: 6284 - DNA, 50 bp, synthetic construct
  source 1..50: mol_type = other DNA
aaaaaataattctccaaccaaaaaaaattatatttatcctctaattaccc

SEQ ID NO: 6285 - DNA, 50 bp, synthetic construct
  source 1..50: mol_type = other DNA
acaatcaaaaaataaacataacctctcctaactaaaaaaccatttcttac

SEQ ID NO: 6286 - DNA, 50 bp, synthetic construct
  source 1..50: mol_type = other DNA
cccccaaaatattataaaaatactctaaaatctaacccctaacaacaaac

SEQ ID NO: 6287 - DNA, 50 bp, synthetic construct
  source 1..50: mol_type = other DNA
acccaaaacaccctaaaaaccaataaaaactcccctcatacaaaaccaac

SEQ ID NO: 6288 - DNA, 50 bp, synthetic construct
  source 1..50: mol_type = other DNA
aaaacraaatttcatcatattaacaaaaataatctcratctcctaacctc

SEQ ID NO: 6289 - DNA, 50 bp, synthetic construct
  source 1..50: mol_type = other DNA
tttttttaaaacaaaatcttaatctatcacccaacctaaaatacaataac

SEQ ID NO: 6290 - DNA, 50 bp, synthetic construct
  source 1..50: mol_type = other DNA
aacaaaatcttaatctatcacccaacctaaaatacaataacrcaatctcc

SEQ ID NO: 6291 - DNA, 50 bp, synthetic construct
  source 1..50: mol_type = other DNA
ccttcccttatcctaaccaaatctaaactttctatccttttatctacaac

SEQ ID NO: 6292 - DNA, 50 bp, synthetic construct
  source 1..50: mol_type = other DNA
tttcacctccaatctaactaaaaaccttcaaaaacaatataataacctcc

SEQ ID NO: 6293 - DNA, 50 bp, synthetic construct
  source 1..50: mol_type = other DNA
tacttcctacataacctaaaaccccaaaaaacaaccrtacatctaacaac

SEQ ID NO: 6294 - DNA, 50 bp, synthetic construct
  source 1..50: mol_type = other DNA
aatcatacaaaaaacaacraccctacaaactaaaaccacaactaaccaac

SEQ ID NO: 6295 - DNA, 50 bp, synthetic construct
  source 1..50: mol_type = other DNA
tatctatatcaccraaaaaaccrtaaaatcctaaaccacaaactacacac

SEQ ID NO: 6296 - DNA, 50 bp, synthetic construct
  source 1..50: mol_type = other DNA
crcctacatatacttaaacctaacctaaaatctatccaaaacctaaccac

SEQ ID NO: 6297 - DNA, 50 bp, synthetic construct
  source 1..50: mol_type = other DNA
caaactctaaacaaacttcaaatcaaacccaaacacatacaaacrattac

SEQ ID NO: 6298 - DNA, 50 bp, synthetic construct
  source 1..50: mol_type = other DNA
ataaaataaaatcccaaatccttccccaaaaaaacaaacttccacrtatc

SEQ ID NO: 6299 - DNA, 50 bp, synthetic construct
  source 1..50: mol_type = other DNA
aaaaaataaaataaaatcccaaatccttccccaaaaaaacaaacttccac

SEQ ID NO: 6300 - DNA, 50 bp, synthetic construct
  source 1..50: mol_type = other DNA
ataacttaaatttctaaataaacttcataacctaaattaaaaacactctc

SEQ ID NO: 6301 - DNA, 50 bp, synthetic construct
  source 1..50: mol_type = other DNA
ttttttaaaaacraaatcttactctatcacccaaacttaaatacaataac

SEQ ID NO: 6302 - DNA, 50 bp, synthetic construct
  source 1..50: mol_type = other DNA
aaaaactaatcactaaattctaaacrcacaaacatcrctctacctatacc

SEQ ID NO: 6303 - DNA, 50 bp, synthetic construct
  source 1..50: mol_type = other DNA
caacatattaaaaccccatctcttctaaaaataacaaaaactaaccaaac

SEQ ID NO: 6304 - DNA, 50 bp, synthetic construct
  source 1..50: mol_type = other DNA
aaaaccctacraaacaataccttaaaaaaatatttaaaaaaacaaattcc

SEQ ID NO: 6305 - DNA, 50 bp, synthetic construct
  source 1..50: mol_type = other DNA
cataatacctaatccaccctaccattctcaaaatataactaaaaccctac

SEQ ID NO: 6306 - DNA, 50 bp, synthetic construct
  source 1..50: mol_type = other DNA
tataaaccaaaactataccaaaccaaaaaaaaacttaaatcaatataaac

SEQ ID NO: 6307 - DNA, 50 bp, synthetic construct
  source 1..50: mol_type = other DNA
cctacaatataacacacacrcrtactaactcataaatctaaaaaacctac

SEQ ID NO: 6308 - DNA, 50 bp, synthetic construct
  source 1..50: mol_type = other DNA
ttctaacctccatctactcaaaacaaacctaaacrcaataaacaaaaaac

SEQ ID NO: 6309 - DNA, 50 bp, synthetic construct
  source 1..50: mol_type = other DNA
ttctccccacactaaaccttaacaaccaaaaacctaaacaaaaacacaac

SEQ ID NO: 6310 - DNA, 50 bp, synthetic construct
  source 1..50: mol_type = other DNA
aaacttaaccaaccataaaaaaaccaccctattctcacatacataaactc

SEQ ID NO: 6311 - DNA, 50 bp, synthetic construct
  source 1..50: mol_type = other DNA
ccaaactctattaacctaaaatataactccctaacrctaacctaaaaacc

SEQ ID NO: 6312 - DNA, 50 bp, synthetic construct
  source 1..50: mol_type = other DNA
aactctattaacctaaaatataactccctaacrctaacctaaaaaccrcc

SEQ ID NO: 6313 - DNA, 50 bp, synthetic construct
  source 1..50: mol_type = other DNA
aaaatattcaacrctaaaaaccccraacctaaaacaaaaacataaaaaac

SEQ ID NO: 6314 - DNA, 50 bp, synthetic construct
  source 1..50: mol_type = other DNA
aatcctaacctcaatcctcaacctaaatcaaaaccctaactcaactttcc

SEQ ID NO: 6315 - DNA, 50 bp, synthetic construct
  source 1..50: mol_type = other DNA
tctaaacttcatttctcccacctaaactaaacaacatacatataaaaccc

SEQ ID NO: 6316 - DNA, 50 bp, synthetic construct
  source 1..50: mol_type = other DNA
tataaaaaaacaccttacaacaactcccttaaaaacctacccaactaccc

SEQ ID NO: 6317 - DNA, 50 bp, synthetic construct
  source 1..50: mol_type = other DNA
craacactctcaaaccttaatacctaaatcraaaatcactttctccttcc

SEQ ID NO: 6318 - DNA, 50 bp, synthetic construct
  source 1..50: mol_type = other DNA
taactatataaccttaacaacraacactctcaaaccttaatacctaaatc

SEQ ID NO: 6319 - DNA, 50 bp, synthetic construct
  source 1..50: mol_type = other DNA
aaaaataataaccattaatactcccraacaactaaaactaatatctcctc

SEQ ID NO: 6320 - DNA, 50 bp, synthetic construct
  source 1..50: mol_type = other DNA
caactatccraaaacaccaataatcattaccccttctcatccctacaaac

SEQ ID NO: 6321 - DNA, 50 bp, synthetic construct
  source 1..50: mol_type = other DNA
cccraatttaaatacaaactctaactttattaaactatataacctaaaac

SEQ ID NO: 6322 - DNA, 50 bp, synthetic construct
  source 1..50: mol_type = other DNA
ttattaaactatataacctaaaacrtaaaacctcaatattcccatctatc

SEQ ID NO: 6323 - DNA, 50 bp, synthetic construct
  source 1..50: mol_type = other DNA
cacttaaaaccaaaaattcraaacctaccaaaccaacataacaaaacccc

SEQ ID NO: 6324 - DNA, 50 bp, synthetic construct
  source 1..50: mol_type = other DNA
tccacctaccttaacctcccaaaacattaacattaaaaatataaaccacc

SEQ ID NO: 6325 - DNA, 50 bp, synthetic construct
  source 1..50: mol_type = other DNA
taacccaaaactataaaatatctcraaacctcctaaatatccccattatc

SEQ ID NO: 6326 - DNA, 50 bp, synthetic construct
  source 1..50: mol_type = other DNA
ataacatctaacacacaattctccrataataaaaatacctaaaaaattcc

SEQ ID NO: 6327 - DNA, 50 bp, synthetic construct
  source 1..50: mol_type = other DNA
aaaatatttaatttttccttcaaataaataaacaaatatattccatatac

SEQ ID NO: 6328 - DNA, 50 bp, synthetic construct
  source 1..50: mol_type = other DNA
ccatattcacttaaaacrtcttttaaacatcctaataaaaatactaacac

SEQ ID NO: 6329 - DNA, 50 bp, synthetic construct
  source 1..50: mol_type = other DNA
ctcaaactaaatcctccrtaccaataccttcactaaaatatctaaaaaac

SEQ ID NO: 6330 - DNA, 50 bp, synthetic construct
  source 1..50: mol_type = other DNA
taacaaaaaaaacctaaacctcctaattccctaaacraaaacctaaacac

SEQ ID NO: 6331 - DNA, 50 bp, synthetic construct
  source 1..50: mol_type = other DNA
attcaacccaaaaaaacraaacraataactacaaaaaactacatcctacc

SEQ ID NO: 6332 - DNA, 50 bp, synthetic construct
  source 1..50: mol_type = other DNA
acttaaaacaaacctacacacaatacctattcaacccaaaaaaacraaac

SEQ ID NO: 6333 - DNA, 50 bp, synthetic construct
  source 1..50: mol_type = other DNA
ctaaaacttaaaacaaacctacacacaatacctattcaacccaaaaaaac

SEQ ID NO: 6334 - DNA, 50 bp, synthetic construct
  source 1..50: mol_type = other DNA
tcaaccttatacaacactatataacctcctacactactaatacccraaac

SEQ ID NO: 6335 - DNA, 50 bp, synthetic construct
  source 1..50: mol_type = other DNA
tataatcaaccttatacaacactatataacctcctacactactaataccc

SEQ ID NO: 6336 - DNA, 50 bp, synthetic construct
  source 1..50: mol_type = other DNA
tatcaacaatacaaaaaaccacataatactacacaaaactaaccacatcc

SEQ ID NO: 6337 - DNA, 50 bp, synthetic construct
  source 1..50: mol_type = other DNA
aaccacataatactacacaaaactaaccacatccraaaaaaccaaaatac

SEQ ID NO: 6338 - DNA, 50 bp, synthetic construct
  source 1..50: mol_type = other DNA
atccraaaaaaccaaaatacrtaacctaaacaaacaattaaaatccaaac

SEQ ID NO: 6339 - DNA, 50 bp, synthetic construct
  source 1..50: mol_type = other DNA
aaaatacrtaacctaaacaaacaattaaaatccaaacraaaactaaaatc

SEQ ID NO: 6340 - DNA, 50 bp, synthetic construct
  source 1..50: mol_type = other DNA
caaacraaaactaaaatcracatactcaatacrtacattaataaaaccac

SEQ ID NO: 6341 - DNA, 50 bp, synthetic construct
  source 1..50: mol_type = other DNA
catactcaatacrtacattaataaaaccacraataattttcactaacaac

SEQ ID NO: 6342 - DNA, 50 bp, synthetic construct
  source 1..50: mol_type = other DNA
caacacctacaaaaaataccaaaaaacacrttcttaatacrtaacaacac

SEQ ID NO: 6343 - DNA, 50 bp, synthetic construct
  source 1..50: mol_type = other DNA
craaacccracaacacctacaaaaaataccaaaaaacacrttcttaatac

SEQ ID NO: 6344 - DNA, 50 bp, synthetic construct
  source 1..50: mol_type = other DNA
ctaacaacrtaaacaaataactaaaatacrtactatcacrtactaaaaac

SEQ ID NO: 6345 - DNA, 50 bp, synthetic construct
  source 1..50: mol_type = other DNA
actatcacrtactaaaaacrtaccttctaacatcttctacaaatattatc

SEQ ID NO: 6346 - DNA, 50 bp, synthetic construct
  source 1..50: mol_type = other DNA
crtactaaaaacrtaccttctaacatcttctacaaatattatcraacctc

SEQ ID NO: 6347 - DNA, 50 bp, synthetic construct
  source 1..50: mol_type = other DNA
aactaaaataaccaatccaatacaaatcaaaacaatacctccaacttcac

SEQ ID NO: 6348 - DNA, 50 bp, synthetic construct
  source 1..50: mol_type = other DNA
ataaaaaaaacttaattctacctttaaatctaatttaaaaaacataaccc

SEQ ID NO: 6349 - DNA, 50 bp, synthetic construct
  source 1..50: mol_type = other DNA
aaacccaaaaaaaaatctactatacataaccaaaaccttctcctaccttc

SEQ ID NO: 6350 - DNA, 50 bp, synthetic construct
  source 1..50: mol_type = other DNA
aaaccccaacaaacaaaaactacataactaacttaaacaattccaaaaac

SEQ ID NO: 6351 - DNA, 50 bp, synthetic construct
  source 1..50: mol_type = other DNA
aaactacataactaacttaaacaattccaaaaacraaacccacaaaaacc

SEQ ID NO: 6352 - DNA, 50 bp, synthetic construct
  source 1..50: mol_type = other DNA
aaaaaacataaatcctccactcactactcatccactaccttctaaacctc

SEQ ID NO: 6353 - DNA, 50 bp, synthetic construct
  source 1..50: mol_type = other DNA
tccccacataaaaacaatcaaaataacttttataataacaaataaaaaac

SEQ ID NO: 6354 - DNA, 50 bp, synthetic construct
  source 1..50: mol_type = other DNA
atataaacctaaatccctctaaaaaacactcctatccataaaaaaataac

SEQ ID NO: 6355 - DNA, 50 bp, synthetic construct
  source 1..50: mol_type = other DNA
acratcttatacaaaacttactcttcactaaacttcaatttcccttttcc

SEQ ID NO: 6356 - DNA, 50 bp, synthetic construct
  source 1..50: mol_type = other DNA
cctactaaataaacttcccctaaaaaaaaactactactcaaattttaatc

SEQ ID NO: 6357 - DNA, 50 bp, synthetic construct
  source 1..50: mol_type = other DNA
cccaaccaatctaattctccttaaaaacaaaaccataatttcattataac

SEQ ID NO: 6358 - DNA, 50 bp, synthetic construct
  source 1..50: mol_type = other DNA
cctttaacctaaaaaacacaactcaaaaacaaacaaaccctaactccccc

SEQ ID NO: 6359 - DNA, 50 bp, synthetic construct
  source 1..50: mol_type = other DNA
aaaacaataactaatatattctaaatacatatatatacccrctttaaaac

SEQ ID NO: 6360 - DNA, 50 bp, synthetic construct
  source 1..50: mol_type = other DNA
atataaataaatattctacactcaaaaaaaactaaataactatacttatc

SEQ ID NO: 6361 - DNA, 50 bp, synthetic construct
  source 1..50: mol_type = other DNA
cccctctcctaccccaaactaacaaataaactcttcttaaaaaaccaacc

SEQ ID NO: 6362 - DNA, 50 bp, synthetic construct
  source 1..50: mol_type = other DNA
aaccccaactcatacatttccttatctctaaaacatttcctaatccaccc

SEQ ID NO: 6363 - DNA, 50 bp, synthetic construct
  source 1..50: mol_type = other DNA
tatcctaaaaatacctactcatttttttttcttattttttctaaaacaac

SEQ ID NO: 6364 - DNA, 50 bp, synthetic construct
  source 1..50: mol_type = other DNA
taattaacctccaaccaaaaaatattactttcaaaaaaacaccaactacc

SEQ ID NO: 6365 - DNA, 50 bp, synthetic construct
  source 1..50: mol_type = other DNA
ataataaacaacaataaaccttacctaattcccacatcrttttcaaaatc

SEQ ID NO: 6366 - DNA, 50 bp, synthetic construct
  source 1..50: mol_type = other DNA
ccccaacctataaacttccccacaaaaataacaaccacaactttcaaacc

SEQ ID NO: 6367 - DNA, 50 bp, synthetic construct
  source 1..50: mol_type = other DNA
aaccctataaaactcaaaacctccctctaaaacttaaaaaaccataaaac

SEQ ID NO: 6368 - DNA, 50 bp, synthetic construct
  source 1..50: mol_type = other DNA
ctttttacctatacccttaccactaaaacttcctaccaaaaaatatacac

SEQ ID NO: 6369 - DNA, 50 bp, synthetic construct
  source 1..50: mol_type = other DNA
aacaacaaaaatatataaaaacacatattaaaccaaacaaaataactcac

SEQ ID NO: 6370 - DNA, 50 bp, synthetic construct
  source 1..50: mol_type = other DNA
actaactaaataaaattcraccacrccttacatctattaaattaacccrc

SEQ ID NO: 6371 - DNA, 50 bp, synthetic construct
  source 1..50: mol_type = other DNA
rtctaaactcrcractcctaaaccaataaaaaaataacatataaaaaaac

SEQ ID NO: 6372 - DNA, 50 bp, synthetic construct
  source 1..50: mol_type = other DNA
aatacacccaaaacatcaaaaaaccaaacatcacccaataacctataaac

SEQ ID NO: 6373 - DNA, 50 bp, synthetic construct
  source 1..50: mol_type = other DNA
attaaataatacttaatcctttaataccctaaatataccaaaaaaccccc

SEQ ID NO: 6374 - DNA, 50 bp, synthetic construct
  source 1..50: mol_type = other DNA
aacttttccatcaccratttttctcaaatatctacaaataaacaaaaccc

SEQ ID NO: 6375 - DNA, 50 bp, synthetic construct
  source 1..50: mol_type = other DNA
ccrccacttaaaaccraattctatctacctataaacacctaaaaaaaatc

SEQ ID NO: 6376 - DNA, 50 bp, synthetic construct
  source 1..50: mol_type = other DNA
acctaaaaaaaatcrataataaaaaaactcacctctaataattcatctcc

SEQ ID NO: 6377 - DNA, 50 bp, synthetic construct
  source 1..50: mol_type = other DNA
aaactcacctctaataattcatctccrtatctcctattaaaattactaac

SEQ ID NO: 6378 - DNA, 50 bp, synthetic construct
  source 1..50: mol_type = other DNA
aaaacctcaaaaacaaaaatatcacattctcaccaaccactattaaaaac

SEQ ID NO: 6379 - DNA, 50 bp, synthetic construct
  source 1..50: mol_type = other DNA
tatcacattctcaccaaccactattaaaaacraacttataaaattctacc

SEQ ID NO: 6380 - DNA, 50 bp, synthetic construct
  source 1..50: mol_type = other DNA
ttaacataaaccaaaaccaattaaaaaaaatcaccaactacttaccaacc

SEQ ID NO: 6381 - DNA, 50 bp, synthetic construct
  source 1..50: mol_type = other DNA
aattcaaattaaaaaacccattacttcactaaaacttttatcttaaattc

SEQ ID NO: 6382 - DNA, 50 bp, synthetic construct
  source 1..50: mol_type = other DNA
catatttctcctataaaaacaatataacctctatccctatccttattcac

SEQ ID NO: 6383 - DNA, 50 bp, synthetic construct
  source 1..50: mol_type = other DNA
atatatctaaaaatatctcttcctctaaaaccaataaaactaatttaacc

SEQ ID NO: 6384 - DNA, 50 bp, synthetic construct
  source 1..50: mol_type = other DNA
ttcttcaactctttaactcraaacttcttcaaatccactatactcaaatc

SEQ ID NO: 6385 - DNA, 50 bp, synthetic construct
  source 1..50: mol_type = other DNA
ataaaacaaatactatatcaaaaaacaaaatatcaaacrcaacacccccc

SEQ ID NO: 6386 - DNA, 50 bp, synthetic construct
  source 1..50: mol_type = other DNA
tctcttaaacraataaaacaaatactatatcaaaaaacaaaatatcaaac

SEQ ID NO: 6387 - DNA, 50 bp, synthetic construct
  source 1..50: mol_type = other DNA
aaaatactacrcttaataccctaccccttaatacaatatctatcttaccc

SEQ ID NO: 6388 - DNA, 50 bp, synthetic construct
  source 1..50: mol_type = other DNA
aaaatatctaaaatataatttttccacaaaaatatcttcaatcaatacac

SEQ ID NO: 6389 - DNA, 50 bp, synthetic construct
  source 1..50: mol_type = other DNA
aaataatctaaaacaaaaccaattacttaaaaaacactaattcttaatcc

SEQ ID NO: 6390 - DNA, 50 bp, synthetic construct
  source 1..50: mol_type = other DNA
tactttctctttatacraaaaaaacataacttaatctactcttccccatc

SEQ ID NO: 6391 - DNA, 50 bp, synthetic construct
  source 1..50: mol_type = other DNA
tatacacaaataataccaacaattatcacaccttaccacrctaacccctc

SEQ ID NO: 6392 - DNA, 50 bp, synthetic construct
  source 1..50: mol_type = other DNA
taaaaaaaccatatacacaaataataccaacaattatcacaccttaccac

SEQ ID NO: 6393 - DNA, 50 bp, synthetic construct
  source 1..50: mol_type = other DNA
taactactaacactatctatacatataacctcttcatccttaactcttac

SEQ ID NO: 6394 - DNA, 50 bp, synthetic construct
  source 1..50: mol_type = other DNA
aaaaacaaacctacaattacaattaataaaattaaaataaactctttaac

SEQ ID NO: 6395 - DNA, 50 bp, synthetic construct
  source 1..50: mol_type = other DNA
aaatctattccaactccatcaactacaactacaaacttatctctactttc

SEQ ID NO: 6396 - DNA, 50 bp, synthetic construct
  source 1..50: mol_type = other DNA
aacttatctctactttcrattattacctacrtaacaacaattatcctcac

SEQ ID NO: 6397 - DNA, 50 bp, synthetic construct
  source 1..50: mol_type = other DNA
tcacraccttttcraaaactactacaaataaacctacacrtaaaaaatac

SEQ ID NO: 6398 - DNA, 50 bp, synthetic construct
  source 1..50: mol_type = other DNA
accttaaatcctaaacaaaatctaaaaataaacatacattaatccttaac

SEQ ID NO: 6399 - DNA, 50 bp, synthetic construct
  source 1..50: mol_type = other DNA
ttaaatcctaaacaaaatctaaaaataaacatacattaatccttaacrcc

SEQ ID NO: 6400 - DNA, 50 bp, synthetic construct
  source 1..50: mol_type = other DNA
aaacaaaatctaaaaataaacatacattaatccttaacrccrtcaacrcc

SEQ ID NO: 6401 - DNA, 50 bp, synthetic construct
  source 1..50: mol_type = other DNA
aaacactaaaacccrcrctaattaaaacaaaaataacaacttccataacc

SEQ ID NO: 6402 - DNA, 50 bp, synthetic construct
  source 1..50: mol_type = other DNA
aactaaacccaaaacracaaaacacractaaaaacacaaaacrttaaatc

SEQ ID NO: 6403 - DNA, 50 bp, synthetic construct
  source 1..50: mol_type = other DNA
crcccaataccaaataaccctataaatactaaataaataaaaccraccrc

SEQ ID NO: 6404 - DNA, 50 bp, synthetic construct
  source 1..50: mol_type = other DNA
atcctcraacatcaaatcctcctcacacacaactaaataaccataaaaac

SEQ ID NO: 6405 - DNA, 50 bp, synthetic construct
  source 1..50: mol_type = other DNA
ctcaaatacrctataatccaaattaccaataaaaaaattacrcrtaaccc

SEQ ID NO: 6406 - DNA, 50 bp, synthetic construct
  source 1..50: mol_type = other DNA
actccacctcaaatacrctataatccaaattaccaataaaaaaattacrc

SEQ ID NO: 6407 - DNA, 50 bp, synthetic construct
  source 1..50: mol_type = other DNA
caactccacctcaaatacrctataatccaaattaccaataaaaaaattac

SEQ ID NO: 6408 - DNA, 50 bp, synthetic construct
  source 1..50: mol_type = other DNA
caacctcttcattaataacctaaaccacaacrtatctaaaataaaactac

SEQ ID NO: 6409 - DNA, 50 bp, synthetic construct
  source 1..50: mol_type = other DNA
ttaataacctaaaccacaacrtatctaaaataaaactacraaaaaccttc

SEQ ID NO: 6410 - DNA, 50 bp, synthetic construct
  source 1..50: mol_type = other DNA
cttcraaaaatataacatcatcraaaaaataatcatcaaaaaacctaccc

SEQ ID NO: 6411 - DNA, 50 bp, synthetic construct
  source 1..50: mol_type = other DNA
ataacatcatcraaaaaataatcatcaaaaaacctacccrtaaccaaaac

SEQ ID NO: 6412 - DNA, 50 bp, synthetic construct
  source 1..50: mol_type = other DNA
taatcrcaaccccattaaaataaactataacaaaaccaaccccaccactc

SEQ ID NO: 6413 - DNA, 50 bp, synthetic construct
  source 1..50: mol_type = other DNA
aaaaccaaccccaccactcrtctctaaataaataacctaaaacctaacac

SEQ ID NO: 6414 - DNA, 50 bp, synthetic construct
  source 1..50: mol_type = other DNA
aacaaaactatctcctttaacrtaatcaataatccraatactcccaaaac

SEQ ID NO: 6415 - DNA, 50 bp, synthetic construct
  source 1..50: mol_type = other DNA
ctcrtactaaatataaacaaaactatctcctttaacrtaatcaataatcc

SEQ ID NO: 6416 - DNA, 50 bp, synthetic construct
  source 1..50: mol_type = other DNA
actacrtccaaactctcrtactaaatataaacaaaactatctcctttaac

SEQ ID NO: 6417 - DNA, 50 bp, synthetic construct
  source 1..50: mol_type = other DNA
aaataacacaaaactaccrtctaactcrataacactactaaacaactctc

SEQ ID NO: 6418 - DNA, 50 bp, synthetic construct
  source 1..50: mol_type = other DNA
caaacaaaatactctaaacactacraaaccaacrtaaacaactcttcctc

SEQ ID NO: 6419 - DNA, 50 bp, synthetic construct
  source 1..50: mol_type = other DNA
ataatttcaacaaatttcaaacaaaatactctaaacactacraaaccaac

SEQ ID NO: 6420 - DNA, 50 bp, synthetic construct
  source 1..50: mol_type = other DNA
taaacacaaataatttcaacaaatttcaaacaaaatactctaaacactac

SEQ ID NO: 6421 - DNA, 50 bp, synthetic construct
  source 1..50: mol_type = other DNA
ataactaaaaaccccraaatattataaataccaatttaaaatccaaacac

SEQ ID NO: 6422 - DNA, 50 bp, synthetic construct
  source 1..50: mol_type = other DNA
aaaaaataaaataacrtacctaaactccaaactaatacccataacacttc

SEQ ID NO: 6423 - DNA, 50 bp, synthetic construct
  source 1..50: mol_type = other DNA
aaactcatccttaatataaccacctccaaactcctttttcactataaccc

SEQ ID NO: 6424 - DNA, 50 bp, synthetic construct
  source 1..50: mol_type = other DNA
cctcttacratttaacccttacccttcaaatacractaaaaatactatac

SEQ ID NO: 6425 - DNA, 50 bp, synthetic construct
  source 1..50: mol_type = other DNA
aaaaacaaaaaccaaaccrtaaaaaacctctaaacaaaactacctctccc

SEQ ID NO: 6426 - DNA, 50 bp, synthetic construct
  source 1..50: mol_type = other DNA
ctaaacaaaactacctctcccraaacaaacaaatacctctaaaaaaactc

SEQ ID NO: 6427 - DNA, 50 bp, synthetic construct
  source 1..50: mol_type = other DNA
ctctcccraaacaaacaaatacctctaaaaaaactcrataaactcactac

SEQ ID NO: 6428 - DNA, 50 bp, synthetic construct
  source 1..50: mol_type = other DNA
ataatcaaactaaacraaaactccccctactaataaaaaccacctactac

SEQ ID NO: 6429 - DNA, 50 bp, synthetic construct
  source 1..50: mol_type = other DNA
cttactctccaaacatcaacctaactccraaaactataatcaaactaaac

SEQ ID NO: 6430 - DNA, 50 bp, synthetic construct
  source 1..50: mol_type = other DNA
aatattccttcaatactaccaaactcttctaacttcctaaactcctaaac

SEQ ID NO: 6431 - DNA, 50 bp, synthetic construct
  source 1..50: mol_type = other DNA
taattaactaaacccacaatatctactaaaaccacactaaacacaaaaac

SEQ ID NO: 6432 - DNA, 50 bp, synthetic construct
  source 1..50: mol_type = other DNA
ataaatattaaacacaaatccctaccctaaaaaccttccttcttaaaccc

SEQ ID NO: 6433 - DNA, 50 bp, synthetic construct
  source 1..50: mol_type = other DNA
aaactatataaaaaatccaccttcacctccactccctaacccaaataaac

SEQ ID NO: 6434 - DNA, 50 bp, synthetic construct
  source 1..50: mol_type = other DNA
acccaaaactatactatttccattataacaatacaactaactcaatcctc

SEQ ID NO: 6435 - DNA, 50 bp, synthetic construct
  source 1..50: mol_type = other DNA
cactacttccccacaactcaccccttctaaaaccaaattaaataattccc

SEQ ID NO: 6436 - DNA, 50 bp, synthetic construct
  source 1..50: mol_type = other DNA
aataaccctatctaaaaaattctaactaactaaacaaaaattttcactcc

SEQ ID NO: 6437 - DNA, 50 bp, synthetic construct
  source 1..50: mol_type = other DNA
rtaaatctaataaaaccctacttctacaacaaacaaatataatttaaatc

SEQ ID NO: 6438 - DNA, 50 bp, synthetic construct
  source 1..50: mol_type = other DNA
ctaataaaaccccaaaactaaaaatactaaacatctacctacttatctcc

SEQ ID NO: 6439 - DNA, 50 bp, synthetic construct
  source 1..50: mol_type = other DNA
aacaaacaaacaaatatccaacactctcaactctaaaacctcactaatac

SEQ ID NO: 6440 - DNA, 50 bp, synthetic construct
  source 1..50: mol_type = other DNA
caaaaaacacttaacctccctatccctactctctccctctaaaaaataac

SEQ ID NO: 6441 - DNA, 50 bp, synthetic construct
  source 1..50: mol_type = other DNA
aaaaaacctatcracrttactaaaaaaaaccacaacatctcacraaaaac

SEQ ID NO: 6442 - DNA, 50 bp, synthetic construct
  source 1..50: mol_type = other DNA
ttttattaaaaaacctatcracrttactaaaaaaaaccacaacatctcac

SEQ ID NO: 6443 - DNA, 50 bp, synthetic construct
  source 1..50: mol_type = other DNA
tcttttctaacaacrtcracaaactttccaacaaaattcctctttcctac

SEQ ID NO: 6444 - DNA, 50 bp, synthetic construct
  source 1..50: mol_type = other DNA
aatactaataaataacctacattccaacctatataacataataaaacctc

SEQ ID NO: 6445 - DNA, 50 bp, synthetic construct
  source 1..50: mol_type = other DNA
aaaaccatatttattctccaacctcactacaactaaattctaaccaatac

SEQ ID NO: 6446 - DNA, 50 bp, synthetic construct
  source 1..50: mol_type = other DNA
aaaccactatcatattacaacctcraaaataataataccttttttctaac

SEQ ID NO: 6447 - DNA, 50 bp, synthetic construct
  source 1..50: mol_type = other DNA
aacaaaaaatacacaccttaaatactaaaccactatcatattacaacctc

SEQ ID NO: 6448 - DNA, 50 bp, synthetic construct
  source 1..50: mol_type = other DNA
acttttataaaaaataccrtccctctactacctcctttttactaacaaac

SEQ ID NO: 6449 - DNA, 50 bp, synthetic construct
  source 1..50: mol_type = other DNA
aataacaacatcacactaaaatatacaaaacaacttttataaaaaatacc

SEQ ID NO: 6450 - DNA, 50 bp, synthetic construct
  source 1..50: mol_type = other DNA
actactctataccacataataattaaaaacacaaactttaaaatcaaaac

SEQ ID NO: 6451 - DNA, 50 bp, synthetic construct
  source 1..50: mol_type = other DNA
aaaccccacccatatataacrccaacctctaattcaaaattattccaaac

SEQ ID NO: 6452 - DNA, 50 bp, synthetic construct
  source 1..50: mol_type = other DNA
ctaaaaactaacrctacacataaataaaacttcttaataaaaaacccctc

SEQ ID NO: 6453 - DNA, 50 bp, synthetic construct
  source 1..50: mol_type = other DNA
aaataacaaaattaccccctcaaaaaacaaaaccccataccaaaactccc

SEQ ID NO: 6454 - DNA, 50 bp, synthetic construct
  source 1..50: mol_type = other DNA
taaatcccattaaaaacccaaacttaaaactaaccatcrtcatactaatc

SEQ ID NO: 6455 - DNA, 50 bp, synthetic construct
  source 1..50: mol_type = other DNA
ctaaaaaccctaaacataaaatactactcccattaaactttaaaaaaaac

SEQ ID NO: 6456 - DNA, 50 bp, synthetic construct
  source 1..50: mol_type = other DNA
ataacatctctctaataacraaaaaatattctcrcaaatatacaaatatc

SEQ ID NO: 6457 - DNA, 50 bp, synthetic construct
  source 1..50: mol_type = other DNA
acttctaaaatccccaaataacatctctctaataacraaaaaatattctc

SEQ ID NO: 6458 - DNA, 50 bp, synthetic construct
  source 1..50: mol_type = other DNA
atcttccccacataacttctaaaatccccaaataacatctctctaataac

SEQ ID NO: 6459 - DNA, 50 bp, synthetic construct
  source 1..50: mol_type = other DNA
caatatcttaattctctaaatctttataattctccctacataaccctacc

SEQ ID NO: 6460 - DNA, 50 bp, synthetic construct
  source 1..50: mol_type = other DNA
aaccaaaaacatactactcaattatcacctccaatataactaatacaacc

SEQ ID NO: 6461 - DNA, 50 bp, synthetic construct
  source 1..50: mol_type = other DNA
aataccccatcacaaattaaaaccttaaaacaaactcraaaactatcatc

SEQ ID NO: 6462 - DNA, 50 bp, synthetic construct
  source 1..50: mol_type = other DNA
taatctactctacaataccccatcacaaattaaaaccttaaaacaaactc

SEQ ID NO: 6463 - DNA, 50 bp, synthetic construct
  source 1..50: mol_type = other DNA
aaccccaacctataataaaacactacaaaacaaattaaaaataaaaaacc

SEQ ID NO: 6464 - DNA, 50 bp, synthetic construct
  source 1..50: mol_type = other DNA
aacaaaaaaataatctaaaaaattccttcacaaatcaactattatatcac

SEQ ID NO: 6465 - DNA, 50 bp, synthetic construct
  source 1..50: mol_type = other DNA
atcattattttcttacaccaaaatcatatttcatttaactaacttaactc

SEQ ID NO: 6466 - DNA, 50 bp, synthetic construct
  source 1..50: mol_type = other DNA
taaaaattcttcaattctatatatctacttaaaatatacttaatatcaac

SEQ ID NO: 6467 - DNA, 50 bp, synthetic construct
  source 1..50: mol_type = other DNA
tttctccaaaaccattaccaatattctaaaaaccataaatacttctcccc

SEQ ID NO: 6468 - DNA, 50 bp, synthetic construct
  source 1..50: mol_type = other DNA
aaaacctcctcaatactacatatataccctacrttcctatattatccacc

SEQ ID NO: 6469 - DNA, 50 bp, synthetic construct
  source 1..50: mol_type = other DNA
aaccaataattctaaaacacatttaacctaatcaataaaatcaaatttcc

SEQ ID NO: 6470 - DNA, 50 bp, synthetic construct
  source 1..50: mol_type = other DNA
tcccaaaatcctaaaatccaaatatttttaaccaataattaattaaatcc

SEQ ID NO: 6471 - DNA, 50 bp, synthetic construct
  source 1..50: mol_type = other DNA
taaaaataaaatttcaccrttaatcaaactaatcttaaacccctaacctc

SEQ ID NO: 6472 - DNA, 50 bp, synthetic construct
  source 1..50: mol_type = other DNA
ccaataactaatttaaaaaaaactatatcatacccaatataataactcac

SEQ ID NO: 6473 - DNA, 50 bp, synthetic construct
  source 1..50: mol_type = other DNA
ttctcraaacaccctataattacccrtaaaaatcctaaacaaataccacc

SEQ ID NO: 6474 - DNA, 50 bp, synthetic construct
  source 1..50: mol_type = other DNA
ctaaatatttacaaattatatcattttctcraaacaccctataattaccc

SEQ ID NO: 6475 - DNA, 50 bp, synthetic construct
  source 1..50: mol_type = other DNA
aaaacrataacatctatccaaaatttttacraacaatcacaaaatatctc

SEQ ID NO: 6476 - DNA, 50 bp, synthetic construct
  source 1..50: mol_type = other DNA
aactaatctttaacaaaattctacatacttaactatataaaaataccacc

SEQ ID NO: 6477 - DNA, 50 bp, synthetic construct
  source 1..50: mol_type = other DNA
ataaaaattactaaaaccctcccaaataaaaacttacaaatcccactccc

SEQ ID NO: 6478 - DNA, 50 bp, synthetic construct
  source 1..50: mol_type = other DNA
taaaaaaccccaccattaatcaatacttctaacaacccacttcataaaac

SEQ ID NO: 6479 - DNA, 50 bp, synthetic construct
  source 1..50: mol_type = other DNA
tcacattacctctaaataactaaatcattaatcttctcacctcataacac

SEQ ID NO: 6480 - DNA, 50 bp, synthetic construct
  source 1..50: mol_type = other DNA
taattatacctttcttccttacaaataaaatttaaataaacaccaattac

SEQ ID NO: 6481 - DNA, 50 bp, synthetic construct
  source 1..50: mol_type = other DNA
catcacactttcacaactactaacaacaaaaactctttataataatattc

SEQ ID NO: 6482 - DNA, 50 bp, synthetic construct
  source 1..50: mol_type = other DNA
cttaaatctactcaactatatacacttaactcactaaatcatatatattc

SEQ ID NO: 6483 - DNA, 50 bp, synthetic construct
  source 1..50: mol_type = other DNA
acataattcaataaaccaaatacatacaactaaacaaacccaaaaaaaac

SEQ ID NO: 6484 - DNA, 50 bp, synthetic construct
  source 1..50: mol_type = other DNA
cacacctaccttcaacctttccccaataataataataatatttaatattc

SEQ ID NO: 6485 - DNA, 50 bp, synthetic construct
  source 1..50: mol_type = other DNA
tactataatcaaactacrataaaacccacaaaacccaactaatcattacc

SEQ ID NO: 6486 - DNA, 50 bp, synthetic construct
  source 1..50: mol_type = other DNA
aaaaaaaaacatccctctctttaaaaatcttaaaaaatacaatcrctttc

SEQ ID NO: 6487 - DNA, 50 bp, synthetic construct
  source 1..50: mol_type = other DNA
actaaacccaacctttaaaaccaataaactatataccaaaaaaataacac

SEQ ID NO: 6488 - DNA, 50 bp, synthetic construct
  source 1..50: mol_type = other DNA
aaacattaaaaacatttctctttctaaaaactttcctataccttacraac

SEQ ID NO: 6489 - DNA, 50 bp, synthetic construct
  source 1..50: mol_type = other DNA
cttaaaacattaaaaacatttctctttctaaaaactttcctataccttac

SEQ ID NO: 6490 - DNA, 50 bp, synthetic construct
  source 1..50: mol_type = other DNA
aaacacaacrcctctacctatcacctataaccaataaaaatcattcaacc

SEQ ID NO: 6491 - DNA, 50 bp, synthetic construct
  source 1..50: mol_type = other DNA
cccaatatcaaaaaaatatcaacaaaccccaatatcrctaccctttaaac

SEQ ID NO: 6492 - DNA, 50 bp, synthetic construct
  source 1..50: mol_type = other DNA
caataaattccaataaacactctactttcctttatttaaattataaatcc

SEQ ID NO: 6493 - DNA, 50 bp, synthetic construct
  source 1..50: mol_type = other DNA
aaacttaaactttcrataaaaaataaccaaaccttcrtactacttaattc

SEQ ID NO: 6494 - DNA, 50 bp, synthetic construct
  source 1..50: mol_type = other DNA
craaaaaatatttcraatcaaacaacacraaaacctaaccactttctacc

SEQ ID NO: 6495 - DNA, 50 bp, synthetic construct
  source 1..50: mol_type = other DNA
rcaaaaaaaaatactccaaaaatcttctattcttcaaataaaataattcc

SEQ ID NO: 6496 - DNA, 50 bp, synthetic construct
  source 1..50: mol_type = other DNA
aaaaaaatactccaaaaatcttctattcttcaaataaaataattccrccc

SEQ ID NO: 6497 - DNA, 50 bp, synthetic construct
  source 1..50: mol_type = other DNA
aacaatatctaaatactttcatcrcacttttaacccccacctcattcctc

SEQ ID NO: 6498 - DNA, 50 bp, synthetic construct
  source 1..50: mol_type = other DNA
cttactaaaattacacaaaaaaatccaactcttctacataataaccctac

SEQ ID NO: 6499 - DNA, 50 bp, synthetic construct
  source 1..50: mol_type = other DNA
ctaaaattacacaaaaaaatccaactcttctacataataaccctacraac

SEQ ID NO: 6500 - DNA, 50 bp, synthetic construct
  source 1..50: mol_type = other DNA
tccaaatacracataaaatctctaaaacaacaacaaaaccaaaccaaacc

SEQ ID NO: 6501 - DNA, 50 bp, synthetic construct
  source 1..50: mol_type = other DNA
ctatttacaaaaacaacaactacttccaacactatctctcatcaataccc

SEQ ID NO: 6502 - DNA, 50 bp, synthetic construct
  source 1..50: mol_type = other DNA
aatataaatatattccaaatataacaaacaactctcacaaattacaaatc

SEQ ID NO: 6503 - DNA, 50 bp, synthetic construct
  source 1..50: mol_type = other DNA
aaatatattccaaatataacaaacaactctcacaaattacaaatcrttac

SEQ ID NO: 6504 - DNA, 50 bp, synthetic construct
  source 1..50: mol_type = other DNA
acaactctcacaaattacaaatcrttacrtaaaacatacctatactaaac

SEQ ID NO: 6505 - DNA, 50 bp, synthetic construct
  source 1..50: mol_type = other DNA
caccaaacaacaaacacaaataataaccatccccraaaaaacrataaaac

SEQ ID NO: 6506 - DNA, 50 bp, synthetic construct
  source 1..50: mol_type = other DNA
ctaatatcttatatttttatttatacratcttccaaacccacrtcccacc

SEQ ID NO: 6507 - DNA, 50 bp, synthetic construct
  source 1..50: mol_type = other DNA
cctataattacactattaacccaataccctaaaaaaattaacttactctc

SEQ ID NO: 6508 - DNA, 50 bp, synthetic construct
  source 1..50: mol_type = other DNA
caaaattccaccatattactccractaatcttaaattccaaaacccaaac

SEQ ID NO: 6509 - DNA, 50 bp, synthetic construct
  source 1..50: mol_type = other DNA
caataaaatcacctaaaaaacrttaaaaaaatttctcatacccaaactac

SEQ ID NO: 6510 - DNA, 50 bp, synthetic construct
  source 1..50: mol_type = other DNA
aaaatcacttaaaaaactttacaaactacaaactccaaccacaaaactcc

SEQ ID NO: 6511 - DNA, 50 bp, synthetic construct
  source 1..50: mol_type = other DNA
acttcctaaatcaaaatctaattttaacaaaatccccaaataatttacac

SEQ ID NO: 6512 - DNA, 50 bp, synthetic construct
  source 1..50: mol_type = other DNA
tcttaattacactctaaaaaaacattttccttaaccctataaaacacttc

SEQ ID NO: 6513 - DNA, 50 bp, synthetic construct
  source 1..50: mol_type = other DNA
tcaaactatccctaaaaccccaatcctatctatactatcttttctcttcc

SEQ ID NO: 6514 - DNA, 50 bp, synthetic construct
  source 1..50: mol_type = other DNA
crtacactacaccttaatacttaccctcaaaaaaacattaacaaacactc

SEQ ID NO: 6515 - DNA, 50 bp, synthetic construct
  source 1..50: mol_type = other DNA
cccaacacccaacacacatcacatttattaaataaataacatcattacac

SEQ ID NO: 6516 - DNA, 50 bp, synthetic construct
  source 1..50: mol_type = other DNA
ttcactcaatcctctcaaaaaccttataaaattaaatccttctactatcc

SEQ ID NO: 6517 - DNA, 50 bp, synthetic construct
  source 1..50: mol_type = other DNA
tctataactttctaaatatcaaaactaaaactatacaaatcaaacaaaac

SEQ ID NO: 6518 - DNA, 50 bp, synthetic construct
  source 1..50: mol_type = other DNA
crctttctattccttccaaaacttattcccttcaaatttcaatttcaaac

SEQ ID NO: 6519 - DNA, 50 bp, synthetic construct
  source 1..50: mol_type = other DNA
ctattccttccaaaacttattcccttcaaatttcaatttcaaacraaaac

SEQ ID NO: 6520 - DNA, 50 bp, synthetic construct
  source 1..50: mol_type = other DNA
aataccraaacacacacctacraaaactataaacttcttaaaaatccacc

SEQ ID NO: 6521 - DNA, 50 bp, synthetic construct
  source 1..50: mol_type = other DNA
aacacacacctacraaaactataaacttcttaaaaatccaccraaattac

SEQ ID NO: 6522 - DNA, 50 bp, synthetic construct
  source 1..50: mol_type = other DNA
acacacctacraaaactataaacttcttaaaaatccaccraaattacrtc

SEQ ID NO: 6523 - DNA, 50 bp, synthetic construct
  source 1..50: mol_type = other DNA
aactataaacttcttaaaaatccaccraaattacrtcrcattacttccac

SEQ ID NO: 6524 - DNA, 50 bp, synthetic construct
  source 1..50: mol_type = other DNA
caaaatttaaatataactaatatctctatttctaatacataaccaacaac

SEQ ID NO: 6525 - DNA, 50 bp, synthetic construct
  source 1..50: mol_type = other DNA
taaataataaaataactatactcatctctcaacatatcactcacttaatc

SEQ ID NO: 6526 - DNA, 50 bp, synthetic construct
  source 1..50: mol_type = other DNA
tttaaatacaaataataatcaatatacttaatcatataaaactactcttc

SEQ ID NO: 6527 - DNA, 50 bp, synthetic construct
  source 1..50: mol_type = other DNA
aaaaaataattctcatcaaaaatccattctacccctaaaaaatatttaac

SEQ ID NO: 6528 - DNA, 50 bp, synthetic construct
  source 1..50: mol_type = other DNA
aaaataatacttaaaaaaaccactataacaaactataaaataactcatac

SEQ ID NO: 6529 - DNA, 50 bp, synthetic construct
  source 1..50: mol_type = other DNA
ataaaaaaatataaaattcaactctttataactacttcccctaaaaatac

SEQ ID NO: 6530 - DNA, 50 bp, synthetic construct
  source 1..50: mol_type = other DNA
aaatcaaaatcctatacatttatatacacaacatacrattttacaaactc

SEQ ID NO: 6531 - DNA, 50 bp, synthetic construct
  source 1..50: mol_type = other DNA
atttacaattcaactaatcatttactccaaatttccraacttataaaatc

SEQ ID NO: 6532 - DNA, 50 bp, synthetic construct
  source 1..50: mol_type = other DNA
aatcacaataaaacttaaactactaccaaaaaacccaacaaacatatttc

SEQ ID NO: 6533 - DNA, 50 bp, synthetic construct
  source 1..50: mol_type = other DNA
atacctaatataaataacraattaataaatacaacaaaccaccacaacac

SEQ ID NO: 6534 - DNA, 50 bp, synthetic construct
  source 1..50: mol_type = other DNA
atcccaatctactaccataaaacctcaaaacaaataaaaatctctctaac

SEQ ID NO: 6535 - DNA, 50 bp, synthetic construct
  source 1..50: mol_type = other DNA
actcacaacttaaataaacaaccrcatttctcaacctcttttacaaaaac

SEQ ID NO: 6536 - DNA, 50 bp, synthetic construct
  source 1..50: mol_type = other DNA
ttcttattacctaaaatacaaacataataacaacaactaaactataaaac

SEQ ID NO: 6537 - DNA, 50 bp, synthetic construct
  source 1..50: mol_type = other DNA
tctactccraaaaatatctaaaacttctaccracatcctatttcaaattc

SEQ ID NO: 6538 - DNA, 50 bp, synthetic construct
  source 1..50: mol_type = other DNA
aatttccrtatccttctcttactaattaaatcccaaatatatatataatc

SEQ ID NO: 6539 - DNA, 50 bp, synthetic construct
  source 1..50: mol_type = other DNA
ctaatacaattaactcaaccctaacaacaatatcaacaaaaactaaactc

SEQ ID NO: 6540 - DNA, 50 bp, synthetic construct
  source 1..50: mol_type = other DNA
caaaaaaaataaaccaccttcctaaaaacccaactactctacacccaacc

SEQ ID NO: 6541 - DNA, 50 bp, synthetic construct
  source 1..50: mol_type = other DNA
ctttaaatactcctaaaactactatatctaaaaacataactacracatac

SEQ ID NO: 6542 - DNA, 50 bp, synthetic construct
  source 1..50: mol_type = other DNA
aaaacrcctactaaaactaataacaaaaacaacattaaaaccraatatcc

SEQ ID NO: 6543 - DNA, 50 bp, synthetic construct
  source 1..50: mol_type = other DNA
ctactaaaactaataacaaaaacaacattaaaaccraatatccrccttcc

SEQ ID NO: 6544 - DNA, 50 bp, synthetic construct
  source 1..50: mol_type = other DNA
cttccrcraccaaacaaaaaacaaaacaataatttccccaaaatatattc

SEQ ID NO: 6545 - DNA, 50 bp, synthetic construct
  source 1..50: mol_type = other DNA
aaacaataatttccccaaaatatattcrctacctaacttccccacaaaac

SEQ ID NO: 6546 - DNA, 50 bp, synthetic construct
  source 1..50: mol_type = other DNA
caactaaaatttctcaaaaacccracattcacccataactaaatcctaac

SEQ ID NO: 6547 - DNA, 50 bp, synthetic construct
  source 1..50: mol_type = other DNA
caattctaaaattacaacaactccrctcaactaaaatttctcaaaaaccc

SEQ ID NO: 6548 - DNA, 50 bp, synthetic construct
  source 1..50: mol_type = other DNA
aaaactcaatcataaataaataccraacttctaaaaaactccaactaaac

SEQ ID NO: 6549 - DNA, 50 bp, synthetic construct
  source 1..50: mol_type = other DNA
tttaattctatttctaaaaaccacactaactatctcaaactataaaaatc

SEQ ID NO: 6550 - DNA, 50 bp, synthetic construct
  source 1..50: mol_type = other DNA
cccraaaaaataaacaaataaacactcaactactaccaatccactcaaac

SEQ ID NO: 6551 - DNA, 50 bp, synthetic construct
  source 1..50: mol_type = other DNA
cacrtttaaataaactaacaataactaaatactcatttattcaccctccc

SEQ ID NO: 6552 - DNA, 50 bp, synthetic construct
  source 1..50: mol_type = other DNA
aaaaaaaaccttctatacaaaaaccaaacctaactactcctacaaactcc

SEQ ID NO: 6553 - DNA, 50 bp, synthetic construct
  source 1..50: mol_type = other DNA
atctacccaaaattttactataaaataccaatcaaaactaaaaaaacacc

SEQ ID NO: 6554 - DNA, 50 bp, synthetic construct
  source 1..50: mol_type = other DNA
cttaaacactctcttcaattcctttaaataaaccraaatcataataattc

SEQ ID NO: 6555 - DNA, 50 bp, synthetic construct
  source 1..50: mol_type = other DNA
tacrtatatcttttatcttaaacactctcttcaattcctttaaataaacc

SEQ ID NO: 6556 - DNA, 50 bp, synthetic construct
  source 1..50: mol_type = other DNA
taaattcctacttccactaacttataattaaaaaaaatacaaacacatac

SEQ ID NO: 6557 - DNA, 50 bp, synthetic construct
  source 1..50: mol_type = other DNA
attttctccaactacaaaccaataaaaataaaaacttaaaaactcccrac

SEQ ID NO: 6558 - DNA, 50 bp, synthetic construct
  source 1..50: mol_type = other DNA
atactatttatttctttaattaaaaacaaaaacctttcaatataaatcac

SEQ ID NO: 6559 - DNA, 50 bp, synthetic construct
  source 1..50: mol_type = other DNA
ccatttaaactctaaccctcactcaataaaaaaaataatttatttcccac

SEQ ID NO: 6560 - DNA, 50 bp, synthetic construct
  source 1..50: mol_type = other DNA
aaaaatctctcctccaaatccattacacaaaaaataaactaaataaatac

SEQ ID NO: 6561 - DNA, 50 bp, synthetic construct
  source 1..50: mol_type = other DNA
tatctcaaatactttaaacatattttacttttactttcaaaaaactaacc

SEQ ID NO: 6562 - DNA, 50 bp, synthetic construct
  source 1..50: mol_type = other DNA
tacctctactccaaaaaatattctaacataactcttaaaatcttctaaac

SEQ ID NO: 6563 - DNA, 50 bp, synthetic construct
  source 1..50: mol_type = other DNA
aaaaaatattctaacataactcttaaaatcttctaaacrtaccccaaccc

SEQ ID NO: 6564 - DNA, 50 bp, synthetic construct
  source 1..50: mol_type = other DNA
caaaactcctaaaaaatacctttaaaaccaaaactccrcttatcctcctc

SEQ ID NO: 6565 - DNA, 50 bp, synthetic construct
  source 1..50: mol_type = other DNA
cratatttcccaacaaaactcctaaaaaatacctttaaaaccaaaactcc

SEQ ID NO: 6566 - DNA, 50 bp, synthetic construct
  source 1..50: mol_type = other DNA
aaaaaaatcaacrccatcccaactttaccaacaactatttaaaatatttc

SEQ ID NO: 6567 - DNA, 50 bp, synthetic construct
  source 1..50: mol_type = other DNA
caactttaccaacaactatttaaaatatttcrcaaatcaataaacttctc

SEQ ID NO: 6568 - DNA, 50 bp, synthetic construct
  source 1..50: mol_type = other DNA
aaatcccatctttttaaacaatactatatcataattttatacctcaaatc

SEQ ID NO: 6569 - DNA, 50 bp, synthetic construct
  source 1..50: mol_type = other DNA
atatacttaataactaatcactaaccaacrtcatattaatctaaaatttc

SEQ ID NO: 6570 - DNA, 50 bp, synthetic construct
  source 1..50: mol_type = other DNA
ctcaaacaactaaatactaaaatatacttaataactaatcactaaccaac

SEQ ID NO: 6571 - DNA, 50 bp, synthetic construct
  source 1..50: mol_type = other DNA
atctaaacaaacaaataactcaacraaaaataaattacccaaccaaccac

SEQ ID NO: 6572 - DNA, 50 bp, synthetic construct
  source 1..50: mol_type = other DNA
tcctttatcaaaaaaaactataaccatcaaacrttaaacaactctaaacc

SEQ ID NO: 6573 - DNA, 50 bp, synthetic construct
  source 1..50: mol_type = other DNA
ccctaaaatatacacrtttcctttatcaaaaaaaactataaccatcaaac

SEQ ID NO: 6574 - DNA, 50 bp, synthetic construct
  source 1..50: mol_type = other DNA
tcaaaactatccaacrtctaataaccacaattccttctaacaaaaaaaac

SEQ ID NO: 6575 - DNA, 50 bp, synthetic construct
  source 1..50: mol_type = other DNA
acttttcttaataacattatcctaatcatcaactcttcccttaacrcctc

SEQ ID NO: 6576 - DNA, 50 bp, synthetic construct
  source 1..50: mol_type = other DNA
rtaacacttttcttaataacattatcctaatcatcaactcttcccttaac

SEQ ID NO: 6577 - DNA, 50 bp, synthetic construct
  source 1..50: mol_type = other DNA
attcctttcctttctcatatttacaacaaaaatatcaccacttaaactcc

SEQ ID NO: 6578 - DNA, 50 bp, synthetic construct
  source 1..50: mol_type = other DNA
aatatccaaaaatcctacraccrcattaaacaccaaaataaaaaaccaac

SEQ ID NO: 6579 - DNA, 50 bp, synthetic construct
  source 1..50: mol_type = other DNA
taatattaaaactaaaaatacccaaaaaaatatccaaaaatcctacracc

SEQ ID NO: 6580 - DNA, 50 bp, synthetic construct
  source 1..50: mol_type = other DNA
taattaatattaaaactaaaaatacccaaaaaaatatccaaaaatcctac

SEQ ID NO: 6581 - DNA, 50 bp, synthetic construct
  source 1..50: mol_type = other DNA
tacttacacctacactaatttcaaaaacaaataaaaaacccaacaaaacc

SEQ ID NO: 6582 - DNA, 50 bp, synthetic construct
  source 1..50: mol_type = other DNA
attccaaaactcataccacatatacaaaataaacttccttcaattttttc

SEQ ID NO: 6583 - DNA, 50 bp, synthetic construct
  source 1..50: mol_type = other DNA
accaaacaccctatatcacattccacataaattatctcatttaatccacc

SEQ ID NO: 6584 - DNA, 50 bp, synthetic construct
  source 1..50: mol_type = other DNA
atatatcaatcacactacaacrtaataattacraacaacractcaaaatc

SEQ ID NO: 6585 - DNA, 50 bp, synthetic construct
  source 1..50: mol_type = other DNA
ttaaatcacccaacaaatattaaaaatctctaattaaccraccttaaatc

SEQ ID NO: 6586 - DNA, 50 bp, synthetic construct
  source 1..50: mol_type = other DNA
acccaacaaatattaaaaatctctaattaaccraccttaaatcrctaccc

SEQ ID NO: 6587 - DNA, 50 bp, synthetic construct
  source 1..50: mol_type = other DNA
ataaccaaatcctcatccaatataatcatatatatcaatcacactacaac

SEQ ID NO: 6588 - DNA, 50 bp, synthetic construct
  source 1..50: mol_type = other DNA
taaaaatctatataacraaacctccctcataaaccaatacctttcaaatc

SEQ ID NO: 6589 - DNA, 50 bp, synthetic construct
  source 1..50: mol_type = other DNA
aacacaaaacacacacaccacacatacacacatacatataccacatacac

SEQ ID NO: 6590 - DNA, 50 bp, synthetic construct
  source 1..50: mol_type = other DNA
ccrtaaataatcactactaaactaccaaatcaccaacaaacaaaaacaac

SEQ ID NO: 6591 - DNA, 50 bp, synthetic construct
  source 1..50: mol_type = other DNA
accaaactcctaacaaaaattaaataatcatccaaccctaaaacacracc

SEQ ID NO: 6592 - DNA, 50 bp, synthetic construct
  source 1..50: mol_type = other DNA
tcttaccaaactcctaacaaaaattaaataatcatccaaccctaaaacac

SEQ ID NO: 6593 - DNA, 50 bp, synthetic construct
  source 1..50: mol_type = other DNA
caacratttcctcctcaaaaatcaactacctacrataaaccatacacaac

SEQ ID NO: 6594 - DNA, 50 bp, synthetic construct
  source 1..50: mol_type = other DNA
tcactaaaaaataccaaaaaataaatacaaaacaataaatacaacrcacc

SEQ ID NO: 6595 - DNA, 50 bp, synthetic construct
  source 1..50: mol_type = other DNA
aaataaaaaaactaaacctctaaacctcacaaccaaaacccaaacttacc

SEQ ID NO: 6596 - DNA, 50 bp, synthetic construct
  source 1..50: mol_type = other DNA
tataatattcttaatataataaactcaaatctacractatttctaaaaac

SEQ ID NO: 6597 - DNA, 50 bp, synthetic construct
  source 1..50: mol_type = other DNA
atccaataaatcactttataaaaatacacttaaacctatttaaaactcac

SEQ ID NO: 6598 - DNA, 50 bp, synthetic construct
  source 1..50: mol_type = other DNA
aattcattacctacaacaacaacaactaacaacaaataacaactaactac

SEQ ID NO: 6599 - DNA, 50 bp, synthetic construct
  source 1..50: mol_type = other DNA
tatccctcttattacatatttaacrtttatctaaaatccctttcaaatcc

SEQ ID NO: 6600 - DNA, 50 bp, synthetic construct
  source 1..50: mol_type = other DNA
aaaaaaacratcctacaccaaaaactacaccraaaaataaataaaattcc

SEQ ID NO: 6601 - DNA, 50 bp, synthetic construct
  source 1..50: mol_type = other DNA
aaaaaacrcctcacctccractcatatctaaaaataaatcctacaaaaac

SEQ ID NO: 6602 - DNA, 50 bp, synthetic construct
  source 1..50: mol_type = other DNA
ctaactaccrccttacaatttattctcaaactactatactaacaatcaac

SEQ ID NO: 6603 - DNA, 50 bp, synthetic construct
  source 1..50: mol_type = other DNA
acaatttattctcaaactactatactaacaatcaacraaactctataaac

SEQ ID NO: 6604 - DNA, 50 bp, synthetic construct
  source 1..50: mol_type = other DNA
caaactactatactaacaatcaacraaactctataaacrtaaaaccctcc

SEQ ID NO: 6605 - DNA, 50 bp, synthetic construct
  source 1..50: mol_type = other DNA
raaactctataaacrtaaaaccctccraaccaaatacaaaatataatctc

SEQ ID NO: 6606 - DNA, 50 bp, synthetic construct
  source 1..50: mol_type = other DNA
aaacrtaaaaccctccraaccaaatacaaaatataatctcrtaatatacc

SEQ ID NO: 6607 - DNA, 50 bp, synthetic construct
  source 1..50: mol_type = other DNA
raaccaaatacaaaatataatctcrtaatataccrttttttaaacccrcc

SEQ ID NO: 6608 - DNA, 50 bp, synthetic construct
  source 1..50: mol_type = other DNA
cctcactaaaaaataccaaacaataaacccaaatcataaatacrtacacc

SEQ ID NO: 6609 - DNA, 50 bp, synthetic construct
  source 1..50: mol_type = other DNA
raattcacctcactaaaaaataccaaacaataaacccaaatcataaatac

SEQ ID NO: 6610 - DNA, 50 bp, synthetic construct
  source 1..50: mol_type = other DNA
ttaattatcttctcttatctcactaatcttataaaaaaaacacatttacc

SEQ ID NO: 6611 - DNA, 50 bp, synthetic construct
  source 1..50: mol_type = other DNA
aatcaaaaaactaattaaccctccaactactttcccaaattcaaaacaac

SEQ ID NO: 6612 - DNA, 50 bp, synthetic construct
  source 1..50: mol_type = other DNA
aaactaattaaccctccaactactttcccaaattcaaaacaacrtttaac

SEQ ID NO: 6613 - DNA, 50 bp, synthetic construct
  source 1..50: mol_type = other DNA
crtttaacrcaatcctttctcaattctcacacaacaaaacaatatttctc

SEQ ID NO: 6614 - DNA, 50 bp, synthetic construct
  source 1..50: mol_type = other DNA
cctttctcaattctcacacaacaaaacaatatttctcrattccctacaac

SEQ ID NO: 6615 - DNA, 50 bp, synthetic construct
  source 1..50: mol_type = other DNA
ataaaaaataaacctataaactcaaaacctattcctcctaatacctccac

SEQ ID NO: 6616 - DNA, 50 bp, synthetic construct
  source 1..50: mol_type = other DNA
aaataactaaataaaaacaactccaatctacractcccaacataattaac

SEQ ID NO: 6617 - DNA, 50 bp, synthetic construct
  source 1..50: mol_type = other DNA
ataaactacacctactatccaaccaatcccaataaaataaaccaaatacc

SEQ ID NO: 6618 - DNA, 50 bp, synthetic construct
  source 1..50: mol_type = other DNA
aactaactaaacaataaatacaactcacaaaaaacaaactaaaacaaaac

SEQ ID NO: 6619 - DNA, 50 bp, synthetic construct
  source 1..50: mol_type = other DNA
aaaatcaaaaaacttccctttcctaaccaaaaaaaactataacaaactac

SEQ ID NO: 6620 - DNA, 50 bp, synthetic construct
  source 1..50: mol_type = other DNA
acaatttaatctcaaaatactatactaacaataaacaaaactttataaac

SEQ ID NO: 6621 - DNA, 50 bp, synthetic construct
  source 1..50: mol_type = other DNA
attctaactacccraccactttatttacctactcaaacctcaacaataac

SEQ ID NO: 6622 - DNA, 50 bp, synthetic construct
  source 1..50: mol_type = other DNA
acaataaaccttattaaactataataaactctaccctattctaactaccc

SEQ ID NO: 6623 - DNA, 50 bp, synthetic construct
  source 1..50: mol_type = other DNA
ttacatctacaaaaattatctactaccttttattcaaccataccctaccc

SEQ ID NO: 6624 - DNA, 50 bp, synthetic construct
  source 1..50: mol_type = other DNA
aatcattaacccacttaaaaaaacaatctatctattctcaaaactcaaac

SEQ ID NO: 6625 - DNA, 50 bp, synthetic construct
  source 1..50: mol_type = other DNA
tttattaacaaacaaaacctacaaacttatttcttcttaaacacacccac

SEQ ID NO: 6626 - DNA, 50 bp, synthetic construct
  source 1..50: mol_type = other DNA
taacaaacaaaacctacaaacttatttcttcttaaacacacccacratac

SEQ ID NO: 6627 - DNA, 50 bp, synthetic construct
  source 1..50: mol_type = other DNA
aaaaaaaaatatcctctcttctcataaaaaaacccaaaaacraatacccc

SEQ ID NO: 6628 - DNA, 50 bp, synthetic construct
  source 1..50: mol_type = other DNA
cccrttcctaccaccraacactcaataaaacactttaatataacataaac

SEQ ID NO: 6629 - DNA, 50 bp, synthetic construct
  source 1..50: mol_type = other DNA
aaccaaaatttaaacrtctatattatactaaaataccttattaaataccc

SEQ ID NO: 6630 - DNA, 50 bp, synthetic construct
  source 1..50: mol_type = other DNA
aacrtctatattatactaaaataccttattaaatacccrataacaaaaac

SEQ ID NO: 6631 - DNA, 50 bp, synthetic construct
  source 1..50: mol_type = other DNA
tacaaaacctttccaacttactctaatcaatcaataaccttataaatccc

SEQ ID NO: 6632 - DNA, 50 bp, synthetic construct
  source 1..50: mol_type = other DNA
cttaaaaactttatacattaaacaacaactatacttttaaaattattaac

SEQ ID NO: 6633 - DNA, 50 bp, synthetic construct
  source 1..50: mol_type = other DNA
tttataacttcraatatacaacaaaaattccttcactaaattctttaccc

SEQ ID NO: 6634 - DNA, 50 bp, synthetic construct
  source 1..50: mol_type = other DNA
caccttaaaatcatccacaacttaaccaaaaaccttctatttataacttc

SEQ ID NO: 6635 - DNA, 50 bp, synthetic construct
  source 1..50: mol_type = other DNA
tatccctataaaaataatcccctactccacaatttaaaaaaattcttaac

SEQ ID NO: 6636 - DNA, 50 bp, synthetic construct
  source 1..50: mol_type = other DNA
ctataaaaataatcccctactccacaatttaaaaaaattcttaacraaac

SEQ ID NO: 6637 - DNA, 50 bp, synthetic construct
  source 1..50: mol_type = other DNA
ataaaaataatcccctactccacaatttaaaaaaattcttaacraaacrc

SEQ ID NO: 6638 - DNA, 50 bp, synthetic construct
  source 1..50: mol_type = other DNA
aatatatttactactttttcctctccccactaacctaaataaatcrctcc

SEQ ID NO: 6639 - DNA, 50 bp, synthetic construct
  source 1..50: mol_type = other DNA
tataacttcacttcaacctctaattaatcactttccacaactaatcaaac

SEQ ID NO: 6640 - DNA, 50 bp, synthetic construct
  source 1..50: mol_type = other DNA
atcccctctcacaaccaatcaaattaattataaaccaaatcttcatttac

SEQ ID NO: 6641 - DNA, 50 bp, synthetic construct
  source 1..50: mol_type = other DNA
tattacaaaaaaaataacctctaatccttttattacttaaacacttaaac

SEQ ID NO: 6642 - DNA, 50 bp, synthetic construct
  source 1..50: mol_type = other DNA
atactcctaaaaactatacatacctatctttatccccatataatcaactc

SEQ ID NO: 6643 - DNA, 50 bp, synthetic construct
  source 1..50: mol_type = other DNA
tttatccccatataatcaactcrttacaaataaatcctactaaatctttc

SEQ ID NO: 6644 - DNA, 50 bp, synthetic construct
  source 1..50: mol_type = other DNA
aaccctatactctctaacccattacctaaaactaatattatacttaaaac

SEQ ID NO: 6645 - DNA, 50 bp, synthetic construct
  source 1..50: mol_type = other DNA
acrtataatattatccaatccaactttaccactactaaaactaataccac

SEQ ID NO: 6646 - DNA, 50 bp, synthetic construct
  source 1..50: mol_type = other DNA
ccaaataatctctaacctaaaccattctcaatcaaaaacaaacatacaac

SEQ ID NO: 6647 - DNA, 50 bp, synthetic construct
  source 1..50: mol_type = other DNA
taaacacaaaacaataaatacaacrcaccrtataccaaccaaaacaaaac

SEQ ID NO: 6648 - DNA, 50 bp, synthetic construct
  source 1..50: mol_type = other DNA
aacccactaacaaattcatctattactatcaaaaccctctaatataaaac

SEQ ID NO: 6649 - DNA, 50 bp, synthetic construct
  source 1..50: mol_type = other DNA
attaaatatctcttctaaactaaaaatttccactaacaatttaccaccac

SEQ ID NO: 6650 - DNA, 50 bp, synthetic construct
  source 1..50: mol_type = other DNA
atattaaaattaatcraacctatatttacatcataaaacctccatttttc

SEQ ID NO: 6651 - DNA, 50 bp, synthetic construct
  source 1..50: mol_type = other DNA
aaaaaaaattaaatattctcttttctctattctcccaacaatctttaacc

SEQ ID NO: 6652 - DNA, 50 bp, synthetic construct
  source 1..50: mol_type = other DNA
aactttttctacctaactaatatccactaattccccaaacattaactcac

SEQ ID NO: 6653 - DNA, 50 bp, synthetic construct
  source 1..50: mol_type = other DNA
ctacacttaaaaaaaatccaaaatccttaacataacrtacaaaattctcc

SEQ ID NO: 6654 - DNA, 50 bp, synthetic construct
  source 1..50: mol_type = other DNA
caattcctacactcccaactttaaaactttttactaaaaacaccatctac

SEQ ID NO: 6655 - DNA, 50 bp, synthetic construct
  source 1..50: mol_type = other DNA
taccraaccttaaaataaacataaacacttccrcraacctaaataaaacc

SEQ ID NO: 6656 - DNA, 50 bp, synthetic construct
  source 1..50: mol_type = other DNA
attaatctcaaatattactaccraaccttaaaataaacataaacacttcc

SEQ ID NO: 6657 - DNA, 50 bp, synthetic construct
  source 1..50: mol_type = other DNA
ctcracaataacatctaaaattaatcttctcaacaacataacctaaccac

SEQ ID NO: 6658 - DNA, 50 bp, synthetic construct
  source 1..50: mol_type = other DNA
aacataccatcctcctaaaaaacaaattatatataattataaaactaatc

SEQ ID NO: 6659 - DNA, 50 bp, synthetic construct
  source 1..50: mol_type = other DNA
ctttacccaactcaaaaaccaaatcccacccttctaaaattaaaaacatc

SEQ ID NO: 6660 - DNA, 50 bp, synthetic construct
  source 1..50: mol_type = other DNA
acaattaaaaaccactaaataatacttcaacttaaatctcttaacatttc

SEQ ID NO: 6661 - DNA, 50 bp, synthetic construct
  source 1..50: mol_type = other DNA
aacacatactaatcatatctaaccttaaccaaatcatttcacctctctac

SEQ ID NO: 6662 - DNA, 50 bp, synthetic construct
  source 1..50: mol_type = other DNA
tctataacttctataaaaacctaaatattaaaaaatctattctctaactc

SEQ ID NO: 6663 - DNA, 50 bp, synthetic construct
  source 1..50: mol_type = other DNA
ctcttacaacccacacatcttaaaaataaatacaaacatacatcacaaac

SEQ ID NO: 6664 - DNA, 50 bp, synthetic construct
  source 1..50: mol_type = other DNA
taaactatcctaatctataccactaacaatataaacctaaataaattaac

SEQ ID NO: 6665 - DNA, 50 bp, synthetic construct
  source 1..50: mol_type = other DNA
aaactactaacctaaaactactattaattttaactatcttcttaataacc

SEQ ID NO: 6666 - DNA, 50 bp, synthetic construct
  source 1..50: mol_type = other DNA
ttattcatttcatcattataatacctatatctcccatttcaatactaatc

SEQ ID NO: 6667 - DNA, 50 bp, synthetic construct
  source 1..50: mol_type = other DNA
taacctacraaaaacaactcactaaatttctttaacaccrtaaacttaac

SEQ ID NO: 6668 - DNA, 50 bp, synthetic construct
  source 1..50: mol_type = other DNA
aacaaaaaaattttactcctataacctaaattacrcrtacrtaacttccc

SEQ ID NO: 6669 - DNA, 50 bp, synthetic construct
  source 1..50: mol_type = other DNA
caacaaaaacttaaaacrtactattataacractcaatcrctctaacacc

SEQ ID NO: 6670 - DNA, 50 bp, synthetic construct
  source 1..50: mol_type = other DNA
ccrcaacacctcaacaaaaacttaaaacrtactattataacractcaatc

SEQ ID NO: 6671 - DNA, 50 bp, synthetic construct
  source 1..50: mol_type = other DNA
aaaaacraaaaaactctttaaaatacctacratactaaaacractaaacc

SEQ ID NO: 6672 - DNA, 50 bp, synthetic construct
  source 1..50: mol_type = other DNA
ctctttaaaatacctacratactaaaacractaaaccrctataataacac

SEQ ID NO: 6673 - DNA, 50 bp, synthetic construct
  source 1..50: mol_type = other DNA
tccttaatacctcctcttaaacattttacaatctcaacttatctaaaatc

SEQ ID NO: 6674 - DNA, 50 bp, synthetic construct
  source 1..50: mol_type = other DNA
actaaaatactacractaccraaacaacaactaaaaaaactactataccc

SEQ ID NO: 6675 - DNA, 50 bp, synthetic construct
  source 1..50: mol_type = other DNA
atatcctccraacttaaatcaaaaatacrcaaataaaaatcttacctccc

SEQ ID NO: 6676 - DNA, 50 bp, synthetic construct
  source 1..50: mol_type = other DNA
aaaaatattatccrccctaactatatcctccraacttaaatcaaaaatac

SEQ ID NO: 6677 - DNA, 50 bp, synthetic construct
  source 1..50: mol_type = other DNA
tttatacttaacaataaatttctcraatatccccacrtacaaaaaacatc

SEQ ID NO: 6678 - DNA, 50 bp, synthetic construct
  source 1..50: mol_type = other DNA
aacrcatatattattttaactcaataaacatatatcratactccctatac

SEQ ID NO: 6679 - DNA, 50 bp, synthetic construct
  source 1..50: mol_type = other DNA
craccrtctaaatctccctaaaaataataatcraacrcttattataatac

SEQ ID NO: 6680 - DNA, 50 bp, synthetic construct; identical to SEQ ID NO: 6679
  source 1..50: mol_type = other DNA

SEQ ID NO: 6681 - DNA, 50 bp, synthetic construct
  source 1..50: mol_type = other DNA
aactatctaatacctcctatctctacctaaaatcaaaaacaacatcctac

SEQ ID NO: 6682 - DNA, 50 bp, synthetic construct
  source 1..50: mol_type = other DNA
ctactaaaaaattaatctatactctaaaaaaaccctaaattatatttccc

SEQ ID NO: 6683 - DNA, 50 bp, synthetic construct
  source 1..50: mol_type = other DNA
atctatactctaaaaaaaccctaaattatatttcccrtatacaaaccacc

SEQ ID NO: 6684 - DNA, 50 bp, synthetic construct
  source 1..50: mol_type = other DNA
ratcttataaaaaataccaccactcccaaccccrcttaactaaaaactac

SEQ ID NO: 6685 - DNA, 50 bp, synthetic construct
  source 1..50: mol_type = other DNA
cacaaattttcaaaaccrtacttataattaaaaactataaactcaaatac

SEQ ID NO: 6686 - DNA, 50 bp, synthetic construct
  source 1..50: mol_type = other DNA
aactaataaaaaaattttacaatctaaaccaacacttcttcccctttcac

SEQ ID NO: 6687 - DNA, 50 bp, synthetic construct
  source 1..50: mol_type = other DNA
aaaaaattttacaatctaaaccaacacttcttcccctttcacraacaaac

SEQ ID NO: 6688 - DNA, 50 bp, synthetic construct
  source 1..50: mol_type = other DNA
actttattctaccctaacttttaaaactataaattaaacaaatctaatcc

SEQ ID NO: 6689 - DNA, 50 bp, synthetic construct
  source 1..50: mol_type = other DNA
aaaaatataaatcaacacctaataaacctcacaaatccctactataccac

SEQ ID NO: 6690 - DNA, 50 bp, synthetic construct
  source 1..50: mol_type = other DNA
ctactataccacraaaactactaactaaccttaaaaactcaaaataaccc

SEQ ID NO: 6691 - DNA, 50 bp, synthetic construct
  source 1..50: mol_type = other DNA
aactacttttaattcccctaaaatatcatattttttccaaattatttccc

SEQ ID NO: 6692 - DNA, 50 bp, synthetic construct
  source 1..50: mol_type = other DNA
ctacccttcatcrcctaaataaacctaaactctaactaactatcccttcc

SEQ ID NO: 6693 - DNA, 50 bp, synthetic construct
  source 1..50: mol_type = other DNA
raaacattacctcacctaaaaaacrcaaaaaatcaaaaaattctctttcc

SEQ ID NO: 6694 - DNA, 50 bp, synthetic construct
  source 1..50: mol_type = other DNA
aaattaataattaaatttaattcactaattttcaatcctaaaaccaaacc

SEQ ID NO: 6695 - DNA, 50 bp, synthetic construct
  source 1..50: mol_type = other DNA
tctaaaatacctttcacaacttcatttttaacctttcaaaataaaacaac

SEQ ID NO: 6696 - DNA, 50 bp, synthetic construct
  source 1..50: mol_type = other DNA
tctaacattaaaacatttattttccttttatattcracataaccatccac

SEQ ID NO: 6697 - DNA, 50 bp, synthetic construct
  source 1..50: mol_type = other DNA
ttaatctccaattactctaacattaaaacatttattttccttttatattc

SEQ ID NO: 6698 - DNA, 50 bp, synthetic construct
  source 1..50: mol_type = other DNA
ccaaaacatttacatacatctctaaaaaaaacaaacattactattaactc

SEQ ID NO: 6699 - DNA, 50 bp, synthetic construct
  source 1..50: mol_type = other DNA
attctacctccaaaaaaataatctcaaaacctatttaattaatccatatc

SEQ ID NO: 6700 - DNA, 50 bp, synthetic construct
  source 1..50: mol_type = other DNA
aacttacaattcacaaaaacacacattaaaataaaaccaaaaaaaattac

SEQ ID NO: 6701 - DNA, 50 bp, synthetic construct
  source 1..50: mol_type = other DNA
aatcctccraaaccaaaaaacaaaatatcttaacctaatatctaaaaatc

SEQ ID NO: 6702 - DNA, 50 bp, synthetic construct
  source 1..50: mol_type = other DNA
tccraaaccaaaaaacaaaatatcttaacctaatatctaaaaatcrcaac

SEQ ID NO: 6703 - DNA, 50 bp, synthetic construct
  source 1..50: mol_type = other DNA
aaaatatcttaacctaatatctaaaaatcrcaacrcaaaacraaacttcc

SEQ ID NO: 6704 - DNA, 50 bp, synthetic construct
  source 1..50: mol_type = other DNA
aataaaacctaaacactaaaattctaaactactaaacctaacaaacaccc

SEQ ID NO: 6705 - DNA, 50 bp, synthetic construct
  source 1..50: mol_type = other DNA
tcctttataaactcaaaaactcaacattaccaataactaaataataaaac

SEQ ID NO: 6706 - DNA, 50 bp, synthetic construct
  source 1..50: mol_type = other DNA
tcaaaaactcaacattaccaataactaaataataaaacrcatccatcttc

SEQ ID NO: 6707 - DNA, 50 bp, synthetic construct
  source 1..50: mol_type = other DNA
aaaactcaacattaccaataactaaataataaaacrcatccatcttcrtc

SEQ ID NO: 6708 - DNA, 50 bp, synthetic construct
  source 1..50: mol_type = other DNA
tacaaaaaaaattcttttaacacctaaaacatttaaaaactacaactaac

SEQ ID NO: 6709 - DNA, 50 bp, synthetic construct
  source 1..50: mol_type = other DNA
aataaaacaaaaccactacccaatatatcactacataattataacttaac

SEQ ID NO: 6710 - DNA, 50 bp, synthetic construct
  source 1..50: mol_type = other DNA
attctatcactaacttactaattaaaaaaacacaactaactaaacaaaac

SEQ ID NO: 6711 - DNA, 50 bp, synthetic construct
  source 1..50: mol_type = other DNA
aaatttaccccttcataaccattctaaccatctaaatcttatcaattcac

SEQ ID NO: 6712 - DNA, 50 bp, synthetic construct
  source 1..50: mol_type = other DNA
aaatacttacccataattataaatatccctatcccactctcaaactatcc

SEQ ID NO: 6713 - DNA, 50 bp, synthetic construct
  source 1..50: mol_type = other DNA
aaattcctttttctctaacaacctacccacctctaattcctaaaattttc

SEQ ID NO: 6714 - DNA, 50 bp, synthetic construct
  source 1..50: mol_type = other DNA
ttttctctaacaacctacccacctctaattcctaaaattttcrtattaac

SEQ ID NO: 6715 - DNA, 50 bp, synthetic construct
  source 1..50: mol_type = other DNA
ttaaacaaacctccrtttacattaatatctccaataattctataatctcc

SEQ ID NO: 6716 - DNA, 50 bp, synthetic construct
  source 1..50: mol_type = other DNA
caataattctataatctccrccctaaaaacctttaatttcttttaatcrc

SEQ ID NO: 6717 - DNA, 50 bp, synthetic construct
  source 1..50: mol_type = other DNA
aaaaacctactaaacccctatactcaaaccctaaacaaacttaatatccc

SEQ ID NO: 6718 - DNA, 50 bp, synthetic construct
  source 1..50: mol_type = other DNA
ccaaatttatttaaaacctaaacacaaaaacccaacaaattctttccrac

SEQ ID NO: 6719 - DNA, 50 bp, synthetic construct
  source 1..50: mol_type = other DNA
ttatttaaaacctaaacacaaaaacccaacaaattctttccracrtcaac

SEQ ID NO: 6720 - DNA, 50 bp, synthetic construct
  source 1..50: mol_type = other DNA
aaaaaacaactaaaacctcaaacracaacrcttctaaataaataaaaaac

SEQ ID NO: 6721 - DNA, 50 bp, synthetic construct
  source 1..50: mol_type = other DNA
atatcttaatcccatcttccrtcccaactactaataactaaatccctaac

SEQ ID NO: 6722 - DNA, 50 bp, synthetic construct
  source 1..50: mol_type = other DNA
attattaataaattaataacaaacaaaatatacctaatctccctaataac

SEQ ID NO: 6723 - DNA, 50 bp, synthetic construct
  source 1..50: mol_type = other DNA
tctcaatataaaataattatactaacttcctccaattcctcctcttcrtc

SEQ ID NO: 6724 - DNA, 50 bp, synthetic construct
  source 1..50: mol_type = other DNA
tataactaaccraaacaacracttaaacttcracaaaaacttaaaactac

SEQ ID NO: 6725 - DNA, 50 bp, synthetic construct
  source 1..50: mol_type = other DNA
cttacccaaaatcaaacaacracttaataataaaactcraactaaaaccc

SEQ ID NO: 6726 - DNA, 50 bp, synthetic construct
  source 1..50: mol_type = other DNA
aataaaaaataactataaatacaaataaaactttactcactcacttaccc

SEQ ID NO: 6727 - DNA, 50 bp, synthetic construct
  source 1..50: mol_type = other DNA
aaacaaaaattcaaactaaaaccaccatctaccttaaaacatttaactac

SEQ ID NO: 6728 - DNA, 50 bp, synthetic construct
  source 1..50: mol_type = other DNA
taaaaccaccatctaccttaaaacatttaactacratataaaacaacttc

SEQ ID NO: 6729 - DNA, 50 bp, synthetic construct
  source 1..50: mol_type = other DNA
aaaacaattatttatctattttaaaactactaccctattaccaaaccacc

SEQ ID NO: 6730 - DNA, 50 bp, synthetic construct
  source 1..50: mol_type = other DNA
attatttatctattttaaaactactaccctattaccaaaccaccraatcc

SEQ ID NO: 6731 - DNA, 50 bp, synthetic construct
  source 1..50: mol_type = other DNA
tttcatttattttcctcacaataatccrtaaaaacaataacaaacrcrac

SEQ ID NO: 6732 - DNA, 50 bp, synthetic construct
  source 1..50: mol_type = other DNA
ccttttcatttattttcctcacaataatccrtaaaaacaataacaaacrc

SEQ ID NO: 6733 - DNA, 50 bp, synthetic construct
  source 1..50: mol_type = other DNA
ttccttttcatttattttcctcacaataatccrtaaaaacaataacaaac

SEQ ID NO: 6734 - DNA, 50 bp, synthetic construct
  source 1..50: mol_type = other DNA
caatacratcctattacractaatcctaaatatctacaattactatctcc

SEQ ID NO: 6735 - DNA, 50 bp, synthetic construct
  source 1..50: mol_type = other DNA
cccaaaatctcratccttaaacttaaaacracrctattacctcaataatc

SEQ ID NO: 6736 - DNA, 50 bp, synthetic construct
  source 1..50: mol_type = other DNA
ataaaaaaacccaaaaaccccaaaatctcratccttaaacttaaaacrac

SEQ ID NO: 6737 - DNA, 50 bp, synthetic construct
  source 1..50: mol_type = other DNA
aaaataaaaaaacccaaaaaccccaaaatctcratccttaaacttaaaac

SEQ ID NO: 6738 - DNA, 50 bp, synthetic construct
  source 1..50: mol_type = other DNA
aatcaaaaaacrattactaaaataacaacrtcrcttcaaatctaaaaacc

SEQ ID NO: 6739 - DNA, 50 bp, synthetic construct
  source 1..50: mol_type = other DNA
tccaaacacaaaacctaatatcttatccaaaacctaataacrcraaaacc

SEQ ID NO: 6740 - DNA, 50 bp, synthetic construct
  source 1..50: mol_type = other DNA
tacaatatccaaacacaaaacctaatatcttatccaaaacctaataacrc

SEQ ID NO: 6741 - DNA, 50 bp, synthetic construct
  source 1..50: mol_type = other DNA
aactcctaaacraaatcaaccracttataaaaactcttaacraaaaaatc

SEQ ID NO: 6742 - DNA, 50 bp, synthetic construct
  source 1..50: mol_type = other DNA
ttccacaccaaatctctacaaaataaacrtaaaaacaaaccrattctccc

SEQ ID NO: 6743 - DNA, 50 bp, synthetic construct
  source 1..50: mol_type = other DNA
aaaaacaaaccrattctcccrttaaaaactcttacaaaccractaacttc

SEQ ID NO: 6744 - DNA, 50 bp, synthetic construct
  source 1..50: mol_type = other DNA
aaaccractaacttcrtccaaaaacctaaaatcctaacctcctaataaac

SEQ ID NO: 6745 - DNA, 50 bp, synthetic construct
  source 1..50: mol_type = other DNA
tcaaatacaactacttcaaactaaaataacaaataataaacrctaataac

SEQ ID NO: 6746 - DNA, 50 bp, synthetic construct
  source 1..50: mol_type = other DNA
tactataaaaacaaaacccaaaaaaatttatacctcttcacccccatccc

SEQ ID NO: 6747 - DNA, 50 bp, synthetic construct
  source 1..50: mol_type = other DNA
acccctctaaattttattcccacaataccccttacactattaaaaactac

SEQ ID NO: 6748 - DNA, 50 bp, synthetic construct
  source 1..50: mol_type = other DNA
tctaaattttattcccacaataccccttacactattaaaaactacraaac

SEQ ID NO: 6749 - DNA, 50 bp, synthetic construct
  source 1..50: mol_type = other DNA
tttatcaccttattattttcctatccacccctacatcatccacctatcac

SEQ ID NO: 6750 - DNA, 50 bp, synthetic construct
  source 1..50: mol_type = other DNA
ttaaaccccaaatttcactcaattatcaaatactaattatcaaaatattc

SEQ ID NO: 6751 - DNA, 50 bp, synthetic construct
  source 1..50: mol_type = other DNA
cccttatttattcttctttatcatatactttctcatccaaaactccccac

SEQ ID NO: 6752 - DNA, 50 bp, synthetic construct
  source 1..50: mol_type = other DNA
aataatactatactaactctacaatttctctctcttcaatcccattttcc

SEQ ID NO: 6753 - DNA, 50 bp, synthetic construct
  source 1..50: mol_type = other DNA
aaattccttcaatactactttatcaaccaaaaatctctataaccactacc

SEQ ID NO: 6754 - DNA, 50 bp, synthetic construct
  source 1..50: mol_type = other DNA
ctataattcaacraacaaaaacatattacaactctctcctataatctaac

SEQ ID NO: 6755 - DNA, 50 bp, synthetic construct
  source 1..50: mol_type = other DNA
aattcaacraacaaaaacatattacaactctctcctataatctaacraac

SEQ ID NO: 6756 - DNA, 50 bp, synthetic construct
  source 1..50: mol_type = other DNA
aaaacatattacaactctctcctataatctaacraacraaaacrtattac

SEQ ID NO: 6757 - DNA, 50 bp, synthetic construct
  source 1..50: mol_type = other DNA
aaaacaatcttcacatactaaatccacctctatttaaaacaataaaattc

SEQ ID NO: 6758 - DNA, 50 bp, synthetic construct
  source 1..50: mol_type = other DNA
aacrtacaaaaaactcaaataaattccaataaatcctttctactcttccc

SEQ ID NO: 6759 - DNA, 50 bp, synthetic construct
  source 1..50: mol_type = other DNA
aaaatatcactccaaccccttaaataaaactaatctaaaacatacaaccc

SEQ ID NO: 6760 - DNA, 50 bp, synthetic construct
  source 1..50: mol_type = other DNA
tctaaaacatacaacccrcaataaatacaaattaaaaacaaaaacatttc

SEQ ID NO: 6761 - DNA, 50 bp, synthetic construct
  source 1..50: mol_type = other DNA
aataattataactaaatacctcatatttcctaaaaactctacctatccac

SEQ ID NO: 6762 - DNA, 50 bp, synthetic construct
  source 1..50: mol_type = other DNA
taattataactaaatacctcatatttcctaaaaactctacctatccacrc

SEQ ID NO: 6763 - DNA, 50 bp, synthetic construct
  source 1..50: mol_type = other DNA
ctaaatacctcatatttcctaaaaactctacctatccacrcrtattaaac

SEQ ID NO: 6764 - DNA, 50 bp, synthetic construct
  source 1..50: mol_type = other DNA
aaacrtatacctatacrttaaatacaaaaaataccaacctcaatataaac

SEQ ID NO: 6765 - DNA, 50 bp, synthetic construct
  source 1..50: mol_type = other DNA
cctatataactatattcaaaataccaactttctacccccttctactatac

SEQ ID NO: 6766 - DNA, 50 bp, synthetic construct
  source 1..50: mol_type = other DNA
aaaatataaacttaaacrtcacacaaattcacaccctaactctaccaatc

SEQ ID NO: 6767 - DNA, 50 bp, synthetic construct
  source 1..50: mol_type = other DNA
aaaatcctacaactaacractaacaaaaccaaaatataaacctatataac

SEQ ID NO: 6768 - DNA, 50 bp, synthetic construct
  source 1..50: mol_type = other DNA
aaatataaacctatataacrctcaaacctacactctttatataccrcacc

SEQ ID NO: 6769 - DNA, 50 bp, synthetic construct
  source 1..50: mol_type = other DNA
aataacttcctttctatcttcaaaaaccaaactacttccctttcccttcc

SEQ ID NO: 6770 - DNA, 50 bp, synthetic construct
  source 1..50: mol_type = other DNA
atcatttatattaactttatccccaatcttacctacttttaataccccac

SEQ ID NO: 6771 - DNA, 50 bp, synthetic construct
  source 1..50: mol_type = other DNA
ctacttttaataccccacraacctaaaaaatctaaacaaacatcttaaac

SEQ ID NO: 6772 - DNA, 50 bp, synthetic construct
  source 1..50: mol_type = other DNA
caacttccacttataaaatcatcaaaataaacaaacaacctacaaaatac

SEQ ID NO: 6773 - DNA, 50 bp, synthetic construct
  source 1..50: mol_type = other DNA
tctatcctaaaaaaatttaaaatccaatcaaaaacatcaaaacaacctcc

SEQ ID NO: 6774 - DNA, 50 bp, synthetic construct
  source 1..50: mol_type = other DNA
atttaaaatccaatcaaaaacatcaaaacaacctccrtataaaatacaac

SEQ ID NO: 6775 - DNA, 50 bp, synthetic construct
  source 1..50: mol_type = other DNA
atcacrcaccaataaacctaactttaacttctatttccttctctttctac

SEQ ID NO: 6776 - DNA, 50 bp, synthetic construct
  source 1..50: mol_type = other DNA
acaccaaaaactacaaattactaaaaaaatataaaaataacctaaccccc

SEQ ID NO: 6777 - DNA, 50 bp, synthetic construct
  source 1..50: mol_type = other DNA
ttaataaaactaaactacctaactattactatcctatcccrtcccatccc

SEQ ID NO: 6778 - DNA, 50 bp, synthetic construct
  source 1..50: mol_type = other DNA
crcraaaaccttaataaaactaaactacctaactattactatcctatccc

SEQ ID NO: 6779 - DNA, 50 bp, synthetic construct
  source 1..50: mol_type = other DNA
tttccttaaaaattttccccactttaacttcaaaaatcaacatcaccatc

SEQ ID NO: 6780 - DNA, 50 bp, synthetic construct
  source 1..50: mol_type = other DNA
caaaactaaaacrcaactaaacaaaaaaacatccatcacactcctttccc

SEQ ID NO: 6781 - DNA, 50 bp, synthetic construct
  source 1..50: mol_type = other DNA
aaaacrataaacccctaaaccaaaaaacacraatatctacctaaaaaaac

SEQ ID NO: 6782 - DNA, 50 bp, synthetic construct
  source 1..50: mol_type = other DNA
taaaatttaaacccaaaactacatattttataatataaatactcaatatc

SEQ ID NO: 6783 - DNA, 50 bp, synthetic construct
  source 1..50: mol_type = other DNA
ttccrcaaacattatcttttaatcttcacaactaccctatataattttac

SEQ ID NO: 6784 - DNA, 50 bp, synthetic construct
  source 1..50: mol_type = other DNA
ctaacatttattaaatattttctaaataccaaacaatactatatacttcc

SEQ ID NO: 6785 - DNA, 50 bp, synthetic construct
  source 1..50: mol_type = other DNA
atcattattaatattataattatacaaaccttccatctctctctccaaac

SEQ ID NO: 6786 - DNA, 50 bp, synthetic construct
  source 1..50: mol_type = other DNA
cctcctactatacctcctaattcctaacaaaccaaaaattaattctatcc

SEQ ID NO: 6787 - DNA, 50 bp, synthetic construct
  source 1..50: mol_type = other DNA
aaaaaatattaactaaaaaatttaaacaacactattcattttctctcacc

SEQ ID NO: 6788 - DNA, 50 bp, synthetic construct
  source 1..50: mol_type = other DNA
ataataactaaaaaccaaacttctctaccacaacaactccaaatataacc

SEQ ID NO: 6789 - DNA, 50 bp, synthetic construct
  source 1..50: mol_type = other DNA
ctaaatccttaacacctataatcaacataaaactcccactccaaaattac

SEQ ID NO: 6790 - DNA, 50 bp, synthetic construct
  source 1..50: mol_type = other DNA
taactttaaacatcrttaatctaaaaacctcaaaaacttaacaaacctcc

SEQ ID NO: 6791 - DNA, 50 bp, synthetic construct
  source 1..50: mol_type = other DNA
aaaacttaacaaacctccratttctctaccccataacataaacatttccc

SEQ ID NO: 6792 - DNA, 50 bp, synthetic construct
  source 1..50: mol_type = other DNA
tatccatacaacctaaaaacaaaaacrtttaaatcaaatactatatacac

SEQ ID NO: 6793 - DNA, 50 bp, synthetic construct
  source 1..50: mol_type = other DNA
aacctaataaactataaaaataaaacrtacacacaacatctaactcaaac

SEQ ID NO: 6794 - DNA, 50 bp, synthetic construct
  source 1..50: mol_type = other DNA
aacctaacaaactttttaacaatttttcttttaaaaaaatattaacaaac

SEQ ID NO: 6795 - DNA, 50 bp, synthetic construct
  source 1..50: mol_type = other DNA
accaccctaaaattttttaaacaaaacctaaaaactatctaaaaaaaaac

SEQ ID NO: 6796 - DNA, 50 bp, synthetic construct
  source 1..50: mol_type = other DNA
acaaaaccatctaactaacaccaacctatcatcactctactaaaaaaaac

SEQ ID NO: 6797 - DNA, 50 bp, synthetic construct
  source 1..50: mol_type = other DNA
accctatataacaatacaattcctcctcccataaaacraaatatctacac

SEQ ID NO: 6798 - DNA, 50 bp, synthetic construct
  source 1..50: mol_type = other DNA
taaatacaaaaacctataaatcaatacctaactcataataaatacatatc

SEQ ID NO: 6799 - DNA, 50 bp, synthetic construct
  source 1..50: mol_type = other DNA
tatccacaataaaaactactacctatataacctaaacctccatatcctcc

SEQ ID NO: 6800 - DNA, 50 bp, synthetic construct
  source 1..50: mol_type = other DNA
racctaaactacacttttccccctaattatatcttaccatactaaaaaac

SEQ ID NO: 6801 - DNA, 50 bp, synthetic construct
  source 1..50: mol_type = other DNA
accaacttcctaaatttctaacaaccrcaccttctcttacaaaaatcatc

SEQ ID NO: 6802 - DNA, 50 bp, synthetic construct
  source 1..50: mol_type = other DNA
caaccatatctaatacaccactatatccttatcactttacacaaaacctc

SEQ ID NO: 6803 - DNA, 50 bp, synthetic construct
  source 1..50: mol_type = other DNA
ccctaaaatttcraaaaacctctcacctctatcttattccraaaaaacac

SEQ ID NO: 6804 - DNA, 50 bp, synthetic construct
  source 1..50: mol_type = other DNA
aaatccttactacraaaatactcaaccttatactaccaaacttatccctc

SEQ ID NO: 6805 - DNA, 50 bp, synthetic construct
  source 1..50: mol_type = other DNA
aatcrataaacccraaaaacaaatttaacaacacaaaattaaacactttc

SEQ ID NO: 6806 - DNA, 50 bp, synthetic construct
  source 1..50: mol_type = other DNA
aacaaatttaacaacacaaaattaaacactttcrcaacaaaaacctaacc

SEQ ID NO: 6807 - DNA, 50 bp, synthetic construct
  source 1..50: mol_type = other DNA
atattcaatttaaacatcactctccttaatatactataaactatcactac

SEQ ID NO: 6808 - DNA, 50 bp, synthetic construct
  source 1..50: mol_type = other DNA
ttacaatacattaaaaaaaataatacccaaactaaacatcaaccaaattc

SEQ ID NO: 6809 - DNA, 50 bp, synthetic construct
  source 1..50: mol_type = other DNA
aaaaataatacccaaactaaacatcaaccaaattcrtctcccaaacctac

SEQ ID NO: 6810 - DNA, 50 bp, synthetic construct
  source 1..50: mol_type = other DNA
aaatataaaacraacaaaattcaaacrtaacttcccaccttaaacrcaac

SEQ ID NO: 6811 - DNA, 50 bp, synthetic construct
  source 1..50: mol_type = other DNA
aaaaaaaatataaaacraacaaaattcaaacrtaacttcccaccttaaac

SEQ ID NO: 6812 - DNA, 50 bp, synthetic construct
  source 1..50: mol_type = other DNA
accttaaaaaaactaaccaaacaaccrctacrcccaaaataaaaaatcac

SEQ ID NO: 6813 - DNA, 50 bp, synthetic construct
  source 1..50: mol_type = other DNA
ccaaaaaacrctactacraaaaacrataaaaatctaaaacccatttaccc

SEQ ID NO: 6814 - DNA, 50 bp, synthetic construct
  source 1..50: mol_type = other DNA
caaaactacaaaaaacaaacctacraacaaataaacctcaaattcccacc

SEQ ID NO: 6815 - DNA, 50 bp, synthetic construct
  source 1..50: mol_type = other DNA
aatttccaataaatcactacaacaactaacaaaccaaaaaccaaaaaaac

SEQ ID NO: 6816 - DNA, 50 bp, synthetic construct
  source 1..50: mol_type = other DNA
ccaaaaaaacrccaaccccrattttctccctactatatttaaaatattac

SEQ ID NO: 6817 - DNA, 50 bp, synthetic construct
  source 1..50: mol_type = other DNA
ttctaattcaacacaactctaaatttaatctttccttattttaatacacc

SEQ ID NO: 6818 - DNA, 50 bp, synthetic construct
  source 1..50: mol_type = other DNA
acattttattccccactctctaacctaaaaacctaataaaactttttttc

SEQ ID NO: 6819 - DNA, 50 bp, synthetic construct
  source 1..50: mol_type = other DNA
aacattcacataaacacttaaatacttaaaatccactttcatttttttac

SEQ ID NO: 6820 - DNA, 50 bp, synthetic construct
  source 1..50: mol_type = other DNA
cttttaataaacraatttataaaactttaccccctcaattccaatataac

SEQ ID NO: 6821 - DNA, 50 bp, synthetic construct
  source 1..50: mol_type = other DNA
aacaccttaataactatataaccttaaccttataactcaatataataaac

SEQ ID NO: 6822 - DNA, 50 bp, synthetic construct
  source 1..50: mol_type = other DNA
caccaatacctttacaaactatatactccttttatttaaaattcctttcc

SEQ ID NO: 6823 - DNA, 50 bp, synthetic construct
  source 1..50: mol_type = other DNA
atatctatcaaatcccacacattccrccaaataaaatacatctaataaac

SEQ ID NO: 6824 - DNA, 50 bp, synthetic construct
  source 1..50: mol_type = other DNA
caaaaccaaacttaaaaccactatcrtctaccaaatacattttatctaac

SEQ ID NO: 6825 - DNA, 50 bp, synthetic construct
  source 1..50: mol_type = other DNA
tctaacraaatatataaaacctaacaaacacaaaaaaatccaaactctac

SEQ ID NO: 6826 - DNA, 50 bp, synthetic construct
  source 1..50: mol_type = other DNA
ctataaacctctaaaaatacaatcatttcctccctctaactataaactac

SEQ ID NO: 6827 - DNA, 50 bp, synthetic construct
  source 1..50: mol_type = other DNA
ccctctaactataaactacratacctttaaaataaaatacrcatatcatc

SEQ ID NO: 6828 - DNA, 50 bp, synthetic construct
  source 1..50: mol_type = other DNA
acrcatatcatcraaaaatctaacaataacctaaaaactaacaaaacctc

SEQ ID NO: 6829 - DNA, 50 bp, synthetic construct
  source 1..50: mol_type = other DNA
tctaacaataacctaaaaactaacaaaacctcratactaaaacccaaaac

SEQ ID NO: 6830 - DNA, 50 bp, synthetic construct
  source 1..50: mol_type = other DNA
ccrataaaccccaaatctctaacttcaataacaaaccaaataaaaaaacc

SEQ ID NO: 6831 - DNA, 50 bp, synthetic construct
  source 1..50: mol_type = other DNA
acacttatatcaacttacttcctaaacctttccaaataaattccccaaac

SEQ ID NO: 6832 - DNA, 50 bp, synthetic construct
  source 1..50: mol_type = other DNA
aacttcatacaatctcaccaccaacaaatactaaaccaaaacaaactaac

SEQ ID NO: 6833 - DNA, 50 bp, synthetic construct
  source 1..50: mol_type = other DNA
accctaacccaacacttactaataataaaactacataaaacttacataac

SEQ ID NO: 6834 - DNA, 50 bp, synthetic construct
  source 1..50: mol_type = other DNA
ccaacacttactaataataaaactacataaaacttacataacrccctccc

SEQ ID NO: 6835 - DNA, 50 bp, synthetic construct
  source 1..50: mol_type = other DNA
aactttacaaaaaacaacacttaccactaatcraacaacaactatattcc

SEQ ID NO: 6836 - DNA, 50 bp, synthetic construct
  source 1..50: mol_type = other DNA
aaaaaattatcccaacaaaactttacaaaaaacaacacttaccactaatc

SEQ ID NO: 6837 - DNA, 50 bp, synthetic construct
  source 1..50: mol_type = other DNA
acccttaattctctctcctaattaataacaaaaacccaattaaaaataac

SEQ ID NO: 6838 - DNA, 50 bp, synthetic construct
  source 1..50: mol_type = other DNA
aaaaaaactacttacaaccaaaaccaccaaaaacaacaatccrcaatctc

SEQ ID NO: 6839 - DNA, 50 bp, synthetic construct
  source 1..50: mol_type = other DNA
ttattacaaaaaaaactacttacaaccaaaaccaccaaaaacaacaatcc

SEQ ID NO: 6840 - DNA, 50 bp, synthetic construct
  source 1..50: mol_type = other DNA
tcttacctaaaatatcacaaacaatatcccactcctcttcctaaataacc

SEQ ID NO: 6841 - DNA, 50 bp, synthetic construct
  source 1..50: mol_type = other DNA
cttcctaaataaccrtatactaacaaataacaaataacaaatatataaac

SEQ ID NO: 6842 - DNA, 50 bp, synthetic construct
  source 1..50: mol_type = other DNA
aaataacaaataacaaatatataaacraacaacrattaatacctaacttc

SEQ ID NO: 6843 - DNA, 50 bp, synthetic construct
  source 1..50: mol_type = other DNA
caaataacaaatatataaacraacaacrattaatacctaacttcrccacc

SEQ ID NO: 6844 - DNA, 50 bp, synthetic construct
  source 1..50: mol_type = other DNA
rattaatacctaacttcrccaccraaaaaacacttaaaccaaacacctac

SEQ ID NO: 6845 - DNA, 50 bp, synthetic construct
  source 1..50: mol_type = other DNA
tttctcctctctaaacctctaaatcttcataatacaataaaataaaaacc

SEQ ID NO: 6846 - DNA, 50 bp, synthetic construct
  source 1..50: mol_type = other DNA
taaattcaaacaaaatacaacacataaaatttctacccttttaactcctc

SEQ ID NO: 6847 - DNA, 50 bp, synthetic construct
  source 1..50: mol_type = other DNA
atcccattttctataactcctaaccctcaaaacaaaaataacaaaccaac

SEQ ID NO: 6848 - DNA, 50 bp, synthetic construct
  source 1..50: mol_type = other DNA
taaaacctactatcccctaataaaacaacaaacaaaataaactaactccc

SEQ ID NO: 6849 - DNA, 50 bp, synthetic construct
  source 1..50: mol_type = other DNA
ctcrctcactaaaacataaatatttaccatcctctaactttactactctc

SEQ ID NO: 6850 - DNA, 50 bp, synthetic construct
  source 1..50: mol_type = other DNA
aaaaaataataaatattcatacctcaataaacraaaataactccattacc

SEQ ID NO: 6851 - DNA, 50 bp, synthetic construct
  source 1..50: mol_type = other DNA
cctataacacacaaaccaacrtaaatcatattatatcrcaaataaaaatc

SEQ ID NO: 6852 - DNA, 50 bp, synthetic construct
  source 1..50: mol_type = other DNA
attaaaaataaaacctataacacacaaaccaacrtaaatcatattatatc

SEQ ID NO: 6853 - DNA, 50 bp, synthetic construct
  source 1..50: mol_type = other DNA
crctttatacaaaatctattaaaaataaaacctataacacacaaaccaac

SEQ ID NO: 6854 - DNA, 50 bp, synthetic construct
  source 1..50: mol_type = other DNA
aacatcttaaaactaacctaaaactaataaaaccctaaacaaaccccaac

SEQ ID NO: 6855 - DNA, 50 bp, synthetic construct
  source 1..50: mol_type = other DNA
attaatataactcctaaatctaattactcccactcaaacctatcaacaac

SEQ ID NO: 6856 - DNA, 50 bp, synthetic construct
  source 1..50: mol_type = other DNA
cccctaacattaaaacaaatacccattcaactaaaacctcaaaaaattac

SEQ ID NO: 6857 - DNA, 50 bp, synthetic construct
  source 1..50: mol_type = other DNA
tacaactcrattcactaacctacattcccacaaaattattttaaacatcc

SEQ ID NO: 6858 - DNA, 50 bp, synthetic construct
  source 1..50: mol_type = other DNA
acacacaaactaattaacccctaaaatcctactaatatataatacaactc

SEQ ID NO: 6859 - DNA, 50 bp, synthetic construct
  source 1..50: mol_type = other DNA
aataaataaaccactcctatacraccacataaaaaccacaaaaaaaatac

SEQ ID NO: 6860 - DNA, 50 bp, synthetic construct
  source 1..50: mol_type = other DNA
aaaaaactaaaaccctatttactactaaaaaaaccraaaatcaaaaaaac

SEQ ID NO: 6861 - DNA, 50 bp, synthetic construct
  source 1..50: mol_type = other DNA
ctcccccaacatcctataataaatacatccctaaacccaataaaacatcc

SEQ ID NO: 6862 - DNA, 50 bp, synthetic construct
  source 1..50: mol_type = other DNA
actctcaactaccctaaaaaaccacaaaactaactaaactaaccaaaacc

SEQ ID NO: 6863 - DNA, 50 bp, synthetic construct
  source 1..50: mol_type = other DNA
ccrataaatttataatctcrctaacttcaaaaataaaactacaaaccttc

SEQ ID NO: 6864 - DNA, 50 bp, synthetic construct
  source 1..50: mol_type = other DNA
ccccactatatactcaataccaaataaaaatttattaaatattaaatacc

SEQ ID NO: 6865 - DNA, 50 bp, synthetic construct
  source 1..50: mol_type = other DNA
aaccatattactcacacaaaacctatttaataatctcttcacacraaccc

SEQ ID NO: 6866 - DNA, 50 bp, synthetic construct
  source 1..50: mol_type = other DNA
aaaaatacaacttctaatacaccccctccaaataacaaacacaaaccctc

SEQ ID NO: 6867 - DNA, 50 bp, synthetic construct
  source 1..50: mol_type = other DNA
taattcctacrtcctaaatctaaactcaaacctaacaaacaaaactactc

SEQ ID NO: 6868 - DNA, 50 bp, synthetic construct
  source 1..50: mol_type = other DNA
aatctaaactcaaacctaacaaacaaaactactcrttacctctacttccc

SEQ ID NO: 6869 - DNA, 50 bp, synthetic construct
  source 1..50: mol_type = other DNA
aaaaacaaaccaaaaccrtattctaaaaaaatcttaacaactaaccatac

SEQ ID NO: 6870 - DNA, 50 bp, synthetic construct
  source 1..50: mol_type = other DNA
cacacctatatctaaaataaaaaaaccaaccaaaaaaacaaaccaaaacc

SEQ ID NO: 6871 - DNA, 50 bp, synthetic construct
  source 1..50: mol_type = other DNA
cctaacttatctctctaactaaccttttcaccccaaacacaaatataccc

SEQ ID NO: 6872 - DNA, 50 bp, synthetic construct
  source 1..50: mol_type = other DNA
tatacaaatttataacctaaaaacaataaactataccacataacccaaac

SEQ ID NO: 6873 - DNA, 50 bp, synthetic construct
  source 1..50: mol_type = other DNA
ccacataacccaaacrttataccatctaaatttatataaacacactcaac

SEQ ID NO: 6874 - DNA, 50 bp, synthetic construct
  source 1..50: mol_type = other DNA
tctaaataaaaaccaaaacacactataactccaaacaacccaaataaaac

SEQ ID NO: 6875 - DNA, 50 bp, synthetic construct
  source 1..50: mol_type = other DNA
aatttttttctccaaaataacractaacaatttaaatataaaccttatcc

SEQ ID NO: 6876 - DNA, 50 bp, synthetic construct
  source 1..50: mol_type = other DNA
ccttacacrataccaaacactaacataacataaaactccaaaacctaaac

SEQ ID NO: 6877 - DNA, 50 bp, synthetic construct
  source 1..50: mol_type = other DNA
cataacataaaactccaaaacctaaacrctataatcraccractaaaaac

SEQ ID NO: 6878 - DNA, 50 bp, synthetic construct
  source 1..50: mol_type = other DNA
ccaaatcaaaatacratctactaaatcatctccaccttacaacaaaacac

SEQ ID NO: 6879 - DNA, 50 bp, synthetic construct
  source 1..50: mol_type = other DNA
aaaatcctcactaaaacttctcttatatctaacttaatcatcatcacctc

SEQ ID NO: 6880 - DNA, 50 bp, synthetic construct
  source 1..50: mol_type = other DNA
tacccaaataacaaataaccatacaaccctaatttaaaattataaccctc

SEQ ID NO: 6881 - DNA, 50 bp, synthetic construct
  source 1..50: mol_type = other DNA
ttcataaaaaactaaacctaataaccracttaccttacttaattaatttc

SEQ ID NO: 6882 - DNA, 50 bp, synthetic construct
  source 1..50: mol_type = other DNA
cttcctccaaaccaaaaatctaccaatcacaatctaaattctattttccc

SEQ ID NO: 6883 - DNA, 50 bp, synthetic construct
  source 1..50: mol_type = other DNA
ataatacaacaaaacatacctaaaacttacattactcaccatccraaacc

SEQ ID NO: 6884 - DNA, 50 bp, synthetic construct
  source 1..50: mol_type = other DNA
aacccaataatacaacaaaacatacctaaaacttacattactcaccatcc

SEQ ID NO: 6885 - DNA, 50 bp, synthetic construct
  source 1..50: mol_type = other DNA
aataaatccttcacaaatctataaactaataaacatacaaatttccccac

SEQ ID NO: 6886 - DNA, 50 bp, synthetic construct
  source 1..50: mol_type = other DNA
tctataaactaataaacatacaaatttccccacrcaaataatattaaacc

SEQ ID NO: 6887 - DNA, 50 bp, synthetic construct
  source 1..50: mol_type = other DNA
aacraacaaaacataaactttcacccattttcccaacttattaacaaaac

SEQ ID NO: 6888 - DNA, 50 bp, synthetic construct
  source 1..50: mol_type = other DNA
cctacaaaaaaccttacccaaattcttaaccaatatatactacccaaaac

SEQ ID NO: 6889 - DNA, 50 bp, synthetic construct
  source 1..50: mol_type = other DNA
ataacacacactaaccaaaaatctaaacaaaaccccctacaaaaacaaac

SEQ ID NO: 6890 - DNA, 50 bp, synthetic construct
  source 1..50: mol_type = other DNA
acactaaccaaaaatctaaacaaaaccccctacaaaaacaaacrcacatc

SEQ ID NO: 6891 - DNA, 50 bp, synthetic construct
  source 1..50: mol_type = other DNA
aaatcaaataaacaaataaacttttccctaaaaccaaaccacaaacctac

SEQ ID NO: 6892 - DNA, 50 bp, synthetic construct
  source 1..50: mol_type = other DNA
caaacctataatctaactttaaaaaaaaatccatttactcacttaattcc

SEQ ID NO: 6893 - DNA, 50 bp, synthetic construct
  source 1..50: mol_type = other DNA
taactttaaaaaaaaatccatttactcacttaattccrtaatatttccac

SEQ ID NO: 6894 - DNA, 50 bp, synthetic construct
  source 1..50: mol_type = other DNA
attaaaaccccaaaaaaatccataaccactaaactaaaaatttccacrac

SEQ ID NO: 6895 - DNA, 50 bp, synthetic construct
  source 1..50: mol_type = other DNA
ataaactttcttaaaacctcaactctccccaaaaacrtaatcctcactac

SEQ ID NO: 6896 - DNA, 50 bp, synthetic construct
  source 1..50: mol_type = other DNA
actataaaaaaataaatcaaaataaatctataaaaatatccacccrcccc

SEQ ID NO: 6897 - DNA, 50 bp, synthetic construct
  source 1..50: mol_type = other DNA
cattttctcacaatttccaacccaaaaccrcaaaaacaaaaacraactac

SEQ ID NO: 6898 - DNA, 50 bp, synthetic construct
  source 1..50: mol_type = other DNA
ccttaaaacaatatctaacacttaactctatactaatatcaactaacatc

SEQ ID NO: 6899 - DNA, 50 bp, synthetic construct
  source 1..50: mol_type = other DNA
cccaaaatataatatatcccattacctttatacataacaataaaccattc

SEQ ID NO: 6900 - DNA, 50 bp, synthetic construct
  source 1..50: mol_type = other DNA
aaatctacccaacccaaataaaaaacaaaccattaaaaaattcctacttc

SEQ ID NO: 6901 - DNA, 50 bp, synthetic construct
  source 1..50: mol_type = other DNA
atatacatacaccraacaaccctaataaaaatttaaataaacrcacrtac

SEQ ID NO: 6902 - DNA, 50 bp, synthetic construct
  source 1..50: mol_type = other DNA
tttacccaatcaccccaaaactcttaaacatattattccataaaatacac

SEQ ID NO: 6903 - DNA, 50 bp, synthetic construct
  source 1..50: mol_type = other DNA
aatactatacaaataaaaactatactcaaactacaaacttccataaaaac

SEQ ID NO: 6904 - DNA, 50 bp, synthetic construct
  source 1..50: mol_type = other DNA
ataatcaccaaacacttattcatcractaataaaaacaacttcctaactc

SEQ ID NO: 6905 - DNA, 50 bp, synthetic construct
  source 1..50: mol_type = other DNA
aaaaaatcctatccaaacacaaatacataatcaccaaacacttattcatc

SEQ ID NO: 6906 - DNA, 50 bp, synthetic construct
  source 1..50: mol_type = other DNA
ttatttatcaaacatcaaaaaacacaataactcatttaaaatccccaacc

SEQ ID NO: 6907 - DNA, 50 bp, synthetic construct
  source 1..50: mol_type = other DNA
ttcaaattacaaataaaatacacaacacaaacacacaccaacaacactcc

SEQ ID NO: 6908 - DNA, 50 bp, synthetic construct
  source 1..50: mol_type = other DNA
ttaaaaatctttccatatccaaacacrtaaaaatacctcatcctacaacc

SEQ ID NO: 6909 - DNA, 50 bp, synthetic construct
  source 1..50: mol_type = other DNA
aaattaaacaaaaactaaaatcattttaaatcatcccctccaaccctacc

SEQ ID NO: 6910 - DNA, 50 bp, synthetic construct
  source 1..50: mol_type = other DNA
acaaaaccaaatactttaaactcacctaaaacaccaaattctctaactcc

SEQ ID NO: 6911 - DNA, 50 bp, synthetic construct
  source 1..50: mol_type = other DNA
aaattcactatcaatatctacacacaacctaatcttaaactaaaaaaatc

SEQ ID NO: 6912 - DNA, 50 bp, synthetic construct
  source 1..50: mol_type = other DNA
aaaaacatctacttatcraaatatctaaacccaacataaaaataacctac

SEQ ID NO: 6913 - DNA, 50 bp, synthetic construct
  source 1..50: mol_type = other DNA
aaaaaaaaaactacctcrtaaatcattcttatactaaacccaaatacccc

SEQ ID NO: 6914 - DNA, 50 bp, synthetic construct
  source 1..50: mol_type = other DNA
caaaactcttcctcaaacccaaaaaaacaactaattcctaataaaaaaac

SEQ ID NO: 6915 - DNA, 50 bp, synthetic construct
  source 1..50: mol_type = other DNA
catccracctccctaatttctcatccccacttaaacctaataactaattc

SEQ ID NO: 6916 - DNA, 50 bp, synthetic construct
  source 1..50: mol_type = other DNA
actacrtcaacaccaaatctaaaatttaacaaataaataacttactcaac

SEQ ID NO: 6917 - DNA, 50 bp, synthetic construct
  source 1..50: mol_type = other DNA
aaaacaattaaaaatattctaacaacataaacctcataccttcttactac

SEQ ID NO: 6918 - DNA, 50 bp, synthetic construct
  source 1..50: mol_type = other DNA
tcataacaaaacctaaatcatctaatctcacatcctattttcttaatcac

SEQ ID NO: 6919 - DNA, 50 bp, synthetic construct
  source 1..50: mol_type = other DNA
accaccaaaaactacccraaaataataacaaaaataccttccacctttcc

SEQ ID NO: 6920 - DNA, 50 bp, synthetic construct
  source 1..50: mol_type = other DNA
acaaaacctccccaaaaaacatcaccctcctacataacaaaaacataacc

SEQ ID NO: 6921 - DNA, 50 bp, synthetic construct
  source 1..50: mol_type = other DNA
aaaaaccaataaccraacrtaaataacrtcaaaaccaaacctaaatcatc

SEQ ID NO: 6922 - DNA, 50 bp, synthetic construct
  source 1..50: mol_type = other DNA
ttaaaaaataacactcrcaactacaacaaatctcaaaataaaaaaacaac

SEQ ID NO: 6923 - DNA, 50 bp, synthetic construct
  source 1..50: mol_type = other DNA
ccattctaacttcctacattttaaaaattaatctacaaataaaatctttc

SEQ ID NO: 6924 - DNA, 50 bp, synthetic construct
  source 1..50: mol_type = other DNA
acccaaaacacraaaacrattataactcctaaacccaaaaaattaacaac

SEQ ID NO: 6925 - DNA, 50 bp, synthetic construct
  source 1..50: mol_type = other DNA
aactcctaaacccaaaaaattaacaacrtctaaatttcaaaaaaaccaac

SEQ ID NO: 6926 - DNA, 50 bp, synthetic construct
  source 1..50: mol_type = other DNA
taaacccaaaaaattaacaacrtctaaatttcaaaaaaaccaacrcctcc

SEQ ID NO: 6927 - DNA, 50 bp, synthetic construct
  source 1..50: mol_type = other DNA
taacaaactataaacrtcaaaaaacaaaataacrccctacrataaaaaac

SEQ ID NO: 6928 - DNA, 50 bp, synthetic construct
  source 1..50: mol_type = other DNA
aactaaaacttaacaaactataaacrtcaaaaaacaaaataacrccctac

SEQ ID NO: 6929 - DNA, 50 bp, synthetic construct
  source 1..50: mol_type = other DNA
aactctaaactaaaacttaacaaactataaacrtcaaaaaacaaaataac

SEQ ID NO: 6930 - DNA, 50 bp, synthetic construct
  source 1..50: mol_type = other DNA
aatacaatccctactcccaactctaaactaaaacttaacaaactataaac

SEQ ID NO: 6931 - DNA, 50 bp, synthetic construct
  source 1..50: mol_type = other DNA
aaaaaacaaacaatccaaaactctaaacaaacattctaacaacctaaaac

SEQ ID NO: 6932 - DNA, 50 bp, synthetic construct
  source 1..50: mol_type = other DNA
aacacaaaacacrtatttacctaaaacaaaatttatttttatatctaatc

SEQ ID NO: 6933 - DNA, 50 bp, synthetic construct
  source 1..50: mol_type = other DNA
cttatactaaacratcaaacataaaaataaaccctattctaaacaaatac

SEQ ID NO: 6934 - DNA, 50 bp, synthetic construct
  source 1..50: mol_type = other DNA
aacaaccctaataaaaaaatatacataattatactacctttactaaacac

SEQ ID NO: 6935 - DNA, 50 bp, synthetic construct
  source 1..50: mol_type = other DNA
tactaaacacrtttctaattattctatatataaacctccattatcttatc

SEQ ID NO: 6936 - DNA, 50 bp, synthetic construct
  source 1..50: mol_type = other DNA
cttatcrccctatttacaaaaaacttattttcattcctacttataccatc

SEQ ID NO: 6937 - DNA, 50 bp, synthetic construct
  source 1..50: mol_type = other DNA
aacttttctcttaaaaacttaactttcttaaataaaaacttccaaaaatc

SEQ ID NO: 6938 - DNA, 50 bp, synthetic construct
  source 1..50: mol_type = other DNA
acatacataaaaacaacacrtaaacataaaaatcataccctaattttccc

SEQ ID NO: 6939 - DNA, 50 bp, synthetic construct
  source 1..50: mol_type = other DNA
cctaattttcccracttctaaatcatcccctaaatcaacatctaatcttc

SEQ ID NO: 6940 - DNA, 50 bp, synthetic construct
  source 1..50: mol_type = other DNA
tcccaatcattttaacataaaatttctaaaaaacaaatctcccctaatac

SEQ ID NO: 6941 - DNA, 50 bp, synthetic construct
  source 1..50: mol_type = other DNA
ataaataacaaacttccttactacctttaaaataaaacttacrcctcccc

SEQ ID NO: 6942 - DNA, 50 bp, synthetic construct
  source 1..50: mol_type = other DNA
attttccaataaataacaaacttccttactacctttaaaataaaacttac

SEQ ID NO: 6943 - DNA, 50 bp, synthetic construct
  source 1..50: mol_type = other DNA
taaaaaaatacacataaaaattttttataaactctacctaaaaataatac

SEQ ID NO: 6944 - DNA, 50 bp, synthetic construct
  source 1..50: mol_type = other DNA
cctttaaatctaaaacatcacaaaacacccatcatataatttatatttac

SEQ ID NO: 6945 - DNA, 50 bp, synthetic construct
  source 1..50: mol_type = other DNA
aaaaaacttactacactcaccaccttaaaaaccctatcttaataaaactc

SEQ ID NO: 6946 - DNA, 50 bp, synthetic construct
  source 1..50: mol_type = other DNA
aacaacratactcatttctcraacctaactataaattaacaaccaaaatc

SEQ ID NO: 6947 - DNA, 50 bp, synthetic construct
  source 1..50: mol_type = other DNA
actaaaaaatacaaaactacraaattcaccaacractacraaaaatcaac

SEQ ID NO: 6948 - DNA, 50 bp, synthetic construct
  source 1..50: mol_type = other DNA
caaccaaaatcrtatactaaaaaaataacaattttaatcrctaactttcc

SEQ ID NO: 6949 - DNA, 50 bp, synthetic construct
  source 1..50: mol_type = other DNA
ataaatctcrtaattttacaccttttaatttcaaaaccatactaaacaac

SEQ ID NO: 6950 - DNA, 50 bp, synthetic construct
  source 1..50: mol_type = other DNA
caaaaccatactaaacaacraaaaataaaacctacaacttatttttaacc

SEQ ID NO: 6951 - DNA, 50 bp, synthetic construct
  source 1..50: mol_type = other DNA
aaataacattttctaaaacrtcttccttatcctttaattctataaaacac

SEQ ID NO: 6952 - DNA, 50 bp, synthetic construct
  source 1..50: mol_type = other DNA
ataaaaacatcctcaacaaatatcaccaccattataaaaatcactacctc

SEQ ID NO: 6953 - DNA, 50 bp, synthetic construct
  source 1..50: mol_type = other DNA
aaaaaataaacctttcactttaattaacrtacttacttactcrtaatctc

SEQ ID NO: 6954 - DNA, 50 bp, synthetic construct
  source 1..50: mol_type = other DNA
ctaaacrtaaaaaataaacctttcactttaattaacrtacttacttactc

SEQ ID NO: 6955 - DNA, 50 bp, synthetic construct
  source 1..50: mol_type = other DNA
aaaaaattaactcaacctacaaaacaacraaaccacraacaaataaacac

SEQ ID NO: 6956 - DNA, 50 bp, synthetic construct
  source 1..50: mol_type = other DNA
aaccacraacaaataaacacrttaatcaaaataaaaaactcacccctcac

SEQ ID NO: 6957 - DNA, 50 bp, synthetic construct
  source 1..50: mol_type = other DNA
aacattttaacctatttctaccactttaacraatcaaacacraaaaaccc

SEQ ID NO: 6958 - DNA, 50 bp, synthetic construct
  source 1..50: mol_type = other DNA
tccacaataaacattttaacctatttctaccactttaacraatcaaacac

SEQ ID NO: 6959 - DNA, 50 bp, synthetic construct
  source 1..50: mol_type = other DNA
tacattcacttataatttaaaaaaattacrtacttctcatcaacctcctc

SEQ ID NO: 6960 - DNA, 50 bp, synthetic construct
  source 1..50: mol_type = other DNA
ttttaaattaatatttatacacataccccraaaaaactaataaaaaacac

SEQ ID NO: 6961 - DNA, 50 bp, synthetic construct
  source 1..50: mol_type = other DNA
aaactcattactttaaatattttcaactataattcacatttatttaaccc

SEQ ID NO: 6962 - DNA, 50 bp, synthetic construct
  source 1..50: mol_type = other DNA
tattttcaactataattcacatttatttaacccraacaaatctaataaac

SEQ ID NO: 6963 - DNA, 50 bp, synthetic construct
  source 1..50: mol_type = other DNA
tataaaatcaactctaaccacataaaactaaatcatctacctcctctatc

SEQ ID NO: 6964 - DNA, 50 bp, synthetic construct
  source 1..50: mol_type = other DNA
tattccccatcaataacrtttaaaaactaaacattcatttaaaaatactc

SEQ ID NO: 6965 - DNA, 50 bp, synthetic construct
  source 1..50: mol_type = other DNA
ctaaacattaaatactcttcatatctattaaaatattccccatcaataac

SEQ ID NO: 6966 - DNA, 50 bp, synthetic construct
  source 1..50: mol_type = other DNA
tatattaaattaataccttataactcaacrtaatcatctctctaattctc

SEQ ID NO: 6967 - DNA, 50 bp, synthetic construct
  source 1..50: mol_type = other DNA
ttccccacccccacatcattactctataaactctaattaacattaacaac

SEQ ID NO: 6968 - DNA, 50 bp, synthetic construct
  source 1..50: mol_type = other DNA
aaaatacatctctctcccacaactactccaaaaataaatataactctaac

SEQ ID NO: 6969 - DNA, 50 bp, synthetic construct
  source 1..50: mol_type = other DNA
aactctttcaacaatttttattccacatattaaacatttcattacaattc

SEQ ID NO: 6970 - DNA, 50 bp, synthetic construct
  source 1..50: mol_type = other DNA
cataataacattaacatcaaaaaatcaatactaacactaaattaatatcc

SEQ ID NO: 6971 - DNA, 50 bp, synthetic construct
  source 1..50: mol_type = other DNA
aaataaattaatactaaattcctctaactatataactaaccatcataaac

SEQ ID NO: 6972 - DNA, 50 bp, synthetic construct
  source 1..50: mol_type = other DNA
ttataacacraatacaaacaactaatcatacatttttctacaaacctacc

SEQ ID NO: 6973 - DNA, 50 bp, synthetic construct
  source 1..50: mol_type = other DNA
atactacatttaaaataaactatcccttacctcctccttccccaatactc

SEQ ID NO: 6974 - DNA, 50 bp, synthetic construct
  source 1..50: mol_type = other DNA
caaacacractaatcctacctaccatcttaaactcrcaaaaacaaaatac

SEQ ID NO: 6975 - DNA, 50 bp, synthetic construct
  source 1..50: mol_type = other DNA
catacacacacaacacaaacacractaatcctacctaccatcttaaactc

SEQ ID NO: 6976 - DNA, 50 bp, synthetic construct
  source 1..50: mol_type = other DNA
atttcaaatataaatatataaatactctatataccatatcatctaataac

SEQ ID NO: 6977 - DNA, 50 bp, synthetic construct
  source 1..50: mol_type = other DNA
aaacattttctaattctcaaaatttctaaaataccttttatttcaataac

SEQ ID NO: 6978 - DNA, 50 bp, synthetic construct
  source 1..50: mol_type = other DNA
aattctaaaaatcaaaaaatacttatactcttaccttccctaatccctcc

SEQ ID NO: 6979 - DNA, 50 bp, synthetic construct
  source 1..50: mol_type = other DNA
cttatactcttaccttccctaatccctccrttaataacctcaatactatc

SEQ ID NO: 6980 - DNA, 50 bp, synthetic construct
  source 1..50: mol_type = other DNA
ttacacaaataattttaaatctcaatattcttcacattaaaacaaacctc

SEQ ID NO: 6981 - DNA, 50 bp, synthetic construct
  source 1..50: mol_type = other DNA
aactactttattctaacaatttaactaatattctattccataacactatc

SEQ ID NO: 6982 - DNA, 50 bp, synthetic construct
  source 1..50: mol_type = other DNA
ttcactaacttataaaaccctcaaaacaaaaactctacrtcatactcaac

SEQ ID NO: 6983 - DNA, 50 bp, synthetic construct
  source 1..50: mol_type = other DNA
ttattttctaacttcactaacttataaaaccctcaaaacaaaaactctac

SEQ ID NO: 6984 - DNA, 50 bp, synthetic construct
  source 1..50: mol_type = other DNA
tatttcacrcaaaaaacccaatcctcttctttaaataaaaaaccctaacc

SEQ ID NO: 6985 - DNA, 50 bp, synthetic construct
  source 1..50: mol_type = other DNA
aaaaaaaacctaaataaatttttcccaacrtaacacaaaaactatttcac

SEQ ID NO: 6986 - DNA, 50 bp, synthetic construct
  source 1..50: mol_type = other DNA
tatattttttccataaccrtcaaaaaaaacctaaataaatttttcccaac

SEQ ID NO: 6987 - DNA, 50 bp, synthetic construct
  source 1..50: mol_type = other DNA
aatccrtaaactcctattcraaactatacacactaaattcrcaaaaaatc

SEQ ID NO: 6988 - DNA, 50 bp, synthetic construct
  source 1..50: mol_type = other DNA
taactccttattcctaaaaatttaatacaattaaaacaacractttctac

SEQ ID NO: 6989 - DNA, 50 bp, synthetic construct
  source 1..50: mol_type = other DNA
ttaatacaattaaaacaacractttctacraatccaatatacataatctc

SEQ ID NO: 6990 - DNA, 50 bp, synthetic construct
  source 1..50: mol_type = other DNA
cacaaaacctaataactatcaaaacaaaacctcraaccrcaaaaaaatcc

SEQ ID NO: 6991 - DNA, 50 bp, synthetic construct
  source 1..50: mol_type = other DNA
aaaactctaaaccacaaaacctaataactatcaaaacaaaacctcraacc

SEQ ID NO: 6992 - DNA, 50 bp, synthetic construct
  source 1..50: mol_type = other DNA
caattaaaactctaaaccacaaaacctaataactatcaaaacaaaacctc

SEQ ID NO: 6993 - DNA, 50 bp, synthetic construct
  source 1..50: mol_type = other DNA
aaaccttattctaacaatcaccaaactctataacccaaaatcctaactac

SEQ ID NO: 6994 - DNA, 50 bp, synthetic construct
  source 1..50: mol_type = other DNA
ttatccttcracaaattctaaattatatcctccctaaaaaaactaaaacc

SEQ ID NO: 6995 - DNA, 50 bp, synthetic construct
  source 1..50: mol_type = other DNA
accraaaaaccraactaaaaaaaccctcrcaaaaattaaactctacaaac

SEQ ID NO: 6996 - DNA, 50 bp, synthetic construct
  source 1..50: mol_type = other DNA
aaaaaacraaaaatataactatcaaaacaatacccraacccrctaaactc

SEQ ID NO: 6997 - DNA, 50 bp, synthetic construct
  source 1..50: mol_type = other DNA
tcaaattcccataaaatcaaaactaaaatccrattcccaatccaaaaaac

SEQ ID NO: 6998 - DNA, 50 bp, synthetic construct
  source 1..50: mol_type = other DNA
tattacatcaaaaaaatcatcaaattcccataaaatcaaaactaaaatcc

SEQ ID NO: 6999 - DNA, 50 bp, synthetic construct
  source 1..50: mol_type = other DNA
ataaacractaaaactacaaacccctaaaaacaaatccctacctttacac

SEQ ID NO: 7000 - DNA, 50 bp, synthetic construct
  source 1..50: mol_type = other DNA
atcttaaaataaatcccccactcttaaaaaacrctacacttaaatataac

SEQ ID NO: 7001 - DNA, 50 bp, synthetic construct
  source 1..50: mol_type = other DNA
crctaaactaatcccacaatcttaaaataaatcccccactcttaaaaaac

SEQ ID NO: 7002 - DNA, 50 bp, synthetic construct
  source 1..50: mol_type = other DNA
aaaccaaaaatctcataaaacaatacttacccttactatatacaatacac

SEQ ID NO: 7003 - DNA, 50 bp, synthetic construct
  source 1..50: mol_type = other DNA
ctattaaccaataaatcaaaattttaaaaacatttcaaacaataacccac

SEQ ID NO: 7004 - DNA, 50 bp, synthetic construct
  source 1..50: mol_type = other DNA
ttaaatcctaattatcacatacaccaactatataaccttaaacaaattcc

SEQ ID NO: 7005 - DNA, 50 bp, synthetic construct
  source 1..50: mol_type = other DNA
tacaccaactatataaccttaaacaaattccrtaatccattaaaatctcc

SEQ ID NO: 7006 - DNA, 50 bp, synthetic construct
  source 1..50: mol_type = other DNA
aaatctcactctattaaaactaatctattctaactaaaataactaaaatc

SEQ ID NO: 7007 - DNA, 50 bp, synthetic construct
  source 1..50: mol_type = other DNA
taaaattacaaaataaccataacactcaaataatatattactaaaaaacc

SEQ ID NO: 7008 - DNA, 50 bp, synthetic construct
  source 1..50: mol_type = other DNA
cataacactcaaataatatattactaaaaaaccraatatataaaaccccc

SEQ ID NO: 7009 - DNA, 50 bp, synthetic construct
  source 1..50: mol_type = other DNA
caaaactttaaaacaactaatttcttattccaattctatcaacaattatc

SEQ ID NO: 7010 - DNA, 50 bp, synthetic construct
  source 1..50: mol_type = other DNA
aatctctaatttccctaaactaaaaaaatacactaacattactaaaaccc

SEQ ID NO: 7011 - DNA, 50 bp, synthetic construct
  source 1..50: mol_type = other DNA
ttcctatatatccatttaaaattctacrtataaatcaatctccaacatcc

SEQ ID NO: 7012 - DNA, 50 bp, synthetic construct
  source 1..50: mol_type = other DNA
attaatatactaaaatatcaactccacraatattaaaaattaacccatac

SEQ ID NO: 7013 - DNA, 50 bp, synthetic construct
  source 1..50: mol_type = other DNA
tcaaaaaaaaatttcacacttctctttaaaattttaattttatcattctc

SEQ ID NO: 7014 - DNA, 50 bp, synthetic construct
  source 1..50: mol_type = other DNA
taaaccactcaaatttacacaaatcaaaaatcactcttaaatttatcccc

SEQ ID NO: 7015 - DNA, 50 bp, synthetic construct
  source 1..50: mol_type = other DNA
tcctcattccattatactaaactcatatacacrtaaaaatacrcaaacac

SEQ ID NO: 7016 - DNA, 50 bp, synthetic construct
  source 1..50: mol_type = other DNA
atttatctaaccccratctcctcattccattatactaaactcatatacac

SEQ ID NO: 7017 - DNA, 50 bp, synthetic construct
  source 1..50: mol_type = other DNA
aatctaaaaaataacccaactaaattataaaactaaatttatctaacccc

SEQ ID NO: 7018 - DNA, 50 bp, synthetic construct
  source 1..50: mol_type = other DNA
ataaatcaaacaaaccccaaaatataaaaatctcacctcaaaataaacac

SEQ ID NO: 7019 - DNA, 50 bp, synthetic construct
  source 1..50: mol_type = other DNA
aaatataaaaaaactccataaaaataaaatcctaatctcctacctaacac

SEQ ID NO: 7020 - DNA, 50 bp, synthetic construct
  source 1..50: mol_type = other DNA
cctcacctataaccaaaaaaaattttactcaataataactatttccttcc

SEQ ID NO: 7021 - DNA, 50 bp, synthetic construct
  source 1..50: mol_type = other DNA
ctcccaaaaatctcaatataataactccctcctatcctcataaatatacc

SEQ ID NO: 7022 - DNA, 50 bp, synthetic construct
  source 1..50: mol_type = other DNA
ccataaaaacaaactaaccataacatctactaaacttccaacaaacacac

SEQ ID NO: 7023 - DNA, 50 bp, synthetic construct
  source 1..50: mol_type = other DNA
ctaaccataacatctactaaacttccaacaaacacacrcaataaaacacc

SEQ ID NO: 7024 - DNA, 50 bp, synthetic construct
  source 1..50: mol_type = other DNA
atttacttaactatcttaattaacaaaaacccaaaaactccaactaaacc

SEQ ID NO: 7025 - DNA, 50 bp, synthetic construct
  source 1..50: mol_type = other DNA
aaaaaataacaactcatatctatctcaccttacacaaaacctaccttcac

SEQ ID NO: 7026 - DNA, 50 bp, synthetic construct
  source 1..50: mol_type = other DNA
atcactatactattaaaactaatcraaaatctccatacttacataaaaac

SEQ ID NO: 7027 - DNA, 50 bp, synthetic construct
  source 1..50: mol_type = other DNA
atcaatctccccatacttttatacrttttcatataaacataaaaatttcc

SEQ ID NO: 7028 - DNA, 50 bp, synthetic construct
  source 1..50: mol_type = other DNA
caaaaaacaaaatttctcaaaatctctatacaaatctttaatactctttc

SEQ ID NO: 7029 - DNA, 50 bp, synthetic construct
  source 1..50: mol_type = other DNA
cttcatttcaataccacrtcataacttttacaaactatcttcttacctcc

SEQ ID NO: 7030 - DNA, 50 bp, synthetic construct
  source 1..50: mol_type = other DNA
ttctctaacrtctaaataaaaccctacacaaaacttcatttcaataccac

SEQ ID NO: 7031 - DNA, 50 bp, synthetic construct
  source 1..50: mol_type = other DNA
ccaaaaaaccttttaaaaatacraaacacttacctttcacaaaaataatc

SEQ ID NO: 7032 - DNA, 50 bp, synthetic construct
  source 1..50: mol_type = other DNA
aaaaaccttaacacaacaaacaaaacacccaaaaaaccttttaaaaatac

SEQ ID NO: 7033 - DNA, 50 bp, synthetic construct
  source 1..50: mol_type = other DNA
aatactcrtaaacctcacaataaaaaaaatttcacacaaaaattcaactc

SEQ ID NO: 7034 - DNA, 50 bp, synthetic construct
  source 1..50: mol_type = other DNA
aaaataacttaaatttctacctatactttcattttaaaaaacaaatactc

SEQ ID NO: 7035 - DNA, 50 bp, synthetic construct
  source 1..50: mol_type = other DNA
aataattaaaactccccaaacaaactccaaaccactacaaataaacactc

SEQ ID NO: 7036 - DNA, 50 bp, synthetic construct
  source 1..50: mol_type = other DNA
aaacttaactcccttaatattctttctccctcccacaattttttccactc

SEQ ID NO: 7037 - DNA, 50 bp, synthetic construct
  source 1..50: mol_type = other DNA
ttatctaaaccattattcatccatttaaaacactaaccaaaatttttatc

SEQ ID NO: 7038 - DNA, 50 bp, synthetic construct
  source 1..50: mol_type = other DNA
aaaaacctttatacctctctttatacctcaaacctactaataaacttacc

SEQ ID NO: 7039 - DNA, 50 bp, synthetic construct
  source 1..50: mol_type = other DNA
craaaacaacacaaaattataaaaatcrcctcttcataaactcaaaaaac

SEQ ID NO: 7040 - DNA, 50 bp, synthetic construct
  source 1..50: mol_type = other DNA
crtctcctaaacctataaaaaaacractttcacaatcctatactaccttc

SEQ ID NO: 7041 - DNA, 50 bp, synthetic construct
  source 1..50: mol_type = other DNA
caattcctcctcccatatttccaatttaaaaccactactaacaacactac

SEQ ID NO: 7042 - DNA, 50 bp, synthetic construct
  source 1..50: mol_type = other DNA
caaaaatcatctatataaacctaaaccctcaaatatttatttaaatccac

SEQ ID NO: 7043 - DNA, 50 bp, synthetic construct
  source 1..50: mol_type = other DNA
aacttaaataaatatctaaaaacccaaacccatacaaataatctctatac

SEQ ID NO: 7044 - DNA, 50 bp, synthetic construct
  source 1..50: mol_type = other DNA
atctaaaaacccaaacccatacaaataatctctatacrctaatattttac

SEQ ID NO: 7045 - DNA, 50 bp, synthetic construct
  source 1..50: mol_type = other DNA
tcttaaaaatccctttaatttatccattcctataaaaaaaatttctctac

SEQ ID NO: 7046 - DNA, 50 bp, synthetic construct
  source 1..50: mol_type = other DNA
taaataataaaatatcaatattcaaattttcaaaactctcaaaatactcc

SEQ ID NO: 7047 - DNA, 50 bp, synthetic construct
  source 1..50: mol_type = other DNA
ccatccaaattaacctctacaaacttaattccatctaactaccttaaaac

SEQ ID NO: 7048 - DNA, 50 bp, synthetic construct
  source 1..50: mol_type = other DNA
tcaaaaaacatccttaaaccaaacataccaaaaaccaaatacaccaaaac

SEQ ID NO: 7049 - DNA, 50 bp, synthetic construct
  source 1..50: mol_type = other DNA
acatcccaaaccctatactatatacrtcaaaaacattataactcaacacc

SEQ ID NO: 7050 - DNA, 50 bp, synthetic construct
  source 1..50: mol_type = other DNA
cacatcttcaaaaatacctcaaccatctccaccctaacataaataaaaac

SEQ ID NO: 7051 - DNA, 50 bp, synthetic construct
  source 1..50: mol_type = other DNA
aaacttacatttctaataaaaacccaactcctacaacraaaataaataac

SEQ ID NO: 7052 - DNA, 50 bp, synthetic construct
  source 1..50: mol_type = other DNA
acatacaaaaaccttttctaaaatctatcctatttacrtcacccattttc

SEQ ID NO: 7053 - DNA, 50 bp, synthetic construct
  source 1..50: mol_type = other DNA
acccccaatataatcctcaaactaacaacataaacatcctctaaaaatcc

SEQ ID NO: 7054 - DNA, 50 bp, synthetic construct
  source 1..50: mol_type = other DNA
tttaaaaacttcctctaaatcctaacaaaatcaactctacaaaccrtatc

SEQ ID NO: 7055 - DNA, 50 bp, synthetic construct
  source 1..50: mol_type = other DNA
caaactttaaaaacttcctctaaatcctaacaaaatcaactctacaaacc

SEQ ID NO: 7056 - DNA, 50 bp, synthetic construct
  source 1..50: mol_type = other DNA
ttttttctccaatccatctcattataatactaacaaccaattaaatactc

SEQ ID NO: 7057 - DNA, 50 bp, synthetic construct
  source 1..50: mol_type = other DNA
atacataataaaaaataaccttcttctaacaaacactacaaccctacacc

SEQ ID NO: 7058 - DNA, 50 bp, synthetic construct
  source 1..50: mol_type = other DNA
tttttataattccacaaataaatctaatatacataattctaaaaacaacc

SEQ ID NO: 7059 - DNA, 50 bp, synthetic construct
  source 1..50: mol_type = other DNA
caaatactcaaaacaaaaaccaaattcctaaactttaaacaaaacatatc

SEQ ID NO: 7060 - DNA, 50 bp, synthetic construct
  source 1..50: mol_type = other DNA
taaataactctattttatcttatacaactcaactttaaaccaacaatatc

SEQ ID NO: 7061 - DNA, 50 bp, synthetic construct
  source 1..50: mol_type = other DNA
tataataatacaatccccaaaaattataaaactcatactaaaaacctacc

SEQ ID NO: 7062 - DNA, 50 bp, synthetic construct
  source 1..50: mol_type = other DNA
ataactaaccaaatatacaacaactatccrataaacattttccaaatacc

SEQ ID NO: 7063 - DNA, 50 bp, synthetic construct
  source 1..50: mol_type = other DNA
aacaaacacaaattaattacatatcaaacracacctaaaaaatacctacc

SEQ ID NO: 7064 - DNA, 50 bp, synthetic construct
  source 1..50: mol_type = other DNA
caaacaaaacaaccraaaataacaattaaaacatacaaccccttaatccc

SEQ ID NO: 7065 - DNA, 50 bp, synthetic construct
  source 1..50: mol_type = other DNA
acraataaataacataaccatacatttaaaacacaaaccaaactcacccc

SEQ ID NO: 7066 - DNA, 50 bp, synthetic construct
  source 1..50: mol_type = other DNA
tatatctccaaaccrcaacacataacaaaaacacrcaataaatatctaac

SEQ ID NO: 7067 - DNA, 50 bp, synthetic construct
  source 1..50: mol_type = other DNA
ttatatttcaaatacataatcatatcacttactcrccaaacatttactac

SEQ ID NO: 7068 - DNA, 50 bp, synthetic construct
  source 1..50: mol_type = other DNA
aaaaactacttctctaaactactcactattcactactatatctccaaacc

SEQ ID NO: 7069 - DNA, 50 bp, synthetic construct
  source 1..50: mol_type = other DNA
aacaataaacaacctaaaaaaacaactcctcctaaaacttactttctaac

SEQ ID NO: 7070 - DNA, 50 bp, synthetic construct
  source 1..50: mol_type = other DNA
cttatttatttcttcatactacttacctcaacctacaattatcacccrtc

SEQ ID NO: 7071 - DNA, 50 bp, synthetic construct
  source 1..50: mol_type = other DNA
caccttatttatttcttcatactacttacctcaacctacaattatcaccc

SEQ ID NO: 7072 - DNA, 50 bp, synthetic construct
  source 1..50: mol_type = other DNA
cactacccataactaactcaaactcrtacttcaaacccaactcaaatatc

SEQ ID NO: 7073 - DNA, 50 bp, synthetic construct
  source 1..50: mol_type = other DNA
aaaatctaacaaacaaacttaaaaaatctctctaaaaccttttaaatacc

SEQ ID NO: 7074 - DNA, 50 bp, synthetic construct
  source 1..50: mol_type = other DNA
taaaatatttaactaaacccattacatcattcataaatctaacaatactc

SEQ ID NO: 7075 - DNA, 50 bp, synthetic construct
  source 1..50: mol_type = other DNA
ctttaaaacaacctaaatttcaattaaaaaataaacttcccctatcacac

SEQ ID NO: 7076 - DNA, 50 bp, synthetic construct
  source 1..50: mol_type = other DNA
ctaaacacaactcaactccataaaaaacttctattttataatctattttc

SEQ ID NO: 7077 - DNA, 50 bp, synthetic construct
  source 1..50: mol_type = other DNA
ttaaataactacrtcaaacctcctcacrtaacraaatattaaaaacacac

SEQ ID NO: 7078 - DNA, 50 bp, synthetic construct
  source 1..50: mol_type = other DNA
ctattttataatctattttcraaatctaatacrtatatttctaacacccc

SEQ ID NO: 7079 - DNA, 50 bp, synthetic construct
  source 1..50: mol_type = other DNA
caatatattttctcaaaatcatattaaataactacrtcaaacctcctcac

SEQ ID NO: 7080 - DNA, 50 bp, synthetic construct
  source 1..50: mol_type = other DNA
raaatctaatacrtatatttctaacaccccrtcacrtaaaaaaatctaac

SEQ ID NO: 7081 - DNA, 50 bp, synthetic construct
  source 1..50: mol_type = other DNA
taatacaaccaactcactaaaacaaaatatcctttatcraaaaactttcc

SEQ ID NO: 7082 - DNA, 50 bp, synthetic construct
  source 1..50: mol_type = other DNA
ctacaaatttaacttttacaaaattccaaatcaatatcctaatacaatac

SEQ ID NO: 7083 - DNA, 50 bp, synthetic construct
  source 1..50: mol_type = other DNA
aaacaactttctcctccatctataacaaattatcttctataaaaaaaaac

SEQ ID NO: 7084 - DNA, 50 bp, synthetic construct
  source 1..50: mol_type = other DNA
ccaatatttccaacttaattaaatcttctctcccttcaattaattaaaac

SEQ ID NO: 7085 - DNA, 50 bp, synthetic construct
  source 1..50: mol_type = other DNA
aacaatctaattcatctttatactccctacacctataaacataacaatcc

SEQ ID NO: 7086 - DNA, 50 bp, synthetic construct
  source 1..50: mol_type = other DNA
cttattcctctaaaatttctaatttttaatttcccatcattacaatatac

SEQ ID NO: 7087 - DNA, 50 bp, synthetic construct
  source 1..50: mol_type = other DNA
caatattattttacttactattcttatcaattacacaaactaaacctacc

SEQ ID NO: 7088 - DNA, 50 bp, synthetic construct
  source 1..50: mol_type = other DNA
aatttaaaattaaaactctaatatccacctctccaatcttaacaataccc

SEQ ID NO: 7089 - DNA, 50 bp, synthetic construct
  source 1..50: mol_type = other DNA
tttaaattacttctccaacaaatttcactactttttttcaaattccattc

SEQ ID NO: 7090 - DNA, 50 bp, synthetic construct
  source 1..50: mol_type = other DNA
atccatatctacaacactcaattccaacaacaaaatccaatacataccac

SEQ ID NO: 7091 - DNA, 50 bp, synthetic construct
  source 1..50: mol_type = other DNA
aatctaaatcaaaacaccctaaaatattcattaacctaatttaaaatacc

SEQ ID NO: 7092 - DNA, 50 bp, synthetic construct
  source 1..50: mol_type = other DNA
atcaaaacaccctaaaatattcattaacctaatttaaaataccrtattcc

SEQ ID NO: 7093 - DNA, 50 bp, synthetic construct
  source 1..50: mol_type = other DNA
ccttaaaattatactaattcaaaaatctataactaaattcattcttatcc

SEQ ID NO: 7094 - DNA, 50 bp, synthetic construct
  source 1..50: mol_type = other DNA
ctaaacaacataacraaaccctatctctaccaacaatacaaaaattaacc

SEQ ID NO: 7095 - DNA, 50 bp, synthetic construct
  source 1..50: mol_type = other DNA
ctctcacctcaacttcctaaataactaaaaccacaaataaaaaccaccac

SEQ ID NO: 7096 - DNA, 50 bp, synthetic construct
  source 1..50: mol_type = other DNA
tcrcaaatttcaaatcctccaaaaaacatttacctaactccaaaccaaac

SEQ ID NO: 7097 - DNA, 50 bp, synthetic construct
  source 1..50: mol_type = other DNA
caattttaacaacacctttaaaatccataataacataaaaatactaaaac

SEQ ID NO: 7098 - DNA, 50 bp, synthetic construct
  source 1..50: mol_type = other DNA
ctaaaaaactaaaaatccaatttaaatactttccaaacatatttaaaaac

SEQ ID NO: 7099 - DNA, 50 bp, synthetic construct
  source 1..50: mol_type = other DNA
acctaaaaatcraaaaaactatatcttccttcttttacctcttaattaac

SEQ ID NO: 7100 - DNA, 50 bp, synthetic construct
  source 1..50: mol_type = other DNA
tacaaaactaaaacccataataaaaatactccaaacctaacctaaaaatc

SEQ ID NO: 7101 - DNA, 50 bp, synthetic construct
  source 1..50: mol_type = other DNA
aataaatacctaccacaaaaataatttcaaacatctattaaaaacaaatc

SEQ ID NO: 7102 - DNA, 50 bp, synthetic construct
  source 1..50: mol_type = other DNA
actaataaaaaaattcacatttatttttacaaaccaatcataacataacc

SEQ ID NO: 7103 - DNA, 50 bp, synthetic construct
  source 1..50: mol_type = other DNA
aaatcaatctaaatcaaccccaaaaaccaacccacraaataacaaacacc

SEQ ID NO: 7104 - DNA, 50 bp, synthetic construct
  source 1..50: mol_type = other DNA
aaacaccraaatcaaacaccttcattttccaaacataactctataacrcc

SEQ ID NO: 7105 - DNA, 50 bp, synthetic construct
  source 1..50: mol_type = other DNA
atacatcctaaaatcctaactaacctccaactactacataaatcactccc

SEQ ID NO: 7106 - DNA, 50 bp, synthetic construct
  source 1..50: mol_type = other DNA
tccaaaccctactcctaactaataaattaataaacataacaaaaacatac

SEQ ID NO: 7107 - DNA, 50 bp, synthetic construct
  source 1..50: mol_type = other DNA
aactttcrataaataatactcaccatacrttccatctctttaaaaaccac

SEQ ID NO: 7108 - DNA, 50 bp, synthetic construct
  source 1..50: mol_type = other DNA
caactacatctaaataacrctaaactttcrataaataatactcaccatac

SEQ ID NO: 7109 - DNA, 50 bp, synthetic construct
  source 1..50: mol_type = other DNA
ttataacttcccaaaacccaaacataataaaatttactcttataatcacc

SEQ ID NO: 7110 - DNA, 50 bp, synthetic construct
  source 1..50: mol_type = other DNA
aacrcaaatacaaatcaaaaaaactcttaaaaccraatacaataactcac

SEQ ID NO: 7111 - DNA, 50 bp, synthetic construct
  source 1..50: mol_type = other DNA
ctatacaactcaataactaactaaattaaaattattcataattcatatcc

SEQ ID NO: 7112 - DNA, 50 bp, synthetic construct
  source 1..50: mol_type = other DNA
aaattaaaattattcataattcatatccrttacatttatattcctatttc

SEQ ID NO: 7113 - DNA, 50 bp, synthetic construct
  source 1..50: mol_type = other DNA
acttcattaaatacttactaataaataacaacttacaaactatattaacc

SEQ ID NO: 7114 - DNA, 50 bp, synthetic construct
  source 1..50: mol_type = other DNA
cttacraaactcaacttccccttaactacactactttacaaataaaaaac

SEQ ID NO: 7115 - DNA, 50 bp, synthetic construct
  source 1..50: mol_type = other DNA
taactcacaccaaaaccrttcraataacaaaaaatatcctacctaaaaac

SEQ ID NO: 7116 - DNA, 50 bp, synthetic construct
  source 1..50: mol_type = other DNA
aaacctctaacaatctcatatcacaataactctcccacctacatcaattc

SEQ ID NO: 7117 - DNA, 50 bp, synthetic construct
  source 1..50: mol_type = other DNA
ataacttaaaaacaaaattccactaataacaaaacctataaataaataac

SEQ ID NO: 7118 - DNA, 50 bp, synthetic construct
  source 1..50: mol_type = other DNA
aaaaaaaaaaccacatcacaaaaaaaacccataacaataaaaaccccatc

SEQ ID NO: 7119 - DNA, 50 bp, synthetic construct
  source 1..50: mol_type = other DNA
aaacaaacaaacaaaaaacctaatcttaatattacaaacataatcaaatc

SEQ ID NO: 7120 - DNA, 50 bp, synthetic construct
  source 1..50: mol_type = other DNA
aacactattattaattataataattcttccattctacccaaatcctaaac

SEQ ID NO: 7121 - DNA, 50 bp, synthetic construct
  source 1..50: mol_type = other DNA
aaaattcatccttctttaaaaccacaaaaaatttataattaaaaatttcc

SEQ ID NO: 7122 - DNA, 50 bp, synthetic construct
  source 1..50: mol_type = other DNA
ccrcaaaaactaaaatactaaaaactactaaaaccrccatcttaaattcc

SEQ ID NO: 7123 - DNA, 50 bp, synthetic construct
  source 1..50: mol_type = other DNA
rcccctcaataccccaaaaaaactaatttacraacaattattcatcaacc

SEQ ID NO: 7124 - DNA, 50 bp, synthetic construct
  source 1..50: mol_type = other DNA
accctacaaaatcatcaaataaattttcaaatatatttacaataaaaacc

SEQ ID NO: 7125 - DNA, 50 bp, synthetic construct
  source 1..50: mol_type = other DNA
aaaacacctaaacataactcacatattaccaacttcaaaacaactaaaac

SEQ ID NO: 7126 - DNA, 50 bp, synthetic construct
  source 1..50: mol_type = other DNA
cacctaaacataactcacatattaccaacttcaaaacaactaaaacratc

SEQ ID NO: 7127 - DNA, 50 bp, synthetic construct
  source 1..50: mol_type = other DNA
aaacataactcacatattaccaacttcaaaacaactaaaacratcrtaac

SEQ ID NO: 7128 - DNA, 50 bp, synthetic construct
  source 1..50: mol_type = other DNA
tattaaaaaattacaaaacttatacttcataaaaatatcactctacctac

SEQ ID NO: 7129 - DNA, 50 bp, synthetic construct
  source 1..50: mol_type = other DNA
actatctaacattttaatacatcaatttaatcaatatattcctactactc

SEQ ID NO: 7130 - DNA, 50 bp, synthetic construct
  source 1..50: mol_type = other DNA
atttataatcataaaaaccatacaaatccctaaaatcaaaaaaccacaac

SEQ ID NO: 7131 - DNA, 50 bp, synthetic construct
  source 1..50: mol_type = other DNA
tattttccttacaacaaaaccctaacrtaaatccatttcaaaaactaatc

SEQ ID NO: 7132 - DNA, 50 bp, synthetic construct
  source 1..50: mol_type = other DNA
ctaaattacaaaaccacaaaccacaactaacctaaaatcttaataaaaac

SEQ ID NO: 7133 - DNA, 50 bp, synthetic construct
  source 1..50: mol_type = other DNA
accaaaactctaaactaattataacctataattctacaactcaactcttc

SEQ ID NO: 7134 - DNA, 50 bp, synthetic construct
  source 1..50: mol_type = other DNA
tttcctatcttactataaatcactaatacaaaacacttcttttacacttc

SEQ ID NO: 7135 - DNA, 50 bp, synthetic construct
  source 1..50: mol_type = other DNA
ttcrctatctactatccaaaaaacaaaaatacaacaactaaaatcaaacc

SEQ ID NO: 7136 - DNA, 50 bp, synthetic construct
  source 1..50: mol_type = other DNA
caaaaaacaaaaatacaacaactaaaatcaaaccraaaccatccctctac

SEQ ID NO: 7137 - DNA, 50 bp, synthetic construct
  source 1..50: mol_type = other DNA
cttactccataaacraaaaaacaacccctaaaaatatacaaaccatacac

SEQ ID NO: 7138 - DNA, 50 bp, synthetic construct
  source 1..50: mol_type = other DNA
ctcaccacctattcrtacataatctacacatcctcaaaaattactcttcc

SEQ ID NO: 7139 - DNA, 50 bp, synthetic construct
  source 1..50: mol_type = other DNA
aactcttcaatactaactaaactaaaaaaaattataaacctatctcatac

SEQ ID NO: 7140 - DNA, 50 bp, synthetic construct
  source 1..50: mol_type = other DNA
ttatttcaatcaacrtttactaccctaaaacctaaatacaaaaaaactac

SEQ ID NO: 7141 - DNA, 50 bp, synthetic construct
  source 1..50: mol_type = other DNA
aaaaaaataatcrataaaataacrcacrcaacctataattccaactactc

SEQ ID NO: 7142 - DNA, 50 bp, synthetic construct
  source 1..50: mol_type = other DNA
aattaaaaatactctctcccaaaacrtacaaaacttccctactcttcctc

SEQ ID NO: 7143 - DNA, 50 bp, synthetic construct
  source 1..50: mol_type = other DNA
ctcctttacacatcctttatttcattaaataccttaaaaaatcttataac

SEQ ID NO: 7144 - DNA, 50 bp, synthetic construct
  source 1..50: mol_type = other DNA
crcaaatctacraccctcaaactcttcaactacaataacrataataatac

SEQ ID NO: 7145 - DNA, 50 bp, synthetic construct
  source 1..50: mol_type = other DNA
tttatttcattaaataccttaaaaaatcttataacrtacrcatcattacc

SEQ ID NO: 7146 - DNA, 50 bp, synthetic construct
  source 1..50: mol_type = other DNA
aaataacctattatttaataaaaaaaacccacrccttaaaaacccacacc

SEQ ID NO: 7147 - DNA, 50 bp, synthetic construct
  source 1..50: mol_type = other DNA
tcctaacaattaaaatttaacactaaaaaaaataccaccaaaaaacccac

SEQ ID NO: 7148 - DNA, 50 bp, synthetic construct
  source 1..50: mol_type = other DNA
caccataacaacaaaacaccatcaaaactaataacrctaatccatccctc

SEQ ID NO: 7149 - DNA, 50 bp, synthetic construct
  source 1..50: mol_type = other DNA
taataattttcctaacaccataacaacaaaacaccatcaaaactaataac

SEQ ID NO: 7150 - DNA, 50 bp, synthetic construct
  source 1..50: mol_type = other DNA
ccaaacaaccaacrtaaaccctctaaaataaatatctactacaaatatac

SEQ ID NO: 7151 - DNA, 50 bp, synthetic construct
  source 1..50: mol_type = other DNA
attatcatacacataaatacaacctttaaatcacrtcccaaacaaccaac

SEQ ID NO: 7152 - DNA, 50 bp, synthetic construct
  source 1..50: mol_type = other DNA
taaaacrtaattcaaaaactatacccatatatataacaatcctatttccc

SEQ ID NO: 7153 - DNA, 50 bp, synthetic construct
  source 1..50: mol_type = other DNA
tcacataatcactaactctactccaaaacttcctacratataaataaacc

SEQ ID NO: 7154 - DNA, 50 bp, synthetic construct
  source 1..50: mol_type = other DNA
aaattaaaacaaattcacataatcactaactctactccaaaacttcctac

SEQ ID NO: 7155 - DNA, 50 bp, synthetic construct
  source 1..50: mol_type = other DNA
aaaccccaaaaaaactaccttctttctttactcaaaaaaatccctcaatc

SEQ ID NO: 7156 - DNA, 50 bp, synthetic construct
  source 1..50: mol_type = other DNA
actaaactctactactattttaaataaactaaccccacaaaaaatataac

SEQ ID NO: 7157 - DNA, 50 bp, synthetic construct
  source 1..50: mol_type = other DNA
ccaaccctccraaaccaataaaacaaacttaaaaacataaaactaaaacc

SEQ ID NO: 7158 - DNA, 50 bp, synthetic construct
  source 1..50: mol_type = other DNA
acrccctaataaaacaaaaactccccrcaaattaaaataaatactatttc

SEQ ID NO: 7159 - DNA, 50 bp, synthetic construct
  source 1..50: mol_type = other DNA
caataccactacrcaaattaatcaacraaacaacatccattttaatctac

SEQ ID NO: 7160 - DNA, 50 bp, synthetic construct
  source 1..50: mol_type = other DNA
acraaacaacatccattttaatctacraaaaacccctaccttaccaaaac

SEQ ID NO: 7161 - DNA, 50 bp, synthetic construct
  source 1..50: mol_type = other DNA
caattatcctaatataccatctcaatacatcctaaaacrcaaaccccaac

SEQ ID NO: 7162 - DNA, 50 bp, synthetic construct
  source 1..50: mol_type = other DNA
acctaatacraacaattatcctaatataccatctcaatacatcctaaaac

SEQ ID NO: 7163 - DNA, 50 bp, synthetic construct
  source 1..50: mol_type = other DNA
aaaatctacrccctaaaatacactaaaataatacatcaaaataactactc

SEQ ID NO: 7164 - DNA, 50 bp, synthetic construct
  source 1..50: mol_type = other DNA
ttattaaaatcatttctactacttttctttctacttcaaacacacaattc

SEQ ID NO: 7165 - DNA, 50 bp, synthetic construct
  source 1..50: mol_type = other DNA
ttataaaaataaattcccaaacaacactaactacaacaaaatcttatctc

SEQ ID NO: 7166 - DNA, 50 bp, synthetic construct
  source 1..50: mol_type = other DNA
cccaaacaacactaactacaacaaaatcttatctcractcaataaaatac

SEQ ID NO: 7167 - DNA, 50 bp, synthetic construct
  source 1..50: mol_type = other DNA
ataaatctttctactaaatctaattaaaaataaaattatcaaaaccaaac

SEQ ID NO: 7168 - DNA, 50 bp, synthetic construct
  source 1..50: mol_type = other DNA
rcrttaattacctaaaatcaaaaactcaaaaccaatctaaaccacataac

SEQ ID NO: 7169 - DNA, 50 bp, synthetic construct
  source 1..50: mol_type = other DNA
tacctaaaatcaaaaactcaaaaccaatctaaaccacataacraaacccc

SEQ ID NO: 7170 - DNA, 50 bp, synthetic construct
  source 1..50: mol_type = other DNA
tatccrtattaaaaaccccctcccaaaatctaaaaacaactaaaactacc

SEQ ID NO: 7171 - DNA, 50 bp, synthetic construct
  source 1..50: mol_type = other DNA
tataactaaataccttccttaaaaaaattttacatctcccaaatcaattc

SEQ ID NO: 7172 - DNA, 50 bp, synthetic construct
  source 1..50: mol_type = other DNA
taaactaaaacaatatccaaaaaaaatttactcttcctaaaaccaccctc

SEQ ID NO: 7173 - DNA, 50 bp, synthetic construct
  source 1..50: mol_type = other DNA
aaaaacrtatcrtattaattatcattcttaaaataaccacaacacctcac

SEQ ID NO: 7174 - DNA, 50 bp, synthetic construct
  source 1..50: mol_type = other DNA
aaatactataattattccaaaaataataattaatacratacrtctccccc

SEQ ID NO: 7175 - DNA, 50 bp, synthetic construct
  source 1..50: mol_type = other DNA
atacaaaaactttcttttcaaaaacacrcaaataaaaataatccccacac

SEQ ID NO: 7176 - DNA, 50 bp, synthetic construct
  source 1..50: mol_type = other DNA
tctaaaaaataaatttccataataactactcttaatactattacaaacac

SEQ ID NO: 7177 - DNA, 50 bp, synthetic construct
  source 1..50: mol_type = other DNA
atcattttctacaaactacaaataacataaaaaatcatttataaaaatcc

SEQ ID NO: 7178 - DNA, 50 bp, synthetic construct
  source 1..50: mol_type = other DNA
aaaatatacttacrtatttaaaaatcraatatacccaacattccaaaaac

SEQ ID NO: 7179 - DNA, 50 bp, synthetic construct
  source 1..50: mol_type = other DNA
aacttaatatattttcaataataaacrtttttaaaatactaaacacaccc

SEQ ID NO: 7180 - DNA, 50 bp, synthetic construct
  source 1..50: mol_type = other DNA
tccccacaacctacttaaaatactcacaaatattccatcccaaaatacac

SEQ ID NO: 7181 - DNA, 50 bp, synthetic construct
  source 1..50: mol_type = other DNA
acctatctaactcaacttaaacaaaaactaaaccatatatactcaaaaac

SEQ ID NO: 7182 - DNA, 50 bp, synthetic construct
  source 1..50: mol_type = other DNA
acctcctaccctaatcttcaacacatctacacattattttatactcaacc

SEQ ID NO: 7183 - DNA, 50 bp, synthetic construct
  source 1..50: mol_type = other DNA
aaccaaacaaatattatctaaaatctctttttcaacttctataaaataac

SEQ ID NO: 7184 - DNA, 50 bp, synthetic construct
  source 1..50: mol_type = other DNA
ttactaattaataactaccatcaaaacccaaaccactatttttcataaac

SEQ ID NO: 7185 - DNA, 50 bp, synthetic construct
  source 1..50: mol_type = other DNA
aaacccaacctaaatcaactaataaacaaaaatatataccaactttatcc

SEQ ID NO: 7186 - DNA, 50 bp, synthetic construct
  source 1..50: mol_type = other DNA
aacaacaatataaataactatcctattcatttaacaatcaactctcattc

SEQ ID NO: 7187 - DNA, 50 bp, synthetic construct
  source 1..50: mol_type = other DNA
atatcttacattatataaacccatctaaaaaccactaaacacaaaaaccc

SEQ ID NO: 7188 - DNA, 50 bp, synthetic construct
  source 1..50: mol_type = other DNA
aaataaactacctaacaatactcracacccaacctaaaataataacaatc

SEQ ID NO: 7189 - DNA, 50 bp, synthetic construct
  source 1..50: mol_type = other DNA
aacccctataatataaattcatctatataacaaacctacacatatacccc

SEQ ID NO: 7190 - DNA, 50 bp, synthetic construct
  source 1..50: mol_type = other DNA
ataccttatttaataatcraccaataaaatctctatccctaataaatacc

SEQ ID NO: 7191 - DNA, 50 bp, synthetic construct
  source 1..50: mol_type = other DNA
ttcttctctcacaattttccaaatccaaaataataccttatttaataatc

SEQ ID NO: 7192 - DNA, 50 bp, synthetic construct
  source 1..50: mol_type = other DNA
aaaaacactaaactaatttaaacctttttaatctctcccccaccttttac

SEQ ID NO: 7193 - DNA, 50 bp, synthetic construct
  source 1..50: mol_type = other DNA
actactaacttttaacattaaaacattacatcaaatcattttaacttccc

SEQ ID NO: 7194 - DNA, 50 bp, synthetic construct
  source 1..50: mol_type = other DNA
atccactaacccccattccttaatctaaaaattaaacaattaaactttac

SEQ ID NO: 7195 - DNA, 50 bp, synthetic construct
  source 1..50: mol_type = other DNA
accccactaaaattccactataaaatccctaattccaaaatattctctac

SEQ ID NO: 7196 - DNA, 50 bp, synthetic construct
  source 1..50: mol_type = other DNA
ttactatacttcactaaaaacaattactcaatattataaattttctaacc

SEQ ID NO: 7197 - DNA, 50 bp, synthetic construct
  source 1..50: mol_type = other DNA
aatatcctccaatatatacratctctcaaaaaaaataacctcactcacac

SEQ ID NO: 7198 - DNA, 50 bp, synthetic construct
  source 1..50: mol_type = other DNA
attcaattaaaactttatttactaaaacacaataaatcaaatttacctcc

SEQ ID NO: 7199 - DNA, 50 bp, synthetic construct
  source 1..50: mol_type = other DNA
tccctctcctctaactctataattacaaaacaattaattacactcttacc

SEQ ID NO: 7200 - DNA, 50 bp, synthetic construct
  source 1..50: mol_type = other DNA
accraatccaatcccaaaaaaataaacaaccaaatctctccaacatcaac

SEQ ID NO: 7201 - DNA, 50 bp, synthetic construct
  source 1..50: mol_type = other DNA
ctttttaacttcaaatttctattaataacaaaacaaaaaataccaccttc

SEQ ID NO: 7202 - DNA, 50 bp, synthetic construct
  source 1..50: mol_type = other DNA
ctattaataacaaaacaaaaaataccaccttcrtaatacctaaactaaac

SEQ ID NO: 7203 - DNA, 50 bp, synthetic construct
  source 1..50: mol_type = other DNA
tttttttccaactcataaatcacttccaatcaaattcaaaaacaaaaacc

SEQ ID NO: 7204 - DNA, 50 bp, synthetic construct
  source 1..50: mol_type = other DNA
ctacatttataaaacaacaaatctacattttaacaaaataaaatacaatc

SEQ ID NO: 7205 - DNA, 50 bp, synthetic construct
  source 1..50: mol_type = other DNA
ctaaaaaacatttattaaacaccttattataaaacactaacatatactac

SEQ ID NO: 7206 - DNA, 50 bp, synthetic construct
  source 1..50: mol_type = other DNA
acaatatatcaattaaattcaaaaactccccaaccccattataacccccc

SEQ ID NO: 7207 - DNA, 50 bp, synthetic construct
  source 1..50: mol_type = other DNA
aacacaaaaaccratactaccaataacattaaactcctattaacctcaac

SEQ ID NO: 7208 - DNA, 50 bp, synthetic construct
  source 1..50: mol_type = other DNA
aaatttcccaaaaaaacttttaattaaattcaaatatatcaactcttccc

SEQ ID NO: 7209 - DNA, 50 bp, synthetic construct
  source 1..50: mol_type = other DNA
aaaaataaaaacrtaaaaactatacctctaacctaaactaaaccattcac

SEQ ID NO: 7210 - DNA, 50 bp, synthetic construct
  source 1..50: mol_type = other DNA
ttaaaaaaaaccrtaaataatccaacttaaatcaaaaatacaatttccac

SEQ ID NO: 7211 - DNA, 50 bp, synthetic construct
  source 1..50: mol_type = other DNA
aaaaacaaccacaaaacctctaaccccaataaaacttaactcataaaaac

SEQ ID NO: 7212 - DNA, 50 bp, synthetic construct
  source 1..50: mol_type = other DNA
raaaaaactttaaaatcrcctaaacttaaaccctaccccaccacrtattc

SEQ ID NO: 7213 - DNA, 50 bp, synthetic construct
  source 1..50: mol_type = other DNA
raacacrtaataaaacaaaactcaaatccaaacrattccaaaatcccccc

SEQ ID NO: 7214 - DNA, 50 bp, synthetic construct
  source 1..50: mol_type = other DNA
craaacctataatttttctccccrcraaataaacttaataaaaacaccrc

SEQ ID NO: 7215 - DNA, 50 bp, synthetic construct
  source 1..50: mol_type = other DNA
tccraaacctataatttttctccccrcraaataaacttaataaaaacacc

SEQ ID NO: 7216 - DNA, 50 bp, synthetic construct
  source 1..50: mol_type = other DNA
aaaaaccaacataaaaccttattcactaaaaaattccacaaacctaaaac

SEQ ID NO: 7217 - DNA, 50 bp, synthetic construct
  source 1..50: mol_type = other DNA
aatataaaccraacaaaattacccttaaaacraaattacaattaaaaacc

SEQ ID NO: 7218 - DNA, 50 bp, synthetic construct
  source 1..50: mol_type = other DNA
tctatcatcttcaaaactaaatataaaccraacaaaattacccttaaaac

SEQ ID NO: 7219 - DNA, 50 bp, synthetic construct
  source 1..50: mol_type = other DNA
tacaaattactcacaatacaatctatcatcttcaaaactaaatataaacc

SEQ ID NO: 7220 - DNA, 50 bp, synthetic construct
  source 1..50: mol_type = other DNA
caataaatcattatccaatctatttattacccaaactccaaactactaac

SEQ ID NO: 7221 - DNA, 50 bp, synthetic construct
  source 1..50: mol_type = other DNA
ctaaaaatctaaacaaaatctaataaactcctatatatattcataacacc

SEQ ID NO: 7222 - DNA, 50 bp, synthetic construct
  source 1..50: mol_type = other DNA
ccaaaaaacaacattattctaaaaaaaactcttaaaaataccaaataatc

SEQ ID NO: 7223 - DNA, 50 bp, synthetic construct
  source 1..50: mol_type = other DNA
accaaaaaccccaaactaaaaaatattaaaataaacaataacaaaaactc

SEQ ID NO: 7224 - DNA, 50 bp, synthetic construct
  source 1..50: mol_type = other DNA
aacaataacaaaaactcraaacacacaattttaaatacacctaatcaacc

SEQ ID NO: 7225 - DNA, 50 bp, synthetic construct
  source 1..50: mol_type = other DNA
tcctaaaaaatatacttaataatcataaactctatttacaacactaaaac

SEQ ID NO: 7226 - DNA, 50 bp, synthetic construct
  source 1..50: mol_type = other DNA
tcaacaattaaattttaaacrttttaaaaaaacttcccrctaaaccacac

SEQ ID NO: 7227 - DNA, 50 bp, synthetic construct
  source 1..50: mol_type = other DNA
ttaaaaccaaactttcatttatttatacaaacaatactttattatttttc

SEQ ID NO: 7228 - DNA, 50 bp, synthetic construct
  source 1..50: mol_type = other DNA
actaatactcaaatctcttaacttccttcctatcccatattcttttcacc

SEQ ID NO: 7229 - DNA, 50 bp, synthetic construct
  source 1..50: mol_type = other DNA
tctaaaactaattaaacaaaaatatactaaaaacctacccaacaataacc

SEQ ID NO: 7230 - DNA, 50 bp, synthetic construct
  source 1..50: mol_type = other DNA
aataaaattacaataccracaaaaaacatcctacaaactcccaaaccaac

SEQ ID NO: 7231 - DNA, 50 bp, synthetic construct
  source 1..50: mol_type = other DNA
acacctttcatactaacctccaacraaaattaaaaacrtataaccrtatc

SEQ ID NO: 7232 - DNA, 50 bp, synthetic construct
  source 1..50: mol_type = other DNA
aaaaacrtataaccrtatcrccttctaaattccataaatccctaactatc

SEQ ID NO: 7233 - DNA, 50 bp, synthetic construct
  source 1..50: mol_type = other DNA
ccttaataaaatctcaataacrtaattactacactctaacttaataaacc

SEQ ID NO: 7234 - DNA, 50 bp, synthetic construct
  source 1..50: mol_type = other DNA
aactacaccataaaaaacaacractcaccaaaccaaaatacaacaatcac

SEQ ID NO: 7235 - DNA, 50 bp, synthetic construct
  source 1..50: mol_type = other DNA
caatatccccaatattaaactataactataaatcaaaataaccttcttac

SEQ ID NO: 7236 - DNA, 50 bp, synthetic construct
  source 1..50: mol_type = other DNA
caatattaaactataactataaatcaaaataaccttcttacraaaatcac

SEQ ID NO: 7237 - DNA, 50 bp, synthetic construct
  source 1..50: mol_type = other DNA
ttcccaacttcccaaaattacraaaatcatttaaaataaattctacaatc

SEQ ID NO: 7238 - DNA, 50 bp, synthetic construct
  source 1..50: mol_type = other DNA
catttctacctctaaatttataaaacaattaaacattccttttctacaac

SEQ ID NO: 7239 - DNA, 50 bp, synthetic construct
  source 1..50: mol_type = other DNA
cttataaacacccaaaccaaaaataaattacttcataaacctaaaatcac

SEQ ID NO: 7240 - DNA, 50 bp, synthetic construct
  source 1..50: mol_type = other DNA
tctccttataccctttcctaaaatatttaaattctataaattaaaatacc

SEQ ID NO: 7241 - DNA, 50 bp, synthetic construct
  source 1..50: mol_type = other DNA
acctttaaaacatccaatctcttaaactccactacccttcaaaaaaaatc

SEQ ID NO: 7242 - DNA, 50 bp, synthetic construct
  source 1..50: mol_type = other DNA
aaaaaaaaaactccaataacctacacaactccacaaaaaatattaacaac

SEQ ID NO: 7243 - DNA, 50 bp, synthetic construct
  source 1..50: mol_type = other DNA
taaaaaactaaaataataaaacacaactaactccrccaaaaaactcaccc

SEQ ID NO: 7244 - DNA, 50 bp, synthetic construct
  source 1..50: mol_type = other DNA
aaactcaactaatataacctaactcccattaaatctaataatattaaccc

SEQ ID NO: 7245 - DNA, 50 bp, synthetic construct
  source 1..50: mol_type = other DNA
tataaaaaaaacttctaaaaacaaaacttaaataaattaatacctccaac

SEQ ID NO: 7246 - DNA, 50 bp, synthetic construct
  source 1..50: mol_type = other DNA
aacatactatccaaaaaaccaaccaccrtaaataatcaacaaaacaaaac

SEQ ID NO: 7247 - DNA, 50 bp, synthetic construct
  source 1..50: mol_type = other DNA
ccaataataccaccctcattaacaacatactatccaaaaaaccaaccacc

SEQ ID NO: 7248 - DNA, 50 bp, synthetic construct
  source 1..50: mol_type = other DNA
tactttaaaccctactaccaactcttactttcctatttactccttttacc

SEQ ID NO: 7249 - DNA, 50 bp, synthetic construct
  source 1..50: mol_type = other DNA
ctaaataaaaaaattcttatcctatcttattaccttcattccctcccccc

SEQ ID NO: 7250 - DNA, 50 bp, synthetic construct
  source 1..50: mol_type = other DNA
aatcttcaaaataataacttatttaatatccaaattctcaattaaaaacc

SEQ ID NO: 7251 - DNA, 50 bp, synthetic construct
  source 1..50: mol_type = other DNA
aataaatcattataataacactcccaaccctcaacactacctctcatcac

SEQ ID NO: 7252 - DNA, 50 bp, synthetic construct
  source 1..50: mol_type = other DNA
aaatatccaactcraataacataacactactccaaactactcctccttac

SEQ ID NO: 7253 - DNA, 50 bp, synthetic construct
  source 1..50: mol_type = other DNA
aaaaaatttaacttcaaaaactctaaacaaaactcttccrcttacaaatc

SEQ ID NO: 7254 - DNA, 50 bp, synthetic construct
  source 1..50: mol_type = other DNA
ataactccctaaaaaaatttaacttcaaaaactctaaacaaaactcttcc

SEQ ID NO: 7255 - DNA, 50 bp, synthetic construct
  source 1..50: mol_type = other DNA
cataaaaataattctaaatataactaaatacracctccccaaatataacc

SEQ ID NO: 7256 - DNA, 50 bp, synthetic construct
  source 1..50: mol_type = other DNA
taacaaaaaaataacttattacttaaacaacractatacctaaaaaaacc

SEQ ID NO: 7257 - DNA, 50 bp, synthetic construct
  source 1..50: mol_type = other DNA
cacctctacttcccttacaaaaataacccatataactaccctacctaaac

SEQ ID NO: 7258 - DNA, 50 bp, synthetic construct
  source 1..50: mol_type = other DNA
ttattcaaaacatacaaaaaacatttcttaaaacctaacctaaacctaac

SEQ ID NO: 7259 - DNA, 50 bp, synthetic construct
  source 1..50: mol_type = other DNA
actaaaataattactaattctctaaaaaatcataccctaataaaaaaaac

SEQ ID NO: 7260 - DNA, 50 bp, synthetic construct
  source 1..50: mol_type = other DNA
atctcctctaacctctccraatctcacctaaaaatatatattcctataac

SEQ ID NO: 7261 - DNA, 50 bp, synthetic construct
  source 1..50: mol_type = other DNA
caaaatctaaaaaactcaatttaaaaaactaaattcccaacctcaaaatc

SEQ ID NO: 7262 - DNA, 50 bp, synthetic construct
  source 1..50: mol_type = other DNA
tcctacacccactaaaatctaattatctatcctaataacaataaccaaac

SEQ ID NO: 7263 - DNA, 50 bp, synthetic construct
  source 1..50: mol_type = other DNA
cttctttccaataaataaattctatacacracaaaatctatcttctcctc

SEQ ID NO: 7264 - DNA, 50 bp, synthetic construct
  source 1..50: mol_type = other DNA
tcaaaaacttaacccaaaaaacttctttccaataaataaattctatacac

SEQ ID NO: 7265 - DNA, 50 bp, synthetic construct
  source 1..50: mol_type = other DNA
aaattacaaaacccttctctcaaaaaatacatttccaatcaactctcaac

SEQ ID NO: 7266 - DNA, 50 bp, synthetic construct
  source 1..50: mol_type = other DNA
taatatcaatttttacctaaaactactatcatcctaaaaactaatactcc

SEQ ID NO: 7267 - DNA, 50 bp, synthetic construct
  source 1..50: mol_type = other DNA
tccactatttattaaaataaactccataaaatactaatctcataaaatcc

SEQ ID NO: 7268 - DNA, 50 bp, synthetic construct
  source 1..50: mol_type = other DNA
aaaaaactacaccrcataacttaatatatacracattaacacratataac

SEQ ID NO: 7269 - DNA, 50 bp, synthetic construct
  source 1..50: mol_type = other DNA
cctaaattaaaaaactacaccrcataacttaatatatacracattaacac

SEQ ID NO: 7270 - DNA, 50 bp, synthetic construct
  source 1..50: mol_type = other DNA
cttcaaataaccctaaattaaaaaactacaccrcataacttaatatatac

SEQ ID NO: 7271 - DNA, 50 bp, synthetic construct
  source 1..50: mol_type = other DNA
acaactaaaattactcaacttcaaataaccctaaattaaaaaactacacc

SEQ ID NO: 7272 - DNA, 50 bp, synthetic construct
  source 1..50: mol_type = other DNA
ctaaaaacaaaaacttccacatattacctaaatacaaaactaaaaacaac

SEQ ID NO: 7273 - DNA, 50 bp, synthetic construct
  source 1..50: mol_type = other DNA
aaacaaaatacaaaaaccttaaacaacctctcttctctcctctcataatc

SEQ ID NO: 7274 - DNA, 50 bp, synthetic construct
  source 1..50: mol_type = other DNA
ctaaaatataaaaacataaaaccaaactacctctaaataaaataaacacc

SEQ ID NO: 7275 - DNA, 50 bp, synthetic construct
  source 1..50: mol_type = other DNA
cctactataaactccaaacaaatttaatcctactaatcctacttccacac

SEQ ID NO: 7276 - DNA, 50 bp, synthetic construct
  source 1..50: mol_type = other DNA
ctaatcctacttccacacrtataaaatatatcttccccaatctcacaaac

SEQ ID NO: 7277 - DNA, 50 bp, synthetic construct
  source 1..50: mol_type = other DNA
ctctcctcaaaatttaaacttcctaccctaaaattaaatcaacaaatacc

SEQ ID NO: 7278 - DNA, 50 bp, synthetic construct
  source 1..50: mol_type = other DNA
aatcaaaaaatccttatccacaattacaaaatcctcaaaaattaatatac

SEQ ID NO: 7279 - DNA, 50 bp, synthetic construct
  source 1..50: mol_type = other DNA
aactacataaaaaaactccaacaacracaaaacraaaaatccccaaaacc

SEQ ID NO: 7280 - DNA, 50 bp, synthetic construct
  source 1..50: mol_type = other DNA
acaacrattaactatacaactacataaaaaaactccaacaacracaaaac

SEQ ID NO: 7281 - DNA, 50 bp, synthetic construct
  source 1..50: mol_type = other DNA
aaaataaaacaacrattaactatacaactacataaaaaaactccaacaac

SEQ ID NO: 7282 - DNA, 50 bp, synthetic construct
  source 1..50: mol_type = other DNA
ctcatctacataaataaatcaaaataatcaacaatacaaaataaaacaac

SEQ ID NO: 7283 - DNA, 50 bp, synthetic construct
  source 1..50: mol_type = other DNA
aattctccctcatctaaactcaattccacctatacaaacraaatacaaac

SEQ ID NO: 7284 - DNA, 50 bp, synthetic construct
  source 1..50: mol_type = other DNA
caataaaaaacaattctccctcatctaaactcaattccacctatacaaac

SEQ ID NO: 7285 - DNA, 50 bp, synthetic construct
  source 1..50: mol_type = other DNA
cacacacaaaacaatataaactttctcattctaatacataaacacaaatc

SEQ ID NO: 7286 - DNA, 50 bp, synthetic construct
  source 1..50: mol_type = other DNA
caaaaacttcaaaaataaacccaactttcaccaatctccraaaataatcc

SEQ ID NO: 7287 - DNA, 50 bp, synthetic construct
  source 1..50: mol_type = other DNA
tcttaaaacctctacttctaaatcatattttccataaaatctccctcatc

SEQ ID NO: 7288 - DNA, 50 bp, synthetic construct
  source 1..50: mol_type = other DNA
acacratataatccataccactaaatattcacaacctacttaaaaaaaac

SEQ ID NO: 7289 - DNA, 50 bp, synthetic construct
  source 1..50: mol_type = other DNA
tatcrtcttttccaaataaactataaacattcaataacataaatcatacc

SEQ ID NO: 7290 - DNA, 50 bp, synthetic construct
  source 1..50: mol_type = other DNA
attaaaattattcactaacctaactaaaaataatcataactcttaatacc

SEQ ID NO: 7291 - DNA, 50 bp, synthetic construct
  source 1..50: mol_type = other DNA
tacatatatatacatataccatattaataaactacacccattaactcatc

SEQ ID NO: 7292 - DNA, 50 bp, synthetic construct
  source 1..50: mol_type = other DNA
atatccacrtattctcattattcaatacccatctataaataaaaacatac

SEQ ID NO: 7293 - DNA, 50 bp, synthetic construct
  source 1..50: mol_type = other DNA
atcctaatcaccactatctaccacaataaaattccttaacaaatatatac

SEQ ID NO: 7294 - DNA, 50 bp, synthetic construct
  source 1..50: mol_type = other DNA
aacaaacaataataattaaaattctcttccccactataactcactaactc

SEQ ID NO: 7295 - DNA, 50 bp, synthetic construct
  source 1..50: mol_type = other DNA
cctaaactaaccataactctaaacaaaaccaaaacaaaacaccactaacc

SEQ ID NO: 7296 - DNA, 50 bp, synthetic construct
  source 1..50: mol_type = other DNA
aataattttctccttattataaactaaattatatcatcactaccttttcc

SEQ ID NO: 7297 - DNA, 50 bp, synthetic construct
  source 1..50: mol_type = other DNA
ccttcatcttcacataacattctccctatataaatatttctctcaatatc

SEQ ID NO: 7298 - DNA, 50 bp, synthetic construct
  source 1..50: mol_type = other DNA
taataacrctttaatatttcttaacttaaaaaaacattactctaatctcc

SEQ ID NO: 7299 - DNA, 50 bp, synthetic construct
  source 1..50: mol_type = other DNA
aaaaatatatcatctcacaattctaaaaaccaaaaatctaaaaccaaaac

SEQ ID NO: 7300 - DNA, 50 bp, synthetic construct
  source 1..50: mol_type = other DNA
aaaattaaaactatatactctacctatatattcataccttctctcctacc

SEQ ID NO: 7301 - DNA, 50 bp, synthetic construct
  source 1..50: mol_type = other DNA
acaaataaaatacataaccccaacttcccacacaaaacacacttttaacc

SEQ ID NO: 7302 - DNA, 50 bp, synthetic construct
  source 1..50: mol_type = other DNA
ataaaatacataaccccaacttcccacacaaaacacacttttaaccracc

SEQ ID NO: 7303 - DNA, 50 bp, synthetic construct
  source 1..50: mol_type = other DNA
acaaaaacaaacaaataacctaaaatcaaaaattccaaaccaacctaacc

SEQ ID NO: 7304 - DNA, 50 bp, synthetic construct
  source 1..50: mol_type = other DNA
aacrtaatcccccctttacacctcaaacaaaaacttaaaaaacrttactc

SEQ ID NO: 7305 - DNA, 50 bp, synthetic construct
  source 1..50: mol_type = other DNA
aatctctcacccractattacatcttcaaataaattaaataaaacaaaac

SEQ ID NO: 7306 - DNA, 50 bp, synthetic construct
  source 1..50: mol_type = other DNA
aaaaaaaactacrctctatcctatctaactcacctaaaaatacaataacc

SEQ ID NO: 7307 - DNA, 50 bp, synthetic construct
  source 1..50: mol_type = other DNA
acctaaaaatacaataaccraataaaaaactactttcattatatactaac

SEQ ID NO: 7308 - DNA, 50 bp, synthetic construct
  source 1..50: mol_type = other DNA
ataaacracrataaaaaccaccacttaactatattaaaaaattataacrc

SEQ ID NO: 7309 - DNA, 50 bp, synthetic construct
  source 1..50: mol_type = other DNA
aaaaaaaaatctcaaaatataaaatactttcctaaccataactactacrc

SEQ ID NO: 7310 - DNA, 50 bp, synthetic construct
  source 1..50: mol_type = other DNA
tactacrcrtcataatcccctaacacaattaaataataattctcatcrtc

SEQ ID NO: 7311 - DNA, 50 bp, synthetic construct
  source 1..50: mol_type = other DNA
aaatttcataactaaatctcttccactcaaactcaataccctaatttaac

SEQ ID NO: 7312 - DNA, 50 bp, synthetic construct
  source 1..50: mol_type = other DNA
atctcttccactcaaactcaataccctaatttaacrccttaataataaac

SEQ ID NO: 7313 - DNA, 50 bp, synthetic construct
  source 1..50: mol_type = other DNA
acrccttaataataaacrcaaacttttccattttccaaaaaccccctaac

SEQ ID NO: 7314 - DNA, 50 bp, synthetic construct
  source 1..50: mol_type = other DNA
aaacrctaaaaactaacrtcaaaaacctaaattcctaactttacctacac

SEQ ID NO: 7315 - DNA, 50 bp, synthetic construct
  source 1..50: mol_type = other DNA
aaatttttccaaaaacrtcraccccaaactaaacraaattaaaaccttac

SEQ ID NO: 7316 - DNA, 50 bp, synthetic construct
  source 1..50: mol_type = other DNA
cttaaaaaactaaatctaaaccctttccrctataacaactataattccrc

SEQ ID NO: 7317 - DNA, 50 bp, synthetic construct
  source 1..50: mol_type = other DNA
aaaccaactatttaaattataatctaacctctaataaataacttccraac

SEQ ID NO: 7318 - DNA, 50 bp, synthetic construct
  source 1..50: mol_type = other DNA
cccraaaattatttactaaaaaccaaaccataattcaaataattaactcc

SEQ ID NO: 7319 - DNA, 50 bp, synthetic construct
  source 1..50: mol_type = other DNA
caaccttattctcctataaatctctacaaaaccacttaacracccctatc

SEQ ID NO: 7320 - DNA, 50 bp, synthetic construct
  source 1..50: mol_type = other DNA
aaaccctacccaaccttattctcctataaatctctacaaaaccacttaac

SEQ ID NO: 7321 - DNA, 50 bp, synthetic construct
  source 1..50: mol_type = other DNA
tactatacctcctacattaccatccaaataactactcccacaaaaataac

SEQ ID NO: 7322 - DNA, 50 bp, synthetic construct
  source 1..50: mol_type = other DNA
acataataccacttttaatctaaataaacctaaaactttaaccctaaacc

SEQ ID NO: 7323 - DNA, 50 bp, synthetic construct
  source 1..50: mol_type = other DNA
ataataccacttttaatctaaataaacctaaaactttaaccctaaaccrc

SEQ ID NO: 7324 - DNA, 50 bp, synthetic construct
  source 1..50: mol_type = other DNA
acataatctactcaaaaatctcacatcaccttctaaaaacctacattacc

SEQ ID NO: 7325 - DNA, 50 bp, synthetic construct
  source 1..50: mol_type = other DNA
aataactttccaaaaaccctaaaataaattaaattctaaaatctataccc

SEQ ID NO: 7326 - DNA, 50 bp, synthetic construct
  source 1..50: mol_type = other DNA
cccaccttctctaactcacttattatatcaacaaaattaaaaaaacaacc

SEQ ID NO: 7327 - DNA, 50 bp, synthetic construct
  source 1..50: mol_type = other DNA
tctctaactcacttattatatcaacaaaattaaaaaaacaaccrataaac

SEQ ID NO: 7328 - DNA, 50 bp, synthetic construct
  source 1..50: mol_type = other DNA
caaaccaaatccactcaaatataactaaaaactttctaataactctaacc

SEQ ID NO: 7329 - DNA, 50 bp, synthetic construct
  source 1..50: mol_type = other DNA
tttaaataaatctaatctaaaccttataattctaacaatcctcaaaactc

SEQ ID NO: 7330 - DNA, 50 bp, synthetic construct
  source 1..50: mol_type = other DNA
tcttatataacactaccaaaatccataatacaaaaatcaacccccacttc

SEQ ID NO: 7331 - DNA, 50 bp, synthetic construct
  source 1..50: mol_type = other DNA
cttataaatttcaaactccttccctccaaaatactattttaaaaaatatc

SEQ ID NO: 7332 - DNA, 50 bp, synthetic construct
  source 1..50: mol_type = other DNA
aaataaaatttatctacttaattaaaacctcccatctattataatattac

SEQ ID NO: 7333 - DNA, 50 bp, synthetic construct
  source 1..50: mol_type = other DNA
tacaaaatccatattcttttcttaacctattttaaatcctttatataaac

SEQ ID NO: 7334 - DNA, 50 bp, synthetic construct
  source 1..50: mol_type = other DNA
ttaaacaaaaaaatatctctttaacttatatttcctaattttaaaacacc

SEQ ID NO: 7335 - DNA, 50 bp, synthetic construct
  source 1..50: mol_type = other DNA
atttaaataacttacctaaaaccattaattaaaaaaaatctaactaactc

SEQ ID NO: 7336 - DNA, 50 bp, synthetic construct
  source 1..50: mol_type = other DNA
aactccaaatatcttcattaatttcataaaaacataacacaaaaaattcc

SEQ ID NO: 7337 - DNA, 50 bp, synthetic construct
  source 1..50: mol_type = other DNA
taaaaaactataaattcccttacaattcttcctataaaaaattatttaac

SEQ ID NO: 7338 - DNA, 50 bp, synthetic construct
  source 1..50: mol_type = other DNA
aatctaaaatttacatttctaacaaactcccatataatactaatacttcc

SEQ ID NO: 7339 - DNA, 50 bp, synthetic construct
  source 1..50: mol_type = other DNA
caaacattatcaacacaccacaacaataaccttaaaataaaacraaaacc

SEQ ID NO: 7340 - DNA, 50 bp, synthetic construct
  source 1..50: mol_type = other DNA
aacataccaaacattatcaacacaccacaacaataaccttaaaataaaac

SEQ ID NO: 7341 - DNA, 50 bp, synthetic construct
  source 1..50: mol_type = other DNA
aacatactaccaacattcttaaaacatactataccataccttaaaataac

SEQ ID NO: 7342 - DNA, 50 bp, synthetic construct
  source 1..50: mol_type = other DNA
taccaacattcttaaaacatactataccataccttaaaataacraaatcc

SEQ ID NO: 7343 - DNA, 50 bp, synthetic construct
  source 1..50: mol_type = other DNA
attcttaaaacatactataccataccttaaaataacraaatccraaaaac

SEQ ID NO: 7344 - DNA, 50 bp, synthetic construct
  source 1..50: mol_type = other DNA
aaattctaaatctttctaatccaaaatccatattcttttcattaaaccac

SEQ ID NO: 7345 - DNA, 50 bp, synthetic construct
  source 1..50: mol_type = other DNA
aaattttaaaaaatccctttaaacacacraaaactcaaataccaacacac

SEQ ID NO: 7346 - DNA, 50 bp, synthetic construct
  source 1..50: mol_type = other DNA
tttactatctaactaaaaccatcaaaacrtatactaacatctaaatcctc

SEQ ID NO: 7347 - DNA, 50 bp, synthetic construct
  source 1..50: mol_type = other DNA
aatctttctaccatactttcactcaaacattactaactaaatataaactc

SEQ ID NO: 7348 - DNA, 50 bp, synthetic construct
  source 1..50: mol_type = other DNA
acctcctatcctctacaataaattcaataaacctaccccataaataacac

SEQ ID NO: 7349 - DNA, 50 bp, synthetic construct
  source 1..50: mol_type = other DNA
caaacaaaatccctaataaaacaaacaaatctcaatactaccaccttttc

SEQ ID NO: 7350 - DNA, 50 bp, synthetic construct
  source 1..50: mol_type = other DNA
tccaattttacaaataaaaaatttacaatacaacaattcaacaactaacc

SEQ ID NO: 7351 - DNA, 50 bp, synthetic construct
  source 1..50: mol_type = other DNA
tttaaaaaatacttaactaaatatccacraactataactctcaaaccaac

SEQ ID NO: 7352 - DNA, 50 bp, synthetic construct
  source 1..50: mol_type = other DNA
atttacaatataaacacacacrttttctcttcttcaaactctaaatcatc

SEQ ID NO: 7353 - DNA, 50 bp, synthetic construct
  source 1..50: mol_type = other DNA
taacaaattttaacratttattttcttccrcaataaccttatctctactc

SEQ ID NO: 7354 - DNA, 50 bp, synthetic construct
  source 1..50: mol_type = other DNA
ctacatcctcaaacaaacctaaaaactaacrtattctaacaaattttaac

SEQ ID NO: 7355 - DNA, 50 bp, synthetic construct
  source 1..50: mol_type = other DNA
accacaaaacrtaatttccactacatcctcaaacaaacctaaaaactaac

SEQ ID NO: 7356 - DNA, 50 bp, synthetic construct
  source 1..50: mol_type = other DNA
aatataataactttaatctcaacaatttaaaaaaccaaaataaaaacacc

SEQ ID NO: 7357 - DNA, 50 bp, synthetic construct
  source 1..50: mol_type = other DNA
aataaccccaaccttacattccaaatcacatttaataacaattattccac

SEQ ID NO: 7358 - DNA, 50 bp, synthetic construct
  source 1..50: mol_type = other DNA
caaaattaaaaccatttatcttctatactaattttcaataccataattac

SEQ ID NO: 7359 - DNA, 50 bp, synthetic construct
  source 1..50: mol_type = other DNA
tctaactactctattacattaaataaatttctttaacttctctaaatctc

SEQ ID NO: 7360 - DNA, 50 bp, synthetic construct
  source 1..50: mol_type = other DNA
tttctttaacttctctaaatctcratatttaaatactcaaattaaaaaac

SEQ ID NO: 7361 - DNA, 50 bp, synthetic construct
  source 1..50: mol_type = other DNA
actaataaaaactataacaaactaaaaaccacttaatcaatatttattcc

SEQ ID NO: 7362 - DNA, 50 bp, synthetic construct
  source 1..50: mol_type = other DNA
ataaccaacatattaaaaccccttctcaactacaaatacaaaaattaacc

SEQ ID NO: 7363 - DNA, 50 bp, synthetic construct
  source 1..50: mol_type = other DNA
aaaaatttcaacatattaaccatactaatcttaaactcctaacctcaaac

SEQ ID NO: 7364 - DNA, 50 bp, synthetic construct
  source 1..50: mol_type = other DNA
aatacttctctcccttactacttcrtaatttatttaaatcctaaaatacc

SEQ ID NO: 7365 - DNA, 50 bp, synthetic construct
  source 1..50: mol_type = other DNA
aactattttctaaaataaaaaacaatcattccaaataacaaccatttcac

SEQ ID NO: 7366 - DNA, 50 bp, synthetic construct
  source 1..50: mol_type = other DNA
crtaaatttaattaaattataacataaatcataatctccrcaatctatac

SEQ ID NO: 7367 - DNA, 50 bp, synthetic construct
  source 1..50: mol_type = other DNA
attaataccaaacttcaaataatactataaaaataacataccaaataccc

SEQ ID NO: 7368 - DNA, 50 bp, synthetic construct
  source 1..50: mol_type = other DNA
atataaactttcttaaacataacaccraataattccracttactcattac

SEQ ID NO: 7369 - DNA, 50 bp, synthetic construct
  source 1..50: mol_type = other DNA
accttaactaaaacatataaactttcttaaacataacaccraataattcc

SEQ ID NO: 7370 - DNA, 50 bp, synthetic construct
  source 1..50: mol_type = other DNA
acttcacacaaccttaactaaaacatataaactttcttaaacataacacc

SEQ ID NO: 7371 - DNA, 50 bp, synthetic construct
  source 1..50: mol_type = other DNA
attataattttcracacattattctacactaaaaactcttaacataaacc

SEQ ID NO: 7372 - DNA, 50 bp, synthetic construct
  source 1..50: mol_type = other DNA
acaaaaactacacracctcctattaaaaataaatatacacacattcccac

SEQ ID NO: 7373 - DNA, 50 bp, synthetic construct
  source 1..50: mol_type = other DNA
acttccacacttcacaataaaaaccaaataaaataccaaattaccaaaac

SEQ ID NO: 7374 - DNA, 50 bp, synthetic construct
  source 1..50: mol_type = other DNA
ttttatcacctacatctcaattatcaaaaaccaaatcaaaaaattctcac

SEQ ID NO: 7375 - DNA, 50 bp, synthetic construct
  source 1..50: mol_type = other DNA
taaataatcaccaaacaatctaaaaaaaaatacctaaaattctaatcctc

SEQ ID NO: 7376 - DNA, 50 bp, synthetic construct
  source 1..50: mol_type = other DNA
ataacrtaaacaataccaataaataaccctaactctcccatctcactacc

SEQ ID NO: 7377 - DNA, 50 bp, synthetic construct
  source 1..50: mol_type = other DNA
tacttaaaaataattctccaaacaaaatcaaacaaaaaacaaccaataac

SEQ ID NO: 7378 - DNA, 50 bp, synthetic construct
  source 1..50: mol_type = other DNA
tcctttaataaatataaccaaaaaactcctcctaataccataaaataacc

SEQ ID NO: 7379 - DNA, 50 bp, synthetic construct
  source 1..50: mol_type = other DNA
aaaaaaatacaaactttattaatccaaaaaaactacttaataaccctctc

SEQ ID NO: 7380 - DNA, 50 bp, synthetic construct
  source 1..50: mol_type = other DNA
aaataattttatcctcaaaaatacrataatataaccaaatcaaaacaacc

SEQ ID NO: 7381 - DNA, 50 bp, synthetic construct
  source 1..50: mol_type = other DNA
aactattataacataccaatcaaaaaaaataattttatcctcaaaaatac

SEQ ID NO: 7382 - DNA, 50 bp, synthetic construct
  source 1..50: mol_type = other DNA
taaaaaaatattactaaatcacttttttctttaataaacaaactattctc

SEQ ID NO: 7383 - DNA, 50 bp, synthetic construct
  source 1..50: mol_type = other DNA
craaataatactaacttaacatatcaaacccttatacaactaattaaccc

SEQ ID NO: 7384 - DNA, 50 bp, synthetic construct
  source 1..50: mol_type = other DNA
craattaatcaattacacaaaaacttaatataccaaatcaatactacccc

SEQ ID NO: 7385 - DNA, 50 bp, synthetic construct
  source 1..50: mol_type = other DNA
tcaattacacaaaaacttaatataccaaatcaatactaccccraaactcc

SEQ ID NO: 7386 - DNA, 50 bp, synthetic construct
  source 1..50: mol_type = other DNA
aaataatattaaaaatcaacttactatttaactcccacccraaaccaaac

SEQ ID NO: 7387 - DNA, 50 bp, synthetic construct
  source 1..50: mol_type = other DNA
aatttcttccaaataatattaaaaatcaacttactatttaactcccaccc

SEQ ID NO: 7388 - DNA, 50 bp, synthetic construct
  source 1..50: mol_type = other DNA
tactatcatttacacttacaaactattatactttccaaaaaactttttcc

SEQ ID NO: 7389 - DNA, 50 bp, synthetic construct
  source 1..50: mol_type = other DNA
aaaccttctttatcaattttaacaacaaattaatcactttcrcaacctac

SEQ ID NO: 7390 - DNA, 50 bp, synthetic construct
  source 1..50: mol_type = other DNA
cttatcaaaaaaccttctttatcaattttaacaacaaattaatcactttc

SEQ ID NO: 7391 - DNA, 50 bp, synthetic construct
  source 1..50: mol_type = other DNA
aatatatatatatccacaaacacacaaccatccatatattataattccac

SEQ ID NO: 7392 - DNA, 50 bp, synthetic construct
  source 1..50: mol_type = other DNA
tacatttcttatttatattccttttaattttcaaatctttaccaataccc

SEQ ID NO: 7393 - DNA, 50 bp, synthetic construct
  source 1..50: mol_type = other DNA
aaaaatcatacaaacattaaaaacttcatatctatatacataaaccatac

SEQ ID NO: 7394 - DNA, 50 bp, synthetic construct
  source 1..50: mol_type = other DNA
cctatcatactcatataaattaaaacccaataaatatattttaaaaactc

SEQ ID NO: 7395 - DNA, 50 bp, synthetic construct
  source 1..50: mol_type = other DNA
ataacaaataaataacttcaatatataaaaattaaactactttaaacctc

SEQ ID NO: 7396 - DNA, 50 bp, synthetic construct
  source 1..50: mol_type = other DNA
taaaataaaaccctccraacaaaatacraaatataatctcrtaatacacc

SEQ ID NO: 7397 - DNA, 50 bp, synthetic construct
  source 1..50: mol_type = other DNA
craaactccataaaataaaaccctccraacaaaatacraaatataatctc

SEQ ID NO: 7398 - DNA, 50 bp, synthetic construct
  source 1..50: mol_type = other DNA
tcaaactactatactaaaaatcaacraaactccataaaataaaaccctcc

SEQ ID NO: 7399 - DNA, 50 bp, synthetic construct
  source 1..50: mol_type = other DNA
raacttcctaactactttatttacctaaacaaatctaaacaataataaac

SEQ ID NO: 7400 - DNA, 50 bp, synthetic construct
  source 1..50: mol_type = other DNA
ctacaaaaacaaacaaacttccttaaactataataaactccccccaattc

SEQ ID NO: 7401 - DNA, 50 bp, synthetic construct
  source 1..50: mol_type = other DNA
atcatccttcttcaactcaatacaaccccaaaatcaaaaaacacttactc

SEQ ID NO: 7402 - DNA, 50 bp, synthetic construct
  source 1..50: mol_type = other DNA
aataatcacatcctaactaaataattccrattcctacaaccctacaacac

SEQ ID NO: 7403 - DNA, 50 bp, synthetic construct
  source 1..50: mol_type = other DNA
aatatacaatataacttatataatcatacatccccactttaacaaccctc

SEQ ID NO: 7404 - DNA, 50 bp, synthetic construct
  source 1..50: mol_type = other DNA
ttataaacttaaccaaaacatttcaattatctaaacttttatttcacaac

SEQ ID NO: 7405 - DNA, 50 bp, synthetic construct
  source 1..50: mol_type = other DNA
aaaaccaaaaaaactaataatctctatatttcttatctcacataattacc

SEQ ID NO: 7406 - DNA, 50 bp, synthetic construct
  source 1..50: mol_type = other DNA
aaaaatctatatttaaaaaaattaccttcatttactaatttacaaacatc

SEQ ID NO: 7407 - DNA, 50 bp, synthetic construct
  source 1..50: mol_type = other DNA
aaaaatcaaccaactcatttactcatttatttattttattaatacctatc

SEQ ID NO: 7408 - DNA, 50 bp, synthetic construct
  source 1..50: mol_type = other DNA
ataaaacactaaatcattaaattctcaccaaatattaactaaaaaacttc

SEQ ID NO: 7409 - DNA, 50 bp, synthetic construct
  source 1..50: mol_type = other DNA
acraaatataaccaataacacaatcrtaaaatcacatcacactcaatttc

SEQ ID NO: 7410 - DNA, 50 bp, synthetic construct
  source 1..50: mol_type = other DNA
caacccrtactttcctatcaccaatacraaatataaccaataacacaatc

SEQ ID NO: 7411 - DNA, 50 bp, synthetic construct
  source 1..50: mol_type = other DNA
acraaattaaatataatataattctacractatactactaactacatttc

SEQ ID NO: 7412 - DNA, 50 bp, synthetic construct
  source 1..50: mol_type = other DNA
ttctacractatactactaactacatttcrcattaataacaaaaaaacac

SEQ ID NO: 7413 - DNA, 50 bp, synthetic construct
  source 1..50: mol_type = other DNA
acaaaaaaactacaaaatacratcctaactcttatataaaaattctaacc

SEQ ID NO: 7414 - DNA, 50 bp, synthetic construct
  source 1..50: mol_type = other DNA
ctcaacctaacaaactacrtctacttcctcactacctaaccacttttttc

SEQ ID NO: 7415 - DNA, 50 bp, synthetic construct
  source 1..50: mol_type = other DNA
atcatttacrtattttttctatttatatcaaactcaacctaacaaactac

SEQ ID NO: 7416 - DNA, 50 bp, synthetic construct
  source 1..50: mol_type = other DNA
acaattctaccaaaaaacccttcccacccractatctcattatcatttac

SEQ ID NO: 7417 - DNA, 50 bp, synthetic construct
  source 1..50: mol_type = other DNA
aaaaaacttcctaacaaaactacaacccrccratacactaaaaaaaatac

SEQ ID NO: 7418 - DNA, 50 bp, synthetic construct
  source 1..50: mol_type = other DNA
caaatataaaaccttttctcctaaaaaaacaacaataacttcrtaaaatc

SEQ ID NO: 7419 - DNA, 50 bp, synthetic construct
  source 1..50: mol_type = other DNA
ccctaatcatatacctattatcctaaaataacaccttcctccattatacc

SEQ ID NO: 7420 - DNA, 50 bp, synthetic construct
  source 1..50: mol_type = other DNA
tccattataccraaattcaacrcaaaactaactcatacaataccraaatc

SEQ ID NO: 7421 - DNA, 50 bp, synthetic construct
  source 1..50: mol_type = other DNA
aaaacttttactttctcraataaaaaatctaaacccraacaataaatccc

SEQ ID NO: 7422 - DNA, 50 bp, synthetic construct
  source 1..50: mol_type = other DNA
taaattaaatactaaaaacttttactttctcraataaaaaatctaaaccc

SEQ ID NO: 7423 - DNA, 50 bp, synthetic construct
  source 1..50: mol_type = other DNA
tcaaaatattatcttctaataaattaaatactaaaaacttttactttctc

SEQ ID NO: 7424 - DNA, 50 bp, synthetic construct
  source 1..50: mol_type = other DNA
aaactttcaatatccaacttattaaaaaataacatcttaataaaattctc

SEQ ID NO: 7425 - DNA, 50 bp, synthetic construct
  source 1..50: mol_type = other DNA
accaaccaaattacctaaaaccacracaacaaaaccaaaactttaaaacc

SEQ ID NO: 7426 - DNA, 50 bp, synthetic construct
  source 1..50: mol_type = other DNA
caaaactttaaaaccrcacctaaaaactctaaccatctataaacctcacc

SEQ ID NO: 7427 - DNA, 50 bp, synthetic construct
  source 1..50: mol_type = other DNA
cctcaaaaactcaactatataatatataacaacctatccccctaactccc

SEQ ID NO: 7428 - DNA, 50 bp, synthetic construct
  source 1..50: mol_type = other DNA
ataataaataaaatttcaaacccaactatatttaaccctaaaaccaaaac

SEQ ID NO: 7429 - DNA, 50 bp, synthetic construct
  source 1..50: mol_type = other DNA
taattctctcatctcccaaaacaacaacctaatacaaactataatcatcc

SEQ ID NO: 7430 - DNA, 50 bp, synthetic construct
  source 1..50: mol_type = other DNA
cttaccaacttcraacctaaactattacccctaaaaaactaaacaaaacc

SEQ ID NO: 7431 - DNA, 50 bp, synthetic construct
  source 1..50: mol_type = other DNA
tattaccaaaaattaaaacctaaacraactacaaaactaaacacccaacc

SEQ ID NO: 7432 - DNA, 50 bp, synthetic construct
  source 1..50: mol_type = other DNA
tactacaaacctaaatattaaaaaaacacaaaatttaaacaactacaaac

SEQ ID NO: 7433 - DNA, 50 bp, synthetic construct
  source 1..50: mol_type = other DNA
acacrcctctctccraataaaaaaatctcraaataaaaattctaaaaccc

SEQ ID NO: 7434 - DNA, 50 bp, synthetic construct
  source 1..50: mol_type = other DNA
ccaaactaatacraaaaacaaaacttactcttcctatttactccctatcc

SEQ ID NO: 7435 - DNA, 50 bp, synthetic construct
  source 1..50: mol_type = other DNA
aataacrcaactacttctaccaaaattaaaaaaactacaaactacrttcc

SEQ ID NO: 7436 - DNA, 50 bp, synthetic construct
  source 1..50: mol_type = other DNA
ctttcctaaacacctactatatactaaacattaaactaattttaaaaacc

SEQ ID NO: 7437 - DNA, 50 bp, synthetic construct
  source 1..50: mol_type = other DNA
actctacaaccaaaaaactatctacccraaaactttacaaccaaaaaacc

SEQ ID NO: 7438 - DNA, 50 bp, synthetic construct
  source 1..50: mol_type = other DNA
tcctaaatcactaacaactccaaactctacaaccaaaaaactatctaccc

SEQ ID NO: 7439 - DNA, 50 bp, synthetic construct
  source 1..50: mol_type = other DNA
acaatcccttaactacaaaacttaaaactactaataacccaaaaaactac

SEQ ID NO: 7440 - DNA, 50 bp, synthetic construct
  source 1..50: mol_type = other DNA
ctccacatcattttccrcctcttaaaaaatcttaaccaaactctctactc

SEQ ID NO: 7441 - DNA, 50 bp, synthetic construct
  source 1..50: mol_type = other DNA
acraatctctcatctctatccacaatcacatttaacaaaaatacctccac

SEQ ID NO: 7442 - DNA, 50 bp, synthetic construct
  source 1..50: mol_type = other DNA
aaaaactaaccccatacctacaactaaacractaaacacactataaaaac

SEQ ID NO: 7443 - DNA, 50 bp, synthetic construct
  source 1..50: mol_type = other DNA
acaaaaaaaatattactccctaaaccaacacrtaaaactcraaaaatatc

SEQ ID NO: 7444 - DNA, 50 bp, synthetic construct
  source 1..50: mol_type = other DNA
ataacaaacataatacaaacccatccaaaaaacataaaacracatctccc

SEQ ID NO: 7445 - DNA, 50 bp, synthetic construct
  source 1..50: mol_type = other DNA
aaaaacctaaaaatatcttacaaaaaaaatattactccctaaaccaacac

SEQ ID NO: 7446 - DNA, 50 bp, synthetic construct
  source 1..50: mol_type = other DNA
crtcctaaaacaaacrtcaaaacctaaaactacrcaaccaaaatcaaaac

SEQ ID NO: 7447 - DNA, 50 bp, synthetic construct
  source 1..50: mol_type = other DNA
actaaaactaaacrtaactaaaaaacaaatccacaaccaaatatacrtcc

SEQ ID NO: 7448 - DNA, 50 bp, synthetic construct
  source 1..50: mol_type = other DNA
cccractaaaactaaacrtaactaaaaaacaaatccacaaccaaatatac

SEQ ID NO: 7449 - DNA, 50 bp, synthetic construct
  source 1..50: mol_type = other DNA
aaacttcacttaaaattaacrtaaacttaaacraaactttacaacacrcc

SEQ ID NO: 7450 - DNA, 50 bp, synthetic construct
  source 1..50: mol_type = other DNA
cctaaacttcacttaaaattaacrtaaacttaaacraaactttacaacac

SEQ ID NO: 7451 - DNA, 50 bp, synthetic construct
  source 1..50: mol_type = other DNA
ccaaaactaaaaacccctaaacttcacttaaaattaacrtaaacttaaac

SEQ ID NO: 7452 - DNA, 50 bp, synthetic construct
  source 1..50: mol_type = other DNA
tatcataaacacccaaaactaaaaacccctaaacttcacttaaaattaac

SEQ ID NO: 7453 - DNA, 50 bp, synthetic construct
  source 1..50: mol_type = other DNA
aacatccacaaaatctaaactacctctaaaaattcraaaatccaccccac

SEQ ID NO: 7454 - DNA, 50 bp, synthetic construct
  source 1..50: mol_type = other DNA
atacraaataacaaatccacaccaaaacrcaaacataacaaacaatttcc

SEQ ID NO: 7455 - DNA, 50 bp, synthetic construct
  source 1..50: mol_type = other DNA
aaattctaaaaacacccaacctaaccttactccaaaaacctaaactctac

SEQ ID NO: 7456 - DNA, 50 bp, synthetic construct
  source 1..50: mol_type = other DNA
attacatatccaaactaaactcaacatcaccccttaaactctacttctac

SEQ ID NO: 7457 - DNA, 50 bp, synthetic construct
  source 1..50: mol_type = other DNA
tcaaccccaccaaatccaatcaacctcaaattcaatataaactaaatcac

SEQ ID NO: 7458 - DNA, 50 bp, synthetic construct
  source 1..50: mol_type = other DNA
taaaaacaaaaacatccatctatatcaaatcttaaaaatactataaaacc

SEQ ID NO: 7459 - DNA, 50 bp, synthetic construct
  source 1..50: mol_type = other DNA
catccatctatatcaaatcttaaaaatactataaaaccrtttcatactcc

SEQ ID NO: 7460 - DNA, 50 bp, synthetic construct
  source 1..50: mol_type = other DNA
aaatcttaaaaatactataaaaccrtttcatactccrccaactaaaaacc

SEQ ID NO: 7461 - DNA, 50 bp, synthetic construct
  source 1..50: mol_type = other DNA
crataatccaaaaacacattaaaaccctcaatatactatctctttatatc

SEQ ID NO: 7462 - DNA, 50 bp, synthetic construct
  source 1..50: mol_type = other DNA
cracacaaaaaaacaatacactaaaaaccctaatatactcctaaaccatc

SEQ ID NO: 7463 - DNA, 50 bp, synthetic construct
  source 1..50: mol_type = other DNA
rtaccrtaacaatacataaacaaaacaaacaacraaaaacaactctctac

SEQ ID NO: 7464 - DNA, 50 bp, synthetic construct
  source 1..50: mol_type = other DNA
atatctacaccaaaacccaaaaactaaaaacatatcacctaaaacaaacc

SEQ ID NO: 7465 - DNA, 50 bp, synthetic construct
  source 1..50: mol_type = other DNA
tcaaaaatcrtcaaacctaaaacaaaccctccctccttcaaaaatactcc

SEQ ID NO: 7466 - DNA, 50 bp, synthetic construct
  source 1..50: mol_type = other DNA
aaaaatccrcttacctaaaactatttctacccaaatcctcatcaaaaatc

SEQ ID NO: 7467 - DNA, 50 bp, synthetic construct
  source 1..50: mol_type = other DNA
aacctaacrattcctaataaaaacttaaacaaaaacaaccccaaacaaac

SEQ ID NO: 7468 - DNA, 50 bp, synthetic construct
  source 1..50: mol_type = other DNA
ctaaaacataaatctataaactaaaaacaaaacctacaaactaccccrcc

SEQ ID NO: 7469 - DNA, 50 bp, synthetic construct
  source 1..50: mol_type = other DNA
taaaaaacaataacaaaaactaaataaccctaaacccttaaactccacrc

SEQ ID NO: 7470 - DNA, 50 bp, synthetic construct
  source 1..50: mol_type = other DNA
aataaaaaacaataacaaaaactaaataaccctaaacccttaaactccac

SEQ ID NO: 7471 - DNA, 50 bp, synthetic construct
  source 1..50: mol_type = other DNA
aaaaaaccaaccctacacaatttccratatatctaatcttaccacctacc

SEQ ID NO: 7472 - DNA, 50 bp, synthetic construct
  source 1..50: mol_type = other DNA
ccattactaaacaatataaacrcaaaaaaaaccaaccctacacaatttcc

SEQ ID NO: 7473 - DNA, 50 bp, synthetic construct
  source 1..50: mol_type = other DNA
tacacctactctataaaactaaaacctaaaaaaatatcccaaaataaccc

SEQ ID NO: 7474 - DNA, 50 bp, synthetic construct
  source 1..50: mol_type = other DNA
aatcaaacactaacactaaaaatcctaataaaactatcttcccaaacccc

SEQ ID NO: 7475 - DNA, 50 bp, synthetic construct
  source 1..50: mol_type = other DNA
caaaacaataaatcactccaacacaccctatatattctaaaaaaaacccc

SEQ ID NO: 7476 - DNA, 50 bp, synthetic construct
  source 1..50: mol_type = other DNA
aaaaaaaaccccraaacaaacacctacctcaataaaaaaatccaacattc

SEQ ID NO: 7477 - DNA, 50 bp, synthetic construct
  source 1..50: mol_type = other DNA
acacctacctcaataaaaaaatccaacattcrtaacratatatactaaac

SEQ ID NO: 7478 - DNA, 50 bp, synthetic construct
  source 1..50: mol_type = other DNA
aaaaaatttaaatcaaaaaaaaactataaactccacaactacacacaccc

SEQ ID NO: 7479 - DNA, 50 bp, synthetic construct
  source 1..50: mol_type = other DNA
caaattaacctaaaactaatctcctattacaaacctctaacatataaacc

SEQ ID NO: 7480 - DNA, 50 bp, synthetic construct
  source 1..50: mol_type = other DNA
ccccaatcaatcttcactatataaacaaatacttcactaaacaacccaac

SEQ ID NO: 7481 - DNA, 50 bp, synthetic construct
  source 1..50: mol_type = other DNA
aatcttcactatataaacaaatacttcactaaacaacccaacrcatctac

SEQ ID NO: 7482 - DNA, 50 bp, synthetic construct
  source 1..50: mol_type = other DNA
tcatcrtccatcaaatttaaacataaacaacccttcctccraaaaacttc

SEQ ID NO: 7483 - DNA, 50 bp, synthetic construct
  source 1..50: mol_type = other DNA
acacataaaaaaacctaatcctatctaacaaaaacaaaacraaacttccc

SEQ ID NO: 7484 - DNA, 50 bp, synthetic construct
  source 1..50: mol_type = other DNA
caacttctaacctttacacctaaaatactcttcctacctaatatctcatc

SEQ ID NO: 7485 - DNA, 50 bp, synthetic construct
  source 1..50: mol_type = other DNA
ttccactccaataaacctaactctacaacttaacrtctatataactttac

SEQ ID NO: 7486 - DNA, 50 bp, synthetic construct
  source 1..50: mol_type = other DNA
aaataaaaatacacrcttccactccaataaacctaactctacaacttaac

SEQ ID NO: 7487 - DNA, 50 bp, synthetic construct
  source 1..50: mol_type = other DNA
aaaatcacacaaacrccaaactacaaaaccaaactcactaaaataaaaac

SEQ ID NO: 7488 - DNA, 50 bp, synthetic construct
  source 1..50: mol_type = other DNA
tacatccaataactcatcaaaacaacraaactcataaaaccatatctccc

SEQ ID NO: 7489 - DNA, 50 bp, synthetic construct
  source 1..50: mol_type = other DNA
raaaaataaaatatttctcacraatacatccaataactcatcaaaacaac

SEQ ID NO: 7490 - DNA, 50 bp, synthetic construct
  source 1..50: mol_type = other DNA
tcctcaaaaaactaaacacaaaattaccataaaatccaacaattccactc

SEQ ID NO: 7491 - DNA, 50 bp, synthetic construct
  source 1..50: mol_type = other DNA
caaaaaaactaaacacaaatattcaaacacatactaatacataaatattc

SEQ ID NO: 7492 - DNA, 50 bp, synthetic construct
  source 1..50: mol_type = other DNA
aaactaaacacaaatattcaaacacatactaatacataaatattcrtatc

SEQ ID NO: 7493 - DNA, 50 bp, synthetic construct
  source 1..50: mol_type = other DNA
tcaaacacatactaatacataaatattcrtatcrccaatattcaaataac

SEQ ID NO: 7494 - DNA, 50 bp, synthetic construct
  source 1..50: mol_type = other DNA
aaaaaaccaatatccaaccaataaataaacaaaatataacaaatatatcc

SEQ ID NO: 7495 - DNA, 50 bp, synthetic construct
  source 1..50: mol_type = other DNA
ataaacaaaatataacaaatatatccrtaaaacaaattattattcaaccc

SEQ ID NO: 7496 - DNA, 50 bp, synthetic construct
  source 1..50: mol_type = other DNA
aaaaaacctatcccaaatcccaaattcctcttaaatacaacattttaatc

SEQ ID NO: 7497 - DNA, 50 bp, synthetic construct
  source 1..50: mol_type = other DNA
tacttccttaaccccttttcacaaacctatatactaattataaaccaaac

SEQ ID NO: 7498 - DNA, 50 bp, synthetic construct
  source 1..50: mol_type = other DNA
cctaacatataccrctactaccccctactaaaaaaacactattaaatccc

SEQ ID NO: 7499 - DNA, 50 bp, synthetic construct
  source 1..50: mol_type = other DNA
actaccaactttaaaaaaaacatatttataactcaactcaccacaaatac

SEQ ID NO: 7500 - DNA, 50 bp, synthetic construct
  source 1..50: mol_type = other DNA
aaccaaatcctcaataatattaaatacatcttcctccttccaaaataaac

SEQ ID NO: 7501 - DNA, 50 bp, synthetic construct
  source 1..50: mol_type = other DNA
aacctaacttttttttctttactttttcctaatttcttatcctctacttc

SEQ ID NO: 7502 - DNA, 50 bp, synthetic construct
  source 1..50: mol_type = other DNA
ctaacctcacctacccttcttctaaatcctaatatctaaaactaaaaaac

SEQ ID NO: 7503 - DNA, 50 bp, synthetic construct
  source 1..50: mol_type = other DNA
cctctaattaaatttctaaaaaactcatacctctaccaaaaaacctcccc

SEQ ID NO: 7504 - DNA, 50 bp, synthetic construct
  source 1..50: mol_type = other DNA
tttaaaacaaaacrttctttaattccctacaaaaactcctaataaccacc

SEQ ID NO: 7505 - DNA, 50 bp, synthetic construct
  source 1..50: mol_type = other DNA
actaaaatctctcacaattttttctaccactttaaattaacttttcctcc

SEQ ID NO: 7506 - DNA, 50 bp, synthetic construct
  source 1..50: mol_type = other DNA
ttaaaaaattctactttctcttatcacccaccaacataacaacactaacc

SEQ ID NO: 7507 - DNA, 50 bp, synthetic construct
  source 1..50: mol_type = other DNA
caacrtatccccttttttactttaaatataactttataaaacccttatac

SEQ ID NO: 7508 - DNA, 50 bp, synthetic construct
  source 1..50: mol_type = other DNA
ttttactttaaatataactttataaaacccttatacraacctcaattcac

SEQ ID NO: 7509 - DNA, 50 bp, synthetic construct
  source 1..50: mol_type = other DNA
tcactttctcaaaaacatactaccatttattccaccttacrttcctctac

SEQ ID NO: 7510 - DNA, 50 bp, synthetic construct
  source 1..50: mol_type = other DNA
taaaaaaatactcaaaaattaaatacttcctaaaaacattcactataccc

SEQ ID NO: 7511 - DNA, 50 bp, synthetic construct
  source 1..50: mol_type = other DNA
acacaataaatattcttaaaaaatactcaattcttaaacatctttccaac

SEQ ID NO: 7512 - DNA, 50 bp, synthetic construct
  source 1..50: mol_type = other DNA
acrtctcaaaccataatatattcttttaattaataaaatctaaaaaccac

SEQ ID NO: 7513 - DNA, 50 bp, synthetic construct
  source 1..50: mol_type = other DNA
aattaataaaatctaaaaaccacrtctaactaaaccctaccatttctctc

SEQ ID NO: 7514 - DNA, 50 bp, synthetic construct
  source 1..50: mol_type = other DNA
aaatactaataaaaaatcttcacatcctcraacctactaaaaatccatcc

SEQ ID NO: 7515 - DNA, 50 bp, synthetic construct
  source 1..50: mol_type = other DNA
aaaattcaacctttaaactcaatactaaattcatactaataattaattcc

SEQ ID NO: 7516 - DNA, 50 bp, synthetic construct
  source 1..50: mol_type = other DNA
aattcatactaataattaattccrataaattaaacttcctctaatttacc

SEQ ID NO: 7517 - DNA, 50 bp, synthetic construct
  source 1..50: mol_type = other DNA
crcaaaccaataaataaaacaaaatacaaactaccaaaaaacraaaaccc

SEQ ID NO: 7518 - DNA, 50 bp, synthetic construct
  source 1..50: mol_type = other DNA
tttaaatatcttttatttaaaaccaaaaccractccaaaaaaaaactacc

SEQ ID NO: 7519 - DNA, 50 bp, synthetic construct
  source 1..50: mol_type = other DNA
tttcaccatattatccaaaataatcccraactcctaaccttaaacratcc

SEQ ID NO: 7520 - DNA, 50 bp, synthetic construct
  source 1..50: mol_type = other DNA
caaaatttcaccatattatccaaaataatcccraactcctaaccttaaac

SEQ ID NO: 7521 - DNA, 50 bp, synthetic construct
  source 1..50: mol_type = other DNA
aaaaaaatccaattcacacttccaaaaaatttaaactacactatcccaac

SEQ ID NO: 7522 - DNA, 50 bp, synthetic construct
  source 1..50: mol_type = other DNA
tcacacttccaaaaaatttaaactacactatcccaacractatacccttc

SEQ ID NO: 7523 - DNA, 50 bp, synthetic construct
  source 1..50: mol_type = other DNA
caaaataaaaaacctatctataaccaacractaaaaacccacaacacaac

SEQ ID NO: 7524 - DNA, 50 bp, synthetic construct
  source 1..50: mol_type = other DNA
aaacacaaaaattacacctaacaataaaaccataaaaacctaaaactaac

SEQ ID NO: 7525 - DNA, 50 bp, synthetic construct
  source 1..50: mol_type = other DNA
aaatatttacaatacctactacrtataaaataacrtaaaccaccataatc

SEQ ID NO: 7526 - DNA, 50 bp, synthetic construct
  source 1..50: mol_type = other DNA
aaatcaaaactaaaaaccccttatctaaacccccractataataatccac

SEQ ID NO: 7527 - DNA, 50 bp, synthetic construct
  source 1..50: mol_type = other DNA
aaacttcatatacattaccccaacrctcctattctcraaaaactactatc

SEQ ID NO: 7528 - DNA, 50 bp, synthetic construct
  source 1..50: mol_type = other DNA
rcaacaaacactataaatatttcaccttctctaaacracaataattcctc

SEQ ID NO: 7529 - DNA, 50 bp, synthetic construct
  source 1..50: mol_type = other DNA
aacaaaaacrctaaaataatacatataaaactcttaacacaatatctaac

SEQ ID NO: 7530 - DNA, 50 bp, synthetic construct
  source 1..50: mol_type = other DNA
aatactaaaataatctaataccccacaacaaaaaaataacccaaccccrc

SEQ ID NO: 7531 - DNA, 50 bp, synthetic construct
  source 1..50: mol_type = other DNA
caatactcaacatactaaatatacacaaaacratctcatcatatccaatc

SEQ ID NO: 7532 - DNA, 50 bp, synthetic construct
  source 1..50: mol_type = other DNA
aaaacaaaaatactccctccctaaactaaacractaaatataataaaacc

SEQ ID NO: 7533 - DNA, 50 bp, synthetic construct
  source 1..50: mol_type = other DNA
aataactccttacttctttccrtctaactcctaaatacrtaaaaaaatac

SEQ ID NO: 7534 - DNA, 50 bp, synthetic construct
  source 1..50: mol_type = other DNA
caaaaccacaccaataactccttacttctttccrtctaactcctaaatac

SEQ ID NO: 7535 - DNA, 50 bp, synthetic construct
  source 1..50: mol_type = other DNA
aaattcccataaaaacactcattacataaaaactaaaaacrataactcac

SEQ ID NO: 7536 - DNA, 50 bp, synthetic construct
  source 1..50: mol_type = other DNA
taacacacttacaaatatctatactcactaatacttattaatatatcatc

SEQ ID NO: 7537 - DNA, 50 bp, synthetic construct
  source 1..50: mol_type = other DNA
taaaacttataaaaactaaaatccaaacactaatatcctttttccttcac

SEQ ID NO: 7538 - DNA, 50 bp, synthetic construct
  source 1..50: mol_type = other DNA
aaccaatctatctaaaaatctaattcttaaactcraatttattattacac

SEQ ID NO: 7539 - DNA, 50 bp, synthetic construct
  source 1..50: mol_type = other DNA
tcaatacttaaatcttaactcttataaacctcacrtacaacaataaaccc

SEQ ID NO: 7540 - DNA, 50 bp, synthetic construct
  source 1..50: mol_type = other DNA
tccttctctttcttaaaaataacaacaaaaaattacttaatacacataac

SEQ ID NO: 7541 - DNA, 50 bp, synthetic construct
  source 1..50: mol_type = other DNA
aacccataaaaaaatctcaaaatatcaaactaactaataacaaaaaaacc

SEQ ID NO: 7542 - DNA, 50 bp, synthetic construct
  source 1..50: mol_type = other DNA
accataatcccataatacactcaaaaatactattcaaaatatcaaacacc

SEQ ID NO: 7543 - DNA, 50 bp, synthetic construct
  source 1..50: mol_type = other DNA
actctactttccctttaattaatacacctctttatctcactataaaaaac

SEQ ID NO: 7544 - DNA, 50 bp, synthetic construct
  source 1..50: mol_type = other DNA
ttaataaacraaaaaccccaccaaaccttccaaaacctacaaaaaaacac

SEQ ID NO: 7545 - DNA, 50 bp, synthetic construct
  source 1..50: mol_type = other DNA
aataaaaacrtatcctcctacaaaccttaaaaaacttaataaaatccccc

SEQ ID NO: 7546 - DNA, 50 bp, synthetic construct
  source 1..50: mol_type = other DNA
aataaccacraaaaacaacacttaccttaataacctcacaaaattatatc

SEQ ID NO: 7547 - DNA, 50 bp, synthetic construct
  source 1..50: mol_type = other DNA
cacaaatttattccctctaatcacttctaaaaaaataactacctaccacc

SEQ ID NO: 7548 - DNA, 50 bp, synthetic construct
  source 1..50: mol_type = other DNA
atctttttaccactttcttactataaccaaatctaaaaacaaaaaaccac

SEQ ID NO: 7549 - DNA, 50 bp, synthetic construct
  source 1..50: mol_type = other DNA
aaaaaatccaaaataaacaatcctcttaccatatctctctacaaaatccc

SEQ ID NO: 7550 - DNA, 50 bp, synthetic construct
  source 1..50: mol_type = other DNA
ctttacaataccataactctaaaaaaactctctacaactacacactctac

SEQ ID NO: 7551 - DNA, 50 bp, synthetic construct
  source 1..50: mol_type = other DNA
aacraaattttactcttattacccaaattaaaatacaatattataatctc

SEQ ID NO: 7552 - DNA, 50 bp, synthetic construct
  source 1..50: mol_type = other DNA
ttacaaaacaaaactaaccctaaacacaaataactatactaactaacaac

SEQ ID NO: 7553 - DNA, 50 bp, synthetic construct
  source 1..50: mol_type = other DNA
aaatataacacaaaacctaacttaccttccaatctaaaaattaccttttc

SEQ ID NO: 7554 - DNA, 50 bp, synthetic construct
  source 1..50: mol_type = other DNA
caatctctctaaaaaaaccaaccctacrtatcraaaaactaaatctaaac

SEQ ID NO: 7555 - DNA, 50 bp, synthetic construct
  source 1..50: mol_type = other DNA
aataatacctactactataactccaatctctctaaaaaaaccaaccctac

SEQ ID NO: 7556 - DNA, 50 bp, synthetic construct
  source 1..50: mol_type = other DNA
acaaccttatttcataacraacaataataataatcccaaatttcaaaaac

SEQ ID NO: 7557 - DNA, 50 bp, synthetic construct
  source 1..50: mol_type = other DNA
tttaaatactcaccaatacaaacaaactaattaaaaaactcaataaaacc

SEQ ID NO: 7558 - DNA, 50 bp, synthetic construct
  source 1..50: mol_type = other DNA
cattcattcactcaacaaatacttactaaactcaaaaaatacatcaaacc

SEQ ID NO: 7559 - DNA, 50 bp, synthetic construct
  source 1..50: mol_type = other DNA
actacacccracctaaatcatccaaatttttaacaaattattcttattcc

SEQ ID NO: 7560 - DNA, 50 bp, synthetic construct
  source 1..50: mol_type = other DNA
catcctcccraaacaaaaacaacttattaaaaatctaaataattcaaacc

SEQ ID NO: 7561 - DNA, 50 bp, synthetic construct
  source 1..50: mol_type = other DNA
tattatcrcrcaacaaaaaaatccrcaacttactatactaaaacaacaac

SEQ ID NO: 7562 - DNA, 50 bp, synthetic construct
  source 1..50: mol_type = other DNA
atacaaatcccrataaaaacccatattattatcrcrcaacaaaaaaatcc

SEQ ID NO: 7563 - DNA, 50 bp, synthetic construct
  source 1..50: mol_type = other DNA
aaaaaaaattcttcccaaaaactaacrataataatattaatcacrttacc

SEQ ID NO: 7564 - DNA, 50 bp, synthetic construct
  source 1..50: mol_type = other DNA
tactaaaactaattctaactcatatccaaaaaacraaaatctacraaatc

SEQ ID NO: 7565 - DNA, 50 bp, synthetic construct
  source 1..50: mol_type = other DNA
aacaaatactaaaactaattctaactcatatccaaaaaacraaaatctac

SEQ ID NO: 7566 - DNA, 50 bp, synthetic construct
  source 1..50: mol_type = other DNA
racaactaattataactcaaatccaactcrataaacrctccraaaaactc

SEQ ID NO: 7567 - DNA, 50 bp, synthetic construct
  source 1..50: mol_type = other DNA
aaaaccaaaaaaaacrcccaaaaactaattaaaactcaaattaaacaaac

SEQ ID NO: 7568 - DNA, 50 bp, synthetic construct
  source 1..50: mol_type = other DNA
aaaatctaattataactcatatcaaatataataatattcctaacattaac

SEQ ID NO: 7569 - DNA, 50 bp, synthetic construct
  source 1..50: mol_type = other DNA
ccttaaaaataccatattcctaaaatccacacaactaaaaaaacccaccc

SEQ ID NO: 7570 - DNA, 50 bp, synthetic construct
  source 1..50: mol_type = other DNA
taacctacttaaacctctcaaacaactaaaaaattctaaataaaaacctc

SEQ ID NO: 7571 - DNA, 50 bp, synthetic construct
  source 1..50: mol_type = other DNA
cctataaatttatctcaaactaactacacctatcaaccaaactcacactc

SEQ ID NO: 7572 - DNA, 50 bp, synthetic construct
  source 1..50: mol_type = other DNA
aaataaataattcctaaatacctaaaacaaaaattcrtatacaaaaaacc

SEQ ID NO: 7573 - DNA, 50 bp, synthetic construct
  source 1..50: mol_type = other DNA
aactctcttctctaaacctaacataaataacaactctacctcaccaactc

SEQ ID NO: 7574 - DNA, 50 bp, synthetic construct
  source 1..50: mol_type = other DNA
ataaataacaactctacctcaccaactcrtataattacattatcctttac

SEQ ID NO: 7575 - DNA, 50 bp, synthetic construct
  source 1..50: mol_type = other DNA
ataaataaccaactacrtcatacaaaaacccaacaaaaaccaaataacac

SEQ ID NO: 7576 - DNA, 50 bp, synthetic construct
  source 1..50: mol_type = other DNA
ctaaatccctacataacrcaactaactactcatttaataatcctaaaccc

SEQ ID NO: 7577 - DNA, 50 bp, synthetic construct
  source 1..50: mol_type = other DNA
aaatcaaaaaactccatcttcraaaaatttactttcctaacrctaaccrc

SEQ ID NO: 7578 - DNA, 50 bp, synthetic construct
  source 1..50: mol_type = other DNA
aaaaatcaaaaaactccatcttcraaaaatttactttcctaacrctaacc

SEQ ID NO: 7579 - DNA, 50 bp, synthetic construct
  source 1..50: mol_type = other DNA
actccataaaaatcaaaaaactccatcttcraaaaatttactttcctaac

SEQ ID NO: 7580 - DNA, 50 bp, synthetic construct
  source 1..50: mol_type = other DNA
ttcctcatatccacrcataaactccataaaaatcaaaaaactccatcttc

SEQ ID NO: 7581 - DNA, 50 bp, synthetic construct
  source 1..50: mol_type = other DNA
aaaacaaatctcccraaaataaaatcccctaatttccataaaatccatac

SEQ ID NO: 7582 - DNA, 50 bp, synthetic construct
  source 1..50: mol_type = other DNA
aaaaaaataccaatatccattatctctactacrtttaaattttcctttcc

SEQ ID NO: 7583 - DNA, 50 bp, synthetic construct
  source 1..50: mol_type = other DNA
acaaaatataaaacaaaaaccacrcaatatcttccttatcatacacaacc

SEQ ID NO: 7584 - DNA, 50 bp, synthetic construct
  source 1..50: mol_type = other DNA
aaaatataaaacaaaaaccacrcaatatcttccttatcatacacaaccrc

SEQ ID NO: 7585 - DNA, 50 bp, synthetic construct
  source 1..50: mol_type = other DNA
actcctaaaacttcctacaatatataattaaaccactaataatcrtaaac

SEQ ID NO: 7586 - DNA, 50 bp, synthetic construct
  source 1..50: mol_type = other DNA
taaataactcctaaaacttcctacaatatataattaaaccactaataatc

SEQ ID NO: 7587 - DNA, 50 bp, synthetic construct
  source 1..50: mol_type = other DNA
caatttatattaaactacattcaaaaccacctaaaccacatacaacccrc

SEQ ID NO: 7588 - DNA, 50 bp, synthetic construct
  source 1..50: mol_type = other DNA
atcaatttatattaaactacattcaaaaccacctaaaccacatacaaccc

SEQ ID NO: 7589 - DNA, 50 bp, synthetic construct
  source 1..50: mol_type = other DNA
ttcttttaaaacaaaatctccctctatcrcctaaactacaatacaataac

SEQ ID NO: 7590 - DNA, 50 bp, synthetic construct
  source 1..50: mol_type = other DNA
acaaatacctaccaccatacccaactaatctttatattttcaataaaaac

SEQ ID NO: 7591 - DNA, 50 bp, synthetic construct
  source 1..50: mol_type = other DNA
tcttcctaaacaaaataaaatctataaacaaaccaaaaaaacatccaaac

SEQ ID NO: 7592 - DNA, 50 bp, synthetic construct
  source 1..50: mol_type = other DNA
caataactacccacaatcttattaaaaaaccccacaacacctaaaaatac

SEQ ID NO: 7593 - DNA, 50 bp, synthetic construct
  source 1..50: mol_type = other DNA
ttaaaaaaccccacaacacctaaaaatacraatatccccaaaaaataaac

SEQ ID NO: 7594 - DNA, 50 bp, synthetic construct
  source 1..50: mol_type = other DNA
rattaaataaaaaaacccactcctaattatttaaacrttaacctacaaac

SEQ ID NO: 7595 - DNA, 50 bp, synthetic construct
  source 1..50: mol_type = other DNA
tttacrtacactacrattaaataaaaaaacccactcctaattatttaaac

SEQ ID NO: 7596 - DNA, 50 bp, synthetic construct
  source 1..50: mol_type = other DNA
ccaacrtctaaacaaccaaaaataaatttttccacccaaccrcaatacac

SEQ ID NO: 7597 - DNA, 50 bp, synthetic construct
  source 1..50: mol_type = other DNA
rcraaacctaaatcaataaaacraaccraaaaaaatcaaacactaaaacc

SEQ ID NO: 7598 - DNA, 50 bp, synthetic construct
  source 1..50: mol_type = other DNA
ccaaaacrcttaacractaactttccttctcaaaactttaataacaaaac

SEQ ID NO: 7599 - DNA, 50 bp, synthetic construct
  source 1..50: mol_type = other DNA
ttaataatcaaaaacttcrtacaactcaaaaacatcccaaaacrcttaac

SEQ ID NO: 7600 - DNA, 50 bp, synthetic construct
  source 1..50: mol_type = other DNA
taaccccttaataatcaaaaacttcrtacaactcaaaaacatcccaaaac

SEQ ID NO: 7601 - DNA, 50 bp, synthetic construct
  source 1..50: mol_type = other DNA
cctcacaaaacrctaaaaccttacctaaccccttaataatcaaaaacttc

SEQ ID NO: 7602 - DNA, 50 bp, synthetic construct
  source 1..50: mol_type = other DNA
ccttaacrccctataaaacctaaaaatccccaaactaaatataaaactcc

SEQ ID NO: 7603 - DNA, 50 bp, synthetic construct
  source 1..50: mol_type = other DNA
aatttatactttcctcccatcaaaccttaccctttattataattattccc

SEQ ID NO: 7604 - DNA, 50 bp, synthetic construct
  source 1..50: mol_type = other DNA
aaaaaatctaatactaaccrccttcttccttcrattacctaaaaaaaccc

SEQ ID NO: 7605 - DNA, 50 bp, synthetic construct
  source 1..50: mol_type = other DNA
ccttcrattacctaaaaaaacccrtatttatccttcrcttcacaaaaaac

SEQ ID NO: 7606 - DNA, 50 bp, synthetic construct
  source 1..50: mol_type = other DNA
tccccactttacaaaaacrcactacaaaatcrcraataattaaataatac

SEQ ID NO: 7607 - DNA, 50 bp, synthetic construct
  source 1..50: mol_type = other DNA
aaaaaaaaacaaaacatcttcatcaaaaaaaacrcaccatttaaccaccc

SEQ ID NO: 7608 - DNA, 50 bp, synthetic construct
  source 1..50: mol_type = other DNA
ctcctactacaaaacraaatccccactttacaaaaacrcactacaaaatc

SEQ ID NO: 7609 - DNA, 50 bp, synthetic construct
  source 1..50: mol_type = other DNA
ccaaaaaaaacracaataaataaactccactccaaaacacraatctaaac

SEQ ID NO: 7610 - DNA, 50 bp, synthetic construct
  source 1..50: mol_type = other DNA
taacatttacccaaaaaaaacracaataaataaactccactccaaaacac

SEQ ID NO: 7611 - DNA, 50 bp, synthetic construct
  source 1..50: mol_type = other DNA
aaatctaaataacaccaaaaaaaacracaaaacraacctatcctacctac

SEQ ID NO: 7612 - DNA, 50 bp, synthetic construct
  source 1..50: mol_type = other DNA
ttaaaactttctaaaaaatacctcccccaaaataaactaaattccctccc

SEQ ID NO: 7613 - DNA, 50 bp, synthetic construct
  source 1..50: mol_type = other DNA
ctacttcaaaaccttatacacataaataaaataactctccttacractac

SEQ ID NO: 7614 - DNA, 50 bp, synthetic construct; identical to SEQ ID NO: 7613
  source 1..50: mol_type = other DNA

SEQ ID NO: 7615 - DNA, 50 bp, synthetic construct
  source 1..50: mol_type = other DNA
acrtattctaaaaaatacraacaaacaccaacrtattcaaaaacaaccac

SEQ ID NO: 7616 - DNA, 50 bp, synthetic construct
  source 1..50: mol_type = other DNA
rcrtaactattcctaaatacrctaatatctattcrcatcttttaaaatac

SEQ ID NO: 7617 - DNA, 50 bp, synthetic construct
  source 1..50: mol_type = other DNA
ttcctaaatacrctaatatctattcrcatcttttaaaatacrctaatatc

SEQ ID NO: 7618 - DNA, 50 bp, synthetic construct
  source 1..50: mol_type = other DNA
aaaaacraatatccaaaaacaaaaactaacrtctacaaaaaaacaactac

SEQ ID NO: 7619 - DNA, 50 bp, synthetic construct
  source 1..50: mol_type = other DNA
aaatcaacrctaactctaaataatatcrttaataaattactaaacacccc

SEQ ID NO: 7620 - DNA, 50 bp, synthetic construct
  source 1..50: mol_type = other DNA
actaaacaccccrttaaaattaaaacattaactaatattaaaaaaactcc

SEQ ID NO: 7621 - DNA, 50 bp, synthetic construct
  source 1..50: mol_type = other DNA
aataaaaccctatcttaaaccaaatataaccrtacraatacccaataaac

SEQ ID NO: 7622 - DNA, 50 bp, synthetic construct
  source 1..50: mol_type = other DNA
aacacaattcctaaaaataaaaccctatcttaaaccaaatataaccrtac

SEQ ID NO: 7623 - DNA, 50 bp, synthetic construct
  source 1..50: mol_type = other DNA
cataaacacaattcctaaaaataaaaccctatcttaaaccaaatataacc

SEQ ID NO: 7624 - DNA, 50 bp, synthetic construct
  source 1..50: mol_type = other DNA
aattcttaatcaaaacrtaacccrtattaaatactcaataaacaataacc

SEQ ID NO: 7625 - DNA, 50 bp, synthetic construct
  source 1..50: mol_type = other DNA
ratctaattcctaaacracatcaaaaatccaacaaattcatactcatacc

SEQ ID NO: 7626 - DNA, 50 bp, synthetic construct
  source 1..50: mol_type = other DNA
caaactcacactacraaataaacacaacttttacratctaattcctaaac

SEQ ID NO: 7627 - DNA, 50 bp, synthetic construct
  source 1..50: mol_type = other DNA
racataaatataaacttattaaattcctaataccrcccaaaaatcaaacc

SEQ ID NO: 7628 - DNA, 50 bp, synthetic construct
  source 1..50: mol_type = other DNA
ccrtaaaaactatacttatttcrcaatataaacctaacacaacaaaaaac

SEQ ID NO: 7629 - DNA, 50 bp, synthetic construct
  source 1..50: mol_type = other DNA
aacacaacaaaaaacrcacaaaacaaacatcattaaaatataaaaaccac

SEQ ID NO: 7630 - DNA, 50 bp, synthetic construct
  source 1..50: mol_type = other DNA
raaccacaacaaatactcactatataattttctccatttttctatattac

SEQ ID NO: 7631 - DNA, 50 bp, synthetic construct
  source 1..50: mol_type = other DNA
actaacaccttaaaaattaaaatcccccataaattctaaaaaacacaaac

SEQ ID NO: 7632 - DNA, 50 bp, synthetic construct
  source 1..50: mol_type = other DNA
caactcctaaaattcacaaacacaaaactacaaacrtatcctataccacc

SEQ ID NO: 7633 - DNA, 50 bp, synthetic construct
  source 1..50: mol_type = other DNA
aaactttccaaaaaacaactcctaaaattcacaaacacaaaactacaaac

SEQ ID NO: 7634 - DNA, 50 bp, synthetic construct
  source 1..50: mol_type = other DNA
aaaaaaatcctaaaaaacaaaataacccccaacraatacactctaccctc

SEQ ID NO: 7635 - DNA, 50 bp, synthetic construct
  source 1..50: mol_type = other DNA
aaactcctttcacaaaacaaaaaaactcctaataaacraaactactaaac

SEQ ID NO: 7636 - DNA, 50 bp, synthetic construct
  source 1..50: mol_type = other DNA
acctcccactatccccaacataaaatctacactctacataaaatctacac

SEQ ID NO: 7637 - DNA, 50 bp, synthetic construct
  source 1..50: mol_type = other DNA
aacaaaaaaatctctatacaaccctacatataaactatacctcacraaac

SEQ ID NO: 7638 - DNA, 50 bp, synthetic construct
  source 1..50: mol_type = other DNA
cttctaaaaaacacaaaaacrcacaatacctacttaacaaaaataaaaac

SEQ ID NO: 7639 - DNA, 50 bp, synthetic construct
  source 1..50: mol_type = other DNA
cttaaatctataatacaacaaaaacracrccttctaaaaaacacaaaaac

SEQ ID NO: 7640 - DNA, 50 bp, synthetic construct
  source 1..50: mol_type = other DNA
acaccattcacaacaaatccatcttaaatctataatacaacaaaaacrac

SEQ ID NO: 7641 - DNA, 50 bp, synthetic construct
  source 1..50: mol_type = other DNA
ataacaccattcacaacaaatccatcttaaatctataatacaacaaaaac

SEQ ID NO: 7642 - DNA, 50 bp, synthetic construct
  source 1..50: mol_type = other DNA
aataaacttactataaataataccacacaacrcccacaaactaaaccctc

SEQ ID NO: 7643 - DNA, 50 bp, synthetic construct
  source 1..50: mol_type = other DNA
tcaaaaatctaatccacataacacccaaaaacaatattcttaaacrcrac

SEQ ID NO: 7644 - DNA, 50 bp, synthetic construct
  source 1..50: mol_type = other DNA
tattcaaaaatctaatccacataacacccaaaaacaatattcttaaacrc

SEQ ID NO: 7645 - DNA, 50 bp, synthetic construct
  source 1..50: mol_type = other DNA
tattacctaaaacatcactctccctacaaaactaaaacacraaataaaac

SEQ ID NO: 7646 - DNA, 50 bp, synthetic construct
  source 1..50: mol_type = other DNA
ctcaaaaccrtattacctaaaacatcactctccctacaaaactaaaacac

SEQ ID NO: 7647 - DNA, 50 bp, synthetic construct
  source 1..50: mol_type = other DNA
caaaaaaaataatactccaaacaacacrattctaaatcaccttctaacac

SEQ ID NO: 7648 - DNA, 50 bp, synthetic construct
  source 1..50: mol_type = other DNA
tatttaatttcccaccttataaaacacaacaacaactccctaactaattc

SEQ ID NO: 7649 - DNA, 50 bp, synthetic construct
  source 1..50: mol_type = other DNA
aaaacacaacaacaactccctaactaattcrcctttcattatataaaatc

SEQ ID NO: 7650 - DNA, 50 bp, synthetic construct
  source 1..50: mol_type = other DNA
attcrcctttcattatataaaatcracacttaaactcactcaaaactatc

SEQ ID NO: 7651 - DNA, 50 bp, synthetic construct
  source 1..50: mol_type = other DNA
ctaatcacacracctctaatctacctactaaacatatcaaaaatcccrac

SEQ ID NO: 7652 - DNA, 50 bp, synthetic construct
  source 1..50: mol_type = other DNA
aaactaatcacacracctctaatctacctactaaacatatcaaaaatccc

SEQ ID NO: 7653 - DNA, 50 bp, synthetic construct
  source 1..50: mol_type = other DNA
caaacrccacrtcraaatttctaacatactcaacaaataaaccaaaaacc

SEQ ID NO: 7654 - DNA, 50 bp, synthetic construct
  source 1..50: mol_type = other DNA
tactcaacaaataaaccaaaaaccrtataaccaactcaatactaatttac

SEQ ID NO: 7655 - DNA, 50 bp, synthetic construct
  source 1..50: mol_type = other DNA
aacaactcttacttttaaaaattacttattcccccaaattattaaatacc

SEQ ID NO: 7656 - DNA, 50 bp, synthetic construct
  source 1..50: mol_type = other DNA
aactcttacttttaaaaattacttattcccccaaattattaaataccrcc

SEQ ID NO: 7657 - DNA, 50 bp, synthetic construct
  source 1..50: mol_type = other DNA
acaaaaatataaatacaaacaaaacraaaactaaacctacccataacccc

SEQ ID NO: 7658 - DNA, 50 bp, synthetic construct
  source 1..50: mol_type = other DNA
aaaatataaatacaaacaaaacraaaactaaacctacccataaccccrcc

SEQ ID NO: 7659 - DNA, 50 bp, synthetic construct
  source 1..50: mol_type = other DNA
aatcaatcactctcraaacctacacaaacaaatccractacaaataaaac

SEQ ID NO: 7660 - DNA, 50 bp, synthetic construct
  source 1..50: mol_type = other DNA
aataaaactacaaaaaatcaatcactctcraaacctacacaaacaaatcc

SEQ ID NO: 7661 - DNA, 50 bp, synthetic construct
  source 1..50: mol_type = other DNA
caacaaaaatatatacrtacraataaaactacaaaaaatcaatcactctc

SEQ ID NO: 7662 - DNA, 50 bp, synthetic construct
  source 1..50: mol_type = other DNA
aatctacttatacaaactccraaaataactaatcttctacaaccccaccc

SEQ ID NO: 7663 - DNA, 50 bp, synthetic construct
  source 1..50: mol_type = other DNA
ataataaataacctaccccrtcctacaaactacacaacaaaaatatatac

SEQ ID NO: 7664 - DNA, 50 bp, synthetic construct
  source 1..50: mol_type = other DNA
aactacctaaaacraaataaaacttcccctaataataaataacctacccc

SEQ ID NO: 7665 - DNA, 50 bp, synthetic construct
  source 1..50: mol_type = other DNA
caaaaaacctccaacaccttcactaaaaaactaactcctcaaccctatcc

SEQ ID NO: 7666 - DNA, 50 bp, synthetic construct
  source 1..50: mol_type = other DNA
atactcttccctaacaattcaacctaaaatacactccttaaaataataac

SEQ ID NO: 7667 - DNA, 50 bp, synthetic construct
  source 1..50: mol_type = other DNA
atctcttctatcccatcaaaaccctaaaaacaaaaacccaaataatctac

SEQ ID NO: 7668 - DNA, 50 bp, synthetic construct
  source 1..50: mol_type = other DNA
craatcacacaaccrtaaacaaacctaaactaaaatccttatcccctaac

SEQ ID NO: 7669 - DNA, 50 bp, synthetic construct
  source 1..50: mol_type = other DNA
aaaaaaactaaaaccttaaaaaaacttaacccataccraatcacacaacc

SEQ ID NO: 7670 - DNA, 50 bp, synthetic construct
  source 1..50: mol_type = other DNA
aactatatataaaatctacaaaaactacctaaataccraatccrcrtttc

SEQ ID NO: 7671 - DNA, 50 bp, synthetic construct
  source 1..50: mol_type = other DNA
cccraaactatatataaaatctacaaaaactacctaaataccraatccrc

SEQ ID NO: 7672 - DNA, 50 bp, synthetic construct
  source 1..50: mol_type = other DNA
crtaacctcccraaactatatataaaatctacaaaaactacctaaatacc

SEQ ID NO: 7673 - DNA, 50 bp, synthetic construct
  source 1..50: mol_type = other DNA
actctacttctaattaaaaactacttcaaacccctccaaaataccaaaac

SEQ ID NO: 7674 - DNA, 50 bp, synthetic construct
  source 1..50: mol_type = other DNA
aatacacaaaaaactaccccaaaaaatacaactaaattcttaaaaaaaac

SEQ ID NO: 7675 - DNA, 50 bp, synthetic construct
  source 1..50: mol_type = other DNA
acaatacraatcraatatcttacractataacatataacaacctccaaac

SEQ ID NO: 7676 - DNA, 50 bp, synthetic construct
  source 1..50: mol_type = other DNA
cttacractataacatataacaacctccaaacraaaattctcccttcatc

SEQ ID NO: 7677 - DNA, 50 bp, synthetic construct
  source 1..50: mol_type = other DNA
ctaaaatacrttacrttttatcaacaaattctatcaaaaacacracaaac

SEQ ID NO: 7678 - DNA, 50 bp, synthetic construct
  source 1..50: mol_type = other DNA
aaaatttaaaaaaacrcatcctaaaactaataacaccrtataaaaacaac

SEQ ID NO: 7679 - DNA, 50 bp, synthetic construct
  source 1..50: mol_type = other DNA
tataacaaacaatataaataaaaacatacrtaaaacrtctacacctaccc

SEQ ID NO: 7680 - DNA, 50 bp, synthetic construct
  source 1..50: mol_type = other DNA
caatacatcttcccctttaataactcacaacaataatcctccctaatttc

SEQ ID NO: 7681 - DNA, 50 bp, synthetic construct
  source 1..50: mol_type = other DNA
taatttattacattacaactttttatattcacraaatttctctacttaac

SEQ ID NO: 7682 - DNA, 50 bp, synthetic construct
  source 1..50: mol_type = other DNA
tccccaatttttcctaaataatttattacattacaactttttatattcac

SEQ ID NO: 7683 - DNA, 50 bp, synthetic construct
  source 1..50: mol_type = other DNA
cttaaaactaaaactaaaactacatttcaactctcctaaatctccractc

SEQ ID NO: 7684 - DNA, 50 bp, synthetic construct
  source 1..50: mol_type = other DNA
caaaccttaaaactaaaactaaaactacatttcaactctcctaaatctcc

SEQ ID NO: 7685 - DNA, 50 bp, synthetic construct
  source 1..50: mol_type = other DNA
caatctcaaaacctaaaaaccaaaaaaactaacaataacaattttaaccc

SEQ ID NO: 7686 - DNA, 50 bp, synthetic construct
  source 1..50: mol_type = other DNA
acctaaaaaccaaaaaaactaacaataacaattttaacccraaaactatc

SEQ ID NO: 7687 - DNA, 50 bp, synthetic construct
  source 1..50: mol_type = other DNA
aaaaaccaaaaaaactaacaataacaattttaacccraaaactatcraac

SEQ ID NO: 7688 - DNA, 50 bp, synthetic construct
  source 1..50: mol_type = other DNA
tttctaacctttacacttaaactaaaaccctaactcttcttaaatctccc

SEQ ID NO: 7689 - DNA, 50 bp, synthetic construct
  source 1..50: mol_type = other DNA
aaaaaccaaaattttaatccaaatacaaaaaccaaaaaaaaccatacccc

SEQ ID NO: 7690 - DNA, 50 bp, synthetic construct
  source 1..50: mol_type = other DNA
taaaattaatatctaaataaataaactaaaaaaaacccacaaccttcccc

SEQ ID NO: 7691 - DNA, 50 bp, synthetic construct
  source 1..50: mol_type = other DNA
atttattaaaaaacctaacaacrtcaaataaacccataaaattcaccatc

SEQ ID NO: 7692 - DNA, 50 bp, synthetic construct
  source 1..50: mol_type = other DNA
ttattaaaaaacctaacaacrtcaaataaacccataaaattcaccatcrc

SEQ ID NO: 7693 - DNA, 50 bp, synthetic construct
  source 1..50: mol_type = other DNA
aaaacrtacaacatcataaatcatcaaaaaaatacaaattaaaccacaac

SEQ ID NO: 7694 - DNA, 50 bp, synthetic construct
  source 1..50: mol_type = other DNA
aatattcctattcaaaccttttccccattaaaaaaataaaattactaacc

SEQ ID NO: 7695 - DNA, 50 bp, synthetic construct
  source 1..50: mol_type = other DNA
atacttatccctttctatcacctaacatactataatcacaccaacaccac

SEQ ID NO: 7696 - DNA, 50 bp, synthetic construct
  source 1..50: mol_type = other DNA
ataaattatcttcccaccaaataaaacaaatacrtctactcttaaacaac

SEQ ID NO: 7697 - DNA, 50 bp, synthetic construct
  source 1..50: mol_type = other DNA
atacccccraaacttaaataaattatcttcccaccaaataaaacaaatac

SEQ ID NO: 7698 - DNA, 50 bp, synthetic construct
  source 1..50: mol_type = other DNA
atacccctaaaacttaaaacaattatcttcccaccaaataaaacaaatac

SEQ ID NO: 7699 - DNA, 50 bp, synthetic construct
  source 1..50: mol_type = other DNA
ccraaacttaaaacaattatcttctcaccaaataaaacaaatacrtctac

SEQ ID NO: 7700 - DNA, 50 bp, synthetic construct
  source 1..50: mol_type = other DNA
aaaaaaattatcttcccaccaaataaaacaaatacrtctataataccccc

SEQ ID NO: 7701 - DNA, 50 bp, synthetic construct
  source 1..50: mol_type = other DNA
taaaaattcttcctaaaccctatacctacaacracrtctttaaaaaacrc

SEQ ID NO: 7702 - DNA, 50 bp, synthetic construct
  source 1..50: mol_type = other DNA
aataaaaattcttcctaaaccctatacctacaacracrtctttaaaaaac

SEQ ID NO: 7703 - DNA, 50 bp, synthetic construct
  source 1..50: mol_type = other DNA
aaaaaaaaaaacccctctcctatacaaacaaacaaaactactaaataaac

SEQ ID NO: 7704 - DNA, 50 bp, synthetic construct
  source 1..50: mol_type = other DNA
caactccccracaacracaaccaaactctctaattaactaaaatactaac

SEQ ID NO: 7705 - DNA, 50 bp, synthetic construct
  source 1..50: mol_type = other DNA
taaaaactctctaatatttctcctcctctaaaaccccataattcaacaac

SEQ ID NO: 7706 - DNA, 50 bp, synthetic construct
  source 1..50: mol_type = other DNA
aataacaataataaacrcaaataataaacataacrttatacattcccrcc

SEQ ID NO: 7707 - DNA, 50 bp, synthetic construct
  source 1..50: mol_type = other DNA
attaaaaaaaacacrccctttataaatacacrtacraacccaaaaacaac

SEQ ID NO: 7708 - DNA, 50 bp, synthetic construct
  source 1..50: mol_type = other DNA
cccctactacrtacaaataattaaaaaaaacacrccctttataaatacac

SEQ ID NO: 7709 - DNA, 50 bp, synthetic construct
  source 1..50: mol_type = other DNA
acrttattattacccttattaccctacrtacactaaaaaacccctactac

SEQ ID NO: 7710 - DNA, 50 bp, synthetic construct
  source 1..50: mol_type = other DNA
acrcaacaaaaacctctcaatacacrcaaaataataaaaataacaacaac

SEQ ID NO: 7711 - DNA, 50 bp, synthetic construct
  source 1..50: mol_type = other DNA
aatacrtaaaccaccatttactaactatataactttaaccaaatttcttc

SEQ ID NO: 7712 - DNA, 50 bp, synthetic construct
  source 1..50: mol_type = other DNA
raacrcactaaacactccctataaaccaaactctatacttctcaataatc

SEQ ID NO: 7713 - DNA, 50 bp, synthetic construct
  source 1..50: mol_type = other DNA
aaacratcactaaaaaacacaaaacttaacccacaaaaaatacccaatac

SEQ ID NO: 7714 - DNA, 50 bp, synthetic construct
  source 1..50: mol_type = other DNA
ratcactaaaaaacacaaaacttaacccacaaaaaatacccaatacrctc

SEQ ID NO: 7715 - DNA, 50 bp, synthetic construct
  source 1..50: mol_type = other DNA
ataataataattctatactcaaacttcaaaacacraaaacacaaaaaacc

SEQ ID NO: 7716 - DNA, 50 bp, synthetic construct
  source 1..50: mol_type = other DNA
aaaaaaataccaaatcaccctatacactttattcacacrctcatatatac

SEQ ID NO: 7717 - DNA, 50 bp, synthetic construct
  source 1..50: mol_type = other DNA
tatctataaacccctaactaaaactactacctttctttcaaaaatacccc

SEQ ID NO: 7718 - DNA, 50 bp, synthetic construct
  source 1..50: mol_type = other DNA
tcacaatataaacaaaactaccaaaaaattcacactaaacaaaacccacc

SEQ ID NO: 7719 - DNA, 50 bp, synthetic construct
  source 1..50: mol_type = other DNA
tcracaaacactaaactaactacaaaaattttttctaataccccaataac

SEQ ID NO: 7720 - DNA, 50 bp, synthetic construct
  source 1..50: mol_type = other DNA
ccataacaccaaaaccctaaatttcaaacacaaaactaaacaaccrtttc

SEQ ID NO: 7721 - DNA, 50 bp, synthetic construct
  source 1..50: mol_type = other DNA
actaaaatatcaaaaaaaactcctacaactaactcaatatctaccraaac

SEQ ID NO: 7722 - DNA, 50 bp, synthetic construct
  source 1..50: mol_type = other DNA
taaaaaacaatacattccaactcaaatactacrcttttcccacratcttc

SEQ ID NO: 7723 - DNA, 50 bp, synthetic construct
  source 1..50: mol_type = other DNA
tataacttaaaaaacaatacattccaactcaaatactacrcttttcccac

SEQ ID NO: 7724 - DNA, 50 bp, synthetic construct
  source 1..50: mol_type = other DNA
ccataaaaaactataacttaaaaaacaatacattccaactcaaatactac

SEQ ID NO: 7725 - DNA, 50 bp, synthetic construct
  source 1..50: mol_type = other DNA
tcaaaccacaatccctcataacttcccttaactaaataaaaaaattcccc

SEQ ID NO: 7726 - DNA, 50 bp, synthetic construct
  source 1..50: mol_type = other DNA
aactcatctccctaaaactaattaaacaataaatacaacccacraaaaac

SEQ ID NO: 7727 - DNA, 50 bp, synthetic construct
  source 1..50: mol_type = other DNA
aatacctaactcatctccctaaaactaattaaacaataaatacaacccac

SEQ ID NO: 7728 - DNA, 50 bp, synthetic construct
  source 1..50: mol_type = other DNA
atacaaaaatcatccaccttctacrttaatctcactaaaaactacaaatc

SEQ ID NO: 7729 - DNA, 50 bp, synthetic construct
  source 1..50: mol_type = other DNA
aaaaaaaatctctccccrataaaacttcaacaaacaaaaatactatattc

SEQ ID NO: 7730 - DNA, 50 bp, synthetic construct
  source 1..50: mol_type = other DNA
aacatttatctctttacraacacaatatttctatctattaaaacttcacc

SEQ ID NO: 7731 - DNA, 50 bp, synthetic construct
  source 1..50: mol_type = other DNA
aactcaataaaaaaaacaatacrcttctatccaaatcaaaactcraccac

SEQ ID NO: 7732 - DNA, 50 bp, synthetic construct
  source 1..50: mol_type = other DNA
cactaaatctttaatcacaacaatcaaccccracctctatacaaaaaaac

SEQ ID NO: 7733 - DNA, 50 bp, synthetic construct
  source 1..50: mol_type = other DNA
aaaaatttctatcaaaaaccccaaaccctacacacaaacacaataaaaac

SEQ ID NO: 7734 - DNA, 50 bp, synthetic construct
  source 1..50: mol_type = other DNA
tctttctccataaaccttaaaaatttcctatacaaatataatcacaaacc

SEQ ID NO: 7735 - DNA, 50 bp, synthetic construct
  source 1..50: mol_type = other DNA
tatctaaattaccaaaccctactctaaaccactcctaaccttaaacracc

SEQ ID NO: 7736 - DNA, 50 bp, synthetic construct
  source 1..50: mol_type = other DNA
atattatctaaattaccaaaccctactctaaaccactcctaaccttaaac

SEQ ID NO: 7737 - DNA, 50 bp, synthetic construct
  source 1..50: mol_type = other DNA
tcctaacccctaaaaaaacactaaaaacrcaaataaccctcaaatacttc

SEQ ID NO: 7738 - DNA, 50 bp, synthetic construct
  source 1..50: mol_type = other DNA
aaaacaactccttaaaaacctaactctaaaacaaaaaccactaatccccc

SEQ ID NO: 7739 - DNA, 50 bp, synthetic construct
  source 1..50: mol_type = other DNA
ctctcaaatctcattaactcracattctctatcctacaatttctatatac

SEQ ID NO: 7740 - DNA, 50 bp, synthetic construct
  source 1..50: mol_type = other DNA
aaataaccccaataaataacrcacacaaaaactacaaaacaaaaaatacc

SEQ ID NO: 7741 - DNA, 50 bp, synthetic construct
  source 1..50: mol_type = other DNA
aaaaccataacctataaatataaaacccaacataactaaaccctcaaaac

SEQ ID NO: 7742 - DNA, 50 bp, synthetic construct
  source 1..50: mol_type = other DNA
aaaatccaatcatactaaaccctacactcacaaaccataacccttaaacc

SEQ ID NO: 7743 - DNA, 50 bp, synthetic construct
  source 1..50: mol_type = other DNA
taatacccttacccacatatcctaacttctaaacataatcccttacctcc

SEQ ID NO: 7744 - DNA, 50 bp, synthetic construct
  source 1..50: mol_type = other DNA
actaactctatacccttaacraactctctacratcctatatttaataaac

SEQ ID NO: 7745 - DNA, 50 bp, synthetic construct
  source 1..50: mol_type = other DNA
tatcctattcraaaatataactaactctatacccttaacraactctctac

SEQ ID NO: 7746 - DNA, 50 bp, synthetic construct
  source 1..50: mol_type = other DNA
aaatacaacaatatcctattcraaaatataactaactctatacccttaac

SEQ ID NO: 7747 - DNA, 50 bp, synthetic construct
  source 1..50: mol_type = other DNA
cccaccaacttatctttaaaaactccaaaccccaaatactcaaaaaaacc

SEQ ID NO: 7748 - DNA, 50 bp, synthetic construct
  source 1..50: mol_type = other DNA
aataacataacacrcaactaaaatatataaacttactaccracaccttcc

SEQ ID NO: 7749 - DNA, 50 bp, synthetic construct
  source 1..50: mol_type = other DNA
aaaataaaaccraaccaaacacctaactatccattaaaaccttactatac

SEQ ID NO: 7750 - DNA, 50 bp, synthetic construct
  source 1..50: mol_type = other DNA
crtcctaaatcrcataacaaaacctcaataaacaaccaaatacctaatcc

SEQ ID NO: 7751 - DNA, 50 bp, synthetic construct
  source 1..50: mol_type = other DNA
aaacaaccaaatacctaatccratcccacttttttttctatcctattctc

SEQ ID NO: 7752 - DNA, 50 bp, synthetic construct
  source 1..50: mol_type = other DNA
cactatataaacccaaaatttcacccatctacaaattttctctaccacac

SEQ ID NO: 7753 - DNA, 50 bp, synthetic construct
  source 1..50: mol_type = other DNA
acctaattaataaatataacaaccccaaactcttctaaatttataaatcc

SEQ ID NO: 7754 - DNA, 50 bp, synthetic construct
  source 1..50: mol_type = other DNA
aaactcaaaataaatcaatctctctctaaaaaacrcaaaacaaaaacaac

SEQ ID NO: 7755 - DNA, 50 bp, synthetic construct
  source 1..50: mol_type = other DNA
ctacctaataaacctaaaactcaaaataaatcaatctctctctaaaaaac

SEQ ID NO: 7756 - DNA, 50 bp, synthetic construct
  source 1..50: mol_type = other DNA
actaaaccaaaacataaaccatcctcaatataaaaaacaattactaccrc

SEQ ID NO: 7757 - DNA, 50 bp, synthetic construct
  source 1..50: mol_type = other DNA
taactaaaccaaaacataaaccatcctcaatataaaaaacaattactacc

SEQ ID NO: 7758 - DNA, 50 bp, synthetic construct
  source 1..50: mol_type = other DNA
taaaaacatattaacaaattttaactattataaaaaacctaatactaaac

SEQ ID NO: 7759 - DNA, 50 bp, synthetic construct
  source 1..50: mol_type = other DNA
aacaaattttaactattataaaaaacctaatactaaacrcrataactcac

SEQ ID NO: 7760 - DNA, 50 bp, synthetic construct
  source 1..50: mol_type = other DNA
aactaatctaaaacttctaaactcaaacratctacctaccttaacctccc

SEQ ID NO: 7761 - DNA, 50 bp, synthetic construct
  source 1..50: mol_type = other DNA
cactactataaactctcaacttatacaatttcaacrcccttaacctccac

SEQ ID NO: 7762 - DNA, 50 bp, synthetic construct
  source 1..50: mol_type = other DNA
taaaaaaacaccacrcactactataaactctcaacttatacaatttcaac

SEQ ID NO: 7763 - DNA, 50 bp, synthetic construct
  source 1..50: mol_type = other DNA
ctaaaaactcacaacaatacrtaatacctcttcaactaaaatactcaccc

SEQ ID NO: 7764 - DNA, 50 bp, synthetic construct
  source 1..50: mol_type = other DNA
craaaacacccrtacrtataccaaaacataaaaatttcccaaaaaacrac

SEQ ID NO: 7765 - DNA, 50 bp, synthetic construct
  source 1..50: mol_type = other DNA
acrtataccaaaacataaaaatttcccaaaaaacracrttaaaactaaac

SEQ ID NO: 7766 - DNA, 50 bp, synthetic construct
  source 1..50: mol_type = other DNA
aatccttaaaaaaaatacraaacttaaacctttttcctaaactatacttc

SEQ ID NO: 7767 - DNA, 50 bp, synthetic construct
  source 1..50: mol_type = other DNA
aaatacraaacttaaacctttttcctaaactatacttcrcaaaataaacc

SEQ ID NO: 7768 - DNA, 50 bp, synthetic construct
  source 1..50: mol_type = other DNA
tatcaaaactacctaaaacctacaaccraaatctctatactacctactac

SEQ ID NO: 7769 - DNA, 50 bp, synthetic construct
  source 1..50: mol_type = other DNA
cctaaaaacctaatcrctcctactactcttataaaaacracccaaaaaac

SEQ ID NO: 7770 - DNA, 50 bp, synthetic construct
  source 1..50: mol_type = other DNA
cactatcattaccactaaaccaaaaaaccctctaataaccctatctaaac

SEQ ID NO: 7771 - DNA, 50 bp, synthetic construct
  source 1..50: mol_type = other DNA
cctaatctaataataataacaatacctaaaaaaacacctattacttaacc

SEQ ID NO: 7772 - DNA, 50 bp, synthetic construct
  source 1..50: mol_type = other DNA
atcaaaccttccacaaaaaataataaaacaaaatcttctctaacccctcc

SEQ ID NO: 7773 - DNA, 50 bp, synthetic construct
  source 1..50: mol_type = other DNA
ctataatactatacttcaacratcacrctcctatttcactttcatattcc

SEQ ID NO: 7774 - DNA, 50 bp, synthetic construct
  source 1..50: mol_type = other DNA
ttaaaatacataaaaaaaataataacrtaaactatctcctctctctctcc

SEQ ID NO: 7775 - DNA, 50 bp, synthetic construct
  source 1..50: mol_type = other DNA
tataaatcatctccaataataaatcaaatcacrcaaatcacrtatccacc

SEQ ID NO: 7776 - DNA, 50 bp, synthetic construct
  source 1..50: mol_type = other DNA
aataaaaaatataaatcatctccaataataaatcaaatcacrcaaatcac

SEQ ID NO: 7777 - DNA, 50 bp, synthetic construct
  source 1..50: mol_type = other DNA
aaaaaaaacctctcacctctcctaatctaactctacacaaaactaaaacc

SEQ ID NO: 7778 - DNA, 50 bp, synthetic construct
  source 1..50: mol_type = other DNA
acaaaacttaaccaacraaaaaaaccacaaaaacraacttctatacracc

SEQ ID NO: 7779 - DNA, 50 bp, synthetic construct
  source 1..50: mol_type = other DNA
taacacaaaacttaaccaacraaaaaaaccacaaaaacraacttctatac

SEQ ID NO: 7780 - DNA, 50 bp, synthetic construct
  source 1..50: mol_type = other DNA
taacaaacctcttaacacaaaacttaaccaacraaaaaaaccacaaaaac

SEQ ID NO: 7781 - DNA, 50 bp, synthetic construct
  source 1..50: mol_type = other DNA
taaccaaaaaaataactacaaacaacctaaaacttaaactcataactaac

SEQ ID NO: 7782 - DNA, 50 bp, synthetic construct
  source 1..50: mol_type = other DNA
taaaacttaaactcataactaacrttctataataaaaccaataaacctac

SEQ ID NO: 7783 - DNA, 50 bp, synthetic construct
  source 1..50: mol_type = other DNA
aaactcataactaacrttctataataaaaccaataaacctacraatatcc

SEQ ID NO: 7784 - DNA, 50 bp, synthetic construct
  source 1..50: mol_type = other DNA
cctatacccttctattttccttttaacttattaataattttcttcttaac

SEQ ID NO: 7785 - DNA, 50 bp, synthetic construct
  source 1..50: mol_type = other DNA
aactactatccraacaaaaacatttaatacaaacaaaataacttaacrtc

SEQ ID NO: 7786 - DNA, 50 bp, synthetic construct
  source 1..50: mol_type = other DNA
cacatcaacactaacattaaaaaacctttattttaaatctcaccttcccc

SEQ ID NO: 7787 - DNA, 50 bp, synthetic construct
  source 1..50: mol_type = other DNA
ctaatattaatactaatatactcaccccaaccatactactcaatattaac

SEQ ID NO: 7788 - DNA, 50 bp, synthetic construct
  source 1..50: mol_type = other DNA
aaaataccctaaaaaataattcaaaacaaataaaacaaccttaacttacc

SEQ ID NO: 7789 - DNA, 50 bp, synthetic construct
  source 1..50: mol_type = other DNA
accraaaaaactccctttctaaaaaatcttatataattattcataaaaac

SEQ ID NO: 7790 - DNA, 50 bp, synthetic construct
  source 1..50: mol_type = other DNA
caaatatatacaactactatacctaaacactcaaaaaacccrcccccacc

SEQ ID NO: 7791 - DNA, 50 bp, synthetic construct
  source 1..50: mol_type = other DNA
acraatcctctaaatacccaaacacaataactatacacacttattcatac

SEQ ID NO: 7792 - DNA, 50 bp, synthetic construct
  source 1..50: mol_type = other DNA
tatacacacttattcatacrtcacatatctcattaacatcttaaatctcc

SEQ ID NO: 7793 - DNA, 50 bp, synthetic construct
  source 1..50: mol_type = other DNA
caatcracaaatacactttaattttatctatcctcaaactaaccctctac

SEQ ID NO: 7794 - DNA, 50 bp, synthetic construct
  source 1..50: mol_type = other DNA
atctaactctttcaaacaattatctacaataaacaacrtctcctacaatc

SEQ ID NO: 7795 - DNA, 50 bp, synthetic construct
  source 1..50: mol_type = other DNA
catttacactataatctaactctttcaaacaattatctacaataaacaac

SEQ ID NO: 7796 - DNA, 50 bp, synthetic construct
  source 1..50: mol_type = other DNA
aaatcctcataaattcaattctcatactttaatcattatcaaaacacccc

SEQ ID NO: 7797 - DNA, 50 bp, synthetic construct
  source 1..50: mol_type = other DNA
acaataacaaaactaaaaatccaactaatatattacattaaaatcacctc

SEQ ID NO: 7798 - DNA, 50 bp, synthetic construct
  source 1..50: mol_type = other DNA
ctccraaaactactaaaacccaacaaaaccraaatcaaaaaacaatatcc

SEQ ID NO: 7799 - DNA, 50 bp, synthetic construct
  source 1..50: mol_type = other DNA
atatttacaaaatttataaacaaacaatcacctcrtatttacaaaactcc

SEQ ID NO: 7800 - DNA, 50 bp, synthetic construct
  source 1..50: mol_type = other DNA
acraaataactatctacctacaaactttataaacatcacttaaaataacc

SEQ ID NO: 7801 - DNA, 50 bp, synthetic construct
  source 1..50: mol_type = other DNA
ctcaaaacctacccatataataacaaaacrttctcactataaaaccaaac

SEQ ID NO: 7802 - DNA, 50 bp, synthetic construct
  source 1..50: mol_type = other DNA
aaaaaccaaaccracaaaactctcaaaacctacccatataataacaaaac

SEQ ID NO: 7803 - DNA, 50 bp, synthetic construct
  source 1..50: mol_type = other DNA
cacaataaaaacrctttactatcacataaacaaactctaaaaaccctacc

SEQ ID NO: 7804 - DNA, 50 bp, synthetic construct
  source 1..50: mol_type = other DNA
ataaaacccaaaaaacccaaaaaacctaccctaaaatcacacaaaaaacc

SEQ ID NO: 7805 - DNA, 50 bp, synthetic construct
  source 1..50: mol_type = other DNA
taaaaacaaccatcactataaaacactttacaaatccaaaaacaaccccc

SEQ ID NO: 7806 - DNA, 50 bp, synthetic construct
  source 1..50: mol_type = other DNA
acaaatccaaaaacaacccccracaaaaactcaaaataaaactccctctc

SEQ ID NO: 7807 - DNA, 50 bp, synthetic construct
  source 1..50: mol_type = other DNA
cracaaaaactcaaaataaaactccctctcrcaaaacacaattccaattc

SEQ ID NO: 7808 - DNA, 50 bp, synthetic construct
  source 1..50: mol_type = other DNA
cctccccaaaaccaaatctacaaaaaaataaaactcrctcattcaaaaac

SEQ ID NO: 7809 - DNA, 50 bp, synthetic construct
  source 1..50: mol_type = other DNA
ataccraaataaacatatctatcaccacaactatacaaaaactataactc

SEQ ID NO: 7810 - DNA, 50 bp, synthetic construct
  source 1..50: mol_type = other DNA
aaaacccaatattccattatttcaaatcattaaattcctcccctacaacc

SEQ ID NO: 7811 - DNA, 50 bp, synthetic construct
  source 1..50: mol_type = other DNA
accttataaaacaacraccaaatctaccrttaaatcacaaacacaaaacc

SEQ ID NO: 7812 - DNA, 50 bp, synthetic construct
  source 1..50: mol_type = other DNA
tctacaatataccaaacactataccttataaaacaacraccaaatctacc

SEQ ID NO: 7813 - DNA, 50 bp, synthetic construct
  source 1..50: mol_type = other DNA
ttaaattaatttcacrattctatacttataactcaacracaaacctaacc

SEQ ID NO: 7814 - DNA, 50 bp, synthetic construct
  source 1..50: mol_type = other DNA
crctacttcacaaaacacaatacctaacacactacaaacrctcaaaaaac

SEQ ID NO: 7815 - DNA, 50 bp, synthetic construct
  source 1..50: mol_type = other DNA
acacaatacctaacacactacaaacrctcaaaaaacrctatatacttaac

SEQ ID NO: 7816 - DNA, 50 bp, synthetic construct
  source 1..50: mol_type = other DNA
aatcccrataaattttataacaaataacctaaacrtactatatacttaac

SEQ ID NO: 7817 - DNA, 50 bp, synthetic construct
  source 1..50: mol_type = other DNA
ttataacaaataacctaaacrtactatatacttaacrcttttccaaatcc

SEQ ID NO: 7818 - DNA, 50 bp, synthetic construct
  source 1..50: mol_type = other DNA
tacacccataaaatttccccraaactataactctaacrtaccaaaaatac

SEQ ID NO: 7819 - DNA, 50 bp, synthetic construct
  source 1..50: mol_type = other DNA
caaaaaaaataaccatcatatctactataacctcrcaactccraaaaacc

SEQ ID NO: 7820 - DNA, 50 bp, synthetic construct
  source 1..50: mol_type = other DNA
tccataaacaaaaacrcaaaaaaaataaccatcatatctactataacctc

SEQ ID NO: 7821 - DNA, 50 bp, synthetic construct
  source 1..50: mol_type = other DNA
ttaactaaaaacaaaatctttcctacrtataactttaacaacatataacc

SEQ ID NO: 7822 - DNA, 50 bp, synthetic construct
  source 1..50: mol_type = other DNA
actaaaaacaaaatctttcctacrtataactttaacaacatataaccrtc

SEQ ID NO: 7823 - DNA, 50 bp, synthetic construct
  source 1..50: mol_type = other DNA
cccccctccaaaacaattacttttacaaataaccaaatataaaaccaacc

SEQ ID NO: 7824 - DNA, 50 bp, synthetic construct
  source 1..50: mol_type = other DNA
aaacaattacttttacaaataaccaaatataaaaccaaccrcratattac

SEQ ID NO: 7825 - DNA, 50 bp, synthetic construct
  source 1..50: mol_type = other DNA
aaataaccaaatataaaaccaaccrcratattacraacactttcaatttc

SEQ ID NO: 7826 - DNA, 50 bp, synthetic construct
  source 1..50: mol_type = other DNA
taccacaaaataaaaaaatccctaaaattaccatcctaatcaaaacaacc

SEQ ID NO: 7827 - DNA, 50 bp, synthetic construct
  source 1..50: mol_type = other DNA
actttacaaacttactaaaaaataaataatacctaaaccttctaaaatcc

SEQ ID NO: 7828 - DNA, 50 bp, synthetic construct
  source 1..50: mol_type = other DNA
aaaataaataatacctaaaccttctaaaatccrtcaaatataaaataaac

SEQ ID NO: 7829 - DNA, 50 bp, synthetic construct
  source 1..50: mol_type = other DNA
aataaaatctcattattccaaataaacacaacrtttccaatactttcctc

SEQ ID NO: 7830 - DNA, 50 bp, synthetic construct
  source 1..50: mol_type = other DNA
ctaaactacaaaacatatctttctaaaatctataaaccacaactataatc

SEQ ID NO: 7831 - DNA, 50 bp, synthetic construct
  source 1..50: mol_type = other DNA
taaaccacaactataatcrtcataaccaacaataacaccctaaatacaac

SEQ ID NO: 7832 - DNA, 50 bp, synthetic construct
  source 1..50: mol_type = other DNA
cactaatataacaaacaaacaaaactccrcttaaaaaaccaccaactcrc

SEQ ID NO: 7833 - DNA, 50 bp, synthetic construct
  source 1..50: mol_type = other DNA
ttcactaatataacaaacaaacaaaactccrcttaaaaaaccaccaactc

SEQ ID NO: 7834 - DNA, 50 bp, synthetic construct
  source 1..50: mol_type = other DNA
tttactcaaataatcctacattcactaatataacaaacaaacaaaactcc

SEQ ID NO: 7835 - DNA, 50 bp, synthetic construct
  source 1..50: mol_type = other DNA
atccaaacttatataaatcacaataaacaaaaaacattcttccacccrac

SEQ ID NO: 7836 - DNA, 50 bp, synthetic construct
  source 1..50: mol_type = other DNA
ctcacacaaacttaaataaaacactctaaaaaaattctaatttcaaatcc

SEQ ID NO: 7837 - DNA, 50 bp, synthetic construct
  source 1..50: mol_type = other DNA
aattctaatttcaaatccraaaataaaaactacaatatttattcrcctcc

SEQ ID NO: 7838 - DNA, 50 bp, synthetic construct
  source 1..50: mol_type = other DNA
aaaaaccaaaattctacaaaaacraatataatccaaaactctaacraaac

SEQ ID NO: 7839 - DNA, 50 bp, synthetic construct
  source 1..50: mol_type = other DNA
attacaccccattccattataatcactattaaatctacattccacacaac

SEQ ID NO: 7840 - DNA, 50 bp, synthetic construct
  source 1..50: mol_type = other DNA
tctttattttcaattcrctttataactaaattccactctatcctatttcc

SEQ ID NO: 7841 - DNA, 50 bp, synthetic construct
  source 1..50: mol_type = other DNA
tcaaaattttaactcatatataatcccaataacatctttattttcaattc

SEQ ID NO: 7842 - DNA, 50 bp, synthetic construct
  source 1..50: mol_type = other DNA
ataacaacrttaactcttttaccaattataaaactaaaactaaaacccac

SEQ ID NO: 7843 - DNA, 50 bp, synthetic construct
  source 1..50: mol_type = other DNA
tttaaatcrtaaactttaaccccaactctacaactaataaaaaaaccaac

SEQ ID NO: 7844 - DNA, 50 bp, synthetic construct
  source 1..50: mol_type = other DNA
tctacaactaataaaaaaaccaacrttatcacataatctcaaaaaacctc

SEQ ID NO: 7845 - DNA, 50 bp, synthetic construct
  source 1..50: mol_type = other DNA
acaataaaattttaataccaaacrttaccatcttcccatcratacatttc

SEQ ID NO: 7846 - DNA, 50 bp, synthetic construct
  source 1..50: mol_type = other DNA
tcracctaaaacaataaaattttaataccaaacrttaccatcttcccatc

SEQ ID NO: 7847 - DNA, 50 bp, synthetic construct
  source 1..50: mol_type = other DNA
acaacttaacctcaaaaaacccctaacrcttcttatcaaaaaaaatatac

SEQ ID NO: 7848 - DNA, 50 bp, synthetic construct
  source 1..50: mol_type = other DNA
acttccttctctaaaaaataaatatacrtacacttcccctaataaaaaac

SEQ ID NO: 7849 - DNA, 50 bp, synthetic construct
  source 1..50: mol_type = other DNA
aaaattactactaattttaccctaactttaaataacactctaaattcctc

SEQ ID NO: 7850 - DNA, 50 bp, synthetic construct
  source 1..50: mol_type = other DNA
aaaaacaacaaatttaaatttaaatacataaaactaaaatatacattccc

SEQ ID NO: 7851 - DNA, 50 bp, synthetic construct
  source 1..50: mol_type = other DNA
cataaattacctataacaaaaactacaaaaccacaaacatcttttcttac

SEQ ID NO: 7852 - DNA, 50 bp, synthetic construct
  source 1..50: mol_type = other DNA
ctacaacccacacctaacccaaaacctatttttatcaataatattttatc

SEQ ID NO: 7853 - DNA, 50 bp, synthetic construct
  source 1..50: mol_type = other DNA
ctaacccaaaacctatttttatcaataatattttatcraaacacaaacac

SEQ ID NO: 7854 - DNA, 50 bp, synthetic construct
  source 1..50: mol_type = other DNA
attttatcraaacacaaacacrtccattcatttatatatcacctacaacc

SEQ ID NO: 7855 - DNA, 50 bp, synthetic construct
  source 1..50: mol_type = other DNA
tatatatcacctacaaccrtattcacactccaacaacaaaaataaatatc

SEQ ID NO: 7856 - DNA, 50 bp, synthetic construct
  source 1..50: mol_type = other DNA
acttcttctatattaacrtcatatcctttatcttcaaattttcctttttc

SEQ ID NO: 7857 - DNA, 50 bp, synthetic construct
  source 1..50: mol_type = other DNA
crtcaccaaacttatcttaacatatacrtctcttctacctcaaaattcac

SEQ ID NO: 7858 - DNA, 50 bp, synthetic construct
  source 1..50: mol_type = other DNA
cttcacaaaacraactaacctctcataactaacaaaatcccraaattacc

SEQ ID NO: 7859 - DNA, 50 bp, synthetic construct
  source 1..50: mol_type = other DNA
atctccctaattctacattctaaaaaaaacataatcacccttcacaaaac

SEQ ID NO: 7860 - DNA, 50 bp, synthetic construct
  source 1..50: mol_type = other DNA
rcaaaaacctcatttcaaacctacctcttcatcrataaatcacataatac

SEQ ID NO: 7861 - DNA, 50 bp, synthetic construct
  source 1..50: mol_type = other DNA
aacaaaacctaaaacccccatctttccaaaaataacracaaccaaataac

SEQ ID NO: 7862 - DNA, 50 bp, synthetic construct
  source 1..50: mol_type = other DNA
ttttcctctttaacaacaaaacctaaaacccccatctttccaaaaataac

SEQ ID NO: 7863 - DNA, 50 bp, synthetic construct
  source 1..50: mol_type = other DNA
aactaacaaattcaacaaaacataaaaaaatctattaacacaatttacac

SEQ ID NO: 7864 - DNA, 50 bp, synthetic construct
  source 1..50: mol_type = other DNA
catcacactatctatataaaattcaaattccttccaataccataaataac

SEQ ID NO: 7865 - DNA, 50 bp, synthetic construct
  source 1..50: mol_type = other DNA
cataaataacrccaataataaactatatttaaccataataacccattaac

SEQ ID NO: 7866 - DNA, 50 bp, synthetic construct
  source 1..50: mol_type = other DNA
caaaatttcaacraaaactaaacraaataaaactcaaaacctaacacctc

SEQ ID NO: 7867 - DNA, 50 bp, synthetic construct
  source 1..50: mol_type = other DNA
atatacactcacraaataccaaactctaaattttatctcrtctaattctc

SEQ ID NO: 7868 - DNA, 50 bp, synthetic construct
  source 1..50: mol_type = other DNA
craaaatctcttaaacccaaaaaatcaaaactacaataaaccatcatcrc

SEQ ID NO: 7869 - DNA, 50 bp, synthetic construct
  source 1..50: mol_type = other DNA
tacraaaatctcttaaacccaaaaaatcaaaactacaataaaccatcatc

SEQ ID NO: 7870 - DNA, 50 bp, synthetic construct
  source 1..50: mol_type = other DNA
crcrataataattcactacaaccttaacttcctaaactcaaaaaattctc

SEQ ID NO: 7871 - DNA, 50 bp, synthetic construct
  source 1..50: mol_type = other DNA
tactaaaccaaacccaacatcraacaaacaaattaaatctaaacaacacc

SEQ ID NO: 7872 - DNA, 50 bp, synthetic construct
  source 1..50: mol_type = other DNA
aaatctaaacaacaccrcctactaaccctaccccactaaataataataac

SEQ ID NO: 7873 - DNA, 50 bp, synthetic construct
  source 1..50: mol_type = other DNA
ctaaataataataacracractactctcctttataaaacccctcccctac

SEQ ID NO: 7874 - DNA, 50 bp, synthetic construct
  source 1..50: mol_type = other DNA
caaacaacraaactacractaaacttataactaaaaacaaaactaaaccc

SEQ ID NO: 7875 - DNA, 50 bp, synthetic construct
  source 1..50: mol_type = other DNA
aaccccacctatactacttaactatataaccttaaacaaacaaaatcacc

SEQ ID NO: 7876 - DNA, 50 bp, synthetic construct
  source 1..50: mol_type = other DNA
taactatataaccttaaacaaacaaaatcaccrcaactaataactcatcc

SEQ ID NO: 7877 - DNA, 50 bp, synthetic construct
  source 1..50: mol_type = other DNA
atattaacaatcacataattataaccatccaaaatactcacaacatcctc

SEQ ID NO: 7878 - DNA, 50 bp, synthetic construct
  source 1..50: mol_type = other DNA
aattatataactatcaacactattattaacaataataacaactatatccc

SEQ ID NO: 7879 - DNA, 50 bp, synthetic construct
  source 1..50: mol_type = other DNA
actatcaacactattattaacaataataacaactatatcccrtataaaac

SEQ ID NO: 7880 - DNA, 50 bp, synthetic construct
  source 1..50: mol_type = other DNA
ctaaaccaacrttttttacataaaaacrtcactcactcttccaacaacac

SEQ ID NO: 7881 - DNA, 50 bp, synthetic construct
  source 1..50: mol_type = other DNA
aaaccctaaaaaacaacttcraaaacctattcctaataataactatatac

SEQ ID NO: 7882 - DNA, 50 bp, synthetic construct
  source 1..50: mol_type = other DNA
aaacctattcctaataataactatatacrccaacctaaccaacatttacc

SEQ ID NO: 7883 - DNA, 50 bp, synthetic construct
  source 1..50: mol_type = other DNA
craacaaactacaaaatatccaaaaccaccraactctacccataaaacac

SEQ ID NO: 7884 - DNA, 50 bp, synthetic construct
  source 1..50: mol_type = other DNA
crtacttcataaacaaaacccrataaccctaaacatcctacaatctatcc

SEQ ID NO: 7885 - DNA, 50 bp, synthetic construct
  source 1..50: mol_type = other DNA
crataaccctaaacatcctacaatctatccraaatacaataataaccaac

SEQ ID NO: 7886 - DNA, 50 bp, synthetic construct
  source 1..50: mol_type = other DNA
tcctacaatctatccraaatacaataataaccaacraaaaccaaaaaaac

SEQ ID NO: 7887 - DNA, 50 bp, synthetic construct
  source 1..50: mol_type = other DNA
caataataaccaacraaaaccaaaaaaacrtaattaccaacataataacc

SEQ ID NO: 7888 - DNA, 50 bp, synthetic construct
  source 1..50: mol_type = other DNA
aaccaaaaaaacrtaattaccaacataataaccrtaactctaaaaaaaac

SEQ ID NO: 7889 - DNA, 50 bp, synthetic construct
  source 1..50: mol_type = other DNA
ctcraaacctaaaccaacaaaaaaaccaaacaataaaactaaccaacttc

SEQ ID NO: 7890 - DNA, 50 bp, synthetic construct
  source 1..50: mol_type = other DNA
aaaaaccaaacaataaaactaaccaacttcraaaccctatacctacatac

SEQ ID NO: 7891 - DNA, 50 bp, synthetic construct
  source 1..50: mol_type = other DNA
actacctacccattaaataataaccacaaaaacaaaatctaaaaactacc

SEQ ID NO: 7892 - DNA, 50 bp, synthetic construct
  source 1..50: mol_type = other DNA
tacctacccattaaataataaccacaaaaacaaaatctaaaaactaccrc

SEQ ID NO: 7893 - DNA, 50 bp, synthetic construct
  source 1..50: mol_type = other DNA
ccaaaaataccccrttcrtaataaaacaaacttcattttatcacraaacc

SEQ ID NO: 7894 - DNA, 50 bp, synthetic construct
  source 1..50: mol_type = other DNA
aactttccaaaaataccccrttcrtaataaaacaaacttcattttatcac

SEQ ID NO: 7895 - DNA, 50 bp, synthetic construct
  source 1..50: mol_type = other DNA
accctaaaccaaaaacaatctctaaaaattctactcactttataaatccc

SEQ ID NO: 7896 - DNA, 50 bp, synthetic construct
  source 1..50: mol_type = other DNA
aaccaaaaacaatctctaaaaattctactcactttataaatcccrtcctc

SEQ ID NO: 7897 - DNA, 50 bp, synthetic construct
  source 1..50: mol_type = other DNA
aaaattatatttacaaattaaaccaaattctcraaactcctcttaaaacc

SEQ ID NO: 7898 - DNA, 50 bp, synthetic construct
  source 1..50: mol_type = other DNA
aaacacaacctcctccaaaaacatcaacaatccctaaaatatacatttcc

SEQ ID NO: 7899 - DNA, 50 bp, synthetic construct
  source 1..50: mol_type = other DNA
aatccctaaaatatacatttccraatccattattcttatccatcctcaac

SEQ ID NO: 7900 - DNA, 50 bp, synthetic construct
  source 1..50: mol_type = other DNA
actctcctacttcaaattcataatcaaaaccctcaaatactactaacccc

SEQ ID NO: 7901 - DNA, 50 bp, synthetic construct
  source 1..50: mol_type = other DNA
tttaaatataactaacaacatctcaaaaacccataccrtacatacrcccc

SEQ ID NO: 7902 - DNA, 50 bp, synthetic construct
  source 1..50: mol_type = other DNA
caaactttaaatataactaacaacatctcaaaaacccataccrtacatac

SEQ ID NO: 7903 - DNA, 50 bp, synthetic construct
  source 1..50: mol_type = other DNA
aaatacracaaactttaaatataactaacaacatctcaaaaacccatacc

SEQ ID NO: 7904 - DNA, 50 bp, synthetic construct
  source 1..50: mol_type = other DNA
atacacracataaacctctaaaatactaccaactacacccaaaacctacc

SEQ ID NO: 7905 - DNA, 50 bp, synthetic construct
  source 1..50: mol_type = other DNA
ccrcatttctaacacatttcttccacaaaatatctttcaatcttctaacc

SEQ ID NO: 7906 - DNA, 50 bp, synthetic construct
  source 1..50: mol_type = other DNA
tcttccacaaaatatctttcaatcttctaaccrtttatcactttacaaac

SEQ ID NO: 7907 - DNA, 50 bp, synthetic construct
  source 1..50: mol_type = other DNA
aacrcatcactaccctcactatctctaaaaaaaaccaatctaaatatccc

SEQ ID NO: 7908 - DNA, 50 bp, synthetic construct
  source 1..50: mol_type = other DNA
caaatcctaactctccctactcctttacatcttaactactaaaccttaac

SEQ ID NO: 7909 - DNA, 50 bp, synthetic construct
  source 1..50: mol_type = other DNA
cttaacraaaaaatcccctaacctctctcaatatcttcatttctaaaaac

SEQ ID NO: 7910 - DNA, 50 bp, synthetic construct
  source 1..50: mol_type = other DNA
aaaaaaatcrtatataaaacrcaaaacctcctctaacaattaaacrttac

SEQ ID NO: 7911 - DNA, 50 bp, synthetic construct
  source 1..50: mol_type = other DNA
taatatcaaaaataaataacrctaacaaacrcctccttatctacrtaacc

SEQ ID NO: 7912 - DNA, 50 bp, synthetic construct
  source 1..50: mol_type = other DNA
ccaaaaaaaatcctacttataaccaaccccattattccacractatttcc

SEQ ID NO: 7913 - DNA, 50 bp, synthetic construct
  source 1..50: mol_type = other DNA
tctcaaccacaaaaaaatttaatttataacaaaaatacacttatttacac

SEQ ID NO: 7914 - DNA, 50 bp, synthetic construct
  source 1..50: mol_type = other DNA
tcttacctaatcctcatttcctatcccatataataacttttaccaataac

SEQ ID NO: 7915 - DNA, 50 bp, synthetic construct
  source 1..50: mol_type = other DNA
attctatttatattaaaacttaattcttcatttacaactcaaaaaacccc

SEQ ID NO: 7916 - DNA, 50 bp, synthetic construct
  source 1..50: mol_type = other DNA
atctccatcttcttccaaatatttaatttcttttccaatccttccccacc

SEQ ID NO: 7917 - DNA, 50 bp, synthetic construct
  source 1..50: mol_type = other DNA
ccctctccaaaaaaccccttcccacraaacccaaaaaatttaataaaatc

SEQ ID NO: 7918 - DNA, 50 bp, synthetic construct
  source 1..50: mol_type = other DNA
atcacraaatcaaaaaatcaaaaccatctttactaacataataaaacccc

SEQ ID NO: 7919 - DNA, 50 bp, synthetic construct
  source 1..50: mol_type = other DNA
ttataaattataaattcaaaactctaccctataaacttatatccttaccc

SEQ ID NO: 7920 - DNA, 50 bp, synthetic construct
  source 1..50: mol_type = other DNA
ttataaattcaaaactctaccctataaacttatatccttacccraaaaac

SEQ ID NO: 7921 - DNA, 50 bp, synthetic construct
  source 1..50: mol_type = other DNA
taaaaccactattatctacaaaaaatataattaccctactaatactatac

SEQ ID NO: 7922 - DNA, 50 bp, synthetic construct
  source 1..50: mol_type = other DNA
cataaacaacttctacataactatactctctccctaaacaaaaacraacc

SEQ ID NO: 7923 - DNA, 50 bp, synthetic construct
  source 1..50: mol_type = other DNA
tattatctacaaaaaatataattaccctactaatactatacrttcractc

SEQ ID NO: 7924 - DNA, 50 bp, synthetic construct
  source 1..50: mol_type = other DNA
aaaaaaatacaattatcacatcctaataatttcatctcccttaccccaac

SEQ ID NO: 7925 - DNA, 50 bp, synthetic construct
  source 1..50: mol_type = other DNA
aatacaattatcacatcctaataatttcatctcccttaccccaacraatc

SEQ ID NO: 7926 - DNA, 50 bp, synthetic construct
  source 1..50: mol_type = other DNA
aacttataacttataattattaaaactttctctactacaaacctactatc

SEQ ID NO: 7927 - DNA, 50 bp, synthetic construct
  source 1..50: mol_type = other DNA
aaactttatcaataatcccaacaacacactctactactaataaccatctc

SEQ ID NO: 7928 - DNA, 50 bp, synthetic construct
  source 1..50: mol_type = other DNA
ttcctaaaaaactacaaacccaaaaaatctataatttaaacatcaatacc

SEQ ID NO: 7929 - DNA, 50 bp, synthetic construct
  source 1..50: mol_type = other DNA
taaaaaaacaattcaaaccaaaacctccaaaaactaactacaatttctac

SEQ ID NO: 7930 - DNA, 50 bp, synthetic construct
  source 1..50: mol_type = other DNA
tcaaaaaaccaaaaccaaaaaaaccaaaaaccaaaaataaaccctccacc

SEQ ID NO: 7931 - DNA, 50 bp, synthetic construct
  source 1..50: mol_type = other DNA
tttattcctaacccctaaccttcctaaccttaatcttttaaatacttacc

SEQ ID NO: 7932 - DNA, 50 bp, synthetic construct
  source 1..50: mol_type = other DNA
cttcctaaccttaatcttttaaatacttaccraatccctaattcctttcc

SEQ ID NO: 7933 - DNA, 50 bp, synthetic construct
  source 1..50: mol_type = other DNA
aatcatctttatttaaaaaatcctaacccctataatttattaatttattc

SEQ ID NO: 7934 - DNA, 50 bp, synthetic construct
  source 1..50: mol_type = other DNA
ctaatataacttcatcrctatacctttcaacaaaaaaaatataatctccc

SEQ ID NO: 7935 - DNA, 50 bp, synthetic construct
  source 1..50: mol_type = other DNA
tctctcaaacaaaacacacaaaatcrtaaccacctttcataaaaaacaac

SEQ ID NO: 7936 - DNA, 50 bp, synthetic construct
  source 1..50: mol_type = other DNA
aacrtcttctctatttaatttccatttcraaatcataaaataaacrtacc

SEQ ID NO: 7937 - DNA, 50 bp, synthetic construct
  source 1..50: mol_type = other DNA
raaaaaatcataaccccaatctcacataaaaaaatcaaaaccaaacatac

SEQ ID NO: 7938 - DNA, 50 bp, synthetic construct
  source 1..50: mol_type = other DNA
ctaaccctaatccctttatataaaactaaaatcataatcctcccrcaccc

SEQ ID NO: 7939 - DNA, 50 bp, synthetic construct
  source 1..50: mol_type = other DNA
tacatcccattaatatcttaaaaataattccaaaccttaaaaatacacac

SEQ ID NO: 7940 - DNA, 50 bp, synthetic construct
  source 1..50: mol_type = other DNA
accaaacaaaaataccatccatttccctatcattccctaatcctaacatc

SEQ ID NO: 7941 - DNA, 50 bp, synthetic construct
  source 1..50: mol_type = other DNA
aaccataccraaataaatttactataattccaaataaaaacaaaactatc

SEQ ID NO: 7942 - DNA, 50 bp, synthetic construct
  source 1..50: mol_type = other DNA
attaaataaaaaaatcaattactcaaaataccacataccrcaaccatacc

SEQ ID NO: 7943 - DNA, 50 bp, synthetic construct
  source 1..50: mol_type = other DNA
aacaacttacaattaaataaaaaaatcaattactcaaaataccacatacc

SEQ ID NO: 7944 - DNA, 50 bp, synthetic construct
  source 1..50: mol_type = other DNA
caacaaaaaatctaacttaaaacrcttttatctacaaccctctttaaaac

SEQ ID NO: 7945 - DNA, 50 bp, synthetic construct
  source 1..50: mol_type = other DNA
acctaaaatataaccaaaaaccaatatcaacaaaaaatctaacttaaaac

SEQ ID NO: 7946 - DNA, 50 bp, synthetic construct
  source 1..50: mol_type = other DNA
taatacaaaacccaacattacaaaataaactctatctcaaatttctactc

SEQ ID NO: 7947 - DNA, 50 bp, synthetic construct
  source 1..50: mol_type = other DNA
atattataaaaacaataaataaaattcaacaaacctcctataaaaatacc

SEQ ID NO: 7948 - DNA, 50 bp, synthetic construct
  source 1..50: mol_type = other DNA
ccrattcaacccacatcaccttaatcaaacaaaacttcaaccttattacc

SEQ ID NO: 7949 - DNA, 50 bp, synthetic construct
  source 1..50: mol_type = other DNA
caatctactttcctcaaatatctaatccaaactacaaatcataaatctcc

SEQ ID NO: 7950 - DNA, 50 bp, synthetic construct
  source 1..50: mol_type = other DNA
tccaaaaacaacacacattaacaaaaaacaaaattaacttccccraaaac

SEQ ID NO: 7951 - DNA, 50 bp, synthetic construct
  source 1..50: mol_type = other DNA
taaaaatccaaaaacaacacacattaacaaaaaacaaaattaacttcccc

SEQ ID NO: 7952 - DNA, 50 bp, synthetic construct
  source 1..50: mol_type = other DNA
tcactacacctttaaacaaattaaaatactctaataacatctaataaaac

SEQ ID NO: 7953 - DNA, 50 bp, synthetic construct
  source 1..50: mol_type = other DNA
aaactcacaccctttacattttaaaaataaaacttataaaacaacacrac

SEQ ID NO: 7954 - DNA, 50 bp, synthetic construct
  source 1..50: mol_type = other DNA
acattttaaaaataaaacttataaaacaacacracrtcccataaaccrac

SEQ ID NO: 7955 - DNA, 50 bp, synthetic construct
  source 1..50: mol_type = other DNA
ttttaaataacrcaaatccaaaaaaaaccacrtaaaaaatacccaaaacc

SEQ ID NO: 7956 - DNA, 50 bp, synthetic construct
  source 1..50: mol_type = other DNA
aattaccraatactaattttacaatactatataactacataaaacractc

SEQ ID NO: 7957 - DNA, 50 bp, synthetic construct
  source 1..50: mol_type = other DNA
caatactatataactacataaaacractcraaatatactattatcactcc

SEQ ID NO: 7958 - DNA, 50 bp, synthetic construct
  source 1..50: mol_type = other DNA
cttattattacttcaaaatattttaaaaaccctttaaattaacccatctc

SEQ ID NO: 7959 - DNA, 50 bp, synthetic construct
  source 1..50: mol_type = other DNA
tctttccaaaaaaccraaaaactactccaaatttactataacraacraac

SEQ ID NO: 7960 - DNA, 50 bp, synthetic construct
  source 1..50: mol_type = other DNA
aatttctttccaaaaaaccraaaaactactccaaatttactataacraac

SEQ ID NO: 7961 - DNA, 50 bp, synthetic construct
  source 1..50: mol_type = other DNA
taaaatactacctccaatcccaattaccctaaatttctttccaaaaaacc

SEQ ID NO: 7962 - DNA, 50 bp, synthetic construct
  source 1..50: mol_type = other DNA
atctatccctaaatccccatcaaactcractacaaacaattacctaaaac

SEQ ID NO: 7963 - DNA, 50 bp, synthetic construct
  source 1..50: mol_type = other DNA
tttacaaaactactcatctattcaacatatacacacrtttataaaaattc

SEQ ID NO: 7964 - DNA, 50 bp, synthetic construct
  source 1..50: mol_type = other DNA
caattatacacatctttacaaaactactcatctattcaacatatacacac

SEQ ID NO: 7965 - DNA, 50 bp, synthetic construct
  source 1..50: mol_type = other DNA
ttttttcctcttaatacactaaaactaaaccataatcattaccctaactc

SEQ ID NO: 7966 - DNA, 50 bp, synthetic construct
  source 1..50: mol_type = other DNA
cacaaccaacaaaactatttcctattctttatttcaaaactaaaatttac

SEQ ID NO: 7967 - DNA, 50 bp, synthetic construct
  source 1..50: mol_type = other DNA
ctaataaatcaataacccaaaccaaactaaaatccctacccctaaactcc

SEQ ID NO: 7968 - DNA, 50 bp, synthetic construct
  source 1..50: mol_type = other DNA
ccccacccataaaattatcatatctctacacacttaatattacttaaaac

SEQ ID NO: 7969 - DNA, 50 bp, synthetic construct
  source 1..50: mol_type = other DNA
cttaaaacrcctatattatatcataataaaaaatcaattaacctttttac

SEQ ID NO: 7970 - DNA, 50 bp, synthetic construct
  source 1..50: mol_type = other DNA
aacaaatacaaacaaaactcctttaaatttctttaccaaaataaacccac

SEQ ID NO: 7971 - DNA, 50 bp, synthetic construct
  source 1..50: mol_type = other DNA
ctaatccaaaattaacaacttcaaaacaaaatacctatcttaaaacaaac

SEQ ID NO: 7972 - DNA, 50 bp, synthetic construct
  source 1..50: mol_type = other DNA
ccttacaatttaaaaaacctaacattatctaaaaaatataacccaccctc

SEQ ID NO: 7973 - DNA, 50 bp, synthetic construct
  source 1..50: mol_type = other DNA
aatttaaaaaacctaacattatctaaaaaatataacccaccctcrttcac

SEQ ID NO: 7974 - DNA, 50 bp, synthetic construct
  source 1..50: mol_type = other DNA
aaacttaaactaaaaccaaactaccaacattacttaaattctccatccac

SEQ ID NO: 7975 - DNA, 50 bp, synthetic construct
  source 1..50: mol_type = other DNA
ttaaaaacaaaaatttcactatacaatattctacacctcatttccaaccc

SEQ ID NO: 7976 - DNA, 50 bp, synthetic construct
  source 1..50: mol_type = other DNA
taaaacaacaaatcaaactctcttctccccaaaattaataataataatac

SEQ ID NO: 7977 - DNA, 50 bp, synthetic construct
  source 1..50: mol_type = other DNA
cactctattcctttcttaaaccatatttctcatcttaaacaatcataccc

SEQ ID NO: 7978 - DNA, 50 bp, synthetic construct
  source 1..50: mol_type = other DNA
aaaaaccaaacaacaatctaccctaataaaaaacaacattatctaaaaac

SEQ ID NO: 7979 - DNA, 50 bp, synthetic construct
  source 1..50: mol_type = other DNA
tttcatataacccctaaatctaactcttaccctatttcctataaaaaaac

SEQ ID NO: 7980 - DNA, 50 bp, synthetic construct
  source 1..50: mol_type = other DNA
taataccttccaaaacttcacactccaaaacctctttcatttataaaatc

SEQ ID NO: 7981 - DNA, 50 bp, synthetic construct
  source 1..50: mol_type = other DNA
aacttcacactccaaaacctctttcatttataaaatcraattcctattcc

SEQ ID NO: 7982 - DNA, 50 bp, synthetic construct
  source 1..50: mol_type = other DNA
accctaaaataataatacaccaaatatcctacataaaaactctatccaac

SEQ ID NO: 7983 - DNA, 50 bp, synthetic construct
  source 1..50: mol_type = other DNA
tctattctacttcaaaacctatactataaaaccracttttaaataaaatc

SEQ ID NO: 7984 - DNA, 50 bp, synthetic construct
  source 1..50: mol_type = other DNA
tacaaacccraacactttctattctacttcaaaacctatactataaaacc

SEQ ID NO: 7985 - DNA, 50 bp, synthetic construct
  source 1..50: mol_type = other DNA
aactaattaaaactacaaccaaaaacaaaaacrtatctacctacaaaccc

SEQ ID NO: 7986 - DNA, 50 bp, synthetic construct
  source 1..50: mol_type = other DNA
actcrcccaatttcacaaaactaattaaaactacaaccaaaaacaaaaac

SEQ ID NO: 7987 - DNA, 50 bp, synthetic construct
  source 1..50: mol_type = other DNA
aaataaaaacctaacccttccacctttatacaattattataaaaatttcc

SEQ ID NO: 7988 - DNA, 50 bp, synthetic construct
  source 1..50: mol_type = other DNA
aaaccccaaattaaacaattattcttcctaaccaatacacctacattatc

SEQ ID NO: 7989 - DNA, 50 bp, synthetic construct
  source 1..50: mol_type = other DNA
ccaccaacaataaatacataataataatttctataaacaaattaatcccc

SEQ ID NO: 7990 - DNA, 50 bp, synthetic construct
  source 1..50: mol_type = other DNA
aaaccaccaatcttaaatcaaactaccttaaattcaaatcctaactctac

SEQ ID NO: 7991 - DNA, 50 bp, synthetic construct
  source 1..50: mol_type = other DNA
ataataaccacctcattaacattaaacaacrcctaaaaattaccaatcac

SEQ ID NO: 7992 - DNA, 50 bp, synthetic construct
  source 1..50: mol_type = other DNA
tacctaaataatctaaacctcttaactttcccaataatacrtcccacacc

SEQ ID NO: 7993 - DNA, 50 bp, synthetic construct
  source 1..50: mol_type = other DNA
crcctcttcttacctaaataatctaaacctcttaactttcccaataatac

SEQ ID NO: 7994 - DNA, 50 bp, synthetic construct
  source 1..50: mol_type = other DNA
crtaaataacraaataccaaacataaatacctaaacccactatcaaaccc

SEQ ID NO: 7995 - DNA, 50 bp, synthetic construct
  source 1..50: mol_type = other DNA
aaataccaaacataaatacctaaacccactatcaaacccraaaaatacac

SEQ ID NO: 7996 - DNA, 50 bp, synthetic construct
  source 1..50: mol_type = other DNA
taaaattcctcccaaaaaaccactaaaactttaaatacaaaaccataaac

SEQ ID NO: 7997 - DNA, 50 bp, synthetic construct
  source 1..50: mol_type = other DNA
taaccatccctattcaaaccraaatttccaaaaactaactactacccaac

SEQ ID NO: 7998 - DNA, 50 bp, synthetic construct
  source 1..50: mol_type = other DNA
tcacaattctcctctataaaatattatataatcaaatccaaaaaaactac

SEQ ID NO: 7999 - DNA, 50 bp, synthetic construct
  source 1..50: mol_type = other DNA
aaaatacccataatatctaatcctactatatacatatctcacaaaacctc

SEQ ID NO: 8000 - DNA, 50 bp, synthetic construct
  source 1..50: mol_type = other DNA
atctaactaataacattccacacccttcttaaaaaaactacaacaaactc

SEQ ID NO: 8001 - DNA, 50 bp, synthetic construct
  source 1..50: mol_type = other DNA
ctaaccaaataaccttaaacttaaaaaataacataaatataaatatcccc

SEQ ID NO: 8002 - DNA, 50 bp, synthetic construct
  source 1..50: mol_type = other DNA
tcaaaaacaatttcctatttcttaaaattaaaacaaaacctacctctaac

SEQ ID NO: 8003 - DNA, 50 bp, synthetic construct
  source 1..50: mol_type = other DNA
ataaaaaactatatatatatttctaaaccctacaactcacctacaacccc

SEQ ID NO: 8004 - DNA, 50 bp, synthetic construct
  source 1..50: mol_type = other DNA
ttctaaaacttcatatcaataattcaccaacccttttaatctataatcac

SEQ ID NO: 8005 - DNA, 50 bp, synthetic construct
  source 1..50: mol_type = other DNA
taatcctaaaaaaaacataatctaatataaaacrctaacactaactaaac

SEQ ID NO: 8006 - DNA, 50 bp, synthetic construct
  source 1..50: mol_type = other DNA
ccatttaactcacataactttcaataactttatctaatacccacaacaac

SEQ ID NO: 8007 - DNA, 50 bp, synthetic construct
  source 1..50: mol_type = other DNA
ctccaaaacccatcatcttaatttattctactatactacaattaataatc

SEQ ID NO: 8008 - DNA, 50 bp, synthetic construct
  source 1..50: mol_type = other DNA
acccatcatcttaatttattctactatactacaattaataatcrtaaaac

SEQ ID NO: 8009 - DNA, 50 bp, synthetic construct
  source 1..50: mol_type = other DNA
taaaaccttatcacttcacaactataccactacaacaacaacttctaaac

SEQ ID NO: 8010 - DNA, 50 bp, synthetic construct
  source 1..50: mol_type = other DNA
acacaacactaaatatattaattccaacttccraaacaaaaatatctaac

SEQ ID NO: 8011 - DNA, 50 bp, synthetic construct
  source 1..50: mol_type = other DNA
taaatatatattctatacacacaacactaaatatattaattccaacttcc

SEQ ID NO: 8012 - DNA, 50 bp, synthetic construct
  source 1..50: mol_type = other DNA
atctcctacttacatcaataaaatcaaatcatttaacaaccctaactcac

SEQ ID NO: 8013 - DNA, 50 bp, synthetic construct
  source 1..50: mol_type = other DNA
caactactaatctaaaaactacttaataataaatcccaaaacacaaaaac

SEQ ID NO: 8014 - DNA, 50 bp, synthetic construct
  source 1..50: mol_type = other DNA
ctacttaataataaatcccaaaacacaaaaacrttttcatccctcattac

SEQ ID NO: 8015 - DNA, 50 bp, synthetic construct
  source 1..50: mol_type = other DNA
tcaaatcaataatactactaccctcttatatattccaacaaaaactaacc

SEQ ID NO: 8016 - DNA, 50 bp, synthetic construct
  source 1..50: mol_type = other DNA
taacaaaaacctccaaaacccatacacaaaaataatctaattttacaaac

SEQ ID NO: 8017 - DNA, 50 bp, synthetic construct
  source 1..50: mol_type = other DNA
ctttactaacttaataatatccataacaactcaactccaaaaacctcrac

SEQ ID NO: 8018 - DNA, 50 bp, synthetic construct
  source 1..50: mol_type = other DNA
acactttactaacttaataatatccataacaactcaactccaaaaacctc

SEQ ID NO: 8019 - DNA, 50 bp, synthetic construct
  source 1..50: mol_type = other DNA
tttacttcatcaacatttatctctaatttaaatataaaaccaatacaacc

SEQ ID NO: 8020 - DNA, 50 bp, synthetic construct
  source 1..50: mol_type = other DNA
acracaaaatatatactctaaacaaatacaacctaataacaatcttcccc

SEQ ID NO: 8021 - DNA, 50 bp, synthetic construct
  source 1..50: mol_type = other DNA
aacttttacaatcaacttccaacaatctaataccrtataaaaactaacac

SEQ ID NO: 8022 - DNA, 50 bp, synthetic construct
  source 1..50: mol_type = other DNA
ttaaataacacacacaaacttttacaatcaacttccaacaatctaatacc

SEQ ID NO: 8023 - DNA, 50 bp, synthetic construct
  source 1..50: mol_type = other DNA
atatccaaatatatctctccccacaattaatcttataccttacaataatc

SEQ ID NO: 8024 - DNA, 50 bp, synthetic construct
  source 1..50: mol_type = other DNA
taaaacattactattcaaaaaataacctaaattcccttaatccactcccc

SEQ ID NO: 8025 - DNA, 50 bp, synthetic construct
  source 1..50: mol_type = other DNA
accaaaatttctcaaactttactatacacatccatctccctaaaacactc

SEQ ID NO: 8026 - DNA, 50 bp, synthetic construct
  source 1..50: mol_type = other DNA
cctaaaaatcccttcttatccctacttatacaaaaaatactcactatcac

SEQ ID NO: 8027 - DNA, 50 bp, synthetic construct
  source 1..50: mol_type = other DNA
acatctaaaattttaaaaacaacacaaataattccaatacataaccaacc

SEQ ID NO: 8028 - DNA, 50 bp, synthetic construct
  source 1..50: mol_type = other DNA
aacttaaaatacaaccaaaaaaacccaataataccttataattaaacaac

SEQ ID NO: 8029 - DNA, 50 bp, synthetic construct
  source 1..50: mol_type = other DNA
cttatataaataactttaaactccacatttccttatataaatcatatcac

SEQ ID NO: 8030 - DNA, 50 bp, synthetic construct
  source 1..50: mol_type = other DNA
aaattctaaataaaaacactaaacaaattaaaaccaaaaacatcattacc

SEQ ID NO: 8031 - DNA, 50 bp, synthetic construct
  source 1..50: mol_type = other DNA
tcaacaactatacaatccatacctaaaactaaccaacaatcctaatcaac

SEQ ID NO: 8032 - DNA, 50 bp, synthetic construct
  source 1..50: mol_type = other DNA
aataacraaatttaccttacatactactactaaaattttccatctcctcc

SEQ ID NO: 8033 - DNA, 50 bp, synthetic construct
  source 1..50: mol_type = other DNA
ataacatctctttcatcacccatacaaaaacaactataaatacaaaccac

SEQ ID NO: 8034 - DNA, 50 bp, synthetic construct
  source 1..50: mol_type = other DNA
taaaaacattacttaaaaaatacatatcccaactataactaatctattac

SEQ ID NO: 8035 - DNA, 50 bp, synthetic construct
  source 1..50: mol_type = other DNA
cctaactaactaatttcctacrtaaactactactaaacatactccaaaac

SEQ ID NO: 8036 - DNA, 50 bp, synthetic construct
  source 1..50: mol_type = other DNA
tcacaaatataattaaataacrtcttaaaatatacccaataacaacccac

SEQ ID NO: 8037 - DNA, 50 bp, synthetic construct
  source 1..50: mol_type = other DNA
ttatccactattttaaactaaaacaacccctcttaaatttactataattc

SEQ ID NO: 8038 - DNA, 50 bp, synthetic construct
  source 1..50: mol_type = other DNA
tataaaatcccaaaactcttcatctaaccttaacctaaaccaacatcaac

SEQ ID NO: 8039 - DNA, 50 bp, synthetic construct
  source 1..50: mol_type = other DNA
tctctacttaaactatatccctcaaacattctaaacacaattaacctacc

SEQ ID NO: 8040 - DNA, 50 bp, synthetic construct
  source 1..50: mol_type = other DNA
taattctaactaccctttccaattatttattttacacataaaaatacacc

SEQ ID NO: 8041 - DNA, 50 bp, synthetic construct
  source 1..50: mol_type = other DNA
aatttcaatataatattataatcacccataatactaactcacrtaatacc

SEQ ID NO: 8042 - DNA, 50 bp, synthetic construct
  source 1..50: mol_type = other DNA
cacatatttactaaacatctaccrtataccaaacctaaaaatacaacaac

SEQ ID NO: 8043 - DNA, 50 bp, synthetic construct
  source 1..50: mol_type = other DNA
cattccattcattccaatccaacccaacacatatttactaaacatctacc

SEQ ID NO: 8044 - DNA, 50 bp, synthetic construct
  source 1..50: mol_type = other DNA
taaaatacccaacaactacraacttccatttaaattttttctctctatac

SEQ ID NO: 8045 - DNA, 50 bp, synthetic construct
  source 1..50: mol_type = other DNA
aaaaatccrcaattactaaatactttaaaaatatctttctaaaaccraac

SEQ ID NO: 8046 - DNA, 50 bp, synthetic construct
  source 1..50: mol_type = other DNA
aaatccrcaattactaaatactttaaaaatatctttctaaaaccraacrc

SEQ ID NO: 8047 - DNA, 50 bp, synthetic construct
  source 1..50: mol_type = other DNA
aacttcctaaatttctacttattaatacacattataaatcctccaaaaac

SEQ ID NO: 8048 - DNA, 50 bp, synthetic construct
  source 1..50: mol_type = other DNA
aatcctccaaaaacratcctaaatcattcccttaattatatccatatacc

SEQ ID NO: 8049 - DNA, 50 bp, synthetic construct
  source 1..50: mol_type = other DNA
aatcaaaacctttcccacaaaaaatcaaaaattccaattctcaataaacc

SEQ ID NO: 8050 - DNA, 50 bp, synthetic construct
  source 1..50: mol_type = other DNA
cttctaattcaaaaccraaatcctcttaaaaattctcraaacaccttctc

SEQ ID NO: 8051 - DNA, 50 bp, synthetic construct
  source 1..50: mol_type = other DNA
racaatctaactctaaattaccacattacccttaacaatcctactctcac

SEQ ID NO: 8052 - DNA, 50 bp, synthetic construct
  source 1..50: mol_type = other DNA
attcccctaaacctcactacaaattaaacttttattcacctatttcaaac

SEQ ID NO: 8053 - DNA, 50 bp, synthetic construct
  source 1..50: mol_type = other DNA
aaaaataactatccaatcaattcctcaattcataaaaaaacatttaaaac

SEQ ID NO: 8054 - DNA, 50 bp, synthetic construct
  source 1..50: mol_type = other DNA
aaatctacttcaatacattaaaaaaataaccrctcttcctaaataatatc

SEQ ID NO: 8055 - DNA, 50 bp, synthetic construct
  source 1..50: mol_type = other DNA
ccacaatcctaaaaaaaataaatctacttcaatacattaaaaaaataacc

SEQ ID NO: 8056 - DNA, 50 bp, synthetic construct
  source 1..50: mol_type = other DNA
cracaattaaaaacaaattaaaaaactatatcattcactcaacctcaatc

SEQ ID NO: 8057 - DNA, 50 bp, synthetic construct
  source 1..50: mol_type = other DNA
aaaataaaactactctccrtaaaaaatctttaaaaaaattaccaaaacac

SEQ ID NO: 8058 - DNA, 50 bp, synthetic construct
  source 1..50: mol_type = other DNA
aatttatttttaattatcrtatcctaataacccttccaaaaacccttcac

SEQ ID NO: 8059 - DNA, 50 bp, synthetic construct
  source 1..50: mol_type = other DNA
aaccaaatatattataatttcaaatacaaacctatttaaaacaaaaaccc

SEQ ID NO: 8060 - DNA, 50 bp, synthetic construct
  source 1..50: mol_type = other DNA
ataatttcaaatacaaacctatttaaaacaaaaacccrtaaaattactac

SEQ ID NO: 8061 - DNA, 50 bp, synthetic construct
  source 1..50: mol_type = other DNA
taaaacaaaaacccrtaaaattactacrtttcaacctcaaaaaataaccc

SEQ ID NO: 8062 - DNA, 50 bp, synthetic construct
  source 1..50: mol_type = other DNA
aaatttaaactaaatcaaaaaaccattcaaacccctccctttcacaaacc

SEQ ID NO: 8063 - DNA, 50 bp, synthetic construct
  source 1..50: mol_type = other DNA
tcctaaacaacaaaaaatattatacatttcaacrcttactaaatcaatac

SEQ ID NO: 8064 - DNA, 50 bp, synthetic construct
  source 1..50: mol_type = other DNA
aaaatcrctaatctacttcctaaacaacaaaaaatattatacatttcaac

SEQ ID NO: 8065 - DNA, 50 bp, synthetic construct
  source 1..50: mol_type = other DNA
ataaaaaacaccattctcaaaacrcaaaaaattcrcraaccctaaaaatc

SEQ ID NO: 8066 - DNA, 50 bp, synthetic construct
  source 1..50: mol_type = other DNA
acataacattccttactacttaaaaaataaaccaacratccccaaaactc

SEQ ID NO: 8067 - DNA, 50 bp, synthetic construct
  source 1..50: mol_type = other DNA
ccccaaaactcrcraattccctacrctttaaaaataatactctttataac

SEQ ID NO: 8068 - DNA, 50 bp, synthetic construct
  source 1..50: mol_type = other DNA
accctcacctaaaaacaaaatacttcctacaactccaaaactttaaaatc

SEQ ID NO: 8069 - DNA, 50 bp, synthetic construct
  source 1..50: mol_type = other DNA
cttctaaatcaataaacctaaaataaaacctaaaattctacatatctaac

SEQ ID NO: 8070 - DNA, 50 bp, synthetic construct
  source 1..50: mol_type = other DNA
caaaaaattactaaaaactatattccaactaaaaccaaactacaacrttc

SEQ ID NO: 8071 - DNA, 50 bp, synthetic construct
  source 1..50: mol_type = other DNA
acaacaaaaaattactaaaaactatattccaactaaaaccaaactacaac

SEQ ID NO: 8072 - DNA, 50 bp, synthetic construct
  source 1..50: mol_type = other DNA
aaaaaaaccaaaacaactttctctttccattccaatcccataaaatttac

SEQ ID NO: 8073 - DNA, 50 bp, synthetic construct
  source 1..50: mol_type = other DNA
aaaaaaaacctactaaaaaaatctaatcttctccacaactcatcttaacc

SEQ ID NO: 8074 - DNA, 50 bp, synthetic construct
  source 1..50: mol_type = other DNA
aaaactccttccaaattttattacaaaatttacaacacataaaataaccc

SEQ ID NO: 8075 - DNA, 50 bp, synthetic construct
  source 1..50: mol_type = other DNA
acttcccccaaaaccaaaatcaaaattcctaaaaaaatacctaaaaaatc

SEQ ID NO: 8076 - DNA, 50 bp, synthetic construct
  source 1..50: mol_type = other DNA
aaaaacaaatttcaccatattaatcaaaataatcttaatcttctaacctc

SEQ ID NO: 8077 - DNA, 50 bp, synthetic construct
  source 1..50: mol_type = other DNA
tttatttccttaccatttatcaacctaaaacttatttcatttttttcccc

SEQ ID NO: 8078 - DNA, 50 bp, synthetic construct
  source 1..50: mol_type = other DNA
ataataaccacaataataacaatcaacaaaactatattacaaaataattc

SEQ ID NO: 8079 - DNA, 50 bp, synthetic construct
  source 1..50: mol_type = other DNA
actaaataaaattttttaattcacaaatacaccraaataaatttcttccc

SEQ ID NO: 8080 - DNA, 50 bp, synthetic construct
  source 1..50: mol_type = other DNA
accccacctttattaccctaccatatttatatacattcctataaataaac

SEQ ID NO: 8081 - DNA, 50 bp, synthetic construct
  source 1..50: mol_type = other DNA
aaccctctaaaaacctaaaacaataacttctaaaaactcccaaaacaacc

SEQ ID NO: 8082 - DNA, 50 bp, synthetic construct
  source 1..50: mol_type = other DNA
tcctacaaccttttcccaaactcataacttacaatcaaaaactaaaaccc

SEQ ID NO: 8083 - DNA, 50 bp, synthetic construct
  source 1..50: mol_type = other DNA
ctaccattctaatacatacacaaacctaaaaacacaaaaaataacactac

SEQ ID NO: 8084 - DNA, 50 bp, synthetic construct
  source 1..50: mol_type = other DNA
aaccataacataaaaaaaattcatcccttaactctaaaccactattatcc

SEQ ID NO: 8085 - DNA, 50 bp, synthetic construct
  source 1..50: mol_type = other DNA
cttaactctaaaccactattatccrtaaataatataattaccctactaac

SEQ ID NO: 8086 - DNA, 50 bp, synthetic construct
  source 1..50: mol_type = other DNA
ccctcaaaatcaacaacttaactctttctctctctaaatacaaacaaacc

SEQ ID NO: 8087 - DNA, 50 bp, synthetic construct
  source 1..50: mol_type = other DNA
acttacaataattctctcaaactatccrccttatcctaactacttaattc

SEQ ID NO: 8088 - DNA, 50 bp, synthetic construct
  source 1..50: mol_type = other DNA
acaacaactctcattaacaacttacttacaataattctctcaaactatcc

SEQ ID NO: 8089 - DNA, 50 bp, synthetic construct
  source 1..50: mol_type = other DNA
aactactaataaaaactattactaaataaaatcacctttcacctacctac

SEQ ID NO: 8090 - DNA, 50 bp, synthetic construct
  source 1..50: mol_type = other DNA
aaaaacaaaaattaaatttctacracccatataaattcaccactactaac

SEQ ID NO: 8091 - DNA, 50 bp, synthetic construct
  source 1..50: mol_type = other DNA
accactactaacrcaaacatttaataaaaacataacttcaattttatatc

SEQ ID NO: 8092 - DNA, 50 bp, synthetic construct
  source 1..50: mol_type = other DNA
actaatccttctatttctcaaaccactaacactattctaaaaaactaaac

SEQ ID NO: 8093 - DNA, 50 bp, synthetic construct
  source 1..50: mol_type = other DNA
aactaaattcaaaatacttaccrtaataactatacttaacaaaaatatac

SEQ ID NO: 8094 - DNA, 50 bp, synthetic construct
  source 1..50: mol_type = other DNA
ataaataatcttccctctttacraatatacttcaacaaaactttaatctc

SEQ ID NO: 8095 - DNA, 50 bp, synthetic construct
  source 1..50: mol_type = other DNA
taattaacatccatcctataaccaacacataaataatcttccctctttac

SEQ ID NO: 8096 - DNA, 50 bp, synthetic construct
  source 1..50: mol_type = other DNA
tctaaaattaatccccctacccatctaaacaatattaaaaaacattacac

SEQ ID NO: 8097 - DNA, 50 bp, synthetic construct
  source 1..50: mol_type = other DNA
attaacaaaaattaatccaataaaaatctccaacaaaataaacaccaatc

SEQ ID NO: 8098 - DNA, 50 bp, synthetic construct
  source 1..50: mol_type = other DNA
cctctatatttaaaatctcccaatcctacaacttaaactataccttaatc

SEQ ID NO: 8099 - DNA, 50 bp, synthetic construct
  source 1..50: mol_type = other DNA
atcccaaaaaaaaccactaaatacactatacttcctatttcctaaaatac

SEQ ID NO: 8100 - DNA, 50 bp, synthetic construct
  source 1..50: mol_type = other DNA
atcaaaatatacattccccaaaacctcaaaattacctacccaaaaccacc

SEQ ID NO: 8101 - DNA, 50 bp, synthetic construct
  source 1..50: mol_type = other DNA
aacataataaacctatcctcaaaccccttaaaaacatatataaatatatc

SEQ ID NO: 8102 - DNA, 50 bp, synthetic construct
  source 1..50: mol_type = other DNA
ataataaacacaaacaacaacaaactaaacaaaccaatcctcaaaacccc

SEQ ID NO: 8103 - DNA, 50 bp, synthetic construct
  source 1..50: mol_type = other DNA
aacctaaacttaccrattctcaaacccctatataaaatatataaacactc

SEQ ID NO: 8104 - DNA, 50 bp, synthetic construct
  source 1..50: mol_type = other DNA
acaaacctattctcaaacaacaataataacaacaataacctaaacttacc

SEQ ID NO: 8105 - DNA, 50 bp, synthetic construct
  source 1..50: mol_type = other DNA
tccctaaaatatctcattttaaatatcctttataatccaaaaaaattatc

SEQ ID NO: 8106 - DNA, 50 bp, synthetic construct
  source 1..50: mol_type = other DNA
tctaaaaattctccatctttatattttaatattccaaataaaacaaacac

SEQ ID NO: 8107 - DNA, 50 bp, synthetic construct
  source 1..50: mol_type = other DNA
aacaattactacactataccaaattcaaacttataaaaaaacttaatccc

SEQ ID NO: 8108 - DNA, 50 bp, synthetic construct
  source 1..50: mol_type = other DNA
caaaccaacaaactattacaataacaaacracaaaaaaaatcaaacacac

SEQ ID NO: 8109 - DNA, 50 bp, synthetic construct
  source 1..50: mol_type = other DNA
tcaccacaaacrctaattattttctatcttttcaaaacaactataaaaac

SEQ ID NO: 8110 - DNA, 50 bp, synthetic construct
  source 1..50: mol_type = other DNA
aattaaaaaacttatcccaaacctcacaataaataaccaaataaaaattc

SEQ ID NO: 8111 - DNA, 50 bp, synthetic construct
  source 1..50: mol_type = other DNA
acaaaaatacttactatctctaaacaaaaacaaaaatcccaaacacaaac

SEQ ID NO: 8112 - DNA, 50 bp, synthetic construct
  source 1..50: mol_type = other DNA
actacaccaaaacacacctattacaactaaaacataatttaataacactc

SEQ ID NO: 8113 - DNA, 50 bp, synthetic construct
  source 1..50: mol_type = other DNA
aaatcaataacctttttaaattaaacraaactttaaaccttaactaacac

SEQ ID NO: 8114 - DNA, 50 bp, synthetic construct
  source 1..50: mol_type = other DNA
aaaaaccttcctcaaatataacttaatataaactcaaatacraaaaaaac

SEQ ID NO: 8115 - DNA, 50 bp, synthetic construct
  source 1..50: mol_type = other DNA
aaaccatatttaaaaaaaaccttcatatataaccttccctccatatcaac

SEQ ID NO: 8116 - DNA, 50 bp, synthetic construct
  source 1..50: mol_type = other DNA
tactataacttacttcaccaatcttactaaaaaacattaaaattatctcc

SEQ ID NO: 8117 - DNA, 50 bp, synthetic construct
  source 1..50: mol_type = other DNA
taaaatttaatctcctaattctacrttaaacaacactcccttaccctatc

SEQ ID NO: 8118 - DNA, 50 bp, synthetic construct
  source 1..50: mol_type = other DNA
ttttaaatctatcacactcccaccracaaaacaaaaaaatactacttaac

SEQ ID NO: 8119 - DNA, 50 bp, synthetic construct
  source 1..50: mol_type = other DNA
aatactacttaacrcaaaatcaaaaaatcaaactttaactaaatttaaac

SEQ ID NO: 8120 - DNA, 50 bp, synthetic construct
  source 1..50: mol_type = other DNA
cacraatcctaccctctacrttaataaaaaacaataatcaaaaaaaaccc

SEQ ID NO: 8121 - DNA, 50 bp, synthetic construct
  source 1..50: mol_type = other DNA
accaaaactaaatactttaaaaaatccaaacaaactccrcraaaattcac

SEQ ID NO: 8122 - DNA, 50 bp, synthetic construct
  source 1..50: mol_type = other DNA
cttacttaataccaaaactaaatactttaaaaaatccaaacaaactccrc

SEQ ID NO: 8123 - DNA, 50 bp, synthetic construct
  source 1..50: mol_type = other DNA
cccaataactcraaaccaaatcaaaaataaactacaaaatcccccaaccc

SEQ ID NO: 8124 - DNA, 50 bp, synthetic construct
  source 1..50: mol_type = other DNA
aaacraaaaaatcaaaacctaaactccctataccaaaaccraaaacaaac

SEQ ID NO: 8125 - DNA, 50 bp, synthetic construct
  source 1..50: mol_type = other DNA
tcaaacrcctaatctaaaatacctaaaaatactcaccraataacaaaaac

SEQ ID NO: 8126 - DNA, 50 bp, synthetic construct
  source 1..50: mol_type = other DNA
aaaacaataacrttcaaacrcctaatctaaaatacctaaaaatactcacc

SEQ ID NO: 8127 - DNA, 50 bp, synthetic construct
  source 1..50: mol_type = other DNA
atccaaaaatacctaacaacctcacaaaaaataaactaaaacctaaatac

SEQ ID NO: 8128 - DNA, 50 bp, synthetic construct
  source 1..50: mol_type = other DNA
accataacctaaaaatttccctatcttaatttattatcctcacataaatc

SEQ ID NO: 8129 - DNA, 50 bp, synthetic construct
  source 1..50: mol_type = other DNA
aaccataacaatcaaacaaaatcctaaaccataaataaacaaacattttc

SEQ ID NO: 8130 - DNA, 50 bp, synthetic construct
  source 1..50: mol_type = other DNA
aaccatataaactacaaaatcacaaaacctaaaatatttactatctaacc

SEQ ID NO: 8131 - DNA, 50 bp, synthetic construct
  source 1..50: mol_type = other DNA
aacacaattttattaaaccaaaaatacaccctttatttacatataaaacc

SEQ ID NO: 8132 - DNA, 50 bp, synthetic construct
  source 1..50: mol_type = other DNA
ccataaaccacccacaatactaccccttctctatacaataaatttctatc

SEQ ID NO: 8133 - DNA, 50 bp, synthetic construct
  source 1..50: mol_type = other DNA
caaacttcccttaaactaatatacaaaatttaaaatattcaaaattaacc

SEQ ID NO: 8134 - DNA, 50 bp, synthetic construct
  source 1..50: mol_type = other DNA
accttaaatatcctaaactttatataccaactcaaaaaaaatctacattc

SEQ ID NO: 8135 - DNA, 50 bp, synthetic construct
  source 1..50: mol_type = other DNA
taattccatatattattcttttacacattaaaaacccaattaaaataacc

SEQ ID NO: 8136 - DNA, 50 bp, synthetic construct
  source 1..50: mol_type = other DNA
aaacaatataaatatctatacaatacctaacacatccacaaaaaaccctc

SEQ ID NO: 8137 - DNA, 50 bp, synthetic construct
  source 1..50: mol_type = other DNA
aatataataaactattatcataccacacactccaacttaaacaacaaaac

SEQ ID NO: 8138 - DNA, 50 bp, synthetic construct
  source 1..50: mol_type = other DNA
caaacaataataacataaaaaccataaatataaaaaccaataacctcacc

SEQ ID NO: 8139 - DNA, 50 bp, synthetic construct
  source 1..50: mol_type = other DNA
tactccatctaaacaaaaataatacccttattccctaaaccaaacaaaac

SEQ ID NO: 8140 - DNA, 50 bp, synthetic construct
  source 1..50: mol_type = other DNA
tataactcaatttcctcattaaattattataacrtacaaataaaatacac

SEQ ID NO: 8141 - DNA, 50 bp, synthetic construct
  source 1..50: mol_type = other DNA
ccttcttttaatatttccatttaccaataacctaaatacatcaaaaaaac

SEQ ID NO: 8142 - DNA, 50 bp, synthetic construct
  source 1..50: mol_type = other DNA
caactctaataaaaaattctctctcccctcaaccaaaaactatccttacc

SEQ ID NO: 8143 - DNA, 50 bp, synthetic construct
  source 1..50: mol_type = other DNA
tcctaaatactctacttatcttatccctaaatttaaaaaaacattaaacc

SEQ ID NO: 8144 - DNA, 50 bp, synthetic construct
  source 1..50: mol_type = other DNA
aacaaaaaaaacaacccaaatatatttctaaaatatttccaaaaaccaac

SEQ ID NO: 8145 - DNA, 50 bp, synthetic construct
  source 1..50: mol_type = other DNA
cactcatatcctctttacaactattataaaaaccaaatactacaacaaac

SEQ ID NO: 8146 - DNA, 50 bp, synthetic construct
  source 1..50: mol_type = other DNA
tttacttaaataaaaattattttaaaacttacactaaacttacttcccac

SEQ ID NO: 8147 - DNA, 50 bp, synthetic construct
  source 1..50: mol_type = other DNA
cacaaaacttacctaaaaaaacctacacattcaatactctcaatttctcc

SEQ ID NO: 8148 - DNA, 50 bp, synthetic construct
  source 1..50: mol_type = other DNA
acaaaaaacractacaaaacaaataacacactaataccrtttaaataaac

SEQ ID NO: 8149 - DNA, 50 bp, synthetic construct
  source 1..50: mol_type = other DNA
ccattataaccracaacctcaaatttcraaaccacaaaatcatcttaacc

SEQ ID NO: 8150 - DNA, 50 bp, synthetic construct
  source 1..50: mol_type = other DNA
aaaataaccttataacctcraaacttaaaactatcraccacaataatcac

SEQ ID NO: 8151 - DNA, 50 bp, synthetic construct
  source 1..50: mol_type = other DNA
ataaccttataacctcraaacttaaaactatcraccacaataatcacrtc

SEQ ID NO: 8152 - DNA, 50 bp, synthetic construct
  source 1..50: mol_type = other DNA
tttctcaaacaactccraaaccaaaattcraaaaaacattaaaacaaaac

SEQ ID NO: 8153 - DNA, 50 bp, synthetic construct
  source 1..50: mol_type = other DNA
tctacatcactatacatatcctatactttacaatcattccctaaaaactc

SEQ ID NO: 8154 - DNA, 50 bp, synthetic construct
  source 1..50: mol_type = other DNA
ctaacactacattttaaactcctcctctaaactcactctcaaaacctacc

SEQ ID NO: 8155 - DNA, 50 bp, synthetic construct
  source 1..50: mol_type = other DNA
caaaataatatataactttttaacccaccttattcactaaatataactcc

SEQ ID NO: 8156 - DNA, 50 bp, synthetic construct
  source 1..50: mol_type = other DNA
aaacaaaacaaatataatcaaataaccrtttcccttcaaaacaatccctc

SEQ ID NO: 8157 - DNA, 50 bp, synthetic construct
  source 1..50: mol_type = other DNA
aactttttctaaaaaatctatcaaaacaaaacaaatataatcaaataacc

SEQ ID NO: 8158 - DNA, 50 bp, synthetic construct
  source 1..50: mol_type = other DNA
ccaaaacaaacaaaccaaaataaacataacaactaaaaatcctaaaaacc

SEQ ID NO: 8159 - DNA, 50 bp, synthetic construct
  source 1..50: mol_type = other DNA
ccctaaattctaatcatttccttccttttatacaaaatccattaaaaacc

SEQ ID NO: 8160 - DNA, 50 bp, synthetic construct
  source 1..50: mol_type = other DNA
tttttaaaaccttcaaaccccaaaaaacatttcacttaaaaatactactc

SEQ ID NO: 8161 - DNA, 50 bp, synthetic construct
  source 1..50: mol_type = other DNA
acaacaaacaaaaaaaacaactacattaataatcaatcaaataaaacatc

SEQ ID NO: 8162 - DNA, 50 bp, synthetic construct
  source 1..50: mol_type = other DNA
acactaaaaataaaaacaaataaacaaattcaactacctttaataaaacc

SEQ ID NO: 8163 - DNA, 50 bp, synthetic construct
  source 1..50: mol_type = other DNA
taaaacaacatcactttacaacttttctttaacatatctaaattaccaac

SEQ ID NO: 8164 - DNA, 50 bp, synthetic construct
  source 1..50: mol_type = other DNA
ctacacacccatcctacctataaaaccracctataaattacttaataacc

SEQ ID NO: 8165 - DNA, 50 bp, synthetic construct
  source 1..50: mol_type = other DNA
aaaatataaatcattactttatcctacacacccatcctacctataaaacc

SEQ ID NO: 8166 - DNA, 50 bp, synthetic construct
  source 1..50: mol_type = other DNA
tcataaacaaaataaatatacaaaacaaaacaataactcacatcctaaac

SEQ ID NO: 8167 - DNA, 50 bp, synthetic construct
  source 1..50: mol_type = other DNA
ataaaaaattctaaaaataaactataaattttaaactacacaccrttctc

SEQ ID NO: 8168 - DNA, 50 bp, synthetic construct
  source 1..50: mol_type = other DNA
aattccataaaaaattctaaaaataaactataaattttaaactacacacc

SEQ ID NO: 8169 - DNA, 50 bp, synthetic construct
  source 1..50: mol_type = other DNA
tccttattcacaatttcactttctataacttcaattacctacaatacacc

SEQ ID NO: 8170 - DNA, 50 bp, synthetic construct
  source 1..50: mol_type = other DNA
ctaaaataaaaataaatctatttttctaaactccccaaaatacaatctac

SEQ ID NO: 8171 - DNA, 50 bp, synthetic construct
  source 1..50: mol_type = other DNA
aaataaacrtaactacacccactaaaaactaataaaaaaatcccttaaac

SEQ ID NO: 8172 - DNA, 50 bp, synthetic construct
  source 1..50: mol_type = other DNA
taaaaactaataaaaaaatcccttaaacrcaaacctcaaactataacctc

SEQ ID NO: 8173 - DNA, 50 bp, synthetic construct
  source 1..50: mol_type = other DNA
cctctttcttttataaattacccaatcccaaatatatctttatcaacaac

SEQ ID NO: 8174 - DNA, 50 bp, synthetic construct
  source 1..50: mol_type = other DNA
attaaaaaaattaaatactaactaaatcatataaatatcttaccccaaac

SEQ ID NO: 8175 - DNA, 50 bp, synthetic construct
  source 1..50: mol_type = other DNA
aataataataaaacaactcacttattaattttcacaatccaacacraacc

SEQ ID NO: 8176 - DNA, 50 bp, synthetic construct
  source 1..50: mol_type = other DNA
attaaaataataataaaacaactcacttattaattttcacaatccaacac

SEQ ID NO: 8177 - DNA, 50 bp, synthetic construct
  source 1..50: mol_type = other DNA
tttacaatttataaaacaaacaatacatttcaattttctttaattaaaac

SEQ ID NO: 8178 - DNA, 50 bp, synthetic construct
  source 1..50: mol_type = other DNA
ctctaactcctataacactacacraacacrtaattactacaaattaatac

SEQ ID NO: 8179 - DNA, 50 bp, synthetic construct
  source 1..50: mol_type = other DNA
aaaaatacctctaataaaaccaaatatacrtactaacttataacaaccac

SEQ ID NO: 8180 - DNA, 50 bp, synthetic construct
  source 1..50: mol_type = other DNA
acctctaataaaaccaaatatacrtactaacttataacaaccacrtatcc

SEQ ID NO: 8181 - DNA, 50 bp, synthetic construct
  source 1..50: mol_type = other DNA
aaatacttcatattcaccttttcaaccttttcatttaattatcacaactc

SEQ ID NO: 8182 - DNA, 50 bp, synthetic construct
  source 1..50: mol_type = other DNA
acaactcraaaataaattctattaaaaacaaactaccccaaaaccactcc

SEQ ID NO: 8183 - DNA, 50 bp, synthetic construct
  source 1..50: mol_type = other DNA
craaaataaattctattaaaaacaaactaccccaaaaccactccrccccc

SEQ ID NO: 8184 - DNA, 50 bp, synthetic construct
  source 1..50: mol_type = other DNA
aaaacttcratataacaaatctaataaccttactataacrcctaaataac

SEQ ID NO: 8185 - DNA, 50 bp, synthetic construct
  source 1..50: mol_type = other DNA
rtaccacccaaaaaacttcratataacaaatctaataaccttactataac

SEQ ID NO: 8186 - DNA, 50 bp, synthetic construct
  source 1..50: mol_type = other DNA
cctaaaccrttatctaaacrctataacaaaatcaccaaacttactacacc

SEQ ID NO: 8187 - DNA, 50 bp, synthetic construct
  source 1..50: mol_type = other DNA
aaataaaaatttacaaaaaaatataatccacrtttctcataacctccccc

SEQ ID NO: 8188 - DNA, 50 bp, synthetic construct
  source 1..50: mol_type = other DNA
aaattaataaacttacttaacctaaccttaaatctcttatcttttctctc

SEQ ID NO: 8189 - DNA, 50 bp, synthetic construct
  source 1..50: mol_type = other DNA
ctacaaccacaaaataaataaacraataaacaacraacaacccaaccacc

SEQ ID NO: 8190 - DNA, 50 bp, synthetic construct
  source 1..50: mol_type = other DNA
tcctataaacataataacttataactctacatcaaattataccaaacatc

SEQ ID NO: 8191 - DNA, 50 bp, synthetic construct
  source 1..50: mol_type = other DNA
taacccataacraaacacaaataacctcaaacccttaccttttaacaaac

SEQ ID NO: 8192 - DNA, 50 bp, synthetic construct
  source 1..50: mol_type = other DNA
acaaacaatacrtctactaaaaaacaaaaacttaaaaccacctatatctc

SEQ ID NO: 8193 - DNA, 50 bp, synthetic construct
  source 1..50: mol_type = other DNA
tttcaatttcctatctatattatatccaacaaacaaatataccacccrtc

SEQ ID NO: 8194 - DNA, 50 bp, synthetic construct
  source 1..50: mol_type = other DNA
aacatctaaccactatatatatcatttctttaattcaaacttattctaac

SEQ ID NO: 8195 - DNA, 50 bp, synthetic construct
  source 1..50: mol_type = other DNA
acaaaactatctattaataaatcctacaactcacaaaaaaaaacctcaac

SEQ ID NO: 8196 - DNA, 50 bp, synthetic construct
  source 1..50: mol_type = other DNA
caccttaaaccaccttccccaaaaacacctaccaaaatacaaattaaaac

SEQ ID NO: 8197 - DNA, 50 bp, synthetic construct
  source 1..50: mol_type = other DNA
acaaatacccctaaaaaaaataacccaaaatacaaatcataaacaaaccc

SEQ ID NO: 8198 - DNA, 50 bp, synthetic construct
  source 1..50: mol_type = other DNA
tccttcrctaaactaaattacaaaatttttcraaaatcaaataaaacttc

SEQ ID NO: 8199 - DNA, 50 bp, synthetic construct
  source 1..50: mol_type = other DNA
crtcccraaactccatttaactttcraaaaattctataacccaattcaac

SEQ ID NO: 8200 - DNA, 50 bp, synthetic construct
  source 1..50: mol_type = other DNA
catttaactttcraaaaattctataacccaattcaacraaaaattaaatc

SEQ ID NO: 8201 - DNA, 50 bp, synthetic construct
  source 1..50: mol_type = other DNA
ataaaacaataccccttaaaatacatcttaaaccraacrcaataactcac

SEQ ID NO: 8202 - DNA, 50 bp, synthetic construct
  source 1..50: mol_type = other DNA
aacttattttaacacaatctaaattctctttacaaaaacctacaacctcc

SEQ ID NO: 8203 - DNA, 50 bp, synthetic construct
  source 1..50: mol_type = other DNA
ttaaccacacacacacatttctaactaatctaaaacrctaattatcctac

SEQ ID NO: 8204 - DNA, 50 bp, synthetic construct
  source 1..50: mol_type = other DNA
aactccctctttccatctctatactttcctttatttccttaattaaaaac

SEQ ID NO: 8205 - DNA, 50 bp, synthetic construct
  source 1..50: mol_type = other DNA
aaacacrtttaactataaaacaaacctacacatcctacrcatataacccc

SEQ ID NO: 8206 - DNA, 50 bp, synthetic construct
  source 1..50: mol_type = other DNA
caaaccaccataaaacacrtttaactataaaacaaacctacacatcctac

SEQ ID NO: 8207 - DNA, 50 bp, synthetic construct
  source 1..50: mol_type = other DNA
ttaattcctaactaacraattaataaatataacaaaccaccataaaacac

SEQ ID NO: 8208 - DNA, 50 bp, synthetic construct
  source 1..50: mol_type = other DNA
tacacctaacaaatccaaatatattactaacaaaatataaacttacaaac

SEQ ID NO: 8209 - DNA, 50 bp, synthetic construct
  source 1..50: mol_type = other DNA
ataaaaatttctcccrtatctcaatcccctaccttaaatcacttctctac

SEQ ID NO: 8210 - DNA, 50 bp, synthetic construct
  source 1..50: mol_type = other DNA
tcttacaaatcctcccctcraaaaacacacaataaaacaaactctttacc

SEQ ID NO: 8211 - DNA, 50 bp, synthetic construct
  source 1..50: mol_type = other DNA
caaaatatccttaactataaatttaacacacctatcaaaacttaactatc

SEQ ID NO: 8212 - DNA, 50 bp, synthetic construct
  source 1..50: mol_type = other DNA
aattataatataatttatacctaaaataaaccacacttcactaatatccc

SEQ ID NO: 8213 - DNA, 50 bp, synthetic construct
  source 1..50: mol_type = other DNA
aaatcataccaaatcaaaaacacttcttcttctatatacacccattaccc

SEQ ID NO: 8214 - DNA, 50 bp, synthetic construct
  source 1..50: mol_type = other DNA
tatatcaaccataacaaaattattattacttcactaaataaacacccaac

SEQ ID NO: 8215 - DNA, 50 bp, synthetic construct
  source 1..50: mol_type = other DNA
aaaaatctaaacactaaaaacacaaacacacaaaattacatctctactcc

SEQ ID NO: 8216 - DNA, 50 bp, synthetic construct
  source 1..50: mol_type = other DNA
aattataatatattttatatctttaatcaccataaataccaaactatacc

SEQ ID NO: 8217 - DNA, 50 bp, synthetic construct
  source 1..50: mol_type = other DNA
attattaacacaaccccatattacctcatctatcacataattaccaaaac

SEQ ID NO: 8218 - DNA, 50 bp, synthetic construct
  source 1..50: mol_type = other DNA
ataaaataacataaaactataccaacaacattacccaaaaataaactaac

SEQ ID NO: 8219 - DNA, 50 bp, synthetic construct
  source 1..50: mol_type = other DNA
tttcctataaaaacttcccacccaattcaatacttacaaaataaaaaaac

SEQ ID NO: 8220 - DNA, 50 bp, synthetic construct
  source 1..50: mol_type = other DNA
ccaaatattcaaatacacttcctcttactaaaaaaacccraaaacctccc

SEQ ID NO: 8221 - DNA, 50 bp, synthetic construct
  source 1..50: mol_type = other DNA
ttccctcctttatactcccctaatacttaacaaacattcactaaacaccc

SEQ ID NO: 8222 - DNA, 50 bp, synthetic construct
  source 1..50: mol_type = other DNA
tacaaaaatcaaccaaacataataacraacacctataatcctaactactc

SEQ ID NO: 8223 - DNA, 50 bp, synthetic construct
  source 1..50: mol_type = other DNA
aaataaaaatatctaactctcctctactctctcaacactaaactatatcc

SEQ ID NO: 8224 - DNA, 50 bp, synthetic construct
  source 1..50: mol_type = other DNA
caaacacctccattctaattacactttttccaaatactaaataaaaactc

SEQ ID NO: 8225 - DNA, 50 bp, synthetic construct
  source 1..50: mol_type = other DNA
tctaattacactttttccaaatactaaataaaaactcrctaaaaaaaccc

SEQ ID NO: 8226 - DNA, 50 bp, synthetic construct
  source 1..50: mol_type = other DNA
atcaaaaactaactaaaacaaataacacaaatcaaaatttcaacaacaac

SEQ ID NO: 8227 - DNA, 50 bp, synthetic construct
  source 1..50: mol_type = other DNA
taaaaaaccactactacataaaaaaacrtaaccttttcctaataaaatac

SEQ ID NO: 8228 - DNA, 50 bp, synthetic construct
  source 1..50: mol_type = other DNA
cctatcctattaaacacrtttcctaaaaaaccactactacataaaaaaac

SEQ ID NO: 8229 - DNA, 50 bp, synthetic construct
  source 1..50: mol_type = other DNA
actctaattactaatatttaatcaaaaaaaccacctatcctattaaacac

SEQ ID NO: 8230 - DNA, 50 bp, synthetic construct
  source 1..50: mol_type = other DNA
taaatttaaaaactaaaaaatatctcacaacttaaccatcctaataaaac

SEQ ID NO: 8231 - DNA, 50 bp, synthetic construct
  source 1..50: mol_type = other DNA
ttaaaataaaaatatatctatatctaaaccraatactacctaaatcratc

SEQ ID NO: 8232 - DNA, 50 bp, synthetic construct
  source 1..50: mol_type = other DNA
ctcctaaaaactaactccatttaaaaataaccractcaaactaaacaatc

SEQ ID NO: 8233 - DNA, 50 bp, synthetic construct
  source 1..50: mol_type = other DNA
tcctaaactcttcctcttctcctaaaaactaactccatttaaaaataacc

SEQ ID NO: 8234 - DNA, 50 bp, synthetic construct
  source 1..50: mol_type = other DNA
aattcaacaaacrtttcttaattaactaatcaaacactaatacaaaaaac

SEQ ID NO: 8235 - DNA, 50 bp, synthetic construct
  source 1..50: mol_type = other DNA
aaaaacaacatcrctctttatatcaatatttaactaaccaatcaaaaaac

SEQ ID NO: 8236 - DNA, 50 bp, synthetic construct
  source 1..50: mol_type = other DNA
aacrtttactaaattcttcatatcatacatatctataaactctacccttc

SEQ ID NO: 8237 - DNA, 50 bp, synthetic construct
  source 1..50: mol_type = other DNA
aaacaaacttaacatacaacttccaaaaactcttataaataacctaaaac

SEQ ID NO: 8238 - DNA, 50 bp, synthetic construct
  source 1..50: mol_type = other DNA
aataaaatctttcaaatcaactaacatcaataaaatccttcaaaccaacc

SEQ ID NO: 8239 - DNA, 50 bp, synthetic construct
  source 1..50: mol_type = other DNA
actaaaacccaaaataaataaaactaaaaacctaacrcaataactcattc

SEQ ID NO: 8240 - DNA, 50 bp, synthetic construct
  source 1..50: mol_type = other DNA
cattcrtaataactcattcttataatcctaacactttaacaaacaaaaac

SEQ ID NO: 8241 - DNA, 50 bp, synthetic construct
  source 1..50: mol_type = other DNA
actcttaaaacacttaattcrcttcaataaatttatacttttattacttc

SEQ ID NO: 8242 - DNA, 50 bp, synthetic construct
  source 1..50: mol_type = other DNA
acctctaattaatcrcaaaccaatccttcataaaatacaaccaattaaac

SEQ ID NO: 8243 - DNA, 50 bp, synthetic construct
  source 1..50: mol_type = other DNA
actcctataattacaaaacaaaaatttccacatcrcctctaattatcctc

SEQ ID NO: 8244 - DNA, 50 bp, synthetic construct
  source 1..50: mol_type = other DNA
tacaaaccacaccttcactcctataattacaaaacaaaaatttccacatc

SEQ ID NO: 8245 - DNA, 50 bp, synthetic construct
  source 1..50: mol_type = other DNA
ctcttctataaaatttaacaaacattataccttttactatcaccataatc

SEQ ID NO: 8246 - DNA, 50 bp, synthetic construct
  source 1..50: mol_type = other DNA
aaatattaccttttccaaaataccatataaataaaatcataaactatatc

SEQ ID NO: 8247 - DNA, 50 bp, synthetic construct
  source 1..50: mol_type = other DNA
aaaataccatataaataaaatcataaactatatcrccttttatatctaac

SEQ ID NO: 8248 - DNA, 50 bp, synthetic construct
  source 1..50: mol_type = other DNA
tttatttctttttattactaaataatattccattacataaatataccatc

SEQ ID NO: 8249 - DNA, 50 bp, synthetic construct
  source 1..50: mol_type = other DNA
attaaaatcattaaaaacctctttacttatactcraatatttcraatttc

SEQ ID NO: 8250 - DNA, 50 bp, synthetic construct
  source 1..50: mol_type = other DNA
ccatactattaaaatcattaaaaacctctttacttatactcraatatttc

SEQ ID NO: 8251 - DNA, 50 bp, synthetic construct
  source 1..50: mol_type = other DNA
taaaaaactccatactattaaaatcattaaaaacctctttacttatactc

SEQ ID NO: 8252 - DNA, 50 bp, synthetic construct
  source 1..50: mol_type = other DNA
aaaatcrataatatcctattattaccataacaacraaaaactaacataac

SEQ ID NO: 8253 - DNA, 50 bp, synthetic construct
  source 1..50: mol_type = other DNA
ctaaaaaaatatctcaaaaaaactcacaataataaaataacrttaaccac

SEQ ID NO: 8254 - DNA, 50 bp, synthetic construct
  source 1..50: mol_type = other DNA
ctaaaacacctaaaaaaatatctcaaaaaaactcacaataataaaataac

SEQ ID NO: 8255 - DNA, 50 bp, synthetic construct
  source 1..50: mol_type = other DNA
aaaacaaataaacacaaacaaacacaaaccctccaaaacaatcraaaacc

SEQ ID NO: 8256 - DNA, 50 bp, synthetic construct
  source 1..50: mol_type = other DNA
cctaacatttttaaaaaccaacataaaaaaatcattaaacccaaaaattc

SEQ ID NO: 8257 - DNA, 50 bp, synthetic construct
  source 1..50: mol_type = other DNA
aacaatcaaacaaaataccaaatataaaaaatatacttcctattacatac

SEQ ID NO: 8258 - DNA, 50 bp, synthetic construct
  source 1..50: mol_type = other DNA
acattttatctaactattaaacaaccacttcttaatactccaaaacccac

SEQ ID NO: 8259 - DNA, 50 bp, synthetic construct
  source 1..50: mol_type = other DNA
cracatttactactattaccattcctataataacactcaacctctcccac

SEQ ID NO: 8260 - DNA, 50 bp, synthetic construct
  source 1..50: mol_type = other DNA
ccctataaatcaaaaccraacctacacccttacacaatattaaaaaccrc

SEQ ID NO: 8261 - DNA, 50 bp, synthetic construct
  source 1..50: mol_type = other DNA
ttccctataaatcaaaaccraacctacacccttacacaatattaaaaacc

SEQ ID NO: 8262 - DNA, 50 bp, synthetic construct
  source 1..50: mol_type = other DNA
taccaataactcaaaaaatacaaatcrcctcttccctataaatcaaaacc

SEQ ID NO: 8263 - DNA, 50 bp, synthetic construct
  source 1..50: mol_type = other DNA
ctcaaatataccaacaaaaaataataccaataactcaaaaaatacaaatc

SEQ ID NO: 8264 - DNA, 50 bp, synthetic construct
  source 1..50: mol_type = other DNA
accaaataatataacacaaataatctataaactcaaaattaacaattaac

SEQ ID NO: 8265 - DNA, 50 bp, synthetic construct
  source 1..50: mol_type = other DNA
aactttttcattcttaacaataaattcttcctaaacaaataattcactac

SEQ ID NO: 8266 - DNA, 50 bp, synthetic construct
  source 1..50: mol_type = other DNA
aaaccaaaacataattcaaacactctcttacaataaccttataatcccac

SEQ ID NO: 8267 - DNA, 50 bp, synthetic construct
  source 1..50: mol_type = other DNA
aaactacacatcaaaaattatattaccattttacccaatttaataaccac

SEQ ID NO: 8268 - DNA, 50 bp, synthetic construct
  source 1..50: mol_type = other DNA
cctcattaaaccttccccattaaaacatacttaaataatactacacaacc

SEQ ID NO: 8269 - DNA, 50 bp, synthetic construct
  source 1..50: mol_type = other DNA
rcttaccaaaattccaaaaaacctaaattaaaccrctataacaacacttc

SEQ ID NO: 8270 - DNA, 50 bp, synthetic construct
  source 1..50: mol_type = other DNA
attaaaccrctataacaacacttcracaaaaaactttttattcaatcttc

SEQ ID NO: 8271 - DNA, 50 bp, synthetic construct
  source 1..50: mol_type = other DNA
rctataacaacacttcracaaaaaactttttattcaatcttcratttacc

SEQ ID NO: 8272 - DNA, 50 bp, synthetic construct
  source 1..50: mol_type = other DNA
racaaaaaactttttattcaatcttcratttaccrtcaaacctcattcac

SEQ ID NO: 8273 - DNA, 50 bp, synthetic construct
  source 1..50: mol_type = other DNA
aatttaaacaataaataacracrcrcacctataattccaactactctaac

SEQ ID NO: 8274 - DNA, 50 bp, synthetic construct
  source 1..50: mol_type = other DNA
tcacaacaatactataaaaaccctactcttaccatcatccccactataac

SEQ ID NO: 8275 - DNA, 50 bp, synthetic construct
  source 1..50: mol_type = other DNA
ctttcatatatacatcacattcccatccctcctcaccaaatcctaaactc

SEQ ID NO: 8276 - DNA, 50 bp, synthetic construct
  source 1..50: mol_type = other DNA
taacttcaaacttaacctcacccaaactatataactcatctaacctcatc

SEQ ID NO: 8277 - DNA, 50 bp, synthetic construct
  source 1..50: mol_type = other DNA
aaatataaactaacaaattatcrctaacatctatttacaacracracaac

SEQ ID NO: 8278 - DNA, 50 bp, synthetic construct
  source 1..50: mol_type = other DNA
rcrtccaaatataaactaacaaattatcrctaacatctatttacaacrac

SEQ ID NO: 8279 - DNA, 50 bp, synthetic construct
  source 1..50: mol_type = other DNA
ctttaacaacctacaaattaactccttcaacraaactacaacaccacrtc

SEQ ID NO: 8280 - DNA, 50 bp, synthetic construct
  source 1..50: mol_type = other DNA
aatctttaacaacctacaaattaactccttcaacraaactacaacaccac

SEQ ID NO: 8281 - DNA, 50 bp, synthetic construct
  source 1..50: mol_type = other DNA
aatactaataacttaaaatctttaacaacctacaaattaactccttcaac

SEQ ID NO: 8282 - DNA, 50 bp, synthetic construct
  source 1..50: mol_type = other DNA
actacactaaaaaaacaaatcaacrcctctaaataacttaacrcacaaac

SEQ ID NO: 8283 - DNA, 50 bp, synthetic construct
  source 1..50: mol_type = other DNA
aaataaaaataattaccaaaataaactccraaaaacttttcacatccaac

SEQ ID NO: 8284 - DNA, 50 bp, synthetic construct
  source 1..50: mol_type = other DNA
aacaaaaataactcaatcaattctttcccrtaccaaactaataactcctc

SEQ ID NO: 8285 - DNA, 50 bp, synthetic construct
  source 1..50: mol_type = other DNA
aactttccctcctaatttaaaaaaaatacaacaaacaaacaaatttcctc

SEQ ID NO: 8286 - DNA, 50 bp, synthetic construct
  source 1..50: mol_type = other DNA
aaaactcaaactaaaaacrttaactacattccaaacatatataaaaaaac

SEQ ID NO: 8287 - DNA, 50 bp, synthetic construct
  source 1..50: mol_type = other DNA
ttcatctcactaaaaaataccaaacaataaacacaaatcaataaatacrc

SEQ ID NO: 8288 - DNA, 50 bp, synthetic construct
  source 1..50: mol_type = other DNA
ttcatctcactaaaaaataccaaacaataaacrcaaatcaataaatacrc

SEQ ID NO: 8289 - DNA, 50 bp, synthetic construct
  source 1..50: mol_type = other DNA
ctcactaaaaaataccaaacaataaacrcaaatcaataaatacrcrcacc

SEQ ID NO: 8290 - DNA, 50 bp, synthetic construct
  source 1..50: mol_type = other DNA
aaaaaaaaaactccctaaccccttatacttactaaataaaacaatacctc

SEQ ID NO: 8291 - DNA, 50 bp, synthetic construct
  source 1..50: mol_type = other DNA
aaataataaacaacacctaaaaaatcraatcactctcacccraatatcrc

SEQ ID NO: 8292 - DNA, 50 bp, synthetic construct
  source 1..50: mol_type = other DNA
cacaaacttaacaaatcctactactactatacttatatctacacacraac

SEQ ID NO: 8293 - DNA, 50 bp, synthetic construct
  source 1..50: mol_type = other DNA
tataaaaaacctttaatatcattcaccaactttaacattttaccccaccc

SEQ ID NO: 8294 - DNA, 50 bp, synthetic construct
  source 1..50: mol_type = other DNA
ccacccrcaaaactactttaacaaaataaactatttccatatacatattc

SEQ ID NO: 8295 - DNA, 50 bp, synthetic construct
  source 1..50: mol_type = other DNA
tcttcctctccaacttaatttatctaatcatttctatccataaacactac

SEQ ID NO: 8296 - DNA, 50 bp, synthetic construct
  source 1..50: mol_type = other DNA
tttatctaatcatttctatccataaacactacracttccaatctatcatc

SEQ ID NO: 8297 - DNA, 50 bp, synthetic construct
  source 1..50: mol_type = other DNA
tccataaacactacracttccaatctatcatcratttaaaacrtcaaaac

SEQ ID NO: 8298 - DNA, 50 bp, synthetic construct
  source 1..50: mol_type = other DNA
aataatttctcaaaacctttcccaatcaaacraaacttaatcraaaaatc

SEQ ID NO: 8299 - DNA, 50 bp, synthetic construct
  source 1..50: mol_type = other DNA
caaaaattttattccaaattaataaaataaaaaccttattctattccacc

SEQ ID NO: 8300 - DNA, 50 bp, synthetic construct
  source 1..50: mol_type = other DNA
ataaaaaattcaaaaacccaactctatttcaaaaatcattttttctcaac

SEQ ID NO: 8301 - DNA, 50 bp, synthetic construct
  source 1..50: mol_type = other DNA
aactccaaaatcacaaaaaccrcraacacaatcaaaaacatctaaaaacc

SEQ ID NO: 8302 - DNA, 50 bp, synthetic construct
  source 1..50: mol_type = other DNA
taataaaattttaccttaaccttcaattacacttctcccacattctcatc

SEQ ID NO: 8303 - DNA, 50 bp, synthetic construct
  source 1..50: mol_type = other DNA
aacaaaataccaatttcttcactccacaaataaacaaaattttaaaaaac

SEQ ID NO: 8304 - DNA, 50 bp, synthetic construct
  source 1..50: mol_type = other DNA
aaaacaataattaactaacaataaacatatttacatcctctatactcttc

SEQ ID NO: 8305 - DNA, 50 bp, synthetic construct
  source 1..50: mol_type = other DNA
acaaaaaaaaaccaatacacacctaatcttatttattctactaactcctc

SEQ ID NO: 8306 - DNA, 50 bp, synthetic construct
  source 1..50: mol_type = other DNA
cacctaatcttatttattctactaactcctcrtattcatcttaaaaaaac

SEQ ID NO: 8307 - DNA, 50 bp, synthetic construct
  source 1..50: mol_type = other DNA
taaatttcaacttttcraaaccataaacacttttcaaaaattaataaaac

SEQ ID NO: 8308 - DNA, 50 bp, synthetic construct
  source 1..50: mol_type = other DNA
tacaaaatatatcaacrttttatcaatttctaaaaaatatctataacccc

SEQ ID NO: 8309 - DNA, 50 bp, synthetic construct
  source 1..50: mol_type = other DNA
ttttatcaatttctaaaaaatatctataaccccraaaaattaaaatccac

SEQ ID NO: 8310 - DNA, 50 bp, synthetic construct
  source 1..50: mol_type = other DNA
tcttttaccacatataacacctcctccaactctttctaaacactcaaatc

SEQ ID NO: 8311 - DNA, 50 bp, synthetic construct
  source 1..50: mol_type = other DNA
ccaacaaaaaaacrccaaacaaataaccatacaacacaaaaataaacacc

SEQ ID NO: 8312 - DNA, 50 bp, synthetic construct
  source 1..50: mol_type = other DNA
aacaaaaaacactatctcacctcaataaaataacaatccaacaaaaaaac

SEQ ID NO: 8313 - DNA, 50 bp, synthetic construct
  source 1..50: mol_type = other DNA
aaccacaaccaaaattaaacctcatatttcctacrtatatatatacatac

SEQ ID NO: 8314 - DNA, 50 bp, synthetic construct
  source 1..50: mol_type = other DNA
taaattaacataattttaaatctacccatatccttaaatattccctcccc

SEQ ID NO: 8315 - DNA, 50 bp, synthetic construct
  source 1..50: mol_type = other DNA
tatctataaactaatttctcttattcttcactacttttattcaatatctc

SEQ ID NO: 8316 - DNA, 50 bp, synthetic construct
  source 1..50: mol_type = other DNA
aaaaaacccaatcttaaaaaaactttcacacttttataaattttacctcc

SEQ ID NO: 8317 - DNA, 50 bp, synthetic construct
  source 1..50: mol_type = other DNA
tttcccccaaatcaattaaccacttataaaaatcccaatacactaaactc

SEQ ID NO: 8318 - DNA, 50 bp, synthetic construct
  source 1..50: mol_type = other DNA
aaacaacaaacctccaattaaatataacctaaactacaacctcataattc

SEQ ID NO: 8319 - DNA, 50 bp, synthetic construct
  source 1..50: mol_type = other DNA
ataaaacataccaataaatcacatttcctctctaaatctccctccaaacc

SEQ ID NO: 8320 - DNA, 50 bp, synthetic construct
  source 1..50: mol_type = other DNA
ttatctaaaataaaaatacctcaaaaccaataaacraaaattttaacttc

SEQ ID NO: 8321 - DNA, 50 bp, synthetic construct
  source 1..50: mol_type = other DNA
aaaaaatataacccactaacataccccataaaaacraaaccaaaatcccc

SEQ ID NO: 8322 - DNA, 50 bp, synthetic construct
  source 1..50: mol_type = other DNA
ctttttcttcccatacataccttaactaaaaaatatcctaaacttataac

SEQ ID NO: 8323 - DNA, 50 bp, synthetic construct
  source 1..50: mol_type = other DNA
taataaacctaatcccrtacracaatacatttattacraaaaacaaatcc

SEQ ID NO: 8324 - DNA, 50 bp, synthetic construct
  source 1..50: mol_type = other DNA
cctaaatacctcatataatatacacaaaaaccaaaactacattatatctc

SEQ ID NO: 8325 - DNA, 50 bp, synthetic construct
  source 1..50: mol_type = other DNA
ttaacaaaaaaaattatcacataccaccctaattaacaattacccratac

SEQ ID NO: 8326 - DNA, 50 bp, synthetic construct
  source 1..50: mol_type = other DNA
aaaccaaaactacattatatctcrttttcaaataacactaattacrcacc

SEQ ID NO: 8327 - DNA, 50 bp, synthetic construct
  source 1..50: mol_type = other DNA
aataacatataataatcttccttactaaccttataaaaaatatacraacc

SEQ ID NO: 8328 - DNA, 50 bp, synthetic construct
  source 1..50: mol_type = other DNA
aatttaacaaccraaaactacaattttacrcctaataaactaaaaaatcc

SEQ ID NO: 8329 - DNA, 50 bp, synthetic construct
  source 1..50: mol_type = other DNA
ttctataaaatattaaaatcaccaaaatcraacctctcaattcatcaaac

SEQ ID NO: 8330 - DNA, 50 bp, synthetic construct
  source 1..50: mol_type = other DNA
attcatcaaacrtaaaactacaatttccractaccaaatcccttaacaac

SEQ ID NO: 8331 - DNA, 50 bp, synthetic construct
  source 1..50: mol_type = other DNA
cttttaatccttcaacctcrtctaataaaaaacaaatatcaccaaatacc

SEQ ID NO: 8332 - DNA, 50 bp, synthetic construct
  source 1..50: mol_type = other DNA
aaataaaaacractcatatacaaaataaaatctaaaaacacccacaatac

SEQ ID NO: 8333 - DNA, 50 bp, synthetic construct
  source 1..50: mol_type = other DNA
aaaataaaatctaaaaacacccacaatacraaaaactacccraacctaac

SEQ ID NO: 8334 - DNA, 50 bp, synthetic construct
  source 1..50: mol_type = other DNA
raacctaacraccttacctaattaaaatacaactaaccaaactccraaac

SEQ ID NO: 8335 - DNA, 50 bp, synthetic construct
  source 1..50: mol_type = other DNA
craaaaaaccaaaactaaccttcaacraaaatatactaaacrtattcrac

SEQ ID NO: 8336 - DNA, 50 bp, synthetic construct
  source 1..50: mol_type = other DNA
cttcctatctttctactttattctctccrccrcaaacttaaaaataaaac

SEQ ID NO: 8337 - DNA, 50 bp, synthetic construct
  source 1..50: mol_type = other DNA
ctcacctctcctatctatttatttatctatctctacrtctttctctctac

SEQ ID NO: 8338 - DNA, 50 bp, synthetic construct
  source 1..50: mol_type = other DNA
atttcaacaaattaatttcatcaaaatcacraaaaaatacatacrtcccc

SEQ ID NO: 8339 - DNA, 50 bp, synthetic construct
  source 1..50: mol_type = other DNA
tcaataaacaatttaatctaacccaataaatctacattttttacataaac

SEQ ID NO: 8340 - DNA, 50 bp, synthetic construct
  source 1..50: mol_type = other DNA
aattaatatctcatatctctctaaaatatataaaaacaaactataccccc

SEQ ID NO: 8341 - DNA, 50 bp, synthetic construct
  source 1..50: mol_type = other DNA
aataaactttctaaattaactaaaacctatctcaaacattttacattcac

SEQ ID NO: 8342 - DNA, 50 bp, synthetic construct
  source 1..50: mol_type = other DNA
taatttctccataatcaaaaataattcaaatcaacaaatcctaaataacc

SEQ ID NO: 8343 - DNA, 50 bp, synthetic construct
  source 1..50: mol_type = other DNA
aataaactaaataatcttaatactatactctttccaattataaaatctac

SEQ ID NO: 8344 - DNA, 50 bp, synthetic construct
  source 1..50: mol_type = other DNA
atttaaaaaaattaatcacaacctcttcttaaaactatttaatatttacc

SEQ ID NO: 8345 - DNA, 50 bp, synthetic construct
  source 1..50: mol_type = other DNA
taactaactaatctctaattttctctcccatcactaaactaatacaattc

SEQ ID NO: 8346 - DNA, 50 bp, synthetic construct
  source 1..50: mol_type = other DNA
cctaaatccatacaccccaaatctttctcatccttaaaaaataaacaaac

SEQ ID NO: 8347 - DNA, 50 bp, synthetic construct
  source 1..50: mol_type = other DNA
aaataaattcttacraaatctaattatttaaaattataaaacacctcccc

SEQ ID NO: 8348 - DNA, 50 bp, synthetic construct
  source 1..50: mol_type = other DNA
aactaaacttctcaaaaacctcaaaaaactttacaaacacatcacataac

SEQ ID NO: 8349 - DNA, 50 bp, synthetic construct
  source 1..50: mol_type = other DNA
aaacaactaacrtatacacactaaacttaacaaaattcctaactaatttc

SEQ ID NO: 8350 - DNA, 50 bp, synthetic construct
  source 1..50: mol_type = other DNA
cttaatttataaaaaacccttccttatttattttcttcctccctcccttc

SEQ ID NO: 8351 - DNA, 50 bp, synthetic construct
  source 1..50: mol_type = other DNA
ttaaaatcrtcttttctctatctaaccaaatatctacctaatcctacaac

SEQ ID NO: 8352 - DNA, 50 bp, synthetic construct
  source 1..50: mol_type = other DNA
cccattcattaaattaaaatccttataacttaatcacttcctcaaaaaac

SEQ ID NO: 8353 - DNA, 50 bp, synthetic construct
  source 1..50: mol_type = other DNA
ctaaaaataccttcraataaattacctccccacataaaaaaacttaaacc

SEQ ID NO: 8354 - DNA, 50 bp, synthetic construct
  source 1..50: mol_type = other DNA
aactactttaatactaaacactatattaaatacaaactaaaaataccttc

SEQ ID NO: 8355 - DNA, 50 bp, synthetic construct
  source 1..50: mol_type = other DNA
ataccaataaataataaccactaaaaaacctatcaataaataccaataac

SEQ ID NO: 8356 - DNA, 50 bp, synthetic construct
  source 1..50: mol_type = other DNA
ataaacracttatacccaataaaatataaccctctactaatttttaatac

SEQ ID NO: 8357 - DNA, 50 bp, synthetic construct
  source 1..50: mol_type = other DNA
caaacataccaaatataaaaataaaactcatctatatattccatttaaac

SEQ ID NO: 8358 - DNA, 50 bp, synthetic construct
  source 1..50: mol_type = other DNA
ttatttttatatctaacatacttaaatccataccraccctccaactactc

SEQ ID NO: 8359 - DNA, 50 bp, synthetic construct
  source 1..50: mol_type = other DNA
taccaaaccccraaaaatcaaaatcaaatcctataacaaataactatatc

SEQ ID NO: 8360 - DNA, 50 bp, synthetic construct
  source 1..50: mol_type = other DNA
tctaaatatccaaataaataatttattttctctctcaaataccaaacccc

SEQ ID NO: 8361 - DNA, 50 bp, synthetic construct
  source 1..50: mol_type = other DNA
cttaattatataaaactcttaaacaataccaccatacattatacataacc

SEQ ID NO: 8362 - DNA, 50 bp, synthetic construct
  source 1..50: mol_type = other DNA
tctaacaaaatcccacaactaaatattatcaaacaatttaaactacattc

SEQ ID NO: 8363 - DNA, 50 bp, synthetic construct
  source 1..50: mol_type = other DNA
tcttcctaaactacaacctactaaacaaacttaaacacaaaaaaacacac

SEQ ID NO: 8364 - DNA, 50 bp, synthetic construct
  source 1..50: mol_type = other DNA
tttcattcttatattaaacattaacactcacttatactaaataaataccc

SEQ ID NO: 8365 - DNA, 50 bp, synthetic construct
  source 1..50: mol_type = other DNA
aaaataataatccaacattcatataactaccaattccctatctaaacctc

SEQ ID NO: 8366 - DNA, 50 bp, synthetic construct
  source 1..50: mol_type = other DNA
ccactactataaacaattcaccttataaacaaaaaaccaacaaaccaacc

SEQ ID NO: 8367 - DNA, 50 bp, synthetic construct
  source 1..50: mol_type = other DNA
tctactcctacatctacatttatatctaatcaacattaattaataactac

SEQ ID NO: 8368 - DNA, 50 bp, synthetic construct
  source 1..50: mol_type = other DNA
craatcatatctctacaataaatcccaattatcttcacaaactaattctc

SEQ ID NO: 8369 - DNA, 50 bp, synthetic construct
  source 1..50: mol_type = other DNA
ctacaataaaccataattacrccactacattccaacctatataacaaaac

SEQ ID NO: 8370 - DNA, 50 bp, synthetic construct
  source 1..50: mol_type = other DNA
acatcactaaacattataaacattcaattataatttcaaaaaaaccacac

SEQ ID NO: 8371 - DNA, 50 bp, synthetic construct
  source 1..50: mol_type = other DNA
caaaataacccctcacaataaaacattatacaaccctaaatatcaataac

SEQ ID NO: 8372 - DNA, 50 bp, synthetic construct
  source 1..50: mol_type = other DNA
attctaaaaaaactcaaatattttatttcccattctacacttataaatac

SEQ ID NO: 8373 - DNA, 50 bp, synthetic construct
  source 1..50: mol_type = other DNA
tctataccaacttaacaacaacaaaaacataacttacttctataaaacac

SEQ ID NO: 8374 - DNA, 50 bp, synthetic construct
  source 1..50: mol_type = other DNA
acacrctaaaacaacaatccccaacctttttaacatcaaaaaccaatttc

SEQ ID NO: 8375 - DNA, 50 bp, synthetic construct
  source 1..50: mol_type = other DNA
aacaatccccaacctttttaacatcaaaaaccaatttcrtaaaaaacaac

SEQ ID NO: 8376 - DNA, 50 bp, synthetic construct
  source 1..50: mol_type = other DNA
ctaacrcctaataatcactatcactatctccaaataaatcactatctccc

SEQ ID NO: 8377 - DNA, 50 bp, synthetic construct
  source 1..50: mol_type = other DNA
tactaaaattcttaaaaaccatttctttttatcrccctctaaacttcaac

SEQ ID NO: 8378 - DNA, 50 bp, synthetic construct
  source 1..50: mol_type = other DNA
aaaaattacataatctaaaaattaccacttacrtataattcaataccctc

SEQ ID NO: 8379 - DNA, 50 bp, synthetic construct
  source 1..50: mol_type = other DNA
tcccctaacttctaattaattactaaaaatccttaacttataactttatc

SEQ ID NO: 8380 - DNA, 50 bp, synthetic construct
  source 1..50: mol_type = other DNA
aaatccttaacttataactttatcrctccaatctcttcctccattatcac

SEQ ID NO: 8381 - DNA, 50 bp, synthetic construct
  source 1..50: mol_type = other DNA
actaactactacaaatcaactcctcaaacttaaaaaatcacttaatcccc

SEQ ID NO: 8382 - DNA, 50 bp, synthetic construct
  source 1..50: mol_type = other DNA
cttcctccaaaataacacctaataatactacttattaacatttctatccc

SEQ ID NO: 8383 - DNA, 50 bp, synthetic construct
  source 1..50: mol_type = other DNA
ctacatctttcaaaacacaacttacraaaacttccttcraaaaatcctcc

SEQ ID NO: 8384 - DNA, 50 bp, synthetic construct
  source 1..50: mol_type = other DNA
taatctaacaaactacatctttcaaaacacaacttacraaaacttccttc

SEQ ID NO: 8385 - DNA, 50 bp, synthetic construct
  source 1..50: mol_type = other DNA
ccttcaccttttctaatctaacaaactacatctttcaaaacacaacttac

SEQ ID NO: 8386 - DNA, 50 bp, synthetic construct
  source 1..50: mol_type = other DNA
ttaaaacatattccacttctatttttatttttctaactaattctttacac

SEQ ID NO: 8387 - DNA, 50 bp, synthetic construct
  source 1..50: mol_type = other DNA
atataaaaaacaatacaatcattctttctaaatcaatcaaaatatcaccc

SEQ ID NO: 8388 - DNA, 50 bp, synthetic construct
  source 1..50: mol_type = other DNA
acaaaaacatttaactaattatattatcaaaaccrtttattttacctttc

SEQ ID NO: 8389 - DNA, 50 bp, synthetic construct
  source 1..50: mol_type = other DNA
cctcaaaaataaaaatatcaaaatataccccacccctattactaataatc

SEQ ID NO: 8390 - DNA, 50 bp, synthetic construct
  source 1..50: mol_type = other DNA
tcaataacaaaaataaaacatattctaacatttccatttttaaaacaaac

SEQ ID NO: 8391 - DNA, 50 bp, synthetic construct
  source 1..50: mol_type = other DNA
acaattcaaaacactctcttcatcttattatcattaccttaataacatac

SEQ ID NO: 8392 - DNA, 50 bp, synthetic construct
  source 1..50: mol_type = other DNA
acctctaaaaactttataaccaaattatacttctcaaatccctttattac

SEQ ID NO: 8393 - DNA, 50 bp, synthetic construct
  source 1..50: mol_type = other DNA
aaaaactttataaccaaattatacttctcaaatccctttattacrtaaac

SEQ ID NO: 8394 - DNA, 50 bp, synthetic construct
  source 1..50: mol_type = other DNA
attaaaaaatataccatcacctttcaacaaacatttacttattataattc

SEQ ID NO: 8395 - DNA, 50 bp, synthetic construct
  source 1..50: mol_type = other DNA
tataccatcacctttcaacaaacatttacttattataattcrctaaactc

SEQ ID NO: 8396 - DNA, 50 bp, synthetic construct
  source 1..50: mol_type = other DNA
acaaaactaaatattctaaaaattaataatctatactataactcatctcc

SEQ ID NO: 8397 - DNA, 50 bp, synthetic construct
  source 1..50: mol_type = other DNA
taaaaaaaacttaacaaatacaaaatctaacacaaaatatattctacaac

SEQ ID NO: 8398 - DNA, 50 bp, synthetic construct
  source 1..50: mol_type = other DNA
taaactatcaacrtttccaaattcctctccaaacaccrcaaaataataac

SEQ ID NO: 8399 - DNA, 50 bp, synthetic construct
  source 1..50: mol_type = other DNA
aactctttcctactatctccatataaccraatatacactaaactatcaac

SEQ ID NO: 8400 - DNA, 50 bp, synthetic construct
  source 1..50: mol_type = other DNA
caaatctttcaaattaacccctaactctttcctactatctccatataacc

SEQ ID NO: 8401 - DNA, 50 bp, synthetic construct
  source 1..50: mol_type = other DNA
cattatataaaataactccttttcaaaacaaacataaattcaaactaaac

SEQ ID NO: 8402 - DNA, 50 bp, synthetic construct
  source 1..50: mol_type = other DNA
actacctataaaatttccctttaaaattttttccattctaatttcatcac

SEQ ID NO: 8403 - DNA, 50 bp, synthetic construct
  source 1..50: mol_type = other DNA
ttttaactcaacaaaaaataccaaaaaaaactcacttccctatttttccc

SEQ ID NO: 8404 - DNA, 50 bp, synthetic construct
  source 1..50: mol_type = other DNA
aacaaaaaataccaaaaaaaactcacttccctatttttcccraaaaccac

SEQ ID NO: 8405 - DNA, 50 bp, synthetic construct
  source 1..50: mol_type = other DNA
caaaaaataccaaaaaaaactcacttccctatttttcccraaaaccacrc

SEQ ID NO: 8406 - DNA, 50 bp, synthetic construct
  source 1..50: mol_type = other DNA
cctctaaaataaccaaaaaataccccttcctatcctaactaatataacac

SEQ ID NO: 8407 - DNA, 50 bp, synthetic construct
  source 1..50: mol_type = other DNA
ctccactcttcrtacctttccttaaaaatcctaaatattaaatttctatc

SEQ ID NO: 8408 - DNA, 50 bp, synthetic construct
  source 1..50: mol_type = other DNA
tcttcrtacctttccttaaaaatcctaaatattaaatttctatcraaatc

SEQ ID NO: 8409 - DNA, 50 bp, synthetic construct
  source 1..50: mol_type = other DNA
tccacccatatcctattatattttcccaaaattttcttttatcttacrac

SEQ ID NO: 8410 - DNA, 50 bp, synthetic construct
  source 1..50: mol_type = other DNA
aaatccacccatatcctattatattttcccaaaattttcttttatcttac

SEQ ID NO: 8411 - DNA, 50 bp, synthetic construct
  source 1..50: mol_type = other DNA
taactatcaacaacaactaaaacctctatcrcctaaaacttccattcacc

SEQ ID NO: 8412 - DNA, 50 bp, synthetic construct
  source 1..50: mol_type = other DNA
ctacaataaataaccaaaattctaatcaccaaatactactataatactac

SEQ ID NO: 8413 - DNA, 50 bp, synthetic construct
  source 1..50: mol_type = other DNA
attcaaactctctataaactatactatcatccctattattttctccaaac

SEQ ID NO: 8414 - DNA, 50 bp, synthetic construct
  source 1..50: mol_type = other DNA
acctcaacaaatatcattccatcattaacaaattacaaataaatctttac

SEQ ID NO: 8415 - DNA, 50 bp, synthetic construct
  source 1..50: mol_type = other DNA
tttcaattttactacatcaaatataactacttacaaatcatacttctttc

SEQ ID NO: 8416 - DNA, 50 bp, synthetic construct
  source 1..50: mol_type = other DNA
atataactttactctaaaaattttatcttttccctcatactttaacccac

SEQ ID NO: 8417 - DNA, 50 bp, synthetic construct
  source 1..50: mol_type = other DNA
aataccaatttctttccttctctattatttataaaaacccttaaacctcc

SEQ ID NO: 8418 - DNA, 50 bp, synthetic construct
  source 1..50: mol_type = other DNA
ctacacaataaaccaatcacataacttcaaaaaactaccrtaaaaactac

SEQ ID NO: 8419 - DNA, 50 bp, synthetic construct
  source 1..50: mol_type = other DNA
ataccaatcttaatcaaattacctctttttatttaaaacaattttatcac

SEQ ID NO: 8420 - DNA, 50 bp, synthetic construct
  source 1..50: mol_type = other DNA
acrtctaaacattacaaactcttattaaaaattaaactttcraaccraac

SEQ ID NO: 8421 - DNA, 50 bp, synthetic construct
  source 1..50: mol_type = other DNA
acrcccracccraaaacttaactcttaataaaaacctacaatattcaaac

SEQ ID NO: 8422 - DNA, 50 bp, synthetic construct
  source 1..50: mol_type = other DNA
aaaaactccctatctattaccctataatctctataaaaaccaaataatac

SEQ ID NO: 8423 - DNA, 50 bp, synthetic construct
  source 1..50: mol_type = other DNA
tacattcctatactaatatcacttaaaaatataattacataatttatttc

SEQ ID NO: 8424 - DNA, 50 bp, synthetic construct
  source 1..50: mol_type = other DNA
aattttcttaataaaaactttttcccaacccaatatttcatccaaaaatc

SEQ ID NO: 8425 - DNA, 50 bp, synthetic construct
  source 1..50: mol_type = other DNA
aaaataaaaaaatccctcactttccttaaaaacaatttacttctattccc

SEQ ID NO: 8426 - DNA, 50 bp, synthetic construct
  source 1..50: mol_type = other DNA
aaactccaataatctctaaatatatctctatttacratttcttcctttcc

SEQ ID NO: 8427 - DNA, 50 bp, synthetic construct
  source 1..50: mol_type = other DNA
tcactccaactacattaacctccttacctttattatattttaaaaacacc

SEQ ID NO: 8428 - DNA, 50 bp, synthetic construct
  source 1..50: mol_type = other DNA
ttaacctccttacctttattatattttaaaaacaccracrtaatcctacc

SEQ ID NO: 8429 - DNA, 50 bp, synthetic construct
  source 1..50: mol_type = other DNA
actattccttttaccacattcatcattcatatattcatatcttccccatc

SEQ ID NO: 8430 - DNA, 50 bp, synthetic construct
  source 1..50: mol_type = other DNA
attcctaccttatttttctaaataacacttattaccttctaaattatatc

SEQ ID NO: 8431 - DNA, 50 bp, synthetic construct
  source 1..50: mol_type = other DNA
tattcacacttccctaaacataaataaactatactatataaccctaaatc

SEQ ID NO: 8432 - DNA, 50 bp, synthetic construct
  source 1..50: mol_type = other DNA
aactaatccrccaaacaactctacaacaaaccaaaaaaataaacctcaac

SEQ ID NO: 8433 - DNA, 50 bp, synthetic construct
  source 1..50: mol_type = other DNA
aaaaaaataaacctcaacrtaatacractcatatttacaacttttcttcc

SEQ ID NO: 8434 - DNA, 50 bp, synthetic construct
  source 1..50: mol_type = other DNA
aaaatactcactactatcataaataacrtctaataccacraattccaaac

SEQ ID NO: 8435 - DNA, 50 bp, synthetic construct
  source 1..50: mol_type = other DNA
caacttttcttccraataacactaacaacttcacaaaacrcctaaaaccc

SEQ ID NO: 8436 - DNA, 50 bp, synthetic construct
  source 1..50: mol_type = other DNA
craataacactaacaacttcacaaaacrcctaaaacccrtaatatcaaac

SEQ ID NO: 8437 - DNA, 50 bp, synthetic construct
  source 1..50: mol_type = other DNA
acctcatttattttaataatcataaataacccatacccaaaaaatattcc

SEQ ID NO: 8438 - DNA, 50 bp, synthetic construct
  source 1..50: mol_type = other DNA
ctaaaaaacaccrtatcctaaaaaaaattccaaactcaaaattctatacc

SEQ ID NO: 8439 - DNA, 50 bp, synthetic construct
  source 1..50: mol_type = other DNA
tatacttttctttatacccaatatttaaacacaatatactaaaaaacacc

SEQ ID NO: 8440 - DNA, 50 bp, synthetic construct
  source 1..50: mol_type = other DNA
aaaactctctcttcaacattctcttatatttttataaatacttcactttc

SEQ ID NO: 8441 - DNA, 50 bp, synthetic construct
  source 1..50: mol_type = other DNA
actactaaaatataccccaaatactaaaaaccaaataatatctccttaac

SEQ ID NO: 8442 - DNA, 50 bp, synthetic construct
  source 1..50: mol_type = other DNA
acatcacaaacttcctaatcaaaaaatcttaaacccatctataactcccc

SEQ ID NO: 8443 - DNA, 50 bp, synthetic construct
  source 1..50: mol_type = other DNA
tactactacacctttacratttccaacctcaacaaaaatctaaatacccc

SEQ ID NO: 8444 - DNA, 50 bp, synthetic construct
  source 1..50: mol_type = other DNA
aataaaataattaccacraaacacccaaatccttactaaaattaaaaacc

SEQ ID NO: 8445 - DNA, 50 bp, synthetic construct
  source 1..50: mol_type = other DNA
aaaaaacaaaaacttataaaaccrttttctaaacactcctataacaacac

SEQ ID NO: 8446 - DNA, 50 bp, synthetic construct
  source 1..50: mol_type = other DNA
aaaactttcctttcctaaaattcrtactaccacaaaaatatttaaaaaac

SEQ ID NO: 8447 - DNA, 50 bp, synthetic construct
  source 1..50: mol_type = other DNA
ttttactatcatttacaccataactatatatataaaatcataaatacaac

SEQ ID NO: 8448 - DNA, 50 bp, synthetic construct
  source 1..50: mol_type = other DNA
accaaaaaaaaaatcatacttctaaaactactcraaaatttccatatacc

SEQ ID NO: 8449 - DNA, 50 bp, synthetic construct
  source 1..50: mol_type = other DNA
tcttccaatatcacatttcaaaaaacaataataaaaccctaaaatcatcc

SEQ ID NO: 8450 - DNA, 50 bp, synthetic construct
  source 1..50: mol_type = other DNA
caaacctcttccttaacaataacaaatatatcrtacttaaaattaactcc

SEQ ID NO: 8451 - DNA, 50 bp, synthetic construct
  source 1..50: mol_type = other DNA
atcaaataccactttactcaaacctcttccttaacaataacaaatatatc

SEQ ID NO: 8452 - DNA, 50 bp, synthetic construct
  source 1..50: mol_type = other DNA
ccactccaaaacataaacaaattaaaatacaaaacacactaaaacatctc

SEQ ID NO: 8453 - DNA, 50 bp, synthetic construct
  source 1..50: mol_type = other DNA
aaataactttaaaataaaacaaacctaaacttaaatcccaacttcaccac

SEQ ID NO: 8454 - DNA, 50 bp, synthetic construct
  source 1..50: mol_type = other DNA
aacttaaatcccaacttcaccacrtattaaccttaactaaattatataac

SEQ ID NO: 8455 - DNA, 50 bp, synthetic construct
  source 1..50: mol_type = other DNA
tcaaatttactacttaattatacaactacaattttctacacatttttctc

SEQ ID NO: 8456 - DNA, 50 bp, synthetic construct
  source 1..50: mol_type = other DNA
taaatattcactactaaccaataaatctcctaccctttcactttccaaac

SEQ ID NO: 8457 - DNA, 50 bp, synthetic construct
  source 1..50: mol_type = other DNA
aaatcccacttcaaaattccaataaataacaaaactataaatcacacttc

SEQ ID NO: 8458 - DNA, 50 bp, synthetic construct
  source 1..50: mol_type = other DNA
caaaactcaaccraaaaacattattaaatatccccaaacctaatttctac

SEQ ID NO: 8459 - DNA, 50 bp, synthetic construct
  source 1..50: mol_type = other DNA
aactactctaacrcaaaaattaaatctaaaaatacttaataataccttcc

SEQ ID NO: 8460 - DNA, 50 bp, synthetic construct
  source 1..50: mol_type = other DNA
caacccatcttcctaaaaatactattttcaaataccttcaaattttcccc

SEQ ID NO: 8461 - DNA, 50 bp, synthetic construct
  source 1..50: mol_type = other DNA
rattatttactcaaaaccrttaaaattctataaaaatcctaaccctctac

SEQ ID NO: 8462 - DNA, 50 bp, synthetic construct
  source 1..50: mol_type = other DNA
taaaaacaaaaaactacacrttaattacaatcrattatttactcaaaacc

SEQ ID NO: 8463 - DNA, 50 bp, synthetic construct
  source 1..50: mol_type = other DNA
rtaaaaaatcaaaattttcacaaaactttaacraccctaaacaaacaatc

SEQ ID NO: 8464 - DNA, 50 bp, synthetic construct
  source 1..50: mol_type = other DNA
aaaacattaaatcatattctataaaataactcctaataaaaccattaccc

SEQ ID NO: 8465 - DNA, 50 bp, synthetic construct
  source 1..50: mol_type = other DNA
aaaaaaaaactatataaacrtcactataaacaaaatttcactacctcaac

SEQ ID NO: 8466 - DNA, 50 bp, synthetic construct
  source 1..50: mol_type = other DNA
ctatataaacrtcactataaacaaaatttcactacctcaacrcttctctc

SEQ ID NO: 8467 - DNA, 50 bp, synthetic construct
  source 1..50: mol_type = other DNA
ctacttactacaaaccacttctctataatttcctaaataatctttaaacc

SEQ ID NO: 8468 - DNA, 50 bp, synthetic construct
  source 1..50: mol_type = other DNA
tctctataatttcctaaataatctttaaaccraaacaaaaaacttaattc

SEQ ID NO: 8469 - DNA, 50 bp, synthetic construct
  source 1..50: mol_type = other DNA
tctttaaaccraaacaaaaaacttaattcraaaactatattttcttaatc

SEQ ID NO: 8470 - DNA, 50 bp, synthetic construct
  source 1..50: mol_type = other DNA
aaaataatcttcactaaactaaaaactacctaaatcacttcaattacttc

SEQ ID NO: 8471 - DNA, 50 bp, synthetic construct
  source 1..50: mol_type = other DNA
actatcttttatctttttttttacctatttactaccttataaaaacaaac

SEQ ID NO: 8472 - DNA, 50 bp, synthetic construct
  source 1..50: mol_type = other DNA
aactaatatcttcaactctttttaaatataatataacaattttctttctc

SEQ ID NO: 8473 - DNA, 50 bp, synthetic construct
  source 1..50: mol_type = other DNA
ctaaactcaccctctacctctcttaataataccattcaaataaaaaaatc

SEQ ID NO: 8474 - DNA, 50 bp, synthetic construct
  source 1..50: mol_type = other DNA
tctctcaaacttataacactaaccttatcccccaccatatataaaactac

SEQ ID NO: 8475 - DNA, 50 bp, synthetic construct
  source 1..50: mol_type = other DNA
ccttatcccccaccatatataaaactacrtatcataccaccaaaaatctc

SEQ ID NO: 8476 - DNA, 50 bp, synthetic construct
  source 1..50: mol_type = other DNA
cacctaacaaacatttcataatttcctcatctttaaaaacaaaacacacc

SEQ ID NO: 8477 - DNA, 50 bp, synthetic construct
  source 1..50: mol_type = other DNA
ccaaaataaaaacaaactattctacaaaaccctacccacattacaaattc

SEQ ID NO: 8478 - DNA, 50 bp, synthetic construct
  source 1..50: mol_type = other DNA
taacacctaaattacctacaactctcaaaaaataaaacattctaactcac

SEQ ID NO: 8479 - DNA, 50 bp, synthetic construct
  source 1..50: mol_type = other DNA
taacacataataacrctctataataaaaacatcatcctaaacctaaactc

SEQ ID NO: 8480 - DNA, 50 bp, synthetic construct
  source 1..50: mol_type = other DNA
ctctccaaaacaccraactcaaacccaaaataatacttccattacaaaac

SEQ ID NO: 8481 - DNA, 50 bp, synthetic construct
  source 1..50: mol_type = other DNA
tttcaaaaaaaactatttacccaaacaatatcctcaaacaaacctatacc

SEQ ID NO: 8482 - DNA, 50 bp, synthetic construct
  source 1..50: mol_type = other DNA
aaacaacctcccctaaaaatattcaatatacaactcttcacaaaacaatc

SEQ ID NO: 8483 - DNA, 50 bp, synthetic construct
  source 1..50: mol_type = other DNA
ccctaaaaatattcaatatacaactcttcacaaaacaatcrctcaaatac

SEQ ID NO: 8484 - DNA, 50 bp, synthetic construct
  source 1..50: mol_type = other DNA
attcaatatacaactcttcacaaaacaatcrctcaaatacrtaacaacac

SEQ ID NO: 8485 - DNA, 50 bp, synthetic construct
  source 1..50: mol_type = other DNA
tctctcaacaaaataacatatttatttttaacctaaaaacctcaactatc

SEQ ID NO: 8486 - DNA, 50 bp, synthetic construct
  source 1..50: mol_type = other DNA
atataaaaccaacccaaataaactcaatttatacaaacctcrtataacac

SEQ ID NO: 8487 - DNA, 50 bp, synthetic construct
  source 1..50: mol_type = other DNA
tttatctttatataaaaccaacccaaataaactcaatttatacaaacctc

SEQ ID NO: 8488 - DNA, 50 bp, synthetic construct
  source 1..50: mol_type = other DNA
actccrctttcatttctttcacatacaactttccacataaaatttcatac

SEQ ID NO: 8489 - DNA, 50 bp, synthetic construct
  source 1..50: mol_type = other DNA
ctttaaaactaaaaaaccaaaacttctaaacccaccatcaacrcaactcc

SEQ ID NO: 8490 - DNA, 50 bp, synthetic construct
  source 1..50: mol_type = other DNA
actaaaaactttaaaactaaaaaaccaaaacttctaaacccaccatcaac

SEQ ID NO: 8491 - DNA, 50 bp, synthetic construct
  source 1..50: mol_type = other DNA
aacccaaaaactttaacctttcaatcccaaaatttccaataataaaatcc

SEQ ID NO: 8492 - DNA, 50 bp, synthetic construct
  source 1..50: mol_type = other DNA
cccaaaaactttaacctttcaatcccaaaatttccaataataaaatccrc

SEQ ID NO: 8493 - DNA, 50 bp, synthetic construct
  source 1..50: mol_type = other DNA
aataaccaattaaataaccraataaaaaacttattctacccccctttatc

SEQ ID NO: 8494 - DNA, 50 bp, synthetic construct
  source 1..50: mol_type = other DNA
taaaacaattaatattataccttaaacaaaatctttataataaattaacc

SEQ ID NO: 8495 - DNA, 50 bp, synthetic construct
  source 1..50: mol_type = other DNA
acatttatcctatcctaatatttaaataaaacttctcttaacatttcaac

SEQ ID NO: 8496 - DNA, 50 bp, synthetic construct
  source 1..50: mol_type = other DNA
aactctctctacatatcaaaaacaattatcttaacatatttactacaaac

SEQ ID NO: 8497 - DNA, 50 bp, synthetic construct
  source 1..50: mol_type = other DNA
acttaaaaattccactaatataaacaaaacaaactaaaccacaacttctc

SEQ ID NO: 8498 - DNA, 50 bp, synthetic construct
  source 1..50: mol_type = other DNA
ataaaattacccaaactaatctccaactcctaaactcaaactatctaccc

SEQ ID NO: 8499 - DNA, 50 bp, synthetic construct
  source 1..50: mol_type = other DNA
tattaataataaaatattctctaaactcattttcttacttctttaaatac

SEQ ID NO: 8500 - DNA, 50 bp, synthetic construct
  source 1..50: mol_type = other DNA
taaaaacttaatatatccaatccataaaaacatcctcctatccactaaac

SEQ ID NO: 8501 - DNA, 50 bp, synthetic construct
  source 1..50: mol_type = other DNA
aaaactactctaatatatccrcaaccctctcaaatactaccatataattc

SEQ ID NO: 8502 - DNA, 50 bp, synthetic construct
  source 1..50: mol_type = other DNA
caaaaacccacttaaaaaaacaatctatctattctcaaatctcaaactcc

SEQ ID NO: 8503 - DNA, 50 bp, synthetic construct
  source 1..50: mol_type = other DNA
taaataactaaacaaaacaacctaaaaactcaaattaaataaaacccacc

SEQ ID NO: 8504 - DNA, 50 bp, synthetic construct
  source 1..50: mol_type = other DNA
aaacttccaaactactttatttaactactcaaacctcaacaataacaaac

SEQ ID NO: 8505 - DNA, 50 bp, synthetic construct
  source 1..50: mol_type = other DNA
caccctacaattcratctcaaactactatactaacaataaacraaactcc

SEQ ID NO: 8506 - DNA, 50 bp, synthetic construct
  source 1..50: mol_type = other DNA
caaactactatactaacaataaacraaactccrtaaatataaaaccctcc

SEQ ID NO: 8507 - DNA, 50 bp, synthetic construct
  source 1..50: mol_type = other DNA
tttctacatttccaactaaacaaataacatacraaaaaattatatcccac

SEQ ID NO: 8508 - DNA, 50 bp, synthetic construct
  source 1..50: mol_type = other DNA
rtcattcraaacataataaaaaccrcaacaatcaaaaacatttctaaaac

SEQ ID NO: 8509 - DNA, 50 bp, synthetic construct
  source 1..50: mol_type = other DNA
tccactatatttcraataacraatttcttaataaccttatccttaaacac

SEQ ID NO: 8510 - DNA, 50 bp, synthetic construct
  source 1..50: mol_type = other DNA
tatatttcraataacraatttcttaataaccttatccttaaacacrcatc

SEQ ID NO: 8511 - DNA, 50 bp, synthetic construct
  source 1..50: mol_type = other DNA
acctaatactataactcctaattaaaaaccatcattaaaacaaaaaattc

SEQ ID NO: 8512 - DNA, 50 bp, synthetic construct
  source 1..50: mol_type = other DNA
aattctaactacctataaaaacttacttcctatcaccataacaacaaaac

SEQ ID NO: 8513 - DNA, 50 bp, synthetic construct
  source 1..50: mol_type = other DNA
taactacctataaaaacttacttcctatcaccataacaacaaaacraatc

SEQ ID NO: 8514 - DNA, 50 bp, synthetic construct
  source 1..50: mol_type = other DNA
aaaaaatttctactctcaatcccataaaaataaaatcaacacttccaaac

SEQ ID NO: 8515 - DNA, 50 bp, synthetic construct
  source 1..50: mol_type = other DNA
aaacraaaaaactccaccacattaataaaaccaaaaacaataactcatcc

SEQ ID NO: 8516 - DNA, 50 bp, synthetic construct
  source 1..50: mol_type = other DNA
acrcraataaatcattacttttaacctcattaatataataaaactcttcc

SEQ ID NO: 8517 - DNA, 50 bp, synthetic construct
  source 1..50: mol_type = other DNA
acataaaaacraaccaattaaacaattaaaaacattctaaaaacaaccac

SEQ ID NO: 8518 - DNA, 50 bp, synthetic construct
  source 1..50: mol_type = other DNA
cccraaaaaaaacttccacaatacaacracaaactaaaaaactcctcaac

SEQ ID NO: 8519 - DNA, 50 bp, synthetic construct
  source 1..50: mol_type = other DNA
rattcctaaaactaaacaatcttctcrtcaaaataaaaactaataaaaac

SEQ ID NO: 8520 - DNA, 50 bp, synthetic construct
  source 1..50: mol_type = other DNA
aactaaacaatcttctcrtcaaaataaaaactaataaaaacracctcccc

SEQ ID NO: 8521 - DNA, 50 bp, synthetic construct
  source 1..50: mol_type = other DNA
aacataaacactatactaaatctaaatttttcacctacccttcttcaacc

SEQ ID NO: 8522 - DNA, 50 bp, synthetic construct
  source 1..50: mol_type = other DNA
aaacccaacacaatatttatattaatcaaaaataaaaaactatatctaac

SEQ ID NO: 8523 - DNA, 50 bp, synthetic construct
  source 1..50: mol_type = other DNA
acccaacacaatatttatattaatcaaaaataaaaaactatatctaacrc

SEQ ID NO: 8524 - DNA, 50 bp, synthetic construct
  source 1..50: mol_type = other DNA
aaattcaaaactccaataaactataatcccaccacaacattccaacctac

SEQ ID NO: 8525 - DNA, 50 bp, synthetic construct
  source 1..50: mol_type = other DNA
atctcaaaccractacctatatattccatatctttcctctaattcatacc

SEQ ID NO: 8526 - DNA, 50 bp, synthetic construct
  source 1..50: mol_type = other DNA
acaactaaaaatacttctaaatcattaccatcctaaaatacttttaaacc

SEQ ID NO: 8527 - DNA, 50 bp, synthetic construct
  source 1..50: mol_type = other DNA
ctcccaaccaaatataaaatataatctcctaatatacctttttttaaacc

SEQ ID NO: 8528 - DNA, 50 bp, synthetic construct
  source 1..50: mol_type = other DNA
tcatctcactaaaaaataccaaacaataaacacaaaacaataaatacaac

SEQ ID NO: 8529 - DNA, 50 bp, synthetic construct
  source 1..50: mol_type = other DNA
tcatctcactaaaaaataccaaacaataaacrcaaaacaataaatacaac

SEQ ID NO: 8530 - DNA, 50 bp, synthetic construct
  source 1..50: mol_type = other DNA
aaataaccraataaaaacaactctaatctacaactcccaacrtaaacaac

SEQ ID NO: 8531 - DNA, 50 bp, synthetic construct
  source 1..50: mol_type = other DNA
tcttctacrttactcacrctaaaaactataaaccaaaactattcccattc

SEQ ID NO: 8532 - DNA, 50 bp, synthetic construct
  source 1..50: mol_type = other DNA
crtaaaccaccaaacctaacccaattactttcttcaatctaaacataaac

SEQ ID NO: 8533 - DNA, 50 bp, synthetic construct
  source 1..50: mol_type = other DNA
crctcatactcaaactaaaaaaaataattaaaccaaacctaataactcac

SEQ ID NO: 8534 - DNA, 50 bp, synthetic construct
  source 1..50: mol_type = other DNA
taaaccaaacctaataactcacrcccataatcccaacattttaaaaaaac

SEQ ID NO: 8535 - DNA, 50 bp, synthetic construct
  source 1..50: mol_type = other DNA
aaaaattaaataatacrtttacccaaaatcaactttatttattcccccac

SEQ ID NO: 8536 - DNA, 50 bp, synthetic construct
  source 1..50: mol_type = other DNA
tatttaatactacctctccaaaaaaactaaataattaacaacataacccc

SEQ ID NO: 8537 - DNA, 50 bp, synthetic construct
  source 1..50: mol_type = other DNA
aaaataaatacaccrtttatttcttatcccctctccaattattttaaatc

SEQ ID NO: 8538 - DNA, 50 bp, synthetic construct
  source 1..50: mol_type = other DNA
crtaataactaacratattactactactataaactaaaaataaatacacc

SEQ ID NO: 8539 - DNA, 50 bp, synthetic construct
  source 1..50: mol_type = other DNA
cratacatttactttcaatccacaataataataacatcrttaattactac

SEQ ID NO: 8540 - DNA, 50 bp, synthetic construct
  source 1..50: mol_type = other DNA
acatttactttcaatccacaataataataacatcrttaattactacrtac

SEQ ID NO: 8541 - DNA, 50 bp, synthetic construct
  source 1..50: mol_type = other DNA
atctaaacctctatttccttatatacaataacaattaattattatacctc

SEQ ID NO: 8542 - DNA, 50 bp, synthetic construct
  source 1..50: mol_type = other DNA
actacctctaaaattccaaatatctaaatctctaattctaacttctttcc

SEQ ID NO: 8543 - DNA, 50 bp, synthetic construct
  source 1..50: mol_type = other DNA
attaatcaataaaccctactaaacactatttactattactaatatataac

SEQ ID NO: 8544 - DNA, 50 bp, synthetic construct
  source 1..50: mol_type = other DNA
tatctacracattcctctaattccaaaaaatcrtttaccttaattcaccc

SEQ ID NO: 8545 - DNA, 50 bp, synthetic construct
  source 1..50: mol_type = other DNA
taataataaacttaattaaaaaattcaacrtaacaacacttcacacaatc

SEQ ID NO: 8546 - DNA, 50 bp, synthetic construct
  source 1..50: mol_type = other DNA
ttattaatcatatcataacaacatctctatttcttaaaaactcatttcac

SEQ ID NO: 8547 - DNA, 50 bp, synthetic construct
  source 1..50: mol_type = other DNA
taacaacatctctatttcttaaaaactcatttcacrtcatacacccatcc

SEQ ID NO: 8548 - DNA, 50 bp, synthetic construct
  source 1..50: mol_type = other DNA
attaaaatcrtcaacccctttttccaatatctctaaaactcaacctaatc

SEQ ID NO: 8549 - DNA, 50 bp, synthetic construct
  source 1..50: mol_type = other DNA
actcaacctaatcraaatctaaaaactttaacttaataataactacctac

SEQ ID NO: 8550 - DNA, 50 bp, synthetic construct
  source 1..50: mol_type = other DNA
caacctaatcraaatctaaaaactttaacttaataataactacctacrac

SEQ ID NO: 8551 - DNA, 50 bp, synthetic construct
  source 1..50: mol_type = other DNA
cctaatcraaatctaaaaactttaacttaataataactacctacracrac

SEQ ID NO: 8552 - DNA, 50 bp, synthetic construct
  source 1..50: mol_type = other DNA
aaccataacaatcraataactaaaaactttaatacaaaaacaattcctac

SEQ ID NO: 8553 - DNA, 50 bp, synthetic construct
  source 1..50: mol_type = other DNA
ataactaaaaactttaatacaaaaacaattcctacraataataataaaac

SEQ ID NO: 8554 - DNA, 50 bp, synthetic construct
  source 1..50: mol_type = other DNA
caattcctacraataataataaaacrctccacttactaatatataaactc

SEQ ID NO: 8555 - DNA, 50 bp, synthetic construct
  source 1..50: mol_type = other DNA
taataataaaacrctccacttactaatatataaactcracaaaaaaaacc

SEQ ID NO: 8556 - DNA, 50 bp, synthetic construct
  source 1..50: mol_type = other DNA
aaaatctactacaacccaatacaactaacaaaactacaatccraacctac

SEQ ID NO: 8557 - DNA, 50 bp, synthetic construct
  source 1..50: mol_type = other DNA
aacaacataaaatctactacaacccaatacaactaacaaaactacaatcc

SEQ ID NO: 8558 - DNA, 50 bp, synthetic construct
  source 1..50: mol_type = other DNA
acactaaattataataaaccccatactacttaatataaaatcrattaacc

SEQ ID NO: 8559 - DNA, 50 bp, synthetic construct
  source 1..50: mol_type = other DNA
aattataataaaccccatactacttaatataaaatcrattaaccraaaac

SEQ ID NO: 8560 - DNA, 50 bp, synthetic construct
  source 1..50: mol_type = other DNA
aatcaacttctcttcaccttcctttaaccaataaaaaattctactaaaac

SEQ ID NO: 8561 - DNA, 50 bp, synthetic construct
  source 1..50: mol_type = other DNA
aataacatattcaaaatcaaaactataactaaaaccaaataatctaactc

SEQ ID NO: 8562 - DNA, 50 bp, synthetic construct
  source 1..50: mol_type = other DNA
atcctcaacctttttaacactaaaaaccaattttataaaacaatttttcc

SEQ ID NO: 8563 - DNA, 50 bp, synthetic construct
  source 1..50: mol_type = other DNA
aaatcatcaaacattaaattctcttaaaaaatacacaacctaaatccctc

SEQ ID NO: 8564 - DNA, 50 bp, synthetic construct
  source 1..50: mol_type = other DNA
cctactatataacctaattcctaacaaaccacaaaccaataccaatctac

SEQ ID NO: 8565 - DNA, 50 bp, synthetic construct
  source 1..50: mol_type = other DNA
atcccttttatacttctattaactataaacaaacctctaaatctctttac

SEQ ID NO: 8566 - DNA, 50 bp, synthetic construct
  source 1..50: mol_type = other DNA
ctcattcctctcaatctctaaaaccttaatctaattacttctcctatacc

SEQ ID NO: 8567 - DNA, 50 bp, synthetic construct
  source 1..50: mol_type = other DNA
tttactaccacaaccaaaaaaaccaactaatatatcaaacrtaaaaaaac

SEQ ID NO: 8568 - DNA, 50 bp, synthetic construct
  source 1..50: mol_type = other DNA
aacttttctaattataacaataaaatcactaataaactactaactaccac

SEQ ID NO: 8569 - DNA, 50 bp, synthetic construct
  source 1..50: mol_type = other DNA
tctctcctaaatatcttcttaaaataaatacatctatacaaacctacctc

SEQ ID NO: 8570 - DNA, 50 bp, synthetic construct
  source 1..50: mol_type = other DNA
aataaaattaacaaaacaaactacatttcracactataaatatattctac

SEQ ID NO: 8571 - DNA, 50 bp, synthetic construct
  source 1..50: mol_type = other DNA
aaccataaaattactacaaaatatccrtaaatctcrattctaaaaaaatc

SEQ ID NO: 8572 - DNA, 50 bp, synthetic construct
  source 1..50: mol_type = other DNA
aaacaaaaacaataatttatacraactccaacttcaaacatatcatttcc

SEQ ID NO: 8573 - DNA, 50 bp, synthetic construct
  source 1..50: mol_type = other DNA
taactatctttcttcctaccatctatttaaacaaaaacaataatttatac

SEQ ID NO: 8574 - DNA, 50 bp, synthetic construct
  source 1..50: mol_type = other DNA
aacaactattcttcaacaaacttacaattaattactccacaaaaacatac

SEQ ID NO: 8575 - DNA, 50 bp, synthetic construct
  source 1..50: mol_type = other DNA
aattaaaaaaaacccccaaaacaaaaatcatctaaatataactctcactc

SEQ ID NO: 8576 - DNA, 50 bp, synthetic construct
  source 1..50: mol_type = other DNA
attaccaaaatcaaaactttcccataatatttcttttaaaaataaatttc

SEQ ID NO: 8577 - DNA, 50 bp, synthetic construct
  source 1..50: mol_type = other DNA
actcaaacaatcctccaatcttaacctcctaaatacctaaaactacaaac

SEQ ID NO: 8578 - DNA, 50 bp, synthetic construct
  source 1..50: mol_type = other DNA
atactatttatattcctttaacaatcaaaaaacatcactttatcaaacac

SEQ ID NO: 8579 - DNA, 50 bp, synthetic construct
  source 1..50: mol_type = other DNA
ctactaaaacctaatactctaaattaactaataaacttcataaactaacc

SEQ ID NO: 8580 - DNA, 50 bp, synthetic construct
  source 1..50: mol_type = other DNA
aacactttcccacacrccattttatcaataattctatttccattttaacc

SEQ ID NO: 8581 - DNA, 50 bp, synthetic construct
  source 1..50: mol_type = other DNA
ataaaaacaaaacattccttaaaaaatcccttcraaaaaaactccattac

SEQ ID NO: 8582 - DNA, 50 bp, synthetic construct
  source 1..50: mol_type = other DNA
ctttcttatttaacccaataaaaacaaaacattccttaaaaaatcccttc

SEQ ID NO: 8583 - DNA, 50 bp, synthetic construct
  source 1..50: mol_type = other DNA
ttataccaaatattttacrcaaataaaaaaacttacctaaacatacctac

SEQ ID NO: 8584 - DNA, 50 bp, synthetic construct
  source 1..50: mol_type = other DNA
ttaaaacataaattcctaaaaactctaccccttccttacaatacrcattc

SEQ ID NO: 8585 - DNA, 50 bp, synthetic construct
  source 1..50: mol_type = other DNA
cccaacttaaaacataaattcctaaaaactctaccccttccttacaatac

SEQ ID NO: 8586 - DNA, 50 bp, synthetic construct
  source 1..50: mol_type = other DNA
actatttataaatattcaatataacacttttttttccttaaaaaccacac

SEQ ID NO: 8587 - DNA, 50 bp, synthetic construct
  source 1..50: mol_type = other DNA
actcaacaaaataaacctctataaaaaatactaatttttcaaatcatcac

SEQ ID NO: 8588 - DNA, 50 bp, synthetic construct
  source 1..50: mol_type = other DNA
ttaatcttttcactctccttctcaatacatccttaaaacaatttaataac

SEQ ID NO: 8589 - DNA, 50 bp, synthetic construct
  source 1..50: mol_type = other DNA
cactaatattatatatactataaaatccrccttcacaactttccacttac

SEQ ID NO: 8590 - DNA, 50 bp, synthetic construct
  source 1..50: mol_type = other DNA
ataacttcccactacttttattcactaatattatatatactataaaatcc

SEQ ID NO: 8591 - DNA, 50 bp, synthetic construct
  source 1..50: mol_type = other DNA
taatataaaacctaaattttaaacaataaatcctaaaacaacaaaatacc

SEQ ID NO: 8592 - DNA, 50 bp, synthetic construct
  source 1..50: mol_type = other DNA
tatttccaattaactaaaattaaatcataccaaactttctaaaatactac

SEQ ID NO: 8593 - DNA, 50 bp, synthetic construct
  source 1..50: mol_type = other DNA
tattaacaccaaaaattccacccataaaaattaccactctaaatatatac

SEQ ID NO: 8594 - DNA, 50 bp, synthetic construct
  source 1..50: mol_type = other DNA
aacaccaaaaattccacccataaaaattaccactctaaatatatacrtac

SEQ ID NO: 8595 - DNA, 50 bp, synthetic construct
  source 1..50: mol_type = other DNA
aatacaattactaccaaaaacaaccttccttactctaacraaaaaacttc

SEQ ID NO: 8596 - DNA, 50 bp, synthetic construct
  source 1..50: mol_type = other DNA
taaaaacraccttaacaaccrccaataaactataaaaacttaaattaaac

SEQ ID NO: 8597 - DNA, 50 bp, synthetic construct
  source 1..50: mol_type = other DNA
aaaccaaaatcctacctcrtaaacaaatactacacraaacatataaaaac

SEQ ID NO: 8598 - DNA, 50 bp, synthetic construct
  source 1..50: mol_type = other DNA
taataattataaataaaaccaaaatcctacctcrtaaacaaatactacac

SEQ ID NO: 8599 - DNA, 50 bp, synthetic construct
  source 1..50: mol_type = other DNA
taaaaaacraaatccrataataattataaataaaaccaaaatcctacctc

SEQ ID NO: 8600 - DNA, 50 bp, synthetic construct
  source 1..50: mol_type = other DNA
ataacatttatttacraaataaaactttaaccccacccataattactatc

SEQ ID NO: 8601 - DNA, 50 bp, synthetic construct
  source 1..50: mol_type = other DNA
ttatttacraaataaaactttaaccccacccataattactatcraacccc

SEQ ID NO: 8602 - DNA, 50 bp, synthetic construct
  source 1..50: mol_type = other DNA
ataatcaaactacctatatctaactctaaaatacaaatcaaattaatatc

SEQ ID NO: 8603 - DNA, 50 bp, synthetic construct
  source 1..50: mol_type = other DNA
tctatattaatcaattcttctatataaaaatttcataaaaaatcaaatac

SEQ ID NO: 8604 - DNA, 50 bp, synthetic construct
  source 1..50: mol_type = other DNA
tctattcttaaaacacaaaaactaaacaataattatttctttctttttac

SEQ ID NO: 8605 - DNA, 50 bp, synthetic construct
  source 1..50: mol_type = other DNA
aaacttctcatcctccaaatatccccaaaataaaacctaaactttaccac

SEQ ID NO: 8606 - DNA, 50 bp, synthetic construct
  source 1..50: mol_type = other DNA
atatcttaaataaattttaaataatttctttccatcctattctcttctcc

SEQ ID NO: 8607 - DNA, 50 bp, synthetic construct
  source 1..50: mol_type = other DNA
ctaaactttaaaatataccaatttaccctataaaccaatacccccraccc

SEQ ID NO: 8608 - DNA, 50 bp, synthetic construct
  source 1..50: mol_type = other DNA
acactttaatcttccacctacaataactaactttaaaaccttaaaccrac

SEQ ID NO: 8609 - DNA, 50 bp, synthetic construct
  source 1..50: mol_type = other DNA
ttcatcctcaaacctactacaaaataataatatattaaccccacrtaaac

SEQ ID NO: 8610 - DNA, 50 bp, synthetic construct
  source 1..50: mol_type = other DNA
tctcatttcatcctcaaacctactacaaaataataatatattaaccccac

SEQ ID NO: 8611 - DNA, 50 bp, synthetic construct
  source 1..50: mol_type = other DNA
attatatttactttaaatattaaatcactaatactaatctaaccatacac

SEQ ID NO: 8612 - DNA, 50 bp, synthetic construct
  source 1..50: mol_type = other DNA
aactcataaaaatatacaaatacccataaaacaaaactaaataatcaatc

SEQ ID NO: 8613 - DNA, 50 bp, synthetic construct
  source 1..50: mol_type = other DNA
aaaaccrcrattatttcattaaaaaaactctaaaaccccraaaacccttc

SEQ ID NO: 8614 - DNA, 50 bp, synthetic construct
  source 1..50: mol_type = other DNA
attatttcattaaaaaaactctaaaaccccraaaacccttcrtcccaaac

SEQ ID NO: 8615 - DNA, 50 bp, synthetic construct
  source 1..50: mol_type = other DNA
ctcccccaccrccactcacttattttatttaataatttaattcaacaaac

SEQ ID NO: 8616 - DNA, 50 bp, synthetic construct
  source 1..50: mol_type = other DNA
cacttaaattataaattcctaaaaaacaaaacrtttttacatctcctccc

SEQ ID NO: 8617 - DNA, 50 bp, synthetic construct
  source 1..50: mol_type = other DNA
raaaaataattcrtccttaccctctactacttcctcttatacraaaacac

SEQ ID NO: 8618 - DNA, 50 bp, synthetic construct
  source 1..50: mol_type = other DNA
tactatctaatcrttcctctaaaaattttatctcaaaaaaatacccracc

SEQ ID NO: 8619 - DNA, 50 bp, synthetic construct
  source 1..50: mol_type = other DNA
caaaaacccacttaaaaaaacaatctacctattctcaaatctccaactac

SEQ ID NO: 8620 - DNA, 50 bp, synthetic construct
  source 1..50: mol_type = other DNA
acaaacaaacttccttaaactataataaactccacccaattcaaacttcc

SEQ ID NO: 8621 - DNA, 50 bp, synthetic construct
  source 1..50: mol_type = other DNA
aacttccttaaactataataaactccacccaattcaaacttccraactac

SEQ ID NO: 8622 - DNA, 50 bp, synthetic construct
  source 1..50: mol_type = other DNA
acttccraactacractactttatttactaaaacaaacctaaacaataac

SEQ ID NO: 8623 - DNA, 50 bp, synthetic construct
  source 1..50: mol_type = other DNA
rataaacttaaaaaacratacaccaaaaaattatatcccrcacctaactc

SEQ ID NO: 8624 - DNA, 50 bp, synthetic construct
  source 1..50: mol_type = other DNA
crcrcttttccrataaacttaaaaaacratacaccaaaaaattatatccc

SEQ ID NO: 8625 - DNA, 50 bp, synthetic construct
  source 1..50: mol_type = other DNA
raaccaaatacraaatataatctcctaatacaccrtttcctaaacccatc

SEQ ID NO: 8626 - DNA, 50 bp, synthetic construct
  source 1..50: mol_type = other DNA
tcatctcactaaaaaataccaaaaaataaatacaaaacaataaatacaac

SEQ ID NO: 8627 - DNA, 50 bp, synthetic construct
  source 1..50: mol_type = other DNA
atacaaaaatcacctatcttctatattactcacrctaaaaactataaacc

SEQ ID NO: 8628 - DNA, 50 bp, synthetic construct
  source 1..50: mol_type = other DNA
ctccaccaaataacaacccttctcttacaaactcttaaaattactaacac

SEQ ID NO: 8629 - DNA, 50 bp, synthetic construct
  source 1..50: mol_type = other DNA
acatacaaatattcttactacttactatactataaataataaaatcattc

SEQ ID NO: 8630 - DNA, 50 bp, synthetic construct
  source 1..50: mol_type = other DNA
tataacttctaaaactctaaccaaacctactctttactctaaaaaaaaac

SEQ ID NO: 8631 - DNA, 50 bp, synthetic construct
  source 1..50: mol_type = other DNA
atataattttctcttacaaataatatatattttaaaaaacaattctccac

SEQ ID NO: 8632 - DNA, 50 bp, synthetic construct
  source 1..50: mol_type = other DNA
atacctatccaaataccttaactaaaatattccctacttttaacraaatc

SEQ ID NO: 8633 - DNA, 50 bp, synthetic construct
  source 1..50: mol_type = other DNA
cacccaatacctatccaaataccttaactaaaatattccctacttttaac

SEQ ID NO: 8634 - DNA, 50 bp, synthetic construct
  source 1..50: mol_type = other DNA
aaacacrctaatactacacacctcatatatacaatcttttattccttaac

SEQ ID NO: 8635 - DNA, 50 bp, synthetic construct
  source 1..50: mol_type = other DNA
aacaacaaaatcaatattttattctactaaatatataatttcacaaacac

SEQ ID NO: 8636 - DNA, 50 bp, synthetic construct
  source 1..50: mol_type = other DNA
ttatttaaactcctaaacattccaaaaaacaaaaacacctcracaaaaac

SEQ ID NO: 8637 - DNA, 50 bp, synthetic construct
  source 1..50: mol_type = other DNA
aacaaaaacacctcracaaaaacrtacaaaactacatattactttaattc

SEQ ID NO: 8638 - DNA, 50 bp, synthetic construct
  source 1..50: mol_type = other DNA
caaaaacacctcracaaaaacrtacaaaactacatattactttaattcrc

SEQ ID NO: 8639 - DNA, 50 bp, synthetic construct
  source 1..50: mol_type = other DNA
crcaaacatttcraccrtaaaaccccaaactcraaaaactaaatataaac

SEQ ID NO: 8640 - DNA, 50 bp, synthetic construct
  source 1..50: mol_type = other DNA
tccttttccttcttccrtcaactatttattcaatacraattacaaaaaac

SEQ ID NO: 8641 - DNA, 50 bp, synthetic construct
  source 1..50: mol_type = other DNA
cttccrtcaactatttattcaatacraattacaaaaaacrcaactccacc

SEQ ID NO: 8642 - DNA, 50 bp, synthetic construct
  source 1..50: mol_type = other DNA
atacraattacaaaaaacrcaactccaccrtaataacttacaatataacc

SEQ ID NO: 8643 - DNA, 50 bp, synthetic construct
  source 1..50: mol_type = other DNA
aacttttcctttaaaacataaacaaatccttacttaaaatcaaccaaacc

SEQ ID NO: 8644 - DNA, 50 bp, synthetic construct
  source 1..50: mol_type = other DNA
aataacccaccaaaatttctaaaaaatcataaaaaaccttcaacrtccac

SEQ ID NO: 8645 - DNA, 50 bp, synthetic construct
  source 1..50: mol_type = other DNA
tttttaaataacccaccaaaatttctaaaaaatcataaaaaaccttcaac

SEQ ID NO: 8646 - DNA, 50 bp, synthetic construct
  source 1..50: mol_type = other DNA
tttcaaaaaacccttcaaatcatccacaatcaattacttaaactaaatcc

SEQ ID NO: 8647 - DNA, 50 bp, synthetic construct
  source 1..50: mol_type = other DNA
cattacattttaaatcattaaaatatcctaaaaaacaatatttacaaacc

SEQ ID NO: 8648 - DNA, 50 bp, synthetic construct
  source 1..50: mol_type = other DNA
acattttaaatcattaaaatatcctaaaaaacaatatttacaaaccraac

SEQ ID NO: 8649 - DNA, 50 bp, synthetic construct
  source 1..50: mol_type = other DNA
attaaaatatcctaaaaaacaatatttacaaaccraacrcracaactcac

SEQ ID NO: 8650 - DNA, 50 bp, synthetic construct
  source 1..50: mol_type = other DNA
aatttcactatattaaccaaaataatctcratttcctaacctcrtaatcc

SEQ ID NO: 8651 - DNA, 50 bp, synthetic construct
  source 1..50: mol_type = other DNA
ctaacacaataaaaccccctcccaactaaaaattaaaaaattaaccaaac

SEQ ID NO: 8652 - DNA, 50 bp, synthetic construct
  source 1..50: mol_type = other DNA
acactaaaaaaaacaaatattcaaaactataaaattaactcacctctcac

SEQ ID NO: 8653 - DNA, 50 bp, synthetic construct
  source 1..50: mol_type = other DNA
tatatttttaattattaataatacaaaccacttaatcttctctattaaac

SEQ ID NO: 8654 - DNA, 50 bp, synthetic construct
  source 1..50: mol_type = other DNA
taaaaaatataaaattccrttttaataatactactatactaacatcttcc

SEQ ID NO: 8655 - DNA, 50 bp, synthetic construct
  source 1..50: mol_type = other DNA
ccttaacttaaaacacatacacacacaatttttaaaaaatataaaattcc

SEQ ID NO: 8656 - DNA, 50 bp, synthetic construct
  source 1..50: mol_type = other DNA
cctaaactaaacctattctaaacacaaacaaaaaactccatctccaccac

SEQ ID NO: 8657 - DNA, 50 bp, synthetic construct
  source 1..50: mol_type = other DNA
caaccratcaaacctactatacraaaataaacctttaaaaaatcttcctc

SEQ ID NO: 8658 - DNA, 50 bp, synthetic construct
  source 1..50: mol_type = other DNA
acaaatatcctttataactatacttctcaaaataaaaactcccrattatc

SEQ ID NO: 8659 - DNA, 50 bp, synthetic construct
  source 1..50: mol_type = other DNA
aacactataaaacccccatctctattaaaatacaaaaaaattaactaaac

SEQ ID NO: 8660 - DNA, 50 bp, synthetic construct
  source 1..50: mol_type = other DNA
ttaaataaacaaattttaactaatttattaaaaactcacaaactaaacac

SEQ ID NO: 8661 - DNA, 50 bp, synthetic construct
  source 1..50: mol_type = other DNA
taaataataacctactccctaccaaaaaaccaaaataattaacaactacc

SEQ ID NO: 8662 - DNA, 50 bp, synthetic construct
  source 1..50: mol_type = other DNA
taaactaccaatctaacatactattattatctctttacctcaaaactaac

SEQ ID NO: 8663 - DNA, 50 bp, synthetic construct
  source 1..50: mol_type = other DNA
aaattcratcacccctataaaataaacaataaaccctatattataacttc

SEQ ID NO: 8664 - DNA, 50 bp, synthetic construct
  source 1..50: mol_type = other DNA
aaaaccraaaccacaacataaaatctattattcacctcataaaaataacc

SEQ ID NO: 8665 - DNA, 50 bp, synthetic construct
  source 1..50: mol_type = other DNA
caaaaacatttcaatcactattactacaatctaaacaatttaaattccac

SEQ ID NO: 8666 - DNA, 50 bp, synthetic construct
  source 1..50: mol_type = other DNA
aacatacttaaaataaaactattaaactaaaattaacttaacatcaaaac

SEQ ID NO: 8667 - DNA, 50 bp, synthetic construct
  source 1..50: mol_type = other DNA
cttaataaaatcaatcccacttaaactaacctcactaaaacrcaaacacc

SEQ ID NO: 8668 - DNA, 50 bp, synthetic construct
  source 1..50: mol_type = other DNA
aatcctcatcttaataaaatcaatcccacttaaactaacctcactaaaac

SEQ ID NO: 8669 - DNA, 50 bp, synthetic construct
  source 1..50: mol_type = other DNA
tcacacttacttaacaaactccacccatctaaaaacatcaaaaaaaaaac

SEQ ID NO: 8670 - DNA, 50 bp, synthetic construct
  source 1..50: mol_type = other DNA
ctacaaatcctaactccaattttcaaatattctaaccataaaaatcatcc

SEQ ID NO: 8671 - DNA, 50 bp, synthetic construct
  source 1..50: mol_type = other DNA
aactccaattttcaaatattctaaccataaaaatcatccraaatcaaccc

SEQ ID NO: 8672 - DNA, 50 bp, synthetic construct
  source 1..50: mol_type = other DNA
aaataataaaacaacacrcaaatcttttatcacccaatcttaaaaataac

SEQ ID NO: 8673 - DNA, 50 bp, synthetic construct
  source 1..50: mol_type = other DNA
cctttctttaatatacattcctacccccaaccaaaatccataaaacrttc

SEQ ID NO: 8674 - DNA, 50 bp, synthetic construct
  source 1..50: mol_type = other DNA
caccaatcctacacactattttattaatcacctcatttacataaaaattc

SEQ ID NO: 8675 - DNA, 50 bp, synthetic construct
  source 1..50: mol_type = other DNA
taaaaaaattattcacactctactttaattcaacccaattataaaatacc

SEQ ID NO: 8676 - DNA, 50 bp, synthetic construct
  source 1..50: mol_type = other DNA
aaaactaaataaaacctattataaccatataatctattttcttattttac

SEQ ID NO: 8677 - DNA, 50 bp, synthetic construct
  source 1..50: mol_type = other DNA
ttaaaaataaatcttctcttcctttcttaaaaaacaactctaaaccraac

SEQ ID NO: 8678 - DNA, 50 bp, synthetic construct
  source 1..50: mol_type = other DNA
cttctcttcctttcttaaaaaacaactctaaaccraacrcaataactcac

SEQ ID NO: 8679 - DNA, 50 bp, synthetic construct
  source 1..50: mol_type = other DNA
aatttcatttaaattattcrtaaaccaaacrattacaaaaactctaaacc

SEQ ID NO: 8680 - DNA, 50 bp, synthetic construct
  source 1..50: mol_type = other DNA
actttttcaataaaaccctaaatttcatttaaattattcrtaaaccaaac

SEQ ID NO: 8681 - DNA, 50 bp, synthetic construct
  source 1..50: mol_type = other DNA
acttcctaaccraaatcccctaaaaacttataaacatataaactaaaatc

SEQ ID NO: 8682 - DNA, 50 bp, synthetic construct
  source 1..50: mol_type = other DNA
tttaacctctcractccaacctatatacttacaaatcctcaaaaaactcc

SEQ ID NO: 8683 - DNA, 50 bp, synthetic construct
  source 1..50: mol_type = other DNA
tacttacaaatcctcaaaaaactccractaaaaaatcaaaaataaaaccc

SEQ ID NO: 8684 - DNA, 50 bp, synthetic construct
  source 1..50: mol_type = other DNA
taatttatttttactctttcctaccacraacaatcctcatctctatcctc

SEQ ID NO: 8685 - DNA, 50 bp, synthetic construct
  source 1..50: mol_type = other DNA
aaacatcctttttatttatacattaatttatttttactctttcctaccac

SEQ ID NO: 8686 - DNA, 50 bp, synthetic construct
  source 1..50: mol_type = other DNA
aaaaaaaataaaatcaaccccactaccaaatcaataaaacccrtctcctc

SEQ ID NO: 8687 - DNA, 50 bp, synthetic construct
  source 1..50: mol_type = other DNA
tcatttccaataaatacccttatcattttatctaaaccaatcaaaaaaac

SEQ ID NO: 8688 - DNA, 50 bp, synthetic construct
  source 1..50: mol_type = other DNA
ccttctaattaaatatataaaacttactaataatcacttctatattcatc

SEQ ID NO: 8689 - DNA, 50 bp, synthetic construct
  source 1..50: mol_type = other DNA
ctcacattcatatattctaaaacatctctcaaatattaaataatatactc

SEQ ID NO: 8690 - DNA, 50 bp, synthetic construct
  source 1..50: mol_type = other DNA
aacaaaaataccaaaaaataaaattataaccttatcaacatatcttatcc

SEQ ID NO: 8691 - DNA, 50 bp, synthetic construct
  source 1..50: mol_type = other DNA
atttaacattcattcaattcacaaaaaaatccatttaaaaactttacaac

SEQ ID NO: 8692 - DNA, 50 bp, synthetic construct
  source 1..50: mol_type = other DNA
aaactaaataaaaaccaaactaaaaatacctctaacacatataaatatac

SEQ ID NO: 8693 - DNA, 50 bp, synthetic construct
  source 1..50: mol_type = other DNA
actctaacaatcaatcacrtaactatcaaaaaccttacaaaactctaaac

SEQ ID NO: 8694 - DNA, 50 bp, synthetic construct
  source 1..50: mol_type = other DNA
crtttaaaaaaataatctctaaaataaaccaaactctaacaatcaatcac

SEQ ID NO: 8695 - DNA, 50 bp, synthetic construct
  source 1..50: mol_type = other DNA
tttcactaaatctcaacctattttaaaaacaatcaaaaactaaaattttc

SEQ ID NO: 8696 - DNA, 50 bp, synthetic construct
  source 1..50: mol_type = other DNA
aaattaacaaaaatattacattctaaataactatactataaaaatacatc

SEQ ID NO: 8697 - DNA, 50 bp, synthetic construct
  source 1..50: mol_type = other DNA
ttctacccaccctctaacctaacctcaattatattactatatataaattc

SEQ ID NO: 8698 - DNA, 50 bp, synthetic construct
  source 1..50: mol_type = other DNA
aatcaaatcaaaaaataaacaaaaaacccatcacttcacacactaaatcc

SEQ ID NO: 8699 - DNA, 50 bp, synthetic construct
  source 1..50: mol_type = other DNA
aaacaatctaatcttaccaaaaaaattctttttctcaaatcrtttctttc

SEQ ID NO: 8700 - DNA, 50 bp, synthetic construct
  source 1..50: mol_type = other DNA
atccaaaatctaccacaaaactacctaaaaacttaaatcacccaaatatc

SEQ ID NO: 8701 - DNA, 50 bp, synthetic construct
  source 1..50: mol_type = other DNA
ataaaaaaaaccctatactaaacaaataatctactataatatacaaattc

SEQ ID NO: 8702 - DNA, 50 bp, synthetic construct
  source 1..50: mol_type = other DNA
aataatacratataatcttttccccaaacatcaaacataaaaattaaaac

SEQ ID NO: 8703 - DNA, 50 bp, synthetic construct
  source 1..50: mol_type = other DNA
aaaaaaaaaattacatcrcaccacctatcttccccatatattaattattc

SEQ ID NO: 8704 - DNA, 50 bp, synthetic construct
  source 1..50: mol_type = other DNA
cttatatacaaatcctaaatccattactccaaaaaaatcacctcccrttc

SEQ ID NO: 8705 - DNA, 50 bp, synthetic construct
  source 1..50: mol_type = other DNA
ttaattctactcaaaaaaactcccaaacrtctccataaaaatactaacac

SEQ ID NO: 8706 - DNA, 50 bp, synthetic construct
  source 1..50: mol_type = other DNA
ttccattccataatttactcatacataaaataaaaatacrctaacccrac

SEQ ID NO: 8707 - DNA, 50 bp, synthetic construct
  source 1..50: mol_type = other DNA
cttttccattccataatttactcatacataaaataaaaatacrctaaccc

SEQ ID NO: 8708 - DNA, 50 bp, synthetic construct
  source 1..50: mol_type = other DNA
crctaaactctatccctccataactcataaacaataattaacctaaaacc

SEQ ID NO: 8709 - DNA, 50 bp, synthetic construct
  source 1..50: mol_type = other DNA
tcaaaattcactactcccrtctataactcaacraaaaatataaaacacac

SEQ ID NO: 8710 - DNA, 50 bp, synthetic construct
  source 1..50: mol_type = other DNA
actactcccrtctataactcaacraaaaatataaaacacacrtaaaaacc

SEQ ID NO: 8711 - DNA, 50 bp, synthetic construct
  source 1..50: mol_type = other DNA
aaaatatatcacccctttacatatatataatttttaaaaccaaaataacc

SEQ ID NO: 8712 - DNA, 50 bp, synthetic construct
  source 1..50: mol_type = other DNA
tatatataaactctaaatataaaccttaataaacctacctttaatattcc

SEQ ID NO: 8713 - DNA, 50 bp, synthetic construct
  source 1..50: mol_type = other DNA
aaaaattaatcttaattttcaaccaaaacatctaatacctatactattcc

SEQ ID NO: 8714 - DNA, 50 bp, synthetic construct
  source 1..50: mol_type = other DNA
ttataacaacacaattcaccacacccaaccttctaatttactttaaattc

SEQ ID NO: 8715 - DNA, 50 bp, synthetic construct
  source 1..50: mol_type = other DNA
tatactaattttaattaccacatcatcaataaatattaaacacccatacc

SEQ ID NO: 8716 - DNA, 50 bp, synthetic construct
  source 1..50: mol_type = other DNA
tcrtttaaaaatatcacatattaaaattaaaactcttcccaaataatcac

SEQ ID NO: 8717 - DNA, 50 bp, synthetic construct
  source 1..50: mol_type = other DNA
ataaaatataactctataacttcactttaacctctacttaatacttaatc

SEQ ID NO: 8718 - DNA, 50 bp, synthetic construct
  source 1..50: mol_type = other DNA
aacccccatctccttattccrcataacaaataaaaatctaaaaatacctc

SEQ ID NO: 8719 - DNA, 50 bp, synthetic construct
  source 1..50: mol_type = other DNA
aacaaaaaaaccaaaaactattccctttacaacccccatctccttattcc

SEQ ID NO: 8720 - DNA, 50 bp, synthetic construct
  source 1..50: mol_type = other DNA
aacctactcttacaactaatctaaaaataaaattcacaatacaaacctcc

SEQ ID NO: 8721 - DNA, 50 bp, synthetic construct
  source 1..50: mol_type = other DNA
aaaaacttacctaaaactttccacttcccaaaatatttaaaatatctccc

SEQ ID NO: 8722 - DNA, 50 bp, synthetic construct
  source 1..50: mol_type = other DNA
ctaaaattatatacctaaaaaaatttataactacctctactaaatcatac

SEQ ID NO: 8723 - DNA, 50 bp, synthetic construct
  source 1..50: mol_type = other DNA
atcaaataacaacaaaactaaacatatctaaactcaaactctccttaaac

SEQ ID NO: 8724 - DNA, 50 bp, synthetic construct
  source 1..50: mol_type = other DNA
caaccaacacaaaaataaaacattaaaccaccaaaactaaaaactcccac

SEQ ID NO: 8725 - DNA, 50 bp, synthetic construct
  source 1..50: mol_type = other DNA
aaacctaaaaactccaaatcacctaaccctacaaataaacttctaataac

SEQ ID NO: 8726 - DNA, 50 bp, synthetic construct
  source 1..50: mol_type = other DNA
tactcccctaatcctatatatccttccccaacttaactacaattaaaaac

SEQ ID NO: 8727 - DNA, 50 bp, synthetic construct
  source 1..50: mol_type = other DNA
acccctaccaaaacaatctttaacataaatacttatctccatctcaaccc

SEQ ID NO: 8728 - DNA, 50 bp, synthetic construct
  source 1..50: mol_type = other DNA
ctctaacccctaatatcrtaaaatcatcctaatattttaaaaaactcttc

SEQ ID NO: 8729 - DNA, 50 bp, synthetic construct
  source 1..50: mol_type = other DNA
tataaattataaataaacttattataccctcacctctaacccctaatatc

SEQ ID NO: 8730 - DNA, 50 bp, synthetic construct
  source 1..50: mol_type = other DNA
cccttaatttaaatttaaaacctaaacattcaaaatacaatttcataatc

SEQ ID NO: 8731 - DNA, 50 bp, synthetic construct
  source 1..50: mol_type = other DNA
atctctaaacctttccctacaaatcaccatctaaatcataacttcccrtc

SEQ ID NO: 8732 - DNA, 50 bp, synthetic construct
  source 1..50: mol_type = other DNA
taaatcataacttcccrtcrtttatcttcaataatctaattaatacaaac

SEQ ID NO: 8733 - DNA, 50 bp, synthetic construct
  source 1..50: mol_type = other DNA
attaattataccttatctaatatcacataattactaaataatacaacaac

SEQ ID NO: 8734 - DNA, 50 bp, synthetic construct
  source 1..50: mol_type = other DNA
acataattactaaataatacaacaacraaataaacttaaaccctaattcc

SEQ ID NO: 8735 - DNA, 50 bp, synthetic construct
  source 1..50: mol_type = other DNA
tatcacttaaataatactataatcttatcaacatactaaaaaatataaac

SEQ ID NO: 8736 - DNA, 50 bp, synthetic construct
  source 1..50: mol_type = other DNA
aaaaaaaactaatcaaacrtaataaaaatattccctaacttaaaaactcc

SEQ ID NO: 8737 - DNA, 50 bp, synthetic construct
  source 1..50: mol_type = other DNA
tactctcctacccctaaaacaaaatatccaactacractaaaaaacctac

SEQ ID NO: 8738 - DNA, 50 bp, synthetic construct
  source 1..50: mol_type = other DNA
tactacaactcttaatactctcctacccctaaaacaaaatatccaactac

SEQ ID NO: 8739 - DNA, 50 bp, synthetic construct
  source 1..50: mol_type = other DNA
aacattaaaaactacaacaacttcacaacrcaaaccctcaaccataacac

SEQ ID NO: 8740 - DNA, 50 bp, synthetic construct
  source 1..50: mol_type = other DNA
ttttctaaacaaccrcaaaacacaacacaaaattaaatactaccaccacc

SEQ ID NO: 8741 - DNA, 50 bp, synthetic construct
  source 1..50: mol_type = other DNA
aataatttttccttctcctaaaaatttattcccaaataaattttttcccc

SEQ ID NO: 8742 - DNA, 50 bp, synthetic construct
  source 1..50: mol_type = other DNA
ccatacctctatctccactaaaccaacactatctaaacaataaccaaaac

SEQ ID NO: 8743 - DNA, 50 bp, synthetic construct
  source 1..50: mol_type = other DNA
aaaaaaaatatcctctattactaacatcctcatacttatctttatctaac

SEQ ID NO: 8744 - DNA, 50 bp, synthetic construct
  source 1..50: mol_type = other DNA
caacaacaaaaaatattccttttaaaatctatccattacaaaatacacac

SEQ ID NO: 8745 - DNA, 50 bp, synthetic construct
  source 1..50: mol_type = other DNA
aaaatctatccattacaaaatacacacrtacacrctcacacaacaaacac

SEQ ID NO: 8746 - DNA, 50 bp, synthetic construct
  source 1..50: mol_type = other DNA
aaaaaaaacctctctccaacataaacaaacractaaaaaaaaaccacatc

SEQ ID NO: 8747 - DNA, 50 bp, synthetic construct
  source 1..50: mol_type = other DNA
aacttcctaataaaccaaataaaaaaaacctctctccaacataaacaaac

SEQ ID NO: 8748 - DNA, 50 bp, synthetic construct
  source 1..50: mol_type = other DNA
caaaaaacccaaataaataacacacrcaatacccaacaaaaaatttctcc

SEQ ID NO: 8749 - DNA, 50 bp, synthetic construct
  source 1..50: mol_type = other DNA
atccaaacaaaccraaacaactcataaactaattcatctactccctatac

SEQ ID NO: 8750 - DNA, 50 bp, synthetic construct
  source 1..50: mol_type = other DNA
ctccrttcaacatataaatacracaaaaaaataacctatccaaacaaacc

SEQ ID NO: 8751 - DNA, 50 bp, synthetic construct
  source 1..50: mol_type = other DNA
tacaattaactcctactaatataatacataatttcctaacttcaactacc

SEQ ID NO: 8752 - DNA, 50 bp, synthetic construct
  source 1..50: mol_type = other DNA
caattaactcctactaatataatacataatttcctaacttcaactaccrc

SEQ ID NO: 8753 - DNA, 50 bp, synthetic construct
  source 1..50: mol_type = other DNA
taactcctactaatataatacataatttcctaacttcaactaccrcrtcc

SEQ ID NO: 8754 - DNA, 50 bp, synthetic construct
  source 1..50: mol_type = other DNA
aaatctattaaaaaaacccraaaccctacaccaaaaacrcaatttaactc

SEQ ID NO: 8755 - DNA, 50 bp, synthetic construct
  source 1..50: mol_type = other DNA
ratcaacrtataaaatctattaaaaaaacccraaaccctacaccaaaaac

SEQ ID NO: 8756 - DNA, 50 bp, synthetic construct
  source 1..50: mol_type = other DNA
cctacaaaataaactaaacraaccaaactacrttcctaatacaaaacttc

SEQ ID NO: 8757 - DNA, 50 bp, synthetic construct
  source 1..50: mol_type = other DNA
aacraatataatcrtccctaaatatctaaacaaaaaaacactaccataac

SEQ ID NO: 8758 - DNA, 50 bp, synthetic construct
  source 1..50: mol_type = other DNA
tactaccactaaaattcctctctaaacaccataaacractaacaaaacac

SEQ ID NO: 8759 - DNA, 50 bp, synthetic construct
  source 1..50: mol_type = other DNA
crtaacaaccraaatactaccactaaaattcctctctaaacaccataaac

SEQ ID NO: 8760 - DNA, 50 bp, synthetic construct
  source 1..50: mol_type = other DNA
ataatccttctaacttaaaataacctaacaatttcrataacrtaacaacc

SEQ ID NO: 8761 - DNA, 50 bp, synthetic construct
  source 1..50: mol_type = other DNA
cttttcctaataatccttctaacttaaaataacctaacaatttcrataac

SEQ ID NO: 8762 - DNA, 50 bp, synthetic construct
  source 1..50: mol_type = other DNA
tcctaacttttcctaataatccttctaacttaaaataacctaacaatttc

SEQ ID NO: 8763 - DNA, 50 bp, synthetic construct
  source 1..50: mol_type = other DNA
ataaacttcttccttaaaacaacctactctataaaacaaataaacccaac

SEQ ID NO: 8764 - DNA, 50 bp, synthetic construct
  source 1..50: mol_type = other DNA
tcaacacccccattctaactctacaatcctaaatttttcacaaaaactac

SEQ ID NO: 8765 - DNA, 50 bp, synthetic construct
  source 1..50: mol_type = other DNA
aatcctaaatttttcacaaaaactacrccaaacactaaaaaaatccaatc

SEQ ID NO: 8766 - DNA, 50 bp, synthetic construct
  source 1..50: mol_type = other DNA
taactaaacaaaaacttcttaaacattctctatacctaaacctccraatc

SEQ ID NO: 8767 - DNA, 50 bp, synthetic construct
  source 1..50: mol_type = other DNA
aaacttaactaaacaaaaacttcttaaacattctctatacctaaacctcc

SEQ ID NO: 8768 - DNA, 50 bp, synthetic construct
  source 1..50: mol_type = other DNA
ttaaacacaaaaaatattcaaaaaacccctatccaattaaacctcctaac

SEQ ID NO: 8769 - DNA, 50 bp, synthetic construct
  source 1..50: mol_type = other DNA
crcraaaactcrataaatcctaaatattctttaaccraatttactaatcc

SEQ ID NO: 8770 - DNA, 50 bp, synthetic construct
  source 1..50: mol_type = other DNA
aacaacccacttaataaaattaaaatataaatccttcctcrcraaaactc

SEQ ID NO: 8771 - DNA, 50 bp, synthetic construct
  source 1..50: mol_type = other DNA
aaacaaaaaacaacccacttaataaaattaaaatataaatccttcctcrc

SEQ ID NO: 8772 - DNA, 50 bp, synthetic construct
  source 1..50: mol_type = other DNA
ccaaacaaaaaacaacccacttaataaaattaaaatataaatccttcctc

SEQ ID NO: 8773 - DNA, 50 bp, synthetic construct
  source 1..50: mol_type = other DNA
accccctaaatttccacracctattccactcaaactaaaaattctaaaac

SEQ ID NO: 8774 - DNA, 50 bp, synthetic construct
  source 1..50: mol_type = other DNA
caacccaaaaaaaccaattcaaaaatcttatctaccccctaaatttccac

SEQ ID NO: 8775 - DNA, 50 bp, synthetic construct
  source 1..50: mol_type = other DNA
cctactaaaaaacataaccaaatctcaaaaccctcaaaaccacaactatc

SEQ ID NO: 8776 - DNA, 50 bp, synthetic construct
  source 1..50: mol_type = other DNA
actatactaattcrtcaaaactaactcccttaacaaaaaaaatttatatc

SEQ ID NO: 8777 - DNA, 50 bp, synthetic construct
  source 1..50: mol_type = other DNA
actctaatccacrtctaatctaataaaaacaactacatccactacaaacc

SEQ ID NO: 8778 - DNA, 50 bp, synthetic construct
  source 1..50: mol_type = other DNA
cctctaaatcaaaattctaaatcatctttttttaaaaccattttttatcc

SEQ ID NO: 8779 - DNA, 50 bp, synthetic construct
  source 1..50: mol_type = other DNA
aattctaaatcatctttttttaaaaccattttttatccrtttcctcctac

SEQ ID NO: 8780 - DNA, 50 bp, synthetic construct
  source 1..50: mol_type = other DNA
crtttcctcctacractatcaatacctatactttaaaatattctataacc

SEQ ID NO: 8781 - DNA, 50 bp, synthetic construct
  source 1..50: mol_type = other DNA
tactaaaataaaccaatacrtatataataccaaaaacactttcaaaaaac

SEQ ID NO: 8782 - DNA, 50 bp, synthetic construct
  source 1..50: mol_type = other DNA
ccatttcttatataatatctcaaaaaaacattactaaaataaaccaatac

SEQ ID NO: 8783 - DNA, 50 bp, synthetic construct
  source 1..50: mol_type = other DNA
accctaaaacaaatcctcaccttctctacaactttttctcaaatctaatc

SEQ ID NO: 8784 - DNA, 50 bp, synthetic construct
  source 1..50: mol_type = other DNA
cttaattcaatctcccaaatatttaaccctaaatctctttaaaattacac

SEQ ID NO: 8785 - DNA, 50 bp, synthetic construct
  source 1..50: mol_type = other DNA
tcactattttctattcattaaaactctttaaaccaaacacaataactcac

SEQ ID NO: 8786 - DNA, 50 bp, synthetic construct
  source 1..50: mol_type = other DNA
tactcaatcaatattaactaccttcctaattatatactttaaaattaacc

SEQ ID NO: 8787 - DNA, 50 bp, synthetic construct
  source 1..50: mol_type = other DNA
attccaattaaataaacctctcttccttatatattttaaataataactac

SEQ ID NO: 8788 - DNA, 50 bp, synthetic construct
  source 1..50: mol_type = other DNA
atcaccatcttcacttaccataataacaaaactttaacaattaaactaac

SEQ ID NO: 8789 - DNA, 50 bp, synthetic construct
  source 1..50: mol_type = other DNA
aaaacatccraatatcataaacrtcaacrccaaacttaaaaatctcctac

SEQ ID NO: 8790 - DNA, 50 bp, synthetic construct
  source 1..50: mol_type = other DNA
acttcrcaataaatttaacaacctcacaaaaacatccraatatcataaac

SEQ ID NO: 8791 - DNA, 50 bp, synthetic construct
  source 1..50: mol_type = other DNA
ttaacrtctataacattcraatacctttataaaactatcaaacctactac

SEQ ID NO: 8792 - DNA, 50 bp, synthetic construct
  source 1..50: mol_type = other DNA
aattttacaaacccacaatcaaaacacaacccatctaaaaactaaaaacc

SEQ ID NO: 8793 - DNA, 50 bp, synthetic construct
  source 1..50: mol_type = other DNA
tacaccatttcatattcccatctacaatatataaaaataccaatttatcc

SEQ ID NO: 8794 - DNA, 50 bp, synthetic construct
  source 1..50: mol_type = other DNA
accrataaattttaaaacatacacatacaaattacctctacaaaactcac

SEQ ID NO: 8795 - DNA, 50 bp, synthetic construct
  source 1..50: mol_type = other DNA
ttcrtaaactctacaaaaataacctatatatacatactccaaaatccacc

SEQ ID NO: 8796 - DNA, 50 bp, synthetic construct
  source 1..50: mol_type = other DNA
cctaaaaccaaaatcataaactacaaaaaccatttacactttaaactacc

SEQ ID NO: 8797 - DNA, 50 bp, synthetic construct
  source 1..50: mol_type = other DNA
racacrtaaacaaatcrcccataccaaaaaccatattaataaataaatac

SEQ ID NO: 8798 - DNA, 50 bp, synthetic construct
  source 1..50: mol_type = other DNA
caacraaaaaaaacctcttcccatatatcaaaataactcatacccatacc

SEQ ID NO: 8799 - DNA, 50 bp, synthetic construct
  source 1..50: mol_type = other DNA
ataacaaaaactattccactaactttatctctttttctcaaattatcaac

SEQ ID NO: 8800 - DNA, 50 bp, synthetic construct
  source 1..50: mol_type = other DNA
actcatacctataatcttaacactctttaaaaatccaaaataaaaaaatc

SEQ ID NO: 8801 - DNA, 50 bp, synthetic construct
  source 1..50: mol_type = other DNA
aatttcaaattaatattaaaaacatttacttaacracttaccaacaacrc

SEQ ID NO: 8802 - DNA, 50 bp, synthetic construct
  source 1..50: mol_type = other DNA
acaaatatacattacatccaacracttatcrccatataaaaatataaatc

SEQ ID NO: 8803 - DNA, 50 bp, synthetic construct
  source 1..50: mol_type = other DNA
cactttctaaactatacaataacttcaaaaaaatataatccaccatcttc

SEQ ID NO: 8804 - DNA, 50 bp, synthetic construct
  source 1..50: mol_type = other DNA
aaccaaacaataatatccacaattttacccattaatactaacaaaaatac

SEQ ID NO: 8805 - DNA, 50 bp, synthetic construct
  source 1..50: mol_type = other DNA
taaaaacttactataatatactcctttacaattaaaatccaaccttaacc

SEQ ID NO: 8806 - DNA, 50 bp, synthetic construct
  source 1..50: mol_type = other DNA
acttaaaaaaaaataccrcaactacaaatattacaccaacaaacaaaaac

SEQ ID NO: 8807 - DNA, 50 bp, synthetic construct
  source 1..50: mol_type = other DNA
aaaaaaacttcaacaaaaataaccaacraacrcctacaaaaactccaaac

SEQ ID NO: 8808 - DNA, 50 bp, synthetic construct
  source 1..50: mol_type = other DNA
ctacaaatattacaccaacaaacaaaaacrcrcctaaaatctctacaaac

SEQ ID NO: 8809 - DNA, 50 bp, synthetic construct
  source 1..50: mol_type = other DNA
tcccrtcctaaaacctcttcatataactaaactttataactaaaattccc

SEQ ID NO: 8810 - DNA, 50 bp, synthetic construct
  source 1..50: mol_type = other DNA
tacaaattaccatactccrtatcatttcctatacrattacaaatactcac

SEQ ID NO: 8811 - DNA, 50 bp, synthetic construct
  source 1..50: mol_type = other DNA
rccrtttaaaaataatacaacctaactctcraacrtaaatatttataacc

SEQ ID NO: 8812 - DNA, 50 bp, synthetic construct
  source 1..50: mol_type = other DNA
ccaccattttaaacaccctcactaccaaaatcttaaacttaataaccaac

SEQ ID NO: 8813 - DNA, 50 bp, synthetic construct
  source 1..50: mol_type = other DNA
tctcraaaaccctaatcctaacccaaacctaaacaaataaatacraaatc

SEQ ID NO: 8814 - DNA, 50 bp, synthetic construct
  source 1..50: mol_type = other DNA
ttaacaatatccattaatttctaaaaatacacttaaaaatctcaccctac

SEQ ID NO: 8815 - DNA, 50 bp, synthetic construct
  source 1..50: mol_type = other DNA
cacrccctattattctctaaacrtcattataaaaatattattaatacttc

SEQ ID NO: 8816 - DNA, 50 bp, synthetic construct
  source 1..50: mol_type = other DNA
tatctctcaactaaacctccraataattctttaattcttatttataaaac

SEQ ID NO: 8817 - DNA, 50 bp, synthetic construct
  source 1..50: mol_type = other DNA
attttaacaataatcactttaactacctaatatctctcaactaaacctcc

SEQ ID NO: 8818 - DNA, 50 bp, synthetic construct
  source 1..50: mol_type = other DNA
actaatcacaatctcccaaaatactaccataacttccaataaaccaaaac

SEQ ID NO: 8819 - DNA, 50 bp, synthetic construct
  source 1..50: mol_type = other DNA
acaaataataataaatcaatcttaacttctctacttataaattatttaac

SEQ ID NO: 8820 - DNA, 50 bp, synthetic construct
  source 1..50: mol_type = other DNA
cccttatataaatacacaaaacctacrtattccataccactaactcacac

SEQ ID NO: 8821 - DNA, 50 bp, synthetic construct
  source 1..50: mol_type = other DNA
taactcccaaactaccrtcttaactcrtataaatcaataacataaaacac

SEQ ID NO: 8822 - DNA, 50 bp, synthetic construct
  source 1..50: mol_type = other DNA
tccracttaaaaaaattcctaatcttaaactccaaaaaaattcctaaatc

SEQ ID NO: 8823 - DNA, 50 bp, synthetic construct
  source 1..50: mol_type = other DNA
aaaaattatcraactccctaacctccctttacaaataaaaaaatttaaac

SEQ ID NO: 8824 - DNA, 50 bp, synthetic construct
  source 1..50: mol_type = other DNA
caaaaaacatacactacratcacaaacccaaaaatctcaaaaaaattatc

SEQ ID NO: 8825 - DNA, 50 bp, synthetic construct
  source 1..50: mol_type = other DNA
attttccataaaatatacatatatatatcaacttctcactaaactatatc

SEQ ID NO: 8826 - DNA, 50 bp, synthetic construct
  source 1..50: mol_type = other DNA
aatattataaacctctatacaatatataaactctatattacaaacattcc

SEQ ID NO: 8827 - DNA, 50 bp, synthetic construct
  source 1..50: mol_type = other DNA
aaaaataaactattataaaatttaactaacacaaaataaccactaacaac

SEQ ID NO: 8828 - DNA, 50 bp, synthetic construct
  source 1..50: mol_type = other DNA
acatatatccacttacaaacataaaaatacacaaaaccctacctcatccc

SEQ ID NO: 8829 - DNA, 50 bp, synthetic construct
  source 1..50: mol_type = other DNA
atactataaaaaatcattccrcccctacctaacttaaaaacaaaactttc

SEQ ID NO: 8830 - DNA, 50 bp, synthetic construct
  source 1..50: mol_type = other DNA
ttcactacctctaataaatcraaaatcttatttccaaaccaaataaaaac

SEQ ID NO: 8831 - DNA, 50 bp, synthetic construct
  source 1..50: mol_type = other DNA
accaaaaccacaaaacaaaatcctacaccttaaccattttcttaccacac

SEQ ID NO: 8832 - DNA, 50 bp, synthetic construct
  source 1..50: mol_type = other DNA
aatccttttccactatatcacactacactatctaactccaatctaataac

SEQ ID NO: 8833 - DNA, 50 bp, synthetic construct
  source 1..50: mol_type = other DNA
acacaaacctacaactcaaactttaaattttaaccaacctaaccttccac

SEQ ID NO: 8834 - DNA, 50 bp, synthetic construct
  source 1..50: mol_type = other DNA
caaaaaaaacaattattaacttcttactaacaaaaaaatcaaaaacttcc

SEQ ID NO: 8835 - DNA, 50 bp, synthetic construct
  source 1..50: mol_type = other DNA
tcccrcractctcactaccctatcttttattttcttaacctttaattaac

SEQ ID NO: 8836 - DNA, 50 bp, synthetic construct
  source 1..50: mol_type = other DNA
cctaactaaaacttttaaacttcttaatacaaaaatatctaaaatcccrc

SEQ ID NO: 8837 - DNA, 50 bp, synthetic construct
  source 1..50: mol_type = other DNA
accctaactaaaacttttaaacttcttaatacaaaaatatctaaaatccc

SEQ ID NO: 8838 - DNA, 50 bp, synthetic construct
  source 1..50: mol_type = other DNA
acactcctacaccaaaaaacttaaaaatcttaaccaaaacactaaaaaac

SEQ ID NO: 8839 - DNA, 50 bp, synthetic construct
  source 1..50: mol_type = other DNA
ctacctaaacctcccaaaattacaaacataaaactataacataaaccacc

SEQ ID NO: 8840 - DNA, 50 bp, synthetic construct
  source 1..50: mol_type = other DNA
taaaatttaaacctaaaaaatctcacaaacaccraactatacaccaaaac

SEQ ID NO: 8841 - DNA, 50 bp, synthetic construct
  source 1..50: mol_type = other DNA
ccaactacctccctaaataatcacaattcatacrccctaatacataatcc

SEQ ID NO: 8842 - DNA, 50 bp, synthetic construct
  source 1..50: mol_type = other DNA
ttacccaacaatcccatccactaaacaattcttttaataacatttactac

SEQ ID NO: 8843 - DNA, 50 bp, synthetic construct
  source 1..50: mol_type = other DNA
aattcattaaataaaaactctaaacraaaccrcraaaacaccctaacaac

SEQ ID NO: 8844 - DNA, 50 bp, synthetic construct
  source 1..50: mol_type = other DNA
taaaataaacaaataattttctattccaaacaacaaactctaaaaataac

SEQ ID NO: 8845 - DNA, 50 bp, synthetic construct
  source 1..50: mol_type = other DNA
aataactcaaaatttcatcatttcttattacacaatttaataaccatatc

SEQ ID NO: 8846 - DNA, 50 bp, synthetic construct
  source 1..50: mol_type = other DNA
ttctattcctaattaacaaaactatctaacataaacactatactctaaac

SEQ ID NO: 8847 - DNA, 50 bp, synthetic construct
  source 1..50: mol_type = other DNA
ccactccataaaactaatcaatatttttacttacaaacattaataaaacc

SEQ ID NO: 8848 - DNA, 50 bp, synthetic construct
  source 1..50: mol_type = other DNA
tctacataaactaacrtaaaataacaaataaacaaaacaaattacaaaac

SEQ ID NO: 8849 - DNA, 50 bp, synthetic construct
  source 1..50: mol_type = other DNA
aacacraaataaactacrcctttataaacaaaacaaaatctaattttcac

SEQ ID NO: 8850 - DNA, 50 bp, synthetic construct
  source 1..50: mol_type = other DNA
aaaaacaaacctacaaaacraaaattcatacctaaaaataacaattccac

SEQ ID NO: 8851 - DNA, 50 bp, synthetic construct
  source 1..50: mol_type = other DNA
ctatacaacaccttacctcrataacaaacaaaaaaacaaacctacaaaac

SEQ ID NO: 8852 - DNA, 50 bp, synthetic construct
  source 1..50: mol_type = other DNA
tctctaaacataaacctccrctttacaaacttatttccttatttatcacc

SEQ ID NO: 8853 - DNA, 50 bp, synthetic construct
  source 1..50: mol_type = other DNA
tccactaaaaacaaacttaaaaccctaaaaaaaactactcccatcttacc

SEQ ID NO: 8854 - DNA, 50 bp, synthetic construct
  source 1..50: mol_type = other DNA
aaaccccaaatttactctcaataaaaataaacaaacataaactacctccc

SEQ ID NO: 8855 - DNA, 50 bp, synthetic construct
  source 1..50: mol_type = other DNA
aaaatcctaacaaactaatcctaaaaaatttaaacaactaaatataatcc

SEQ ID NO: 8856 - DNA, 50 bp, synthetic construct
  source 1..50: mol_type = other DNA
acattccraatttcaataaccatatataactaataacaattatattaatc

SEQ ID NO: 8857 - DNA, 50 bp, synthetic construct
  source 1..50: mol_type = other DNA
ccactcttataaaacctcccatataaacaaaattatttttaatacccctc

SEQ ID NO: 8858 - DNA, 50 bp, synthetic construct
  source 1..50: mol_type = other DNA
catataaacaaaattatttttaatacccctcrtaaaacctataaaatctc

SEQ ID NO: 8859 - DNA, 50 bp, synthetic construct
  source 1..50: mol_type = other DNA
ctatataaaacacataacaaaaacatcaaaaaaacaaccactcttaaccc

SEQ ID NO: 8860 - DNA, 50 bp, synthetic construct
  source 1..50: mol_type = other DNA
aacccaatattatatcaatttaaaatctaaatttactaacrtcacatacc

SEQ ID NO: 8861 - DNA, 50 bp, synthetic construct
  source 1..50: mol_type = other DNA
atattatatcaatttaaaatctaaatttactaacrtcacataccrtacac

SEQ ID NO: 8862 - DNA, 50 bp, synthetic construct
  source 1..50: mol_type = other DNA
craccaaattctaaaaaactttaaaaacccraaacctcccraatatcaac

SEQ ID NO: 8863 - DNA, 50 bp, synthetic construct
  source 1..50: mol_type = other DNA
taaaaaactttaaaaacccraaacctcccraatatcaacraaaaacaaac

SEQ ID NO: 8864 - DNA, 50 bp, synthetic construct
  source 1..50: mol_type = other DNA
ctaatcaccaatttcaaatatttctatctactaaaaaactacctttccac

SEQ ID NO: 8865 - DNA, 50 bp, synthetic construct
  source 1..50: mol_type = other DNA
aaaacacctaaaactaataatcaacttcccaataaaatctcaaaaattac

SEQ ID NO: 8866 - DNA, 50 bp, synthetic construct
  source 1..50: mol_type = other DNA
tcaacttcccaataaaatctcaaaaattacrcaaataaactcaaacatac

SEQ ID NO: 8867 - DNA, 50 bp, synthetic construct
  source 1..50: mol_type = other DNA
ttcccrtaccaatcaaatatccrtacaaaatcatctaccaattaaactcc

SEQ ID NO: 8868 - DNA, 50 bp, synthetic construct
  source 1..50: mol_type = other DNA
actatatatatactcatttaaaacrttcttcccrtaccaatcaaatatcc

SEQ ID NO: 8869 - DNA, 50 bp, synthetic construct
  source 1..50: mol_type = other DNA
actaaacccraaacaaaaaactctataatctctacattcatcaccaccac

SEQ ID NO: 8870 - DNA, 50 bp, synthetic construct
  source 1..50: mol_type = other DNA
attttaattcaattttactatcttaccatcccrtctaaaatacctccrcc

SEQ ID NO: 8871 - DNA, 50 bp, synthetic construct
  source 1..50: mol_type = other DNA
taaattttaattcaattttactatcttaccatcccrtctaaaatacctcc

SEQ ID NO: 8872 - DNA, 50 bp, synthetic construct
  source 1..50: mol_type = other DNA
tacaaaacccaaaactaaattttaattcaattttactatcttaccatccc

SEQ ID NO: 8873 - DNA, 50 bp, synthetic construct
  source 1..50: mol_type = other DNA
taaaattaacttttcctacaaaaattctacctacaaacaacatatttatc

SEQ ID NO: 8874 - DNA, 50 bp, synthetic construct
  source 1..50: mol_type = other DNA
cacraatttctttcttttttctactaattttttaattatactattccttc

SEQ ID NO: 8875 - DNA, 50 bp, synthetic construct
  source 1..50: mol_type = other DNA
aattatcctcaacatctattttccaaacacatttctcaattaactatcac

SEQ ID NO: 8876 - DNA, 50 bp, synthetic construct
  source 1..50: mol_type = other DNA
aattctataatattttaatcattctatatttacaactactttcaaataac

SEQ ID NO: 8877 - DNA, 50 bp, synthetic construct
  source 1..50: mol_type = other DNA
tttaatttctttttataacccaatacactaacacaacttacaaactattc

SEQ ID NO: 8878 - DNA, 50 bp, synthetic construct
  source 1..50: mol_type = other DNA
tatatttttaataaatacraaatatctcccaattaaccaaaactaatctc

SEQ ID NO: 8879 - DNA, 50 bp, synthetic construct
  source 1..50: mol_type = other DNA
taataaatacraaatatctcccaattaaccaaaactaatctcraactccc

SEQ ID NO: 8880 - DNA, 50 bp, synthetic construct
  source 1..50: mol_type = other DNA
tctccccraatatctctaataaaaccacataataaatttcataatccacc

SEQ ID NO: 8881 - DNA, 50 bp, synthetic construct
  source 1..50: mol_type = other DNA
actaaatcaactatcccrataccraataataaatactaaaatataaacac

SEQ ID NO: 8882 - DNA, 50 bp, synthetic construct
  source 1..50: mol_type = other DNA
crataaaattctcccctctaataaacaatacrtatctaacaaaaacaatc

SEQ ID NO: 8883 - DNA, 50 bp, synthetic construct
  source 1..50: mol_type = other DNA
ttaaaaacctaatacaataacaaaaaaccacaacraaaaaactattctcc

SEQ ID NO: 8884 - DNA, 50 bp, synthetic construct
  source 1..50: mol_type = other DNA
ataaacaatacrtatctaacaaaaacaatcraacraaaaacaattcctcc

SEQ ID NO: 8885 - DNA, 50 bp, synthetic construct
  source 1..50: mol_type = other DNA
ttaaatttccccaacttcaaacaccrtctttaaacctaactataaacrcc

SEQ ID NO: 8886 - DNA, 50 bp, synthetic construct
  source 1..50: mol_type = other DNA
ctattaaatttccccaacttcaaacaccrtctttaaacctaactataaac

SEQ ID NO: 8887 - DNA, 50 bp, synthetic construct
  source 1..50: mol_type = other DNA
cacacrcttacataacraatcactattaaatttccccaacttcaaacacc

SEQ ID NO: 8888 - DNA, 50 bp, synthetic construct
  source 1..50: mol_type = other DNA
racratttaaacattttcctctatcttactaaatcacacrcttacataac

SEQ ID NO: 8889 - DNA, 50 bp, synthetic construct
  source 1..50: mol_type = other DNA
cccttctcaccracratttaaacattttcctctatcttactaaatcacac

SEQ ID NO: 8890 - DNA, 50 bp, synthetic construct
  source 1..50: mol_type = other DNA
accaaatctaaaaaatcacacaacatacaaacctccaccraaactcaacc

SEQ ID NO: 8891 - DNA, 50 bp, synthetic construct
  source 1..50: mol_type = other DNA
acrtaaaataaaccaaatctaaaaaatcacacaacatacaaacctccacc

SEQ ID NO: 8892 - DNA, 50 bp, synthetic construct
  source 1..50: mol_type = other DNA
tcrataaaaacttacatactatataactcttcaaacctaactcatttcac

SEQ ID NO: 8893 - DNA, 50 bp, synthetic construct
  source 1..50: mol_type = other DNA
ataaaaacttacatactatataactcttcaaacctaactcatttcacrtc

SEQ ID NO: 8894 - DNA, 50 bp, synthetic construct
  source 1..50: mol_type = other DNA
aaaaaaacaatccaaacaaccaaaaaccaaaataaacctaaaacraccac

SEQ ID NO: 8895 - DNA, 50 bp, synthetic construct
  source 1..50: mol_type = other DNA
aacataaaaaaaacaatccaaacaaccaaaaaccaaaataaacctaaaac

SEQ ID NO: 8896 - DNA, 50 bp, synthetic construct
  source 1..50: mol_type = other DNA
ctttaattcttaactacttaaactatctcccccataccttcattttctac

SEQ ID NO: 8897 - DNA, 50 bp, synthetic construct
  source 1..50: mol_type = other DNA
ccttcattttctacrtttccttctcratataaatacctcttacaaataac

SEQ ID NO: 8898 - DNA, 50 bp, synthetic construct
  source 1..50: mol_type = other DNA
taaatacctcttacaaataacraatcaaaaaatctccccccacaccaaac

SEQ ID NO: 8899 - DNA, 50 bp, synthetic construct
  source 1..50: mol_type = other DNA
aaatcaactcctaaaaaatcacaaaaaataaataaaccccaataaaaaac

SEQ ID NO: 8900 - DNA, 50 bp, synthetic construct
  source 1..50: mol_type = other DNA
ctatttctcaaactcttctacrataatattcccccaacaaaacctatacc

SEQ ID NO: 8901 - DNA, 50 bp, synthetic construct
  source 1..50: mol_type = other DNA
craaattaaacttcaaacacaatcaacrtactaccaacrtaaaaaaaacc

SEQ ID NO: 8902 - DNA, 50 bp, synthetic construct
  source 1..50: mol_type = other DNA
atatctaaaacttaatcccratatcacaaattcttatctttacacctaac

SEQ ID NO: 8903 - DNA, 50 bp, synthetic construct
  source 1..50: mol_type = other DNA
taaaacttaatcccratatcacaaattcttatctttacacctaacrttac

SEQ ID NO: 8904 - DNA, 50 bp, synthetic construct
  source 1..50: mol_type = other DNA
cccaaaaaatttcacaacaaaacccacaacaaactactaaaaaaacactc

SEQ ID NO: 8905 - DNA, 50 bp, synthetic construct
  source 1..50: mol_type = other DNA
tctaacaatctactataaaccttactataaaaccttctaaacacctccac

SEQ ID NO: 8906 - DNA, 50 bp, synthetic construct
  source 1..50: mol_type = other DNA
ataaaaccttctaaacacctccacraataaaaaaacactactatatcttc

SEQ ID NO: 8907 - DNA, 50 bp, synthetic construct
  source 1..50: mol_type = other DNA
aaacactaaaacaaacttcaacctaaaactctacrtacaacctaactacc

SEQ ID NO: 8908 - DNA, 50 bp, synthetic construct
  source 1..50: mol_type = other DNA
ataaaaaaacactactatatcttcrtacrtaaacrataaccaaactacac

SEQ ID NO: 8909 - DNA, 50 bp, synthetic construct
  source 1..50: mol_type = other DNA
ttcccactcaatatttactacccacaaaataaaaaaaccacraacaaaac

SEQ ID NO: 8910 - DNA, 50 bp, synthetic construct
  source 1..50: mol_type = other DNA
aacrctataccaaaaattcccactaaactaactaaaaaactaaattcrac

SEQ ID NO: 8911 - DNA, 50 bp, synthetic construct
  source 1..50: mol_type = other DNA
ctaaacrctataccaaaaattcccactaaactaactaaaaaactaaattc

SEQ ID NO: 8912 - DNA, 50 bp, synthetic construct
  source 1..50: mol_type = other DNA
ccacraaaaatctactctcaaaattctatctaaacccaacaatattttcc

SEQ ID NO: 8913 - DNA, 50 bp, synthetic construct
  source 1..50: mol_type = other DNA
ctctttaaaaactcctcctaactaataactatcaacacttaatctaaaac

SEQ ID NO: 8914 - DNA, 50 bp, synthetic construct
  source 1..50: mol_type = other DNA
acacttaatctaaaacrtaaataatttaattttcctaaacaaaaaactac

SEQ ID NO: 8915 - DNA, 50 bp, synthetic construct
  source 1..50: mol_type = other DNA
atctaactttaaaaaaacccctaaaaatatccacctccaccacttccacc

SEQ ID NO: 8916 - DNA, 50 bp, synthetic construct
  source 1..50: mol_type = other DNA
ctctaaaaaacacaatccattaaataaacraaaaccrcraatactaaacc

SEQ ID NO: 8917 - DNA, 50 bp, synthetic construct
  source 1..50: mol_type = other DNA
atccaacccaaactctaaaaaacacaatccattaaataaacraaaaccrc

SEQ ID NO: 8918 - DNA, 50 bp, synthetic construct
  source 1..50: mol_type = other DNA
ccatccaacccaaactctaaaaaacacaatccattaaataaacraaaacc

SEQ ID NO: 8919 - DNA, 50 bp, synthetic construct
  source 1..50: mol_type = other DNA
ctctataacrtaaaaatccrcratattaaaaataaatttaaccccttaac

SEQ ID NO: 8920 - DNA, 50 bp, synthetic construct
  source 1..50: mol_type = other DNA
ctaaaataacctaactcttctaacaccacaaaaaacrtacraatatccac

SEQ ID NO: 8921 - DNA, 50 bp, synthetic construct
  source 1..50: mol_type = other DNA
tataaactacctaaaataacctaactcttctaacaccacaaaaaacrtac

SEQ ID NO: 8922 - DNA, 50 bp, synthetic construct
  source 1..50: mol_type = other DNA
acatcacraacrtaatataaacctaattttaatcacraaatccacataac

SEQ ID NO: 8923 - DNA, 50 bp, synthetic construct
  source 1..50: mol_type = other DNA
ataaacctaattttaatcacraaatccacataacrtcacrttcttaaatc

SEQ ID NO: 8924 - DNA, 50 bp, synthetic construct
  source 1..50: mol_type = other DNA
tcrcctattataataataaacaaaaacactattaccrtaaacaaaacrac

SEQ ID NO: 8925 - DNA, 50 bp, synthetic construct
  source 1..50: mol_type = other DNA
rcctattataataataaacaaaaacactattaccrtaaacaaaacracrc

SEQ ID NO: 8926 - DNA, 50 bp, synthetic construct
  source 1..50: mol_type = other DNA
crtcrccacraacacaataacatatacrataaatataaatcaataaaacc

SEQ ID NO: 8927 - DNA, 50 bp, synthetic construct
  source 1..50: mol_type = other DNA
crccacraacacaataacatatacrataaatataaatcaataaaaccrtc

SEQ ID NO: 8928 - DNA, 50 bp, synthetic construct
  source 1..50: mol_type = other DNA
catatacrataaatataaatcaataaaaccrtcrccataaacacaataac

SEQ ID NO: 8929 - DNA, 50 bp, synthetic construct
  source 1..50: mol_type = other DNA
attaaactcatcactatttaaatccccattcactaatttacttaattacc

SEQ ID NO: 8930 - DNA, 50 bp, synthetic construct
  source 1..50: mol_type = other DNA
aaaaaaataaatctaaaacacrcctacctatttcctaacatacttaaaac

SEQ ID NO: 8931 - DNA, 50 bp, synthetic construct
  source 1..50: mol_type = other DNA
aatatccaataatctaacaacrttccaaatataccaaaaaacaaataaac

SEQ ID NO: 8932 - DNA, 50 bp, synthetic construct
  source 1..50: mol_type = other DNA
catataccaaaaataatatcacaaccaacctataattcaaaataaacctc

SEQ ID NO: 8933 - DNA, 50 bp, synthetic construct
  source 1..50: mol_type = other DNA
cacacrctttaacataaacataccttcttaaacataaacaaaaaattcac

SEQ ID NO: 8934 - DNA, 50 bp, synthetic construct
  source 1..50: mol_type = other DNA
accacrtaaacttcttattcatacctaaaaaaacatattcataccaaaac

SEQ ID NO: 8935 - DNA, 50 bp, synthetic construct
  source 1..50: mol_type = other DNA
atacctaaaaaaacatattcataccaaaacrtatatctacaaaaaaaccc

SEQ ID NO: 8936 - DNA, 50 bp, synthetic construct
  source 1..50: mol_type = other DNA
acacttaaaaaacacaaccaaaacttcaaaaatcaacataactaacraac

SEQ ID NO: 8937 - DNA, 50 bp, synthetic construct
  source 1..50: mol_type = other DNA
catacrataaaacataatactttaaatcaactaaccraatccatatatac

SEQ ID NO: 8938 - DNA, 50 bp, synthetic construct
  source 1..50: mol_type = other DNA
aataccaaaacaaaatactaaccrcattaaactcttctaaaaactccctc

SEQ ID NO: 8939 - DNA, 50 bp, synthetic construct
  source 1..50: mol_type = other DNA
catattctcccrccrtctaaaaacaaaaataccaaaacaaaatactaacc

SEQ ID NO: 8940 - DNA, 50 bp, synthetic construct
  source 1..50: mol_type = other DNA
aaacaccacaaaactaataacttaaaacaacaaaaacatattctcccrcc

SEQ ID NO: 8941 - DNA, 50 bp, synthetic construct
  source 1..50: mol_type = other DNA
caccccacaacctcctaaaaattacraaattaaaatacaaaaaacacccc

SEQ ID NO: 8942 - DNA, 50 bp, synthetic construct
  source 1..50: mol_type = other DNA
aaaatacaaaaaacaccccrccataaaaactaatactcaaccaaaacaac

SEQ ID NO: 8943 - DNA, 50 bp, synthetic construct
  source 1..50: mol_type = other DNA
tctaaaaaatatatttccacrttcaatcctcttacataaaaacaaatacc

SEQ ID NO: 8944 - DNA, 50 bp, synthetic construct
  source 1..50: mol_type = other DNA
aaccaaaacaacrtaaccacracacctatctttatacaaaaaaattaaac

SEQ ID NO: 8945 - DNA, 50 bp, synthetic construct
  source 1..50: mol_type = other DNA
aaaacaccttcaattaacctaaaaaacrccraatataaatcctactcacc

SEQ ID NO: 8946 - DNA, 50 bp, synthetic construct
  source 1..50: mol_type = other DNA
aaaaacccrtaataaaatcaaaaacaccttcaattaacctaaaaaacrcc

SEQ ID NO: 8947 - DNA, 50 bp, synthetic construct
  source 1..50: mol_type = other DNA
cctaaaaacccrtaataaaatcaaaaacaccttcaattaacctaaaaaac

SEQ ID NO: 8948 - DNA, 50 bp, synthetic construct
  source 1..50: mol_type = other DNA
taacatttcataacttttattctttcttaaaaattctctcctccaaaaac

SEQ ID NO: 8949 - DNA, 50 bp, synthetic construct
  source 1..50: mol_type = other DNA
accraaaaaactaatacataaaaatatttaacaacacaaccracraacac

SEQ ID NO: 8950 - DNA, 50 bp, synthetic construct
  source 1..50: mol_type = other DNA
raacctaccraaaaaactaatacataaaaatatttaacaacacaaccrac

SEQ ID NO: 8951 - DNA, 50 bp, synthetic construct
  source 1..50: mol_type = other DNA
cccraacctaccraaaaaactaatacataaaaatatttaacaacacaacc

SEQ ID NO: 8952 - DNA, 50 bp, synthetic construct
  source 1..50: mol_type = other DNA
actcaactctcratttcttactaacrattctaaaaaaaactacaacaaac

SEQ ID NO: 8953 - DNA, 50 bp, synthetic construct
  source 1..50: mol_type = other DNA
aaactacctcacaaactactatatacacaaatacaaataaatactacccc

SEQ ID NO: 8954 - DNA, 50 bp, synthetic construct
  source 1..50: mol_type = other DNA
tattttccrtaaaatacttaaaaaaacrtaaacataaccataaaacctcc

SEQ ID NO: 8955 - DNA, 50 bp, synthetic construct
  source 1..50: mol_type = other DNA
tctcatcctcaacttttacctcaaaaatttaacctctatcaaaattaatc

SEQ ID NO: 8956 - DNA, 50 bp, synthetic construct
  source 1..50: mol_type = other DNA
caaaaatttaacctctatcaaaattaatcraaatcaaattatcctaacac

SEQ ID NO: 8957 - DNA, 50 bp, synthetic construct
  source 1..50: mol_type = other DNA
ttaacrtaataacacctaccctattaaaatcatccataacaaatctaaac

SEQ ID NO: 8958 - DNA, 50 bp, synthetic construct
  source 1..50: mol_type = other DNA
tctaacaaaacaaatattaccacrtcaactaatccaaaaaacaaaatacc

SEQ ID NO: 8959 - DNA, 50 bp, synthetic construct
  source 1..50: mol_type = other DNA
rtcaactaatccaaaaaacaaaataccraatacacatcccttaaaatttc

SEQ ID NO: 8960 - DNA, 50 bp, synthetic construct
  source 1..50: mol_type = other DNA
taccraatacacatcccttaaaatttcraatatatttactctaaaacacc

SEQ ID NO: 8961 - DNA, 50 bp, synthetic construct
  source 1..50: mol_type = other DNA
ccaaccttctttaactaatataaacratattcaaatcacaactaaatcrc

SEQ ID NO: 8962 - DNA, 50 bp, synthetic construct
  source 1..50: mol_type = other DNA
aaccaaccttctttaactaatataaacratattcaaatcacaactaaatc

SEQ ID NO: 8963 - DNA, 50 bp, synthetic construct
  source 1..50: mol_type = other DNA
atactacaatattttttcttactatctttccaaaattccctaaaaatatc

SEQ ID NO: 8964 - DNA, 50 bp, synthetic construct
  source 1..50: mol_type = other DNA
crtacacttcaacttttaaaatacttactctaataatccacaatactttc

SEQ ID NO: 8965 - DNA, 50 bp, synthetic construct
  source 1..50: mol_type = other DNA
ccaaaaaccacrccacacaacacattctccaacaaatctaaaaacaatac

SEQ ID NO: 8966 - DNA, 50 bp, synthetic construct
  source 1..50: mol_type = other DNA
cctcatactaccctatataaacaattattaacctaaaaatatcactttcc

SEQ ID NO: 8967 - DNA, 50 bp, synthetic construct
  source 1..50: mol_type = other DNA
ctaaaaataaacaatcataaaaacatcccatcaaaattttcaataactcc

SEQ ID NO: 8968 - DNA, 50 bp, synthetic construct
  source 1..50: mol_type = other DNA
aatattctccrttctctacaaaaccctatacaaataaaaaactccaaaac

SEQ ID NO: 8969 - DNA, 50 bp, synthetic construct
  source 1..50: mol_type = other DNA
ccctaaaaacrtcctaaaaccctttatttacacaaaaccctacaaaaaac

SEQ ID NO: 8970 - DNA, 50 bp, synthetic construct
  source 1..50: mol_type = other DNA
atacacacctatcaaattatataaaataatactaactctacctaaccaac

SEQ ID NO: 8971 - DNA, 50 bp, synthetic construct
  source 1..50: mol_type = other DNA
cacaacctaacaaatatacacacaaaccctatactaacctataaaatttc

SEQ ID NO: 8972 - DNA, 50 bp, synthetic construct
  source 1..50: mol_type = other DNA
tatatctacctactaaaatcttaaaatttttataaacacaaaataaaaac

SEQ ID NO: 8973 - DNA, 50 bp, synthetic construct
  source 1..50: mol_type = other DNA
aaactttttccttccataaacrtaaccccttaaaaaactacccatacctc

SEQ ID NO: 8974 - DNA, 50 bp, synthetic construct
  source 1..50: mol_type = other DNA
ctaaaaccaataaaaatctcratccraaaataactaaaaccaatcacaac

SEQ ID NO: 8975 - DNA, 50 bp, synthetic construct
  source 1..50: mol_type = other DNA
aaacctcaactaaaaatcctaaaaaaataatactaaattataactctatc

SEQ ID NO: 8976 - DNA, 50 bp, synthetic construct
  source 1..50: mol_type = other DNA
acctcaactaaaaatcctaaaaaaataatactaaattataactctatcrc

SEQ ID NO: 8977 - DNA, 50 bp, synthetic construct
  source 1..50: mol_type = other DNA
aaaataacrcacattattaacttcaataaaattttcaacaccatatttcc

SEQ ID NO: 8978 - DNA, 50 bp, synthetic construct
  source 1..50: mol_type = other DNA
aactctcaaccaattaccaatcaaaaaacctttaaatatacctataaccc

SEQ ID NO: 8979 - DNA, 50 bp, synthetic construct
  source 1..50: mol_type = other DNA
ctcaaccaattaccaatcaaaaaacctttaaatatacctataacccraac

SEQ ID NO: 8980 - DNA, 50 bp, synthetic construct
  source 1..50: mol_type = other DNA
caacaaaacattacraaaattaacaacaattacaaaacactaaaacaaac

SEQ ID NO: 8981 - DNA, 50 bp, synthetic construct
  source 1..50: mol_type = other DNA
ttcrctaaaaaaattaaacctatctaaatacraatccaacaaaacattac

SEQ ID NO: 8982 - DNA, 50 bp, synthetic construct
  source 1..50: mol_type = other DNA
acaaactacraacttatctcttacttcattttttacttttatcttaaaac

SEQ ID NO: 8983 - DNA, 50 bp, synthetic construct
  source 1..50: mol_type = other DNA
atttaaatataacccccctcttaaaaatacttacaatatttatttttacc

SEQ ID NO: 8984 - DNA, 50 bp, synthetic construct
  source 1..50: mol_type = other DNA
aatacaaaaatcacttctactactactaaaaaccctccctaaaaaacacc

SEQ ID NO: 8985 - DNA, 50 bp, synthetic construct
  source 1..50: mol_type = other DNA
actactaaaaaccctccctaaaaaacaccraaaatttactacctattaac

SEQ ID NO: 8986 - DNA, 50 bp, synthetic construct
  source 1..50: mol_type = other DNA
aaacaccraaaatttactacctattaacrtaactctctccaaaaattatc

SEQ ID NO: 8987 - DNA, 50 bp, synthetic construct
  source 1..50: mol_type = other DNA
tccaaaaattatcrtctactcttaactttacttaaacctatactaccccc

SEQ ID NO: 8988 - DNA, 50 bp, synthetic construct
  source 1..50: mol_type = other DNA
aaaacattacctaattctaacccaaacraaacataaacaaaaaccctaac

SEQ ID NO: 8989 - DNA, 50 bp, synthetic construct
  source 1..50: mol_type = other DNA
ctccacctcatattttcaaacttaatactaaaaactaactaaaaacttac

SEQ ID NO: 8990 - DNA, 50 bp, synthetic construct
  source 1..50: mol_type = other DNA
aaccctaatatttcatcactttcttacctaacttaacaaaaacatatatc

SEQ ID NO: 8991 - DNA, 50 bp, synthetic construct
  source 1..50: mol_type = other DNA
ctaaaactactccccraaaaacatcttaaaaattccacttaaacraatcc

SEQ ID NO: 8992 - DNA, 50 bp, synthetic construct
  source 1..50: mol_type = other DNA
ccttcrctacctattaaaaactaaaaatcctaaaacccraaaactaaaac

SEQ ID NO: 8993 - DNA, 50 bp, synthetic construct
  source 1..50: mol_type = other DNA
ttcrctacctattaaaaactaaaaatcctaaaacccraaaactaaaacrc

SEQ ID NO: 8994 - DNA, 50 bp, synthetic construct
  source 1..50: mol_type = other DNA
ttttttttcaaccaaaatattctatattattaacaaatctcractaccrc

SEQ ID NO: 8995 - DNA, 50 bp, synthetic construct
  source 1..50: mol_type = other DNA
aattttttttcaaccaaaatattctatattattaacaaatctcractacc

SEQ ID NO: 8996 - DNA, 50 bp, synthetic construct
  source 1..50: mol_type = other DNA
aaatttcactatactaaccaaaatttcrctatactaactaaactaatctc

SEQ ID NO: 8997 - DNA, 50 bp, synthetic construct
  source 1..50: mol_type = other DNA
aaattacattcaacatctctaaaaaatatacccaatcaaaaaatataccc

SEQ ID NO: 8998 - DNA, 50 bp, synthetic construct
  source 1..50: mol_type = other DNA
acaaaaaaacactatatccccaaaccaaaaaatccctataaacaaaaacc

SEQ ID NO: 8999 - DNA, 50 bp, synthetic construct
  source 1..50: mol_type = other DNA
acctcaaactcctaaaataaaactactatttacacratcacttaatttcc

SEQ ID NO: 9000 - DNA, 50 bp, synthetic construct
  source 1..50: mol_type = other DNA
atataaaaattacataccatcaacataatttatcactaaactcaaatcac

SEQ ID NO: 9001 - DNA, 50 bp, synthetic construct
  source 1..50: mol_type = other DNA
cttaaacccaaaaattcaaattaaaataaactataatcatacccctacac

SEQ ID NO: 9002 - DNA, 50 bp, synthetic construct
  source 1..50: mol_type = other DNA
tacttaaaatatcaataaccracttaaatattattaaaaaaccacrcacc

SEQ ID NO: 9003 - DNA, 50 bp, synthetic construct
  source 1..50: mol_type = other DNA
aataatacttaaaatatcaataaccracttaaatattattaaaaaaccac

SEQ ID NO: 9004 - DNA, 50 bp, synthetic construct
  source 1..50: mol_type = other DNA
acraaataaaataacctaaacaattcaaaaacccrcraaaaatccaaaac

SEQ ID NO: 9005 - DNA, 50 bp, synthetic construct
  source 1..50: mol_type = other DNA
acaaccccraaataaaacraaataaaataacctaaacaattcaaaaaccc

SEQ ID NO: 9006 - DNA, 50 bp, synthetic construct
  source 1..50: mol_type = other DNA
crtaaatacaaaaaacaacrctaaaacaaaatacaaccccraaataaaac

SEQ ID NO: 9007 - DNA, 50 bp, synthetic construct
  source 1..50: mol_type = other DNA
aaattacaatcrtaaatacaaaaaacaacrctaaaacaaaatacaacccc

SEQ ID NO: 9008 - DNA, 50 bp, synthetic construct
  source 1..50: mol_type = other DNA
aaaaaaataacctctacrattaaattacaatcrtaaatacaaaaaacaac

SEQ ID NO: 9009 - DNA, 50 bp, synthetic construct
  source 1..50: mol_type = other DNA
ctctactccatcccaaaaataaaacatttcrcctttaaatacttaaaaac

SEQ ID NO: 9010 - DNA, 50 bp, synthetic construct
  source 1..50: mol_type = other DNA
tacataaaatactataatccaaaaacacacactactacrcttacttaacc

SEQ ID NO: 9011 - DNA, 50 bp, synthetic construct
  source 1..50: mol_type = other DNA
aaaatactataatccaaaaacacacactactacrcttacttaaccraatc

SEQ ID NO: 9012 - DNA, 50 bp, synthetic construct
  source 1..50: mol_type = other DNA
aaccaaactaattactccraaactaaaaattacracaccraaattaaaac

SEQ ID NO: 9013 - DNA, 50 bp, synthetic construct
  source 1..50: mol_type = other DNA
aaaaaatcrtcaacraaaaatcctaaacrtcttcaattctaaataaaacc

SEQ ID NO: 9014 - DNA, 50 bp, synthetic construct
  source 1..50: mol_type = other DNA
aaaatctacactcraacactaaaaaaactatctaccaattcctccttatc

SEQ ID NO: 9015 - DNA, 50 bp, synthetic construct
  source 1..50: mol_type = other DNA
cactatataaccaaaattataaaaaaccctaaaattaaaaatctacactc

SEQ ID NO: 9016 - DNA, 50 bp, synthetic construct
  source 1..50: mol_type = other DNA
atataatttaaatatttctcccctccaatctcatactaaaaaataatccc

SEQ ID NO: 9017 - DNA, 50 bp, synthetic construct
  source 1..50: mol_type = other DNA
aaattaaacrcactattctcaccaccaaaataaaaaacaaacaaaacaac

SEQ ID NO: 9018 - DNA, 50 bp, synthetic construct
  source 1..50: mol_type = other DNA
ttcctaatcrctactttacctaccttctaccctaataataaaaacaatac

SEQ ID NO: 9019 - DNA, 50 bp, synthetic construct
  source 1..50: mol_type = other DNA
ctaacttcaaaatttctacattactcaaaaaacataacacaactaaaacc

SEQ ID NO: 9020 - DNA, 50 bp, synthetic construct
  source 1..50: mol_type = other DNA
tttttccccccttaatttacttcccaaatttacttcccaataaatatccc

SEQ ID NO: 9021 - DNA, 50 bp, synthetic construct
  source 1..50: mol_type = other DNA
atcatatctcaaattttaaactttctaacctttttccatctttctaactc

SEQ ID NO: 9022 - DNA, 50 bp, synthetic construct
  source 1..50: mol_type = other DNA
actcracaatatctaaataataaactatttctctataatattttcctcac

SEQ ID NO: 9023 - DNA, 50 bp, synthetic construct
  source 1..50: mol_type = other DNA
taaaatatctctaaaaatcaaaccttattaaaaataactacattaacccc

SEQ ID NO: 9024 - DNA, 50 bp, synthetic construct
  source 1..50: mol_type = other DNA
aataccratactttcctatatttaatatattattcacccatctctaaacc

SEQ ID NO: 9025 - DNA, 50 bp, synthetic construct
  source 1..50: mol_type = other DNA
attttaatcactcaccattataaactttttaaaaattattccccttaatc

SEQ ID NO: 9026 - DNA, 50 bp, synthetic construct
  source 1..50: mol_type = other DNA
attcctaaacctttctaaaattctaccaaattttctaacttacctaccac

SEQ ID NO: 9027 - DNA, 50 bp, synthetic construct
  source 1..50: mol_type = other DNA
taataaccacaaaaaatattctttataataatatataacraaaccrcacc

SEQ ID NO: 9028 - DNA, 50 bp, synthetic construct
  source 1..50: mol_type = other DNA
attcaactaatatttattaccrctaacaatatttcaccctataaactctc

SEQ ID NO: 9029 - DNA, 50 bp, synthetic construct
  source 1..50: mol_type = other DNA
caacaaacaataatttccaaaccaaatctaacttaccacctaattttatc

SEQ ID NO: 9030 - DNA, 50 bp, synthetic construct
  source 1..50: mol_type = other DNA
cttaaaaaaccataaaatttctatcacaactactcaactttactatacac

SEQ ID NO: 9031 - DNA, 50 bp, synthetic construct
  source 1..50: mol_type = other DNA
aacaaaaaccttataactctccaaaccttaacttatttcctatctaaccc

SEQ ID NO: 9032 - DNA, 50 bp, synthetic construct
  source 1..50: mol_type = other DNA
ccctatttaaaaatccctactttccraaaaaatttcaattttaacttccc

SEQ ID NO: 9033 - DNA, 50 bp, synthetic construct
  source 1..50: mol_type = other DNA
caacttataaaattcaaaaacaactttctttaattacaaactacacaaac

SEQ ID NO: 9034 - DNA, 50 bp, synthetic construct
  source 1..50: mol_type = other DNA
aaatcaaaccacaaaccacaaccaaatactaaatcaaaaacctacrtaac

SEQ ID NO: 9035 - DNA, 50 bp, synthetic construct
  source 1..50: mol_type = other DNA
acataaaaatacttccatccactaaataaacatacaaaaaaatatttctc

SEQ ID NO: 9036 - DNA, 50 bp, synthetic construct
  source 1..50: mol_type = other DNA
caacccttcccttaaaaaatccactctaacaaaaactttattaaataaac

SEQ ID NO: 9037 - DNA, 50 bp, synthetic construct
  source 1..50: mol_type = other DNA
tactatacctactttttaaataactatatcatatccccaaatactcaacc

SEQ ID NO: 9038 - DNA, 50 bp, synthetic construct
  source 1..50: mol_type = other DNA
aaattatcctctaaataataccattaatatacaatcccattaaaaaacac

SEQ ID NO: 9039 - DNA, 50 bp, synthetic construct
  source 1..50: mol_type = other DNA
ctaaaaataatttacrcaaataaaaacatactcaacctttctcaaaaaac

SEQ ID NO: 9040 - DNA, 50 bp, synthetic construct
  source 1..50: mol_type = other DNA
acacatcccaaaaactaccttaatcaaaatacataaaaaaaccctaaacc

SEQ ID NO: 9041 - DNA, 50 bp, synthetic construct
  source 1..50: mol_type = other DNA
cttcccatataccttaaccaaaacaactcctaaaatatactaatactatc

SEQ ID NO: 9042 - DNA, 50 bp, synthetic construct
  source 1..50: mol_type = other DNA
atactcttcaaaaaaatatacaaataactaacaaacccaattccaccttc

SEQ ID NO: 9043 - DNA, 50 bp, synthetic construct
  source 1..50: mol_type = other DNA
ctaaaataaaaaacrtttcctcatactttttatcataccaacaaaaccac

SEQ ID NO: 9044 - DNA, 50 bp, synthetic construct
  source 1..50: mol_type = other DNA
caccatcaaaacaactacttacaattcacrtataatctaaaataaaaaac

SEQ ID NO: 9045 - DNA, 50 bp, synthetic construct
  source 1..50: mol_type = other DNA
aatcattatttccaaactttacattatactatacacctcaaattctcatc

SEQ ID NO: 9046 - DNA, 50 bp, synthetic construct
  source 1..50: mol_type = other DNA
aactctcatataaaacactcaaaccrtaaaaaaacatatttttaaacaac

SEQ ID NO: 9047 - DNA, 50 bp, synthetic construct
  source 1..50: mol_type = other DNA
ccacacaaaaaaatatcccaaacacrttactcaaaaacatactttcctac

SEQ ID NO: 9048 - DNA, 50 bp, synthetic construct
  source 1..50: mol_type = other DNA
actaactttaaaccractaaatatacaatacaaacatctcaacactccac

SEQ ID NO: 9049 - DNA, 50 bp, synthetic construct
  source 1..50: mol_type = other DNA
ccrattaataccaactttacaaataaactaacttctaaacttaaaacrac

SEQ ID NO: 9050 - DNA, 50 bp, synthetic construct
  source 1..50: mol_type = other DNA
aaaaaacccctttttctaaactatacactaatttaattaataaaaacrtc

SEQ ID NO: 9051 - DNA, 50 bp, synthetic construct
  source 1..50: mol_type = other DNA
tttctacttcaataactcccaacaaaacaatacccaaaacaacatatacc

SEQ ID NO: 9052 - DNA, 50 bp, synthetic construct
  source 1..50: mol_type = other DNA
ttcaatccttattcctattctcttctacaaccaatcactcccttaaaaac

SEQ ID NO: 9053 - DNA, 50 bp, synthetic construct
  source 1..50: mol_type = other DNA
aaaacaaacraacctaaataaaatcatccaataaaaattactaactaaac

SEQ ID NO: 9054 - DNA, 50 bp, synthetic construct
  source 1..50: mol_type = other DNA
ctcaacattcrtatacatacttccrataaattaaaaaatctaaataaccc

SEQ ID NO: 9055 - DNA, 50 bp, synthetic construct
  source 1..50: mol_type = other DNA
aaatcttttcraatcatctaaatttctcaactcaccraaaacatacacac

SEQ ID NO: 9056 - DNA, 50 bp, synthetic construct
  source 1..50: mol_type = other DNA
aaaatattccatttccaaataaaaaaatacatccataaaaaaaaccaccc

SEQ ID NO: 9057 - DNA, 50 bp, synthetic construct
  source 1..50: mol_type = other DNA
cccatcatctaattaatcactaaattctaaaaactttccctactaacttc

SEQ ID NO: 9058 - DNA, 50 bp, synthetic construct
  source 1..50: mol_type = other DNA
atttccaaaaaacacacrtccctctaataacaacttatttctaaattccc

SEQ ID NO: 9059 - DNA, 50 bp, synthetic construct
  source 1..50: mol_type = other DNA
aaaaacrtataccctctaaaaataatttccaaaacatatttcataatccc

SEQ ID NO: 9060 - DNA, 50 bp, synthetic construct
  source 1..50: mol_type = other DNA
rtataccctctaaaaataatttccaaaacatatttcataatcccraaccc

SEQ ID NO: 9061 - DNA, 50 bp, synthetic construct
  source 1..50: mol_type = other DNA
acaaattaaaatcaacractatattttaacctttccttatctcctaactc

SEQ ID NO: 9062 - DNA, 50 bp, synthetic construct
  source 1..50: mol_type = other DNA
aaactcaattacaaaaacaaacataaaacaacttatacaaaaaactaaac

SEQ ID NO: 9063 - DNA, 50 bp, synthetic construct
  source 1..50: mol_type = other DNA
tataaattctacccttaacaataataaaatcacatcaaaaccccratacc

SEQ ID NO: 9064 - DNA, 50 bp, synthetic construct
  source 1..50: mol_type = other DNA
caaaaatataaattctacccttaacaataataaaatcacatcaaaacccc

SEQ ID NO: 9065 - DNA, 50 bp, synthetic construct
  source 1..50: mol_type = other DNA
aaactacatattttataatataaatactcaatatcracccaaactatacc

SEQ ID NO: 9066 - DNA, 50 bp, synthetic construct
  source 1..50: mol_type = other DNA
taaattctttaccaaaacccttattaaaacaattaaatacaaccraacac

SEQ ID NO: 9067 - DNA, 50 bp, synthetic construct
  source 1..50: mol_type = other DNA
taatcttaaattctttaccaaaacccttattaaaacaattaaatacaacc

SEQ ID NO: 9068 - DNA, 50 bp, synthetic construct
  source 1..50: mol_type = other DNA
ctctaataaaaaacttaaaatcacaataataaaatctcctaaccaaaccc

SEQ ID NO: 9069 - DNA, 50 bp, synthetic construct
  source 1..50: mol_type = other DNA
aatcacaataataaaatctcctaaccaaacccrattaaataaaactattc

SEQ ID NO: 9070 - DNA, 50 bp, synthetic construct
  source 1..50: mol_type = other DNA
caataataaaatctcctaaccaaacccrattaaataaaactattcrcaac

SEQ ID NO: 9071 - DNA, 50 bp, synthetic construct
  source 1..50: mol_type = other DNA
attaaaatatcatccaaccctcrtaacttataataaccatttctaattac

SEQ ID NO: 9072 - DNA, 50 bp, synthetic construct
  source 1..50: mol_type = other DNA
tatctacctaaacatttaactatctcatattaaaatatcatccaaccctc

SEQ ID NO: 9073 - DNA, 50 bp, synthetic construct
  source 1..50: mol_type = other DNA
acaaattccctcatcracccaaaaacatctaatataaacattcttaaaac

SEQ ID NO: 9074 - DNA, 50 bp, synthetic construct
  source 1..50: mol_type = other DNA
aaaaaatctccaaacrtcccaaaaatatttacattaaatacttttaaatc

SEQ ID NO: 9075 - DNA, 50 bp, synthetic construct
  source 1..50: mol_type = other DNA
aaaaacaacacttctaataaccctataactaaccctaattatatccctcc

SEQ ID NO: 9076 - DNA, 50 bp, synthetic construct
  source 1..50: mol_type = other DNA
ttctaataaccctataactaaccctaattatatccctccrtcactattac

SEQ ID NO: 9077 - DNA, 50 bp, synthetic construct
  source 1..50: mol_type = other DNA
tcctattcttatatcttacataatataaacatttatcacactaaaaaacc

SEQ ID NO: 9078 - DNA, 50 bp, synthetic construct
  source 1..50: mol_type = other DNA
taccacacttcattcaaaattctccaatttccacctaatatcctttttcc

SEQ ID NO: 9079 - DNA, 50 bp, synthetic construct
  source 1..50: mol_type = other DNA
taatatcctttttccrtcccaaaaccccttctaaaacattaaatataatc

SEQ ID NO: 9080 - DNA, 50 bp, synthetic construct
  source 1..50: mol_type = other DNA
ttctaaaacattaaatataatcrtcatactccttctttaataaccttaac

SEQ ID NO: 9081 - DNA, 50 bp, synthetic construct
  source 1..50: mol_type = other DNA
tccaaaaccacataactaaaatataataaaaccaaaattcctatccaaac

SEQ ID NO: 9082 - DNA, 50 bp, synthetic construct
  source 1..50: mol_type = other DNA
ctaactttaccacatcttaaccatataaccttaaacaaataaacctccac

SEQ ID NO: 9083 - DNA, 50 bp, synthetic construct
  source 1..50: mol_type = other DNA
atccccacaattcctaaaaaataaattatatttacttttcctctacattc

SEQ ID NO: 9084 - DNA, 50 bp, synthetic construct
  source 1..50: mol_type = other DNA
tactaatctttacrctaaatctctaacacaatatctatattattaaatac

SEQ ID NO: 9085 - DNA, 50 bp, synthetic construct
  source 1..50: mol_type = other DNA
aataaccactaacrcatttaacaacacaaatactataccaaaaatccaac

SEQ ID NO: 9086 - DNA, 50 bp, synthetic construct
  source 1..50: mol_type = other DNA
caaccttaaccttctttaaactcttaaccactttcttaattacaataacc

SEQ ID NO: 9087 - DNA, 50 bp, synthetic construct
  source 1..50: mol_type = other DNA
taccaaacataaaaaactaacaataacctaaccttaaaataaccraaccc

SEQ ID NO: 9088 - DNA, 50 bp, synthetic construct
  source 1..50: mol_type = other DNA
cctaaaccaaacctaaaactcctcttaaacaaattcaaaatcaatccttc

SEQ ID NO: 9089 - DNA, 50 bp, synthetic construct
  source 1..50: mol_type = other DNA
aaaaaaacaacaccataatatttatcccttctaaatatctaaaactattc

SEQ ID NO: 9090 - DNA, 50 bp, synthetic construct
  source 1..50: mol_type = other DNA
aaaacctcaccaaaaatattatattaactaatacatactaatttctaatc

SEQ ID NO: 9091 - DNA, 50 bp, synthetic construct
  source 1..50: mol_type = other DNA
aaccctctaaaaaataaataatcacrctataattcttcctatatatacac

SEQ ID NO: 9092 - DNA, 50 bp, synthetic construct
  source 1..50: mol_type = other DNA
taaaattatatccacaaacttctaaaaccctctaaaaaataaataatcac

SEQ ID NO: 9093 - DNA, 50 bp, synthetic construct
  source 1..50: mol_type = other DNA
ctttataatccctcaacaaaattcctcttctccctatcataacctatatc

SEQ ID NO: 9094 - DNA, 50 bp, synthetic construct
  source 1..50: mol_type = other DNA
tattccttataatatatctaaactttatcctttactttaacaaaaataac

SEQ ID NO: 9095 - DNA, 50 bp, synthetic construct
  source 1..50: mol_type = other DNA
tacctatttaacacctcatttattatcaaatttcaaaaatcrttttcttc

SEQ ID NO: 9096 - DNA, 50 bp, synthetic construct
  source 1..50: mol_type = other DNA
aaatcttcccacaaactaaataccaaaatttttccaccctaccctcatcc

SEQ ID NO: 9097 - DNA, 50 bp, synthetic construct
  source 1..50: mol_type = other DNA
ttactcttaaacaatccctaattatccaaattttcracttcatctcrttc

SEQ ID NO: 9098 - DNA, 50 bp, synthetic construct
  source 1..50: mol_type = other DNA
tcccttactcttaaacaatccctaattatccaaattttcracttcatctc

SEQ ID NO: 9099 - DNA, 50 bp, synthetic construct
  source 1..50: mol_type = other DNA
tttaataactttcccttactcttaaacaatccctaattatccaaattttc

SEQ ID NO: 9100 - DNA, 50 bp, synthetic construct
  source 1..50: mol_type = other DNA
tccatttttcatacaacatcrttataatcttcaaatacaaatataatcac

SEQ ID NO: 9101 - DNA, 50 bp, synthetic construct
  source 1..50: mol_type = other DNA
aaaaaacacattcaaaccataacaactaatatataataactaaataaccc

SEQ ID NO: 9102 - DNA, 50 bp, synthetic construct
  source 1..50: mol_type = other DNA
tcttatattttaaccaatacttatctaacaaaaattaaaaaaactatccc

SEQ ID NO: 9103 - DNA, 50 bp, synthetic construct
  source 1..50: mol_type = other DNA
tcactatcaaattcactactaataaacraaacactacatcattcccctac

SEQ ID NO: 9104 - DNA, 50 bp, synthetic construct
  source 1..50: mol_type = other DNA
aaaaatactaaaccccctaaaaattccrtaaaaaaataatataatatccc

SEQ ID NO: 9105 - DNA, 50 bp, synthetic construct
  source 1..50: mol_type = other DNA
aaatatctatccaaaatccaaaaaaccaaataacttaccctaaacatatc

SEQ ID NO: 9106 - DNA, 50 bp, synthetic construct
  source 1..50: mol_type = other DNA
acttaccctaaacatatcrcaaacctatcaaaatttaaatacttacttcc

SEQ ID NO: 9107 - DNA, 50 bp, synthetic construct
  source 1..50: mol_type = other DNA
aacaaattaatactcataaaaactacacaaactaataattaaaaatattc

SEQ ID NO: 9108 - DNA, 50 bp, synthetic construct
  source 1..50: mol_type = other DNA
aacttacraaccaactaaaattccraataaacrtaaacttaacaaacccc

SEQ ID NO: 9109 - DNA, 50 bp, synthetic construct
  source 1..50: mol_type = other DNA
tatataaaaactactcrctttctcaaaccccacctacaaatcatccttac

SEQ ID NO: 9110 - DNA, 50 bp, synthetic construct
  source 1..50: mol_type = other DNA
tttttcttcttccataaacctctaataaatttcaacaaccacctaattac

SEQ ID NO: 9111 - DNA, 50 bp, synthetic construct
  source 1..50: mol_type = other DNA
acataaatcaaatattttaacatcacctaatcaatcttaactaataacac

SEQ ID NO: 9112 - DNA, 50 bp, synthetic construct
  source 1..50: mol_type = other DNA
ataaaaccacttactttaaataatccctatctaaacctataaaatcatac

SEQ ID NO: 9113 - DNA, 50 bp, synthetic construct
  source 1..50: mol_type = other DNA
tttccttccrttattaaaattactcttaataaccttccactaaataacrc

SEQ ID NO: 9114 - DNA, 50 bp, synthetic construct
  source 1..50: mol_type = other DNA
atttttaaaaaatcattaactatacccccaatacaatttaaatctttacc

SEQ ID NO: 9115 - DNA, 50 bp, synthetic construct
  source 1..50: mol_type = other DNA
aataaaccctaaaaatacatctaaaatataatcttctttactcctttatc

SEQ ID NO: 9116 - DNA, 50 bp, synthetic construct
  source 1..50: mol_type = other DNA
aaatctaatccaaacctttaccatctcttacctaaattactacaatatcc

SEQ ID NO: 9117 - DNA, 50 bp, synthetic construct
  source 1..50: mol_type = other DNA
cctacaaactatttttaaacacaacaaccaaaaaaaaccttttataatac

SEQ ID NO: 9118 - DNA, 50 bp, synthetic construct
  source 1..50: mol_type = other DNA
atatattattatttaaattcaaacatcctataaatcractttatcttcac

SEQ ID NO: 9119 - DNA, 50 bp, synthetic construct
  source 1..50: mol_type = other DNA
acatctactaaaatatactatctctattaaaaaatcrtaaaaacaaaacc

SEQ ID NO: 9120 - DNA, 50 bp, synthetic construct
  source 1..50: mol_type = other DNA
actctttatataatttcaacaaaatataaccctccttctaataacaacac

SEQ ID NO: 9121 - DNA, 50 bp, synthetic construct
  source 1..50: mol_type = other DNA
tatactaaaatcaaatcccaattaattatcccaaaaaccaaaaactatcc

SEQ ID NO: 9122 - DNA, 50 bp, synthetic construct
  source 1..50: mol_type = other DNA
caaaatccaaaacatcatttaactaaatctcaaaatctaaaaactaaacc

SEQ ID NO: 9123 - DNA, 50 bp, synthetic construct
  source 1..50: mol_type = other DNA
cttaaaaatcccacatccctcccaacttcatatcaaaatttaaatcctac

SEQ ID NO: 9124 - DNA, 50 bp, synthetic construct
  source 1..50: mol_type = other DNA
aaaacctaaacaatcrcacactctaaaaaataacaattaacaaaaataac

SEQ ID NO: 9125 - DNA, 50 bp, synthetic construct
  source 1..50: mol_type = other DNA
aaaaacactcttacactttctttaaaaaataacttacctactatctttac

SEQ ID NO: 9126 - DNA, 50 bp, synthetic construct
  source 1..50: mol_type = other DNA
tatctcactccatcctaacaataatcctaaaaaatatatacaattactac

SEQ ID NO: 9127 - DNA, 50 bp, synthetic construct
  source 1..50: mol_type = other DNA
taactcaatttaaatcataaattatctaaacacaccctattactaataac

SEQ ID NO: 9128 - DNA, 50 bp, synthetic construct
  source 1..50: mol_type = other DNA
tatatattcacatttatctaaaaacaatcctaatttttactcattatccc

SEQ ID NO: 9129 - DNA, 50 bp, synthetic construct
  source 1..50: mol_type = other DNA
taaacrcatccattaacactaatatatacttcatcatcataataaaaacc

SEQ ID NO: 9130 - DNA, 50 bp, synthetic construct
  source 1..50: mol_type = other DNA
cactacaaataacccctaaaaaattcataaactactatacaaatataaac

SEQ ID NO: 9131 - DNA, 50 bp, synthetic construct
  source 1..50: mol_type = other DNA
cacaaaaaaatcctctatttcccttctatttacaaatacacaaaataaac

SEQ ID NO: 9132 - DNA, 50 bp, synthetic construct
  source 1..50: mol_type = other DNA
taaaatcrataacatatatttaaaaactaactcttaccctaatacctaac

SEQ ID NO: 9133 - DNA, 50 bp, synthetic construct
  source 1..50: mol_type = other DNA
caaacaaaatcttctacaaacaaaaacactttatacactactataaaatc

SEQ ID NO: 9134 - DNA, 50 bp, synthetic construct
  source 1..50: mol_type = other DNA
acacaaaatatctctacctataaaaaactctatctaaaccttaaaaatcc

SEQ ID NO: 9135 - DNA, 50 bp, synthetic construct
  source 1..50: mol_type = other DNA
tacctataaaaaactctatctaaaccttaaaaatccratataataacaac

SEQ ID NO: 9136 - DNA, 50 bp, synthetic construct
  source 1..50: mol_type = other DNA
ataaaaaactctatctaaaccttaaaaatccratataataacaacraaac

SEQ ID NO: 9137 - DNA, 50 bp, synthetic construct
  source 1..50: mol_type = other DNA
aaccttaaaaatccratataataacaacraaacrcatccctatacaaaac

SEQ ID NO: 9138 - DNA, 50 bp, synthetic construct
  source 1..50: mol_type = other DNA
aaactaaaccrcatacctaaccraaaaaatatacaaacrcctaaaaacac

SEQ ID NO: 9139 - DNA, 50 bp, synthetic construct
  source 1..50: mol_type = other DNA
tacrattcaatctctaccttccacacaaatctactaaaaactcaaaaaac

SEQ ID NO: 9140 - DNA, 50 bp, synthetic construct
  source 1..50: mol_type = other DNA
cccatatattacccacaaaaaaattcctaataaactcttaaaatttcacc

SEQ ID NO: 9141 - DNA, 50 bp, synthetic construct
  source 1..50: mol_type = other DNA
atcacaaaatcaaaaaattaaaaccatcctaaccaacataataaaatccc

SEQ ID NO: 9142 - DNA, 50 bp, synthetic construct
  source 1..50: mol_type = other DNA
aaacaaacctcaatcattttaaaaaatttatttaccaaaattaaaaacrc

SEQ ID NO: 9143 - DNA, 50 bp, synthetic construct
  source 1..50: mol_type = other DNA
ataaaaaaatcctaaataaaaataacccaacctacaacctctcatctctc

SEQ ID NO: 9144 - DNA, 50 bp, synthetic construct
  source 1..50: mol_type = other DNA
taaataaaaataacccaacctacaacctctcatctctcrtatttaattcc

SEQ ID NO: 9145 - DNA, 50 bp, synthetic construct
  source 1..50: mol_type = other DNA
acaaataaacctcaaaccrcaaaatccctaatacaaaaacaaataaactc

SEQ ID NO: 9146 - DNA, 50 bp, synthetic construct
  source 1..50: mol_type = other DNA
atttccttcaaaaaaaacraacctatctacttctatatcaaaaatcttac

SEQ ID NO: 9147 - DNA, 50 bp, synthetic construct
  source 1..50: mol_type = other DNA
aaactattccactacctaacaattacaaaactatatattctacaacccac

SEQ ID NO: 9148 - DNA, 50 bp, synthetic construct
  source 1..50: mol_type = other DNA
acactctaaacataccaaataaactattttaaattattataaaaaacttc

SEQ ID NO: 9149 - DNA, 50 bp, synthetic construct
  source 1..50: mol_type = other DNA
aaacaaaaataatttacaatttcattttaatacctctacaaaataacttc

SEQ ID NO: 9150 - DNA, 50 bp, synthetic construct
  source 1..50: mol_type = other DNA
ttacaatttcattttaatacctctacaaaataacttcrctaaaatcacac

SEQ ID NO: 9151 - DNA, 50 bp, synthetic construct
  source 1..50: mol_type = other DNA
ttaaaaaatttccaatatatttttctaaacatactactcataataacacc

SEQ ID NO: 9152 - DNA, 50 bp, synthetic construct
  source 1..50: mol_type = other DNA
aaaaaactaaataatctcctcaaaacatcraattatacccttcacaaaac

SEQ ID NO: 9153 - DNA, 50 bp, synthetic construct
  source 1..50: mol_type = other DNA
actcaacacatcaaccacraaaaacatattaaactaaaccatcatcaacc

SEQ ID NO: 9154 - DNA, 50 bp, synthetic construct
  source 1..50: mol_type = other DNA
atctaatataactttttacrcaattcattttaactcaacacatcaaccac

SEQ ID NO: 9155 - DNA, 50 bp, synthetic construct
  source 1..50: mol_type = other DNA
aaatatttccaatataccccratccttaaatatctaatataactttttac

SEQ ID NO: 9156 - DNA, 50 bp, synthetic construct
  source 1..50: mol_type = other DNA
ataaattaactaatttcraaattatatcttaaatatttccaatatacccc

SEQ ID NO: 9157 - DNA, 50 bp, synthetic construct
  source 1..50: mol_type = other DNA
caattctccactcaatacaaaatacattaactcataaattaactaatttc

SEQ ID NO: 9158 - DNA, 50 bp, synthetic construct
  source 1..50: mol_type = other DNA
ctaaaaaaacaacataaaaattccatcccctctatactaaacaaaccaac

SEQ ID NO: 9159 - DNA, 50 bp, synthetic construct
  source 1..50: mol_type = other DNA
aaaaaaacaacataaaaattccatcccctctatactaaacaaaccaacrc

SEQ ID NO: 9160 - DNA, 50 bp, synthetic construct
  source 1..50: mol_type = other DNA
aaatacraatactaaaacccccaaaaatacctaactacccactactaccc

SEQ ID NO: 9161 - DNA, 50 bp, synthetic construct
  source 1..50: mol_type = other DNA
actatactaaaaacttttcaaaaatcacctcaaaacaaatcaataaaaac

SEQ ID NO: 9162 - DNA, 50 bp, synthetic construct
  source 1..50: mol_type = other DNA
aactataactccaaaatcaaaatcctaaacttaaaaataatctctaccac

SEQ ID NO: 9163 - DNA, 50 bp, synthetic construct
  source 1..50: mol_type = other DNA
aaacaaataaaatatcatttctacatccctaatctctctctcttattaac

SEQ ID NO: 9164 - DNA, 50 bp, synthetic construct
  source 1..50: mol_type = other DNA
aaatataatttttaaaacacattaaaactaataaaaacttcaaaaccacc

SEQ ID NO: 9165 - DNA, 50 bp, synthetic construct
  source 1..50: mol_type = other DNA
cttactctttaaaccactaaatatcaatataattactctataaaacaacc

SEQ ID NO: 9166 - DNA, 50 bp, synthetic construct
  source 1..50: mol_type = other DNA
aacttcaaattccccccaacttctactaaaatccaaaaacttaaaaactc

SEQ ID NO: 9167 - DNA, 50 bp, synthetic construct
  source 1..50: mol_type = other DNA
caaaaacrttataatacacttaaaacaccccrtaaaaaaattaaccatcc

SEQ ID NO: 9168 - DNA, 50 bp, synthetic construct
  source 1..50: mol_type = other DNA
taaaaacratcctaaatatcaaaaacrttataatacacttaaaacacccc

SEQ ID NO: 9169 - DNA, 50 bp, synthetic construct
  source 1..50: mol_type = other DNA
ttaaaacraataatcaacttttccacraaataccttaaatacaccataac

SEQ ID NO: 9170 - DNA, 50 bp, synthetic construct
  source 1..50: mol_type = other DNA
ataacaccaaaaattccaacaaaaacacataaaaaaccttatccaattac

SEQ ID NO: 9171 - DNA, 50 bp, synthetic construct
  source 1..50: mol_type = other DNA
aaaacacataaaaaaccttatccaattacraaaaaacaaataacaaacac

SEQ ID NO: 9172 - DNA, 50 bp, synthetic construct
  source 1..50: mol_type = other DNA
cataaaaaaccttatccaattacraaaaaacaaataacaaacacrttccc

SEQ ID NO: 9173 - DNA, 50 bp, synthetic construct
  source 1..50: mol_type = other DNA
attttaatatctcctattcatctcttttactattttccaacaaaacatac

SEQ ID NO: 9174 - DNA, 50 bp, synthetic construct
  source 1..50: mol_type = other DNA
actcacttctaactatcrcatctactctacatataaaactcaaaaactac

SEQ ID NO: 9175 - DNA, 50 bp, synthetic construct
  source 1..50: mol_type = other DNA
ctatccttacccacataactaaacaaattaccataattactccccttccc

SEQ ID NO: 9176 - DNA, 50 bp, synthetic construct
  source 1..50: mol_type = other DNA
cacacactcraaaaaatttttatttctaacctaatcattcaatttaatcc

SEQ ID NO: 9177 - DNA, 50 bp, synthetic construct
  source 1..50: mol_type = other DNA
crtttacttatactcatactaaaacaaacaaaaaattactctctattttc

SEQ ID NO: 9178 - DNA, 50 bp, synthetic construct
  source 1..50: mol_type = other DNA
craaaacaaaaaataactccctatctattctaacataaacacaaacaaac

SEQ ID NO: 9179 - DNA, 50 bp, synthetic construct
  source 1..50: mol_type = other DNA
atataaaaataatattctctctaaaatcratataaacaaaacatattcac

SEQ ID NO: 9180 - DNA, 50 bp, synthetic construct
  source 1..50: mol_type = other DNA
cttctacatcccaacatcccttaaaataaatatttaaacttattattccc

SEQ ID NO: 9181 - DNA, 50 bp, synthetic construct
  source 1..50: mol_type = other DNA
atttacttaactctaaatatcttaaatatactccataaacaactttactc

SEQ ID NO: 9182 - DNA, 50 bp, synthetic construct
  source 1..50: mol_type = other DNA
aatcatccaattaatatcaaataaatcacacaaaatattacctatatatc

SEQ ID NO: 9183 - DNA, 50 bp, synthetic construct
  source 1..50: mol_type = other DNA
catataaaaaacaacactaaaaataacaacaaaacttaacatccacattc

SEQ ID NO: 9184 - DNA, 50 bp, synthetic construct
  source 1..50: mol_type = other DNA
tctactaaccaactaacaactcttccactactaatactctaccaatatac

SEQ ID NO: 9185 - DNA, 50 bp, synthetic construct
  source 1..50: mol_type = other DNA
aataaataaattctaacctacaacattatactatctatatataaactacc

SEQ ID NO: 9186 - DNA, 50 bp, synthetic construct
  source 1..50: mol_type = other DNA
taacttccccttatactctttcttaaatcaaaccaataatataaccctac

SEQ ID NO: 9187 - DNA, 50 bp, synthetic construct
  source 1..50: mol_type = other DNA
actacacccacctaacttttatcaatcaaattatcaacttaacaaacacc

SEQ ID NO: 9188 - DNA, 50 bp, synthetic construct
  source 1..50: mol_type = other DNA
actccaaaacttatacttaatccaaataccctaaacaatacaaaattaac

SEQ ID NO: 9189 - DNA, 50 bp, synthetic construct
  source 1..50: mol_type = other DNA
ataactaacactaattaattacttccttaataccaactctttctaaaatc

SEQ ID NO: 9190 - DNA, 50 bp, synthetic construct
  source 1..50: mol_type = other DNA
ctcaaacttaatttctctttaaccaaaccccatattcccttattccttcc

SEQ ID NO: 9191 - DNA, 50 bp, synthetic construct
  source 1..50: mol_type = other DNA
ccataatactataaaccatcaataaaaataactcaacactaactcaaaac

SEQ ID NO: 9192 - DNA, 50 bp, synthetic construct
  source 1..50: mol_type = other DNA
tcataataccataaatctcaaactattaaattacaattttccatatcccc

SEQ ID NO: 9193 - DNA, 50 bp, synthetic construct
  source 1..50: mol_type = other DNA
tataaatcacttaccctaaatctaaaacttaatttaaaccaaaaatacac

SEQ ID NO: 9194 - DNA, 50 bp, synthetic construct
  source 1..50: mol_type = other DNA
attttaaatctcccttcaaactcatttcatacaaatatacttaaacttac

SEQ ID NO: 9195 - DNA, 50 bp, synthetic construct
  source 1..50: mol_type = other DNA
aaattccccattcattactaaaaatttcttatctatatttctttataccc

SEQ ID NO: 9196 - DNA, 50 bp, synthetic construct
  source 1..50: mol_type = other DNA
atttctcaataaattcaaaaccaactataaaaacctttaatacaatttac

SEQ ID NO: 9197 - DNA, 50 bp, synthetic construct
  source 1..50: mol_type = other DNA
ataacatattcaaacctaccacattttttcctcctaataattattccaac

SEQ ID NO: 9198 - DNA, 50 bp, synthetic construct
  source 1..50: mol_type = other DNA
ccaaaaaatcacacataaaacttattcaatataatttccaaaaacctaac

SEQ ID NO: 9199 - DNA, 50 bp, synthetic construct
  source 1..50: mol_type = other DNA
aaaaatcacacataaaacttattcaatataatttccaaaaacctaacrcc

SEQ ID NO: 9200 - DNA, 50 bp, synthetic construct
  source 1..50: mol_type = other DNA
acataaaacttattcaatataatttccaaaaacctaacrccrtaacttac

SEQ ID NO: 9201 - DNA, 50 bp, synthetic construct
  source 1..50: mol_type = other DNA
tttttttataacracaatatctccctatattacccaaactaatctccaac

SEQ ID NO: 9202 - DNA, 50 bp, synthetic construct
  source 1..50: mol_type = other DNA
ttataatacctaattcataaatttaacttcatcacaaatacacatatacc

SEQ ID NO: 9203 - DNA, 50 bp, synthetic construct
  source 1..50: mol_type = other DNA
cctacacaactcctacaaacaacccttaacaatatcacaactatttcctc

SEQ ID NO: 9204 - DNA, 50 bp, synthetic construct
  source 1..50: mol_type = other DNA
cttcttaaacctaactactaccactcctttaataaccaaatacraaaaac

SEQ ID NO: 9205 - DNA, 50 bp, synthetic construct
  source 1..50: mol_type = other DNA
caaactactaacaacactaataatacccaaaaataaaacaaacrcttttc

SEQ ID NO: 9206 - DNA, 50 bp, synthetic construct
  source 1..50: mol_type = other DNA
actaaattcaaaaaataaacttttaaccctatctaaaacaactaactctc

SEQ ID NO: 9207 - DNA, 50 bp, synthetic construct
  source 1..50: mol_type = other DNA
aaaaattatacactcraaaaactcraattttaaaacaataacttacccac

SEQ ID NO: 9208 - DNA, 50 bp, synthetic construct
  source 1..50: mol_type = other DNA
aaaacccttctttctacaactcaatatctaaaaaattttatctacaactc

SEQ ID NO: 9209 - DNA, 50 bp, synthetic construct
  source 1..50: mol_type = other DNA
acatttcttaattccctaaccaaaaaacraaataactaataaacataaac

SEQ ID NO: 9210 - DNA, 50 bp, synthetic construct
  source 1..50: mol_type = other DNA
cctaaccaaaaaacraaataactaataaacataaacracaaaactaaccc

SEQ ID NO: 9211 - DNA, 50 bp, synthetic construct
  source 1..50: mol_type = other DNA
aaactaactaaaatcccctacaaaaacrctccacaaaacaaacctaaacc

SEQ ID NO: 9212 - DNA, 50 bp, synthetic construct
  source 1..50: mol_type = other DNA
acctatcctataaaacrtccctacaaaaaactccaatcaacctaaataac

SEQ ID NO: 9213 - DNA, 50 bp, synthetic construct
  source 1..50: mol_type = other DNA
aaataaaatacaaaaacaatacaaacttcctacraacctcrataacccac

SEQ ID NO: 9214 - DNA, 50 bp, synthetic construct
  source 1..50: mol_type = other DNA
rtaatacactaaataaaatacaaaaacaatacaaacttcctacraacctc

SEQ ID NO: 9215 - DNA, 50 bp, synthetic construct
  source 1..50: mol_type = other DNA
cccctacrtaatacactaaataaaatacaaaaacaatacaaacttcctac

SEQ ID NO: 9216 - DNA, 50 bp, synthetic construct
  source 1..50: mol_type = other DNA
aacatttaaaatacttccttatactaaaaactacaaacacatttaaacac

SEQ ID NO: 9217 - DNA, 50 bp, synthetic construct
  source 1..50: mol_type = other DNA
acaaaatttaaataaatccatatccattttttcaaaaaaacaccaaatcc

SEQ ID NO: 9218 - DNA, 50 bp, synthetic construct
  source 1..50: mol_type = other DNA
tcaaaaacccaaaaataaacctaaaactttttttcctaaccrttcaaatc

SEQ ID NO: 9219 - DNA, 50 bp, synthetic construct
  source 1..50: mol_type = other DNA
atcataaattcaaaaacccaaaaataaacctaaaactttttttcctaacc

SEQ ID NO: 9220 - DNA, 50 bp, synthetic construct
  source 1..50: mol_type = other DNA
raaaatttcccrtaatatactaacrtattacaataaaaacacaataaacc

SEQ ID NO: 9221 - DNA, 50 bp, synthetic construct
  source 1..50: mol_type = other DNA
tcraaatacttctaaaacctacctcccaaaaaacaaactaaaaaactaac

SEQ ID NO: 9222 - DNA, 50 bp, synthetic construct
  source 1..50: mol_type = other DNA
actaaactaaaaaacatatcratacacaactaaaaatcaacrattatacc

SEQ ID NO: 9223 - DNA, 50 bp, synthetic construct
  source 1..50: mol_type = other DNA
actcataaactctaataattaaacaactaactcactaaaataccaacaac

SEQ ID NO: 9224 - DNA, 50 bp, synthetic construct
  source 1..50: mol_type = other DNA
aaaaaaaccrtttacaaaatcatataaaatataacccctccaaaaaaccc

SEQ ID NO: 9225 - DNA, 50 bp, synthetic construct
  source 1..50: mol_type = other DNA
aataataccraaccctctaaaaaaaccatactctacataaccttacaaac

SEQ ID NO: 9226 - DNA, 50 bp, synthetic construct
  source 1..50: mol_type = other DNA
caaacctaaatcaaaataaaaaaacttattccaaccaactctaaactttc

SEQ ID NO: 9227 - DNA, 50 bp, synthetic construct
  source 1..50: mol_type = other DNA
aatcaaaataaaaaaacttattccaaccaactctaaactttcrccttcac

SEQ ID NO: 9228 - DNA, 50 bp, synthetic construct
  source 1..50: mol_type = other DNA
taacattccatatttctactcctataacctccacratacaacaaactaac

SEQ ID NO: 9229 - DNA, 50 bp, synthetic construct
  source 1..50: mol_type = other DNA
aacttattacaccrtaaaaaccacaaaaacaaaaacataaaataccaaac

SEQ ID NO: 9230 - DNA, 50 bp, synthetic construct
  source 1..50: mol_type = other DNA
aactacatactactatctaaaacttatctcaataaatctaaaacttcatc

SEQ ID NO: 9231 - DNA, 50 bp, synthetic construct
  source 1..50: mol_type = other DNA
actatctaaaacttatctcaataaatctaaaacttcatcrccctctaatc

SEQ ID NO: 9232 - DNA, 50 bp, synthetic construct
  source 1..50: mol_type = other DNA
ctcacataccaaattcctaaacaaaatcactaaaaaaactaaaatcaacc

SEQ ID NO: 9233 - DNA, 50 bp, synthetic construct
  source 1..50: mol_type = other DNA
ataatatatatttaactcaactctatcctcatactacccacaaaaaacac

SEQ ID NO: 9234 - DNA, 50 bp, synthetic construct
  source 1..50: mol_type = other DNA
aaacaaacttaaatttcraaaacrtcrataaataattccaaataaaaccc

SEQ ID NO: 9235 - DNA, 50 bp, synthetic construct
  source 1..50: mol_type = other DNA
cctcttcctctatttctcaacttcttttttcccatcrttctataactcac

SEQ ID NO: 9236 - DNA, 50 bp, synthetic construct
  source 1..50: mol_type = other DNA
atttctcaacttcttttttcccatcrttctataactcacraatatcaacc

SEQ ID NO: 9237 - DNA, 50 bp, synthetic construct
  source 1..50: mol_type = other DNA
tctcattataaacattttcttctcatccccatacacttaaaattaaacac

SEQ ID NO: 9238 - DNA, 50 bp, synthetic construct
  source 1..50: mol_type = other DNA
atacctaccaaaaaactacccctcaaaaaacrcctttaaaaaaataaatc

SEQ ID NO: 9239 - DNA, 50 bp, synthetic construct
  source 1..50: mol_type = other DNA
tcatttttacctataaaaaatacctaccaaaaaactacccctcaaaaaac

SEQ ID NO: 9240 - DNA, 50 bp, synthetic construct
  source 1..50: mol_type = other DNA
attaccttatttaaaattaatcccaaatttatcttttaattaacctacac

SEQ ID NO: 9241 - DNA, 50 bp, synthetic construct
  source 1..50: mol_type = other DNA
cctcaaataatcctccaacctcaaccttctaaaatattaaaattacaaac

SEQ ID NO: 9242 - DNA, 50 bp, synthetic construct
  source 1..50: mol_type = other DNA
tcctccaacctcaaccttctaaaatattaaaattacaaacrtaaatcacc

SEQ ID NO: 9243 - DNA, 50 bp, synthetic construct
  source 1..50: mol_type = other DNA
ataataaatcacaaacaaattaatatttatattcrattaccatccttaac

SEQ ID NO: 9244 - DNA, 50 bp, synthetic construct
  source 1..50: mol_type = other DNA
cttacttataatttactacaattatttctctatttcactaccaattattc

SEQ ID NO: 9245 - DNA, 50 bp, synthetic construct
  source 1..50: mol_type = other DNA
ctaaaatccaaccaacaaaaaaataccccaccttctttttaccaaaaatc

SEQ ID NO: 9246 - DNA, 50 bp, synthetic construct
  source 1..50: mol_type = other DNA
caaccaacaaaaaaataccccaccttctttttaccaaaaatcrtaaaaac

SEQ ID NO: 9247 - DNA, 50 bp, synthetic construct
  source 1..50: mol_type = other DNA
accccaccttctttttaccaaaaatcrtaaaaacratttaattccaatac

SEQ ID NO: 9248 - DNA, 50 bp, synthetic construct
  source 1..50: mol_type = other DNA
ctaaatttaaaaaaacactttcataacttataaaacactaaaaaactacc

SEQ ID NO: 9249 - DNA, 50 bp, synthetic construct
  source 1..50: mol_type = other DNA
cratcataactccctaaaactttaaactcctaaactcaaaaaatccttcc

SEQ ID NO: 9250 - DNA, 50 bp, synthetic construct
  source 1..50: mol_type = other DNA
aatcacactacatataaaaaccccttaaactcaaactcaccaaaaaaatc

SEQ ID NO: 9251 - DNA, 50 bp, synthetic construct
  source 1..50: mol_type = other DNA
aacttaaaactaaataaaacccaaatactttaccctctactactaacttc

SEQ ID NO: 9252 - DNA, 50 bp, synthetic construct
  source 1..50: mol_type = other DNA
tccttaaaaaacraaaaccractcatatttacctattaaaaccrtaaaac

SEQ ID NO: 9253 - DNA, 50 bp, synthetic construct
  source 1..50: mol_type = other DNA
aaaactccaaacaacaataacraaactaaacaactccatccttaaaaaac

SEQ ID NO: 9254 - DNA, 50 bp, synthetic construct
  source 1..50: mol_type = other DNA
acaataatataacrttaaaacttaaattaccttaaatacaccctcacaac

SEQ ID NO: 9255 - DNA, 50 bp, synthetic construct
  source 1..50: mol_type = other DNA
ccccacraacaacrctataaaaatatactcaaaacaatccaaatttcaac

SEQ ID NO: 9256 - DNA, 50 bp, synthetic construct
  source 1..50: mol_type = other DNA
tcaacrtcataccattatctttaacaaaaccctacaaacatataataacc

SEQ ID NO: 9257 - DNA, 50 bp, synthetic construct
  source 1..50: mol_type = other DNA
atatatataccctatatactattataaaacrtatataaacaaacactcac

SEQ ID NO: 9258 - DNA, 50 bp, synthetic construct
  source 1..50: mol_type = other DNA
ttcttaaaaactcttctttataaaaaaaccttatatataccaaaaacatc

SEQ ID NO: 9259 - DNA, 50 bp, synthetic construct
  source 1..50: mol_type = other DNA
aaaaaacccaaatccctataaaaataaaaactaattactaaataaacctc

SEQ ID NO: 9260 - DNA, 50 bp, synthetic construct
  source 1..50: mol_type = other DNA
caaaccaaaactttctcaaaacaatataaataaatactataactacatcc

SEQ ID NO: 9261 - DNA, 50 bp, synthetic construct
  source 1..50: mol_type = other DNA
actaacacatacaaaaaaccctccataaaactatactttccaaaaactac

SEQ ID NO: 9262 - DNA, 50 bp, synthetic construct
  source 1..50: mol_type = other DNA
acccacccaaatttctatacacaaacccaaaccataaaaaaaacataaac

SEQ ID NO: 9263 - DNA, 50 bp, synthetic construct
  source 1..50: mol_type = other DNA
cacccaaatttctatacacaaacccaaaccataaaaaaaacataaacrcc

SEQ ID NO: 9264 - DNA, 50 bp, synthetic construct
  source 1..50: mol_type = other DNA
aattatctctaaacraaaacctcrcctcacctaaaccatctttataattc

SEQ ID NO: 9265 - DNA, 50 bp, synthetic construct
  source 1..50: mol_type = other DNA
aataactacaaaaaccrcctaacaaaaaacrcttcraacttaaattccac

SEQ ID NO: 9266 - DNA, 50 bp, synthetic construct
  source 1..50: mol_type = other DNA
ctaaaaccaccraaaaactaaataacaaactctttaccctttataacccc

SEQ ID NO: 9267 - DNA, 50 bp, synthetic construct
  source 1..50: mol_type = other DNA
tcccatcrctaactttattctaaaaacctaaaataacaaaaaacacatcc

SEQ ID NO: 9268 - DNA, 50 bp, synthetic construct
  source 1..50: mol_type = other DNA
tcaatatacaataaaacaaaaaacccaccttctccctaaccaatcccatc

SEQ ID NO: 9269 - DNA, 50 bp, synthetic construct
  source 1..50: mol_type = other DNA
aaaaaaataaaccctctatcccactacacactaacaaaactcctctaaac

SEQ ID NO: 9270 - DNA, 50 bp, synthetic construct
  source 1..50: mol_type = other DNA
atccracaacttaaacaacaacttaataaaacraaaaatctccaaaaacc

SEQ ID NO: 9271 - DNA, 50 bp, synthetic construct
  source 1..50: mol_type = other DNA
taaacctatcctattccaactacaaataaccttacctaaaaataaatatc

SEQ ID NO: 9272 - DNA, 50 bp, synthetic construct
  source 1..50: mol_type = other DNA
taaacaaatctaactaccaacraaaactaacacacccaaaaactctcaac

SEQ ID NO: 9273 - DNA, 50 bp, synthetic construct
  source 1..50: mol_type = other DNA
attatttttaaacctcttaaaaccttaaataaacaaatctaactaccaac

SEQ ID NO: 9274 - DNA, 50 bp, synthetic construct
  source 1..50: mol_type = other DNA
caaaaacttatctataaaaatcaatcctactaactaaccaacactttaac

SEQ ID NO: 9275 - DNA, 50 bp, synthetic construct
  source 1..50: mol_type = other DNA
aaaactatctaaaacaaccatttacttaataaaaatcccttaaaattaac

SEQ ID NO: 9276 - DNA, 50 bp, synthetic construct
  source 1..50: mol_type = other DNA
ataaacractacctacactttaactaaaaaaaatccttctaaataactcc

SEQ ID NO: 9277 - DNA, 50 bp, synthetic construct
  source 1..50: mol_type = other DNA
aaaaataacactacacatcataaaacaaaaatacaactaacaacaaaccc

SEQ ID NO: 9278 - DNA, 50 bp, synthetic construct
  source 1..50: mol_type = other DNA
tcataatatacaatatcatctccttacaacrtaaaccctcrctacaacac

SEQ ID NO: 9279 - DNA, 50 bp, synthetic construct
  source 1..50: mol_type = other DNA
aacaaaccaaaaataaaaattccattatccttataaaacractcacaacc

SEQ ID NO: 9280 - DNA, 50 bp, synthetic construct
  source 1..50: mol_type = other DNA
ttcccataccacctaaaaaatttctatttccraaataactaaacacaaac

SEQ ID NO: 9281 - DNA, 50 bp, synthetic construct
  source 1..50: mol_type = other DNA
aactaaacacaaacraatcaatcaatcccaaacctttacccracaaaaac

SEQ ID NO: 9282 - DNA, 50 bp, synthetic construct
  source 1..50: mol_type = other DNA
acaaatctaacraacctctatctatcraataatttaaaaaaaccccracc

SEQ ID NO: 9283 - DNA, 50 bp, synthetic construct
  source 1..50: mol_type = other DNA
aaaaacaaatctaacraacctctatctatcraataatttaaaaaaacccc

SEQ ID NO: 9284 - DNA, 50 bp, synthetic construct
  source 1..50: mol_type = other DNA
acataccttcccacataacaaaaaacaaatctaacraacctctatctatc

SEQ ID NO: 9285 - DNA, 50 bp, synthetic construct
  source 1..50: mol_type = other DNA
ttaacttataaaacaacataccttcccacataacaaaaaacaaatctaac

SEQ ID NO: 9286 - DNA, 50 bp, synthetic construct
  source 1..50: mol_type = other DNA
taatctttaaattactattttatattaaacacatataattttaaccaaac

SEQ ID NO: 9287 - DNA, 50 bp, synthetic construct
  source 1..50: mol_type = other DNA
cccactcccaaacaattcttattcccaaaattttctataaaaaacraaac

SEQ ID NO: 9288 - DNA, 50 bp, synthetic construct
  source 1..50: mol_type = other DNA
cccatcccactcccaaacaattcttattcccaaaattttctataaaaaac

SEQ ID NO: 9289 - DNA, 50 bp, synthetic construct
  source 1..50: mol_type = other DNA
aaaaacaaccttaactccttactcctcatttttataccttcaatcaccac

SEQ ID NO: 9290 - DNA, 50 bp, synthetic construct
  source 1..50: mol_type = other DNA
cctaaaaaacttcactaaccraccaccccttctcttctataaattttaac

SEQ ID NO: 9291 - DNA, 50 bp, synthetic construct
  source 1..50: mol_type = other DNA
taacaatcttaaaataaaaactaataaatccctaaaaaacttcactaacc

SEQ ID NO: 9292 - DNA, 50 bp, synthetic construct
  source 1..50: mol_type = other DNA
acccaccaacccttatcctaaaattatcacttcctaaaaaattacataac

SEQ ID NO: 9293 - DNA, 50 bp, synthetic construct
  source 1..50: mol_type = other DNA
actaaattattaactacctattactttccacttaaaaaaactatacctcc

SEQ ID NO: 9294 - DNA, 50 bp, synthetic construct
  source 1..50: mol_type = other DNA
taacatcatacttcraacttaaaaaaaacaaacttctaaaaaactccccc

SEQ ID NO: 9295 - DNA, 50 bp, synthetic construct
  source 1..50: mol_type = other DNA
aatctccctaattcttaatatactcacacttataatataaatttaactac

SEQ ID NO: 9296 - DNA, 50 bp, synthetic construct
  source 1..50: mol_type = other DNA
aaaaacctctccctatacctaccatttaaaactaatattaaaaacccctc

SEQ ID NO: 9297 - DNA, 50 bp, synthetic construct
  source 1..50: mol_type = other DNA
taacaataccccracttattcctttttcaaaaacaaataataatctatac

SEQ ID NO: 9298 - DNA, 50 bp, synthetic construct
  source 1..50: mol_type = other DNA
rctaaactaaaaaacrttatcctcratacrctctacaatcataacatatc

SEQ ID NO: 9299 - DNA, 50 bp, synthetic construct
  source 1..50: mol_type = other DNA
ttactttacttataacraatctcatcaacracatatcataattacaaaac

SEQ ID NO: 9300 - DNA, 50 bp, synthetic construct
  source 1..50: mol_type = other DNA
ttacttataacraatctcatcaacracatatcataattacaaaacrcatc

SEQ ID NO: 9301 - DNA, 50 bp, synthetic construct
  source 1..50: mol_type = other DNA
cttaaaattactatttatcctccaaacactttacaataaaaaactaaccc

SEQ ID NO: 9302 - DNA, 50 bp, synthetic construct
  source 1..50: mol_type = other DNA
atatcaccatctttatacttttctttcttacactaaaatattcrtatatc

SEQ ID NO: 9303 - DNA, 50 bp, synthetic construct
  source 1..50: mol_type = other DNA
rcacaaaatatcaccatctttatacttttctttcttacactaaaatattc

SEQ ID NO: 9304 - DNA, 50 bp, synthetic construct
  source 1..50: mol_type = other DNA
atataatccctacccacataaaacttacacrctaacaaacaacaactaac

SEQ ID NO: 9305 - DNA, 50 bp, synthetic construct
  source 1..50: mol_type = other DNA
ctattaacrtataaaccccatataaacaaaaaccacatacattactctac

SEQ ID NO: 9306 - DNA, 50 bp, synthetic construct
  source 1..50: mol_type = other DNA
ataaactaaccratatttaacrctatcctttttatttctatctcrataac

SEQ ID NO: 9307 - DNA, 50 bp, synthetic construct
  source 1..50: mol_type = other DNA
aacaaatcaattcacaataccttctcccctacatcaaaaacraccaaatc

SEQ ID NO: 9308 - DNA, 50 bp, synthetic construct
  source 1..50: mol_type = other DNA
rtaacaaaccaaaacctaaaactattttattatacacaataaccrctacc

SEQ ID NO: 9309 - DNA, 50 bp, synthetic construct
  source 1..50: mol_type = other DNA
taaatcaattaaaaacaattcaaaaaaacacctttaccccactaactacc

SEQ ID NO: 9310 - DNA, 50 bp, synthetic construct
  source 1..50: mol_type = other DNA
taaaaaatatttcaattactttaacrccatctaattacaaaaaaaccccc

SEQ ID NO: 9311 - DNA, 50 bp, synthetic construct
  source 1..50: mol_type = other DNA
actatatctaacaactctaacacccraaaacccttttacaaccaaataac

SEQ ID NO: 9312 - DNA, 50 bp, synthetic construct
  source 1..50: mol_type = other DNA
aatcctattttaccacactaaaaaacaaaacatacctataatcacaacac

SEQ ID NO: 9313 - DNA, 50 bp, synthetic construct
  source 1..50: mol_type = other DNA
tctcaaaactaacacaacaattattataaaactaaaaacctcccttaatc

SEQ ID NO: 9314 - DNA, 50 bp, synthetic construct
  source 1..50: mol_type = other DNA
cctctataaaaaaactctcctaccattactaactaaacaacctatctatc

SEQ ID NO: 9315 - DNA, 50 bp, synthetic construct
  source 1..50: mol_type = other DNA
aaacaacctatctatcrataaaaacaataaatacataaaactaaaaactc

SEQ ID NO: 9316 - DNA, 50 bp, synthetic construct
  source 1..50: mol_type = other DNA
cttatttaaatctctattactaatataaaatcactttcaacttataaccc

SEQ ID NO: 9317 - DNA, 50 bp, synthetic construct
  source 1..50: mol_type = other DNA
ctatttcacttaacaaaataaaaacaaaaaatcttttctccaaaacattc

SEQ ID NO: 9318 - DNA, 50 bp, synthetic construct
  source 1..50: mol_type = other DNA
caacatttcctaacttatttataactcaaatatctactatatctataatc

SEQ ID NO: 9319 - DNA, 50 bp, synthetic construct
  source 1..50: mol_type = other DNA
atatttaataaccccctaatatcaaaaaataattaactaccaaaaaatac

SEQ ID NO: 9320 - DNA, 50 bp, synthetic construct
  source 1..50: mol_type = other DNA
tacaaaatcaaaaaaaacracttctatctactcacataaaacaattaaac

SEQ ID NO: 9321 - DNA, 50 bp, synthetic construct
  source 1..50: mol_type = other DNA
cattttaaataaaaaatactcaacctatatataaaatatttctccttccc

SEQ ID NO: 9322 - DNA, 50 bp, synthetic construct
  source 1..50: mol_type = other DNA
aactataataacatatattttataacacatcttaaaacaaacctaaaaac

SEQ ID NO: 9323 - DNA, 50 bp, synthetic construct
  source 1..50: mol_type = other DNA
tttaaatactaccaactttttaaaactataacccacaataaaaaatacac

SEQ ID NO: 9324 - DNA, 50 bp, synthetic construct
  source 1..50: mol_type = other DNA
aatttaaaaaataaaaccrtcccaaccaataaacttaaataatatacccc

SEQ ID NO: 9325 - DNA, 50 bp, synthetic construct
  source 1..50: mol_type = other DNA
aaatacctaaaacaaataaatcatctaataacttacataaaactactttc

SEQ ID NO: 9326 - DNA, 50 bp, synthetic construct
  source 1..50: mol_type = other DNA
acttacataaaactactttcrtatcatctaattattaaaatatttaccac

SEQ ID NO: 9327 - DNA, 50 bp, synthetic construct
  source 1..50: mol_type = other DNA
tcttaactttacaacatcattcatattaaaaccacttaatattaatttcc

SEQ ID NO: 9328 - DNA, 50 bp, synthetic construct
  source 1..50: mol_type = other DNA
taaattatcttcttcaaaaaactcttaaaaaaccraatacrataactcac

SEQ ID NO: 9329 - DNA, 50 bp, synthetic construct
  source 1..50: mol_type = other DNA
aacccaaaaactaaccataaacaaaatctctacaacactataacatattc

SEQ ID NO: 9330 - DNA, 50 bp, synthetic construct
  source 1..50: mol_type = other DNA
acaaaatctctacaacactataacatattcrtaataaccataacrctcac

SEQ ID NO: 9331 - DNA, 50 bp, synthetic construct
  source 1..50: mol_type = other DNA
aaaaataccttaaacrattttctaccctaaataaaccaaatattccttac

SEQ ID NO: 9332 - DNA, 50 bp, synthetic construct
  source 1..50: mol_type = other DNA
ccaaatcttaaaacaaaaaactaattcaacatccaaactcaataactcac

SEQ ID NO: 9333 - DNA, 50 bp, synthetic construct
  source 1..50: mol_type = other DNA
aaacctcacacaaaacttcctattctataaaccacaccatacctaataac

SEQ ID NO: 9334 - DNA, 50 bp, synthetic construct
  source 1..50: mol_type = other DNA
ctatattatctaaattctaaaatactactaaatttaacctctaattttcc

SEQ ID NO: 9335 - DNA, 50 bp, synthetic construct
  source 1..50: mol_type = other DNA
caattaaccctctaaacctaaaattccraaactttcctaatataccaccc

SEQ ID NO: 9336 - DNA, 50 bp, synthetic construct
  source 1..50: mol_type = other DNA
tctacaaaccaaaaactaactaacctaaaaacaaaacaacacttacrccc

SEQ ID NO: 9337 - DNA, 50 bp, synthetic construct
  source 1..50: mol_type = other DNA
caaaccaaaaactaactaacctaaaaacaaaacaacacttacrcccracc

SEQ ID NO: 9338 - DNA, 50 bp, synthetic construct
  source 1..50: mol_type = other DNA
atactactccraatatactcraacttatattactaaaaatatattcttcc

SEQ ID NO: 9339 - DNA, 50 bp, synthetic construct
  source 1..50: mol_type = other DNA
actcraacttatattactaaaaatatattcttccraacccaacaaacctc

SEQ ID NO: 9340 - DNA, 50 bp, synthetic construct
  source 1..50: mol_type = other DNA
tatattactaaaaatatattcttccraacccaacaaacctcrctataacc

SEQ ID NO: 9341 - DNA, 50 bp, synthetic construct
  source 1..50: mol_type = other DNA
tttccaaaaacttaacaaaccacttattaaactatttataacttaaaatc

SEQ ID NO: 9342 - DNA, 50 bp, synthetic construct
  source 1..50: mol_type = other DNA
caaaatctatatccttcccactctaaataaaacttaaaccaaaaatatcc

SEQ ID NO: 9343 - DNA, 50 bp, synthetic construct
  source 1..50: mol_type = other DNA
ctcrttaacraattataaatatctccttctccctataatttatttaatcc

SEQ ID NO: 9344 - DNA, 50 bp, synthetic construct
  source 1..50: mol_type = other DNA
craaaatcaaccttacaaaaaaaacattcattttcactttacacaatcrc

SEQ ID NO: 9345 - DNA, 50 bp, synthetic construct
  source 1..50: mol_type = other DNA
cccraaaatcaaccttacaaaaaaaacattcattttcactttacacaatc

SEQ ID NO: 9346 - DNA, 50 bp, synthetic construct
  source 1..50: mol_type = other DNA
aaaaaatcttttaaaataaacccaattttccctaataaatactactacac

SEQ ID NO: 9347 - DNA, 50 bp, synthetic construct
  source 1..50: mol_type = other DNA
taattaaaaccatttaatctaaacttaactaacttcctcaaccaaatctc

SEQ ID NO: 9348 - DNA, 50 bp, synthetic construct
  source 1..50: mol_type = other DNA
caactaaaaaccacaaacatcaaactatattactacaacttaaactaaac

SEQ ID NO: 9349 - DNA, 50 bp, synthetic construct
  source 1..50: mol_type = other DNA
tataatttccaattactcccctactaaaacrctccaaatactccaccaac

SEQ ID NO: 9350 - DNA, 50 bp, synthetic construct
  source 1..50: mol_type = other DNA
accaacrcctaaaaactctaattaacactttccattccataattttaccc

SEQ ID NO: 9351 - DNA, 50 bp, synthetic construct
  source 1..50: mol_type = other DNA
ccccaaataacaccccttcataaatacctatatctcaactctacaaaacc

SEQ ID NO: 9352 - DNA, 50 bp, synthetic construct
  source 1..50: mol_type = other DNA
atccacctataaatacaaccacattcttctctactcttcaaaaataaatc

SEQ ID NO: 9353 - DNA, 50 bp, synthetic construct
  source 1..50: mol_type = other DNA
catttaatttctatttatccaaaataccttccaatttcaaaaaacrcccc

SEQ ID NO: 9354 - DNA, 50 bp, synthetic construct
  source 1..50: mol_type = other DNA
taatacatttaatttctatttatccaaaataccttccaatttcaaaaaac

SEQ ID NO: 9355 - DNA, 50 bp, synthetic construct
  source 1..50: mol_type = other DNA
tcaaatacattaaaatacaattataaaacaaacaatccttaaatacrcrc

SEQ ID NO: 9356 - DNA, 50 bp, synthetic construct
  source 1..50: mol_type = other DNA
accatacctcaaaaatttcccttaattatttattcaaactcctattcttc

SEQ ID NO: 9357 - DNA, 50 bp, synthetic construct
  source 1..50: mol_type = other DNA
ttatttataaataaacccaaccataaaaaacatacaataccttattctac

SEQ ID NO: 9358 - DNA, 50 bp, synthetic construct
  source 1..50: mol_type = other DNA
attccctacttacacaaaaataattttcaaaattttcaatttctaattcc

SEQ ID NO: 9359 - DNA, 50 bp, synthetic construct
  source 1..50: mol_type = other DNA
atccaaataaacataaaactcacatcactataaaaaaaaattatttcctc

SEQ ID NO: 9360 - DNA, 50 bp, synthetic construct
  source 1..50: mol_type = other DNA
aatttctataaatcaatcaactattcctttatcattctccratcctcccc

SEQ ID NO: 9361 - DNA, 50 bp, synthetic construct
  source 1..50: mol_type = other DNA
crccactaaaaatttctataaatcaatcaactattcctttatcattctcc

SEQ ID NO: 9362 - DNA, 50 bp, synthetic construct
  source 1..50: mol_type = other DNA
aaaacatactatccttttaccttatttccaatacttttataatttttacc

SEQ ID NO: 9363 - DNA, 50 bp, synthetic construct
  source 1..50: mol_type = other DNA
tttactttttttctttaaacrtttccaaaatttataaaaaattaacctcc

SEQ ID NO: 9364 - DNA, 50 bp, synthetic construct
  source 1..50: mol_type = other DNA
tctcatttaacatataaaccraaaattaacttctcataaactctaaaaac

SEQ ID NO: 9365 - DNA, 50 bp, synthetic construct
  source 1..50: mol_type = other DNA
ttttcaaataaaaccrcaacactaaaataacraattttaaaacacaatcc

SEQ ID NO: 9366 - DNA, 50 bp, synthetic construct
  source 1..50: mol_type = other DNA
caaaccaattaactatacttaaaacacctatctaattacatttaaaaatc

SEQ ID NO: 9367 - DNA, 50 bp, synthetic construct
  source 1..50: mol_type = other DNA
tttccatattttacatcatcttaatttaatatttctaatacttcaacaac

SEQ ID NO: 9368 - DNA, 50 bp, synthetic construct
  source 1..50: mol_type = other DNA
tacccattcttaataaccacatcaccacaaaaatataatatatatattcc

SEQ ID NO: 9369 - DNA, 50 bp, synthetic construct
  source 1..50: mol_type = other DNA
attcttaataaccacatcaccacaaaaatataatatatatattccrtatc

SEQ ID NO: 9370 - DNA, 50 bp, synthetic construct
  source 1..50: mol_type = other DNA
tataattcctaacaacataataatttatccattacactaaaaaacaaatc

SEQ ID NO: 9371 - DNA, 50 bp, synthetic construct
  source 1..50: mol_type = other DNA
aaccactaaaaataaccacaaaaaacaataatttctataacaaaatattc

SEQ ID NO: 9372 - DNA, 50 bp, synthetic construct
  source 1..50: mol_type = other DNA
actatcatttcaaaaccacaaaatatttataaaataaaaacctttcccac

SEQ ID NO: 9373 - DNA, 50 bp, synthetic construct
  source 1..50: mol_type = other DNA
acaacctcaacttctattaaaataaaaactaaactaaaaataaaaaccac

SEQ ID NO: 9374 - DNA, 50 bp, synthetic construct
  source 1..50: mol_type = other DNA
ccatctaaacataacattacacctttaaaaactactaaaaacacaaaaac

SEQ ID NO: 9375 - DNA, 50 bp, synthetic construct
  source 1..50: mol_type = other DNA
aaacaaactttcatcttcaatttacattctccaattcttaaaatcattcc

SEQ ID NO: 9376 - DNA, 50 bp, synthetic construct
  source 1..50: mol_type = other DNA
tttctttaattaacttcttaaaacactaaatccacttaaacttttaaaac

SEQ ID NO: 9377 - DNA, 50 bp, synthetic construct
  source 1..50: mol_type = other DNA
taaattctaaaaacctactatataacattatacctattattaataatatc

SEQ ID NO: 9378 - DNA, 50 bp, synthetic construct
  source 1..50: mol_type = other DNA
aataaaaaaacctttcrcttctttaccaaacactaaacacaaaactccac

SEQ ID NO: 9379 - DNA, 50 bp, synthetic construct
  source 1..50: mol_type = other DNA
ccaaactactcccaacrtaaaattttatactcaatatctaacaaaaaaac

SEQ ID NO: 9380 - DNA, 50 bp, synthetic construct
  source 1..50: mol_type = other DNA
tctatacaacctaccattcaactcccrttaaaaataccattcactaatac

SEQ ID NO: 9381 - DNA, 50 bp, synthetic construct
  source 1..50: mol_type = other DNA
ataaataatacccctaacraaaactaaataacaaactatacaaacracac

SEQ ID NO: 9382 - DNA, 50 bp, synthetic construct
  source 1..50: mol_type = other DNA
ttaccaaactcrttttaaaataacaattctttcctctccttaacaataac

SEQ ID NO: 9383 - DNA, 50 bp, synthetic construct
  source 1..50: mol_type = other DNA
ccacaactaccaaaataaccctttcaaaataaaatcaaatcaaataactc

SEQ ID NO: 9384 - DNA, 50 bp, synthetic construct
  source 1..50: mol_type = other DNA
actacaactatactaacttccttactattccacaaacctaccaaacaaac

SEQ ID NO: 9385 - DNA, 50 bp, synthetic construct
  source 1..50: mol_type = other DNA
aatcaaaaaaacacaaacattaaaacaccaaatactacaaatttattacc

SEQ ID NO: 9386 - DNA, 50 bp, synthetic construct
  source 1..50: mol_type = other DNA
caaattctttcttacrcaaaatccaaaaaccctctcttaaaatctaaatc

SEQ ID NO: 9387 - DNA, 50 bp, synthetic construct
  source 1..50: mol_type = other DNA
attacttactttcactttactccataaactcccctcaaattctttcttac

SEQ ID NO: 9388 - DNA, 50 bp, synthetic construct
  source 1..50: mol_type = other DNA
aaatcacaaaacctattcaaacttctccccaaaaccccaaaacaacatac

SEQ ID NO: 9389 - DNA, 50 bp, synthetic construct
  source 1..50: mol_type = other DNA
aaaaaacctatctaaacatacccacaacaaactaaaaaacccrcttatac

SEQ ID NO: 9390 - DNA, 50 bp, synthetic construct
  source 1..50: mol_type = other DNA
taccrtcttcctaaaacaataccctctatcracaaaaaacaattcaaatc

SEQ ID NO: 9391 - DNA, 50 bp, synthetic construct
  source 1..50: mol_type = other DNA
cttaaataataacccccttttaccraaaacccttacttaaataaacctcc

SEQ ID NO: 9392 - DNA, 50 bp, synthetic construct
  source 1..50: mol_type = other DNA
tctcacaaaccrcrccaaataactacaaaattatccttcaaaaatacaac

SEQ ID NO: 9393 - DNA, 50 bp, synthetic construct
  source 1..50: mol_type = other DNA
aacaaaataaaatactacccttattttccaaaaaactcaaaaactattcc

SEQ ID NO: 9394 - DNA, 50 bp, synthetic construct
  source 1..50: mol_type = other DNA
aaacataaatttttaacaaaccaacatccacttttactaacatataaccc

SEQ ID NO: 9395 - DNA, 50 bp, synthetic construct
  source 1..50: mol_type = other DNA
aaacratatttaaaatcctatcctatcccattcratctatataaacatac

SEQ ID NO: 9396 - DNA, 50 bp, synthetic construct
  source 1..50: mol_type = other DNA
caataatttcaataacaaaacratatttaaaatcctatcctatcccattc

SEQ ID NO: 9397 - DNA, 50 bp, synthetic construct
  source 1..50: mol_type = other DNA
ttccrcatactcacacaaaccraataaaacaaaacaaaaccttaaatatc

SEQ ID NO: 9398 - DNA, 50 bp, synthetic construct
  source 1..50: mol_type = other DNA
caaaaccttaaatatcrctctatcactaaaatcactaaccatcaattaac

SEQ ID NO: 9399 - DNA, 50 bp, synthetic construct
  source 1..50: mol_type = other DNA
aacraatttcatccactccctaaacactcaaaaccaattaaataccaccc

SEQ ID NO: 9400 - DNA, 50 bp, synthetic construct
  source 1..50: mol_type = other DNA
taccttaaaatattttactttcttaccactactataaaattccttctttc

SEQ ID NO: 9401 - DNA, 50 bp, synthetic construct
  source 1..50: mol_type = other DNA
ccactactataaaattccttctttcraaataaaatcacaccctaaataac

SEQ ID NO: 9402 - DNA, 50 bp, synthetic construct
  source 1..50: mol_type = other DNA
ttccttttccccatctcaacttaaacaaaaaactctacracctcaatacc

SEQ ID NO: 9403 - DNA, 50 bp, synthetic construct
  source 1..50: mol_type = other DNA
cattacctcctctaaaaacrataaccacttccctaaactctttaattccc

SEQ ID NO: 9404 - DNA, 50 bp, synthetic construct
  source 1..50: mol_type = other DNA
crataaaaaactactacaaatacrtctacacrtaaaactaacaacaaaac

SEQ ID NO: 9405 - DNA, 50 bp, synthetic construct
  source 1..50: mol_type = other DNA
tataaacraaacctaaaaccacaaacccaatcactaaactaaatcacccc

SEQ ID NO: 9406 - DNA, 50 bp, synthetic construct
  source 1..50: mol_type = other DNA
tcattacrttttcaacaataatataataaatcacttactaaatctatatc

SEQ ID NO: 9407 - DNA, 50 bp, synthetic construct
  source 1..50: mol_type = other DNA
aaaaaatataccaccttaataaattattttattcctattactttcattac

SEQ ID NO: 9408 - DNA, 50 bp, synthetic construct
  source 1..50: mol_type = other DNA
ttttatctaatccaataatttctcaaacatttcacaacaaaaaacttttc

SEQ ID NO: 9409 - DNA, 50 bp, synthetic construct
  source 1..50: mol_type = other DNA
taaacctcctttctcaaaataccataactttattaaaaaaaacactactc

SEQ ID NO: 9410 - DNA, 50 bp, synthetic construct
  source 1..50: mol_type = other DNA
ataacctaaactcccaaatcatctaaaacaaaacctcttaatcactcacc

SEQ ID NO: 9411 - DNA, 50 bp, synthetic construct
  source 1..50: mol_type = other DNA
ctaaactcccaaatcatctaaaacaaaacctcttaatcactcaccrctac

SEQ ID NO: 9412 - DNA, 50 bp, synthetic construct
  source 1..50: mol_type = other DNA
ctcaccrctacrctctaaaccrctaaaaaccaaaactaattactaaaaac

SEQ ID NO: 9413 - DNA, 50 bp, synthetic construct
  source 1..50: mol_type = other DNA
ataaaaattcacttataaatcctaattaactaaaccctaatcacraaacc

SEQ ID NO: 9414 - DNA, 50 bp, synthetic construct
  source 1..50: mol_type = other DNA
tattctactatatactaaacaccaaaaaacraatttaaacacaaaaaaac

SEQ ID NO: 9415 - DNA, 50 bp, synthetic construct
  source 1..50: mol_type = other DNA
aaaaaaactactataaaacrtcccctactacctattttcattaactccac

SEQ ID NO: 9416 - DNA, 50 bp, synthetic construct
  source 1..50: mol_type = other DNA
rctctacaataatcctctcaattattcaattaaaaatcccaattttaaac

SEQ ID NO: 9417 - DNA, 50 bp, synthetic construct
  source 1..50: mol_type = other DNA
aaaaaaacccacrtactcraatactatcctcctaaaattaaaaattacrc

SEQ ID NO: 9418 - DNA, 50 bp, synthetic construct
  source 1..50: mol_type = other DNA
taaaaaaaacccacrtactcraatactatcctcctaaaattaaaaattac

SEQ ID NO: 9419 - DNA, 50 bp, synthetic construct
  source 1..50: mol_type = other DNA
ttttaaaatacttactctaataatccacaatactttcrcrttcactaaac

SEQ ID NO: 9420 - DNA, 50 bp, synthetic construct
  source 1..50: mol_type = other DNA
aaatctaaaacrtaactataacataaaatatttctaaccraaatctcacc

SEQ ID NO: 9421 - DNA, 50 bp, synthetic construct
  source 1..50: mol_type = other DNA
ctataacataaaatatttctaaccraaatctcaccraataaactccaccc

SEQ ID NO: 9422 - DNA, 50 bp, synthetic construct
  source 1..50: mol_type = other DNA
acctacataaaaaaaattcaaaaatacttcttaaaaaaaaccrataaccc

SEQ ID NO: 9423 - DNA, 50 bp, synthetic construct
  source 1..50: mol_type = other DNA
aaaaataaattctaacaaccraaaatcacrttaaaaacccraaaatcttc

SEQ ID NO: 9424 - DNA, 50 bp, synthetic construct
  source 1..50: mol_type = other DNA
aacttccraatttccaacrtaacttccrattatcaaaatttacccctaac

SEQ ID NO: 9425 - DNA, 50 bp, synthetic construct
  source 1..50: mol_type = other DNA
raaaaactatatatacttaaatcrtaataaccccrataataataaactcc

SEQ ID NO: 9426 - DNA, 50 bp, synthetic construct
  source 1..50: mol_type = other DNA
aactatatatacttaaatcrtaataaccccrataataataaactccraac

SEQ ID NO: 9427 - DNA, 50 bp, synthetic construct
  source 1..50: mol_type = other DNA
ttaataacttaaactaccraaataatacccraaacraacaaaactttaac

SEQ ID NO: 9428 - DNA, 50 bp, synthetic construct
  source 1..50: mol_type = other DNA
tcttctcrccccaatacaaattacractaccraaaatatctaaaaaaatc

SEQ ID NO: 9429 - DNA, 50 bp, synthetic construct
  source 1..50: mol_type = other DNA
aaacccttccctattctctctcccaattacaataaattaaaccatatatc

SEQ ID NO: 9430 - DNA, 50 bp, synthetic construct
  source 1..50: mol_type = other DNA
ataaaaaactaaaccacacaaataaccttaattacaaaaactcctacctc

SEQ ID NO: 9431 - DNA, 50 bp, synthetic construct
  source 1..50: mol_type = other DNA
aaattcaaactctattcttctaccataatatatccttcttccctaacrac

SEQ ID NO: 9432 - DNA, 50 bp, synthetic construct
  source 1..50: mol_type = other DNA
ctaaaattcaaactctattcttctaccataatatatccttcttccctaac

SEQ ID NO: 9433 - DNA, 50 bp, synthetic construct
  source 1..50: mol_type = other DNA
taacttaaccccaccttaatttactaaactttttcatattctcactcttc

SEQ ID NO: 9434 - DNA, 50 bp, synthetic construct
  source 1..50: mol_type = other DNA
aataaaccaaataaatcatacacatctatacaataaaatataaaactccc

SEQ ID NO: 9435 - DNA, 50 bp, synthetic construct
  source 1..50: mol_type = other DNA
ctcattatacaaatatacataactcacttaacctacctcrcaattaattc

SEQ ID NO: 9436 - DNA, 50 bp, synthetic construct
  source 1..50: mol_type = other DNA
taaaaaccaaaaatacaacrtaaaatttcctatatacacctcaaatatac

SEQ ID NO: 9437 - DNA, 50 bp, synthetic construct
  source 1..50: mol_type = other DNA
acctaccaaaattttcaacattcacataaactaaaaaccaaaaatacaac

SEQ ID NO: 9438 - DNA, 50 bp, synthetic construct
  source 1..50: mol_type = other DNA
tatccccctaaaataaattctcaactattacccaaacatttcatcttaac

SEQ ID NO: 9439 - DNA, 50 bp, synthetic construct
  source 1..50: mol_type = other DNA
caaaaacatactaaattcctaaattaactttaaacaaaaaactcattccc

SEQ ID NO: 9440 - DNA, 50 bp, synthetic construct
  source 1..50: mol_type = other DNA
atttccttactctaaataaaacacaacatattaatttcctaattaaacac

SEQ ID NO: 9441 - DNA, 50 bp, synthetic construct
  source 1..50: mol_type = other DNA
aattataacctaaatttccaaacttattcacctatttttcccaatacaac

SEQ ID NO: 9442 - DNA, 50 bp, synthetic construct
  source 1..50: mol_type = other DNA
ttatcttcaactcattaccattacaaaatcctctaaacatacatactctc

SEQ ID NO: 9443 - DNA, 50 bp, synthetic construct
  source 1..50: mol_type = other DNA
aaaaatttattttttaaataaatcatactctatcacctccaaacctttac

SEQ ID NO: 9444 - DNA, 50 bp, synthetic construct
  source 1..50: mol_type = other DNA
tttctaattttcttaaaaatttctacttctacctatcaaaattcaatatc

SEQ ID NO: 9445 - DNA, 50 bp, synthetic construct
  source 1..50: mol_type = other DNA
atttatctaattcaaataaatatatctaaatctcttccttctaaatccac

SEQ ID NO: 9446 - DNA, 50 bp, synthetic construct
  source 1..50: mol_type = other DNA
tctcttccttctaaatccacrctttttaactaaatcttcacaaacaaaac

SEQ ID NO: 9447 - DNA, 50 bp, synthetic construct
  source 1..50: mol_type = other DNA
taaatcttcacaaacaaaacraataataaccttaaactattaataacaac

SEQ ID NO: 9448 - DNA, 50 bp, synthetic construct
  source 1..50: mol_type = other DNA
atcttcacaaacaaaacraataataaccttaaactattaataacaacrac

SEQ ID NO: 9449 - DNA, 50 bp, synthetic construct
  source 1..50: mol_type = other DNA
aactacaataaaataaaaaatacaaccaaaactacatactcccaataacc

SEQ ID NO: 9450 - DNA, 50 bp, synthetic construct
  source 1..50: mol_type = other DNA
aatctacaaccataactaaataaccractacaactacacccaaaaaaacc

SEQ ID NO: 9451 - DNA, 50 bp, synthetic construct
  source 1..50: mol_type = other DNA
ttaacaacacctaaacttaaccacaactttaatctaaaatcraaataaac

SEQ ID NO: 9452 - DNA, 50 bp, synthetic construct
  source 1..50: mol_type = other DNA
aacaaaatcttaacaacacctaaacttaaccacaactttaatctaaaatc

SEQ ID NO: 9453 - DNA, 50 bp, synthetic construct
  source 1..50: mol_type = other DNA
accaaaattataaccaaacccaaatactatcaaaaccctaccaaatatac

SEQ ID NO: 9454 - DNA, 50 bp, synthetic construct
  source 1..50: mol_type = other DNA
aacccaaatactatcaaaaccctaccaaatatacrtacactcaaaacaac

SEQ ID NO: 9455 - DNA, 50 bp, synthetic construct
  source 1..50: mol_type = other DNA
ccctacccccaaacttcaaaccatctaaaacctaaaaataaaacttcacc

SEQ ID NO: 9456 - DNA, 50 bp, synthetic construct
  source 1..50: mol_type = other DNA
accttcaaacctcaaataacctaaaacctaaaaacaaaactaccaattcc

SEQ ID NO: 9457 - DNA, 50 bp, synthetic construct
  source 1..50: mol_type = other DNA
ttcaaacctcaaataacctaaaacctaaaaacaaaactaccaattccrcc

SEQ ID NO: 9458 - DNA, 50 bp, synthetic construct
  source 1..50: mol_type = other DNA
aaaaaaaacccacactaaataactcctttctacaaacaaatcrtcccrac

SEQ ID NO: 9459 - DNA, 50 bp, synthetic construct
  source 1..50: mol_type = other DNA
tacctataaaaaaaaactacccactacaatctcctctcaactattctatc

SEQ ID NO: 9460 - DNA, 50 bp, synthetic construct
  source 1..50: mol_type = other DNA
aaaataccaaaaaccrcaaaacccaaaaataaatatcacaactctaactc

SEQ ID NO: 9461 - DNA, 50 bp, synthetic construct
  source 1..50: mol_type = other DNA
taacaccraaaaatacaataatacccaaaaacttaaaaataccaaaaacc

SEQ ID NO: 9462 - DNA, 50 bp, synthetic construct
  source 1..50: mol_type = other DNA
taactataactaaaccaaatattctacaaacaacttctataattaacacc

SEQ ID NO: 9463 - DNA, 50 bp, synthetic construct
  source 1..50: mol_type = other DNA
ctaccacaaccaacatacctaactatacttaataaccaaaccccatactc

SEQ ID NO: 9464 - DNA, 50 bp, synthetic construct
  source 1..50: mol_type = other DNA
cttatttttctcaaacaatatttctcaaatcaaatcacaaaaatttctcc

SEQ ID NO: 9465 - DNA, 50 bp, synthetic construct
  source 1..50: mol_type = other DNA
acaaaaatttctccraccaataacaacatataaaaatatcttctactaac

SEQ ID NO: 9466 - DNA, 50 bp, synthetic construct
  source 1..50: mol_type = other DNA
atactaattaatacttaaaaccacaccaaaaaattcaaatctcaaaaaac

SEQ ID NO: 9467 - DNA, 50 bp, synthetic construct
  source 1..50: mol_type = other DNA
ctaaactctctactcacccrattactacaaaaaacratattattaaactc

SEQ ID NO: 9468 - DNA, 50 bp, synthetic construct
  source 1..50: mol_type = other DNA
tatcctatttttctttcttccaaaccaaaaataccraattcaacaacacc

SEQ ID NO: 9469 - DNA, 50 bp, synthetic construct
  source 1..50: mol_type = other DNA
ctctcraaattctacacrtaacaaaatactccctctccaaaatacctaac

SEQ ID NO: 9470 - DNA, 50 bp, synthetic construct
  source 1..50: mol_type = other DNA
aaaaaaaaatatcctactacrtacaaaactccraaaaatacctaaactcc

SEQ ID NO: 9471 - DNA, 50 bp, synthetic construct
  source 1..50: mol_type = other DNA
attaattcttccttactctactcaaccctaacctcttctctctaactctc

SEQ ID NO: 9472 - DNA, 50 bp, synthetic construct
  source 1..50: mol_type = other DNA
cactcaattctcaccaactctttctctctctaatattttctccttttctc

SEQ ID NO: 9473 - DNA, 50 bp, synthetic construct
  source 1..50: mol_type = other DNA
aacaaccacattaccttactaaaatccaaaacctaaccttcaatcccacc

SEQ ID NO: 9474 - DNA, 50 bp, synthetic construct
  source 1..50: mol_type = other DNA
taactaaaacaaccttaattttcataacraacatttctttaacraacrac

SEQ ID NO: 9475 - DNA, 50 bp, synthetic construct
  source 1..50: mol_type = other DNA
aaataactaaaacaaccttaattttcataacraacatttctttaacraac

SEQ ID NO: 9476 - DNA, 50 bp, synthetic construct
  source 1..50: mol_type = other DNA
caccaaataactaaaacaaccttaattttcataacraacatttctttaac

SEQ ID NO: 9477 - DNA, 50 bp, synthetic construct
  source 1..50: mol_type = other DNA
tccraataacctaaacaccaaataactaaaacaaccttaattttcataac

SEQ ID NO: 9478 - DNA, 50 bp, synthetic construct
  source 1..50: mol_type = other DNA
ttcrccataaaaactaaaactaccttaactatctaatacccaaactattc

SEQ ID NO: 9479 - DNA, 50 bp, synthetic construct
  source 1..50: mol_type = other DNA
actaccttaactatctaatacccaaactattcraaaactcaaataaaccc

SEQ ID NO: 9480 - DNA, 50 bp, synthetic construct
  source 1..50: mol_type = other DNA
tacaccaaaaccccaatttaatttaaaattaaccccaaaatacaacaaac

SEQ ID NO: 9481 - DNA, 50 bp, synthetic construct
  source 1..50: mol_type = other DNA
acattaataaatataccctttttatccctctcaaatactaatataattac

SEQ ID NO: 9482 - DNA, 50 bp, synthetic construct
  source 1..50: mol_type = other DNA
aatataattacrttaatcactcracccaaaccttaataaactaccaaaac

SEQ ID NO: 9483 - DNA, 50 bp, synthetic construct
  source 1..50: mol_type = other DNA
tttccaatctcatatttttatacatttttaaataatcacatatttaaatc

SEQ ID NO: 9484 - DNA, 50 bp, synthetic construct
  source 1..50: mol_type = other DNA
aaaccaaaatctccaacacrttacctaacattattctccaactcttttac

SEQ ID NO: 9485 - DNA, 50 bp, synthetic construct
  source 1..50: mol_type = other DNA
acataaaattctccctccaaaactcacataaaaaacrtaacttaaattcc

SEQ ID NO: 9486 - DNA, 50 bp, synthetic construct
  source 1..50: mol_type = other DNA
accctcaatacaacacataaaattctccctccaaaactcacataaaaaac

SEQ ID NO: 9487 - DNA, 50 bp, synthetic construct
  source 1..50: mol_type = other DNA
aaaaaaaactttatatattacactaaaaacaatctccraaaacrcrattc

SEQ ID NO: 9488 - DNA, 50 bp, synthetic construct
  source 1..50: mol_type = other DNA
tcaacrtatctaataaaacaatcctctaccaaaactacaaacacaacacc

SEQ ID NO: 9489 - DNA, 50 bp, synthetic construct
  source 1..50: mol_type = other DNA
aaaacratattatatctacaactctaacaaaaaactattccactaaacac

SEQ ID NO: 9490 - DNA, 50 bp, synthetic construct
  source 1..50: mol_type = other DNA
caactctaacaaaaaactattccactaaacacrctaaaaaaactaaatac

SEQ ID NO: 9491 - DNA, 50 bp, synthetic construct
  source 1..50: mol_type = other DNA
ataaaatatcrttactaaaaaatcccaaaacccraaaccccrcaaaaaac

SEQ ID NO: 9492 - DNA, 50 bp, synthetic construct
  source 1..50: mol_type = other DNA
tttttacraaattccraaccttaaaacttttcaacaacracattccacac

SEQ ID NO: 9493 - DNA, 50 bp, synthetic construct
  source 1..50: mol_type = other DNA
raaccttaaaacttttcaacaacracattccacacrtaatacrattcaac

SEQ ID NO: 9494 - DNA, 50 bp, synthetic construct
  source 1..50: mol_type = other DNA
tataaaaactcttacccacrcaaattattacataaaaccracrcttaaac

SEQ ID NO: 9495 - DNA, 50 bp, synthetic construct
  source 1..50: mol_type = other DNA
aactaacaaaaaaaatcactcacrtcataaatataaaaactcttacccac

SEQ ID NO: 9496 - DNA, 50 bp, synthetic construct
  source 1..50: mol_type = other DNA
rccrattctatataacaacctacrtaaacaaaaatttccacacctataac

SEQ ID NO: 9497 - DNA, 50 bp, synthetic construct
  source 1..50: mol_type = other DNA
ctctaaaacacrccccaaaaaaactacaaataccaaatcaacacrtaaac

SEQ ID NO: 9498 - DNA, 50 bp, synthetic construct
  source 1..50: mol_type = other DNA
ctaaaatattctctaacaatttccccttaaccaaactacctctaaaacac

SEQ ID NO: 9499 - DNA, 50 bp, synthetic construct
  source 1..50: mol_type = other DNA
atatattctacctaaaataaatttctaactcaactcrtatcaccaataac

SEQ ID NO: 9500 - DNA, 50 bp, synthetic construct
  source 1..50: mol_type = other DNA
ctccrattctcccaatatattctacctaaaataaatttctaactcaactc

SEQ ID NO: 9501 - DNA, 50 bp, synthetic construct
  source 1..50: mol_type = other DNA
ctaattactattaaatattttccctaacrataattaatctcaccatctcc

SEQ ID NO: 9502 - DNA, 50 bp, synthetic construct
  source 1..50: mol_type = other DNA
ttacaaaaaaacractacaaaacttaaaataacaataccaaacactttac

SEQ ID NO: 9503 - DNA, 50 bp, synthetic construct
  source 1..50: mol_type = other DNA
attatttctatttatcrctaaaaataaaactctccaccctaatattcttc

SEQ ID NO: 9504 - DNA, 50 bp, synthetic construct
  source 1..50: mol_type = other DNA
ccttttcctccaactctcactaaatccaaacacaaaaaccctaaaaaatc

SEQ ID NO: 9505 - DNA, 50 bp, synthetic construct
  source 1..50: mol_type = other DNA
tttcctccaactctcactaaatccaaacacaaaaaccctaaaaaatcrac

SEQ ID NO: 9506 - DNA, 50 bp, synthetic construct
  source 1..50: mol_type = other DNA
acatacaccccacraatactaccatatacaaaaaacttacctaacaatac

SEQ ID NO: 9507 - DNA, 50 bp, synthetic construct
  source 1..50: mol_type = other DNA
ataaaaataatacttctcaaaatctcaaccaaaataaacatacaccccac

SEQ ID NO: 9508 - DNA, 50 bp, synthetic construct
  source 1..50: mol_type = other DNA
actcaaccaatatctacratcatcattctattacattctctaactctatc

SEQ ID NO: 9509 - DNA, 50 bp, synthetic construct
  source 1..50: mol_type = other DNA
ccaaacaaactaaaccatttcctatcattccatataccaaaccactaaac

SEQ ID NO: 9510 - DNA, 50 bp, synthetic construct
  source 1..50: mol_type = other DNA
acacataaaataacaaaaaataacccaacctacttaataatacaaatttc

SEQ ID NO: 9511 - DNA, 50 bp, synthetic construct
  source 1..50: mol_type = other DNA
aaaaaaaccaaactctctaatacctcttcttacaaatacactaatcccac

SEQ ID NO: 9512 - DNA, 50 bp, synthetic construct
  source 1..50: mol_type = other DNA
aattatctacctctaaaatcccttctaatcccaaccatatatacacctac

SEQ ID NO: 9513 - DNA, 50 bp, synthetic construct
  source 1..50: mol_type = other DNA
atcccaaccatatatacacctacrttttcttccaattaaattctctaaac

SEQ ID NO: 9514 - DNA, 50 bp, synthetic construct
  source 1..50: mol_type = other DNA
atataaaaatcctttacataaacaacaaatcttttcaaaacaaccrttac

SEQ ID NO: 9515 - DNA, 50 bp, synthetic construct
  source 1..50: mol_type = other DNA
aatcctttacataaacaacaaatcttttcaaaacaaccrttacrcttacc

SEQ ID NO: 9516 - DNA, 50 bp, synthetic construct
  source 1..50: mol_type = other DNA
tacataaacaacaaatcttttcaaaacaaccrttacrcttaccrtcttac

SEQ ID NO: 9517 - DNA, 50 bp, synthetic construct
  source 1..50: mol_type = other DNA
tacaaacaacctaatactctctctacctctactttttaatacactataac

SEQ ID NO: 9518 - DNA, 50 bp, synthetic construct
  source 1..50: mol_type = other DNA
attaaaaactcctctaaaactttttaattcccatatacctccacaattcc

SEQ ID NO: 9519 - DNA, 50 bp, synthetic construct
  source 1..50: mol_type = other DNA
taactcaaatcactaaaatccaaaactttttcaaattttacatacaattc

SEQ ID NO: 9520 - DNA, 50 bp, synthetic construct
  source 1..50: mol_type = other DNA
acttatacrtctctatacattttctttatacttatattacttctaaaatc

SEQ ID NO: 9521 - DNA, 50 bp, synthetic construct
  source 1..50: mol_type = other DNA
ttataaaataccaaaacataatcataattacaaaataccaaaacactatc

SEQ ID NO: 9522 - DNA, 50 bp, synthetic construct
  source 1..50: mol_type = other DNA
aaaacactatcrtattcataacaactctaaaaattacccctaaatctatc

SEQ ID NO: 9523 - DNA, 50 bp, synthetic construct
  source 1..50: mol_type = other DNA
ttactttcttatctacaaaaaacttatttcttataaattacttaacttcc

SEQ ID NO: 9524 - DNA, 50 bp, synthetic construct
  source 1..50: mol_type = other DNA
aaattttacaacacaaaacctactcaacraaatatccttatataattaac

SEQ ID NO: 9525 - DNA, 50 bp, synthetic construct
  source 1..50: mol_type = other DNA
aacccaacaataaaaactatcctaacttcctaaaaaataaacaataaacc

SEQ ID NO: 9526 - DNA, 50 bp, synthetic construct
  source 1..50: mol_type = other DNA
cctttcatcaaaaaccactcccatcataactatctcactcccaaaataac

SEQ ID NO: 9527 - DNA, 50 bp, synthetic construct
  source 1..50: mol_type = other DNA
aataaaatacttttcactccraaaccatttattcaacaaccaaaacraac

SEQ ID NO: 9528 - DNA, 50 bp, synthetic construct
  source 1..50: mol_type = other DNA
aaaaaaatttcctaatatcttataaacaacctaataaaaatcctactccc

SEQ ID NO: 9529 - DNA, 50 bp, synthetic construct
  source 1..50: mol_type = other DNA
taaaaccactctataaaaacatctacaacccaaaatcctcaaaaccccac

SEQ ID NO: 9530 - DNA, 50 bp, synthetic construct
  source 1..50: mol_type = other DNA
tttttacatccrctcattcttcrtcaatactaattcattctcatttcctc

SEQ ID NO: 9531 - DNA, 50 bp, synthetic construct
  source 1..50: mol_type = other DNA
attaacaaaaattacaactatataactatacacaacaattaaaacttccc

SEQ ID NO: 9532 - DNA, 50 bp, synthetic construct
  source 1..50: mol_type = other DNA
ataataccaccrcaaacccaaaaactataaacaaaacacaaaataaaaac

SEQ ID NO: 9533 - DNA, 50 bp, synthetic construct
  source 1..50: mol_type = other DNA
actccaaacrtaaaacaaaaaaatcaactcaaacaactaaactaacaaac

SEQ ID NO: 9534 - DNA, 50 bp, synthetic construct
  source 1..50: mol_type = other DNA
aaatttaaaaaaaacacraaaaacccccaaaacccaactaactcacaacc

SEQ ID NO: 9535 - DNA, 50 bp, synthetic construct
  source 1..50: mol_type = other DNA
atatttacaaacaatatacttaataaaaatcatcrccattctccaatctc

SEQ ID NO: 9536 - DNA, 50 bp, synthetic construct
  source 1..50: mol_type = other DNA
aacctctacccccaaaaactaccctacraaaaatcctttttctcaaattc

SEQ ID NO: 9537 - DNA, 50 bp, synthetic construct
  source 1..50: mol_type = other DNA
tacaaactttaaattctaaatcattcaatcaacaaatacttattaaacac

SEQ ID NO: 9538 - DNA, 50 bp, synthetic construct
  source 1..50: mol_type = other DNA
ataataaattatcatctatatcccaatatatctaactcaaacctttcttc

SEQ ID NO: 9539 - DNA, 50 bp, synthetic construct
  source 1..50: mol_type = other DNA
ataaaaccttttcaaatattcattctaaattctcttcaaaccctacatac

SEQ ID NO: 9540 - DNA, 50 bp, synthetic construct
  source 1..50: mol_type = other DNA
actacttaaaaatcaaaaatcaaaaaccctcrtaaaaaaacaatctatcc

SEQ ID NO: 9541 - DNA, 50 bp, synthetic construct
  source 1..50: mol_type = other DNA
attcraacttcctaactactttatttacctaaacaaacctaaaaaataac

SEQ ID NO: 9542 - DNA, 50 bp, synthetic construct
  source 1..50: mol_type = other DNA
raacttcctaactactttatttacctaaacaaacctaaaaaataacraac

SEQ ID NO: 9543 - DNA, 50 bp, synthetic construct
  source 1..50: mol_type = other DNA
taccttacaatttaatctcaaactactatactaacaatcaacaaaactcc

SEQ ID NO: 9544 - DNA, 50 bp, synthetic construct; identical to SEQ ID NO: 9543
  source 1..50: mol_type = other DNA

SEQ ID NO: 9545 - DNA, 50 bp, synthetic construct
  source 1..50: mol_type = other DNA
actaacaatcaacaaaactccrtaaacrtaaaaccctctaaatcaaatac

SEQ ID NO: 9546 - DNA, 50 bp, synthetic construct
  source 1..50: mol_type = other DNA
aaacrtaaaaccctctaaatcaaatacraattataatctcttaatacacc

SEQ ID NO: 9547 - DNA, 50 bp, synthetic construct
  source 1..50: mol_type = other DNA
aaatcaaatacraattataatctcttaatacaccrttttttaaacccrtc

SEQ ID NO: 9548 - DNA, 50 bp, synthetic construct
  source 1..50: mol_type = other DNA
aaaaataccaaataataaacacaaaacaataaatacaacrcaccrtacrc

SEQ ID NO: 9549 - DNA, 50 bp, synthetic construct
  source 1..50: mol_type = other DNA
taaaaaataccaaataataaacacaaaacaataaatacaacrcaccrtac

SEQ ID NO: 9550 - DNA, 50 bp, synthetic construct
  source 1..50: mol_type = other DNA
tcattaaaaaataccaaataataaacacaaaacaataaatacaacrcacc

SEQ ID NO: 9551 - DNA, 50 bp, synthetic construct
  source 1..50: mol_type = other DNA
taacaaccaaaataactaattaaaaacaactccaatctacaactcccrac

SEQ ID NO: 9552 - DNA, 50 bp, synthetic construct
  source 1..50: mol_type = other DNA
ctcattataattttaccctttctaaaatataccacacttaaaaaaaatac

SEQ ID NO: 9553 - DNA, 50 bp, synthetic construct
  source 1..50: mol_type = other DNA
atcactcttttatatactttaataataaactaaatcaaaaatacaatatc

SEQ ID NO: 9554 - DNA, 50 bp, synthetic construct
  source 1..50: mol_type = other DNA
caaacaaattattcaatttctctatacctcaaccctcctcattacaaaac

SEQ ID NO: 9555 - DNA, 50 bp, synthetic construct
  source 1..50: mol_type = other DNA
taaaatttctaaatctccatcctctcaaaactcctatctttaacttcttc

SEQ ID NO: 9556 - DNA, 50 bp, synthetic construct
  source 1..50: mol_type = other DNA
tcaaaaaacractaaaacaatcttctatcttttcaaaaaattttcaaaac

SEQ ID NO: 9557 - DNA, 50 bp, synthetic construct
  source 1..50: mol_type = other DNA
acacaactacracactcrctaaatcctaaacctacaaaataaacatctac

SEQ ID NO: 9558 - DNA, 50 bp, synthetic construct
  source 1..50: mol_type = other DNA
atcataaaaaaacaaacrtaaatactcattctacaaacctaaaacccaac

SEQ ID NO: 9559 - DNA, 50 bp, synthetic construct
  source 1..50: mol_type = other DNA
taaaattctaaacrtacctttcaacctccttaaataaccctattttcctc

SEQ ID NO: 9560 - DNA, 50 bp, synthetic construct
  source 1..50: mol_type = other DNA
ctatcttctaatttctcttaaaatcaaataacttaaatattaacaaaacc

SEQ ID NO: 9561 - DNA, 50 bp, synthetic construct
  source 1..50: mol_type = other DNA
cacaaaaacaaaaactactcaaatctatcatcaccacaactaccattcac

SEQ ID NO: 9562 - DNA, 50 bp, synthetic construct
  source 1..50: mol_type = other DNA
ctaaacaaatatattaactttataaaactaaatttccacacctataatcc

SEQ ID NO: 9563 - DNA, 50 bp, synthetic construct
  source 1..50: mol_type = other DNA
aaaatatccacaatatacataatactctcactataatccactcactcctc

SEQ ID NO: 9564 - DNA, 50 bp, synthetic construct
  source 1..50: mol_type = other DNA
tatactatacaaaacctcctttatataaaaaataaatctaaccatccrcc

SEQ ID NO: 9565 - DNA, 50 bp, synthetic construct
  source 1..50: mol_type = other DNA
taaaaaataaatctaaccatccrccrtctctattaaaccatctaaaaaac

SEQ ID NO: 9566 - DNA, 50 bp, synthetic construct
  source 1..50: mol_type = other DNA
actaaatcctacccatactaactctttcaataacrtacctaaaccataac

SEQ ID NO: 9567 - DNA, 50 bp, synthetic construct
  source 1..50: mol_type = other DNA
aaaaatatctacaaaacaccttaacctttatactttaacattcccaaaac

SEQ ID NO: 9568 - DNA, 50 bp, synthetic construct
  source 1..50: mol_type = other DNA
cctctctactctaacactcrctttaaaaactaaaattaccacccactttc

SEQ ID NO: 9569 - DNA, 50 bp, synthetic construct
  source 1..50: mol_type = other DNA
taataatctcttactctaaaataccraaataacrtaaaatacacacacac

SEQ ID NO: 9570 - DNA, 50 bp, synthetic construct
  source 1..50: mol_type = other DNA
aaaaacacctcattcctacctatataaacataaacrtctattaataatac

SEQ ID NO: 9571 - DNA, 50 bp, synthetic construct
  source 1..50: mol_type = other DNA
tctctaaactcacaattaaaaactacctaatacattccactacaaataac

SEQ ID NO: 9572 - DNA, 50 bp, synthetic construct
  source 1..50: mol_type = other DNA
ttttaccaaatttcaacaaaaacattatatctaaacatattctaaaaacc

SEQ ID NO: 9573 - DNA, 50 bp, synthetic construct
  source 1..50: mol_type = other DNA
ccactactaccaaaccactaaaaaccaaaaatatcctacaattaataaac

SEQ ID NO: 9574 - DNA, 50 bp, synthetic construct
  source 1..50: mol_type = other DNA
aactataaaacacctctaattcccaataatctaataacaataataacacc

SEQ ID NO: 9575 - DNA, 50 bp, synthetic construct
  source 1..50: mol_type = other DNA
cctctaattcccaataatctaataacaataataacaccrtaaaacaaccc

SEQ ID NO: 9576 - DNA, 50 bp, synthetic construct
  source 1..50: mol_type = other DNA
acacacacacacraaaaaatcacatacacaactctaaacatctaataaac

SEQ ID NO: 9577 - DNA, 50 bp, synthetic construct
  source 1..50: mol_type = other DNA
aatcactccaaccttaaaaactttatatacacrtctttctaccaaaatac

SEQ ID NO: 9578 - DNA, 50 bp, synthetic construct
  source 1..50: mol_type = other DNA
cttaaatacttataacttaatcactccaaccttaaaaactttatatacac

SEQ ID NO: 9579 - DNA, 50 bp, synthetic construct
  source 1..50: mol_type = other DNA
ataaacattcaaaaataaacataaaccatttaaaaacraactataaattc

SEQ ID NO: 9580 - DNA, 50 bp, synthetic construct
  source 1..50: mol_type = other DNA
aaaaaacaaaattatacrtaccaaactaaaaaccrtaataacaaaataac

SEQ ID NO: 9581 - DNA, 50 bp, synthetic construct
  source 1..50: mol_type = other DNA
tttcccaattcaaaataaactctaatataatatcctaacaataaaaaaac

SEQ ID NO: 9582 - DNA, 50 bp, synthetic construct
  source 1..50: mol_type = other DNA
aattccttaaattaatataatttaaaaaaaacactcacctcctctctctc

SEQ ID NO: 9583 - DNA, 50 bp, synthetic construct
  source 1..50: mol_type = other DNA
aaaacaatacttaaaaaattctacaataaaataaaaacataccrcatctc

SEQ ID NO: 9584 - DNA, 50 bp, synthetic construct
  source 1..50: mol_type = other DNA
atccctatttccctcttcaacttaaaaatatctttttctacttaacactc

SEQ ID NO: 9585 - DNA, 50 bp, synthetic construct
  source 1..50: mol_type = other DNA
actatttctaaaacacatcaacccattctcacctcaaaacctttacaacc

SEQ ID NO: 9586 - DNA, 50 bp, synthetic construct
  source 1..50: mol_type = other DNA
accataaaactaaataatcaaaaacacctaccttaatttctttaacctac

SEQ ID NO: 9587 - DNA, 50 bp, synthetic construct
  source 1..50: mol_type = other DNA
aatctacaactacatataattatatatcccccaaaacaaacaaaataacc

SEQ ID NO: 9588 - DNA, 50 bp, synthetic construct
  source 1..50: mol_type = other DNA
tttttttctaactactaacttccaaacacataaccctaaattttaataac

SEQ ID NO: 9589 - DNA, 50 bp, synthetic construct
  source 1..50: mol_type = other DNA
tacatacaaaaatacaaatattaatacraaactaccrtaaacaataaacc

SEQ ID NO: 9590 - DNA, 50 bp, synthetic construct
  source 1..50: mol_type = other DNA
tctaaccaaatttttatcttaaaatatactcaaaatccacctacractcc

SEQ ID NO: 9591 - DNA, 50 bp, synthetic construct
  source 1..50: mol_type = other DNA
ttaaaatctaaccaaatttttatcttaaaatatactcaaaatccacctac

SEQ ID NO: 9592 - DNA, 50 bp, synthetic construct
  source 1..50: mol_type = other DNA
ttttataaaccacaataacactacaaatcacaaaaaaattctcaaaaatc

SEQ ID NO: 9593 - DNA, 50 bp, synthetic construct
  source 1..50: mol_type = other DNA
tcttttaaataaaatctataactaaaatatcraattccaaactccacaac

SEQ ID NO: 9594 - DNA, 50 bp, synthetic construct
  source 1..50: mol_type = other DNA
atccctaaccaaccaatcttccccaccacataaaatatataaaaatatac

SEQ ID NO: 9595 - DNA, 50 bp, synthetic construct
  source 1..50: mol_type = other DNA
tacaacacataccacaaaaactataccatcacctatctattcatatatcc

SEQ ID NO: 9596 - DNA, 50 bp, synthetic construct
  source 1..50: mol_type = other DNA
actatctataatatccaactaaaaatactcaacttaatacaattcaaacc

SEQ ID NO: 9597 - DNA, 50 bp, synthetic construct
  source 1..50: mol_type = other DNA
aataccacaaataatacatttataaccttaattcaccraataaaaaaatc

SEQ ID NO: 9598 - DNA, 50 bp, synthetic construct
  source 1..50: mol_type = other DNA
aatacatttataaccttaattcaccraataaaaaaatcrtttcctttacc

SEQ ID NO: 9599 - DNA, 50 bp, synthetic construct
  source 1..50: mol_type = other DNA
caaaattaaatattaactaccaaacttatattctaaaacatccaaatatc

SEQ ID NO: 9600 - DNA, 50 bp, synthetic construct
  source 1..50: mol_type = other DNA
ttataacaaaaatacctaccaaaaatcactaaacttccttcatatacacc

SEQ ID NO: 9601 - DNA, 50 bp, synthetic construct
  source 1..50: mol_type = other DNA
ccaataaaacttaccaaccctaaataaaaaatatctacractttaaaacc

SEQ ID NO: 9602 - DNA, 50 bp, synthetic construct
  source 1..50: mol_type = other DNA
ttcaaaacaaaacactaaaaaattattaaacaacaaaatcactaaaaaac

SEQ ID NO: 9603 - DNA, 50 bp, synthetic construct
  source 1..50: mol_type = other DNA
aaaccattaacttatataaactaacattaaaaacaaataaacaatctctc

SEQ ID NO: 9604 - DNA, 50 bp, synthetic construct
  source 1..50: mol_type = other DNA
caatacctttaaataaaacctattatttctaaatttaccacaaatctcac

SEQ ID NO: 9605 - DNA, 50 bp, synthetic construct
  source 1..50: mol_type = other DNA
aaatcaaataacttataacccaaaaatcrtaaactaataaccttaaaacc

SEQ ID NO: 9606 - DNA, 50 bp, synthetic construct
  source 1..50: mol_type = other DNA
aaattttcacccacaaattaaaaacacatcaaaaaaaatcatatcttcac

SEQ ID NO: 9607 - DNA, 50 bp, synthetic construct
  source 1..50: mol_type = other DNA
taacctctcaaaaataacaccttatattatcccctttaaattaaaactac

SEQ ID NO: 9608 - DNA, 50 bp, synthetic construct
  source 1..50: mol_type = other DNA
aaaacaaaataacacccaactcttacaaaaacacatttacaaaaattttc

SEQ ID NO: 9609 - DNA, 50 bp, synthetic construct
  source 1..50: mol_type = other DNA
aaaaaaaatataacattcccataactctcccattaaccaacaccaaatac

SEQ ID NO: 9610 - DNA, 50 bp, synthetic construct
  source 1..50: mol_type = other DNA
taaaaacatttttctttcttttctccctctcttcctcttctttaactaac

SEQ ID NO: 9611 - DNA, 50 bp, synthetic construct
  source 1..50: mol_type = other DNA
taaatcccaaataaaaattccaaacacctctttactaaaaacatacaaac

SEQ ID NO: 9612 - DNA, 50 bp, synthetic construct
  source 1..50: mol_type = other DNA
ccatcctcraattaaaaactttatttcctttaaattaaaaactaacatcc

SEQ ID NO: 9613 - DNA, 50 bp, synthetic construct
  source 1..50: mol_type = other DNA
cttaaaacaaaccttataataaatcataacaccctatataatcacacaac

SEQ ID NO: 9614 - DNA, 50 bp, synthetic construct
  source 1..50: mol_type = other DNA
taataccctccccataataacraataaatccttactctataaattcatac

SEQ ID NO: 9615 - DNA, 50 bp, synthetic construct
  source 1..50: mol_type = other DNA
ctattcatataaaaatctttcactaaatacattctactacaaaatcaacc

SEQ ID NO: 9616 - DNA, 50 bp, synthetic construct
  source 1..50: mol_type = other DNA
attttccttcctaattccratacactctttctacaaactactacaaacac

SEQ ID NO: 9617 - DNA, 50 bp, synthetic construct
  source 1..50: mol_type = other DNA
atactctaaaaaccatacrtatttacaacaacctacaaaaaaaatatacc

SEQ ID NO: 9618 - DNA, 50 bp, synthetic construct
  source 1..50: mol_type = other DNA
cccaatttctaaatttaaaaaactacaataaatttactacctcacaactc

SEQ ID NO: 9619 - DNA, 50 bp, synthetic construct
  source 1..50: mol_type = other DNA
aaacaatacacaacatttctcaaatacttacataaataactatttcaaac

SEQ ID NO: 9620 - DNA, 50 bp, synthetic construct
  source 1..50: mol_type = other DNA
cttcacataacaacatatataaaaatcataccaacaaactattaccrccc

SEQ ID NO: 9621 - DNA, 50 bp, synthetic construct
  source 1..50: mol_type = other DNA
caacttattttaaaaaactttatataaataaatacattcctcaatctccc

SEQ ID NO: 9622 - DNA, 50 bp, synthetic construct
  source 1..50: mol_type = other DNA
taacaaaactaaatttaaattcaaactccttaaatccatatcttttatac

SEQ ID NO: 9623 - DNA, 50 bp, synthetic construct
  source 1..50: mol_type = other DNA
tactcttttaacaaatttattttccaattcrtttctttttcttcrtttcc

SEQ ID NO: 9624 - DNA, 50 bp, synthetic construct
  source 1..50: mol_type = other DNA
aaaatatactcttttaacaaatttattttccaattcrtttctttttcttc

SEQ ID NO: 9625 - DNA, 50 bp, synthetic construct
  source 1..50: mol_type = other DNA
tatcrccaatctaaaacaaaaaatcctcaaataacatatctaaaaaatcc

SEQ ID NO: 9626 - DNA, 50 bp, synthetic construct
  source 1..50: mol_type = other DNA
ctacaaaatacctccrtaaaacaaacctatcaataacaactcttatcccc

SEQ ID NO: 9627 - DNA, 50 bp, synthetic construct
  source 1..50: mol_type = other DNA
taaaataaaaaaaccraacaaccttcacaacaaatctcaattctaccccc

SEQ ID NO: 9628 - DNA, 50 bp, synthetic construct
  source 1..50: mol_type = other DNA
ctttacacaacaaaaacaaacraaactacttactcattcaatataacccc

SEQ ID NO: 9629 - DNA, 50 bp, synthetic construct
  source 1..50: mol_type = other DNA
aaacttataaaattatactctcttaaactaatccttacaaccccataaac

SEQ ID NO: 9630 - DNA, 50 bp, synthetic construct
  source 1..50: mol_type = other DNA
attatactctcttaaactaatccttacaaccccataaacratatccatac

SEQ ID NO: 9631 - DNA, 50 bp, synthetic construct
  source 1..50: mol_type = other DNA
ccataaacratatccatacractttcctacaaaaataacataccaaaacc

SEQ ID NO: 9632 - DNA, 50 bp, synthetic construct
  source 1..50: mol_type = other DNA
tccatacractttcctacaaaaataacataccaaaaccrctttaaaatcc

SEQ ID NO: 9633 - DNA, 50 bp, synthetic construct
  source 1..50: mol_type = other DNA
aattcttctacttcraaatacataatatcaaaataaccaactacaaaaac

SEQ ID NO: 9634 - DNA, 50 bp, synthetic construct
  source 1..50: mol_type = other DNA
cccttttccaaacacattttacattcttaaaatccaaataaaactctttc

SEQ ID NO: 9635 - DNA, 50 bp, synthetic construct
  source 1..50: mol_type = other DNA
cattaactataatctaaaaccttctaattaactaccaccactcaaatatc

SEQ ID NO: 9636 - DNA, 50 bp, synthetic construct
  source 1..50: mol_type = other DNA
aaataactcaattatcttctctatcrttactaatccttttcctcttatac

SEQ ID NO: 9637 - DNA, 50 bp, synthetic construct
  source 1..50: mol_type = other DNA
aaatatctatattacaaaaaaactacctttaaatacttcatacctaatac

SEQ ID NO: 9638 - DNA, 50 bp, synthetic construct
  source 1..50: mol_type = other DNA
aacctactatttcacaaaaaaaacaataaccattaaataactccctcaac

SEQ ID NO: 9639 - DNA, 50 bp, synthetic construct
  source 1..50: mol_type = other DNA
atcctccctatatctataaaacaaatatcattcctactacaaaatacccc

SEQ ID NO: 9640 - DNA, 50 bp, synthetic construct
  source 1..50: mol_type = other DNA
atcaactctttaaaaaaactttttctaaacctaaactcaaatcccctatc

SEQ ID NO: 9641 - DNA, 50 bp, synthetic construct
  source 1..50: mol_type = other DNA
ctacaacatttaataaacaccttttactctataaatcctaaacatacaac

SEQ ID NO: 9642 - DNA, 50 bp, synthetic construct
  source 1..50: mol_type = other DNA
ccttaatatcatacataatataaaaaatacaacatatactcttaaacacc

SEQ ID NO: 9643 - DNA, 50 bp, synthetic construct
  source 1..50: mol_type = other DNA
atacataatataaaaaatacaacatatactcttaaacaccraactttaac

SEQ ID NO: 9644 - DNA, 50 bp, synthetic construct
  source 1..50: mol_type = other DNA
aatttttatcatattaaatatacatcctacctttcttacccccaccttac

SEQ ID NO: 9645 - DNA, 50 bp, synthetic construct
  source 1..50: mol_type = other DNA
aacrcaaataaatatttaaacaaataaaaatttcctatttcaccttctac

SEQ ID NO: 9646 - DNA, 50 bp, synthetic construct
  source 1..50: mol_type = other DNA
taaactcactatttacctacctctcacttaatctacaactttcaaaatcc

SEQ ID NO: 9647 - DNA, 50 bp, synthetic construct
  source 1..50: mol_type = other DNA
actctaaaaatcaaaacacctttctcaaaaaacatttacraaactacaac

SEQ ID NO: 9648 - DNA, 50 bp, synthetic construct
  source 1..50: mol_type = other DNA
tcaacaaatataatctaaaaacttcaaacacctaaaactatcaaaaccac

SEQ ID NO: 9649 - DNA, 50 bp, synthetic construct
  source 1..50: mol_type = other DNA
tacttaataccaactcacctaacttcaatatatattttcatataacctac

SEQ ID NO: 9650 - DNA, 50 bp, synthetic construct
  source 1..50: mol_type = other DNA
taaaaaatcaactctccctttataactaactactctcacactttcttaac

SEQ ID NO: 9651 - DNA, 50 bp, synthetic construct
  source 1..50: mol_type = other DNA
ccraatataaaaaaatctttcttacaccaaccaattttccaaatttcaac

SEQ ID NO: 9652 - DNA, 50 bp, synthetic construct
  source 1..50: mol_type = other DNA
atataaaaaaatctttcttacaccaaccaattttccaaatttcaacraac

SEQ ID NO: 9653 - DNA, 50 bp, synthetic construct
  source 1..50: mol_type = other DNA
tctttcttacaccaaccaattttccaaatttcaacraacrttaactaaac

SEQ ID NO: 9654 - DNA, 50 bp, synthetic construct
  source 1..50: mol_type = other DNA
aaataaaataaaatcattaaccattaataattaaactcaatctccaaccc

SEQ ID NO: 9655 - DNA, 50 bp, synthetic construct
  source 1..50: mol_type = other DNA
caacaaaaaatacacctatcactctattattttaaaaataatctcactcc

SEQ ID NO: 9656 - DNA, 50 bp, synthetic construct
  source 1..50: mol_type = other DNA
taacattaaaaaatactacccctcttccaactactaaattaaaaccaatc

SEQ ID NO: 9657 - DNA, 50 bp, synthetic construct
  source 1..50: mol_type = other DNA
aaacaataatatctacctataaacatcatttcaaaactacctataacatc

SEQ ID NO: 9658 - DNA, 50 bp, synthetic construct
  source 1..50: mol_type = other DNA
ttaaaaaattaaaaccatcacttccaaccaataaaactatacctaacttc

SEQ ID NO: 9659 - DNA, 50 bp, synthetic construct
  source 1..50: mol_type = other DNA
taaataaactcaactaaactacctctcctaacaacaattataatttaccc

SEQ ID NO: 9660 - DNA, 50 bp, synthetic construct
  source 1..50: mol_type = other DNA
tttctaattctttaaattctcaaataacccttcctttaaaaatacaattc

SEQ ID NO: 9661 - DNA, 50 bp, synthetic construct
  source 1..50: mol_type = other DNA
aaaaaacccacactttctcttctttctttcacttacctattctaaacaac

SEQ ID NO: 9662 - DNA, 50 bp, synthetic construct
  source 1..50: mol_type = other DNA
aactttctttttctaaaaacttaactccatacaaatatcaatctctaaac

SEQ ID NO: 9663 - DNA, 50 bp, synthetic construct
  source 1..50: mol_type = other DNA
caaacctaaataacccctactatactatacattaaacttaataaaactcc

SEQ ID NO: 9664 - DNA, 50 bp, synthetic construct
  source 1..50: mol_type = other DNA
acattttctatttacctacaatatacccatcatcataaaaactaaaaaac

SEQ ID NO: 9665 - DNA, 50 bp, synthetic construct
  source 1..50: mol_type = other DNA
aataacctttaaaaaaacttaataaaacctttttcttactaactcccttc

SEQ ID NO: 9666 - DNA, 50 bp, synthetic construct
  source 1..50: mol_type = other DNA
atcaaaacaaacaaacccataaaaaaaacttaaccaaatttatctaaacc

SEQ ID NO: 9667 - DNA, 50 bp, synthetic construct
  source 1..50: mol_type = other DNA
tacaataaacaataaatcaactcaaaaaaatataacccaatacctaaccc

SEQ ID NO: 9668 - DNA, 50 bp, synthetic construct
  source 1..50: mol_type = other DNA
tacttctctatacctttatttccttaaaacatacaaataccaaactccac

SEQ ID NO: 9669 - DNA, 50 bp, synthetic construct
  source 1..50: mol_type = other DNA
taacaacttaaaaatactatataacactacatttcttatccaacaataac

SEQ ID NO: 9670 - DNA, 50 bp, synthetic construct
  source 1..50: mol_type = other DNA
ttaaaaacttatttaaaattctaaaaaatcacttcaaaactttcctcacc

SEQ ID NO: 9671 - DNA, 50 bp, synthetic construct
  source 1..50: mol_type = other DNA
aacttatttaaaattctaaaaaatcacttcaaaactttcctcaccraaac

SEQ ID NO: 9672 - DNA, 50 bp, synthetic construct
  source 1..50: mol_type = other DNA
tcctcctctaataaaaataccaatattaacttatccctaatcactttccc

SEQ ID NO: 9673 - DNA, 50 bp, synthetic construct
  source 1..50: mol_type = other DNA
aactcctactaaataatcaaaaattaaaaatctaacccaacaatataccc

SEQ ID NO: 9674 - DNA, 50 bp, synthetic construct
  source 1..50: mol_type = other DNA
atatatatctaattttctttaaacaatcaaatctaaccaaataaacccac

SEQ ID NO: 9675 - DNA, 50 bp, synthetic construct
  source 1..50: mol_type = other DNA
acatttcttttacacaacttcctcccctttaaaacaaaaaataactaaac

SEQ ID NO: 9676 - DNA, 50 bp, synthetic construct
  source 1..50: mol_type = other DNA
cacaacttcctcccctttaaaacaaaaaataactaaacrcaataattcac

SEQ ID NO: 9677 - DNA, 50 bp, synthetic construct
  source 1..50: mol_type = other DNA
aacaaattaaaacataaaatttaatacaccccatactaactaaaaaacac

SEQ ID NO: 9678 - DNA, 50 bp, synthetic construct
  source 1..50: mol_type = other DNA
tccctacctaaaaaaatactattaatcctataaaactcaatataaatacc

SEQ ID NO: 9679 - DNA, 50 bp, synthetic construct
  source 1..50: mol_type = other DNA
attacacaatttataatacattctacctaactatatactcatctatcccc

SEQ ID NO: 9680 - DNA, 50 bp, synthetic construct
  source 1..50: mol_type = other DNA
ctttcacaaaacctaatcataaaacctataacatcctataccaacaaaac

SEQ ID NO: 9681 - DNA, 50 bp, synthetic construct
  source 1..50: mol_type = other DNA
acaaaacaaacaatcaaataaacccaaacattataataattacaaacacc

SEQ ID NO: 9682 - DNA, 50 bp, synthetic construct
  source 1..50: mol_type = other DNA
atctcaaactttaattctaaaatctcttcatcataattttaaattcaacc

SEQ ID NO: 9683 - DNA, 50 bp, synthetic construct
  source 1..50: mol_type = other DNA
ccaacaatatactaaaccatttctccttacatcccttatttaccaaattc

SEQ ID NO: 9684 - DNA, 50 bp, synthetic construct
  source 1..50: mol_type = other DNA
tcatacaatttctaaaacctcccaaaaaaccaaaaatccaacaacaaaac

SEQ ID NO: 9685 - DNA, 50 bp, synthetic construct
  source 1..50: mol_type = other DNA
aaccaattttctctaaacaaaatacccctattttaactaacaaaatcctc

SEQ ID NO: 9686 - DNA, 50 bp, synthetic construct
  source 1..50: mol_type = other DNA
actaataattccataaactaccacactactcaaaaatattactaatactc

SEQ ID NO: 9687 - DNA, 50 bp, synthetic construct
  source 1..50: mol_type = other DNA
tatcctcttaaaaaacataccttataacacatattaaaatattttccacc

SEQ ID NO: 9688 - DNA, 50 bp, synthetic construct
  source 1..50: mol_type = other DNA
atattaaaaattatctaaaacactcttccaaattccctttattatccttc

SEQ ID NO: 9689 - DNA, 50 bp, synthetic construct
  source 1..50: mol_type = other DNA
aacaataaaaaaaatctaaaaaaataccttaaacaattcctaatactccc

SEQ ID NO: 9690 - DNA, 50 bp, synthetic construct
  source 1..50: mol_type = other DNA
ataaaaaaaacatatcaaaaaaaataataactttaaaatactcctccccc

SEQ ID NO: 9691 - DNA, 50 bp, synthetic construct
  source 1..50: mol_type = other DNA
aattcttaaccacttaaaaaaatatacatataccccaaaatatacattcc

SEQ ID NO: 9692 - DNA, 50 bp, synthetic construct
  source 1..50: mol_type = other DNA
aaaattttaaatataaaaactaataacactaacacatcactaactactcc

SEQ ID NO: 9693 - DNA, 50 bp, synthetic construct
  source 1..50: mol_type = other DNA
acttttctctaaaacactaccaaatctccatataaaaaaatcaactcttc

SEQ ID NO: 9694 - DNA, 50 bp, synthetic construct
  source 1..50: mol_type = other DNA
ccatataaaaaaatcaactcttcrcctactaacttcttataacaaaattc

SEQ ID NO: 9695 - DNA, 50 bp, synthetic construct
  source 1..50: mol_type = other DNA
aatatttattttacctcactaaacatataatttttcttccctctaaatac

SEQ ID NO: 9696 - DNA, 50 bp, synthetic construct
  source 1..50: mol_type = other DNA
accttttaatacaacaaacaaaaacacccactaatatatttacaactctc

SEQ ID NO: 9697 - DNA, 50 bp, synthetic construct
  source 1..50: mol_type = other DNA
taacataattataactcactacaactctataaccttaaactcctaaactc

SEQ ID NO: 9698 - DNA, 50 bp, synthetic construct
  source 1..50: mol_type = other DNA
cacatatcaaccaaaatttcaaaaaataaaatttacaaataaaaccraac

SEQ ID NO: 9699 - DNA, 50 bp, synthetic construct
  source 1..50: mol_type = other DNA
aaattaatctctaaaactttcatatttatcctaaaaaaacttcaaacccc

SEQ ID NO: 9700 - DNA, 50 bp, synthetic construct
  source 1..50: mol_type = other DNA
atattcaaatcataaaaaaccattttacaactacctctactatataccac

SEQ ID NO: 9701 - DNA, 50 bp, synthetic construct
  source 1..50: mol_type = other DNA
tctataactacaaataaacaaaaaacatccataaactacccaaaactttc

SEQ ID NO: 9702 - DNA, 50 bp, synthetic construct
  source 1..50: mol_type = other DNA
acacaaccctataatccaatatatccaaaaaaatccaaatttctccctcc

SEQ ID NO: 9703 - DNA, 50 bp, synthetic construct
  source 1..50: mol_type = other DNA
ccttaccaatactatacctaaaaaacatatcttaaatcaaatccaaaatc

SEQ ID NO: 9704 - DNA, 50 bp, synthetic construct
  source 1..50: mol_type = other DNA
catttctaatacaataaaactccccttaaacatttaaaataacaaaaaac

SEQ ID NO: 9705 - DNA, 50 bp, synthetic construct
  source 1..50: mol_type = other DNA
aaatccccaaattaatattaactcractcaaatttatctaccctaaacac

SEQ ID NO: 9706 - DNA, 50 bp, synthetic construct
  source 1..50: mol_type = other DNA
aaaccaccaacacaaaataaaatcaattacaacacaatttttttcaaaac

SEQ ID NO: 9707 - DNA, 50 bp, synthetic construct
  source 1..50: mol_type = other DNA
acaaaattaaataaattaatatacccracacataatacaaactactctac

SEQ ID NO: 9708 - DNA, 50 bp, synthetic construct
  source 1..50: mol_type = other DNA
taaaaattaaaaaatttcctaaaatcacatatactcraaatatcccaacc

SEQ ID NO: 9709 - DNA, 50 bp, synthetic construct
  source 1..50: mol_type = other DNA
tacctaaaatatcactatataaaaaaccatttcaacaacatactacccac

SEQ ID NO: 9710 - DNA, 50 bp, synthetic construct
  source 1..50: mol_type = other DNA
tcaacataactcctactttaaaaacatcttataactcaattttctatctc

SEQ ID NO: 9711 - DNA, 50 bp, synthetic construct
  source 1..50: mol_type = other DNA
ctactaaaaacaactataaaaaaacaactcactacacctcaaaaatcaac

SEQ ID NO: 9712 - DNA, 50 bp, synthetic construct
  source 1..50: mol_type = other DNA
tttatttccaaaataatacaacaaaaaaacctttaactacttataatccc

SEQ ID NO: 9713 - DNA, 50 bp, synthetic construct
  source 1..50: mol_type = other DNA
aacaaaaaaacctttaactacttataatcccrtataatcaccatcaccac

SEQ ID NO: 9714 - DNA, 50 bp, synthetic construct
  source 1..50: mol_type = other DNA
tcaccacraaatattaaaaatctattttctcttttactaaatatctacac

SEQ ID NO: 9715 - DNA, 50 bp, synthetic construct
  source 1..50: mol_type = other DNA
ctcaatactcaacaaataatacratttaaaactcrcttattccctataac

SEQ ID NO: 9716 - DNA, 50 bp, synthetic construct
  source 1..50: mol_type = other DNA
aatactaactaacttatccatatcctttctcaatactcaacaaataatac

SEQ ID NO: 9717 - DNA, 50 bp, synthetic construct
  source 1..50: mol_type = other DNA
ttctttctactttaatttttccattcaaaaacttacaaataaattcattc

SEQ ID NO: 9718 - DNA, 50 bp, synthetic construct
  source 1..50: mol_type = other DNA
aactaaaaatataactcctcratcataaaaacactaaatccatataattc

SEQ ID NO: 9719 - DNA, 50 bp, synthetic construct
  source 1..50: mol_type = other DNA
ccaacattattactcttttcraatcatataaacttaatattctcataacc

SEQ ID NO: 9720 - DNA, 50 bp, synthetic construct
  source 1..50: mol_type = other DNA
ccaaattcctaacacrtaacrtttaaaaataccataaaacrtttccactc

SEQ ID NO: 9721 - DNA, 50 bp, synthetic construct
  source 1..50: mol_type = other DNA
aaaaaacataccaaattcctaacacrtaacrtttaaaaataccataaaac

SEQ ID NO: 9722 - DNA, 50 bp, synthetic construct
  source 1..50: mol_type = other DNA
aaaaacataataaaatccacraataaaaacrttccataatattttcaaac

SEQ ID NO: 9723 - DNA, 50 bp, synthetic construct
  source 1..50: mol_type = other DNA
cataataaaatccacraataaaaacrttccataatattttcaaacrccac

SEQ ID NO: 9724 - DNA, 50 bp, synthetic construct
  source 1..50: mol_type = other DNA
aaaaacaattaaaaaaccaaaacrtccaacttctacctaccaaaaaactc

SEQ ID NO: 9725 - DNA, 50 bp, synthetic construct
  source 1..50: mol_type = other DNA
ctactaaaatctattacttcatttattttaaactcaatcttcttttcatc

SEQ ID NO: 9726 - DNA, 50 bp, synthetic construct
  source 1..50: mol_type = other DNA
aaatcaaaaaactacccaaataaacacattcaacrcacaaaattataaac

SEQ ID NO: 9727 - DNA, 50 bp, synthetic construct
  source 1..50: mol_type = other DNA
tttaataatttaaaacaacaaccattttattcccrctcacaattctatac

SEQ ID NO: 9728 - DNA, 50 bp, synthetic construct
  source 1..50: mol_type = other DNA
actatctataaaattctactaatcraaaacaactaaaaacttacaccttc

SEQ ID NO: 9729 - DNA, 50 bp, synthetic construct
  source 1..50: mol_type = other DNA
tcccaaaatctaatcaaaaaccaatcctttctttaaaatttacaaaattc

SEQ ID NO: 9730 - DNA, 50 bp, synthetic construct
  source 1..50: mol_type = other DNA
ctacacaaaaacataaattctaaaatacataactctttaaaaccatcttc

SEQ ID NO: 9731 - DNA, 50 bp, synthetic construct
  source 1..50: mol_type = other DNA
caaaactactaaatttatttatttctctttatttcaatcatacaaaatcc

SEQ ID NO: 9732 - DNA, 50 bp, synthetic construct
  source 1..50: mol_type = other DNA
ctttacccctaaatatctttctatctatatctacrtaaatatccctatcc

SEQ ID NO: 9733 - DNA, 50 bp, synthetic construct
  source 1..50: mol_type = other DNA
caatctatactattttattcttaccacrtacacatacttttttataaacc

SEQ ID NO: 9734 - DNA, 50 bp, synthetic construct
  source 1..50: mol_type = other DNA
aattatcrtttttcrctacaaaccaatctatactattttattcttaccac

SEQ ID NO: 9735 - DNA, 50 bp, synthetic construct
  source 1..50: mol_type = other DNA
taatataaactaatttataacraaaaacrataactacactacctctttcc

SEQ ID NO: 9736 - DNA, 50 bp, synthetic construct
  source 1..50: mol_type = other DNA
tatattcctccaaattttttaccactaaattccttcaaatcttaaatatc

SEQ ID NO: 9737 - DNA, 50 bp, synthetic construct
  source 1..50: mol_type = other DNA
ttaaacccatcataataaatttcataaatattaaaatatcaaacaaaacc

SEQ ID NO: 9738 - DNA, 50 bp, synthetic construct
  source 1..50: mol_type = other DNA
acccatcataataaatttcataaatattaaaatatcaaacaaaaccraac

SEQ ID NO: 9739 - DNA, 50 bp, synthetic construct
  source 1..50: mol_type = other DNA
caacttatttttctaaaaccaactacatacatataatttatattatatac

SEQ ID NO: 9740 - DNA, 50 bp, synthetic construct
  source 1..50: mol_type = other DNA
aactttctaaaaattaattacacaacaatatacctatatataatactacc

SEQ ID NO: 9741 - DNA, 50 bp, synthetic construct
  source 1..50: mol_type = other DNA
acacaacaatatacctatatataatactaccraactatacacttaaaaac

SEQ ID NO: 9742 - DNA, 50 bp, synthetic construct
  source 1..50: mol_type = other DNA
ctaacaatatcaattactctaaatcacaaaaaaatttaacttttcaactc

SEQ ID NO: 9743 - DNA, 50 bp, synthetic construct
  source 1..50: mol_type = other DNA
aaaacaaacaaataaataatatactccttaattttactcaatttttatac

SEQ ID NO: 9744 - DNA, 50 bp, synthetic construct
  source 1..50: mol_type = other DNA
taaacaccaaacattttcatatctaaataatcttatttcaaatcattatc

SEQ ID NO: 9745 - DNA, 50 bp, synthetic construct
  source 1..50: mol_type = other DNA
tcaatacaatataaattattacttaaattaaacaaaaatattccacaacc

SEQ ID NO: 9746 - DNA, 50 bp, synthetic construct
  source 1..50: mol_type = other DNA
acccaaatattatatatcaaaaaacaaaacaacacctccaataaatcacc

SEQ ID NO: 9747 - DNA, 50 bp, synthetic construct
  source 1..50: mol_type = other DNA
tactctaataataatttattttactacacaaaaactctttaatttaattc

SEQ ID NO: 9748 - DNA, 50 bp, synthetic construct
  source 1..50: mol_type = other DNA
tcttctacrtcactcatactaaaaactataaaccraaactattcctattc

SEQ ID NO: 9749 - DNA, 50 bp, synthetic construct
  source 1..50: mol_type = other DNA
caaaatctaccaaaaacttaaacaaaaaataaccraacaaaaacaactcc

SEQ ID NO: 9750 - DNA, 50 bp, synthetic construct
  source 1..50: mol_type = other DNA
tacataataaactacacccactatctaacactccctaataacataaactc

SEQ ID NO: 9751 - DNA, 50 bp, synthetic construct
  source 1..50: mol_type = other DNA
atatcattaaaaaataccaaacaataaatacaacccaccatacacraacc

SEQ ID NO: 9752 - DNA, 50 bp, synthetic construct
  source 1..50: mol_type = other DNA
cttcraaaaatcrcaatattaaaataaaataacccrattttccaaatacc

SEQ ID NO: 9753 - DNA, 50 bp, synthetic construct
  source 1..50: mol_type = other DNA
rccattttttaaacccttcraaaaatcrcaatattaaaataaaataaccc

SEQ ID NO: 9754 - DNA, 50 bp, synthetic construct
  source 1..50: mol_type = other DNA
tacraaaaataatctcctaatacrccattttttaaacccttcraaaaatc

SEQ ID NO: 9755 - DNA, 50 bp, synthetic construct
  source 1..50: mol_type = other DNA
aaaccaaatacraaaaataatctcctaatacrccattttttaaacccttc

SEQ ID NO: 9756 - DNA, 50 bp, synthetic construct
  source 1..50: mol_type = other DNA
raatcactccaccctaatactacrattttccraaaaacttaaaaaataac

SEQ ID NO: 9757 - DNA, 50 bp, synthetic construct
  source 1..50: mol_type = other DNA
tacrattttccraaaaacttaaaaaataacrcaccaaaaaattatctccc

SEQ ID NO: 9758 - DNA, 50 bp, synthetic construct
  source 1..50: mol_type = other DNA
atacraacttccaaactactttatttacctaaacaaacctaaacaataac

SEQ ID NO: 9759 - DNA, 50 bp, synthetic construct
  source 1..50: mol_type = other DNA
aaaaaccaaaaaattacacaactaaaactctaacctaaaaataataaaac

SEQ ID NO: 9760 - DNA, 50 bp, synthetic construct
  source 1..50: mol_type = other DNA
aaataaattttattaaaacaactttcacttcaacaataaacaaaaaattc

SEQ ID NO: 9761 - DNA, 50 bp, synthetic construct
  source 1..50: mol_type = other DNA
ctactaaatactccctacaaaatactaattcatttaaaatacttcctacc

SEQ ID NO: 9762 - DNA, 50 bp, synthetic construct
  source 1..50: mol_type = other DNA
aaaatactaattcatttaaaatacttcctaccrttctacaattaaacttc

SEQ ID NO: 9763 - DNA, 50 bp, synthetic construct
  source 1..50: mol_type = other DNA
crataattcaaatataaatttttcaaaaaccatttctcaaaaacaactac

SEQ ID NO: 9764 - DNA, 50 bp, synthetic construct
  source 1..50: mol_type = other DNA
aaataaaaaataaacccrcrtctaaaatttactttccrttaacctctccc

SEQ ID NO: 9765 - DNA, 50 bp, synthetic construct
  source 1..50: mol_type = other DNA
taaatccaaaatattcaacraaaaaaatcaacraaaaacaaatcccaaac

SEQ ID NO: 9766 - DNA, 50 bp, synthetic construct
  source 1..50: mol_type = other DNA
crttcctaaacrctactcaacaaaacattatactcraaaaccccaaaaac

SEQ ID NO: 9767 - DNA, 50 bp, synthetic construct
  source 1..50: mol_type = other DNA
aattaaacctaaatcaaaacrcratcraatttctctctatcaaacaaaac

SEQ ID NO: 9768 - DNA, 50 bp, synthetic construct
  source 1..50: mol_type = other DNA
raaatttcraaattcctaatacaaacaaaatccraaacaaccraaaaacc

SEQ ID NO: 9769 - DNA, 50 bp, synthetic construct
  source 1..50: mol_type = other DNA
ataacaaataaaattaccaaaactcaaatcrctcracctaataacracac

SEQ ID NO: 9770 - DNA, 50 bp, synthetic construct
  source 1..50: mol_type = other DNA
ccraaataacaaataaaattaccaaaactcaaatcrctcracctaataac

SEQ ID NO: 9771 - DNA, 50 bp, synthetic construct
  source 1..50: mol_type = other DNA
acaaccttttcctattattcctattacataattattctccttccctaccc

SEQ ID NO: 9772 - DNA, 50 bp, synthetic construct
  source 1..50: mol_type = other DNA
tataaccttacaaacatcaaaaaaaaactctataatcacrttactaacrc

SEQ ID NO: 9773 - DNA, 50 bp, synthetic construct
  source 1..50: mol_type = other DNA
cttataaccttacaaacatcaaaaaaaaactctataatcacrttactaac

SEQ ID NO: 9774 - DNA, 50 bp, synthetic construct
  source 1..50: mol_type = other DNA
acrtttcaacttataaccttacaaacatcaaaaaaaaactctataatcac

SEQ ID NO: 9775 - DNA, 50 bp, synthetic construct
  source 1..50: mol_type = other DNA
acrtaactacaaaattttttcttaatacttacaaaatcataaattaaaac

SEQ ID NO: 9776 - DNA, 50 bp, synthetic construct
  source 1..50: mol_type = other DNA
caactattaaaacttaacttttatttatacacatttccaaaaaaataatc

SEQ ID NO: 9777 - DNA, 50 bp, synthetic construct
  source 1..50: mol_type = other DNA
ttaacttttatttatacacatttccaaaaaaataatcrcaactaaaaaac

SEQ ID NO: 9778 - DNA, 50 bp, synthetic construct
  source 1..50: mol_type = other DNA
aatacaaaaatatttactcttaaaaaaacttacttaatataccccracrc

SEQ ID NO: 9779 - DNA, 50 bp, synthetic construct
  source 1..50: mol_type = other DNA
acaatacaaaaatatttactcttaaaaaaacttacttaatataccccrac

SEQ ID NO: 9780 - DNA, 50 bp, synthetic construct
  source 1..50: mol_type = other DNA
ctcacaatacaaaaatatttactcttaaaaaaacttacttaatatacccc

SEQ ID NO: 9781 - DNA, 50 bp, synthetic construct
  source 1..50: mol_type = other DNA
actaaatctatctctataataatacttctaaactacrcaacttcctcttc

SEQ ID NO: 9782 - DNA, 50 bp, synthetic construct
  source 1..50: mol_type = other DNA
aaaatctacatataactacaaaacctctatcaaaaaataaaacactcatc

SEQ ID NO: 9783 - DNA, 50 bp, synthetic construct
  source 1..50: mol_type = other DNA
tatatattccaacaactcttttcacctcatactacctctaacatcccttc

SEQ ID NO: 9784 - DNA, 50 bp, synthetic construct
  source 1..50: mol_type = other DNA
attaaccaaaccratctcaaactcctaatctcaaataatctatctacctc

SEQ ID NO: 9785 - DNA, 50 bp, synthetic construct
  source 1..50: mol_type = other DNA
aacacaaaaatatacatattactttcataaaaaaaattcatcataaaacc

SEQ ID NO: 9786 - DNA, 50 bp, synthetic construct
  source 1..50: mol_type = other DNA
ataacacttcccaccttataacaatctttataattcaaaatcaaccctcc

SEQ ID NO: 9787 - DNA, 50 bp, synthetic construct
  source 1..50: mol_type = other DNA
aacrtatacctataattccaaatactctaaaaactaaaaccaaaaattac

SEQ ID NO: 9788 - DNA, 50 bp, synthetic construct
  source 1..50: mol_type = other DNA
aacrtaactcctaacctcaacctccaaaatacctaaaactataaatacac

SEQ ID NO: 9789 - DNA, 50 bp, synthetic construct
  source 1..50: mol_type = other DNA
aatacacacccaaaaaaatcacaaaaatctaatacatatataattttcac

SEQ ID NO: 9790 - DNA, 50 bp, synthetic construct
  source 1..50: mol_type = other DNA
attctaacttttacataaaaaaacaataatcaaaaaataaactctcaacc

SEQ ID NO: 9791 - DNA, 50 bp, synthetic construct
  source 1..50: mol_type = other DNA
aaacaaaatcctaaaacataaaaacctcrcccaaacctaaaataaaaaac

SEQ ID NO: 9792 - DNA, 50 bp, synthetic construct
  source 1..50: mol_type = other DNA
tttcttctatttcctctaaaaaataattacacrctcaattcaaaattcac

SEQ ID NO: 9793 - DNA, 50 bp, synthetic construct
  source 1..50: mol_type = other DNA
tctacctttccattttacatcaaacratcaattaactacctcaactatcc

SEQ ID NO: 9794 - DNA, 50 bp, synthetic construct
  source 1..50: mol_type = other DNA
ataaaaatttcraaaaacaaaaacacctaactccraaactccractcttc

SEQ ID NO: 9795 - DNA, 50 bp, synthetic construct
  source 1..50: mol_type = other DNA
ctacaaacactaaataaaacaacctataaaaataactcaactcccrcrac

SEQ ID NO: 9796 - DNA, 50 bp, synthetic construct
  source 1..50: mol_type = other DNA
aaactacaaacactaaataaaacaacctataaaaataactcaactcccrc

SEQ ID NO: 9797 - DNA, 50 bp, synthetic construct
  source 1..50: mol_type = other DNA
taaactactcttacaaattattttacccaatacttacaactttaaattac

SEQ ID NO: 9798 - DNA, 50 bp, synthetic construct
  source 1..50: mol_type = other DNA
cattaaacctttcaattccacaaatacccataaattccctctatatatac

SEQ ID NO: 9799 - DNA, 50 bp, synthetic construct
  source 1..50: mol_type = other DNA
aataaaacacaattttcttccaaaattattttactattaaaaaatcaatc

SEQ ID NO: 9800 - DNA, 50 bp, synthetic construct
  source 1..50: mol_type = other DNA
aaatttttccttaatcacaataatatccattacctaaaataaaataaacc

SEQ ID NO: 9801 - DNA, 50 bp, synthetic construct
  source 1..50: mol_type = other DNA
rataaaaacttaccacrcaacaaatatacaacaaaattaaaaatcaaatc

SEQ ID NO: 9802 - DNA, 50 bp, synthetic construct
  source 1..50: mol_type = other DNA
tccttaaaataatctctcaaaaataaaaatacacacaaatataccaaaac

SEQ ID NO: 9803 - DNA, 50 bp, synthetic construct
  source 1..50: mol_type = other DNA
caaaaaatcatatcaaaaatttataacataaaccraatacaataactcac

SEQ ID NO: 9804 - DNA, 50 bp, synthetic construct
  source 1..50: mol_type = other DNA
caataataaattataactataccactctactacaacttaaataacaaaac

SEQ ID NO: 9805 - DNA, 50 bp, synthetic construct
  source 1..50: mol_type = other DNA
tcaaataatccttttacctcaaccttttaaataactaaaatcacaaatac

SEQ ID NO: 9806 - DNA, 50 bp, synthetic construct
  source 1..50: mol_type = other DNA
raactactcctaataaatcataataatacaaccactttataaataatttc

SEQ ID NO: 9807 - DNA, 50 bp, synthetic construct
  source 1..50: mol_type = other DNA
raaattatttacaaaataattatatcattataacttaccaaaaataatcc

SEQ ID NO: 9808 - DNA, 50 bp, synthetic construct
  source 1..50: mol_type = other DNA
aacracacaaaatttcatcacactactcaaaataacacataatttaaaac

SEQ ID NO: 9809 - DNA, 50 bp, synthetic construct
  source 1..50: mol_type = other DNA
acttctcraaaattaaaaatcaaaaacccacttaaaaaaacaatctaccc

SEQ ID NO: 9810 - DNA, 50 bp, synthetic construct
  source 1..50: mol_type = other DNA
taaatatccctatctaacaactttaaaaaaaacactaacactcccaacac

SEQ ID NO: 9811 - DNA, 50 bp, synthetic construct
  source 1..50: mol_type = other DNA
taccttacaatttaatctcaatctactatactaacaatcaacratactcc

SEQ ID NO: 9812 - DNA, 50 bp, synthetic construct
  source 1..50: mol_type = other DNA
tatacttttccraaaaacttaaaaaacaacrcaccacraaattatatccc

SEQ ID NO: 9813 - DNA, 50 bp, synthetic construct
  source 1..50: mol_type = other DNA
aatcactcccacccaaatactatacttttccraaaaacttaaaaaacaac

SEQ ID NO: 9814 - DNA, 50 bp, synthetic construct
  source 1..50: mol_type = other DNA
ctattttttaaacccctcraaaaaacacaatatttaaataaaaataaccc

SEQ ID NO: 9815 - DNA, 50 bp, synthetic construct
  source 1..50: mol_type = other DNA
aaaaaacacaatatttaaataaaaataacccrattttccaaataccrtcc

SEQ ID NO: 9816 - DNA, 50 bp, synthetic construct
  source 1..50: mol_type = other DNA
ctcactaaaaaaaaccaaatcrtaaacrcaaatcaataaatacrcacacc

SEQ ID NO: 9817 - DNA, 50 bp, synthetic construct
  source 1..50: mol_type = other DNA
aattcatctcactaaaaaaaaccaaatcrtaaacrcaaatcaataaatac

SEQ ID NO: 9818 - DNA, 50 bp, synthetic construct
  source 1..50: mol_type = other DNA
tccatctaaaatactaaattcatctcactaaaaaaaaccaaatcrtaaac

SEQ ID NO: 9819 - DNA, 50 bp, synthetic construct
  source 1..50: mol_type = other DNA
tacatttccatctaaaatactaaattcatctcactaaaaaaaaccaaatc

SEQ ID NO: 9820 - DNA, 50 bp, synthetic construct
  source 1..50: mol_type = other DNA
aaaaaaccaaaataaccraataaaaacaactcccrtctacaaatcccaac

SEQ ID NO: 9821 - DNA, 50 bp, synthetic construct
  source 1..50: mol_type = other DNA
tcttctatatcrctcacrctaaaatctataaacraaaactattcctattc

SEQ ID NO: 9822 - DNA, 50 bp, synthetic construct
  source 1..50: mol_type = other DNA
aaactataatacaataacrtaatcttaactcactaaaaactctacctccc

SEQ ID NO: 9823 - DNA, 50 bp, synthetic construct
  source 1..50: mol_type = other DNA
aaaacraaattttaccatattaaccaaaataatctccatctcctaacctc

SEQ ID NO: 9824 - DNA, 50 bp, synthetic construct
  source 1..50: mol_type = other DNA
aaaaataactttctcaacaaataaaactaaaacaactaaatattcatacc

SEQ ID NO: 9825 - DNA, 50 bp, synthetic construct
  source 1..50: mol_type = other DNA
taaattctaattatataaaacttccaaaatttttaccctttttaaaaacc

SEQ ID NO: 9826 - DNA, 50 bp, synthetic construct
  source 1..50: mol_type = other DNA
tttttttcttctttcttttaaaacaaactttcactctattacccaaactc

SEQ ID NO: 9827 - DNA, 50 bp, synthetic construct
  source 1..50: mol_type = other DNA
ttaaaacaaactttcactctattacccaaactcraatataataaacaatc

SEQ ID NO: 9828 - DNA, 50 bp, synthetic construct
  source 1..50: mol_type = other DNA
taaacataaattccctaacaaatattattaaactaaataactaatacccc

SEQ ID NO: 9829 - DNA, 50 bp, synthetic construct
  source 1..50: mol_type = other DNA
actatcattaattattctaataccctccataaatatctcrtaatataacc

SEQ ID NO: 9830 - DNA, 50 bp, synthetic construct
  source 1..50: mol_type = other DNA
cttttaataaaactatcattaattattctaataccctccataaatatctc

SEQ ID NO: 9831 - DNA, 50 bp, synthetic construct
  source 1..50: mol_type = other DNA
acaaataaaattctcacaataacaaatcctttaaaattaacctacttctc

SEQ ID NO: 9832 - DNA, 50 bp, synthetic construct
  source 1..50: mol_type = other DNA
tcaccrtatttcctaaaaacaaattctttataaaaaactttattaaaacc

SEQ ID NO: 9833 - DNA, 50 bp, synthetic construct
  source 1..50: mol_type = other DNA
actattaatacrtatcaaaacaaaatacaccatttcctatttttctttac

SEQ ID NO: 9834 - DNA, 50 bp, synthetic construct
  source 1..50: mol_type = other DNA
cctcctaaaatactaaaattataaacataaatcaccatacccaaccaccc

SEQ ID NO: 9835 - DNA, 50 bp, synthetic construct
  source 1..50: mol_type = other DNA
tttataaaaaatcatattttcaccctaaaaaactatcatataaaactctc

SEQ ID NO: 9836 - DNA, 50 bp, synthetic construct
  source 1..50: mol_type = other DNA
caacaccccataaaaaatacttttcaaaaattaaaaaaaatcaaccaaac

SEQ ID NO: 9837 - DNA, 50 bp, synthetic construct
  source 1..50: mol_type = other DNA
caaaattcaaatatcattcctttacttacctaataactacaataacaaac

SEQ ID NO: 9838 - DNA, 50 bp, synthetic construct
  source 1..50: mol_type = other DNA
aacaaaatacttttcctacraatttaaaacaaacaaactatttcctttcc

SEQ ID NO: 9839 - DNA, 50 bp, synthetic construct
  source 1..50: mol_type = other DNA
cctcttacatttccacaaaacaatcaaataaaacaaaatacttttcctac

SEQ ID NO: 9840 - DNA, 50 bp, synthetic construct
  source 1..50: mol_type = other DNA
ataaaatcaactcaaaaaaccctacacacttccacaatttaaaaaaaacc

SEQ ID NO: 9841 - DNA, 50 bp, synthetic construct
  source 1..50: mol_type = other DNA
ttataaaaatatacaaaaccctttaaactaattccataaaataaatactc

SEQ ID NO: 9842 - DNA, 50 bp, synthetic construct
  source 1..50: mol_type = other DNA
aattttcatatatcttacactctatcaaaaaacaaccctacaatataatc

SEQ ID NO: 9843 - DNA, 50 bp, synthetic construct
  source 1..50: mol_type = other DNA
aaattaatacaatttttctacttatcatataactcctaaaacaataatac

SEQ ID NO: 9844 - DNA, 50 bp, synthetic construct
  source 1..50: mol_type = other DNA
acaatttttctacttatcatataactcctaaaacaataatacraaaaacc

SEQ ID NO: 9845 - DNA, 50 bp, synthetic construct
  source 1..50: mol_type = other DNA
aaaataaaaaaactacctccctaaaaaaaattatatccaaaattaatacc

SEQ ID NO: 9846 - DNA, 50 bp, synthetic construct
  source 1..50: mol_type = other DNA
aaaaaatcatttattccccataacaacatatctcatttttaaattaaaac

SEQ ID NO: 9847 - DNA, 50 bp, synthetic construct
  source 1..50: mol_type = other DNA
atactacactaaaaatactaaacccaatattaactaaaatcaacatttcc

SEQ ID NO: 9848 - DNA, 50 bp, synthetic construct
  source 1..50: mol_type = other DNA
aatttaacatttccaatacaacattatcaataaacctttaaaaatacttc

SEQ ID NO: 9849 - DNA, 50 bp, synthetic construct
  source 1..50: mol_type = other DNA
accraaaacacaaaatttccttcrtctttatcaattttataaatatttac

SEQ ID NO: 9850 - DNA, 50 bp, synthetic construct
  source 1..50: mol_type = other DNA
tttaaatttatatataatatactttaaaccraaaacacaaaatttccttc

SEQ ID NO: 9851 - DNA, 50 bp, synthetic construct
  source 1..50: mol_type = other DNA
cccttttaaaactaaaatcaaaaactttcaatattattctaaattaaaac

SEQ ID NO: 9852 - DNA, 50 bp, synthetic construct
  source 1..50: mol_type = other DNA
cctcaaacacctaacacaaacatacaaaataataacacaacaattaatac

SEQ ID NO: 9853 - DNA, 50 bp, synthetic construct
  source 1..50: mol_type = other DNA
aactacaataaactataatcattccactacattctaatctaattaacaac

SEQ ID NO: 9854 - DNA, 50 bp, synthetic construct
  source 1..50: mol_type = other DNA
aatttcatccttaaacaaacatcactaaatataactacaaaaacctaaac

SEQ ID NO: 9855 - DNA, 50 bp, synthetic construct
  source 1..50: mol_type = other DNA
taacaaaccacataaataacatcaaattttactacctatttttactatac

SEQ ID NO: 9856 - DNA, 50 bp, synthetic construct
  source 1..50: mol_type = other DNA
atatttttatataatctatacacatccttccatatacaatcatatattac

SEQ ID NO: 9857 - DNA, 50 bp, synthetic construct
  source 1..50: mol_type = other DNA
aaaaacttaatttcaaaaccccctacaaatactaaaattcraaaatattc

SEQ ID NO: 9858 - DNA, 50 bp, synthetic construct
  source 1..50: mol_type = other DNA
caatatccataaaaacttaatttcaaaaccccctacaaatactaaaattc

SEQ ID NO: 9859 - DNA, 50 bp, synthetic construct
  source 1..50: mol_type = other DNA
ctaatcatatcacataccacacaatccaaaaacaactaacctcacaaaac

SEQ ID NO: 9860 - DNA, 50 bp, synthetic construct
  source 1..50: mol_type = other DNA
ctaaacccttaataatcattcttctcaaactaatactaaaatatatatcc

SEQ ID NO: 9861 - DNA, 50 bp, synthetic construct
  source 1..50: mol_type = other DNA
tccttaccraaaacttctaaatatcrttaaaaaaacaccattactaaatc

SEQ ID NO: 9862 - DNA, 50 bp, synthetic construct
  source 1..50: mol_type = other DNA
tcatattacccaactcaaaaaatacracttaataataatactttcttaac

SEQ ID NO: 9863 - DNA, 50 bp, synthetic construct
  source 1..50: mol_type = other DNA
aaaaatacracttaataataatactttcttaacracactcaaaaaccccc

SEQ ID NO: 9864 - DNA, 50 bp, synthetic construct
  source 1..50: mol_type = other DNA
acttaataataatactttcttaacracactcaaaaacccccracaaaaac

SEQ ID NO: 9865 - DNA, 50 bp, synthetic construct
  source 1..50: mol_type = other DNA
taataatactttcttaacracactcaaaaacccccracaaaaacraatac

SEQ ID NO: 9866 - DNA, 50 bp, synthetic construct
  source 1..50: mol_type = other DNA
ctactaaaaatctattcrcttaaatctcttccctaacccaaacccttatc

SEQ ID NO: 9867 - DNA, 50 bp, synthetic construct
  source 1..50: mol_type = other DNA
aacraacaaattcccaataacaaatacraaactctaacaaaaaaacaatc

SEQ ID NO: 9868 - DNA, 50 bp, synthetic construct
  source 1..50: mol_type = other DNA
raacaaattcccaataacaaatacraaactctaacaaaaaaacaatcrcc

SEQ ID NO: 9869 - DNA, 50 bp, synthetic construct
  source 1..50: mol_type = other DNA
ctaaactataaaacrcacataaaaatcaaccaacctcacctcraaaatcc

SEQ ID NO: 9870 - DNA, 50 bp, synthetic construct
  source 1..50: mol_type = other DNA
atataaataaactataacrtaaactactaaaaacaaactacraaataccc

SEQ ID NO: 9871 - DNA, 50 bp, synthetic construct
  source 1..50: mol_type = other DNA
caattttaacrtcacaataaaattactcccttaaacrtttcttaacrtac

SEQ ID NO: 9872 - DNA, 50 bp, synthetic construct
  source 1..50: mol_type = other DNA
rccccaattttaacrtcacaataaaattactcccttaaacrtttcttaac

SEQ ID NO: 9873 - DNA, 50 bp, synthetic construct
  source 1..50: mol_type = other DNA
craaaccacaacrccaaaacaaaccccrtaactaatttaaataaaatctc

SEQ ID NO: 9874 - DNA, 50 bp, synthetic construct
  source 1..50: mol_type = other DNA
ccraaaacrcrctaaaaacctaaacaaaaataacattttaaaacaaaacc

SEQ ID NO: 9875 - DNA, 50 bp, synthetic construct
  source 1..50: mol_type = other DNA
cacaccctaaacttccraatttaaacacaacaattctctccaatcaaaac

SEQ ID NO: 9876 - DNA, 50 bp, synthetic construct
  source 1..50: mol_type = other DNA
ctattatacccaaatccraaaacccaaaatataaccaaatccractttac

SEQ ID NO: 9877 - DNA, 50 bp, synthetic construct
  source 1..50: mol_type = other DNA
tctcctctacaacttctactaccractttaaatatacraaaataaaaacc

SEQ ID NO: 9878 - DNA, 50 bp, synthetic construct
  source 1..50: mol_type = other DNA
tacaacttctactaccractttaaatatacraaaataaaaaccrccattc

SEQ ID NO: 9879 - DNA, 50 bp, synthetic construct
  source 1..50: mol_type = other DNA
tttcraataaatcaaacacttctctatcracaactttcacaaaaaatctc

SEQ ID NO: 9880 - DNA, 50 bp, synthetic construct
  source 1..50: mol_type = other DNA
ctaaatctaattttttaactcaaaaataatcrtaaactaaccrcracacc

SEQ ID NO: 9881 - DNA, 50 bp, synthetic construct
  source 1..50: mol_type = other DNA
crcaatctaaatctaattttttaactcaaaaataatcrtaaactaaccrc

SEQ ID NO: 9882 - DNA, 50 bp, synthetic construct
  source 1..50: mol_type = other DNA
aacrcaatctaaatctaattttttaactcaaaaataatcrtaaactaacc

SEQ ID NO: 9883 - DNA, 50 bp, synthetic construct
  source 1..50: mol_type = other DNA
crcraccaactcacrattacctttaaatcaaaaaactaaatttaaactac

SEQ ID NO: 9884 - DNA, 50 bp, synthetic construct
  source 1..50: mol_type = other DNA
aaaatataaaaaatattacaaaaattaccactcraatcccaaccctaaac

SEQ ID NO: 9885 - DNA, 50 bp, synthetic construct
  source 1..50: mol_type = other DNA
taacaacttttacaatactttttacattctaatctacttcccaacaaacc

SEQ ID NO: 9886 - DNA, 50 bp, synthetic construct
  source 1..50: mol_type = other DNA
ccccaaaaccaacaaaaaacaatccttaaatcattaccratcccaaaaac

SEQ ID NO: 9887 - DNA, 50 bp, synthetic construct
  source 1..50: mol_type = other DNA
aatttaaacaaaccccaaaaccaacaaaaaacaatccttaaatcattacc

SEQ ID NO: 9888 - DNA, 50 bp, synthetic construct
  source 1..50: mol_type = other DNA
tctatttcacctttctctaaaataataataattactatacctaacataac

SEQ ID NO: 9889 - DNA, 50 bp, synthetic construct
  source 1..50: mol_type = other DNA
ctatacctaacataacrataacttcatcttctccattttctaaaaaatac

SEQ ID NO: 9890 - DNA, 50 bp, synthetic construct
  source 1..50: mol_type = other DNA
crctattaactctcccrtacrattaacaaaaactataataattaacaaac

SEQ ID NO: 9891 - DNA, 50 bp, synthetic construct
  source 1..50: mol_type = other DNA
cctctaaaccatatcttatcrtttaccaactaccacaatccttactaacc

SEQ ID NO: 9892 - DNA, 50 bp, synthetic construct
  source 1..50: mol_type = other DNA
aactaattttttccattacaaaaaacttatataacrctattaactctccc

SEQ ID NO: 9893 - DNA, 50 bp, synthetic construct
  source 1..50: mol_type = other DNA
crtttaccaactaccacaatccttactaaccrtacraaaaaaccaataac

SEQ ID NO: 9894 - DNA, 50 bp, synthetic construct
  source 1..50: mol_type = other DNA
ttattaattcctttttttctcactctatcaacaaactataatacaataac

SEQ ID NO: 9895 - DNA, 50 bp, synthetic construct
  source 1..50: mol_type = other DNA
acaaacaaaacaaacacaaaactataacaaaaaatatcaataactaccac

SEQ ID NO: 9896 - DNA, 50 bp, synthetic construct
  source 1..50: mol_type = other DNA
aacattttcacrtctaattttcaaaaatataaaatctactacataattac

SEQ ID NO: 9897 - DNA, 50 bp, synthetic construct
  source 1..50: mol_type = other DNA
acrtaaatttacaaaactctcaaatcactcatataaaaaaacattttcac

SEQ ID NO: 9898 - DNA, 50 bp, synthetic construct
  source 1..50: mol_type = other DNA
ttaaataaacaactactttctatttctaaacaaaaattaactttaaatac

SEQ ID NO: 9899 - DNA, 50 bp, synthetic construct
  source 1..50: mol_type = other DNA
aataaccctaaactcaaatttcacatttctccttcrataacattaaaatc

SEQ ID NO: 9900 - DNA, 50 bp, synthetic construct
  source 1..50: mol_type = other DNA
accctaaactcaaatttcacatttctccttcrataacattaaaatcrctc

SEQ ID NO: 9901 - DNA, 50 bp, synthetic construct
  source 1..50: mol_type = other DNA
rataacattaaaatcrctcratccrattactacacacctccaattttaac

SEQ ID NO: 9902 - DNA, 50 bp, synthetic construct
  source 1..50: mol_type = other DNA
ttactacacacctccaattttaacrtccaaaaaacctaaaaaaacracac

SEQ ID NO: 9903 - DNA, 50 bp, synthetic construct
  source 1..50: mol_type = other DNA
cccaactctactcrataccaaaaaaacrtataaacccaaaatctcaaacc

SEQ ID NO: 9904 - DNA, 50 bp, synthetic construct
  source 1..50: mol_type = other DNA
tataaacccaaaatctcaaaccrcratactaaatccraaaaaacaaaatc

SEQ ID NO: 9905 - DNA, 50 bp, synthetic construct
  source 1..50: mol_type = other DNA
ataaccttataaactccraactccaaaaatattaaaaccttcratattcc

SEQ ID NO: 9906 - DNA, 50 bp, synthetic construct
  source 1..50: mol_type = other DNA
craaaccrataaccttataaactccraactccaaaaatattaaaaccttc

SEQ ID NO: 9907 - DNA, 50 bp, synthetic construct
  source 1..50: mol_type = other DNA
taacccctacrctattccaaaaactcttcaacaaaaaaaccraactaaac

SEQ ID NO: 9908 - DNA, 50 bp, synthetic construct
  source 1..50: mol_type = other DNA
atcctcttactaaaaaacttctaaaacaacrtaaaaaccatactaaccac

SEQ ID NO: 9909 - DNA, 50 bp, synthetic construct
  source 1..50: mol_type = other DNA
aacttctaaaacaacrtaaaaaccatactaaccacraccaaacaaaaatc

SEQ ID NO: 9910 - DNA, 50 bp, synthetic construct
  source 1..50: mol_type = other DNA
ctaaaacaacrtaaaaaccatactaaccacraccaaacaaaaatcrctcc

SEQ ID NO: 9911 - DNA, 50 bp, synthetic construct
  source 1..50: mol_type = other DNA
aacrcccataaaaataacraaacractataaaaacaaaaacctaacaaac

SEQ ID NO: 9912 - DNA, 50 bp, synthetic construct
  source 1..50: mol_type = other DNA
aataactaatttctatcatataactaaaacrcccataaaaataacraaac

SEQ ID NO: 9913 - DNA, 50 bp, synthetic construct
  source 1..50: mol_type = other DNA
caaaactaaactttaaacccaaaaccccaaaaccrcccttaaaaaactac

SEQ ID NO: 9914 - DNA, 50 bp, synthetic construct
  source 1..50: mol_type = other DNA
tcaaaattctaaacrctaatacaaactacccrcaatacctactcraaatc

SEQ ID NO: 9915 - DNA, 50 bp, synthetic construct
  source 1..50: mol_type = other DNA
aaaaaactaattcccratatcaaaattctaaacrctaatacaaactaccc

SEQ ID NO: 9916 - DNA, 50 bp, synthetic construct
  source 1..50: mol_type = other DNA
caatcrctaactcttccaaaaaactaattcccratatcaaaattctaaac

SEQ ID NO: 9917 - DNA, 50 bp, synthetic construct
  source 1..50: mol_type = other DNA
ctaattttattaattaacaaaaaaacaacctaactcctaaacctccaatc

SEQ ID NO: 9918 - DNA, 50 bp, synthetic construct
  source 1..50: mol_type = other DNA
caaaaattaaactatttccttattaaccaacaaaatcaaataaaaccaac

SEQ ID NO: 9919 - DNA, 50 bp, synthetic construct
  source 1..50: mol_type = other DNA
acttccatcataaaaaaaataacattttattcttactaaaacaaaccctc

SEQ ID NO: 9920 - DNA, 50 bp, synthetic construct
  source 1..50: mol_type = other DNA
ctaaataacattcacatactcccaaaactacrtactaaaactaaacraac

SEQ ID NO: 9921 - DNA, 50 bp, synthetic construct
  source 1..50: mol_type = other DNA
cctcctaaataacattcacatactcccaaaactacrtactaaaactaaac

SEQ ID NO: 9922 - DNA, 50 bp, synthetic construct
  source 1..50: mol_type = other DNA
cctatcccctaataactcctaaccattaaatactaaatctacccataacc

SEQ ID NO: 9923 - DNA, 50 bp, synthetic construct
  source 1..50: mol_type = other DNA
tctataatcaacactatctcaacaaaacttaatctcraaacacaataaac

SEQ ID NO: 9924 - DNA, 50 bp, synthetic construct
  source 1..50: mol_type = other DNA
aatcacttcataaaacaaaaactataaatttaaaacrctcactatacccc

SEQ ID NO: 9925 - DNA, 50 bp, synthetic construct
  source 1..50: mol_type = other DNA
taaaataaaaatcacctccttccctaaaactaaactcctctccaaatacc

SEQ ID NO: 9926 - DNA, 50 bp, synthetic construct
  source 1..50: mol_type = other DNA
cttccctaaaactaaactcctctccaaataccrctaaaaataacctaaac

SEQ ID NO: 9927 - DNA, 50 bp, synthetic construct
  source 1..50: mol_type = other DNA
aaacacaaactaaatccaatcataaaccctaccctatccataacaaacac

SEQ ID NO: 9928 - DNA, 50 bp, synthetic construct
  source 1..50: mol_type = other DNA
atcctatactcaaaaaaaacacaacraaaacrtacttaaactatccatac

SEQ ID NO: 9929 - DNA, 50 bp, synthetic construct
  source 1..50: mol_type = other DNA
accctaaaaaacttcaaatatccaaattactaaatataaacaactttccc

SEQ ID NO: 9930 - DNA, 50 bp, synthetic construct
  source 1..50: mol_type = other DNA
ccttctatataccaaaaaccrcaaacaattactaacccaataaaacaaac

SEQ ID NO: 9931 - DNA, 50 bp, synthetic construct
  source 1..50: mol_type = other DNA
tcccactaaattaacaactacttacratttctaacacacaaaaaaatccc

SEQ ID NO: 9932 - DNA, 50 bp, synthetic construct
  source 1..50: mol_type = other DNA
taaaaccaacrttatttttccttaacaactacraaaacccrtaataattc

SEQ ID NO: 9933 - DNA, 50 bp, synthetic construct
  source 1..50: mol_type = other DNA
aacatccttataaaaccaacrttatttttccttaacaactacraaaaccc

SEQ ID NO: 9934 - DNA, 50 bp, synthetic construct
  source 1..50: mol_type = other DNA
ctcccccaaacatccttataaaaccaacrttatttttccttaacaactac

SEQ ID NO: 9935 - DNA, 50 bp, synthetic construct
  source 1..50: mol_type = other DNA
ccattaaatcaaaaaatcttttctcccccaaacatccttataaaaccaac

SEQ ID NO: 9936 - DNA, 50 bp, synthetic construct
  source 1..50: mol_type = other DNA
aattaaataacacaaaactaaaactaaaaaacrccctttaccacaaacac

SEQ ID NO: 9937 - DNA, 50 bp, synthetic construct
  source 1..50: mol_type = other DNA
cctaaaaaaacaaaactcaatcaaaaaacaacaaaactaatcctaaaacc

SEQ ID NO: 9938 - DNA, 50 bp, synthetic construct
  source 1..50: mol_type = other DNA
ttaacccctacctacaataaacctaccttaactccctatcactctaaaac

SEQ ID NO: 9939 - DNA, 50 bp, synthetic construct
  source 1..50: mol_type = other DNA
ttaactccctatcactctaaaacrcaattctaaccctacaaaaaacccac

SEQ ID NO: 9940 - DNA, 50 bp, synthetic construct
  source 1..50: mol_type = other DNA
cacccaaatatctactctcttaaaaacctactaatcaaaaccaaaaactc

SEQ ID NO: 9941 - DNA, 50 bp, synthetic construct
  source 1..50: mol_type = other DNA
accttcccrtaaaaccctaaaaactaaccaaaaaactcaactactaaccc

SEQ ID NO: 9942 - DNA, 50 bp, synthetic construct
  source 1..50: mol_type = other DNA
aacctcacraaaaaatatcctcaaatataaactacctcatcaactccacc

SEQ ID NO: 9943 - DNA, 50 bp, synthetic construct
  source 1..50: mol_type = other DNA
cttctcctaaccttaaacaaacctaactacatacaaaaaacctaaacatc

SEQ ID NO: 9944 - DNA, 50 bp, synthetic construct
  source 1..50: mol_type = other DNA
ttactaacctccacaaactaatctaaaaacctttctatatccactcccac

SEQ ID NO: 9945 - DNA, 50 bp, synthetic construct
  source 1..50: mol_type = other DNA
ccctctaaaccaaaaaccctataaaccaaaaacttacrcaacactaaacc

SEQ ID NO: 9946 - DNA, 50 bp, synthetic construct
  source 1..50: mol_type = other DNA
accrtataaaaaaccctctaaaccaaaaaccctataaaccaaaaacttac

SEQ ID NO: 9947 - DNA, 50 bp, synthetic construct
  source 1..50: mol_type = other DNA
tacrcaaacccctaattcataaaattcttaattcaaaaaactcctcacac

SEQ ID NO: 9948 - DNA, 50 bp, synthetic construct
  source 1..50: mol_type = other DNA
ctaaaacaaaataatttaaaaccccccttcccctatcaaaaatccctacc

SEQ ID NO: 9949 - DNA, 50 bp, synthetic construct
  source 1..50: mol_type = other DNA
aaaaatccctaccracaaaacttaataacccaaaaaaatctaaaatcctc

SEQ ID NO: 9950 - DNA, 50 bp, synthetic construct
  source 1..50: mol_type = other DNA
aatcacttccccttaaaataactaaaatcrtaaataaaaaactaactcac

SEQ ID NO: 9951 - DNA, 50 bp, synthetic construct
  source 1..50: mol_type = other DNA
ctaaaaaccaaaattcctcctaatcacttccccttaaaataactaaaatc

SEQ ID NO: 9952 - DNA, 50 bp, synthetic construct
  source 1..50: mol_type = other DNA
aacttaactataaaattataaaacccctccccacaaaataacacaaaacc

SEQ ID NO: 9953 - DNA, 50 bp, synthetic construct
  source 1..50: mol_type = other DNA
tccttttccttctctataaacaaaacaaaaccctaaaaaacttaaaaaac

SEQ ID NO: 9954 - DNA, 50 bp, synthetic construct
  source 1..50: mol_type = other DNA
atatatatacrcaaacctatatctacttatatatatcatactatatatcc

SEQ ID NO: 9955 - DNA, 50 bp, synthetic construct
  source 1..50: mol_type = other DNA
rctaaaaaaactaataaaaacactaaacraactaaccaaacaccctaaac

SEQ ID NO: 9956 - DNA, 50 bp, synthetic construct
  source 1..50: mol_type = other DNA
acctacatccccaatcaactccaaacaaaactattactactactactacc

SEQ ID NO: 9957 - DNA, 50 bp, synthetic construct
  source 1..50: mol_type = other DNA
atctaaaaaaaaatttaccaaaaaaaacctcctttatcccccaaaatcac

SEQ ID NO: 9958 - DNA, 50 bp, synthetic construct
  source 1..50: mol_type = other DNA
acttacaatctcaacccataaaacctccaaaaatcccaaaaacatcatcc

SEQ ID NO: 9959 - DNA, 50 bp, synthetic construct
  source 1..50: mol_type = other DNA
aaactaaaaatacaaccactaccrataaaaaactaattcataccctcacc

SEQ ID NO: 9960 - DNA, 50 bp, synthetic construct
  source 1..50: mol_type = other DNA
ttcctatctctattccttctttctatttatcctatacttaaaaactaaac

SEQ ID NO: 9961 - DNA, 50 bp, synthetic construct
  source 1..50: mol_type = other DNA
atctctattccttctttctatttatcctatacttaaaaactaaacraatc

SEQ ID NO: 9962 - DNA, 50 bp, synthetic construct
  source 1..50: mol_type = other DNA
taaaatactaccaactctattaaactaaaaaaattctaatcaaaaaaaac

SEQ ID NO: 9963 - DNA, 50 bp, synthetic construct
  source 1..50: mol_type = other DNA
crcccacaaaaacctaaatataccccttatactaactaaatcatcctacc

SEQ ID NO: 9964 - DNA, 50 bp, synthetic construct
  source 1..50: mol_type = other DNA
aacctaaatataccccttatactaactaaatcatcctaccrcaattaacc

SEQ ID NO: 9965 - DNA, 50 bp, synthetic construct
  source 1..50: mol_type = other DNA
caattaaccaacattataaaaacttccaaatataaacactacttaacccc

SEQ ID NO: 9966 - DNA, 50 bp, synthetic construct
  source 1..50: mol_type = other DNA
ttttaataatctatctatacctataatccatactcactctacacttcctc

SEQ ID NO: 9967 - DNA, 50 bp, synthetic construct
  source 1..50: mol_type = other DNA
aacaaactactaaatcaataataaaaccttaaaaaacctcaaaaaacttc

SEQ ID NO: 9968 - DNA, 50 bp, synthetic construct
  source 1..50: mol_type = other DNA
ctcacaaaactactaaataacaaaactaaaccttaaacacrtaacctctc

SEQ ID NO: 9969 - DNA, 50 bp, synthetic construct
  source 1..50: mol_type = other DNA
taataacctatttcccatctaaactaaacaaactcaataataactctacc

SEQ ID NO: 9970 - DNA, 50 bp, synthetic construct
  source 1..50: mol_type = other DNA
tcctctaaacatctacaacctctaataaaatataaaatcaaacrtccrtc

SEQ ID NO: 9971 - DNA, 50 bp, synthetic construct
  source 1..50: mol_type = other DNA
rcatcctctaaacatctacaacctctaataaaatataaaatcaaacrtcc

SEQ ID NO: 9972 - DNA, 50 bp, synthetic construct
  source 1..50: mol_type = other DNA
ccacrcatcctctaaacatctacaacctctaataaaatataaaatcaaac

SEQ ID NO: 9973 - DNA, 50 bp, synthetic construct
  source 1..50: mol_type = other DNA
taacactacaaaccaaacctcacacattaaccaactaaaaacctatccac

SEQ ID NO: 9974 - DNA, 50 bp, synthetic construct
  source 1..50: mol_type = other DNA
cttacaatactataaactaaacctctttaaactaaacttctataaaccac

SEQ ID NO: 9975 - DNA, 50 bp, synthetic construct
  source 1..50: mol_type = other DNA
actctaactaccatcctcctaaaataaaactatatacttctatccccatc

SEQ ID NO: 9976 - DNA, 50 bp, synthetic construct
  source 1..50: mol_type = other DNA
acacatcctcraaaataaacaaccacaattcacaaacratatatacaacc

SEQ ID NO: 9977 - DNA, 50 bp, synthetic construct
  source 1..50: mol_type = other DNA
cccraaatctaaaacacatcctcraaaataaacaaccacaattcacaaac

SEQ ID NO: 9978 - DNA, 50 bp, synthetic construct
  source 1..50: mol_type = other DNA
atcrtctataaattataactattcactcccraaaatatatcctaaactcc

SEQ ID NO: 9979 - DNA, 50 bp, synthetic construct
  source 1..50: mol_type = other DNA
ctataaattataactattcactcccraaaatatatcctaaactccraatc

SEQ ID NO: 9980 - DNA, 50 bp, synthetic construct
  source 1..50: mol_type = other DNA
tctaaactcrctaaataaacactaaataaaacraatcaatttcttctccc

SEQ ID NO: 9981 - DNA, 50 bp, synthetic construct
  source 1..50: mol_type = other DNA
aacacaaatatacrttactctaaactcrctaaataaacactaaataaaac

SEQ ID NO: 9982 - DNA, 50 bp, synthetic construct
  source 1..50: mol_type = other DNA
aaaaaactaactcrttttatttaatacctatttaacraacccaaaataac

SEQ ID NO: 9983 - DNA, 50 bp, synthetic construct
  source 1..50: mol_type = other DNA
actcacctctttaaaaattttacacraatatatttatttccccaaactcc

SEQ ID NO: 9984 - DNA, 50 bp, synthetic construct
  source 1..50: mol_type = other DNA
taactcaatacccaaacctaaaacccttctactattatataaactaaccc

SEQ ID NO: 9985 - DNA, 50 bp, synthetic construct
  source 1..50: mol_type = other DNA
tattcctaaactaaaaacaaacccttctactaacaaaaaaccttccaatc

SEQ ID NO: 9986 - DNA, 50 bp, synthetic construct
  source 1..50: mol_type = other DNA
cttctactaacaaaaaaccttccaatcraaaaaaactctaacaacctacc

SEQ ID NO: 9987 - DNA, 50 bp, synthetic construct
  source 1..50: mol_type = other DNA
ccaatcraaaaaaactctaacaacctaccrcrataaaaaaccctaaaaac

SEQ ID NO: 9988 - DNA, 50 bp, synthetic construct
  source 1..50: mol_type = other DNA
cataaaacctacrcattacraaaacacaatcataaaaacactatcrtcac

SEQ ID NO: 9989 - DNA, 50 bp, synthetic construct
  source 1..50: mol_type = other DNA
tattttccctatacaaaataaaaatcctaactatcctaaaaacrctatcc

SEQ ID NO: 9990 - DNA, 50 bp, synthetic construct
  source 1..50: mol_type = other DNA
ttccctatacaaaataaaaatcctaactatcctaaaaacrctatccraac

SEQ ID NO: 9991 - DNA, 50 bp, synthetic construct
  source 1..50: mol_type = other DNA
cctatacaaaataaaaatcctaactatcctaaaaacrctatccraacrcc

SEQ ID NO: 9992 - DNA, 50 bp, synthetic construct
  source 1..50: mol_type = other DNA
aaccraattcaactctactaaaactattaaaaaataaactccctatcrac

SEQ ID NO: 9993 - DNA, 50 bp, synthetic construct
  source 1..50: mol_type = other DNA
actctactaaaactattaaaaaataaactccctatcracrtataccaacc

SEQ ID NO: 9994 - DNA, 50 bp, synthetic construct
  source 1..50: mol_type = other DNA
ctaaaactattaaaaaataaactccctatcracrtataccaaccrcctac

SEQ ID NO: 9995 - DNA, 50 bp, synthetic construct
  source 1..50: mol_type = other DNA
crtaaaacccaaatctaaaaatcaacrctcraaaataactaaaaacaacc

SEQ ID NO: 9996 - DNA, 50 bp, synthetic construct
  source 1..50: mol_type = other DNA
aaacaatatcttataactaaaacrctccccaaaaatattaaaacrttccc

SEQ ID NO: 9997 - DNA, 50 bp, synthetic construct
  source 1..50: mol_type = other DNA
caactacraataataacaacrttctcaaaacaatatcttataactaaaac

SEQ ID NO: 9998 - DNA, 50 bp, synthetic construct
  source 1..50: mol_type = other DNA
ttctaacatccttaaaaaacrccccaactacaaaacactatcctaaaaac

SEQ ID NO: 9999 - DNA, 50 bp, synthetic construct
  source 1..50: mol_type = other DNA
tacaaaacactatcctaaaaacrctatcatcacccrtaattacaaatttc

SEQ ID NO: 10000 - DNA, 50 bp, synthetic construct
  source 1..50: mol_type = other DNA
rctatcatcacccrtaattacaaatttcraaacracaataaaaaacatac

SEQ ID NO: 10001 - DNA, 50 bp, synthetic construct
  source 1..50: mol_type = other DNA
aaaactacctaaataactaaaaattcaaccaaaacrtctacctatccacc

SEQ ID NO: 10002 - DNA, 50 bp, synthetic construct
  source 1..50: mol_type = other DNA
aactcctttctccatcacctccttattaaacaaaaacracccaaaaatac

SEQ ID NO: 10003 - DNA, 50 bp, synthetic construct
  source 1..50: mol_type = other DNA
ccccaacrcaacatctaaattcttaaaaaacttcatttattataaaaatc

SEQ ID NO: 10004 - DNA, 50 bp, synthetic construct
  source 1..50: mol_type = other DNA
aaaaaatatatcctaacccaaatccttaccaaatataaaacaacaaaaac

SEQ ID NO: 10005 - DNA, 50 bp, synthetic construct
  source 1..50: mol_type = other DNA
tatccacaccttaatactcaacacaaaaccaaacacaatatctaataacc

SEQ ID NO: 10006 - DNA, 50 bp, synthetic construct
  source 1..50: mol_type = other DNA
caacactactttcatcttacaaaactaaaactctatacccataaaacaac

SEQ ID NO: 10007 - DNA, 50 bp, synthetic construct
  source 1..50: mol_type = other DNA
taatatacaatttaccatcttaaccatttttaaatatacaattcaaaaac

SEQ ID NO: 10008 - DNA, 50 bp, synthetic construct
  source 1..50: mol_type = other DNA
ccactaaaaaataaaatcctcataccacaaactccttaacaaaacataac

SEQ ID NO: 10009 - DNA, 50 bp, synthetic construct
  source 1..50: mol_type = other DNA
actaattttcaaaaacacttaaactttcaaacctaaaaacccaacacaac

SEQ ID NO: 10010 - DNA, 50 bp, synthetic construct
  source 1..50: mol_type = other DNA
tctacttaatacacctacttcccaaatcttcacataacaaattccttctc

SEQ ID NO: 10011 - DNA, 50 bp, synthetic construct
  source 1..50: mol_type = other DNA
acaaaattttttctataaaattcaaaaactatcctatacctcttaaaacc

SEQ ID NO: 10012 - DNA, 50 bp, synthetic construct
  source 1..50: mol_type = other DNA
tacacraaaataactaatctataaaaaatatttaaccctaaactaaaatc

SEQ ID NO: 10013 - DNA, 50 bp, synthetic construct
  source 1..50: mol_type = other DNA
crtctataacaaaccattttattcatacaaatataaaaatttaacttcac

SEQ ID NO: 10014 - DNA, 50 bp, synthetic construct
  source 1..50: mol_type = other DNA
ctaaaaactataacttttcattctaatccaaataccctttccacattttc

SEQ ID NO: 10015 - DNA, 50 bp, synthetic construct
  source 1..50: mol_type = other DNA
ctataatataaactccatacctaataaaaaaaaccaacaaatctaactcc

SEQ ID NO: 10016 - DNA, 50 bp, synthetic construct
  source 1..50: mol_type = other DNA
acaaaccaaactactacaaaaataaatcataacatattacctaatcaacc

SEQ ID NO: 10017 - DNA, 50 bp, synthetic construct
  source 1..50: mol_type = other DNA
aatataacaaaacctaaactaacataaacatacacaaaaaccaaacttcc

SEQ ID NO: 10018 - DNA, 50 bp, synthetic construct
  source 1..50: mol_type = other DNA
aacaacactactcttcaaaaataaaaataaccaaccaacataaaaatacc

SEQ ID NO: 10019 - DNA, 50 bp, synthetic construct
  source 1..50: mol_type = other DNA
ccacacrcaacaataacctaaaataaataaacttatatataccccacacc

SEQ ID NO: 10020 - DNA, 50 bp, synthetic construct
  source 1..50: mol_type = other DNA
atcaaaaataataaaaaacacaacaatcccattaactttaacaaccttac

SEQ ID NO: 10021 - DNA, 50 bp, synthetic construct
  source 1..50: mol_type = other DNA
accaccactcactaaaaaatctacaaaactaacaataaccattaacctcc

SEQ ID NO: 10022 - DNA, 50 bp, synthetic construct
  source 1..50: mol_type = other DNA
taataaaaacctaataaaaacatctaaactataaccctaactccaaaacc

SEQ ID NO: 10023 - DNA, 50 bp, synthetic construct
  source 1..50: mol_type = other DNA
acraccraaccctaaaattctaaacracttctaaaacctaataaattaac

SEQ ID NO: 10024 - DNA, 50 bp, synthetic construct
  source 1..50: mol_type = other DNA
ctacctcaaaactaaataaaactaataataaaaactctaaaataaaatcc

SEQ ID NO: 10025 - DNA, 50 bp, synthetic construct
  source 1..50: mol_type = other DNA
tttaaaacaatcaaccactatacctactaaaaaaatactataaatcaccc

SEQ ID NO: 10026 - DNA, 50 bp, synthetic construct
  source 1..50: mol_type = other DNA
accaaacatctcatctaaaatcaacraaaaacccaaaaatcaataacrtc

SEQ ID NO: 10027 - DNA, 50 bp, synthetic construct
  source 1..50: mol_type = other DNA
aatcttccaacctaacctaaaaactcaaaaccacraaacccaaaaatacc

SEQ ID NO: 10028 - DNA, 50 bp, synthetic construct
  source 1..50: mol_type = other DNA
cctcaaacaaacrtaccaaaaaactaacaacccraaatcraactaaaacc

SEQ ID NO: 10029 - DNA, 50 bp, synthetic construct
  source 1..50: mol_type = other DNA
ttttacrtacaccctcccacttttaatttttaccaacacccaaaaaaatc

SEQ ID NO: 10030 - DNA, 50 bp, synthetic construct
  source 1..50: mol_type = other DNA
caccacattaatcrattataaaaaaaattactaatactcaccaatctctc

SEQ ID NO: 10031 - DNA, 50 bp, synthetic construct
  source 1..50: mol_type = other DNA
craaaatatattacaaatacatcataataaaataattcaccacattaatc

SEQ ID NO: 10032 - DNA, 50 bp, synthetic construct
  source 1..50: mol_type = other DNA
aaatctcttatttcccaaaaatatactttaaaatccatacaattctaatc

SEQ ID NO: 10033 - DNA, 50 bp, synthetic construct
  source 1..50: mol_type = other DNA
aatcaatattaaacaatataacaaatatatcccaactaaaattaccctac

SEQ ID NO: 10034 - DNA, 50 bp, synthetic construct
  source 1..50: mol_type = other DNA
taacccaacaaatattaacactaaataaatacttctaactcttatcccac

SEQ ID NO: 10035 - DNA, 50 bp, synthetic construct
  source 1..50: mol_type = other DNA
cccaacaaatattaacactaaataaatacttctaactcttatcccacrac

SEQ ID NO: 10036 - DNA, 50 bp, synthetic construct
  source 1..50: mol_type = other DNA
aaaaaatccattttcttatttctctactaaccatcctcaaaacttacrac

SEQ ID NO: 10037 - DNA, 50 bp, synthetic construct
  source 1..50: mol_type = other DNA
accaaaaaatccattttcttatttctctactaaccatcctcaaaacttac

SEQ ID NO: 10038 - DNA, 50 bp, synthetic construct
  source 1..50: mol_type = other DNA
aatttccatctacctacacaaacctttcaaccccttaataaacttctccc

SEQ ID NO: 10039 - DNA, 50 bp, synthetic construct
  source 1..50: mol_type = other DNA
tataactccatatccaattccactctacatctcactcacaaaactctaac

SEQ ID NO: 10040 - DNA, 50 bp, synthetic construct
  source 1..50: mol_type = other DNA
actataaatatattaaaaaacaaatcaatccctaaaaaacttcrataaac

SEQ ID NO: 10041 - DNA, 50 bp, synthetic construct
  source 1..50: mol_type = other DNA
caaatcaatccctaaaaaacttcrataaacrcaatcctaaaaacatttcc

SEQ ID NO: 10042 - DNA, 50 bp, synthetic construct
  source 1..50: mol_type = other DNA
tcctaaaaacatttccraactaatttcttttttttaaacaccaattaacc

SEQ ID NO: 10043 - DNA, 50 bp, synthetic construct
  source 1..50: mol_type = other DNA
tttttttatatactttatttttaaaaaatttctcaacttatcaaatctac

SEQ ID NO: 10044 - DNA, 50 bp, synthetic construct
  source 1..50: mol_type = other DNA
aaattataacttataacttcacaaaaacccatcaacaaaaatttctatac

SEQ ID NO: 10045 - DNA, 50 bp, synthetic construct
  source 1..50: mol_type = other DNA
aaacaataacaaaaatcaacttatactatactatcaccttacctaaatcc

SEQ ID NO: 10046 - DNA, 50 bp, synthetic construct
  source 1..50: mol_type = other DNA
aaaaaaataacaaattcataaacctaaaataaaattacctaaaaaacaac

SEQ ID NO: 10047 - DNA, 50 bp, synthetic construct
  source 1..50: mol_type = other DNA
aattcataaacctaaaataaaattacctaaaaaacaacraataaaacaac

SEQ ID NO: 10048 - DNA, 50 bp, synthetic construct
  source 1..50: mol_type = other DNA
aaaaataaaattttattctttctccaactctaaaatatatttcaaacatc

SEQ ID NO: 10049 - DNA, 50 bp, synthetic construct
  source 1..50: mol_type = other DNA
caaaataaccaaaacaactacaaaaaatatctatacccctaccccctaac

SEQ ID NO: 10050 - DNA, 50 bp, synthetic construct
  source 1..50: mol_type = other DNA
ttaaaaaattattcaacctcttcaactctcaatttctacctctataaaac

SEQ ID NO: 10051 - DNA, 50 bp, synthetic construct
  source 1..50: mol_type = other DNA
tataaattaaacaaaataacctatttaaactacttaacatatatatacac

SEQ ID NO: 10052 - DNA, 50 bp, synthetic construct
  source 1..50: mol_type = other DNA
acaaaataacctatttaaactacttaacatatatatacacrtaataaccc

SEQ ID NO: 10053 - DNA, 50 bp, synthetic construct
  source 1..50: mol_type = other DNA
atatatacacrtaataacccrtaataactatttttatcatcatcatcatc

SEQ ID NO: 10054 - DNA, 50 bp, synthetic construct
  source 1..50: mol_type = other DNA
craactacttacctacaactaactccttactcacaaatctacatccatcc

SEQ ID NO: 10055 - DNA, 50 bp, synthetic construct
  source 1..50: mol_type = other DNA
cataccacaacatttactaaacacctactatatacctaaaaaaatcatac

SEQ ID NO: 10056 - DNA, 50 bp, synthetic construct
  source 1..50: mol_type = other DNA
taaacttcatacacaaacatcacaaaaaattttaaaaataatacaacatc

SEQ ID NO: 10057 - DNA, 50 bp, synthetic construct
  source 1..50: mol_type = other DNA
cctccttaaatcaccacataaacaaaaaaaacttcaaataacaaacrctc

SEQ ID NO: 10058 - DNA, 50 bp, synthetic construct
  source 1..50: mol_type = other DNA
ctcccctccttaaatcaccacataaacaaaaaaaacttcaaataacaaac

SEQ ID NO: 10059 - DNA, 50 bp, synthetic construct
  source 1..50: mol_type = other DNA
ctatttaaaaaacattaaaatccaaaaccctaaaaaactacttccaccac

SEQ ID NO: 10060 - DNA, 50 bp, synthetic construct
  source 1..50: mol_type = other DNA
acattaacctaacctaatatttataaaacccctattaaatactaaaaaac

SEQ ID NO: 10061 - DNA, 50 bp, synthetic construct
  source 1..50: mol_type = other DNA
taaatcctcaaattccccacaaaaactaacaaaaacaatctatactcccc

SEQ ID NO: 10062 - DNA, 50 bp, synthetic construct
  source 1..50: mol_type = other DNA
tataacataccaaatcttaaattttcctcccctaaaaacctaatcaatac

SEQ ID NO: 10063 - DNA, 50 bp, synthetic construct
  source 1..50: mol_type = other DNA
tatctacattataattaaaaacatcracataaacaaacaaaaacccttac

SEQ ID NO: 10064 - DNA, 50 bp, synthetic construct
  source 1..50: mol_type = other DNA
cccattcatattaacctaaaaactaaaaaatacctaacataaaaccctcc

SEQ ID NO: 10065 - DNA, 50 bp, synthetic construct
  source 1..50: mol_type = other DNA
taaaactctcctacataaatccaaacctaactaactcttaaattctatac

SEQ ID NO: 10066 - DNA, 50 bp, synthetic construct
  source 1..50: mol_type = other DNA
ctaactaactcttaaattctatacrtttacatataaatccttatacatac

SEQ ID NO: 10067 - DNA, 50 bp, synthetic construct
  source 1..50: mol_type = other DNA
caatcaaaacacratatcattaaaaaccacaatatattctctcataccac

SEQ ID NO: 10068 - DNA, 50 bp, synthetic construct
  source 1..50: mol_type = other DNA
actaaaaaacacrtaacataaaaaaacacactataacttctaataacatc

SEQ ID NO: 10069 - DNA, 50 bp, synthetic construct
  source 1..50: mol_type = other DNA
aattaccaaataacattatactctctataaaaaaacacaaataaatatcc

SEQ ID NO: 10070 - DNA, 50 bp, synthetic construct
  source 1..50: mol_type = other DNA
cccttacaaccratatataccaacataaaacccacacaaaacaactcaac

SEQ ID NO: 10071 - DNA, 50 bp, synthetic construct
  source 1..50: mol_type = other DNA
ccaaaattaactctaaacctaacaacctccaaaatatcaactttattcac

SEQ ID NO: 10072 - DNA, 50 bp, synthetic construct
  source 1..50: mol_type = other DNA
actaaaaacrtattcttcctattattctaaattcaaacaacactctaatc

SEQ ID NO: 10073 - DNA, 50 bp, synthetic construct
  source 1..50: mol_type = other DNA
taaaaataaaaaacacactacataaaaaactctcctacactactaaaaac

SEQ ID NO: 10074 - DNA, 50 bp, synthetic construct
  source 1..50: mol_type = other DNA
tcttctaaacatctctactaaactaaactctataccaaacaaaaatctcc

SEQ ID NO: 10075 - DNA, 50 bp, synthetic construct
  source 1..50: mol_type = other DNA
tcattttccaatttcaatttaaaaacaactctaccaactttccaataccc

SEQ ID NO: 10076 - DNA, 50 bp, synthetic construct
  source 1..50: mol_type = other DNA
aaactaaaaaataaaactaaaaatcacaatttcattttccaatttcactc

SEQ ID NO: 10077 - DNA, 50 bp, synthetic construct
  source 1..50: mol_type = other DNA
aaaaacaataaaaatatcctatctacaacaaaacataaaaaaaccccaac

SEQ ID NO: 10078 - DNA, 50 bp, synthetic construct
  source 1..50: mol_type = other DNA
ccccacacaactcaactacaccttaactcaaaaaaaccataaaatatacc

SEQ ID NO: 10079 - DNA, 50 bp, synthetic construct
  source 1..50: mol_type = other DNA
cctataccaacccaaaaaaacaacctaaataaaatcttcacatccatttc

SEQ ID NO: 10080 - DNA, 50 bp, synthetic construct
  source 1..50: mol_type = other DNA
cacctaacacctctaactactaaccaattaccaccttacatcaaacraac

SEQ ID NO: 10081 - DNA, 50 bp, synthetic construct
  source 1..50: mol_type = other DNA
acaaaaaaaaaccttccctaaaaaaaacctacaaataaatcccaacrccc

SEQ ID NO: 10082 - DNA, 50 bp, synthetic construct
  source 1..50: mol_type = other DNA
aaccacaccaactaaatttctcatattaaaccaaatttacaaacatttac

SEQ ID NO: 10083 - DNA, 50 bp, synthetic construct
  source 1..50: mol_type = other DNA
aatctaattattaaacacaaacttaattcaaatcttactaatactactcc

SEQ ID NO: 10084 - DNA, 50 bp, synthetic construct
  source 1..50: mol_type = other DNA
caaatcttactaatactactccrtttcaaacactatttaactaataactc

SEQ ID NO: 10085 - DNA, 50 bp, synthetic construct
  source 1..50: mol_type = other DNA
aaaaaaaaatcaaaactactacttattctaaataatatcactttcctccc

SEQ ID NO: 10086 - DNA, 50 bp, synthetic construct
  source 1..50: mol_type = other DNA
acataacttaataattaaataacatttccaattttaaatcataccaaaac

SEQ ID NO: 10087 - DNA, 50 bp, synthetic construct
  source 1..50: mol_type = other DNA
tcccccraactcttaacctttacatttatttatacaataccttactcrac

SEQ ID NO: 10088 - DNA, 50 bp, synthetic construct
  source 1..50: mol_type = other DNA
atttcccccraactcttaacctttacatttatttatacaataccttactc

SEQ ID NO: 10089 - DNA, 50 bp, synthetic construct
  source 1..50: mol_type = other DNA
tataaatcttaccacatttctaatcaaaaatatacactaacatttccccc

SEQ ID NO: 10090 - DNA, 50 bp, synthetic construct
  source 1..50: mol_type = other DNA
acaccaactataaacttcttaaaccaaaataactaatacaaaattaactc

SEQ ID NO: 10091 - DNA, 50 bp, synthetic construct
  source 1..50: mol_type = other DNA
aaaataactaatacaaaattaactcrtttatcctctactaaaccaaacac

SEQ ID NO: 10092 - DNA, 50 bp, synthetic construct
  source 1..50: mol_type = other DNA
caaacacrtttctacccaacaacatccacttctcaatcttctatttattc

SEQ ID NO: 10093 - DNA, 50 bp, synthetic construct
  source 1..50: mol_type = other DNA
aaacaaacaaatatttctcccaataaatcctacatacaaaaaatatacac

SEQ ID NO: 10094 - DNA, 50 bp, synthetic construct
  source 1..50: mol_type = other DNA
tacacactccctacatacaaaacccactaaaaaaaacacctacttatccc

SEQ ID NO: 10095 - DNA, 50 bp, synthetic construct
  source 1..50: mol_type = other DNA
acaaaaaaacccaaaaaattacactcactttattaatccaaataaacccc

SEQ ID NO: 10096 - DNA, 50 bp, synthetic construct
  source 1..50: mol_type = other DNA
tccaatctaaaatctattaaacaatacctaaacaataacctaccccaccc

SEQ ID NO: 10097 - DNA, 50 bp, synthetic construct
  source 1..50: mol_type = other DNA
aatactaaaaaaatttaaaaaacaattttattccaacrcaactcccctcc

SEQ ID NO: 10098 - DNA, 50 bp, synthetic construct
  source 1..50: mol_type = other DNA
ctcacctcaaccaactactaaatactacactcaatacraaaaaaaactac

SEQ ID NO: 10099 - DNA, 50 bp, synthetic construct
  source 1..50: mol_type = other DNA
aaaaattcccttaacttaaattataaccactaactaacaaaaaactaacc

SEQ ID NO: 10100 - DNA, 50 bp, synthetic construct
  source 1..50: mol_type = other DNA
ctatactaataacaaaaactaacttactacccaaataactaaaaaaaatc

SEQ ID NO: 10101 - DNA, 50 bp, synthetic construct
  source 1..50: mol_type = other DNA
aaaattactccaatactcaaaactattccraaaccccctaaaaacraaac

SEQ ID NO: 10102 - DNA, 50 bp, synthetic construct
  source 1..50: mol_type = other DNA
aaccccctaaaaacraaacraaataacaatataaactaccrctaataacc

SEQ ID NO: 10103 - DNA, 50 bp, synthetic construct
  source 1..50: mol_type = other DNA
actaaattctctttcctcccaacracratatttataaaaaataaaactcc

SEQ ID NO: 10104 - DNA, 50 bp, synthetic construct
  source 1..50: mol_type = other DNA
tataaactaccrctaataaccrctacraaacttcatttcttataaacacc

SEQ ID NO: 10105 - DNA, 50 bp, synthetic construct
  source 1..50: mol_type = other DNA
aaaactccacatcacrataaaataaaaatactacaacccccacaaaaacc

SEQ ID NO: 10106 - DNA, 50 bp, synthetic construct
  source 1..50: mol_type = other DNA
tctttataaaaactacaacacctccacttcaccrtaatataaaatccttc

SEQ ID NO: 10107 - DNA, 50 bp, synthetic construct
  source 1..50: mol_type = other DNA
aactaaaaaaatctacaattctcctactaaccctccctttccaaaaaacc

SEQ ID NO: 10108 - DNA, 50 bp, synthetic construct
  source 1..50: mol_type = other DNA
aaaaaaaccaacaaaaaaactacaaatcctcccaaccctaataactaccc

SEQ ID NO: 10109 - DNA, 50 bp, synthetic construct
  source 1..50: mol_type = other DNA
aaaaaatttaataacttacctaaaatcacacaacctataactactaaccc

SEQ ID NO: 10110 - DNA, 50 bp, synthetic construct
  source 1..50: mol_type = other DNA
aaaaatattcrcraaaaactctacaccccrattattactaactccatctc

SEQ ID NO: 10111 - DNA, 50 bp, synthetic construct
  source 1..50: mol_type = other DNA
acttctctatacccattatctcaccctacraaataaaactaacaacaatc

SEQ ID NO: 10112 - DNA, 50 bp, synthetic construct
  source 1..50: mol_type = other DNA
atctcaccctacraaataaaactaacaacaatcraaatacaaaactttcc

SEQ ID NO: 10113 - DNA, 50 bp, synthetic construct
  source 1..50: mol_type = other DNA
tctatcccaaatctcaaactacaacraataacaataccccracaaaaaac

SEQ ID NO: 10114 - DNA, 50 bp, synthetic construct
  source 1..50: mol_type = other DNA
ccrttacaacctaaaacttaaaataaacctacractctcccrttaaaaac

SEQ ID NO: 10115 - DNA, 50 bp, synthetic construct
  source 1..50: mol_type = other DNA
crccaactacaaaacccaaacraaaataaaaaccatctaaatacctacrc

SEQ ID NO: 10116 - DNA, 50 bp, synthetic construct
  source 1..50: mol_type = other DNA
accrccaactacaaaacccaaacraaaataaaaaccatctaaatacctac

SEQ ID NO: 10117 - DNA, 50 bp, synthetic construct
  source 1..50: mol_type = other DNA
aacctaaacaaatacattcaaataaaacttttccraaaccrattttcccc

SEQ ID NO: 10118 - DNA, 50 bp, synthetic construct
  source 1..50: mol_type = other DNA
catccraaaaaacctaaacaaatacattcaaataaaacttttccraaacc

SEQ ID NO: 10119 - DNA, 50 bp, synthetic construct
  source 1..50: mol_type = other DNA
aaacaccatccraaaaaacctaaacaaatacattcaaataaaacttttcc

SEQ ID NO: 10120 - DNA, 50 bp, synthetic construct
  source 1..50: mol_type = other DNA
cctcaatcatttaaaaaaatatcccaattcctcaaatcccacctacctac

SEQ ID NO: 10121 - DNA, 50 bp, synthetic construct
  source 1..50: mol_type = other DNA
aactaaaccaaacaatcaaaactcactctcaaaaactccaaatcatattc

SEQ ID NO: 10122 - DNA, 50 bp, synthetic construct
  source 1..50: mol_type = other DNA
ccctaactatctaatctaatctcctaaatctaaaacccaccaacctccac

SEQ ID NO: 10123 - DNA, 50 bp, synthetic construct
  source 1..50: mol_type = other DNA
aatcctataaaaaaacaaatcaaaaaacatataaacctcacaaatacctc

SEQ ID NO: 10124 - DNA, 50 bp, synthetic construct
  source 1..50: mol_type = other DNA
aaataactaaacaaaaaacraactataatcatcacaaaaaaatactaacc

SEQ ID NO: 10125 - DNA, 50 bp, synthetic construct
  source 1..50: mol_type = other DNA
accaactatattatattcttatatatattctatataaacctaacaccccc

SEQ ID NO: 10126 - DNA, 50 bp, synthetic construct
  source 1..50: mol_type = other DNA
crttcctaaaaaaaatcccactttatcataaaatataatccttttaatac

SEQ ID NO: 10127 - DNA, 50 bp, synthetic construct
  source 1..50: mol_type = other DNA
cttaactcctccccccacaaattaatttttatatatttaataactattac

SEQ ID NO: 10128 - DNA, 50 bp, synthetic construct
  source 1..50: mol_type = other DNA
tcccacaaatacattaataaaaaaaaccttaacactactttctactcatc

SEQ ID NO: 10129 - DNA, 50 bp, synthetic construct
  source 1..50: mol_type = other DNA
atctctttcaccaatacacttataaaaatttctataaaaataacatacac

SEQ ID NO: 10130 - DNA, 50 bp, synthetic construct
  source 1..50: mol_type = other DNA
tccaaaaactaacaaactcaaatacaaaaacatcctcataactctaaaac

SEQ ID NO: 10131 - DNA, 50 bp, synthetic construct
  source 1..50: mol_type = other DNA
acttctctttcccttatttttaaaaatatctattactaaaaacactaatc

SEQ ID NO: 10132 - DNA, 50 bp, synthetic construct
  source 1..50: mol_type = other DNA
actcacrtacacrctctttaaaatcccccrtaattttttaatataaaaac

SEQ ID NO: 10133 - DNA, 50 bp, synthetic construct
  source 1..50: mol_type = other DNA
aatcttaaaaacrcctttacactaaaaaattacraaaaacctcaaaaaac

SEQ ID NO: 10134 - DNA, 50 bp, synthetic construct
  source 1..50: mol_type = other DNA
taacrccattacaataacrattaataaaatatacrcatatatattcttac

SEQ ID NO: 10135 - DNA, 50 bp, synthetic construct
  source 1..50: mol_type = other DNA
tctctaacrttcrtataataatttccaataatcacataacatataataac

SEQ ID NO: 10136 - DNA, 50 bp, synthetic construct
  source 1..50: mol_type = other DNA
ttcrtatcaaaactattttccttttcattctcattctctctctaacrttc

SEQ ID NO: 10137 - DNA, 50 bp, synthetic construct
  source 1..50: mol_type = other DNA
actcttcacaaatccttcctttaaactcttctccctactatactaacatc

SEQ ID NO: 10138 - DNA, 50 bp, synthetic construct
  source 1..50: mol_type = other DNA
ataatctcctataaaataatatcrcacttatatccrtaaacaaaattacc

SEQ ID NO: 10139 - DNA, 50 bp, synthetic construct
  source 1..50: mol_type = other DNA
ctattcaaaattttaataatctcctataaaataatatcrcacttatatcc

SEQ ID NO: 10140 - DNA, 50 bp, synthetic construct
  source 1..50: mol_type = other DNA
tattcttcctactaacatataccracaactttatccacraacacaaatac

SEQ ID NO: 10141 - DNA, 50 bp, synthetic construct
  source 1..50: mol_type = other DNA
aaaccaaaaaaattctctcattcaacaaacatttattaaatacctcctac

SEQ ID NO: 10142 - DNA, 50 bp, synthetic construct
  source 1..50: mol_type = other DNA
ttaaattcacrataacaatctataaaatcctaaaaaataaacataacacc

SEQ ID NO: 10143 - DNA, 50 bp, synthetic construct
  source 1..50: mol_type = other DNA
aactatcattactcttataacrctttaacttataatacaaaataaaaccc

SEQ ID NO: 10144 - DNA, 50 bp, synthetic construct
  source 1..50: mol_type = other DNA
cacacacacaaaaacacctacraatttcattctacatcataaactaaaac

SEQ ID NO: 10145 - DNA, 50 bp, synthetic construct
  source 1..50: mol_type = other DNA
cataaactaaaacrccacaaaaacaataacaactcaaaactaaaaaactc

SEQ ID NO: 10146 - DNA, 50 bp, synthetic construct
  source 1..50: mol_type = other DNA
aaactaaaaaactcraaatataaaacctaaaataaaaacaaacaaccttc

SEQ ID NO: 10147 - DNA, 50 bp, synthetic construct
  source 1..50: mol_type = other DNA
aaaaaactcraaatataaaacctaaaataaaaacaaacaaccttcrctcc

SEQ ID NO: 10148 - DNA, 50 bp, synthetic construct
  source 1..50: mol_type = other DNA
actctttaaatactacacacctaataaaacctttacrcctcraaacaaac

SEQ ID NO: 10149 - DNA, 50 bp, synthetic construct
  source 1..50: mol_type = other DNA
cacrataaaactctttaaatactacacacctaataaaacctttacrcctc

SEQ ID NO: 10150 - DNA, 50 bp, synthetic construct
  source 1..50: mol_type = other DNA
ratcrtacrataaaaataattaaaaaacctaactaatcaaccccraaacc

SEQ ID NO: 10151 - DNA, 50 bp, synthetic construct
  source 1..50: mol_type = other DNA
aaatcacacaacrcrtctaaaattccatttcaaacctatctaaaaaaaac

SEQ ID NO: 10152 - DNA, 50 bp, synthetic construct
  source 1..50: mol_type = other DNA
taatataaaataaaacccaaaatctatatccraaaatcctaacccaaaac

SEQ ID NO: 10153 - DNA, 50 bp, synthetic construct
  source 1..50: mol_type = other DNA
ccccaaactacaatattccraaaactaaattataaaataccraattaaac

SEQ ID NO: 10154 - DNA, 50 bp, synthetic construct
  source 1..50: mol_type = other DNA
aactaaattataaaataccraattaaacracaactcaaactcaaaatccc

SEQ ID NO: 10155 - DNA, 50 bp, synthetic construct
  source 1..50: mol_type = other DNA
caaaactacaactctacaaataatactcacatataccctaaaaactacac

SEQ ID NO: 10156 - DNA, 50 bp, synthetic construct
  source 1..50: mol_type = other DNA
ataaaactcaaaatctctatcaaaataatatctccccatcttataaaaac

SEQ ID NO: 10157 - DNA, 50 bp, synthetic construct
  source 1..50: mol_type = other DNA
raactcttcaaaaaatacctaatccctcctaaaacaaaaattaaaaaccc

SEQ ID NO: 10158 - DNA, 50 bp, synthetic construct
  source 1..50: mol_type = other DNA
raactctcaattcctacttcaaaaaaaactaaatactccctaaaaaaccc

SEQ ID NO: 10159 - DNA, 50 bp, synthetic construct
  source 1..50: mol_type = other DNA
cctaaaaaacccrcttcttaaaaaaatatcaaaattacaaaaataacaac

SEQ ID NO: 10160 - DNA, 50 bp, synthetic construct
  source 1..50: mol_type = other DNA
aaataaataactaactaaaaaaaacrccaatataaaactatatactacac

SEQ ID NO: 10161 - DNA, 50 bp, synthetic construct
  source 1..50: mol_type = other DNA
aatatataaaacaaccctctaaaaaaaatatattacctcttaccttcctc

SEQ ID NO: 10162 - DNA, 50 bp, synthetic construct
  source 1..50: mol_type = other DNA
caaaaaaacaatataaacctatcataactccatcacatcctaaaacttac

SEQ ID NO: 10163 - DNA, 50 bp, synthetic construct
  source 1..50: mol_type = other DNA
caaaaccacactaattcctcaaaaaatttataaaaaattaattacaatcc

SEQ ID NO: 10164 - DNA, 50 bp, synthetic construct
  source 1..50: mol_type = other DNA
aaaaatatccatccctccaactaaaactaacataacaaccaaaaccctac

SEQ ID NO: 10165 - DNA, 50 bp, synthetic construct
  source 1..50: mol_type = other DNA
cctccaactaaaactaacataacaaccaaaaccctacrctcaaactctac

SEQ ID NO: 10166 - DNA, 50 bp, synthetic construct
  source 1..50: mol_type = other DNA
cctatatttactctcraaccattcctataaaaaattttaatattaactac

SEQ ID NO: 10167 - DNA, 50 bp, synthetic construct
  source 1..50: mol_type = other DNA
ccatactataaactaatcaaaccttcccctaaaatcctatatttactctc

SEQ ID NO: 10168 - DNA, 50 bp, synthetic construct
  source 1..50: mol_type = other DNA
aacctaaacctaccracaaccaacttactaaaaactttcataattcactc

SEQ ID NO: 10169 - DNA, 50 bp, synthetic construct
  source 1..50: mol_type = other DNA
aacctccctcccrcraataaattataaaaacctttaataaattaactatc

SEQ ID NO: 10170 - DNA, 50 bp, synthetic construct
  source 1..50: mol_type = other DNA
ccaccaaaaacatcaaccttctaaaaacctaaactaaaacccaaataaac

SEQ ID NO: 10171 - DNA, 50 bp, synthetic construct
  source 1..50: mol_type = other DNA
aaatcctaaatacractccaaacaaatcaaacctcaataatcraatctac

SEQ ID NO: 10172 - DNA, 50 bp, synthetic construct
  source 1..50: mol_type = other DNA
ttacaaacttaaatcctaaaaacccttaacctacttttccttcctccccc

SEQ ID NO: 10173 - DNA, 50 bp, synthetic construct
  source 1..50: mol_type = other DNA
ttcaaaactcaaatctacaactatcctaaactcrtataaaaaactctctc

SEQ ID NO: 10174 - DNA, 50 bp, synthetic construct
  source 1..50: mol_type = other DNA
atatttctttctacacacttaaaaaaaaatcctaaccrcacaaatactac

SEQ ID NO: 10175 - DNA, 50 bp, synthetic construct
  source 1..50: mol_type = other DNA
cctatcrcccaaaatatttctttctacacacttaaaaaaaaatcctaacc

SEQ ID NO: 10176 - DNA, 50 bp, synthetic construct
  source 1..50: mol_type = other DNA
aaaaaaacaaaaacccrcctaactccraacaaatacraaaataaaataac

SEQ ID NO: 10177 - DNA, 50 bp, synthetic construct
  source 1..50: mol_type = other DNA
tatcccctaaaacctaaaaccraacctaaataaaaatctcctaaatccrc

SEQ ID NO: 10178 - DNA, 50 bp, synthetic construct
  source 1..50: mol_type = other DNA
ataaacaaataccacaaatccaaactactaataaacraaaccraaaaaac

SEQ ID NO: 10179 - DNA, 50 bp, synthetic construct
  source 1..50: mol_type = other DNA
aaacaaataccacaaatccaaactactaataaacraaaccraaaaaacrc

SEQ ID NO: 10180 - DNA, 50 bp, synthetic construct
  source 1..50: mol_type = other DNA
actaaaactaaataactacrtaaatcctaaaaaaacacaaatataatacc

SEQ ID NO: 10181 - DNA, 50 bp, synthetic construct
  source 1..50: mol_type = other DNA
actacrtaaatcctaaaaaaacacaaatataataccraataaaaaactcc

SEQ ID NO: 10182 - DNA, 50 bp, synthetic construct
  source 1..50: mol_type = other DNA
aaccttaaccaataactcaaaaaaaacttcrttattttcaaaccataaac

SEQ ID NO: 10183 - DNA, 50 bp, synthetic construct
  source 1..50: mol_type = other DNA
aaaataacraaaccccctttaaactactaaccaaaaccaaataaaacctc

SEQ ID NO: 10184 - DNA, 50 bp, synthetic construct
  source 1..50: mol_type = other DNA
aaactactaaccaaaaccaaataaaacctcrtactcctctactataaaac

SEQ ID NO: 10185 - DNA, 50 bp, synthetic construct
  source 1..50: mol_type = other DNA
crctaaccaaaaacttaaaacctacraatcttcccaactataaacaaaac

SEQ ID NO: 10186 - DNA, 50 bp, synthetic construct
  source 1..50: mol_type = other DNA
cacacttctcctcaaccctcracttttctataaaatcccaatcaaaaaac

SEQ ID NO: 10187 - DNA, 50 bp, synthetic construct
  source 1..50: mol_type = other DNA
aaaatctaattatacaatattcrtaaaccctaaaaaactaaaaacrcccc

SEQ ID NO: 10188 - DNA, 50 bp, synthetic construct
  source 1..50: mol_type = other DNA
aacrctctataacttaccrtacacacctttctcattaaatattcctaacc

SEQ ID NO: 10189 - DNA, 50 bp, synthetic construct
  source 1..50: mol_type = other DNA
ataaccacttaattttcaacaaaactaacttctttaaatttctcaaattc

SEQ ID NO: 10190 - DNA, 50 bp, synthetic construct
  source 1..50: mol_type = other DNA
ccaactttattaaaaaccaaataaccacttaccaacacttctttatacac

SEQ ID NO: 10191 - DNA, 50 bp, synthetic construct
  source 1..50: mol_type = other DNA
ttaaaaaacactttataaaatacaaaatcaatacaaaaacraaactttac

SEQ ID NO: 10192 - DNA, 50 bp, synthetic construct
  source 1..50: mol_type = other DNA
atacaaaatcaatacaaaaacraaactttacrcttttcatatctaaaccc

SEQ ID NO: 10193 - DNA, 50 bp, synthetic construct
  source 1..50: mol_type = other DNA
craaccraatataccrattctaaaactcaaataacaaacccaaaccttcc

SEQ ID NO: 10194 - DNA, 50 bp, synthetic construct
  source 1..50: mol_type = other DNA
craacaacctcctacrtcctttacctttttactaaacctcttaaaaactc

SEQ ID NO: 10195 - DNA, 50 bp, synthetic construct
  source 1..50: mol_type = other DNA
ratatttccaataaacttaccctaaaaaaccaaaccrtccctctttcttc

SEQ ID NO: 10196 - DNA, 50 bp, synthetic construct
  source 1..50: mol_type = other DNA
aaattctattaaaaccttaatccactataaacaattatacccacrtactc

SEQ ID NO: 10197 - DNA, 50 bp, synthetic construct
  source 1..50: mol_type = other DNA
taaaaatcttaaatacaaaaacaaaccctaatttaaaacccrttccrccc

SEQ ID NO: 10198 - DNA, 50 bp, synthetic construct
  source 1..50: mol_type = other DNA
catataaaaatcttaaatacaaaaacaaaccctaatttaaaacccrttcc

SEQ ID NO: 10199 - DNA, 50 bp, synthetic construct
  source 1..50: mol_type = other DNA
atttacatataaaaatcttaaatacaaaaacaaaccctaatttaaaaccc

SEQ ID NO: 10200 - DNA, 50 bp, synthetic construct
  source 1..50: mol_type = other DNA
caacaactcccctaacaaatttctatactaaattcactataaacrctcac

SEQ ID NO: 10201 - DNA, 50 bp, synthetic construct
  source 1..50: mol_type = other DNA
aatcaacaacaactcccctaacaaatttctatactaaattcactataaac

SEQ ID NO: 10202 - DNA, 50 bp, synthetic construct
  source 1..50: mol_type = other DNA
caataaacccaacacaaaaacctactaaaaaaactactattaactacatc

SEQ ID NO: 10203 - DNA, 50 bp, synthetic construct
  source 1..50: mol_type = other DNA
ataaacccaacacaaaaacctactaaaaaaactactattaactacatcrc

SEQ ID NO: 10204 - DNA, 50 bp, synthetic construct
  source 1..50: mol_type = other DNA
aaaaacctactaaaaaaactactattaactacatcrcratccaaaaaacc

SEQ ID NO: 10205 - DNA, 50 bp, synthetic construct
  source 1..50: mol_type = other DNA
tccaaaaaaccracrtcttttataaatacaaaaactaaaccaaaccaaac

SEQ ID NO: 10206 - DNA, 50 bp, synthetic construct
  source 1..50: mol_type = other DNA
caaaaaaccracrtcttttataaatacaaaaactaaaccaaaccaaacrc

SEQ ID NO: 10207 - DNA, 50 bp, synthetic construct
  source 1..50: mol_type = other DNA
tcttttataaatacaaaaactaaaccaaaccaaacrcrccrtaaaaaccc

SEQ ID NO: 10208 - DNA, 50 bp, synthetic construct
  source 1..50: mol_type = other DNA
crcraaaaaatacctaaattccaacrcatctatataacacccraatctac

SEQ ID NO: 10209 - DNA, 50 bp, synthetic construct
  source 1..50: mol_type = other DNA
aactaaaacatctaaatttacraaacrcraaaaaatacctaaattccaac

SEQ ID NO: 10210 - DNA, 50 bp, synthetic construct
  source 1..50: mol_type = other DNA
aaacccataactctaaaattaaccctaacctaactaaccctctaaccctc

SEQ ID NO: 10211 - DNA, 50 bp, synthetic construct
  source 1..50: mol_type = other DNA
aaaatcataaactccctaaatacracttctaaaattaaattactataaac

SEQ ID NO: 10212 - DNA, 50 bp, synthetic construct
  source 1..50: mol_type = other DNA
tcataaactccctaaatacracttctaaaattaaattactataaacraac

SEQ ID NO: 10213 - DNA, 50 bp, synthetic construct
  source 1..50: mol_type = other DNA
cctaaatacracttctaaaattaaattactataaacraacracccatatc

SEQ ID NO: 10214 - DNA, 50 bp, synthetic construct
  source 1..50: mol_type = other DNA
cracttctaaaattaaattactataaacraacracccatatcraaatccc

SEQ ID NO: 10215 - DNA, 50 bp, synthetic construct
  source 1..50: mol_type = other DNA
tttattaaactcctattacrtacaaaacttatacatcacacatctataac

SEQ ID NO: 10216 - DNA, 50 bp, synthetic construct
  source 1..50: mol_type = other DNA
tcrcctaactaaaaaacccrtcacaaatatataatatataaactctacac

SEQ ID NO: 10217 - DNA, 50 bp, synthetic construct
  source 1..50: mol_type = other DNA
actatataactttaaaaccacaacaacctacaaaaactcaaaaaaactac

SEQ ID NO: 10218 - DNA, 50 bp, synthetic construct
  source 1..50: mol_type = other DNA
actatccttccatcaaacaccaaatcraaatcaatcctaatatcatttac

SEQ ID NO: 10219 - DNA, 50 bp, synthetic construct
  source 1..50: mol_type = other DNA
taatccacctataaacaaatcttaactatccttccatcaaacaccaaatc

SEQ ID NO: 10220 - DNA, 50 bp, synthetic construct
  source 1..50: mol_type = other DNA
actaatataaacraaatatttcccatatataaaacaaaattctaaacacc

SEQ ID NO: 10221 - DNA, 50 bp, synthetic construct
  source 1..50: mol_type = other DNA
tcaactctacacratactcaaaactctacctcacacataaaaaatactcc

SEQ ID NO: 10222 - DNA, 50 bp, synthetic construct
  source 1..50: mol_type = other DNA
taaacctctactaaaatttcaaacatctaccaccaaaaaacaacttatac

SEQ ID NO: 10223 - DNA, 50 bp, synthetic construct
  source 1..50: mol_type = other DNA
ctcacaaaataaatcaaaacctacctaacaaaataaaaaaatctttcctc

SEQ ID NO: 10224 - DNA, 50 bp, synthetic construct
  source 1..50: mol_type = other DNA
aaaaacaaaaacctaactacaatataaaaaactcacctaaaataaaaaac

SEQ ID NO: 10225 - DNA, 50 bp, synthetic construct
  source 1..50: mol_type = other DNA
ccatacccaaaccaatacttaccctatattaatcrtttatccatctatcc

SEQ ID NO: 10226 - DNA, 50 bp, synthetic construct
  source 1..50: mol_type = other DNA
atattaacaattaaacttaaaattacaatctcaaatcaccctctaacctc

SEQ ID NO: 10227 - DNA, 50 bp, synthetic construct
  source 1..50: mol_type = other DNA
cccttaaacatttccaaacaactaacaaactaacaacttaaataaaaaac

SEQ ID NO: 10228 - DNA, 50 bp, synthetic construct
  source 1..50: mol_type = other DNA
ataaatttaataaaacatacatatttatatttactttctacctacctttc

SEQ ID NO: 10229 - DNA, 50 bp, synthetic construct
  source 1..50: mol_type = other DNA
acccattacatcrattaaaatattcattcaacttctctaaaacaattatc

SEQ ID NO: 10230 - DNA, 50 bp, synthetic construct
  source 1..50: mol_type = other DNA
aatttcactttacrattcacaaacatatctacttctccatattacttaac

SEQ ID NO: 10231 - DNA, 50 bp, synthetic construct
  source 1..50: mol_type = other DNA
aaaattaaattatacacaattaaaactcctacaaatcacaccactctaac

SEQ ID NO: 10232 - DNA, 50 bp, synthetic construct
  source 1..50: mol_type = other DNA
cctactccatctaaatatttcttaacrttattttaccataacttaaaatc

SEQ ID NO: 10233 - DNA, 50 bp, synthetic construct
  source 1..50: mol_type = other DNA
cactctaacrataatatctactcaacractccaaatcataacaaaacaac

SEQ ID NO: 10234 - DNA, 50 bp, synthetic construct
  source 1..50: mol_type = other DNA
actccaaatcataacaaaacaacrctaaaaaatattcaaataaaacaaac

SEQ ID NO: 10235 - DNA, 50 bp, synthetic construct
  source 1..50: mol_type = other DNA
acaacrctaaaaaatattcaaataaaacaaacractatatacaaaaaacc

SEQ ID NO: 10236 - DNA, 50 bp, synthetic construct
  source 1..50: mol_type = other DNA
taaaaaatattcaaataaaacaaacractatatacaaaaaaccracrccc

SEQ ID NO: 10237 - DNA, 50 bp, synthetic construct
  source 1..50: mol_type = other DNA
acctctcttaatcttaaacctactatcccraaaaccaaaacraaaataac

SEQ ID NO: 10238 - DNA, 50 bp, synthetic construct
  source 1..50: mol_type = other DNA
actcrcccrattttattttttccaaactttttaactaaaatctttcactc

SEQ ID NO: 10239 - DNA, 50 bp, synthetic construct
  source 1..50: mol_type = other DNA
aaaactaaacaaactatatcaattcaataataaaacacacacacacaaac

SEQ ID NO: 10240 - DNA, 50 bp, synthetic construct
  source 1..50: mol_type = other DNA
atatattttactactaaactaatacaacttatccaacttccattctccac

SEQ ID NO: 10241 - DNA, 50 bp, synthetic construct
  source 1..50: mol_type = other DNA
cttccattctccacrataaccctccraaataaaataatattaaccttttc

SEQ ID NO: 10242 - DNA, 50 bp, synthetic construct
  source 1..50: mol_type = other DNA
cctaattataaaataaaattcaaatcctaactctaccacttaaccrttcc

SEQ ID NO: 10243 - DNA, 50 bp, synthetic construct
  source 1..50: mol_type = other DNA
ctccatctaacaataaatacctactccttcactaaacatactttaaaccc

SEQ ID NO: 10244 - DNA, 50 bp, synthetic construct
  source 1..50: mol_type = other DNA
catctaacaataaatacctactccttcactaaacatactttaaacccrac

SEQ ID NO: 10245 - DNA, 50 bp, synthetic construct
  source 1..50: mol_type = other DNA
ataaaactttcaaactactccctttcctttacaactaacttcattccatc

SEQ ID NO: 10246 - DNA, 50 bp, synthetic construct
  source 1..50: mol_type = other DNA
tcctaatatcaaaaatatcatcacrtacctattaactaaacraacccrac

SEQ ID NO: 10247 - DNA, 50 bp, synthetic construct
  source 1..50: mol_type = other DNA
tcttcctaatatcaaaaatatcatcacrtacctattaactaaacraaccc

SEQ ID NO: 10248 - DNA, 50 bp, synthetic construct
  source 1..50: mol_type = other DNA
cttttatcttcctaatatcaaaaatatcatcacrtacctattaactaaac

SEQ ID NO: 10249 - DNA, 50 bp, synthetic construct
  source 1..50: mol_type = other DNA
accctatataaaaatatcttttatcttcctaatatcaaaaatatcatcac

SEQ ID NO: 10250 - DNA, 50 bp, synthetic construct
  source 1..50: mol_type = other DNA
tattatttccatcttttttaacactcaaaactaaaatttacrtaaacaac

SEQ ID NO: 10251 - DNA, 50 bp, synthetic construct
  source 1..50: mol_type = other DNA
cacaccttttcataccatacttttctttcaaactaaattcataactcctc

SEQ ID NO: 10252 - DNA, 50 bp, synthetic construct
  source 1..50: mol_type = other DNA
ttttcctatctataaactaaaatatattctaaaattatacaatcaattcc

SEQ ID NO: 10253 - DNA, 50 bp, synthetic construct
  source 1..50: mol_type = other DNA
caactactaacttaaaaatctttcatataatacactaaattccaaaaatc

SEQ ID NO: 10254 - DNA, 50 bp, synthetic construct
  source 1..50: mol_type = other DNA
cttaaaaataaaacctaaacctctccrataaactaaataaaaatcttacc

SEQ ID NO: 10255 - DNA, 50 bp, synthetic construct
  source 1..50: mol_type = other DNA
aataaactaacttaaattctacracttaaaaataaaacctaaacctctcc

SEQ ID NO: 10256 - DNA, 50 bp, synthetic construct
  source 1..50: mol_type = other DNA
aatcaaaaacctctacraaaaaataaactataatacractacraacaacc

SEQ ID NO: 10257 - DNA, 50 bp, synthetic construct
  source 1..50: mol_type = other DNA
raatcccaaatcaaaaacctctacraaaaaataaactataatacractac

SEQ ID NO: 10258 - DNA, 50 bp, synthetic construct
  source 1..50: mol_type = other DNA
ctatccraatcccaaatcaaaaacctctacraaaaaataaactataatac

SEQ ID NO: 10259 - DNA, 50 bp, synthetic construct
  source 1..50: mol_type = other DNA
aactaaacraatacaaacaactatccraatcccaaatcaaaaacctctac

SEQ ID NO: 10260 - DNA, 50 bp, synthetic construct
  source 1..50: mol_type = other DNA
aaaaactaaaccaataaatcraacaactaaacraatacaaacaactatcc

SEQ ID NO: 10261 - DNA, 50 bp, synthetic construct
  source 1..50: mol_type = other DNA
aaaaccrctctaataataaactcaactcctcacctaaaacctaacaatcc

SEQ ID NO: 10262 - DNA, 50 bp, synthetic construct
  source 1..50: mol_type = other DNA
rctctaataataaactcaactcctcacctaaaacctaacaatccratcac

SEQ ID NO: 10263 - DNA, 50 bp, synthetic construct
  source 1..50: mol_type = other DNA
accccrtaactcatctaaaatactacractctataatcrtataaatttcc

SEQ ID NO: 10264 - DNA, 50 bp, synthetic construct
  source 1..50: mol_type = other DNA
aatacatccatcttctctaaacttcccctcttaaaaataaaccaaaacrc

SEQ ID NO: 10265 - DNA, 50 bp, synthetic construct
  source 1..50: mol_type = other DNA
taaaatatacraactctctcttttaaacacrtatcacaactacttctcac

SEQ ID NO: 10266 - DNA, 50 bp, synthetic construct
  source 1..50: mol_type = other DNA
accaaacaaaaatccaatcctaaaatatacraactctctcttttaaacac

SEQ ID NO: 10267 - DNA, 50 bp, synthetic construct
  source 1..50: mol_type = other DNA
aaactccaaaacrattcataaccaaacaaaaatccaatcctaaaatatac

SEQ ID NO: 10268 - DNA, 50 bp, synthetic construct
  source 1..50: mol_type = other DNA
aaaaaaaaactcrtataccctaaaattaaacctctatctaattataaatc

SEQ ID NO: 10269 - DNA, 50 bp, synthetic construct
  source 1..50: mol_type = other DNA
ataccctaaaattaaacctctatctaattataaatcrctttaaaatttac

SEQ ID NO: 10270 - DNA, 50 bp, synthetic construct
  source 1..50: mol_type = other DNA
ttccaaaaaacatttaaccataaaaaacaaaacaaaaactaaacctaatc

SEQ ID NO: 10271 - DNA, 50 bp, synthetic construct
  source 1..50: mol_type = other DNA
aaaaataataccctcaaaaccrcaaaataaacaatctcctcccaaacatc

SEQ ID NO: 10272 - DNA, 50 bp, synthetic construct
  source 1..50: mol_type = other DNA
acctccaataccttcttcaacctattaataaaaataataccctcaaaacc

SEQ ID NO: 10273 - DNA, 50 bp, synthetic construct
  source 1..50: mol_type = other DNA
aacaaaactaaaaatcctcctttatccaaaacaacrtatttaacaaaacc

SEQ ID NO: 10274 - DNA, 50 bp, synthetic construct
  source 1..50: mol_type = other DNA
actatacaaacracacaatttaaaaaaaccttctatttacttataaattc

SEQ ID NO: 10275 - DNA, 50 bp, synthetic construct
  source 1..50: mol_type = other DNA
tattcrtcaacataaaaacaaacraataaactacatattactatacaaac

SEQ ID NO: 10276 - DNA, 50 bp, synthetic construct
  source 1..50: mol_type = other DNA
ttaaaattacacctcaaaacttacaataaacctaaataacaacccattac

SEQ ID NO: 10277 - DNA, 50 bp, synthetic construct
  source 1..50: mol_type = other DNA
aaattccctaactttcractaaaacaacaaaacraaactttctcactcac

SEQ ID NO: 10278 - DNA, 50 bp, synthetic construct
  source 1..50: mol_type = other DNA
tcatcattacttaaaaaacctaatatataaactaaaattccctaactttc

SEQ ID NO: 10279 - DNA, 50 bp, synthetic construct
  source 1..50: mol_type = other DNA
ccactatactcactcacattcctaaactatatatataactctaacacaac

SEQ ID NO: 10280 - DNA, 50 bp, synthetic construct
  source 1..50: mol_type = other DNA
ttctaactcctacaaaaaaaaactatatttatatccatacatatacctac

SEQ ID NO: 10281 - DNA, 50 bp, synthetic construct
  source 1..50: mol_type = other DNA
aataacaataaatacaacaacaaacttttaaaacacttaacatttaaaac

SEQ ID NO: 10282 - DNA, 50 bp, synthetic construct
  source 1..50: mol_type = other DNA
attttacccaataaaataccaccaaaaaacccactaacccctctcaaaac

SEQ ID NO: 10283 - DNA, 50 bp, synthetic construct
  source 1..50: mol_type = other DNA
ttacacaaaatcacacractactaaataataaaaactacaacttccaaac

SEQ ID NO: 10284 - DNA, 50 bp, synthetic construct
  source 1..50: mol_type = other DNA
caaaaaaaatctaaacrcttaaaaactacaacccccaccactcaataacc

SEQ ID NO: 10285 - DNA, 50 bp, synthetic construct
  source 1..50: mol_type = other DNA
aaaaataatactcrtaaaacactaaacacaacatctaatacacaataaac

SEQ ID NO: 10286 - DNA, 50 bp, synthetic construct
  source 1..50: mol_type = other DNA
cataaataaaaacrctcactatataccaaatactatactcaatactttac

SEQ ID NO: 10287 - DNA, 50 bp, synthetic construct
  source 1..50: mol_type = other DNA
aacccaaaaattcaaaactacaaaaaaccataataaaccactacactccc

SEQ ID NO: 10288 - DNA, 50 bp, synthetic construct
  source 1..50: mol_type = other DNA
caatattttccrtataaaatttatacaacctcaaccaatcactcctaaac

SEQ ID NO: 10289 - DNA, 50 bp, synthetic construct
  source 1..50: mol_type = other DNA
ataacttaaacaccttatactctacttttcatctttctaaataacttttc

SEQ ID NO: 10290 - DNA, 50 bp, synthetic construct
  source 1..50: mol_type = other DNA
tcatcctaaataaaattatatacaaaaattaatcaacaaaaaccattccc

SEQ ID NO: 10291 - DNA, 50 bp, synthetic construct
  source 1..50: mol_type = other DNA
aaaaaccattcccraaaccacaaacaactaactacaaacattacrcaaac

SEQ ID NO: 10292 - DNA, 50 bp, synthetic construct
  source 1..50: mol_type = other DNA
aaatatacaaccaaacccaaaactataaaaaaactctaaaaaccaaaatc

SEQ ID NO: 10293 - DNA, 50 bp, synthetic construct
  source 1..50: mol_type = other DNA
aaaaacaaccacattaaaaataaacctaaataaaaaaaacaaatcaccac

SEQ ID NO: 10294 - DNA, 50 bp, synthetic construct
  source 1..50: mol_type = other DNA
aacacaaattaacraaataaacactcccacatacaataaccaacccctac

SEQ ID NO: 10295 - DNA, 50 bp, synthetic construct
  source 1..50: mol_type = other DNA
aaataccrtatcccttatcrctccataatcattaacaaaataaaaaccac

SEQ ID NO: 10296 - DNA, 50 bp, synthetic construct
  source 1..50: mol_type = other DNA
aaaaaactacaaactatataacctcaaaaacaaaacrcaaactacctcac

SEQ ID NO: 10297 - DNA, 50 bp, synthetic construct
  source 1..50: mol_type = other DNA
aaataaacactctaataaacaaaaattcctcctccccrtaaactaacatc

SEQ ID NO: 10298 - DNA, 50 bp, synthetic construct
  source 1..50: mol_type = other DNA
acacctcccatctctaaaaatatattaacaaaaataacttaaccccaacc

SEQ ID NO: 10299 - DNA, 50 bp, synthetic construct
  source 1..50: mol_type = other DNA
aacaatttaacaaaactacctaaccccaattttcaataaaataaaacctc

SEQ ID NO: 10300 - DNA, 50 bp, synthetic construct
  source 1..50: mol_type = other DNA
tcctctacaacaaattaaacaacctaaacaaaaccataccataccatatc

SEQ ID NO: 10301 - DNA, 50 bp, synthetic construct
  source 1..50: mol_type = other DNA
taaactaaaaatccccctaacaaataaataaccaactacaatcctacccc

SEQ ID NO: 10302 - DNA, 50 bp, synthetic construct
  source 1..50: mol_type = other DNA
ataaaacrtataataacactaaaccacaaaaatactatcctataccaacc

SEQ ID NO: 10303 - DNA, 50 bp, synthetic construct
  source 1..50: mol_type = other DNA
aatcccaaaaatcaaacrcaacaaccttcacaaaacctaaaacataaaac

SEQ ID NO: 10304 - DNA, 50 bp, synthetic construct
  source 1..50: mol_type = other DNA
aaaaaaacctatcctaaaaccacaacaaaactaaatcccaaaaatcaaac

SEQ ID NO: 10305 - DNA, 50 bp, synthetic construct
  source 1..50: mol_type = other DNA
aaaaaaatcatacacaacaaaaattacctataaacaaaccaaaaaaaaac

SEQ ID NO: 10306 - DNA, 50 bp, synthetic construct
  source 1..50: mol_type = other DNA
acraaaaccraacctaatcaaaaatacrtataataataccaaaacaaaac

SEQ ID NO: 10307 - DNA, 50 bp, synthetic construct
  source 1..50: mol_type = other DNA
rttataaatttcrtcccaaataaaacraaaatttaacaacaataactacc

SEQ ID NO: 10308 - DNA, 50 bp, synthetic construct
  source 1..50: mol_type = other DNA
acaatcatacaaataaaacaataaacracaactattactattaaacttcc

SEQ ID NO: 10309 - DNA, 50 bp, synthetic construct
  source 1..50: mol_type = other DNA
aaaacaataaacracaactattactattaaacttccrtcctacttaaaac

SEQ ID NO: 10310 - DNA, 50 bp, synthetic construct
  source 1..50: mol_type = other DNA
ccactaatcttacaaaacrtacrtaaccaacctatactaccaaataaaac

SEQ ID NO: 10311 - DNA, 50 bp, synthetic construct
  source 1..50: mol_type = other DNA
atttttttatccccatacrtcctacctaacaatacaaactaatcacrcac

SEQ ID NO: 10312 - DNA, 50 bp, synthetic construct
  source 1..50: mol_type = other DNA
ctcataccraactttctatctatccatctctatactaaaattcraaaccc

SEQ ID NO: 10313 - DNA, 50 bp, synthetic construct
  source 1..50: mol_type = other DNA
acataaaaaaataaccrcttaaactaactccracccraataaaaatatac

SEQ ID NO: 10314 - DNA, 50 bp, synthetic construct
  source 1..50: mol_type = other DNA
tataaaccrtctacctaaatccaacaaccaaactactaaaaaataccccc

SEQ ID NO: 10315 - DNA, 50 bp, synthetic construct
  source 1..50: mol_type = other DNA
aaaaataaaaccacaaaacccctacctttaacaaattcataaactacttc

SEQ ID NO: 10316 - DNA, 50 bp, synthetic construct
  source 1..50: mol_type = other DNA
ttaattcattcaactccccacccaaaaaaaatttactaataataaactcc

SEQ ID NO: 10317 - DNA, 50 bp, synthetic construct
  source 1..50: mol_type = other DNA
aattaaaatcacaaactaaaaatttaaaaacttcataactcaaaaaaaac

SEQ ID NO: 10318 - DNA, 50 bp, synthetic construct
  source 1..50: mol_type = other DNA
tccacttaatcacactatttatctactcaactataaaaaccacaacattc

SEQ ID NO: 10319 - DNA, 50 bp, synthetic construct
  source 1..50: mol_type = other DNA
tttcaattaacctaaccctatacacaaaaaaatccctacraaacaaaatc

SEQ ID NO: 10320 - DNA, 50 bp, synthetic construct
  source 1..50: mol_type = other DNA
taaaaaaaatcaaattcaaaatttacaaatacaacccraaaaatccccrc

SEQ ID NO: 10321 - DNA, 50 bp, synthetic construct
  source 1..50: mol_type = other DNA
ttctaaaacccaaaaaaactaacatcctaaataccttaccaattttaatc

SEQ ID NO: 10322 - DNA, 50 bp, synthetic construct
  source 1..50: mol_type = other DNA
attttaatcrccacttctcataacaaaaaatactaaacataacttctctc

SEQ ID NO: 10323 - DNA, 50 bp, synthetic construct
  source 1..50: mol_type = other DNA
taaaatcttttaaccataaacttttcttaccactcaaaaaattacatctc

SEQ ID NO: 10324 - DNA, 50 bp, synthetic construct
  source 1..50: mol_type = other DNA
ccaaacraaataaccracacctcaaaaaaccattcatttttttatctaac

SEQ ID NO: 10325 - DNA, 50 bp, synthetic construct
  source 1..50: mol_type = other DNA
atattaaaaactctacraattaaccrtaaaaacactctaaaaacttaaac

SEQ ID NO: 10326 - DNA, 50 bp, synthetic construct
  source 1..50: mol_type = other DNA
atcttttcrtctacacrcccaaatttctaaaatacttttacrattaaccc

SEQ ID NO: 10327 - DNA, 50 bp, synthetic construct
  source 1..50: mol_type = other DNA
caaaattcctaacacactaaaattcactaaactacttctctcacacctcc

SEQ ID NO: 10328 - DNA, 50 bp, synthetic construct
  source 1..50: mol_type = other DNA
aaacccaaaattttcaaaaacctacrctctacaacatcrtaaaaaccaac

SEQ ID NO: 10329 - DNA, 50 bp, synthetic construct
  source 1..50: mol_type = other DNA
crtaaaaaacctttataaatccraaactaaacaccatatttttattacac

SEQ ID NO: 10330 - DNA, 50 bp, synthetic construct
  source 1..50: mol_type = other DNA
aaattccaatcrttcrcttctacttaacctctaaattctaatataaatcc

SEQ ID NO: 10331 - DNA, 50 bp, synthetic construct
  source 1..50: mol_type = other DNA
attaataacccraacccacattaaaactcaaaaatcaaacaaaaacraac

SEQ ID NO: 10332 - DNA, 50 bp, synthetic construct
  source 1..50: mol_type = other DNA
ccctttccttacrcraattaataactacaaacttccctatctaattaacc

SEQ ID NO: 10333 - DNA, 50 bp, synthetic construct
  source 1..50: mol_type = other DNA
raaatacaactttattacaaatacaatattttaaattacrcrctacrttc

SEQ ID NO: 10334 - DNA, 50 bp, synthetic construct
  source 1..50: mol_type = other DNA
ccacraaatacaactttattacaaatacaatattttaaattacrcrctac

SEQ ID NO: 10335 - DNA, 50 bp, synthetic construct
  source 1..50: mol_type = other DNA
actccrcccacraaatacaactttattacaaatacaatattttaaattac

SEQ ID NO: 10336 - DNA, 50 bp, synthetic construct
  source 1..50: mol_type = other DNA
raacrcaacrcrtaatttaaaatattatatctataacaaaactacacctc

SEQ ID NO: 10337 - DNA, 50 bp, synthetic construct
  source 1..50: mol_type = other DNA
tatctataacaaaactacacctcrtaaacraaattatactctacractac

SEQ ID NO: 10338 - DNA, 50 bp, synthetic construct
  source 1..50: mol_type = other DNA
aaaacrtaccacttactcctcctaaaatactaacttactcacacctaatc

SEQ ID NO: 10339 - DNA, 50 bp, synthetic construct
  source 1..50: mol_type = other DNA
aaaaaacaaataacacrtcttcraataaatatacractatactaaaaccc

SEQ ID NO: 10340 - DNA, 50 bp, synthetic construct
  source 1..50: mol_type = other DNA
caaacatctaactccaaaaacaaaaaactacrcctaaaataaaacacctc

SEQ ID NO: 10341 - DNA, 50 bp, synthetic construct
  source 1..50: mol_type = other DNA
aaacrcraacaaaaatccacaaacatctaactccaaaaacaaaaaactac

SEQ ID NO: 10342 - DNA, 50 bp, synthetic construct
  source 1..50: mol_type = other DNA
ttaaacrtaaccttctacttttaaaaccaaatatctataaacttctattc

SEQ ID NO: 10343 - DNA, 50 bp, synthetic construct
  source 1..50: mol_type = other DNA
aaacrtaaccttctacttttaaaaccaaatatctataaacttctattcrc

SEQ ID NO: 10344 - DNA, 50 bp, synthetic construct
  source 1..50: mol_type = other DNA
tacttttaaaaccaaatatctataaacttctattcrcrttcaaaaatacc

SEQ ID NO: 10345 - DNA, 50 bp, synthetic construct
  source 1..50: mol_type = other DNA
tctctcaattattcattaaataaacttctctcattcccttcccctttacc

SEQ ID NO: 10346 - DNA, 50 bp, synthetic construct
  source 1..50: mol_type = other DNA
acaaaaaaaaccrcraattttaaataataaatcccttaccccaaaacacc

SEQ ID NO: 10347 - DNA, 50 bp, synthetic construct
  source 1..50: mol_type = other DNA
acccactttttaatctctttttaaacctaaactacccctaccrtcatatc

SEQ ID NO: 10348 - DNA, 50 bp, synthetic construct
  source 1..50: mol_type = other DNA
aaccccaaatctacaactataaactcaaacataaaaaaaactacracatc

SEQ ID NO: 10349 - DNA, 50 bp, synthetic construct
  source 1..50: mol_type = other DNA
aatttctcccatatttaaatccacaactacaaatttaaaatctataatac

SEQ ID NO: 10350 - DNA, 50 bp, synthetic construct
  source 1..50: mol_type = other DNA
caaatttaaaatctataatacrcaaaaacctactatcaaactactctatc

SEQ ID NO: 10351 - DNA, 50 bp, synthetic construct
  source 1..50: mol_type = other DNA
aacaaaacactcaataactcttaaaacacacccctaaattaataaaaaac

SEQ ID NO: 10352 - DNA, 50 bp, synthetic construct
  source 1..50: mol_type = other DNA
aattaataaaaaacrctcactataaacatatccttacctctataataaac

SEQ ID NO: 10353 - DNA, 50 bp, synthetic construct
  source 1..50: mol_type = other DNA
cactataaacatatccttacctctataataaacraaaacrattacaactc

SEQ ID NO: 10354 - DNA, 50 bp, synthetic construct
  source 1..50: mol_type = other DNA
accttaaaaaacttatcraactaatctaatttatataaatattccaaatc

SEQ ID NO: 10355 - DNA, 50 bp, synthetic construct
  source 1..50: mol_type = other DNA
ccrctcccraataaaacccrcaataaacaacaattactttttaatttccc

SEQ ID NO: 10356 - DNA, 50 bp, synthetic construct
  source 1..50: mol_type = other DNA
ttttaatttcccrcaaatctaaaaaatcrctatttataaacaaaacaaac

SEQ ID NO: 10357 - DNA, 50 bp, synthetic construct
  source 1..50: mol_type = other DNA
rcaaatctaaaaaatcrctatttataaacaaaacaaacrccactaccrcc

SEQ ID NO: 10358 - DNA, 50 bp, synthetic construct
  source 1..50: mol_type = other DNA
aaataaacaaccaatattatcrccrataattaactaaaataacccraatc

SEQ ID NO: 10359 - DNA, 50 bp, synthetic construct
  source 1..50: mol_type = other DNA
rataatactaactacccatctacaccaaaaatatctacctatcattaacc

SEQ ID NO: 10360 - DNA, 50 bp, synthetic construct
  source 1..50: mol_type = other DNA
tttaatatcctctctacctaaatatataaaatccctaaactcctcctccc

SEQ ID NO: 10361 - DNA, 50 bp, synthetic construct
  source 1..50: mol_type = other DNA
aaaaaaaccracttaaatataaattccractctcccactttaacrattac

SEQ ID NO: 10362 - DNA, 50 bp, synthetic construct
  source 1..50: mol_type = other DNA
attaaacaatatataaaccataacaattatataccracaatcaacaccac

SEQ ID NO: 10363 - DNA, 50 bp, synthetic construct
  source 1..50: mol_type = other DNA
aactcacacactactcaactcctaaatctttatttaccaaaacctcacac

SEQ ID NO: 10364 - DNA, 50 bp, synthetic construct
  source 1..50: mol_type = other DNA
crataatctaacctaatctaaaaaaatcaaaacracttccctataacttc

SEQ ID NO: 10365 - DNA, 50 bp, synthetic construct
  source 1..50: mol_type = other DNA
aacracttccctataacttcractaaacctacaacataaactaactaaac

SEQ ID NO: 10366 - DNA, 50 bp, synthetic construct
  source 1..50: mol_type = other DNA
cractaaacctacaacataaactaactaaacrtattatacaacctaaacc

SEQ ID NO: 10367 - DNA, 50 bp, synthetic construct
  source 1..50: mol_type = other DNA
actaaattaacrtttaaacattccaaaaaatccctaatactattcccaac

SEQ ID NO: 10368 - DNA, 50 bp, synthetic construct
  source 1..50: mol_type = other DNA
aaaccraaaacrctaaaaacaacaccaaaaactctttaaaatatttaaac

SEQ ID NO: 10369 - DNA, 50 bp, synthetic construct
  source 1..50: mol_type = other DNA
aaaacaacaccaaaaactctttaaaatatttaaacrttaacccaaccrtc

SEQ ID NO: 10370 - DNA, 50 bp, synthetic construct
  source 1..50: mol_type = other DNA
acaccaaaaactctttaaaatatttaaacrttaacccaaccrtcracatc

SEQ ID NO: 10371 - DNA, 50 bp, synthetic construct
  source 1..50: mol_type = other DNA
ctcctaaaaaaaaattttacaacaaattatttctctctccactaatactc

SEQ ID NO: 10372 - DNA, 50 bp, synthetic construct
  source 1..50: mol_type = other DNA
tacaacactaccttaccctttaacaaatatttcttttactaaataaaaac

SEQ ID NO: 10373 - DNA, 50 bp, synthetic construct
  source 1..50: mol_type = other DNA
ataaccattaaaactaccattcaaaaaaatatattaaccracratatcac

SEQ ID NO: 10374 - DNA, 50 bp, synthetic construct
  source 1..50: mol_type = other DNA
ctaataaaactataaccattaaaactaccattcaaaaaaatatattaacc

SEQ ID NO: 10375 - DNA, 50 bp, synthetic construct
  source 1..50: mol_type = other DNA
cctctccaaatcctaactattccccatatcattctaataatcaaaattcc

SEQ ID NO: 10376 - DNA, 50 bp, synthetic construct
  source 1..50: mol_type = other DNA
aaattctaactaccaaaataacataaaaaacaaccaaaacctaaaaaaac

SEQ ID NO: 10377 - DNA, 50 bp, synthetic construct
  source 1..50: mol_type = other DNA
attccaatttaaacaacacrttaccctaaacaaacaacctaaatcaccac

SEQ ID NO: 10378 - DNA, 50 bp, synthetic construct
  source 1..50: mol_type = other DNA
aaaccctctacrctatcttacaaaccttaaaaaacaatacccaataactc

SEQ ID NO: 10379 - DNA, 50 bp, synthetic construct
  source 1..50: mol_type = other DNA
aaaaatcacccraaccactaaacactacctcccaaaacttacaaaacaac

SEQ ID NO: 10380 - DNA, 50 bp, synthetic construct
  source 1..50: mol_type = other DNA
aacactacctcccaaaacttacaaaacaacrcaaaaaattcccaaactac

SEQ ID NO: 10381 - DNA, 50 bp, synthetic construct
  source 1..50: mol_type = other DNA
catacctaaataactcrtaaccttaacccttcccactacttctcaaaaac

SEQ ID NO: 10382 - DNA, 50 bp, synthetic construct
  source 1..50: mol_type = other DNA
cacctttttcctcaaatccaactcccctaactaaaaaattcctaaaaaac

SEQ ID NO: 10383 - DNA, 50 bp, synthetic construct
  source 1..50: mol_type = other DNA
aaacaaaaccatattaatataaaaaacrcatctttattacattcattcac

SEQ ID NO: 10384 - DNA, 50 bp, synthetic construct
  source 1..50: mol_type = other DNA
aaaatataaaaactaaacrtaaaaaataaaccacaccttctccccaaacc

SEQ ID NO: 10385 - DNA, 50 bp, synthetic construct
  source 1..50: mol_type = other DNA
aacttctacaattctccactccacaaaataaaaaaaacttacaaaataac

SEQ ID NO: 10386 - DNA, 50 bp, synthetic construct
  source 1..50: mol_type = other DNA
ttaaaaaacrccatttctcctaaataacttcaaaacaaacacctaataac

SEQ ID NO: 10387 - DNA, 50 bp, synthetic construct
  source 1..50: mol_type = other DNA
ccctaacacrttactaaatacctaccttaaaaccatttaaaaaaaataac

SEQ ID NO: 10388 - DNA, 50 bp, synthetic construct
  source 1..50: mol_type = other DNA
attacaaacctaaaccaaaatacctaaccccatctaaatatttattcaac

SEQ ID NO: 10389 - DNA, 50 bp, synthetic construct
  source 1..50: mol_type = other DNA
taactcaaacaataatttcattaatactattaaaacacttactacaatcc

SEQ ID NO: 10390 - DNA, 50 bp, synthetic construct
  source 1..50: mol_type = other DNA
ctaaaaacctttctaaacttacccaaataaaacttattaaccccctctcc

SEQ ID NO: 10391 - DNA, 50 bp, synthetic construct
  source 1..50: mol_type = other DNA
atacccttttatacttctcataactttctcccttcacttaaaaaaaactc

SEQ ID NO: 10392 - DNA, 50 bp, synthetic construct
  source 1..50: mol_type = other DNA
taattaaacaaaaatatactaaaaacctacccaacaataaccraattaac

SEQ ID NO: 10393 - DNA, 50 bp, synthetic construct
  source 1..50: mol_type = other DNA
tatataacataaatcaaaacttaatctataattttaaaaacataactctc

SEQ ID NO: 10394 - DNA, 50 bp, synthetic construct
  source 1..50: mol_type = other DNA
accacaaaccaaattctaacccatattatacaaatatcaatcccaatatc

SEQ ID NO: 10395 - DNA, 50 bp, synthetic construct
  source 1..50: mol_type = other DNA
aatataatcttaaccttacataaattataataataactataaaaccraac

SEQ ID NO: 10396 - DNA, 50 bp, synthetic construct
  source 1..50: mol_type = other DNA
tataatcttaaccttacataaattataataataactataaaaccraacrc

SEQ ID NO: 10397 - DNA, 50 bp, synthetic construct
  source 1..50: mol_type = other DNA
aaccttacataaattataataataactataaaaccraacrcrtaactcac

SEQ ID NO: 10398 - DNA, 50 bp, synthetic construct
  source 1..50: mol_type = other DNA
aaaccraaataacaccactacattccaacctaataacaaaacaaaactcc

SEQ ID NO: 10399 - DNA, 50 bp, synthetic construct
  source 1..50: mol_type = other DNA
aaacctcaactactaattaaaaacaataacraaaatattaaaccraacrc

SEQ ID NO: 10400 - DNA, 50 bp, synthetic construct
  source 1..50: mol_type = other DNA
rtaccaaaacctcaactactaattaaaaacaataacraaaatattaaacc

SEQ ID NO: 10401 - DNA, 50 bp, synthetic construct
  source 1..50: mol_type = other DNA
taaaaacaataatcrtaccaaaacctcaactactaattaaaaacaataac

SEQ ID NO: 10402 - DNA, 50 bp, synthetic construct
  source 1..50: mol_type = other DNA
racctaacattttcrttattacttttaatcaataattaaaatcttaacac

SEQ ID NO: 10403 - DNA, 50 bp, synthetic construct
  source 1..50: mol_type = other DNA
aaaaatattaaaaaccctcctctatccaatattcccactattcactaccc

SEQ ID NO: 10404 - DNA, 50 bp, synthetic construct
  source 1..50: mol_type = other DNA
aaaaacctaactctatcccctaaccaatatctaaccaaataatactaaac

SEQ ID NO: 10405 - DNA, 50 bp, synthetic construct
  source 1..50: mol_type = other DNA
catctcttattacttatacaccacaacaattcaataataacaaaaaaatc

SEQ ID NO: 10406 - DNA, 50 bp, synthetic construct
  source 1..50: mol_type = other DNA
tattactcaaattaaaatacrctaacrttatcataactcattacaacctc

SEQ ID NO: 10407 - DNA, 50 bp, synthetic construct
  source 1..50: mol_type = other DNA
ctctcctcaaccattcaaaataataaaattaaccaaacaaaataactcac

SEQ ID NO: 10408 - DNA, 50 bp, synthetic construct
  source 1..50: mol_type = other DNA
atactaataatctcaactcactcraaatactaaaacaatattacataaac

SEQ ID NO: 10409 - DNA, 50 bp, synthetic construct
  source 1..50: mol_type = other DNA
tttaaaatttcaataaactataattcacaccactattctccaacctaaac

SEQ ID NO: 10410 - DNA, 50 bp, synthetic construct
  source 1..50: mol_type = other DNA
tcccaaaaacccttttccrccatttcaatttatttcttattaaatactac

SEQ ID NO: 10411 - DNA, 50 bp, synthetic construct
  source 1..50: mol_type = other DNA
attaaacaaattacaaacaataaccaaaactaaccttaaaaccacctccc

SEQ ID NO: 10412 - DNA, 50 bp, synthetic construct
  source 1..50: mol_type = other DNA
taaccttaaaaccacctcccrcttatttattatttttaacaattcaatcc

SEQ ID NO: 10413 - DNA, 50 bp, synthetic construct
  source 1..50: mol_type = other DNA
taataatcccccrtccctttaactattctaaacctatttaattatcraac

SEQ ID NO: 10414 - DNA, 50 bp, synthetic construct
  source 1..50: mol_type = other DNA
tatttaataatcccccrtccctttaactattctaaacctatttaattatc

SEQ ID NO: 10415 - DNA, 50 bp, synthetic construct
  source 1..50: mol_type = other DNA
aaaaaacrctaatcatcacttcctccaaccctaaaaaaaaatcattttcc

SEQ ID NO: 10416 - DNA, 50 bp, synthetic construct
  source 1..50: mol_type = other DNA
atttcatataaaaacaaactatatataaaacatcaataaaaactaataac

SEQ ID NO: 10417 - DNA, 50 bp, synthetic construct
  source 1..50: mol_type = other DNA
taaacacaaatacattatattcctaacctttatataaaacaatttaattc

SEQ ID NO: 10418 - DNA, 50 bp, synthetic construct
  source 1..50: mol_type = other DNA
tctaaaaaaacttcctcacaaaataactatataaccaaaaaaataacttc

SEQ ID NO: 10419 - DNA, 50 bp, synthetic construct
  source 1..50: mol_type = other DNA
ccaactcactttatcttactttcaatctcttacctactaccaacataatc

SEQ ID NO: 10420 - DNA, 50 bp, synthetic construct
  source 1..50: mol_type = other DNA
aatttacacttttacaaactaccccaataacctaataatacaactcctcc

SEQ ID NO: 10421 - DNA, 50 bp, synthetic construct
  source 1..50: mol_type = other DNA
aattcaaataccaaatccttttataacaaaaattctcaaaaaaataatcc

SEQ ID NO: 10422 - DNA, 50 bp, synthetic construct
  source 1..50: mol_type = other DNA
aaacccttttttaaaactcacttaaaacctttcatattcccaaatatcac

SEQ ID NO: 10423 - DNA, 50 bp, synthetic construct
  source 1..50: mol_type = other DNA
ctccaaaccaaataacaacaatataaaaaaatcaaaaaactaaaccaaac

SEQ ID NO: 10424 - DNA, 50 bp, synthetic construct
  source 1..50: mol_type = other DNA
aataattaatacataataactactaccccaccaaaactcacctcaaaacc

SEQ ID NO: 10425 - DNA, 50 bp, synthetic construct
  source 1..50: mol_type = other DNA
tcaaaaacacaccttactacaaactacctacatcctaaacaatcratacc

SEQ ID NO: 10426 - DNA, 50 bp, synthetic construct
  source 1..50: mol_type = other DNA
tactcatcaaaaacacaccttactacaaactacctacatcctaaacaatc

SEQ ID NO: 10427 - DNA, 50 bp, synthetic construct
  source 1..50: mol_type = other DNA
acctacaacaaaatatatccctaataaacaactactaaataaaaaaatac

SEQ ID NO: 10428 - DNA, 50 bp, synthetic construct
  source 1..50: mol_type = other DNA
ccaaaataaaaaatctattttatattcttcactacttttacatttcaaac

SEQ ID NO: 10429 - DNA, 50 bp, synthetic construct
  source 1..50: mol_type = other DNA
ccttttataatacataattccccaacttcaataataaactaataaccccc

SEQ ID NO: 10430 - DNA, 50 bp, synthetic construct
  source 1..50: mol_type = other DNA
acataattccccaacttcaataataaactaataacccccraaatcccacc

SEQ ID NO: 10431 - DNA, 50 bp, synthetic construct
  source 1..50: mol_type = other DNA
aaacaactccccactcctccatttcctatttataatcttcattaaaaaac

SEQ ID NO: 10432 - DNA, 50 bp, synthetic construct
  source 1..50: mol_type = other DNA
aaaacccatttttctatcccacttactcccacctacaattctttaaaaac

SEQ ID NO: 10433 - DNA, 50 bp, synthetic construct
  source 1..50: mol_type = other DNA
taaataaaactacctatcttccaaccrtacraatacaactaactcaatcc

SEQ ID NO: 10434 - DNA, 50 bp, synthetic construct
  source 1..50: mol_type = other DNA
aataaacttttcaaaaactattaaaaacacraactaaatcaattatatcc

SEQ ID NO: 10435 - DNA, 50 bp, synthetic construct
  source 1..50: mol_type = other DNA
aacttttcaaaaactattaaaaacacraactaaatcaattatatccrcac

SEQ ID NO: 10436 - DNA, 50 bp, synthetic construct
  source 1..50: mol_type = other DNA
aacatttatacctattctacaaaaaacaccctccattatctttatcttac

SEQ ID NO: 10437 - DNA, 50 bp, synthetic construct
  source 1..50: mol_type = other DNA
aatacaaatcattaataattaccactacttaaataaaactacacaaatac

SEQ ID NO: 10438 - DNA, 50 bp, synthetic construct
  source 1..50: mol_type = other DNA
atcctcctaattttaaaaaactaaatcaaatcatttctaaaatctcttcc

SEQ ID NO: 10439 - DNA, 50 bp, synthetic construct
  source 1..50: mol_type = other DNA
cttacctaataatacatatcctacaataacttctcaccacttcttcttac

SEQ ID NO: 10440 - DNA, 50 bp, synthetic construct
  source 1..50: mol_type = other DNA
aataaaaattaatcttaattaacaactctttacatccrccaaaactattc

SEQ ID NO: 10441 - DNA, 50 bp, synthetic construct
  source 1..50: mol_type = other DNA
aaaacaaacrtcacccacaaacctaaaaataaataacraacaaccctaac

SEQ ID NO: 10442 - DNA, 50 bp, synthetic construct
  source 1..50: mol_type = other DNA
ctattaactccttaaccttcraaacatataaccaaaattaaacacaaaac

SEQ ID NO: 10443 - DNA, 50 bp, synthetic construct
  source 1..50: mol_type = other DNA
caaatccaaacaaactccttaaaaaaaataacatttaatctaacctctac

SEQ ID NO: 10444 - DNA, 50 bp, synthetic construct
  source 1..50: mol_type = other DNA
ccatatacaaaacaaaactaaacatactaacctactttaatcaaaccaac

SEQ ID NO: 10445 - DNA, 50 bp, synthetic construct
  source 1..50: mol_type = other DNA
cacaattccctataaaataaaaatatattaaatctaaatcccaatacaac

SEQ ID NO: 10446 - DNA, 50 bp, synthetic construct
  source 1..50: mol_type = other DNA
taatcctataaaaaatattaacaatcctactcrtattctcataatactac

SEQ ID NO: 10447 - DNA, 50 bp, synthetic construct
  source 1..50: mol_type = other DNA
attaaaacaaaacctcaataatcctataaaaaatattaacaatcctactc

SEQ ID NO: 10448 - DNA, 50 bp, synthetic construct
  source 1..50: mol_type = other DNA
ttacaaaacctcttaaattaacaattaataaaaacrtttttactactttc

SEQ ID NO: 10449 - DNA, 50 bp, synthetic construct
  source 1..50: mol_type = other DNA
catccaacaaaaattctatttatattatttccaacraaaacaataaaaac

SEQ ID NO: 10450 - DNA, 50 bp, synthetic construct
  source 1..50: mol_type = other DNA
aacataaccacaatacaaatatcacaatacaaatacaacttttcctacrc

SEQ ID NO: 10451 - DNA, 50 bp, synthetic construct
  source 1..50: mol_type = other DNA
ataacataaccacaatacaaatatcacaatacaaatacaacttttcctac

SEQ ID NO: 10452 - DNA, 50 bp, synthetic construct
  source 1..50: mol_type = other DNA
ttttctaattccaaaattacaaacaaaatttcaaatactaaaataaaatc

SEQ ID NO: 10453 - DNA, 50 bp, synthetic construct
  source 1..50: mol_type = other DNA
tcatcacaaaatttacacttactttttaacaatcaataattcaaatatac

SEQ ID NO: 10454 - DNA, 50 bp, synthetic construct
  source 1..50: mol_type = other DNA
ataaaaaactaactttactaaactcaaccrcttcaatacatctatcactc

SEQ ID NO: 10455 - DNA, 50 bp, synthetic construct
  source 1..50: mol_type = other DNA
tccaaactcataacaaaccataaacaaaatccaactattaaaaaaattac

SEQ ID NO: 10456 - DNA, 50 bp, synthetic construct
  source 1..50: mol_type = other DNA
aaattaaaaaactttcccataaaaatacrattctctcttacaaacaaacc

SEQ ID NO: 10457 - DNA, 50 bp, synthetic construct
  source 1..50: mol_type = other DNA
aattcctaaatacttaaacttcaaaaacrccaccaaaccctacataaccc

SEQ ID NO: 10458 - DNA, 50 bp, synthetic construct
  source 1..50: mol_type = other DNA
tctaaaacctttcaactatattaacaaatcacaaacraaaactacctttc

SEQ ID NO: 10459 - DNA, 50 bp, synthetic construct
  source 1..50: mol_type = other DNA
ctaaaacraaacacttactcattaactactatcraacaacraaaaaaacc

SEQ ID NO: 10460 - DNA, 50 bp, synthetic construct
  source 1..50: mol_type = other DNA
ataactacactcctaaaaataaacraatccactacaacccraaaaacaac

SEQ ID NO: 10461 - DNA, 50 bp, synthetic construct
  source 1..50: mol_type = other DNA
acttctaatcatacacacrttctaaaaatcaaccaatcracracaacatc

SEQ ID NO: 10462 - DNA, 50 bp, synthetic construct
  source 1..50: mol_type = other DNA
ataataaatccrcttacttttaaaaatacaattactacaacratactatc

SEQ ID NO: 10463 - DNA, 50 bp, synthetic construct
  source 1..50: mol_type = other DNA
ataaatccrcttacttttaaaaatacaattactacaacratactatcrcc

SEQ ID NO: 10464 - DNA, 50 bp, synthetic construct
  source 1..50: mol_type = other DNA
aaatacaattactacaacratactatcrccractaactaattttcaaaac

SEQ ID NO: 10465 - DNA, 50 bp, synthetic construct
  source 1..50: mol_type = other DNA
ctcctattcataactttaaacttctacaaaaaacaatattttcctttccc

SEQ ID NO: 10466 - DNA, 50 bp, synthetic construct
  source 1..50: mol_type = other DNA
tattcaacttttttcaatacattcaaaaatcatcaaaactacttttcctc

SEQ ID NO: 10467 - DNA, 50 bp, synthetic construct
  source 1..50: mol_type = other DNA
atccaattacaaaaaaacaataatctataaaacrctttataaacatactc

SEQ ID NO: 10468 - DNA, 50 bp, synthetic construct
  source 1..50: mol_type = other DNA
aaaacaaacaaacrcraatccaattacaaaaaaacaataatctataaaac

SEQ ID NO: 10469 - DNA, 50 bp, synthetic construct
  source 1..50: mol_type = other DNA
atatatttacaaaacrcctcataaattactacctttttataactaaaccc

SEQ ID NO: 10470 - DNA, 50 bp, synthetic construct
  source 1..50: mol_type = other DNA
atatttacaaaacrcctcataaattactacctttttataactaaacccrc

SEQ ID NO: 10471 - DNA, 50 bp, synthetic construct
  source 1..50: mol_type = other DNA
tacccaaaataaccataaaaacaaaacacacaaatactataccctacacc

SEQ ID NO: 10472 - DNA, 50 bp, synthetic construct
  source 1..50: mol_type = other DNA
ctaatttcttttacttctcttatatttctaaaaatcaaccatattactac

SEQ ID NO: 10473 - DNA, 50 bp, synthetic construct
  source 1..50: mol_type = other DNA
cctttattcccactttaaacraattaccatcaaatccctataaaaataac

SEQ ID NO: 10474 - DNA, 50 bp, synthetic construct
  source 1..50: mol_type = other DNA
ctaaatatatcattccataaaactaactatacctcccaacataaaacaac

SEQ ID NO: 10475 - DNA, 50 bp, synthetic construct
  source 1..50: mol_type = other DNA
accaataacctaaaattcaaaatctaaaaatccaaaactcaaattacaac

SEQ ID NO: 10476 - DNA, 50 bp, synthetic construct
  source 1..50: mol_type = other DNA
attaacattttatcaatttaatttaaaaatcccaatcattaaacctaaac

SEQ ID NO: 10477 - DNA, 50 bp, synthetic construct
  source 1..50: mol_type = other DNA
ctactttccatttaccaacaaaaccaacaaaactaattacacttcaaatc

SEQ ID NO: 10478 - DNA, 50 bp, synthetic construct
  source 1..50: mol_type = other DNA
taaataaactcccaattaaaaatacaaatcatactttaatcacataccac

SEQ ID NO: 10479 - DNA, 50 bp, synthetic construct
  source 1..50: mol_type = other DNA
taacatctaaaatctaaactaactatcaactaatacaaaaaaaccaacac

SEQ ID NO: 10480 - DNA, 50 bp, synthetic construct
  source 1..50: mol_type = other DNA
tcaactaatacaaaaaaaccaacacraacaaatctaaaaatactacttcc

SEQ ID NO: 10481 - DNA, 50 bp, synthetic construct
  source 1..50: mol_type = other DNA
acctttataaaccaaacaaccatatactcratcaaccccactacaaatac

SEQ ID NO: 10482 - DNA, 50 bp, synthetic construct
  source 1..50: mol_type = other DNA
actaaaaaacraaacraacaacacactacatcaaattaaaatcaaacttc

SEQ ID NO: 10483 - DNA, 50 bp, synthetic construct
  source 1..50: mol_type = other DNA
cccccaaatattctatcatcctacaaccaaactatactaaaaaacraaac

SEQ ID NO: 10484 - DNA, 50 bp, synthetic construct
  source 1..50: mol_type = other DNA
tctaaaacacraaatttaacttcaatctaatacaatatattacccrcccc

SEQ ID NO: 10485 - DNA, 50 bp, synthetic construct
  source 1..50: mol_type = other DNA
acaaaatacttaaaaataacacaaaccctcaaatcataaaaaactaaacc

SEQ ID NO: 10486 - DNA, 50 bp, synthetic construct
  source 1..50: mol_type = other DNA
ataaaatcctcttaaccctaatcttctaacaacacacacacaaaccaaac

SEQ ID NO: 10487 - DNA, 50 bp, synthetic construct
  source 1..50: mol_type = other DNA
accctaatcttctaacaacacacacacaaaccaaacrtaataaataatcc

SEQ ID NO: 10488 - DNA, 50 bp, synthetic construct
  source 1..50: mol_type = other DNA
acctactaaatcacctaaacaaaactccctaaaaacttataataaccaac

SEQ ID NO: 10489 - DNA, 50 bp, synthetic construct
  source 1..50: mol_type = other DNA
aaaaacccctaaaaatcacttctcttctacrtcataattaacacatatac

SEQ ID NO: 10490 - DNA, 50 bp, synthetic construct
  source 1..50: mol_type = other DNA
cccctaacacactacaaaactcctaactttaacatttcccrtatacaatc

SEQ ID NO: 10491 - DNA, 50 bp, synthetic construct
  source 1..50: mol_type = other DNA
atacaatcrtatttctactaatactctctaaatacaataaaaaaactacc

SEQ ID NO: 10492 - DNA, 50 bp, synthetic construct
  source 1..50: mol_type = other DNA
aaaaaacctttaacataaccaaacccttcaaattttaacttcatatcacc

SEQ ID NO: 10493 - DNA, 50 bp, synthetic construct
  source 1..50: mol_type = other DNA
ctcatatttataccatcctttaatattttaacaacctcatctacraaatc

SEQ ID NO: 10494 - DNA, 50 bp, synthetic construct
  source 1..50: mol_type = other DNA
aacactaaaacttaaatttcatatacttttcacaatcataataacaaacc

SEQ ID NO: 10495 - DNA, 50 bp, synthetic construct
  source 1..50: mol_type = other DNA
tatacttttcacaatcataataacaaaccraatttaaccccctccctatc

SEQ ID NO: 10496 - DNA, 50 bp, synthetic construct
  source 1..50: mol_type = other DNA
taacaatcttcacaacaacracctaatccctcrtatctaacaacaaaatc

SEQ ID NO: 10497 - DNA, 50 bp, synthetic construct
  source 1..50: mol_type = other DNA
rttaacaaccaaaaaaattaacaatcttcacaacaacracctaatccctc

SEQ ID NO: 10498 - DNA, 50 bp, synthetic construct
  source 1..50: mol_type = other DNA
cattctcraaatcrttaacaaccaaaaaaattaacaatcttcacaacaac

SEQ ID NO: 10499 - DNA, 50 bp, synthetic construct
  source 1..50: mol_type = other DNA
raaaaatcaaatcrctactataaaaattatcaacctctctaattaccaac

SEQ ID NO: 10500 - DNA, 50 bp, synthetic construct
  source 1..50: mol_type = other DNA
tcaacctctctaattaccaacracctcraaaataaaattataatccctac

SEQ ID NO: 10501 - DNA, 50 bp, synthetic construct
  source 1..50: mol_type = other DNA
attataatccctacrtcaaaacrattatactaaaaactaaataaaaacac

SEQ ID NO: 10502 - DNA, 50 bp, synthetic construct
  source 1..50: mol_type = other DNA
aactatcracaacaacaaaaattttaatcttttctctccacccaatttcc

SEQ ID NO: 10503 - DNA, 50 bp, synthetic construct
  source 1..50: mol_type = other DNA
actccccacaacaaaatactattactcaaaatttcaaaacctaatttatc

SEQ ID NO: 10504 - DNA, 50 bp, synthetic construct
  source 1..50: mol_type = other DNA
tactattactcaaaatttcaaaacctaatttatcraaacccatccccctc

SEQ ID NO: 10505 - DNA, 50 bp, synthetic construct
  source 1..50: mol_type = other DNA
caaatctcttaaaacrtcacttccaaacatttaaaatacacccracacac

SEQ ID NO: 10506 - DNA, 50 bp, synthetic construct
  source 1..50: mol_type = other DNA
ataccatcaaatctcttaaaacrtcacttccaaacatttaaaatacaccc

SEQ ID NO: 10507 - DNA, 50 bp, synthetic construct
  source 1..50: mol_type = other DNA
tcatttcctatacatttcctccccaactataccatcaaatctcttaaaac

SEQ ID NO: 10508 - DNA, 50 bp, synthetic construct
  source 1..50: mol_type = other DNA
taaaacaaacaactcttttccctaaaacctcaatatattaaatcaaaccc

SEQ ID NO: 10509 - DNA, 50 bp, synthetic construct
  source 1..50: mol_type = other DNA
aaccctacaaaaaatctctaaatttcctaaaaaaacttaactacaaacrc

SEQ ID NO: 10510 - DNA, 50 bp, synthetic construct
  source 1..50: mol_type = other DNA
aaaaccctacaaaaaatctctaaatttcctaaaaaaacttaactacaaac

SEQ ID NO: 10511 - DNA, 50 bp, synthetic construct
  source 1..50: mol_type = other DNA
tatatacaccraaaacatctaaaacataacaaacacaaaccrttatttac

SEQ ID NO: 10512 - DNA, 50 bp, synthetic construct
  source 1..50: mol_type = other DNA
attaacatctatatacaccraaaacatctaaaacataacaaacacaaacc

SEQ ID NO: 10513 - DNA, 50 bp, synthetic construct
  source 1..50: mol_type = other DNA
tcatcrtactaactaactttccttacttctaaaatataaaattataaatc

SEQ ID NO: 10514 - DNA, 50 bp, synthetic construct
  source 1..50: mol_type = other DNA
taataacaaaacaaaccaataaccraccraccrcaccaaaattaatctac

SEQ ID NO: 10515 - DNA, 50 bp, synthetic construct
  source 1..50: mol_type = other DNA
attacaacacataactaataataacaaaacaaaccaataaccraccracc

SEQ ID NO: 10516 - DNA, 50 bp, synthetic construct
  source 1..50: mol_type = other DNA
aaaaacraattacaacacataactaataataacaaaacaaaccaataacc

SEQ ID NO: 10517 - DNA, 50 bp, synthetic construct
  source 1..50: mol_type = other DNA
ccraccrattactaatttattttactatcatcaaccatatattacaatcc

SEQ ID NO: 10518 - DNA, 50 bp, synthetic construct
  source 1..50: mol_type = other DNA
atatactctaaaaaaatctaaaaattaactacattaccacaatttaaacc

SEQ ID NO: 10519 - DNA, 50 bp, synthetic construct
  source 1..50: mol_type = other DNA
aacacataaatctaacacatactttttttctataaccttaaacaacctac

SEQ ID NO: 10520 - DNA, 50 bp, synthetic construct
  source 1..50: mol_type = other DNA
atactatcatctaatttcatccttttcatcctaacttaaataaaactaac

SEQ ID NO: 10521 - DNA, 50 bp, synthetic construct
  source 1..50: mol_type = other DNA
aacataaaccactacacccracccaaactttctttctatttataaatctc

SEQ ID NO: 10522 - DNA, 50 bp, synthetic construct
  source 1..50: mol_type = other DNA
tatttataaatctcrtctacaaccataccactctaaacatacccaatctc

SEQ ID NO: 10523 - DNA, 50 bp, synthetic construct
  source 1..50: mol_type = other DNA
actcactccaattacttactaaaataaaacctaaaaacctaataatcccc

SEQ ID NO: 10524 - DNA, 50 bp, synthetic construct
  source 1..50: mol_type = other DNA
taaattaaactcataaactatttctaccaaacaataattttaaaaacttc

SEQ ID NO: 10525 - DNA, 50 bp, synthetic construct
  source 1..50: mol_type = other DNA
aacaaattcrtactccacrtaaacttaatcttacattaacccaacatatc

SEQ ID NO: 10526 - DNA, 50 bp, synthetic construct
  source 1..50: mol_type = other DNA
aaaattaataaaaccaacracatattaaatcaatacaaaactaaacccac

SEQ ID NO: 10527 - DNA, 50 bp, synthetic construct
  source 1..50: mol_type = other DNA
atatataattacctatataaactaacactctacraatacaaaacaaattc

SEQ ID NO: 10528 - DNA, 50 bp, synthetic construct
  source 1..50: mol_type = other DNA
tattctatactcrcaaaatatcaatttatataaacaatcatatactaatc

SEQ ID NO: 10529 - DNA, 50 bp, synthetic construct
  source 1..50: mol_type = other DNA
aaaaaaactttccaataaaaataccaaccatatcatactatacctcaacc

SEQ ID NO: 10530 - DNA, 50 bp, synthetic construct
  source 1..50: mol_type = other DNA
atacacttaaattatactctctatcccaaatttcaatcattactaacaac

SEQ ID NO: 10531 - DNA, 50 bp, synthetic construct
  source 1..50: mol_type = other DNA
ctctctatcccaaatttcaatcattactaacaacrttcaatataaaatac

SEQ ID NO: 10532 - DNA, 50 bp, synthetic construct
  source 1..50: mol_type = other DNA
aacatcataaaatacatttacacaaacccraataatataacctactacac

SEQ ID NO: 10533 - DNA, 50 bp, synthetic construct
  source 1..50: mol_type = other DNA
aaaatacccaaattcatctaccaaattcaaaatacaaccctaactattcc

SEQ ID NO: 10534 - DNA, 50 bp, synthetic construct
  source 1..50: mol_type = other DNA
tcacrtttctctattaactaaacratataaaaaaacrtcaaaaacctctc

SEQ ID NO: 10535 - DNA, 50 bp, synthetic construct
  source 1..50: mol_type = other DNA
atctaaaaataacaacttaacttctctaaaaactctaaacttccctaatc

SEQ ID NO: 10536 - DNA, 50 bp, synthetic construct
  source 1..50: mol_type = other DNA
aaaatcaaaaacctatttttaatatcattccaccaattcccrttaattcc

SEQ ID NO: 10537 - DNA, 50 bp, synthetic construct
  source 1..50: mol_type = other DNA
ctcaacaacaaaatcaaaaacctatttttaatatcattccaccaattccc

SEQ ID NO: 10538 - DNA, 50 bp, synthetic construct
  source 1..50: mol_type = other DNA
aacttaacaaaaccaaatctccattatccttaattttaaatttaatatcc

SEQ ID NO: 10539 - DNA, 50 bp, synthetic construct
  source 1..50: mol_type = other DNA
ataaaaaacttacaatcctcattcraatttccttccaaaaaaaataaatc

SEQ ID NO: 10540 - DNA, 50 bp, synthetic construct
  source 1..50: mol_type = other DNA
taaaaatcaaacctattaataaataaaaactatttactttctcctctaac

SEQ ID NO: 10541 - DNA, 50 bp, synthetic construct
  source 1..50: mol_type = other DNA
acaaacaattttcatctatcaacaaatctaatctccaaaaactctcattc

SEQ ID NO: 10542 - DNA, 50 bp, synthetic construct
  source 1..50: mol_type = other DNA
aaaatatcaaaaatactttaatctataatatacaatttcacattaccacc

SEQ ID NO: 10543 - DNA, 50 bp, synthetic construct
  source 1..50: mol_type = other DNA
caaacacaacaataaatactaaactcttaaaattctctaaaacactaatc

SEQ ID NO: 10544 - DNA, 50 bp, synthetic construct
  source 1..50: mol_type = other DNA
tatacaatcccattaaaaataaaactactttaaacaaatctaactactac

SEQ ID NO: 10545 - DNA, 50 bp, synthetic construct
  source 1..50: mol_type = other DNA
ctactacrcattacttactaaaccttttaaaaaatcaaccaaaaatcttc

SEQ ID NO: 10546 - DNA, 50 bp, synthetic construct
  source 1..50: mol_type = other DNA
caaaaatatttcaacaaaaaaaataacactaactcacaacaattattacc

SEQ ID NO: 10547 - DNA, 50 bp, synthetic construct
  source 1..50: mol_type = other DNA
ttaaatatcaaccaaaacatttacaaaatatcaaaaattttccctaaaac

SEQ ID NO: 10548 - DNA, 50 bp, synthetic construct
  source 1..50: mol_type = other DNA
ctctaaaatcattcatttaatttataattttcacatcatccttttaatac

SEQ ID NO: 10549 - DNA, 50 bp, synthetic construct
  source 1..50: mol_type = other DNA
tttaaatataaaacctctaaactaaacacrcraatctctctctatacctc

SEQ ID NO: 10550 - DNA, 50 bp, synthetic construct
  source 1..50: mol_type = other DNA
caactctatccctaaaacttttaaatataaaacctctaaactaaacacrc

SEQ ID NO: 10551 - DNA, 50 bp, synthetic construct
  source 1..50: mol_type = other DNA
atcaactctatccctaaaacttttaaatataaaacctctaaactaaacac

SEQ ID NO: 10552 - DNA, 50 bp, synthetic construct
  source 1..50: mol_type = other DNA
ttataaacaataaataaaataattcctataaaaaatttaacccaaaaccc

SEQ ID NO: 10553 - DNA, 50 bp, synthetic construct
  source 1..50: mol_type = other DNA
tcaacctaaatttccaaatataaatccatttacaaattaaaaaataaaac

SEQ ID NO: 10554 - DNA, 50 bp, synthetic construct
  source 1..50: mol_type = other DNA
tctattaaacaaaataaattaccaccccaccttaacattacctctaactc

SEQ ID NO: 10555 - DNA, 50 bp, synthetic construct
  source 1..50: mol_type = other DNA
aaatcaaatactatatttttttctactcatactaattcaaattcctcttc

SEQ ID NO: 10556 - DNA, 50 bp, synthetic construct
  source 1..50: mol_type = other DNA
aacaatatactaatcatcacaaccattaccaaattcraacrtctacaaac

SEQ ID NO: 10557 - DNA, 50 bp, synthetic construct
  source 1..50: mol_type = other DNA
ctccrcaaatcttccaaattctacttaaaaaaacacaaaaccctcaaaac

SEQ ID NO: 10558 - DNA, 50 bp, synthetic construct
  source 1..50: mol_type = other DNA
taaacttccttacraataaaattatcctaaatcacatacacaatattaac

SEQ ID NO: 10559 - DNA, 50 bp, synthetic construct
  source 1..50: mol_type = other DNA
acccttcttcatcrttaacattatacatataatccaaaataacctcatcc

SEQ ID NO: 10560 - DNA, 50 bp, synthetic construct
  source 1..50: mol_type = other DNA
aaattaaataaactatatcaattctaatttcaatccccttatctactacc

SEQ ID NO: 10561 - DNA, 50 bp, synthetic construct
  source 1..50: mol_type = other DNA
ctaccraaacccaaatttcaaaattaccttccaaaaacttctatacctac

SEQ ID NO: 10562 - DNA, 50 bp, synthetic construct
  source 1..50: mol_type = other DNA
acctacrcaaatcttctttaaaaacctataaaaataactactccaacaac

SEQ ID NO: 10563 - DNA, 50 bp, synthetic construct
  source 1..50: mol_type = other DNA
aatcaatattatcrctaaacacaataccttaataacccacaaaatcttcc

SEQ ID NO: 10564 - DNA, 50 bp, synthetic construct
  source 1..50: mol_type = other DNA
aacaataaatcatttatactacaattcctcccttataaatcaatattatc

SEQ ID NO: 10565 - DNA, 50 bp, synthetic construct
  source 1..50: mol_type = other DNA
atccctttcatataatctcattacttctctaaaatatatcaaaaaaatcc

SEQ ID NO: 10566 - DNA, 50 bp, synthetic construct
  source 1..50: mol_type = other DNA
aatcaattataactaaaacactttaaaatataaacttctacaatacacac

SEQ ID NO: 10567 - DNA, 50 bp, synthetic construct
  source 1..50: mol_type = other DNA
acattttctaaatttaatattacacaaccctaaaaataaactacctaaac

SEQ ID NO: 10568 - DNA, 50 bp, synthetic construct
  source 1..50: mol_type = other DNA
ataataaccracttaaacctaaactacrccaaacttaccaaaacaaaacc

SEQ ID NO: 10569 - DNA, 50 bp, synthetic construct
  source 1..50: mol_type = other DNA
taaaataacttcactatctccacctcatctttcccactttacctacaatc

SEQ ID NO: 10570 - DNA, 50 bp, synthetic construct
  source 1..50: mol_type = other DNA
cccraaaaaatactatactacaaataaaaactactttatcctaccaaaac

SEQ ID NO: 10571 - DNA, 50 bp, synthetic construct
  source 1..50: mol_type = other DNA
cacrctctaacaaaacaaaacaatctttacctacaacataacaccttctc

SEQ ID NO: 10572 - DNA, 50 bp, synthetic construct
  source 1..50: mol_type = other DNA
acaaaacaaaacaatctttacctacaacataacaccttctcraaaatacc

SEQ ID NO: 10573 - DNA, 50 bp, synthetic construct
  source 1..50: mol_type = other DNA
aaaataatacttactatttactaaaacctcttctttaaaacraaattttc

SEQ ID NO: 10574 - DNA, 50 bp, synthetic construct
  source 1..50: mol_type = other DNA
atatattacactacaaaatattcattacaaacaaacraattaaaacctcc

SEQ ID NO: 10575 - DNA, 50 bp, synthetic construct
  source 1..50: mol_type = other DNA
atctctaacattacatatattacactacaaaatattcattacaaacaaac

SEQ ID NO: 10576 - DNA, 50 bp, synthetic construct
  source 1..50: mol_type = other DNA
cctatatttcctatcccactcccattaccttattctaatcaatctatccc

SEQ ID NO: 10577 - DNA, 50 bp, synthetic construct
  source 1..50: mol_type = other DNA
ttctcttcctctacattattcattaacaaaaacataaaactatactcctc

SEQ ID NO: 10578 - DNA, 50 bp, synthetic construct
  source 1..50: mol_type = other DNA
aaaacccaaaattctttttttacccaaaattctttttttccctactcaac

SEQ ID NO: 10579 - DNA, 50 bp, synthetic construct
  source 1..50: mol_type = other DNA
caacaattcctaatatactatccaattccttaatccaactatctaatccc

SEQ ID NO: 10580 - DNA, 50 bp, synthetic construct
  source 1..50: mol_type = other DNA
aacrataacccaaacctaacacaccctaaaaaataaactatccrtaattc

SEQ ID NO: 10581 - DNA, 50 bp, synthetic construct
  source 1..50: mol_type = other DNA
ctattaaaacrataacccaaacctaacacaccctaaaaaataaactatcc

SEQ ID NO: 10582 - DNA, 50 bp, synthetic construct
  source 1..50: mol_type = other DNA
aaaccccaattcataacctaacatacaataaaaactctctccataccaac

SEQ ID NO: 10583 - DNA, 50 bp, synthetic construct
  source 1..50: mol_type = other DNA
cataaaaaaaaccctcactacatatcaaaccataaactaaaacctaatcc

SEQ ID NO: 10584 - DNA, 50 bp, synthetic construct
  source 1..50: mol_type = other DNA
ctctcaaccacaaaaaataccrctaactcacaacaataaaacaaacaaac

SEQ ID NO: 10585 - DNA, 50 bp, synthetic construct
  source 1..50: mol_type = other DNA
taaccttaaatcataacctaaaaactaacctataaaaaccactaaaattc

SEQ ID NO: 10586 - DNA, 50 bp, synthetic construct
  source 1..50: mol_type = other DNA
actaatactttctacccaatactacttcacaaaatcaatatccaacttcc

SEQ ID NO: 10587 - DNA, 50 bp, synthetic construct
  source 1..50: mol_type = other DNA
cratataatcaactatatcraataccrctaaaaaaaccaatcaaacaaac

SEQ ID NO: 10588 - DNA, 50 bp, synthetic construct
  source 1..50: mol_type = other DNA
taaataaactacataaacaccaactaaatactaataaataacaaaaccac

SEQ ID NO: 10589 - DNA, 50 bp, synthetic construct
  source 1..50: mol_type = other DNA
aaaaattacaaataacctaatcctaaaactactcraaataaaaaacctac

SEQ ID NO: 10590 - DNA, 50 bp, synthetic construct
  source 1..50: mol_type = other DNA
tatcccatcacaccccaaaaactcaaattattattctcattttactcaac

SEQ ID NO: 10591 - DNA, 50 bp, synthetic construct
  source 1..50: mol_type = other DNA
ccaaatcactcaactaattcaaaataataaaataaacaaaaataacaccc

SEQ ID NO: 10592 - DNA, 50 bp, synthetic construct
  source 1..50: mol_type = other DNA
ataataaaataaacaaaaataacacccracctctatataccctacctacc

SEQ ID NO: 10593 - DNA, 50 bp, synthetic construct
  source 1..50: mol_type = other DNA
ccaaccattaaactaccctaacactacccttccctttaaataaactaaac

SEQ ID NO: 10594 - DNA, 50 bp, synthetic construct
  source 1..50: mol_type = other DNA
cctaacacacaataaatactcaataaacccrctaaataaataaacractc

SEQ ID NO: 10595 - DNA, 50 bp, synthetic construct
  source 1..50: mol_type = other DNA
ataccaaaacaacccaataactaacaataccaaaacataaatcccraatc

SEQ ID NO: 10596 - DNA, 50 bp, synthetic construct
  source 1..50: mol_type = other DNA
aataactaacaataccaaaacataaatcccraatcrtttattcattcaac

SEQ ID NO: 10597 - DNA, 50 bp, synthetic construct
  source 1..50: mol_type = other DNA
tcattcaacraatttattaaacacctactatataccaaacactaataaac

SEQ ID NO: 10598 - DNA, 50 bp, synthetic construct
  source 1..50: mol_type = other DNA
aaatatatataaaacaataaattaatccaacrccctaacacacaataaac

SEQ ID NO: 10599 - DNA, 50 bp, synthetic construct
  source 1..50: mol_type = other DNA
atcatacttatattcaacaaatacatttcacrtttactatatattaaaac

SEQ ID NO: 10600 - DNA, 50 bp, synthetic construct
  source 1..50: mol_type = other DNA
acrctaaactaattcattactttacatacattctctcatttaattctccc

SEQ ID NO: 10601 - DNA, 50 bp, synthetic construct
  source 1..50: mol_type = other DNA
catacattctctcatttaattctcccrcattactattaaccacattttac

SEQ ID NO: 10602 - DNA, 50 bp, synthetic construct
  source 1..50: mol_type = other DNA
attctcccrcattactattaaccacattttacraaaaaacaaactaaaac

SEQ ID NO: 10603 - DNA, 50 bp, synthetic construct
  source 1..50: mol_type = other DNA
acaaaatttaaaaaaataacacactataaacccaatctatataaattatc

SEQ ID NO: 10604 - DNA, 50 bp, synthetic construct
  source 1..50: mol_type = other DNA
aaataaccaacctaaaaaaatttaatcccaaaaaattacaatcaaaaccc

SEQ ID NO: 10605 - DNA, 50 bp, synthetic construct
  source 1..50: mol_type = other DNA
catcacataaactccaaaattctacttccacctccaaaaacaaaaaactc

SEQ ID NO: 10606 - DNA, 50 bp, synthetic construct
  source 1..50: mol_type = other DNA
ataataaaaatccaaaccctccctcrtaaaaccaaacctcaaatctaaac

SEQ ID NO: 10607 - DNA, 50 bp, synthetic construct
  source 1..50: mol_type = other DNA
aaaccratcccttaaacaacctaaaataataaaaatccaaaccctccctc

SEQ ID NO: 10608 - DNA, 50 bp, synthetic construct
  source 1..50: mol_type = other DNA
atcatacttacaaaactaataatataaaccaaaaataactaccrtacaac

SEQ ID NO: 10609 - DNA, 50 bp, synthetic construct
  source 1..50: mol_type = other DNA
taaacaaatcatacttacaaaactaataatataaaccaaaaataactacc

SEQ ID NO: 10610 - DNA, 50 bp, synthetic construct
  source 1..50: mol_type = other DNA
ccataaataaataatacttacactcacaaaaacattaacaaaaattaccc

SEQ ID NO: 10611 - DNA, 50 bp, synthetic construct
  source 1..50: mol_type = other DNA
tataaaactaaataatctacacttctaacaaattcccaaataacrctaac

SEQ ID NO: 10612 - DNA, 50 bp, synthetic construct
  source 1..50: mol_type = other DNA
ctcacrccactacctaaaactccrataaatctaaatctaatcattatctc

SEQ ID NO: 10613 - DNA, 50 bp, synthetic construct
  source 1..50: mol_type = other DNA
taaccacaacactcaaacctacraaaaataactaataactactctcctcc

SEQ ID NO: 10614 - DNA, 50 bp, synthetic construct
  source 1..50: mol_type = other DNA
aaataactaataactactctcctccrcttccataaaattaaataaccaac

SEQ ID NO: 10615 - DNA, 50 bp, synthetic construct
  source 1..50: mol_type = other DNA
aactactctcctccrcttccataaaattaaataaccaacrtaaacaaaac

SEQ ID NO: 10616 - DNA, 50 bp, synthetic construct
  source 1..50: mol_type = other DNA
tcaaaatacccaaatatcccatttaccattaataaaaacaacctataacc

SEQ ID NO: 10617 - DNA, 50 bp, synthetic construct
  source 1..50: mol_type = other DNA
acaaaactcaaaaaacaatactaatataactcctatcttacaatccccac

SEQ ID NO: 10618 - DNA, 50 bp, synthetic construct
  source 1..50: mol_type = other DNA
tcttaccaataacctttaaaaactttcacatacattatctcatttaaaac

SEQ ID NO: 10619 - DNA, 50 bp, synthetic construct
  source 1..50: mol_type = other DNA
ccctccttttcatacttattaaaaatccacaatacaaacttaaacctaac

SEQ ID NO: 10620 - DNA, 50 bp, synthetic construct
  source 1..50: mol_type = other DNA
acccaaaaaacaaacctaaaccttaatttacacattaaaaaaacrtaaac

SEQ ID NO: 10621 - DNA, 50 bp, synthetic construct
  source 1..50: mol_type = other DNA
actattaataaattattttcccacccatataataccaatctcacrtaatc

SEQ ID NO: 10622 - DNA, 50 bp, synthetic construct
  source 1..50: mol_type = other DNA
caattatcactctttccracttctacaatccttttataaaaacaaaaaac

SEQ ID NO: 10623 - DNA, 50 bp, synthetic construct
  source 1..50: mol_type = other DNA
ctaccaaatttaatcacctaaaaaccaacaattactaaaatcccrtacac

SEQ ID NO: 10624 - DNA, 50 bp, synthetic construct
  source 1..50: mol_type = other DNA
caaaactctaactaactaaaactactaatcttatatctttctcctctccc

SEQ ID NO: 10625 - DNA, 50 bp, synthetic construct
  source 1..50: mol_type = other DNA
cccttatctcctctaaccactatttcaaatacratactctaaaattccac

SEQ ID NO: 10626 - DNA, 50 bp, synthetic construct
  source 1..50: mol_type = other DNA
ttctacttcaacacaacacttaaacctataatttacacaaatcaaaacac

SEQ ID NO: 10627 - DNA, 50 bp, synthetic construct
  source 1..50: mol_type = other DNA
ctacctaattcataaccaaaaatacctaaatctctccccctacatcaccc

SEQ ID NO: 10628 - DNA, 50 bp, synthetic construct
  source 1..50: mol_type = other DNA
aacacaaacatatataaatacacaacatatatatatacacatacatatac

SEQ ID NO: 10629 - DNA, 50 bp, synthetic construct
  source 1..50: mol_type = other DNA
cataaactataacaacatttccrtcaatatatttcctattaatctaactc

SEQ ID NO: 10630 - DNA, 50 bp, synthetic construct
  source 1..50: mol_type = other DNA
cccaaaatatatttactactttttcctctccccactaacctaaataaatc

SEQ ID NO: 10631 - DNA, 50 bp, synthetic construct
  source 1..50: mol_type = other DNA
taccrtaaaacccaaccaactatatttcaacataccctacaaatacttcc

SEQ ID NO: 10632 - DNA, 50 bp, synthetic construct
  source 1..50: mol_type = other DNA
atttcaacataccctacaaatacttccrataaaacccaaaattaaaaatc

SEQ ID NO: 10633 - DNA, 50 bp, synthetic construct
  source 1..50: mol_type = other DNA
ttaccaaactaattttccttccaaacrctaaatacctttaaaaaaacrac

SEQ ID NO: 10634 - DNA, 50 bp, synthetic construct
  source 1..50: mol_type = other DNA
aaaacaaaaaccttaaatactaattccaaccctactatataaccctaaac

SEQ ID NO: 10635 - DNA, 50 bp, synthetic construct
  source 1..50: mol_type = other DNA
tctatactttaaccaaaaattacaacaacacttacaaattcattcttacc

SEQ ID NO: 10636 - DNA, 50 bp, synthetic construct
  source 1..50: mol_type = other DNA
taaacttctattaataattaacacaacaaaaaaacctaacttcatctctc

SEQ ID NO: 10637 - DNA, 50 bp, synthetic construct
  source 1..50: mol_type = other DNA
ccacaaaaaaatatattctattaatctatatactataaaaacccaaaatc

SEQ ID NO: 10638 - DNA, 50 bp, synthetic construct
  source 1..50: mol_type = other DNA
aaaaaacaaatacccccrcatttcccctacaaaaaacaaaccaaaaatac

SEQ ID NO: 10639 - DNA, 50 bp, synthetic construct
  source 1..50: mol_type = other DNA
aaataaatcacttaaaatcacraattcaaaaccaaactaaccaacataac

SEQ ID NO: 10640 - DNA, 50 bp, synthetic construct
  source 1..50: mol_type = other DNA
tctaatttacraacctaacctaaataaaaaaccccaaaaaaatccaaaac

SEQ ID NO: 10641 - DNA, 50 bp, synthetic construct
  source 1..50: mol_type = other DNA
ctactcattaactctctaccaacacratcacactaaaaattctaatttac

SEQ ID NO: 10642 - DNA, 50 bp, synthetic construct
  source 1..50: mol_type = other DNA
aaccaaaaatcaaatatacatatctaatcttaatcttacttcccaccaac

SEQ ID NO: 10643 - DNA, 50 bp, synthetic construct
  source 1..50: mol_type = other DNA
taacaacccaaaaaaaaactcaattaaatactaaataaaaacacaccaac

SEQ ID NO: 10644 - DNA, 50 bp, synthetic construct
  source 1..50: mol_type = other DNA
aataaataaatcattttacacaaaattccttttctcaaacactatttcac

SEQ ID NO: 10645 - DNA, 50 bp, synthetic construct
  source 1..50: mol_type = other DNA
tacctactatataccaaaaacaatactaaacataaaaattcaatatcctc

SEQ ID NO: 10646 - DNA, 50 bp, synthetic construct
  source 1..50: mol_type = other DNA
cacccaacaaccaaaaatcttttcaaattacaaattaaactatatcactc

SEQ ID NO: 10647 - DNA, 50 bp, synthetic construct
  source 1..50: mol_type = other DNA
ctttcactcacctacttaatttcccaaactccaaacttatcccctaatcc

SEQ ID NO: 10648 - DNA, 50 bp, synthetic construct
  source 1..50: mol_type = other DNA
ccttcaaaaactaactttaaaatccaccaattatctccattcccatttcc

SEQ ID NO: 10649 - DNA, 50 bp, synthetic construct
  source 1..50: mol_type = other DNA
accccaattactcaaatcaaaaacataaatcatccttaactccttccccc

SEQ ID NO: 10650 - DNA, 50 bp, synthetic construct
  source 1..50: mol_type = other DNA
tttttcacaattacaaaaaaacattttaaattaaattcataactcaacac

SEQ ID NO: 10651 - DNA, 50 bp, synthetic construct
  source 1..50: mol_type = other DNA
acaataattcaattcaaataactaaatcaacaaactccaaaaaaataaac

SEQ ID NO: 10652 - DNA, 50 bp, synthetic construct
  source 1..50: mol_type = other DNA
aataactaaatcaacaaactccaaaaaaataaacrtaacttcccttaccc

SEQ ID NO: 10653 - DNA, 50 bp, synthetic construct
  source 1..50: mol_type = other DNA
aaaaaataaacrtaacttcccttacccrccaaaaataactaacaccaacc

SEQ ID NO: 10654 - DNA, 50 bp, synthetic construct
  source 1..50: mol_type = other DNA
taaacctaaataacccatacatcctatacaaccrtcttaactctctcctc

SEQ ID NO: 10655 - DNA, 50 bp, synthetic construct
  source 1..50: mol_type = other DNA
atccttactaaaaaccctaaacctaaataacccatacatcctatacaacc

SEQ ID NO: 10656 - DNA, 50 bp, synthetic construct
  source 1..50: mol_type = other DNA
craacttaactaaatatcccctctataaaatatataataaaaccaaaaac

SEQ ID NO: 10657 - DNA, 50 bp, synthetic construct
  source 1..50: mol_type = other DNA
aaaactaaaataaaaatatataacaaaccaaactaaattcacaaactcac

SEQ ID NO: 10658 - DNA, 50 bp, synthetic construct
  source 1..50: mol_type = other DNA
atcattcaaaaccttcaacraaaaaatatccaaaactaaaaaataaacac

SEQ ID NO: 10659 - DNA, 50 bp, synthetic construct
  source 1..50: mol_type = other DNA
aaaataaatctaaacrcttttcaaaacaaaacacaatattccctcraccc

SEQ ID NO: 10660 - DNA, 50 bp, synthetic construct
  source 1..50: mol_type = other DNA
tccaaatccaaaaaacctaataacttcctaattacctcacccaatctaac

SEQ ID NO: 10661 - DNA, 50 bp, synthetic construct
  source 1..50: mol_type = other DNA
tctatcctatttaactcacaaacttattcaaataataccaaatcaattac

SEQ ID NO: 10662 - DNA, 50 bp, synthetic construct
  source 1..50: mol_type = other DNA
aactacccactccatttctaaccacatacaataatttaatattttactcc

SEQ ID NO: 10663 - DNA, 50 bp, synthetic construct
  source 1..50: mol_type = other DNA
taaaacaacaacrtcctttaattctaaaaacaacacctaaacacataaac

SEQ ID NO: 10664 - DNA, 50 bp, synthetic construct
  source 1..50: mol_type = other DNA
aaatccacatacrcccatatatccaaatactactctcaaaaccaaaaaac

SEQ ID NO: 10665 - DNA, 50 bp, synthetic construct
  source 1..50: mol_type = other DNA
rtttcctaaaaatcctaatacaatccaataataaaaaacracttcctacc

SEQ ID NO: 10666 - DNA, 50 bp, synthetic construct
  source 1..50: mol_type = other DNA
actcacaaatcrtttcctaaaaatcctaatacaatccaataataaaaaac

SEQ ID NO: 10667 - DNA, 50 bp, synthetic construct
  source 1..50: mol_type = other DNA
aaaatcttacacaatcctttctcttcctaaatacacatcactcacaaatc

SEQ ID NO: 10668 - DNA, 50 bp, synthetic construct
  source 1..50: mol_type = other DNA
tacaaattccaattcttcttccctaaaaaataacctaatattttatatcc

SEQ ID NO: 10669 - DNA, 50 bp, synthetic construct
  source 1..50: mol_type = other DNA
aaacaaccaaaccctaaaaatacactacaacctaaaaacaactcaaaccc

SEQ ID NO: 10670 - DNA, 50 bp, synthetic construct
  source 1..50: mol_type = other DNA
aaaactcaaaaacttcaaactcaaaacaattcctttaaattctatttatc

SEQ ID NO: 10671 - DNA, 50 bp, synthetic construct
  source 1..50: mol_type = other DNA
ccctaaactcatcaatcccttatttaactttaaaaccatacctttaacac

SEQ ID NO: 10672 - DNA, 50 bp, synthetic construct
  source 1..50: mol_type = other DNA
aatcccaattttttactctaaaaacaacctccaaaattcccccttccttc

SEQ ID NO: 10673 - DNA, 50 bp, synthetic construct
  source 1..50: mol_type = other DNA
aaaattaaaacctcctcctatcccaaaaactcccttaaataaacaccatc

SEQ ID NO: 10674 - DNA, 50 bp, synthetic construct
  source 1..50: mol_type = other DNA
aataacattaaccttttaccaaacttctaaataacrccatttttaccttc

SEQ ID NO: 10675 - DNA, 50 bp, synthetic construct
  source 1..50: mol_type = other DNA
crttaccaaaaaaccaactttaaaaacaacactccraaaacaaaaataac

SEQ ID NO: 10676 - DNA, 50 bp, synthetic construct
  source 1..50: mol_type = other DNA
actcaatatattttctttaacttcctattaaaaaaatttccaaacaatac

SEQ ID NO: 10677 - DNA, 50 bp, synthetic construct
  source 1..50: mol_type = other DNA
aaacaaaacacaaaaccaaaaactaatcraaaaaataccaaatcttatac

SEQ ID NO: 10678 - DNA, 50 bp, synthetic construct
  source 1..50: mol_type = other DNA
catcctttaatatataatataaaaacaaaacacaaaaccaaaaactaatc

SEQ ID NO: 10679 - DNA, 50 bp, synthetic construct
  source 1..50: mol_type = other DNA
atcaactctatttatacaaaaaaattacccatcttcacaaaaacaaccac

SEQ ID NO: 10680 - DNA, 50 bp, synthetic construct
  source 1..50: mol_type = other DNA
taaaaaacaaatttataaactcttcttaaataaaccattttaaaaacccc

SEQ ID NO: 10681 - DNA, 50 bp, synthetic construct
  source 1..50: mol_type = other DNA
ccccraactattcttatctaattccaacaaatacacataataaactattc

SEQ ID NO: 10682 - DNA, 50 bp, synthetic construct
  source 1..50: mol_type = other DNA
tcrcttttaaatttttctcaaaaattctaaaaataacacctcatttcccc

SEQ ID NO: 10683 - DNA, 50 bp, synthetic construct
  source 1..50: mol_type = other DNA
tatttaccaaaaactaattactaaaaaaattattcctactcaccattttc

SEQ ID NO: 10684 - DNA, 50 bp, synthetic construct
  source 1..50: mol_type = other DNA
tcctcataccctcttacattcrtctttcccttcaaattttctataatatc

SEQ ID NO: 10685 - DNA, 50 bp, synthetic construct
  source 1..50: mol_type = other DNA
acaccrtttttctttataatataacaatttcctcataccctcttacattc

SEQ ID NO: 10686 - DNA, 50 bp, synthetic construct
  source 1..50: mol_type = other DNA
ataatctcaaaaaatccttctcttcatttcccctatatcttatccacacc

SEQ ID NO: 10687 - DNA, 50 bp, synthetic construct
  source 1..50: mol_type = other DNA
atcctcacctacctattttatatttatttattaatttcaaaaaataatcc

SEQ ID NO: 10688 - DNA, 50 bp, synthetic construct
  source 1..50: mol_type = other DNA
ttctaaaccccataataacaaaaactattctaatcaccattaattctccc

SEQ ID NO: 10689 - DNA, 50 bp, synthetic construct
  source 1..50: mol_type = other DNA
acaccctccaatttccaaaaaacctaaataaaaaatttaatcacatcctc

SEQ ID NO: 10690 - DNA, 50 bp, synthetic construct
  source 1..50: mol_type = other DNA
aaaaatactaatacatactacaacacraataaacctcaaaaactttaccc

SEQ ID NO: 10691 - DNA, 50 bp, synthetic construct
  source 1..50: mol_type = other DNA
caaaataaataaatctaaaaacatcaaattaccaacttcataaaactaac

SEQ ID NO: 10692 - DNA, 50 bp, synthetic construct
  source 1..50: mol_type = other DNA
taacataaacttccratttttaaaccacttaatttataatactttattac

SEQ ID NO: 10693 - DNA, 50 bp, synthetic construct
  source 1..50: mol_type = other DNA
caattaaaaactacatctcaaacaaaactaccaaatctctctaaaataac

SEQ ID NO: 10694 - DNA, 50 bp, synthetic construct
  source 1..50: mol_type = other DNA
aaatatttaacaaatctaaaatattcaaaatatttttccaaactctactc

SEQ ID NO: 10695 - DNA, 50 bp, synthetic construct
  source 1..50: mol_type = other DNA
aattaactacaaacatccaaaaaaataaacaaaattatataaaccccaac

SEQ ID NO: 10696 - DNA, 50 bp, synthetic construct
  source 1..50: mol_type = other DNA
ratcrttataattaaataaaacccaaacaaacaactacrttttaaaccrc

SEQ ID NO: 10697 - DNA, 50 bp, synthetic construct
  source 1..50: mol_type = other DNA
atctcaattatatcaactaattttattaccctaaataaatcccttcattc

SEQ ID NO: 10698 - DNA, 50 bp, synthetic construct
  source 1..50: mol_type = other DNA
tatcataaaaaaactttacaattaaatacccatcccaaattcccaaaacc

SEQ ID NO: 10699 - DNA, 50 bp, synthetic construct
  source 1..50: mol_type = other DNA
aatttccacaaataaattcaaacaacaaatatctacaccctaaataactc

SEQ ID NO: 10700 - DNA, 50 bp, synthetic construct
  source 1..50: mol_type = other DNA
tatctacaccctaaataactcratacctaccaactctactaacaatactc

SEQ ID NO: 10701 - DNA, 50 bp, synthetic construct
  source 1..50: mol_type = other DNA
acctcttctttttacatatcacaaaattttaaaactttaactctaaaacc

SEQ ID NO: 10702 - DNA, 50 bp, synthetic construct
  source 1..50: mol_type = other DNA
aaaactcaacatacataatcccatttaattctcttcaacactataaaatc

SEQ ID NO: 10703 - DNA, 50 bp, synthetic construct
  source 1..50: mol_type = other DNA
ctaacaaatacaataacctaaaacttcctaccaaaatacraatcactcac

SEQ ID NO: 10704 - DNA, 50 bp, synthetic construct
  source 1..50: mol_type = other DNA
accttaaaaaacctccaaaatttcaaaacttaaacaaacrtaaataattc

SEQ ID NO: 10705 - DNA, 50 bp, synthetic construct
  source 1..50: mol_type = other DNA
ttcrcactctaacaaaaaattccaaactattacacctaccaacaatactc

SEQ ID NO: 10706 - DNA, 50 bp, synthetic construct
  source 1..50: mol_type = other DNA
aatatacaataaaaaacccccataaatataacacattccccattctctac

SEQ ID NO: 10707 - DNA, 50 bp, synthetic construct
  source 1..50: mol_type = other DNA
aaacctaaaaccaaaatcataaaaacttaatccaaacatttatacaaaac

SEQ ID NO: 10708 - DNA, 50 bp, synthetic construct
  source 1..50: mol_type = other DNA
ctacctaataataaaaacaaaaatccctccaaatctcttctctctaaaac

SEQ ID NO: 10709 - DNA, 50 bp, synthetic construct
  source 1..50: mol_type = other DNA
ccaacactactcccaaaaccaaaaaaaacttctaccttaattatcrttac

SEQ ID NO: 10710 - DNA, 50 bp, synthetic construct
  source 1..50: mol_type = other DNA
taaaaccaacactactcccaaaaccaaaaaaaacttctaccttaattatc

SEQ ID NO: 10711 - DNA, 50 bp, synthetic construct
  source 1..50: mol_type = other DNA
acttcctattaatcaccttaattacacataatatttcttcacctctctac

SEQ ID NO: 10712 - DNA, 50 bp, synthetic construct
  source 1..50: mol_type = other DNA
aaatattaatactttacraaaaatacttccttaaaccttataaaacaatc

SEQ ID NO: 10713 - DNA, 50 bp, synthetic construct
  source 1..50: mol_type = other DNA
cttcctctctctaccccrattacttcataaaacccaaaaaaacattttcc

SEQ ID NO: 10714 - DNA, 50 bp, synthetic construct
  source 1..50: mol_type = other DNA
ttcaacattcttaaaaaaataacccrtatcacataaaaccaacaataccc

SEQ ID NO: 10715 - DNA, 50 bp, synthetic construct
  source 1..50: mol_type = other DNA
cattcttaaaaaaataacccrtatcacataaaaccaacaatacccrtaac

SEQ ID NO: 10716 - DNA, 50 bp, synthetic construct
  source 1..50: mol_type = other DNA
taacaactcraatatatcratacatctctacrtttataaaacttattaac

SEQ ID NO: 10717 - DNA, 50 bp, synthetic construct
  source 1..50: mol_type = other DNA
tctcractaaaaatttaaatttacaattacacattccaaaaaccttatac

SEQ ID NO: 10718 - DNA, 50 bp, synthetic construct
  source 1..50: mol_type = other DNA
ttacaattcaaaaaatccctttattcaaaaaataaacaaatccaaacctc

SEQ ID NO: 10719 - DNA, 50 bp, synthetic construct
  source 1..50: mol_type = other DNA
acttttcaaatacrcrcaaactaaatttcaaccaaaacctcaatttaaac

SEQ ID NO: 10720 - DNA, 50 bp, synthetic construct
  source 1..50: mol_type = other DNA
ccraaaactttatcractacccaataaacctattaacttttcaaatacrc

SEQ ID NO: 10721 - DNA, 50 bp, synthetic construct
  source 1..50: mol_type = other DNA
tcccraaaactttatcractacccaataaacctattaacttttcaaatac

SEQ ID NO: 10722 - DNA, 50 bp, synthetic construct
  source 1..50: mol_type = other DNA
aaaaaccaacaaactcattaaacaaccrataaaactctcraaatttcccc

SEQ ID NO: 10723 - DNA, 50 bp, synthetic construct
  source 1..50: mol_type = other DNA
aaaaattctaatcaaacrctaaatccccaaacttcctatctatactctcc

SEQ ID NO: 10724 - DNA, 50 bp, synthetic construct
  source 1..50: mol_type = other DNA
acaacctaatactttaacctacrcrctctaaaacrttctatacaaaatac

SEQ ID NO: 10725 - DNA, 50 bp, synthetic construct
  source 1..50: mol_type = other DNA
raaaaccctcttacaacacrtatcaaaaacaacctaatactttaacctac

SEQ ID NO: 10726 - DNA, 50 bp, synthetic construct
  source 1..50: mol_type = other DNA
acaaataaaaatctctccaaaaaaatactctttctccaaaacrcttaacc

SEQ ID NO: 10727 - DNA, 50 bp, synthetic construct
  source 1..50: mol_type = other DNA
ctttcctaaataacaccaacaaaaccrattaaaataataaaccctaaacc

SEQ ID NO: 10728 - DNA, 50 bp, synthetic construct
  source 1..50: mol_type = other DNA
cacaacraactcctaaaatttcattttattttatcatttccaattcaacc

SEQ ID NO: 10729 - DNA, 50 bp, synthetic construct
  source 1..50: mol_type = other DNA
ataataaatcaacttacaataattattttttcccaactcatactcacaac

SEQ ID NO: 10730 - DNA, 50 bp, synthetic construct
  source 1..50: mol_type = other DNA
atataccctaattctactttaattttaccccaaacccttctaaatataac

SEQ ID NO: 10731 - DNA, 50 bp, synthetic construct
  source 1..50: mol_type = other DNA
taaaaacctaaaactacacaaaactaaaaaaatacatacrtctaattccc

SEQ ID NO: 10732 - DNA, 50 bp, synthetic construct
  source 1..50: mol_type = other DNA
tctaaattcctaaaatcccactttctccaaaaaccctacraaaatcaaac

SEQ ID NO: 10733 - DNA, 50 bp, synthetic construct
  source 1..50: mol_type = other DNA
ctaaaaactatctacctctttatataattctttcctaaattcctaactcc

SEQ ID NO: 10734 - DNA, 50 bp, synthetic construct
  source 1..50: mol_type = other DNA
taaaaaaaaaaccaattattctaaccaaacccaaaattaaacttaaaatc

SEQ ID NO: 10735 - DNA, 50 bp, synthetic construct
  source 1..50: mol_type = other DNA
caaaattaaacttaaaatcrccactatataccaataacatccatcaactc

SEQ ID NO: 10736 - DNA, 50 bp, synthetic construct
  source 1..50: mol_type = other DNA
taaatttaacaaaaaaatttttcttccttctctctattcctaatatcccc

SEQ ID NO: 10737 - DNA, 50 bp, synthetic construct
  source 1..50: mol_type = other DNA
ttttacaactttcttctaaaaaataatccaaaaccaaaactttaaatctc

SEQ ID NO: 10738 - DNA, 50 bp, synthetic construct
  source 1..50: mol_type = other DNA
atcaacaccccccaataataaaaaactttcaatcctaaaatattactaac

SEQ ID NO: 10739 - DNA, 50 bp, synthetic construct
  source 1..50: mol_type = other DNA
tcataacaccttaaaataacaaccaactcataacaatcaaaaatattttc

SEQ ID NO: 10740 - DNA, 50 bp, synthetic construct
  source 1..50: mol_type = other DNA
aacccaaccattactttctattaatcrcaaatctttaaacaaactcaacc

SEQ ID NO: 10741 - DNA, 50 bp, synthetic construct
  source 1..50: mol_type = other DNA
ttaaattccacaatccttcatcttaacccaaccattactttctattaatc

SEQ ID NO: 10742 - DNA, 50 bp, synthetic construct
  source 1..50: mol_type = other DNA
tactaaaaatacaataataaaccatacataataatacccrccaactactc

SEQ ID NO: 10743 - DNA, 50 bp, synthetic construct
  source 1..50: mol_type = other DNA
ttctcctactccaaaaaactaaattatcaattaaaaacctattaactaac

SEQ ID NO: 10744 - DNA, 50 bp, synthetic construct
  source 1..50: mol_type = other DNA
aaaaactaaaaatttacttaactcattaacttaataactttaaaaatacc

SEQ ID NO: 10745 - DNA, 50 bp, synthetic construct
  source 1..50: mol_type = other DNA
ttacttaactcattaacttaataactttaaaaataccrtattcatttacc

SEQ ID NO: 10746 - DNA, 50 bp, synthetic construct
  source 1..50: mol_type = other DNA
acaataatcatccccraaaaaaaaactctcaaacaaaattaataacaaac

SEQ ID NO: 10747 - DNA, 50 bp, synthetic construct
  source 1..50: mol_type = other DNA
ttataaaaccattacrtttattattaaccttacctaaaaacctttctccc

SEQ ID NO: 10748 - DNA, 50 bp, synthetic construct
  source 1..50: mol_type = other DNA
taacctaaatatataccctatccttacaatacctaactcataaaaaactc

SEQ ID NO: 10749 - DNA, 50 bp, synthetic construct
  source 1..50: mol_type = other DNA
cctctataaaaacaattctctccttccaatctccaaaaaataaactcttc

SEQ ID NO: 10750 - DNA, 50 bp, synthetic construct
  source 1..50: mol_type = other DNA
ataaatctaaccatcaatttctacractttaaacatattttataccaaac

SEQ ID NO: 10751 - DNA, 50 bp, synthetic construct
  source 1..50: mol_type = other DNA
aaaaaattttcaaataatctacataattatctcatttaaatctccrcacc

SEQ ID NO: 10752 - DNA, 50 bp, synthetic construct
  source 1..50: mol_type = other DNA
aacccaaaaatatttccatactaactccaactttcctcctaaaacratac

SEQ ID NO: 10753 - DNA, 50 bp, synthetic construct
  source 1..50: mol_type = other DNA
aaatatcraatttataaaattatactaaataaatctctcttaaaaaccac

SEQ ID NO: 10754 - DNA, 50 bp, synthetic construct
  source 1..50: mol_type = other DNA
acactataaaccattttatcaacttcataaaatttacaatcaaaaaacac

SEQ ID NO: 10755 - DNA, 50 bp, synthetic construct
  source 1..50: mol_type = other DNA
aaacaaaacaaaacaacacaacaaaataattacctcctatttaccaaaac

SEQ ID NO: 10756 - DNA, 50 bp, synthetic construct
  source 1..50: mol_type = other DNA
tttactatattactctattctattccccattctaactaaaaaataactcc

SEQ ID NO: 10757 - DNA, 50 bp, synthetic construct
  source 1..50: mol_type = other DNA
aattcttcraaatctatatctccaataaaacactaatttattcctatacc

SEQ ID NO: 10758 - DNA, 50 bp, synthetic construct
  source 1..50: mol_type = other DNA
actttaacracacaaaaacaaactaatacctcactaaaaatataaattcc

SEQ ID NO: 10759 - DNA, 50 bp, synthetic construct
  source 1..50: mol_type = other DNA
aaactcccaatcactacattacataaaaaactaaacatcaaaataataac

SEQ ID NO: 10760 - DNA, 50 bp, synthetic construct
  source 1..50: mol_type = other DNA
atctttaattaaaatcaactccatatttctcaacaaaaccaacataaatc

SEQ ID NO: 10761 - DNA, 50 bp, synthetic construct
  source 1..50: mol_type = other DNA
tctttccaactaccaaatacttcataaaatcttaaacttttccactaatc

SEQ ID NO: 10762 - DNA, 50 bp, synthetic construct
  source 1..50: mol_type = other DNA
tttatactttacacataaaattttttttcacctcctaaaaaccaattttc

SEQ ID NO: 10763 - DNA, 50 bp, synthetic construct
  source 1..50: mol_type = other DNA
tttcattcratccctctataaatcctacaaactctaccttcacaatacac

SEQ ID NO: 10764 - DNA, 50 bp, synthetic construct
  source 1..50: mol_type = other DNA
aacaattaaaacatccacctaacacatacaactaacacttttaaccattc

SEQ ID NO: 10765 - DNA, 50 bp, synthetic construct
  source 1..50: mol_type = other DNA
ataattactatataaacrttttatattactcatactacaacaccaaatcc

SEQ ID NO: 10766 - DNA, 50 bp, synthetic construct
  source 1..50: mol_type = other DNA
aatcattataaataaacraatttaatactacaacataaacaatacaaaac

SEQ ID NO: 10767 - DNA, 50 bp, synthetic construct
  source 1..50: mol_type = other DNA
tacatccatacctttcattccttctattctataccaaacttcatactccc

SEQ ID NO: 10768 - DNA, 50 bp, synthetic construct
  source 1..50: mol_type = other DNA
caaccacrcattttcatctctacttaaacttacatctatttatatctatc

SEQ ID NO: 10769 - DNA, 50 bp, synthetic construct
  source 1..50: mol_type = other DNA
aaactctaaaatttaattaccaatattctaattccaactctaaacctacc

SEQ ID NO: 10770 - DNA, 50 bp, synthetic construct
  source 1..50: mol_type = other DNA
tttattttacaataccattcatttattcacccactcattcatttatccac

SEQ ID NO: 10771 - DNA, 50 bp, synthetic construct
  source 1..50: mol_type = other DNA
tttctacatctaccatataccaaacacaattaaataccaaaaatccaatc

SEQ ID NO: 10772 - DNA, 50 bp, synthetic construct
  source 1..50: mol_type = other DNA
taacaatcctaaacaaaaaatattacttccactaactataaccccaaacc

SEQ ID NO: 10773 - DNA, 50 bp, synthetic construct
  source 1..50: mol_type = other DNA
aaccacctaccatcattttctaaccaaactaatttaactatttaaccttc

SEQ ID NO: 10774 - DNA, 50 bp, synthetic construct
  source 1..50: mol_type = other DNA
taattaatatctcatatttccctataatatataaaaccaaactatacccc

SEQ ID NO: 10775 - DNA, 50 bp, synthetic construct
  source 1..50: mol_type = other DNA
attttaatacrtatcaatacatccttcctataaataaataatattccatc

SEQ ID NO: 10776 - DNA, 50 bp, synthetic construct
  source 1..50: mol_type = other DNA
ataactaacttctttcacttaactttcaaaatatatccatattttaatac

SEQ ID NO: 10777 - DNA, 50 bp, synthetic construct
  source 1..50: mol_type = other DNA
acactaacacaacccataaaattcaattctcaaaactaaaaatacacatc

SEQ ID NO: 10778 - DNA, 50 bp, synthetic construct
  source 1..50: mol_type = other DNA
aaaaaccctaaacacaatacttaacacataataaacactcaataaacctc

SEQ ID NO: 10779 - DNA, 50 bp, synthetic construct
  source 1..50: mol_type = other DNA
aaaccttcataataaccaaacacccctttccatctataaaacataattac

SEQ ID NO: 10780 - DNA, 50 bp, synthetic construct
  source 1..50: mol_type = other DNA
ttctaatatatattctaaattttctccatcaatctaaaactaaaaacacc

SEQ ID NO: 10781 - DNA, 50 bp, synthetic construct
  source 1..50: mol_type = other DNA
taaatttcaactcctctatactataaacactaactttaactcaaaactcc

SEQ ID NO: 10782 - DNA, 50 bp, synthetic construct
  source 1..50: mol_type = other DNA
ctatcattttaaccatcactcactaaatatcatcaaaaaaatcctaaaac

SEQ ID NO: 10783 - DNA, 50 bp, synthetic construct
  source 1..50: mol_type = other DNA
acacttaaaacaactattccaaactttttcaaatactattttccccctcc

SEQ ID NO: 10784 - DNA, 50 bp, synthetic construct
  source 1..50: mol_type = other DNA
tcttcctattataattaataaaatctcaaaaacaaattaaccatcctttc

SEQ ID NO: 10785 - DNA, 50 bp, synthetic construct
  source 1..50: mol_type = other DNA
cactttcccaaaaataatcaaaattaactcttctacttaaaaaaacttcc

SEQ ID NO: 10786 - DNA, 50 bp, synthetic construct
  source 1..50: mol_type = other DNA
craaatctataaaaaccaaaaactcactcacctcaaaatctattcataac

SEQ ID NO: 10787 - DNA, 50 bp, synthetic construct
  source 1..50: mol_type = other DNA
ttcataacrccaaatatcaaattctaactaaaatccaaaaaaaatcaaac

SEQ ID NO: 10788 - DNA, 50 bp, synthetic construct
  source 1..50: mol_type = other DNA
aaaaccatattaaaaccrtccacaattacttaaatatttttccaactacc

SEQ ID NO: 10789 - DNA, 50 bp, synthetic construct
  source 1..50: mol_type = other DNA
aaataaacttatttatacctaacccatacttcttcraaacaaaacaccac

SEQ ID NO: 10790 - DNA, 50 bp, synthetic construct
  source 1..50: mol_type = other DNA
aatttatatttcaacctaaaatatatttttatatctctacacatacatac

SEQ ID NO: 10791 - DNA, 50 bp, synthetic construct
  source 1..50: mol_type = other DNA
ataataacrccatcttaactcactaaaacctttacctcctaaattcaaac

SEQ ID NO: 10792 - DNA, 50 bp, synthetic construct
  source 1..50: mol_type = other DNA
tttctctactcttcccaaatctatatcttactctacaccctcaactttac

SEQ ID NO: 10793 - DNA, 50 bp, synthetic construct
  source 1..50: mol_type = other DNA
tatcacractatctctaatatattattattaatattacattacaaatccc

SEQ ID NO: 10794 - DNA, 50 bp, synthetic construct
  source 1..50: mol_type = other DNA
aacctaaatatataataaactataccaactaaatacatataaatacactc

SEQ ID NO: 10795 - DNA, 50 bp, synthetic construct
  source 1..50: mol_type = other DNA
caacctcttatcacctaatatattctttttcctatttcattacaacaacc

SEQ ID NO: 10796 - DNA, 50 bp, synthetic construct
  source 1..50: mol_type = other DNA
tatatatacactaaaataaacttaaccttctacattttcccattctctcc

SEQ ID NO: 10797 - DNA, 50 bp, synthetic construct
  source 1..50: mol_type = other DNA
ccaaacttcccaaacaaaactaccctactaaaataacataccaaaatttc

SEQ ID NO: 10798 - DNA, 50 bp, synthetic construct
  source 1..50: mol_type = other DNA
ctaaacctaaaacccaaacatccaacracaaaatatcttctataactcac

SEQ ID NO: 10799 - DNA, 50 bp, synthetic construct
  source 1..50: mol_type = other DNA
attaacacaacaataaactacttactaaacctaaaacccaaacatccaac

SEQ ID NO: 10800 - DNA, 50 bp, synthetic construct
  source 1..50: mol_type = other DNA
aacctaaatttcctcatctttcaaacaataataataatacataacctccc

SEQ ID NO: 10801 - DNA, 50 bp, synthetic construct
  source 1..50: mol_type = other DNA
aaaataaataaaacaaccctcrccaaaaaactaacaatctaacaaataac

SEQ ID NO: 10802 - DNA, 50 bp, synthetic construct
  source 1..50: mol_type = other DNA
aactcatttattaaaaaatacrtcacctaccaaactatcaatcccttaac

SEQ ID NO: 10803 - DNA, 50 bp, synthetic construct
  source 1..50: mol_type = other DNA
taactaacacacacaaaacactcaacaactaactcatccattacttttcc

SEQ ID NO: 10804 - DNA, 50 bp, synthetic construct
  source 1..50: mol_type = other DNA
aaattaaaaatcaataccacaaaaaacraataccatttaatcctttatac

SEQ ID NO: 10805 - DNA, 50 bp, synthetic construct
  source 1..50: mol_type = other DNA
tatactttcaaaaaatacrctaaaaattaaaaatcaataccacaaaaaac

SEQ ID NO: 10806 - DNA, 50 bp, synthetic construct
  source 1..50: mol_type = other DNA
rtaaaaaccrattaatatcactaaacctcaaacttctcctcaaaaaatcc

SEQ ID NO: 10807 - DNA, 50 bp, synthetic construct
  source 1..50: mol_type = other DNA
aaactataacaaaaatacrctctacatcataaaccaatacacaactacac

SEQ ID NO: 10808 - DNA, 50 bp, synthetic construct
  source 1..50: mol_type = other DNA
tttcctctactataacacrtataactatatactaacttataatataaaac

SEQ ID NO: 10809 - DNA, 50 bp, synthetic construct
  source 1..50: mol_type = other DNA
taaactcaaatttcaaactacctactaatccctcctaaaacaaaactccc

SEQ ID NO: 10810 - DNA, 50 bp, synthetic construct
  source 1..50: mol_type = other DNA
ctctcrctctacattccaatcctccttccaaaaaacaaaatattctttcc

SEQ ID NO: 10811 - DNA, 50 bp, synthetic construct
  source 1..50: mol_type = other DNA
aataataataaaaaactccttcctaaatcttaaaacatctaactaccccc

SEQ ID NO: 10812 - DNA, 50 bp, synthetic construct
  source 1..50: mol_type = other DNA
tacaacaaatcacaataactaacaaacaacaaatactacataaaaatcac

SEQ ID NO: 10813 - DNA, 50 bp, synthetic construct
  source 1..50: mol_type = other DNA
atcaaaccctaaaaataataacrcrcrataacaaccacttaataacaacc

SEQ ID NO: 10814 - DNA, 50 bp, synthetic construct
  source 1..50: mol_type = other DNA
tacacatacacrtatacactaatatacrcttaaaatttaccaaaacacac

SEQ ID NO: 10815 - DNA, 50 bp, synthetic construct
  source 1..50: mol_type = other DNA
cttccrttttttaaaaacctaaaaacrcrtacccatttaataaaaacttc

SEQ ID NO: 10816 - DNA, 50 bp, synthetic construct
  source 1..50: mol_type = other DNA
tcccacaaacccracttatcttcaatctctaacacraaaaataaaatcac

SEQ ID NO: 10817 - DNA, 50 bp, synthetic construct
  source 1..50: mol_type = other DNA
tcctacctaaacctcactaattaatccaaaaattactatctaaaccaaac

SEQ ID NO: 10818 - DNA, 50 bp, synthetic construct
  source 1..50: mol_type = other DNA
accaaaacctccaataataaattcraattcaaacaacaacaaataatacc

SEQ ID NO: 10819 - DNA, 50 bp, synthetic construct
  source 1..50: mol_type = other DNA
tttattattaatataaaccataacracaatcatctaacaatacctactac

SEQ ID NO: 10820 - DNA, 50 bp, synthetic construct
  source 1..50: mol_type = other DNA
ccataaatcccaacactactacctccttaactaattacaaaacaaaaacc

SEQ ID NO: 10821 - DNA, 50 bp, synthetic construct
  source 1..50: mol_type = other DNA
aattatctcaaaataaaataattcaaacctccattccactttctataaac

SEQ ID NO: 10822 - DNA, 50 bp, synthetic construct
  source 1..50: mol_type = other DNA
aatattctcatctatccaataaaaataataacaacrcrtctacctaaatc

SEQ ID NO: 10823 - DNA, 50 bp, synthetic construct
  source 1..50: mol_type = other DNA
tatctaaaacctcaatattctcatctatccaataaaaataataacaacrc

SEQ ID NO: 10824 - DNA, 50 bp, synthetic construct
  source 1..50: mol_type = other DNA
actatctaaaacctcaatattctcatctatccaataaaaataataacaac

SEQ ID NO: 10825 - DNA, 50 bp, synthetic construct
  source 1..50: mol_type = other DNA
aataaaaacactaaaactccaaacaataaaacaacttaaccaattcacac

SEQ ID NO: 10826 - DNA, 50 bp, synthetic construct
  source 1..50: mol_type = other DNA
aacaataaaacaacttaaccaattcacacracrataacaaaataaacctc

SEQ ID NO: 10827 - DNA, 50 bp, synthetic construct
  source 1..50: mol_type = other DNA
taaaacaacttaaccaattcacacracrataacaaaataaacctcraacc

SEQ ID NO: 10828 - DNA, 50 bp, synthetic construct
  source 1..50: mol_type = other DNA
atacctcraacctatttacctaatacccaaccaaactaacaaacaaaaac

SEQ ID NO: 10829 - DNA, 50 bp, synthetic construct
  source 1..50: mol_type = other DNA
aacctattttcccaaccccrtaacaaactactaaaaataactcatacctc

SEQ ID NO: 10830 - DNA, 50 bp, synthetic construct
  source 1..50: mol_type = other DNA
cccttataaccctaactaacaaaaaataaccaacctattttcccaacccc

SEQ ID NO: 10831 - DNA, 50 bp, synthetic construct
  source 1..50: mol_type = other DNA
ctaaaaactaaaatataaacaactctacaaaactaaaccctaaaaaatcc

SEQ ID NO: 10832 - DNA, 50 bp, synthetic construct
  source 1..50: mol_type = other DNA
taatcaacatcaccacataccatcacataaatactattcataaaaacaac

SEQ ID NO: 10833 - DNA, 50 bp, synthetic construct
  source 1..50: mol_type = other DNA
tcaattcaactttataaaccccactttacaaatctataaaataaaacatc

SEQ ID NO: 10834 - DNA, 50 bp, synthetic construct
  source 1..50: mol_type = other DNA
tttacrttaaatcataaaatattacaactactaacttttcactacatacc

SEQ ID NO: 10835 - DNA, 50 bp, synthetic construct
  source 1..50: mol_type = other DNA
tataaaccacaacrcccaactcttaaaaaattttctttttaaaaaatttc

SEQ ID NO: 10836 - DNA, 50 bp, synthetic construct
  source 1..50: mol_type = other DNA
cctaactaaaaccactatctattaaatttacacrttctacccacrtctac

SEQ ID NO: 10837 - DNA, 50 bp, synthetic construct
  source 1..50: mol_type = other DNA
tcaaaacaaataaaatcactatttactcacttattccaattccaaatcac

SEQ ID NO: 10838 - DNA, 50 bp, synthetic construct
  source 1..50: mol_type = other DNA
tcttacataactaaataaacaaataaaccaacraaatcctaattaaaccc

SEQ ID NO: 10839 - DNA, 50 bp, synthetic construct
  source 1..50: mol_type = other DNA
aaacatacaacaaacatctcttacataactaaataaacaaataaaccaac

SEQ ID NO: 10840 - DNA, 50 bp, synthetic construct
  source 1..50: mol_type = other DNA
aaaaaccatatctataaaatcaaccaaatactccaacctcaacacaaaac

SEQ ID NO: 10841 - DNA, 50 bp, synthetic construct
  source 1..50: mol_type = other DNA
taacacaaaataaaaacaccacttcccaacactttataaaatattataac

SEQ ID NO: 10842 - DNA, 50 bp, synthetic construct
  source 1..50: mol_type = other DNA
aacttccccaatcccracaaacaatacaaactacctaaaaaaacactttc

SEQ ID NO: 10843 - DNA, 50 bp, synthetic construct
  source 1..50: mol_type = other DNA
aactaaaaatcataaaaaattccaaactaaccaaaaacttccccaatccc

SEQ ID NO: 10844 - DNA, 50 bp, synthetic construct
  source 1..50: mol_type = other DNA
actctacaccattaacrtcaactacaatcacaaaacttttcaatatatcc

SEQ ID NO: 10845 - DNA, 50 bp, synthetic construct
  source 1..50: mol_type = other DNA
actcaacataaaactaacaatacatataaaatattaaacccattaataac

SEQ ID NO: 10846 - DNA, 50 bp, synthetic construct
  source 1..50: mol_type = other DNA
taaaatattaaacccattaataacrtataaaaaatactaacatcactacc

SEQ ID NO: 10847 - DNA, 50 bp, synthetic construct
  source 1..50: mol_type = other DNA
aataccttaacracaaacttcatataaaaacttaataaaaataattcaac

SEQ ID NO: 10848 - DNA, 50 bp, synthetic construct
  source 1..50: mol_type = other DNA
ccaaatctttacataaaatttaccrtcaaaatatctacaaaccaaaaaac

SEQ ID NO: 10849 - DNA, 50 bp, synthetic construct
  source 1..50: mol_type = other DNA
cataaaattaatcttcttaaattaccctttaaaaaccactcaccacatcc

SEQ ID NO: 10850 - DNA, 50 bp, synthetic construct
  source 1..50: mol_type = other DNA
acaccccaaaataccaactaccccraatttaattactatactcttaatcc

SEQ ID NO: 10851 - DNA, 50 bp, synthetic construct
  source 1..50: mol_type = other DNA
atttacttttaaaattaacraacaaaacaccccaaaataccaactacccc

SEQ ID NO: 10852 - DNA, 50 bp, synthetic construct
  source 1..50: mol_type = other DNA
ataatcaccaataaaaccracaaaacactaattcaaacctacctcaactc

SEQ ID NO: 10853 - DNA, 50 bp, synthetic construct
  source 1..50: mol_type = other DNA
cctccaaccactatcaaaataccctactccaatacctcaactaaacaaac

SEQ ID NO: 10854 - DNA, 50 bp, synthetic construct
  source 1..50: mol_type = other DNA
cctaatactataaaaaaactaaatttaatctcrctaaaaaactatatccc

SEQ ID NO: 10855 - DNA, 50 bp, synthetic construct
  source 1..50: mol_type = other DNA
taataccacatctatcaacaaaaccataaaaaattttccttcctaaaacc

SEQ ID NO: 10856 - DNA, 50 bp, synthetic construct
  source 1..50: mol_type = other DNA
tacrcaaaactaaatcaaccraacaatttaaaccaataaatatcaaaatc

SEQ ID NO: 10857 - DNA, 50 bp, synthetic construct
  source 1..50: mol_type = other DNA
acrtcaaaattaaaacraaccaaaaaaacttacrcaaaactaaatcaacc

SEQ ID NO: 10858 - DNA, 50 bp, synthetic construct
  source 1..50: mol_type = other DNA
caatataacttcccaaaacrtcaaaattaaaacraaccaaaaaaacttac

SEQ ID NO: 10859 - DNA, 50 bp, synthetic construct
  source 1..50: mol_type = other DNA
ttaattcaaattactcractaactcaatcttacrtaaatctccctaatcc

SEQ ID NO: 10860 - DNA, 50 bp, synthetic construct
  source 1..50: mol_type = other DNA
tcractaactcaatcttacrtaaatctccctaatccrttttaatcttaac

SEQ ID NO: 10861 - DNA, 50 bp, synthetic construct
  source 1..50: mol_type = other DNA
tacaaactaatccatactaactccacrcaaaaaacattatcatttttatc

SEQ ID NO: 10862 - DNA, 50 bp, synthetic construct
  source 1..50: mol_type = other DNA
catttcctacaaaaaaaactctattacaaactaatccatactaactccac

SEQ ID NO: 10863 - DNA, 50 bp, synthetic construct
  source 1..50: mol_type = other DNA
taaaattactaaaataaaacacattaaaatataaattataatcctccttc

SEQ ID NO: 10864 - DNA, 50 bp, synthetic construct
  source 1..50: mol_type = other DNA
aaaaaaaaatcccccaacccccattcctactctatctttaaaatcraaac

SEQ ID NO: 10865 - DNA, 50 bp, synthetic construct
  source 1..50: mol_type = other DNA
ccaaaaatcctcattccaaccaaacttaacaaaatcaccaaaatccrtcc

SEQ ID NO: 10866 - DNA, 50 bp, synthetic construct
  source 1..50: mol_type = other DNA
raaaccaaaaatcctcattccaaccaaacttaacaaaatcaccaaaatcc

SEQ ID NO: 10867 - DNA, 50 bp, synthetic construct
  source 1..50: mol_type = other DNA
ttctataaacttttaaaacttccaaaaacatccataaacaaaaaaacaac

SEQ ID NO: 10868 - DNA, 50 bp, synthetic construct
  source 1..50: mol_type = other DNA
tctcccctaaaaacttaacacacatcrcttactatcttcaaacattcaac

SEQ ID NO: 10869 - DNA, 50 bp, synthetic construct
  source 1..50: mol_type = other DNA
tataaaattcccaaataacaactctctcccctaaaaacttaacacacatc

SEQ ID NO: 10870 - DNA, 50 bp, synthetic construct
  source 1..50: mol_type = other DNA
aataaaccataatataaaataattcctcaaacaataaaacataaatcacc

SEQ ID NO: 10871 - DNA, 50 bp, synthetic construct
  source 1..50: mol_type = other DNA
ataacaacattattcacaataaccaaaaattaaaaacaacccaaatatcc

SEQ ID NO: 10872 - DNA, 50 bp, synthetic construct
  source 1..50: mol_type = other DNA
ccttttaaaaactaaatactatttcattatataaaattccactatataac

SEQ ID NO: 10873 - DNA, 50 bp, synthetic construct
  source 1..50: mol_type = other DNA
taaactcttaataaaccaaaattaaaatcataaatcacrcatacaaaaac

SEQ ID NO: 10874 - DNA, 50 bp, synthetic construct
  source 1..50: mol_type = other DNA
accaaaactaaaatccaaatccctaactcccaaacaaaaactctactcac

SEQ ID NO: 10875 - DNA, 50 bp, synthetic construct
  source 1..50: mol_type = other DNA
ccaaaccaaaaaataccacacccttataaacaaaactcacratactcaac

SEQ ID NO: 10876 - DNA, 50 bp, synthetic construct
  source 1..50: mol_type = other DNA
aaaaactttaccaaaccaaaaaataccacacccttataaacaaaactcac

SEQ ID NO: 10877 - DNA, 50 bp, synthetic construct
  source 1..50: mol_type = other DNA
caaaccaaaacaaaccaaaacaaaaatacaacctaactcctaaaatcatc

SEQ ID NO: 10878 - DNA, 50 bp, synthetic construct
  source 1..50: mol_type = other DNA
accaaaaaataacaaaaccaaaattcaaactaaattactaaatataactc

SEQ ID NO: 10879 - DNA, 50 bp, synthetic construct
  source 1..50: mol_type = other DNA
cctacttatcttcctctcaaaacaaaactaaaaactaaatccccaactcc

SEQ ID NO: 10880 - DNA, 50 bp, synthetic construct
  source 1..50: mol_type = other DNA
ttccctaaacataatctatacttacctacctctatacctttacttttacc

SEQ ID NO: 10881 - DNA, 50 bp, synthetic construct
  source 1..50: mol_type = other DNA
taatctatacttacctacctctatacctttacttttaccratccatccac

SEQ ID NO: 10882 - DNA, 50 bp, synthetic construct
  source 1..50: mol_type = other DNA
aacctcaacaaccctaaaccccraattctaactcccttaaataactatac

SEQ ID NO: 10883 - DNA, 50 bp, synthetic construct
  source 1..50: mol_type = other DNA
ccctaaaccccraattctaactcccttaaataactatacrtacaaataac

SEQ ID NO: 10884 - DNA, 50 bp, synthetic construct
  source 1..50: mol_type = other DNA
atctctcrtctataaaatcraataatcrataataactaaaccactaaaac

SEQ ID NO: 10885 - DNA, 50 bp, synthetic construct
  source 1..50: mol_type = other DNA
tataaaatattaaattctattccccaaaaccaactcccaaactctcaacc

SEQ ID NO: 10886 - DNA, 50 bp, synthetic construct
  source 1..50: mol_type = other DNA
taaaaaacaaaattcaacattccacaactaacaaactaaaactcctaaac

SEQ ID NO: 10887 - DNA, 50 bp, synthetic construct
  source 1..50: mol_type = other DNA
atcaatttaatacttattccctaaaatctccccaaaactattaaaacrac

SEQ ID NO: 10888 - DNA, 50 bp, synthetic construct
  source 1..50: mol_type = other DNA
atcaacataaaaaaaccccttctatactaaaatacaaaaattaaccaaac

SEQ ID NO: 10889 - DNA, 50 bp, synthetic construct
  source 1..50: mol_type = other DNA
raattcaaacrattctcctacctcaaactcctaaataactattattacac

SEQ ID NO: 10890 - DNA, 50 bp, synthetic construct
  source 1..50: mol_type = other DNA
cactcctacaaatatacacaaaacatattcaaaaaaaccaacttcctaac

SEQ ID NO: 10891 - DNA, 50 bp, synthetic construct
  source 1..50: mol_type = other DNA
cccaccccccaaaaaactaaaaaacaactactatctacataatcctaaac

SEQ ID NO: 10892 - DNA, 50 bp, synthetic construct
  source 1..50: mol_type = other DNA
taaaaaacaactactatctacataatcctaaacrtcrtaaaaatccacac

SEQ ID NO: 10893 - DNA, 50 bp, synthetic construct
  source 1..50: mol_type = other DNA
ctaccaaatctacttatataacaccaaaaataacctactaaaaaaaaacc

SEQ ID NO: 10894 - DNA, 50 bp, synthetic construct
  source 1..50: mol_type = other DNA
caaactaaccaaaaaacaacccttaaccacttaattatctcctacatacc

SEQ ID NO: 10895 - DNA, 50 bp, synthetic construct
  source 1..50: mol_type = other DNA
acaaccctaaaaaaccaatataaacactatataacatacttatttcaccc

SEQ ID NO: 10896 - DNA, 50 bp, synthetic construct
  source 1..50: mol_type = other DNA
aaaaatctttatcccttttatcctctattatatccccaatacctaatacc

SEQ ID NO: 10897 - DNA, 50 bp, synthetic construct
  source 1..50: mol_type = other DNA
atattttctattcttttataactaaaaacaaccctacctttatcccctcc

SEQ ID NO: 10898 - DNA, 50 bp, synthetic construct
  source 1..50: mol_type = other DNA
atactaattctaacaaaaaacctctaaaataactccractaaaaaacacc

SEQ ID NO: 10899 - DNA, 50 bp, synthetic construct
  source 1..50: mol_type = other DNA
raaactactccaaaaacttcctaccaaaactaacattatttaaacaaccc

SEQ ID NO: 10900 - DNA, 50 bp, synthetic construct
  source 1..50: mol_type = other DNA
aaaaaaaatcaaatctaaactccctcctcaaaaaacaccrtctttacctc

SEQ ID NO: 10901 - DNA, 50 bp, synthetic construct
  source 1..50: mol_type = other DNA
aataccaaaaccaaaatcctaataactacttaaaaacacraaacaaaaac

SEQ ID NO: 10902 - DNA, 50 bp, synthetic construct
  source 1..50: mol_type = other DNA
ttaccaatacctaaatatctactcctactcttcrcttaaaattactcccc

SEQ ID NO: 10903 - DNA, 50 bp, synthetic construct
  source 1..50: mol_type = other DNA
tacttccractttaccattaccaatacctaaatatctactcctactcttc

SEQ ID NO: 10904 - DNA, 50 bp, synthetic construct
  source 1..50: mol_type = other DNA
ctcrataacracccaaaaactaattttaaacactcttccaaataaaaaac

SEQ ID NO: 10905 - DNA, 50 bp, synthetic construct
  source 1..50: mol_type = other DNA
aacactaactataaccctctctactacaaatataaaaatctccaaaaccc

SEQ ID NO: 10906 - DNA, 50 bp, synthetic construct
  source 1..50: mol_type = other DNA
ctctactacaaatataaaaatctccaaaacccrtaacaaatctccctacc

SEQ ID NO: 10907 - DNA, 50 bp, synthetic construct
  source 1..50: mol_type = other DNA
aaacactaaacacacctaaaaaaactactaaaacataaaccattaacccc

SEQ ID NO: 10908 - DNA, 50 bp, synthetic construct
  source 1..50: mol_type = other DNA
tatacttcaacaattcctctaaatatactcaatactcaaatttaaaaacc

SEQ ID NO: 10909 - DNA, 50 bp, synthetic construct
  source 1..50: mol_type = other DNA
aattcctctaaatatactcaatactcaaatttaaaaaccrctaatccaac

SEQ ID NO: 10910 - DNA, 50 bp, synthetic construct
  source 1..50: mol_type = other DNA
cctaaaaaaattaataactcaactaaaccatattttaaaacccaaataac

SEQ ID NO: 10911 - DNA, 50 bp, synthetic construct
  source 1..50: mol_type = other DNA
ctaatcaaaaatttactaaacacccctcaaaactaaacctaaaaaactac

SEQ ID NO: 10912 - DNA, 50 bp, synthetic construct
  source 1..50: mol_type = other DNA
cttaaccaaaaccccaaatctaaacaacacccaaaattactaaaaccccc

SEQ ID NO: 10913 - DNA, 50 bp, synthetic construct
  source 1..50: mol_type = other DNA
cccaaatctaaacaacacccaaaattactaaaacccccrataacctacac

SEQ ID NO: 10914 - DNA, 50 bp, synthetic construct
  source 1..50: mol_type = other DNA
atctaaactcrcccaaaaccraaaactttaccaaaccaataaaataaaac

SEQ ID NO: 10915 - DNA, 50 bp, synthetic construct
  source 1..50: mol_type = other DNA
aaaaaaaaatccctacaaatcracatacctaaacaaaaacratactaacc

SEQ ID NO: 10916 - DNA, 50 bp, synthetic construct
  source 1..50: mol_type = other DNA
cacctcaactacacacacccttaacacatcctaaacctcattttcataac

SEQ ID NO: 10917 - DNA, 50 bp, synthetic construct
  source 1..50: mol_type = other DNA
aaataaaattacrataaaaaactaaacaatcaaaaccctaaaaacataac

SEQ ID NO: 10918 - DNA, 50 bp, synthetic construct
  source 1..50: mol_type = other DNA
aattacrataaaaaactaaacaatcaaaaccctaaaaacataacrcttac

SEQ ID NO: 10919 - DNA, 50 bp, synthetic construct
  source 1..50: mol_type = other DNA
acrataaaaaactaaacaatcaaaaccctaaaaacataacrcttacrtac

SEQ ID NO: 10920 - DNA, 50 bp, synthetic construct
  source 1..50: mol_type = other DNA
aaaaacrcaacataaaaatcttcaaaaaacttctctccccctaaaatatc

SEQ ID NO: 10921 - DNA, 50 bp, synthetic construct
  source 1..50: mol_type = other DNA
caaacataatccttaataaaaatttactacrtacctactcaataccaaac

SEQ ID NO: 10922 - DNA, 50 bp, synthetic construct
  source 1..50: mol_type = other DNA
aaaaaaaaccrataacrtatcaaacataatccttaataaaaatttactac

SEQ ID NO: 10923 - DNA, 50 bp, synthetic construct
  source 1..50: mol_type = other DNA
aacactaaataaacacrcaacaaactctcatcaaaaattatacctaatac

SEQ ID NO: 10924 - DNA, 50 bp, synthetic construct
  source 1..50: mol_type = other DNA
aaataaacacrcaacaaactctcatcaaaaattatacctaatacrtcatc

SEQ ID NO: 10925 - DNA, 50 bp, synthetic construct
  source 1..50: mol_type = other DNA
caaacaaacraaataaaaatcattaaaactccatattactctacacracc

SEQ ID NO: 10926 - DNA, 50 bp, synthetic construct
  source 1..50: mol_type = other DNA
atcctaataatttccatcccrtctatctactacaataaatttaaacccac

SEQ ID NO: 10927 - DNA, 50 bp, synthetic construct
  source 1..50: mol_type = other DNA
taaacccacraataacaaataaaacccaaatcacctatacccctaaaacc

SEQ ID NO: 10928 - DNA, 50 bp, synthetic construct
  source 1..50: mol_type = other DNA
acccaaatcacctatacccctaaaaccracacaaaatacttatattaacc

SEQ ID NO: 10929 - DNA, 50 bp, synthetic construct
  source 1..50: mol_type = other DNA
aaaaccracacaaaatacttatattaaccrcaataaacrtaaacaaaaac

SEQ ID NO: 10930 - DNA, 50 bp, synthetic construct
  source 1..50: mol_type = other DNA
ctcataaataatatacaaactcacaaataataaaactcaaaacaactccc

SEQ ID NO: 10931 - DNA, 50 bp, synthetic construct
  source 1..50: mol_type = other DNA
accttttaaaactttacaaacatatccracttaaaccctccaaaaccttc

SEQ ID NO: 10932 - DNA, 50 bp, synthetic construct
  source 1..50: mol_type = other DNA
crcctctcactcaaaacaaaaccacacacataacctaaaacatttcaacc

SEQ ID NO: 10933 - DNA, 50 bp, synthetic construct
  source 1..50: mol_type = other DNA
aaacaacctaaaaaattataaacaaaaaaaatcccrtaaacaaaaacccc

SEQ ID NO: 10934 - DNA, 50 bp, synthetic construct
  source 1..50: mol_type = other DNA
cccaaacttataaatactcrataaaacttactaaataataaaatataaac

SEQ ID NO: 10935 - DNA, 50 bp, synthetic construct
  source 1..50: mol_type = other DNA
aatataaacrtaaaaataaacaaatcraaaacaaataccccaacccaatc

SEQ ID NO: 10936 - DNA, 50 bp, synthetic construct
  source 1..50: mol_type = other DNA
taaactaaatacccaacrtaaatatataccrtaaaaacctttaaactctc

SEQ ID NO: 10937 - DNA, 50 bp, synthetic construct
  source 1..50: mol_type = other DNA
ttaatttttctaaacaccratttcctcactattaaaataacrataaaaac

SEQ ID NO: 10938 - DNA, 50 bp, synthetic construct
  source 1..50: mol_type = other DNA
acaaattacttaatttttctaaacaccratttcctcactattaaaataac

SEQ ID NO: 10939 - DNA, 50 bp, synthetic construct
  source 1..50: mol_type = other DNA
tatcacttaatatataacattaaacaaattacttaatttttctaaacacc

SEQ ID NO: 10940 - DNA, 50 bp, synthetic construct
  source 1..50: mol_type = other DNA
taaacatataaccatacatacaaaatacctaactcaaaaaaaatataacc

SEQ ID NO: 10941 - DNA, 50 bp, synthetic construct
  source 1..50: mol_type = other DNA
aaccatacatacaaaatacctaactcaaaaaaaatataaccrcctatacc

SEQ ID NO: 10942 - DNA, 50 bp, synthetic construct
  source 1..50: mol_type = other DNA
tcaccaaatactaaaatcctacctcatctactaacratcttataactacc

SEQ ID NO: 10943 - DNA, 50 bp, synthetic construct
  source 1..50: mol_type = other DNA
aatactaaaatcctacctcatctactaacratcttataactaccrtccac

SEQ ID NO: 10944 - DNA, 50 bp, synthetic construct
  source 1..50: mol_type = other DNA
ctaaactataaaaacctaaataaaccaaaaaaataactacctaaaaaacc

SEQ ID NO: 10945 - DNA, 50 bp, synthetic construct
  source 1..50: mol_type = other DNA
cratctaaaacrctaaattaaaactccaatctcttcraaaacrtaaattc

SEQ ID NO: 10946 - DNA, 50 bp, synthetic construct
  source 1..50: mol_type = other DNA
aaatttctaaacataatctctttcttataaacttctacaaaactacaaac

SEQ ID NO: 10947 - DNA, 50 bp, synthetic construct
  source 1..50: mol_type = other DNA
aactcctctccaaaacataaaatcacctaaaatcttaacaaaaaacracc

SEQ ID NO: 10948 - DNA, 50 bp, synthetic construct
  source 1..50: mol_type = other DNA
taaaaactcctctccaaaacataaaatcacctaaaatcttaacaaaaaac

SEQ ID NO: 10949 - DNA, 50 bp, synthetic construct
  source 1..50: mol_type = other DNA
ctatactactcrttaaaccatacttcctccctcactaatttaaaaattac

SEQ ID NO: 10950 - DNA, 50 bp, synthetic construct
  source 1..50: mol_type = other DNA
acaaatctcaaatctaaaaaaaacacrtaaatcctcaaactatactactc

SEQ ID NO: 10951 - DNA, 50 bp, synthetic construct
  source 1..50: mol_type = other DNA
ctatcctccctaattctttaataaacaaatctcaaatctaaaaaaaacac

SEQ ID NO: 10952 - DNA, 50 bp, synthetic construct
  source 1..50: mol_type = other DNA
aaaaaaaaatacctctttccccatcttttttatttttcaaaaaaattatc

SEQ ID NO: 10953 - DNA, 50 bp, synthetic construct
  source 1..50: mol_type = other DNA
aaacattttaatcatccccrtaactatatttacttaaataacctcrcacc

SEQ ID NO: 10954 - DNA, 50 bp, synthetic construct
  source 1..50: mol_type = other DNA
cataaacctttaaaacattaaacaaaaattatataatcacaaaatcacac

SEQ ID NO: 10955 - DNA, 50 bp, synthetic construct
  source 1..50: mol_type = other DNA
aaaaaatcttcraaatatctcaaactaaacataactaatttataaaaatc

SEQ ID NO: 10956 - DNA, 50 bp, synthetic construct
  source 1..50: mol_type = other DNA
ctctaaaaaacraccctcacaaaccaaccatacttaacctaaaacattcc

SEQ ID NO: 10957 - DNA, 50 bp, synthetic construct
  source 1..50: mol_type = other DNA
ccatacttaacctaaaacattccraaaacctcctcttaattaccttactc

SEQ ID NO: 10958 - DNA, 50 bp, synthetic construct
  source 1..50: mol_type = other DNA
acacactaatccaaaaatacractaattccattttcaaaaaaataaattc

SEQ ID NO: 10959 - DNA, 50 bp, synthetic construct
  source 1..50: mol_type = other DNA
tcttaattaccttactcracraacttattcctttaaaaataaaactaacc

SEQ ID NO: 10960 - DNA, 50 bp, synthetic construct
  source 1..50: mol_type = other DNA
aaatcacrccaacttctaaaattcaaattaacacatttaaaaatatatcc

SEQ ID NO: 10961 - DNA, 50 bp, synthetic construct
  source 1..50: mol_type = other DNA
cttttccacctttaatttaaattatccataaaaactaataatccattttc

SEQ ID NO: 10962 - DNA, 50 bp, synthetic construct
  source 1..50: mol_type = other DNA
aaaatttcctaaacaactactatataccaaatattttaaatactaaaaac

SEQ ID NO: 10963 - DNA, 50 bp, synthetic construct
  source 1..50: mol_type = other DNA
aataattaacaaaatatacaaaaactttaactacaaataacaaaaacccc

SEQ ID NO: 10964 - DNA, 50 bp, synthetic construct
  source 1..50: mol_type = other DNA
ctctctaacaaataccaaacacrtaactaatacttaataaatactaaacc

SEQ ID NO: 10965 - DNA, 50 bp, synthetic construct
  source 1..50: mol_type = other DNA
aaaaaactaaatatcactcatcrattcaacatttactaaacaccaactac

SEQ ID NO: 10966 - DNA, 50 bp, synthetic construct
  source 1..50: mol_type = other DNA
atcaaaaaatcctccctactcaacctcaattcaacaaactaaattattcc

SEQ ID NO: 10967 - DNA, 50 bp, synthetic construct
  source 1..50: mol_type = other DNA
ctcaacctcaattcaacaaactaaattattccrctcctacaatataacac

SEQ ID NO: 10968 - DNA, 50 bp, synthetic construct
  source 1..50: mol_type = other DNA
aaactaaattattccrctcctacaatataacacraaaaccaacaaaaaac

SEQ ID NO: 10969 - DNA, 50 bp, synthetic construct
  source 1..50: mol_type = other DNA
tttctctaacttcattcccatcaaaacctacccactcctttctttctaac

SEQ ID NO: 10970 - DNA, 50 bp, synthetic construct
  source 1..50: mol_type = other DNA
rctaaaaaataacacrccatatctaaaatctaaactttaaaaccttaatc

SEQ ID NO: 10971 - DNA, 50 bp, synthetic construct
  source 1..50: mol_type = other DNA
aaaactacaacttcaaacttaccctataaataacaaaacraataccaaac

SEQ ID NO: 10972 - DNA, 50 bp, synthetic construct
  source 1..50: mol_type = other DNA
aatttaaaacttttaaaaaatttaatctaataacattataccactatacc

SEQ ID NO: 10973 - DNA, 50 bp, synthetic construct
  source 1..50: mol_type = other DNA
acttttaaaaaatttaatctaataacattataccactataccrtattcac

SEQ ID NO: 10974 - DNA, 50 bp, synthetic construct
  source 1..50: mol_type = other DNA
cctctttataaaatcaataaatttaaaatttttcttaataacaaaacaac

SEQ ID NO: 10975 - DNA, 50 bp, synthetic construct
  source 1..50: mol_type = other DNA
aaaatcaataaatttaaaatttttcttaataacaaaacaacrccrtcacc

SEQ ID NO: 10976 - DNA, 50 bp, synthetic construct
  source 1..50: mol_type = other DNA
taaatttaaaatttttcttaataacaaaacaacrccrtcaccraacaacc

SEQ ID NO: 10977 - DNA, 50 bp, synthetic construct
  source 1..50: mol_type = other DNA
rataaaatcttcactaatttctcttctactcctatatacttacaaaaacc

SEQ ID NO: 10978 - DNA, 50 bp, synthetic construct
  source 1..50: mol_type = other DNA
aacttaaaactctaaaaaactataacacaacctctttacctaccaacccc

SEQ ID NO: 10979 - DNA, 50 bp, synthetic construct
  source 1..50: mol_type = other DNA
aatcaaacttcttaacaaacacaacccraaacaaaatcaacacctaaacc

SEQ ID NO: 10980 - DNA, 50 bp, synthetic construct
  source 1..50: mol_type = other DNA
acttaaaatcctatctaaaatcctaacracccaaatactaaccctacctc

SEQ ID NO: 10981 - DNA, 50 bp, synthetic construct
  source 1..50: mol_type = other DNA
tataacataaaaataacaaaaccttcttacaaattatcaactcaaactac

SEQ ID NO: 10982 - DNA, 50 bp, synthetic construct
  source 1..50: mol_type = other DNA
cctcttataaaaataaaacctaatcaaataacttaaactctataaatttc

SEQ ID NO: 10983 - DNA, 50 bp, synthetic construct
  source 1..50: mol_type = other DNA
tacaaaactcaaatcacttaaccaaactccacccctacaaaaaacaacac

SEQ ID NO: 10984 - DNA, 50 bp, synthetic construct
  source 1..50: mol_type = other DNA
craaaaattccttccaacaataaaacaaaacacaaactttaaaaaaaacc

SEQ ID NO: 10985 - DNA, 50 bp, synthetic construct
  source 1..50: mol_type = other DNA
taatatcrcttcttaaaaataacctttattcaatactacttcaattcccc

SEQ ID NO: 10986 - DNA, 50 bp, synthetic construct
  source 1..50: mol_type = other DNA
aacataaaatccttattaaaccraaaaccccrccttaaatttctaatatc

SEQ ID NO: 10987 - DNA, 50 bp, synthetic construct
  source 1..50: mol_type = other DNA
aaaaatctctaacccacaaaacataaaatccttattaaaccraaaacccc

SEQ ID NO: 10988 - DNA, 50 bp, synthetic construct
  source 1..50: mol_type = other DNA
acacracacaaaaatctctaacccacaaaacataaaatccttattaaacc

SEQ ID NO: 10989 - DNA, 50 bp, synthetic construct
  source 1..50: mol_type = other DNA
aaataacctttctaattatacaactcrataataaataccrtcaacatacc

SEQ ID NO: 10990 - DNA, 50 bp, synthetic construct
  source 1..50: mol_type = other DNA
ctttctaattatacaactcrataataaataccrtcaacataccraaaccc

SEQ ID NO: 10991 - DNA, 50 bp, synthetic construct
  source 1..50: mol_type = other DNA
aacacaaaaattactactataaactaacraactaaatcccraaaaaactc

SEQ ID NO: 10992 - DNA, 50 bp, synthetic construct
  source 1..50: mol_type = other DNA
tacaaaatactttaaaaaaataatttcctcactataaattaataacccac

SEQ ID NO: 10993 - DNA, 50 bp, synthetic construct
  source 1..50: mol_type = other DNA
aatcaaaaacttatttaatacttacaattacaaaatacctcaaaccracc

SEQ ID NO: 10994 - DNA, 50 bp, synthetic construct
  source 1..50: mol_type = other DNA
aataaatcaaaaacttatttaatacttacaattacaaaatacctcaaacc

SEQ ID NO: 10995 - DNA, 50 bp, synthetic construct
  source 1..50: mol_type = other DNA
ctaacaacaacatcttcacrtccacactttttaattcattctcttaaatc

SEQ ID NO: 10996 - DNA, 50 bp, synthetic construct
  source 1..50: mol_type = other DNA
tttcttactttccacatttccaataaccatactaacaacaacatcttcac

SEQ ID NO: 10997 - DNA, 50 bp, synthetic construct
  source 1..50: mol_type = other DNA
tacacrccatttactattaccaccatacttataaattaataaaaaaacac

SEQ ID NO: 10998 - DNA, 50 bp, synthetic construct
  source 1..50: mol_type = other DNA
atacttcctaaaacctaatttaaaaaaactaattataaaatacatactac

SEQ ID NO: 10999 - DNA, 50 bp, synthetic construct
  source 1..50: mol_type = other DNA
tttccaacattttatttaacctcaataaatacaaatacraacraccccac

SEQ ID NO: 11000 - DNA, 50 bp, synthetic construct
  source 1..50: mol_type = other DNA
aacaccaatttccaacattttatttaacctcaataaatacaaatacraac

SEQ ID NO: 11001 - DNA, 50 bp, synthetic construct
  source 1..50: mol_type = other DNA
caaaaacaacacratacaacaattcctaaaaaaaacrctacaaaaactac

SEQ ID NO: 11002 - DNA, 50 bp, synthetic construct
  source 1..50: mol_type = other DNA
attcctaaaaaaaacrctacaaaaactacrcaaaaacttcctaaaactac

SEQ ID NO: 11003 - DNA, 50 bp, synthetic construct
  source 1..50: mol_type = other DNA
aataattataaacataaacttaaaaaccacaataactaaatttaattccc

SEQ ID NO: 11004 - DNA, 50 bp, synthetic construct
  source 1..50: mol_type = other DNA
atctacccaaccctaaaatccttaactcatacttaaaaaatcctatcaac

SEQ ID NO: 11005 - DNA, 50 bp, synthetic construct
  source 1..50: mol_type = other DNA
tacatcacattcatatctctacaaatactaaatcaccctaaatacaaaac

SEQ ID NO: 11006 - DNA, 50 bp, synthetic construct
  source 1..50: mol_type = other DNA
atactaaatcaccctaaatacaaaacraaaaaatactataactacctacc

SEQ ID NO: 11007 - DNA, 50 bp, synthetic construct
  source 1..50: mol_type = other DNA
aatcaccctaaatacaaaacraaaaaatactataactacctaccraaaac

SEQ ID NO: 11008 - DNA, 50 bp, synthetic construct
  source 1..50: mol_type = other DNA
raaaacrtctaaactaaacaaccctttaccattaacaaaaataaataaac

SEQ ID NO: 11009 - DNA, 50 bp, synthetic construct
  source 1..50: mol_type = other DNA
crtctaaactaaacaaccctttaccattaacaaaaataaataaacrtaac

SEQ ID NO: 11010 - DNA, 50 bp, synthetic construct
  source 1..50: mol_type = other DNA
tccaattctataccttaatcaccaaaatcactaaattatatatatcatac

SEQ ID NO: 11011 - DNA, 50 bp, synthetic construct
  source 1..50: mol_type = other DNA
ataccttaatcaccaaaatcactaaattatatatatcatacraaaaaaac

SEQ ID NO: 11012 - DNA, 50 bp, synthetic construct
  source 1..50: mol_type = other DNA
atatttcaaatctcaactttccttaacaaaaaaaacttcaacttttccac

SEQ ID NO: 11013 - DNA, 50 bp, synthetic construct
  source 1..50: mol_type = other DNA
aaaaaaacttcaacttttccacrccctctctatatattctttaattttcc

SEQ ID NO: 11014 - DNA, 50 bp, synthetic construct
  source 1..50: mol_type = other DNA
ttaaataccaaactaaaaactaaaacttcatcctataacaacaaaaaacc

SEQ ID NO: 11015 - DNA, 50 bp, synthetic construct
  source 1..50: mol_type = other DNA
taaaaccaaaaattcacaattaaaccatcttacatctaaatactaactcc

SEQ ID NO: 11016 - DNA, 50 bp, synthetic construct
  source 1..50: mol_type = other DNA
raaactaactaactctaacrtaattcractatactattccaacctaaaac

SEQ ID NO: 11017 - DNA, 50 bp, synthetic construct
  source 1..50: mol_type = other DNA
aaataaatccccaacaaatcccaattaaaacctactaaaaatacaaacac

SEQ ID NO: 11018 - DNA, 50 bp, synthetic construct
  source 1..50: mol_type = other DNA
tccatctaaaataccraattcatctcactaaaaaataccaaaaaacraac

SEQ ID NO: 11019 - DNA, 50 bp, synthetic construct
  source 1..50: mol_type = other DNA
catttccatctaaaataccraattcatctcactaaaaaataccaaaaaac

SEQ ID NO: 11020 - DNA, 50 bp, synthetic construct
  source 1..50: mol_type = other DNA
acrtaaacaacrcaaaaaacrataatttctacatttccatctaaaatacc

SEQ ID NO: 11021 - DNA, 50 bp, synthetic construct
  source 1..50: mol_type = other DNA
ccaaaaactctcatactaacaaaataaaataataactatttcccatactc

SEQ ID NO: 11022 - DNA, 50 bp, synthetic construct
  source 1..50: mol_type = other DNA
ccaaacaactatttatcaaaaaatacaacaaaatacttttaacactaaac

SEQ ID NO: 11023 - DNA, 50 bp, synthetic construct
  source 1..50: mol_type = other DNA
acatccctaaaaactatcaaaattccaacttcttaaaaaattaataaacc

SEQ ID NO: 11024 - DNA, 50 bp, synthetic construct
  source 1..50: mol_type = other DNA
aaaaacattcaacaccacaaaacrcataatctcaaaccaaaaaaataaac

SEQ ID NO: 11025 - DNA, 50 bp, synthetic construct
  source 1..50: mol_type = other DNA
tcacaaataatcaaactataatcrttcactcccttaatctaaaactatac

SEQ ID NO: 11026 - DNA, 50 bp, synthetic construct
  source 1..50: mol_type = other DNA
ataattaaatcaacacctctacctaaaataatactacaaaaaccaatatc

SEQ ID NO: 11027 - DNA, 50 bp, synthetic construct
  source 1..50: mol_type = other DNA
aaactaaattcaattaaaaacacaaactatcacttcaacrataacaaaac

SEQ ID NO: 11028 - DNA, 50 bp, synthetic construct
  source 1..50: mol_type = other DNA
aaaaaaataaataatacttaaaacctctttatctaaaccrttttaccacc

SEQ ID NO: 11029 - DNA, 50 bp, synthetic construct
  source 1..50: mol_type = other DNA
acaaaaactattcaaaaactataaaatctacacccraataataaacaacc

SEQ ID NO: 11030 - DNA, 50 bp, synthetic construct
  source 1..50: mol_type = other DNA
ttttcactccctttctataaaacaacaacaaaatcractactcatcattc

SEQ ID NO: 11031 - DNA, 50 bp, synthetic construct
  source 1..50: mol_type = other DNA
attttaaacacaactattaaatacaactaacctctacaacccactctacc

SEQ ID NO: 11032 - DNA, 50 bp, synthetic construct
  source 1..50: mol_type = other DNA
ttaaacacaactattaaatacaactaacctctacaacccactctaccrac

SEQ ID NO: 11033 - DNA, 50 bp, synthetic construct
  source 1..50: mol_type = other DNA
ctttataaaaaaaacctaaaactctaccctttctctaactcraattaccc

SEQ ID NO: 11034 - DNA, 50 bp, synthetic construct
  source 1..50: mol_type = other DNA
aaaaaacacatctaatcaaatcaaaatactacaaatattacractatccc

SEQ ID NO: 11035 - DNA, 50 bp, synthetic construct
  source 1..50: mol_type = other DNA
aattaacaatatatatattaaaaacraataataaacctctatcaaccaac

SEQ ID NO: 11036 - DNA, 50 bp, synthetic construct
  source 1..50: mol_type = other DNA
tcacaaactaaatatacratacctctctctacctataactctatatacac

SEQ ID NO: 11037 - DNA, 50 bp, synthetic construct
  source 1..50: mol_type = other DNA
taactctatatacacrtatatacctctatcaaataacaaataaacactac

SEQ ID NO: 11038 - DNA, 50 bp, synthetic construct
  source 1..50: mol_type = other DNA
tttcraaatcaccataaaacaattctcataaaacaataaatcaaaaatac

SEQ ID NO: 11039 - DNA, 50 bp, synthetic construct
  source 1..50: mol_type = other DNA
tactcatattttctaaattccttccaacttctaaataaatttcccttctc

SEQ ID NO: 11040 - DNA, 50 bp, synthetic construct
  source 1..50: mol_type = other DNA
tcctttaaaaataactttaaaacatctctctctctctctatcctttccac

SEQ ID NO: 11041 - DNA, 50 bp, synthetic construct
  source 1..50: mol_type = other DNA
tttaaaacaatattaaatctcattatatcctaattccctctttttccccc

SEQ ID NO: 11042 - DNA, 50 bp, synthetic construct
  source 1..50: mol_type = other DNA
aataaaaccccaatcaatcctactaaataccttcttatctaaaaaaaacc

SEQ ID NO: 11043 - DNA, 50 bp, synthetic construct
  source 1..50: mol_type = other DNA
acaaactaaattcaaccataacaaacrtactatcattcattttaataacc

SEQ ID NO: 11044 - DNA, 50 bp, synthetic construct
  source 1..50: mol_type = other DNA
ataaataacaacacrcctactataactaaactcaacctataaaataaccc

SEQ ID NO: 11045 - DNA, 50 bp, synthetic construct
  source 1..50: mol_type = other DNA
ctataactaaactcaacctataaaataacccraaaacatccctacccaac

SEQ ID NO: 11046 - DNA, 50 bp, synthetic construct
  source 1..50: mol_type = other DNA
aaaactaaaactttcrattaccatctactataaaatatatatacaaatac

SEQ ID NO: 11047 - DNA, 50 bp, synthetic construct
  source 1..50: mol_type = other DNA
acaaaatcccraaaaacaacccrataattctaatttaacttcaaatcccc

SEQ ID NO: 11048 - DNA, 50 bp, synthetic construct
  source 1..50: mol_type = other DNA
atccaacattctaaaatttaccaaaaaaatctcrtttactcctaaatcac

SEQ ID NO: 11049 - DNA, 50 bp, synthetic construct
  source 1..50: mol_type = other DNA
tccataccrtcaacaccatccaacattctaaaatttaccaaaaaaatctc

SEQ ID NO: 11050 - DNA, 50 bp, synthetic construct
  source 1..50: mol_type = other DNA
aaataaaacaaccaattaacacataatttcccrattacccaatccatacc

SEQ ID NO: 11051 - DNA, 50 bp, synthetic construct
  source 1..50: mol_type = other DNA
taacaaacctcaaaatattaaataatattaacracataaactaaacaacc

SEQ ID NO: 11052 - DNA, 50 bp, synthetic construct
  source 1..50: mol_type = other DNA
ccraaaaaccatatactaactaactacttcatccctttttccttttctac

SEQ ID NO: 11053 - DNA, 50 bp, synthetic construct
  source 1..50: mol_type = other DNA
taccaaacaaaaataacaaacaaaataccrcaaaaaaccaaacrtactcc

SEQ ID NO: 11054 - DNA, 50 bp, synthetic construct
  source 1..50: mol_type = other DNA
aattatttaccaaacaaaaataacaaacaaaataccrcaaaaaaccaaac

SEQ ID NO: 11055 - DNA, 50 bp, synthetic construct
  source 1..50: mol_type = other DNA
aaaataactcatccccaataccctaaaaaactccraaattctaaaaacac

SEQ ID NO: 11056 - DNA, 50 bp, synthetic construct
  source 1..50: mol_type = other DNA
ttaacacaataaactaaaaataactcatccccaataccctaaaaaactcc

SEQ ID NO: 11057 - DNA, 50 bp, synthetic construct
  source 1..50: mol_type = other DNA
cactaaaaataaatcattctcaactcactataccaaaaatctttttaacc

SEQ ID NO: 11058 - DNA, 50 bp, synthetic construct
  source 1..50: mol_type = other DNA
ctaaaaaattactaccctatacrttaaccaatcaaatttcctaaataatc

SEQ ID NO: 11059 - DNA, 50 bp, synthetic construct
  source 1..50: mol_type = other DNA
atcttatacttcccacaaaaatataaaaaaatccccttacctataaaacc

SEQ ID NO: 11060 - DNA, 50 bp, synthetic construct
  source 1..50: mol_type = other DNA
aaaccrccataaaaaatcaatacaaatcaatatatttcctcttattctac

SEQ ID NO: 11061 - DNA, 50 bp, synthetic construct
  source 1..50: mol_type = other DNA
taaaaacrtctcaattttaaaaatccattccaaaaccaattttaaactac

SEQ ID NO: 11062 - DNA, 50 bp, synthetic construct
  source 1..50: mol_type = other DNA
aacaatatacccttttattaaataaatacttaacaatcctctactaaaac

SEQ ID NO: 11063 - DNA, 50 bp, synthetic construct
  source 1..50: mol_type = other DNA
ccatttaaaaacatcatatacacacaatctcatcacaatattccttatac

SEQ ID NO: 11064 - DNA, 50 bp, synthetic construct
  source 1..50: mol_type = other DNA
acttaaaaaaaacatctcttaaaatttatcccttacacatctaatttaac

SEQ ID NO: 11065 - DNA, 50 bp, synthetic construct
  source 1..50: mol_type = other DNA
aattataataacaatattacatttcaaaattctaaacaccaccaaaaaac

SEQ ID NO: 11066 - DNA, 50 bp, synthetic construct
  source 1..50: mol_type = other DNA
aacttttaaacacacaaaatctcaccctcaccaaacctcttaattaaaac

SEQ ID NO: 11067 - DNA, 50 bp, synthetic construct
  source 1..50: mol_type = other DNA
caaaatctcaccctcaccaaacctcttaattaaaacraaaacaaaacctc

SEQ ID NO: 11068 - DNA, 50 bp, synthetic construct
  source 1..50: mol_type = other DNA
aaacaaaacractctaaccaaaataataacrataaaaaactctacctatc

SEQ ID NO: 11069 - DNA, 50 bp, synthetic construct
  source 1..50: mol_type = other DNA
aaaaacatttatccaactctctccttccaacttccaaacactttcccttc

SEQ ID NO: 11070 - DNA, 50 bp, synthetic construct
  source 1..50: mol_type = other DNA
ataataaatttaccaaaaccaacrcctataaaacttaaccctactaaacc

SEQ ID NO: 11071 - DNA, 50 bp, synthetic construct
  source 1..50: mol_type = other DNA
cttaaataccttataatatccrcracctaacaaaaccaaattccacaaac

SEQ ID NO: 11072 - DNA, 50 bp, synthetic construct
  source 1..50: mol_type = other DNA
actaacaactcactccacttcctaaaataaatttttaccrcctaaactac

SEQ ID NO: 11073 - DNA, 50 bp, synthetic construct
  source 1..50: mol_type = other DNA
taaattactaactaaacttcraacaaactttatatctcctacaaaaacac

SEQ ID NO: 11074 - DNA, 50 bp, synthetic construct
  source 1..50: mol_type = other DNA
aactaaacttcraacaaactttatatctcctacaaaaacacrctacctcc

SEQ ID NO: 11075 - DNA, 50 bp, synthetic construct
  source 1..50: mol_type = other DNA
atattaaacaaattctaatacacctatctctcttaatacccccaaatttc

SEQ ID NO: 11076 - DNA, 50 bp, synthetic construct
  source 1..50: mol_type = other DNA
crcctaaaacttattctttaaatctcaaatccraaaaaccaaaaatcctc

SEQ ID NO: 11077 - DNA, 50 bp, synthetic construct
  source 1..50: mol_type = other DNA
atacrtctatccaaaattcttttaaacaaatcacttcttcaatacaaaac

SEQ ID NO: 11078 - DNA, 50 bp, synthetic construct
  source 1..50: mol_type = other DNA
aataaaatttaatcaacccaaatatctattttcttaactatctttcatac

SEQ ID NO: 11079 - DNA, 50 bp, synthetic construct
  source 1..50: mol_type = other DNA
aaaacacaataaatcaattctcaattacttctaaaatcaaattctacaac

SEQ ID NO: 11080 - DNA, 50 bp, synthetic construct
  source 1..50: mol_type = other DNA
attcctattaatttttccrctaacccaactaaaaacraacacattaaaac

SEQ ID NO: 11081 - DNA, 50 bp, synthetic construct
  source 1..50: mol_type = other DNA
taaaacctaaaattattcctattaatttttccrctaacccaactaaaaac

SEQ ID NO: 11082 - DNA, 50 bp, synthetic construct
  source 1..50: mol_type = other DNA
tcttcacaatcactactttaaaacctaaaattattcctattaatttttcc

SEQ ID NO: 11083 - DNA, 50 bp, synthetic construct
  source 1..50: mol_type = other DNA
ttatataataataaatacaaaatacaaaatttaaacttacatcttcctac

SEQ ID NO: 11084 - DNA, 50 bp, synthetic construct
  source 1..50: mol_type = other DNA
tcatttcctaattataaataataaactcttaaaaacactatctttttaac

SEQ ID NO: 11085 - DNA, 50 bp, synthetic construct
  source 1..50: mol_type = other DNA
atttcctaattataaataataaactcttaaaaacactatctttttaacrc

SEQ ID NO: 11086 - DNA, 50 bp, synthetic construct
  source 1..50: mol_type = other DNA
acaaacttctactaacaataaaacattaaacaaaactaccctcaaaaaac

SEQ ID NO: 11087 - DNA, 50 bp, synthetic construct
  source 1..50: mol_type = other DNA
tacattaaaaactacccttaataaaactacctactataaatacataattc

SEQ ID NO: 11088 - DNA, 50 bp, synthetic construct
  source 1..50: mol_type = other DNA
aaaaaactaaattccctttaacttacacaataaccatccacaaaaacttc

SEQ ID NO: 11089 - DNA, 50 bp, synthetic construct
  source 1..50: mol_type = other DNA
tcrccttctaatccaaatacacacaataaacattttaaaacatataaatc

SEQ ID NO: 11090 - DNA, 50 bp, synthetic construct
  source 1..50: mol_type = other DNA
tttttataatttaacaattcttaataaacrtatttaatccrtccaacaac

SEQ ID NO: 11091 - DNA, 50 bp, synthetic construct
  source 1..50: mol_type = other DNA
aacraactaaatacrtccaccaaaaactattaaaccacaaaaattcctac

SEQ ID NO: 11092 - DNA, 50 bp, synthetic construct
  source 1..50: mol_type = other DNA
taaaaactcctcctcctcataacataataatttactttaacacracctac

SEQ ID NO: 11093 - DNA, 50 bp, synthetic construct
  source 1..50: mol_type = other DNA
aaaacrtacataccraaaatcctattaaatatcacccaaaaatattcrtc

SEQ ID NO: 11094 - DNA, 50 bp, synthetic construct
  source 1..50: mol_type = other DNA
aacactcaacaaaattcccratatatacrtctcttaacttttatttttac

SEQ ID NO: 11095 - DNA, 50 bp, synthetic construct
  source 1..50: mol_type = other DNA
tttatttatataaccaatattccttcratcttttatcctataaacaaaac

SEQ ID NO: 11096 - DNA, 50 bp, synthetic construct
  source 1..50: mol_type = other DNA
taaaccactatactcratcacrtttttatttatataaccaatattccttc

SEQ ID NO: 11097 - DNA, 50 bp, synthetic construct
  source 1..50: mol_type = other DNA
crcctcccaaaatactataattacaaacttaaaccactatactcratcac

SEQ ID NO: 11098 - DNA, 50 bp, synthetic construct
  source 1..50: mol_type = other DNA
aaacccataatacaatcraattctaataccaaaaaaaaatcacaacaaac

SEQ ID NO: 11099 - DNA, 50 bp, synthetic construct
  source 1..50: mol_type = other DNA
cccataatacaatcraattctaataccaaaaaaaaatcacaacaaacrac

SEQ ID NO: 11100 - DNA, 50 bp, synthetic construct
  source 1..50: mol_type = other DNA
aactatttaaaaaatatatattctctacaaaaaaatcactaaaaccttac

SEQ ID NO: 11101 - DNA, 50 bp, synthetic construct
  source 1..50: mol_type = other DNA
ttcaatttctaaaaccacaaaaaattcattcactcatactaattaaaccc

SEQ ID NO: 11102 - DNA, 50 bp, synthetic construct
  source 1..50: mol_type = other DNA
caaacttccttaaaactatcttcttctaacctccacrataccactttttc

SEQ ID NO: 11103 - DNA, 50 bp, synthetic construct
  source 1..50: mol_type = other DNA
tccaaaaaaatttatcctttacactttcctcttctcaactatatacttac

SEQ ID NO: 11104 - DNA, 50 bp, synthetic construct
  source 1..50: mol_type = other DNA
caaaaaaataacatctaaacacacaaataattcctaaaaccataatcttc

SEQ ID NO: 11105 - DNA, 50 bp, synthetic construct
  source 1..50: mol_type = other DNA
ttcaaaaatacaaattccttttacatttccaaaactttaccccaatatcc

SEQ ID NO: 11106 - DNA, 50 bp, synthetic construct
  source 1..50: mol_type = other DNA
actccrtaattacraacactaatttcaaaaaaatcaaactcccratctac

SEQ ID NO: 11107 - DNA, 50 bp, synthetic construct
  source 1..50: mol_type = other DNA
cctatttactccrtaattacraacactaatttcaaaaaaatcaaactccc

SEQ ID NO: 11108 - DNA, 50 bp, synthetic construct
  source 1..50: mol_type = other DNA
acaaaataataacrcaaatcraaaacctaacccccctaaaactaatattc

SEQ ID NO: 11109 - DNA, 50 bp, synthetic construct
  source 1..50: mol_type = other DNA
atttaatctcactaaaataatcaattcctcttaaccttcctatttactcc

SEQ ID NO: 11110 - DNA, 50 bp, synthetic construct
  source 1..50: mol_type = other DNA
taatcataaaaactacaaatcacacctctccrtatttaaaaaaacaaatc

SEQ ID NO: 11111 - DNA, 50 bp, synthetic construct
  source 1..50: mol_type = other DNA
cttcaaacraccrcataaataatcataaaaactacaaatcacacctctcc

SEQ ID NO: 11112 - DNA, 50 bp, synthetic construct
  source 1..50: mol_type = other DNA
aatcttaataaaataatacaccaaacattctatctcatttctcttcaaac

SEQ ID NO: 11113 - DNA, 50 bp, synthetic construct
  source 1..50: mol_type = other DNA
aaatatctaatatatcaccccactaaaactaataacatcatcaataaccc

SEQ ID NO: 11114 - DNA, 50 bp, synthetic construct
  source 1..50: mol_type = other DNA
cttaaatatatctatttctcaaaatctatcctctacatacatacatttac

SEQ ID NO: 11115 - DNA, 50 bp, synthetic construct
  source 1..50: mol_type = other DNA
tcaaattttaattaatctcactttactaatactttaaaaaaaccaataac

SEQ ID NO: 11116 - DNA, 50 bp, synthetic construct
  source 1..50: mol_type = other DNA
tcaattttttataaattcaaactccatcttaaaaaacaaatcacccaacc

SEQ ID NO: 11117 - DNA, 50 bp, synthetic construct
  source 1..50: mol_type = other DNA
taaaataacattattccttcattaaaaattacacttcctacacaccatac

SEQ ID NO: 11118 - DNA, 50 bp, synthetic construct
  source 1..50: mol_type = other DNA
tttaaattttattaaatacacaattttattatttatcttccttcttcacc

SEQ ID NO: 11119 - DNA, 50 bp, synthetic construct
  source 1..50: mol_type = other DNA
atatataacrctacttaatctaataaatccatatatccrtaccaaaaacc

SEQ ID NO: 11120 - DNA, 50 bp, synthetic construct
  source 1..50: mol_type = other DNA
tacaaaataaaaatatataacrctacttaatctaataaatccatatatcc

SEQ ID NO: 11121 - DNA, 50 bp, synthetic construct
  source 1..50: mol_type = other DNA
aaataaatcrattcctaatacraacatataaacttaccaaattaaacaac

SEQ ID NO: 11122 - DNA, 50 bp, synthetic construct
  source 1..50: mol_type = other DNA
aatatatacatataaaaatcttcrtcataacraatactaaccraaacacc

SEQ ID NO: 11123 - DNA, 50 bp, synthetic construct
  source 1..50: mol_type = other DNA
taaccatcrtatttaacaatatactaatcatcacaaccattaccaaattc

SEQ ID NO: 11124 - DNA, 50 bp, synthetic construct
  source 1..50: mol_type = other DNA
aaaattaataataactttattttatacaactaactcatcaccccaaactc

SEQ ID NO: 11125 - DNA, 50 bp, synthetic construct
  source 1..50: mol_type = other DNA
aaaaaataaaacaataaatcacctaatactaaaatctcataaccaaactc

SEQ ID NO: 11126 - DNA, 50 bp, synthetic construct
  source 1..50: mol_type = other DNA
aaaataaaacaataaatcacctaatactaaaatctcataaccaaactcrc

SEQ ID NO: 11127 - DNA, 50 bp, synthetic construct
  source 1..50: mol_type = other DNA
rattccaccacaatataaacraccacaaaaaaaattaccctaaatattcc

SEQ ID NO: 11128 - DNA, 50 bp, synthetic construct
  source 1..50: mol_type = other DNA
caatataaacraccacaaaaaaaattaccctaaatattccrtactacacc

SEQ ID NO: 11129 - DNA, 50 bp, synthetic construct
  source 1..50: mol_type = other DNA
aattcacaaaactataattacaataccaaatatcacrtactccctcraac

SEQ ID NO: 11130 - DNA, 50 bp, synthetic construct
  source 1..50: mol_type = other DNA
cacaaattcacaaaactataattacaataccaaatatcacrtactccctc

SEQ ID NO: 11131 - DNA, 50 bp, synthetic construct
  source 1..50: mol_type = other DNA
atactactcccacaaattcacaaaactataattacaataccaaatatcac

SEQ ID NO: 11132 - DNA, 50 bp, synthetic construct
  source 1..50: mol_type = other DNA
caaattaactcaatcattcaataactcctaaaccctaaaacaacctcttc

SEQ ID NO: 11133 - DNA, 50 bp, synthetic construct
  source 1..50: mol_type = other DNA
acccttccaaatctaaaatcctacattcttccttactatttactttcccc

SEQ ID NO: 11134 - DNA, 50 bp, synthetic construct
  source 1..50: mol_type = other DNA
ccaaatctaaaatcctacattcttccttactatttactttccccraactc

SEQ ID NO: 11135 - DNA, 50 bp, synthetic construct
  source 1..50: mol_type = other DNA
atatcatcccrtaaatataaattaaaaacacaaaacrtaaccaaccatcc

SEQ ID NO: 11136 - DNA, 50 bp, synthetic construct
  source 1..50: mol_type = other DNA
tactttccccraactcraaaaaaaccaaatataaacraataactaaccac

SEQ ID NO: 11137 - DNA, 50 bp, synthetic construct
  source 1..50: mol_type = other DNA
aaatataaacraataactaaccacrttttatatttccaattcatattcac

SEQ ID NO: 11138 - DNA, 50 bp, synthetic construct
  source 1..50: mol_type = other DNA
aactaaccacrttttatatttccaattcatattcacraaataacacaaac

SEQ ID NO: 11139 - DNA, 50 bp, synthetic construct
  source 1..50: mol_type = other DNA
accacrttttatatttccaattcatattcacraaataacacaaacraaac

SEQ ID NO: 11140 - DNA, 50 bp, synthetic construct
  source 1..50: mol_type = other DNA
aacrcttaaacaatttcattttaccccacttctccacctaaaaactaaac

SEQ ID NO: 11141 - DNA, 50 bp, synthetic construct
  source 1..50: mol_type = other DNA
actaaacrttactaaaacctacaaaaacaacctcaacaaaataaaataac

SEQ ID NO: 11142 - DNA, 50 bp, synthetic construct
  source 1..50: mol_type = other DNA
cctcctccttctaaaatcaaaaaaacaatttttatcccaacaacaaaacc

SEQ ID NO: 11143 - DNA, 50 bp, synthetic construct
  source 1..50: mol_type = other DNA
aaaaaaaaatttcccaacatatatattataccaatcttaaaaattcatcc

SEQ ID NO: 11144 - DNA, 50 bp, synthetic construct
  source 1..50: mol_type = other DNA
acaatccctatatcactaactaaaaaattctctatatcatactaattaac

SEQ ID NO: 11145 - DNA, 50 bp, synthetic construct
  source 1..50: mol_type = other DNA
aacaaacraaaacttctataaattattttaccatttctaaaaaacacrac

SEQ ID NO: 11146 - DNA, 50 bp, synthetic construct
  source 1..50: mol_type = other DNA
atcactaactaaaaaattctctatatcatactaattaacraaatttcrtc

SEQ ID NO: 11147 - DNA, 50 bp, synthetic construct
  source 1..50: mol_type = other DNA
aaatttcrtcrtattccctaaaaataataaaacaatccacaaaaattctc

SEQ ID NO: 11148 - DNA, 50 bp, synthetic construct
  source 1..50: mol_type = other DNA
aaatacaatactctaattaaccaacactaaatcacatacccacctctaac

SEQ ID NO: 11149 - DNA, 50 bp, synthetic construct
  source 1..50: mol_type = other DNA
taaatatccctatctaacaactttaaaaaaaacaataattctcccaacac

SEQ ID NO: 11150 - DNA, 50 bp, synthetic construct
  source 1..50: mol_type = other DNA
aacccaaaaaaactataatataatccaaaaacttttcctaaattttttcc

SEQ ID NO: 11151 - DNA, 50 bp, synthetic construct
  source 1..50: mol_type = other DNA
caaaatattcctctattccaattcctctacaattaacctctaactcaacc

SEQ ID NO: 11152 - DNA, 50 bp, synthetic construct
  source 1..50: mol_type = other DNA
cacataaaacttcaaccrttaaaaaaattttcaatactttccrcaaaaac

SEQ ID NO: 11153 - DNA, 50 bp, synthetic construct
  source 1..50: mol_type = other DNA
ttaaaaaaatcrtctttaatattctaacatacacacataaaacttcaacc

SEQ ID NO: 11154 - DNA, 50 bp, synthetic construct
  source 1..50: mol_type = other DNA
acctttctaacrattaaaacttcatatatacatattaaaacaccaaaaac

SEQ ID NO: 11155 - DNA, 50 bp, synthetic construct
  source 1..50: mol_type = other DNA
aatcatactttctaatctcaattcaaataaacatttcccttattttaacc

SEQ ID NO: 11156 - DNA, 50 bp, synthetic construct
  source 1..50: mol_type = other DNA
ccaaataaaatacttcatatctatctctcaaaattcccacaactaatccc

SEQ ID NO: 11157 - DNA, 50 bp, synthetic construct
  source 1..50: mol_type = other DNA
actcatttatttttttctatctacaacaataataaaaaacaattttcctc

SEQ ID NO: 11158 - DNA, 50 bp, synthetic construct
  source 1..50: mol_type = other DNA
cacaatacatccatttaacaactactaaaaaaacaaccrcaattcctctc

SEQ ID NO: 11159 - DNA, 50 bp, synthetic construct
  source 1..50: mol_type = other DNA
atccatttaacaactactaaaaaaacaaccrcaattcctctcractaaac

SEQ ID NO: 11160 - DNA, 50 bp, synthetic construct
  source 1..50: mol_type = other DNA
rccractcacatattattttaacaacacacatacattctttcctacracc

SEQ ID NO: 11161 - DNA, 50 bp, synthetic construct
  source 1..50: mol_type = other DNA
cttcrccractcacatattattttaacaacacacatacattctttcctac

SEQ ID NO: 11162 - DNA, 50 bp, synthetic construct
  source 1..50: mol_type = other DNA
tctatattttacatcaccctcttcacrtactcaaattcaaaatcatcttc

SEQ ID NO: 11163 - DNA, 50 bp, synthetic construct
  source 1..50: mol_type = other DNA
raaataaaactcaaaacataacraactacaaatccraaaccctaccctac

SEQ ID NO: 11164 - DNA, 50 bp, synthetic construct
  source 1..50: mol_type = other DNA
aaaactacacacrcctaatacctatatcaaaaccacrcaatctctaaatc

SEQ ID NO: 11165 - DNA, 50 bp, synthetic construct
  source 1..50: mol_type = other DNA
taaaaaactacraaaaaactacacacrcctaatacctatatcaaaaccac

SEQ ID NO: 11166 - DNA, 50 bp, synthetic construct
  source 1..50: mol_type = other DNA
acttaaaaacacractcaaaaactacrtaactctaacacaaacatcaaac

SEQ ID NO: 11167 - DNA, 50 bp, synthetic construct
  source 1..50: mol_type = other DNA
ractaaatcaaaaatcrctatatactaaataatacaatcctttactaaac

SEQ ID NO: 11168 - DNA, 50 bp, synthetic construct
  source 1..50: mol_type = other DNA
cacatcaaccttaataacratctcctcccacatcractaaatcaaaaatc

SEQ ID NO: 11169 - DNA, 50 bp, synthetic construct
  source 1..50: mol_type = other DNA
aaatatttcttaaactcacatcaaccttaataacratctcctcccacatc

SEQ ID NO: 11170 - DNA, 50 bp, synthetic construct
  source 1..50: mol_type = other DNA
cttcttaaaccaatcaaaatatttcttaaactcacatcaaccttaataac

SEQ ID NO: 11171 - DNA, 50 bp, synthetic construct
  source 1..50: mol_type = other DNA
aaaactaatataaatctaaaaaacatcctaactaacctaaaaaaaccatc

SEQ ID NO: 11172 - DNA, 50 bp, synthetic construct
  source 1..50: mol_type = other DNA
tatctacttaaaccaataattaaaaatataacrtactaaaccctaataac

SEQ ID NO: 11173 - DNA, 50 bp, synthetic construct
  source 1..50: mol_type = other DNA
aacaacttattaaaaatactaacttacttcccrttaccaaaactcaacac

SEQ ID NO: 11174 - DNA, 50 bp, synthetic construct
  source 1..50: mol_type = other DNA
acacraactcctaaaaaattctcattttaacacaactataattcccatac

SEQ ID NO: 11175 - DNA, 50 bp, synthetic construct
  source 1..50: mol_type = other DNA
aactatcactcaaacatcaatcctaacaaacacctactaaaaaaaaccac

SEQ ID NO: 11176 - DNA, 50 bp, synthetic construct
  source 1..50: mol_type = other DNA
ccttaacttacaaaaattcttaatttatactctactattaaaaataacac

SEQ ID NO: 11177 - DNA, 50 bp, synthetic construct
  source 1..50: mol_type = other DNA
taactcaatcatcctatatcccaaataatcataaaacrtaatcaacraac

SEQ ID NO: 11178 - DNA, 50 bp, synthetic construct
  source 1..50: mol_type = other DNA
tcactaactcaatcatcctatatcccaaataatcataaaacrtaatcaac

SEQ ID NO: 11179 - DNA, 50 bp, synthetic construct
  source 1..50: mol_type = other DNA
acrattccatcactaactcaatcatcctatatcccaaataatcataaaac

SEQ ID NO: 11180 - DNA, 50 bp, synthetic construct
  source 1..50: mol_type = other DNA
acrccccataactacttaaaacacaaaataactaaatcaataataaaacc

SEQ ID NO: 11181 - DNA, 50 bp, synthetic construct
  source 1..50: mol_type = other DNA
aacctactctaaacaaaaaacrctatcactacratatcaaatatactctc

SEQ ID NO: 11182 - DNA, 50 bp, synthetic construct
  source 1..50: mol_type = other DNA
tccctcctctactaaataaataataaaacctcraaaacacacttaacatc

SEQ ID NO: 11183 - DNA, 50 bp, synthetic construct
  source 1..50: mol_type = other DNA
ctaaataaataataaaacctcraaaacacacttaacatcrtaataacaac

SEQ ID NO: 11184 - DNA, 50 bp, synthetic construct
  source 1..50: mol_type = other DNA
acatcrtaataacaacrccttttatttaaaataaatttttctttaccctc

SEQ ID NO: 11185 - DNA, 50 bp, synthetic construct
  source 1..50: mol_type = other DNA
aataaacacttctatacccaaaccaattaaaaaaaatttttatatacrac

SEQ ID NO: 11186 - DNA, 50 bp, synthetic construct
  source 1..50: mol_type = other DNA
ttccccttaataccacctatttcaaataaaatccaaaatcratttacccc

SEQ ID NO: 11187 - DNA, 50 bp, synthetic construct
  source 1..50: mol_type = other DNA
ctaaacatcctaaactctaacaattactatcaaaaaataaaacaccaaac

SEQ ID NO: 11188 - DNA, 50 bp, synthetic construct
  source 1..50: mol_type = other DNA
aattctttaacaaataaaaaacrtactcctcaacactaaataaacacacc

SEQ ID NO: 11189 - DNA, 50 bp, synthetic construct
  source 1..50: mol_type = other DNA
aaaaccaatccctaaaaaataaactaattacctaaaaaacaaaatacccc

SEQ ID NO: 11190 - DNA, 50 bp, synthetic construct
  source 1..50: mol_type = other DNA
tatttataaaactaaataaacraaactatacaaattaacccaacctcctc

SEQ ID NO: 11191 - DNA, 50 bp, synthetic construct
  source 1..50: mol_type = other DNA
taaaactaaaaaaataaacacraaaaaactaaaccaacctacacaactcc

SEQ ID NO: 11192 - DNA, 50 bp, synthetic construct
  source 1..50: mol_type = other DNA
ctcaactccacaaacaaaaccataaataaatcccctcaacaaaaaaatcc

SEQ ID NO: 11193 - DNA, 50 bp, synthetic construct
  source 1..50: mol_type = other DNA
caatacctaaaactaccaaccraaaacttacttaaattaaaaaaacctcc

SEQ ID NO: 11194 - DNA, 50 bp, synthetic construct
  source 1..50: mol_type = other DNA
aaccaatactactacttacaaaaaaccacttaatttaatcattaactaac

SEQ ID NO: 11195 - DNA, 50 bp, synthetic construct
  source 1..50: mol_type = other DNA
ctaaaccaaataaccttctataaacaacaacattaactaatttaaaaccc

SEQ ID NO: 11196 - DNA, 50 bp, synthetic construct
  source 1..50: mol_type = other DNA
cacaaaatcacccaatctaaaacrataaattttaatcattcctcccctac

SEQ ID NO: 11197 - DNA, 50 bp, synthetic construct
  source 1..50: mol_type = other DNA
aacacctaaaaaatcataaaaaacaaacacaaaatcacccaatctaaaac

SEQ ID NO: 11198 - DNA, 50 bp, synthetic construct
  source 1..50: mol_type = other DNA
raaaacattacacttaacccttccctaaaaataccatccttaaatttaac

SEQ ID NO: 11199 - DNA, 50 bp, synthetic construct
  source 1..50: mol_type = other DNA
cactctacctacttttccacaatactttttaaataaataattcccaaaac

SEQ ID NO: 11200 - DNA, 50 bp, synthetic construct
  source 1..50: mol_type = other DNA
ataaaactcrtaaatatatatacraataaacaactaacaaccttccctac

SEQ ID NO: 11201 - DNA, 50 bp, synthetic construct
  source 1..50: mol_type = other DNA
cctcctaaaacaattactaacrctttacatcrtattatataataaaactc

SEQ ID NO: 11202 - DNA, 50 bp, synthetic construct
  source 1..50: mol_type = other DNA
taacaaaatccaacctaaacctcctaaaacaattactaacrctttacatc

SEQ ID NO: 11203 - DNA, 50 bp, synthetic construct
  source 1..50: mol_type = other DNA
ccctaataactaacaaaatccaacctaaacctcctaaaacaattactaac

SEQ ID NO: 11204 - DNA, 50 bp, synthetic construct
  source 1..50: mol_type = other DNA
caaaaacaataaataattttaaaactctcccaaaatacctcaattcccac

SEQ ID NO: 11205 - DNA, 50 bp, synthetic construct
  source 1..50: mol_type = other DNA
caaaaaaaaactcccacaatacaacracraactaaaaaaactcctaaaac

SEQ ID NO: 11206 - DNA, 50 bp, synthetic construct
  source 1..50: mol_type = other DNA
ctaaccaaattaccctaacaaacactaacaaacatccattaactaacaac

SEQ ID NO: 11207 - DNA, 50 bp, synthetic construct
  source 1..50: mol_type = other DNA
aaatttaaaattaaaattcaaatcacaaacctaaccatttaacctaatcc

SEQ ID NO: 11208 - DNA, 50 bp, synthetic construct
  source 1..50: mol_type = other DNA
taaattaaataaccaaacttataacctaaattctaatcttaaatctactc

SEQ ID NO: 11209 - DNA, 50 bp, synthetic construct
  source 1..50: mol_type = other DNA
tactctaatttaaaactaaaccacctaccaaatccaaactcatcaaaatc

SEQ ID NO: 11210 - DNA, 50 bp, synthetic construct
  source 1..50: mol_type = other DNA
aatctaaacttaacaaataacccaactccaaatcaaaacacctaaacaac

SEQ ID NO: 11211 - DNA, 50 bp, synthetic construct
  source 1..50: mol_type = other DNA
aaccccaatactattactataataaaaacatccatctaaataaatcaacc

SEQ ID NO: 11212 - DNA, 50 bp, synthetic construct
  source 1..50: mol_type = other DNA
tataaaacattcttcacaaataaataactttatattctttcttcattctc

SEQ ID NO: 11213 - DNA, 50 bp, synthetic construct
  source 1..50: mol_type = other DNA
acatccacatttaccaatactttcaatactctcataaaaaacaaaacttc

SEQ ID NO: 11214 - DNA, 50 bp, synthetic construct
  source 1..50: mol_type = other DNA
ataaaaactactatactcaacacraaaaacaaaaaatccccaatcttatc

SEQ ID NO: 11215 - DNA, 50 bp, synthetic construct
  source 1..50: mol_type = other DNA
acacaaactcatattcatttccaataaaaattaatattataaactctccc

SEQ ID NO: 11216 - DNA, 50 bp, synthetic construct
  source 1..50: mol_type = other DNA
atatatatatttacaaactactacattattatattaaataaattccaacc

SEQ ID NO: 11217 - DNA, 50 bp, synthetic construct
  source 1..50: mol_type = other DNA
attaaatccttattaattccrttctattccatacaacaatataaattaac

SEQ ID NO: 11218 - DNA, 50 bp, synthetic construct
  source 1..50: mol_type = other DNA
tattcaaattattttaaaacrttaacccatactattacataaaacaaaac

SEQ ID NO: 11219 - DNA, 50 bp, synthetic construct
  source 1..50: mol_type = other DNA
ataataatacaataataactcactacaaccttaaactcctaaactcaacc

SEQ ID NO: 11220 - DNA, 50 bp, synthetic construct
  source 1..50: mol_type = other DNA
aaattccataatataataattaacactctaaactctaaatccaacratcc

SEQ ID NO: 11221 - DNA, 50 bp, synthetic construct; identical to SEQ ID NO: 11220
  source 1..50: mol_type = other DNA

SEQ ID NO: 11222 - DNA, 50 bp, synthetic construct
  source 1..50: mol_type = other DNA
taataattaacactctaaactctaaatccaacratccraattcaaatctc

SEQ ID NO: 11223 - DNA, 50 bp, synthetic construct; identical to SEQ ID NO: 11222
  source 1..50: mol_type = other DNA

SEQ ID NO: 11224 - DNA, 50 bp, synthetic construct
  source 1..50: mol_type = other DNA
ccatcctaaaccrcatataacccrtaaattataaattaaacaaacttaac

SEQ ID NO: 11225 - DNA, 50 bp, synthetic construct
  source 1..50: mol_type = other DNA
aatctaaaccccaaaaattaaaaatccctactataaaaaataattccrac

SEQ ID NO: 11226 - DNA, 50 bp, synthetic construct
  source 1..50: mol_type = other DNA
accaatctaaaccccaaaaattaaaaatccctactataaaaaataattcc

SEQ ID NO: 11227 - DNA, 50 bp, synthetic construct
  source 1..50: mol_type = other DNA
aatattaatctataacctattaaaaactaaaccaacaacaacaaataaac

SEQ ID NO: 11228 - DNA, 50 bp, synthetic construct
  source 1..50: mol_type = other DNA
ctataaaaatctaataccrctactaatctaacattaaataacrctcaaac

SEQ ID NO: 11229 - DNA, 50 bp, synthetic construct
  source 1..50: mol_type = other DNA
ttacactcctataaaaatctaataccrctactaatctaacattaaataac

SEQ ID NO: 11230 - DNA, 50 bp, synthetic construct
  source 1..50: mol_type = other DNA
aacatacacrattcaccataaaatttacactcctataaaaatctaatacc

SEQ ID NO: 11231 - DNA, 50 bp, synthetic construct
  source 1..50: mol_type = other DNA
atcaacaacracattaaattctcataaaaatacaaaccctataataaacc

SEQ ID NO: 11232 - DNA, 50 bp, synthetic construct
  source 1..50: mol_type = other DNA
atttaaaaccaatttaataaaaaacaatttttccacaaacccaaaattac

SEQ ID NO: 11233 - DNA, 50 bp, synthetic construct
  source 1..50: mol_type = other DNA
rtaacatacaaataacttatcaaaatacacataatataacaataaacacc

SEQ ID NO: 11234 - DNA, 50 bp, synthetic construct
  source 1..50: mol_type = other DNA
ratatttactatcatactatatacattctaataaatcatttacataccac

SEQ ID NO: 11235 - DNA, 50 bp, synthetic construct
  source 1..50: mol_type = other DNA
taaaaaccacattaataaaatcraccccraaaatcattacctatctaatc

SEQ ID NO: 11236 - DNA, 50 bp, synthetic construct
  source 1..50: mol_type = other DNA
aaccttcratttaatttaaaactaaaaaccacattaataaaatcracccc

SEQ ID NO: 11237 - DNA, 50 bp, synthetic construct
  source 1..50: mol_type = other DNA
aactttcraaaccractttatcaatataacctccaacttcaaattaaacc

SEQ ID NO: 11238 - DNA, 50 bp, synthetic construct
  source 1..50: mol_type = other DNA
aacaactcatatctaaatattaatttttttttccttttaaacaaaactcc

SEQ ID NO: 11239 - DNA, 50 bp, synthetic construct
  source 1..50: mol_type = other DNA
tttcctcctcrtaaattcataacttatactaacttccraaataaaactac

SEQ ID NO: 11240 - DNA, 50 bp, synthetic construct
  source 1..50: mol_type = other DNA
attaaaattattttttcctcctcrtaaattcataacttatactaacttcc

SEQ ID NO: 11241 - DNA, 50 bp, synthetic construct
  source 1..50: mol_type = other DNA
taacttaccrcacttaaaacaatatacattaaaattattttttcctcctc

SEQ ID NO: 11242 - DNA, 50 bp, synthetic construct
  source 1..50: mol_type = other DNA
tctataccraatcraaaataaaaactacatatacttcrtaataacttacc

SEQ ID NO: 11243 - DNA, 50 bp, synthetic construct
  source 1..50: mol_type = other DNA
craaaactcataatctataccraatcraaaataaaaactacatatacttc

SEQ ID NO: 11244 - DNA, 50 bp, synthetic construct
  source 1..50: mol_type = other DNA
ttactttaaatacrataaatcaccacraaatatatacaatctttacttcc

SEQ ID NO: 11245 - DNA, 50 bp, synthetic construct
  source 1..50: mol_type = other DNA
ttattccttctaatacratcaatttttctcraaaactcataatctatacc

SEQ ID NO: 11246 - DNA, 50 bp, synthetic construct
  source 1..50: mol_type = other DNA
craaatatatacaatctttacttccracccracataaaccataaactctc

SEQ ID NO: 11247 - DNA, 50 bp, synthetic construct
  source 1..50: mol_type = other DNA
crcatcaaaaaaaacaaactccaaacacactctccttaactataacattc

SEQ ID NO: 11248 - DNA, 50 bp, synthetic construct
  source 1..50: mol_type = other DNA
tattcaaaaaacaaccrattatcaattaatcctacaactattcattaaac

SEQ ID NO: 11249 - DNA, 50 bp, synthetic construct
  source 1..50: mol_type = other DNA
ataaaaacataaccacaaaaattaaaaacatctatcracraaacacaaac

SEQ ID NO: 11250 - DNA, 50 bp, synthetic construct
  source 1..50: mol_type = other DNA
accatttccracattaatccctacraattcacaatttcctaaataacatc

SEQ ID NO: 11251 - DNA, 50 bp, synthetic construct
  source 1..50: mol_type = other DNA
actaatatctaccttataaaaaattatacacaaactctctcccatactcc

SEQ ID NO: 11252 - DNA, 50 bp, synthetic construct
  source 1..50: mol_type = other DNA
caaacaacaacaaacrcacaaccrtctaaatctccctaaaaataataatc

SEQ ID NO: 11253 - DNA, 50 bp, synthetic construct
  source 1..50: mol_type = other DNA
caacaacaaacrcacaaccrtctaaatctccctaaaaataataatcraac

SEQ ID NO: 11254 - DNA, 50 bp, synthetic construct
  source 1..50: mol_type = other DNA
tacataaaacatctaattataaaaaaccattacttttaataacaaaaacc

SEQ ID NO: 11255 - DNA, 50 bp, synthetic construct
  source 1..50: mol_type = other DNA
ttaacactaaatttcaatacaaactatattaaattaatacaaaaataatc

SEQ ID NO: 11256 - DNA, 50 bp, synthetic construct
  source 1..50: mol_type = other DNA
tttattaaaatactcttaaacattatctacctatacttttacttaaactc

SEQ ID NO: 11257 - DNA, 50 bp, synthetic construct
  source 1..50: mol_type = other DNA
aataacrtccccaaataataaaacccaacaaaacaaataacctacttttc

SEQ ID NO: 11258 - DNA, 50 bp, synthetic construct
  source 1..50: mol_type = other DNA
cccctcraaaaataaatcatctactctactaaactttattatctaaaaac

SEQ ID NO: 11259 - DNA, 50 bp, synthetic construct
  source 1..50: mol_type = other DNA
tacttacccttaaccttataataactcttaatcttctaaaacaaaaacac

SEQ ID NO: 11260 - DNA, 50 bp, synthetic construct
  source 1..50: mol_type = other DNA
tcttctaaaacaaaaacacrccctaaatattaaacaaaacaccrccctac

SEQ ID NO: 11261 - DNA, 50 bp, synthetic construct
  source 1..50: mol_type = other DNA
ttacraataaccaactacaaataacrcaaaataatacraatcttcttatc

SEQ ID NO: 11262 - DNA, 50 bp, synthetic construct
  source 1..50: mol_type = other DNA
acctcatccaaacaaaacaaaactaaaaatacttttacatacctttttcc

SEQ ID NO: 11263 - DNA, 50 bp, synthetic construct
  source 1..50: mol_type = other DNA
aattaccttaattacttccattatcctcctaattaaatctctaacaaaac

SEQ ID NO: 11264 - DNA, 50 bp, synthetic construct
  source 1..50: mol_type = other DNA
aaaatccaatctaaataatattcattataaacttttacttcaaaaaaatc

SEQ ID NO: 11265 - DNA, 50 bp, synthetic construct
  source 1..50: mol_type = other DNA
atttctaacttattttacttaaatatcttcaaaacttatcatataataac

SEQ ID NO: 11266 - DNA, 50 bp, synthetic construct
  source 1..50: mol_type = other DNA
ataaactccraaaacaaaaactttactccraaccaaattaaaaactaacc

SEQ ID NO: 11267 - DNA, 50 bp, synthetic construct
  source 1..50: mol_type = other DNA
aaacaaaaactttactccraaccaaattaaaaactaaccraaacaaaaac

SEQ ID NO: 11268 - DNA, 50 bp, synthetic construct
  source 1..50: mol_type = other DNA
atatcctattattaccataacaacraaaaactaacataacrctaataaac

SEQ ID NO: 11269 - DNA, 50 bp, synthetic construct
  source 1..50: mol_type = other DNA
accaacrccatatcaatttttcrttaccataacaacaacaaaacattatc

SEQ ID NO: 11270 - DNA, 50 bp, synthetic construct
  source 1..50: mol_type = other DNA
accataacaacaacaaaacattatcracttctttcctctatacctactcc

SEQ ID NO: 11271 - DNA, 50 bp, synthetic construct
  source 1..50: mol_type = other DNA
atttcaactctaaaataacactaaacrtacttctcttccaaaaatatcac

SEQ ID NO: 11272 - DNA, 50 bp, synthetic construct
  source 1..50: mol_type = other DNA
aaaaatatcacraaatatcaatttctctaaccttacccaaatccataccc

SEQ ID NO: 11273 - DNA, 50 bp, synthetic construct
  source 1..50: mol_type = other DNA
atttaatccaaccrccaaaaaataactcraataactaacraaccttaaac

SEQ ID NO: 11274 - DNA, 50 bp, synthetic construct
  source 1..50: mol_type = other DNA
racaacccaaaatttaatccaaccrccaaaaaataactcraataactaac

SEQ ID NO: 11275 - DNA, 50 bp, synthetic construct
  source 1..50: mol_type = other DNA
taaaatcrtaaccacrtcctttcaaaactttaacctatttactaaaatac

SEQ ID NO: 11276 - DNA, 50 bp, synthetic construct
  source 1..50: mol_type = other DNA
aaaataattcrttaaaatctcaacctaaaaccaaacrcaacaaaaaaatc

SEQ ID NO: 11277 - DNA, 50 bp, synthetic construct
  source 1..50: mol_type = other DNA
ctaaaaaccraaaaacatttactactctactaaaccctaaatctaacrac

SEQ ID NO: 11278 - DNA, 50 bp, synthetic construct
  source 1..50: mol_type = other DNA
taactaaaaaccraaaaacatttactactctactaaaccctaaatctaac

SEQ ID NO: 11279 - DNA, 50 bp, synthetic construct
  source 1..50: mol_type = other DNA
aactacaaatctaaatccactaaacraaaaacraaatacrttaaaaaacc

SEQ ID NO: 11280 - DNA, 50 bp, synthetic construct
  source 1..50: mol_type = other DNA
atcctaaaaaatacttctaaaataattaacaaaatatataacttaaccac

SEQ ID NO: 11281 - DNA, 50 bp, synthetic construct
  source 1..50: mol_type = other DNA
atatattttaccaactatcccaaaaacatttcttaaaaccacccaatttc

SEQ ID NO: 11282 - DNA, 50 bp, synthetic construct
  source 1..50: mol_type = other DNA
aaaccacccaatttcraaaaatactactttaacaatattaaccccaaaac

SEQ ID NO: 11283 - DNA, 50 bp, synthetic construct
  source 1..50: mol_type = other DNA
ataataaaaaacctcaaacctaaaactaaacttcaaccttaattcaatac

SEQ ID NO: 11284 - DNA, 50 bp, synthetic construct
  source 1..50: mol_type = other DNA
ctaaacttcaaccttaattcaatacrattataactaattaacttaaaatc

SEQ ID NO: 11285 - DNA, 50 bp, synthetic construct
  source 1..50: mol_type = other DNA
aattaaaatcraattttaaaatcacctaaatttcrataaccraaaatccc

SEQ ID NO: 11286 - DNA, 50 bp, synthetic construct
  source 1..50: mol_type = other DNA
tcaatctatcaaaaataacaaaataaattcaaatacaccraattaaaatc

SEQ ID NO: 11287 - DNA, 50 bp, synthetic construct
  source 1..50: mol_type = other DNA
ccaaacaaatacaacacrccctcaattatattaaaatcacttaaaaaatc

SEQ ID NO: 11288 - DNA, 50 bp, synthetic construct
  source 1..50: mol_type = other DNA
aaaaaaaaaactataatacacaaataaaatcccccaaacaaatacaacac

SEQ ID NO: 11289 - DNA, 50 bp, synthetic construct
  source 1..50: mol_type = other DNA
aattaaaaatttcttctaataacccaacractcttttaaaaaccacctac

SEQ ID NO: 11290 - DNA, 50 bp, synthetic construct
  source 1..50: mol_type = other DNA
aaaaatttccttattaccrcaaactttttaacctttttcraaatcttaac

SEQ ID NO: 11291 - DNA, 50 bp, synthetic construct
  source 1..50: mol_type = other DNA
caaactttttaacctttttcraaatcttaacrctctttttactaaccccc

SEQ ID NO: 11292 - DNA, 50 bp, synthetic construct
  source 1..50: mol_type = other DNA
crctctttttactaacccccrtaacctttttaaactttttaaatacaccc

SEQ ID NO: 11293 - DNA, 50 bp, synthetic construct
  source 1..50: mol_type = other DNA
aactttttaaatacacccrttaccttaatttttataaccacctttaaaac

SEQ ID NO: 11294 - DNA, 50 bp, synthetic construct
  source 1..50: mol_type = other DNA
tttttaaatacacccrttaccttaatttttataaccacctttaaaacrcc

SEQ ID NO: 11295 - DNA, 50 bp, synthetic construct
  source 1..50: mol_type = other DNA
rttaccttaatttttataaccacctttaaaacrccraacttaatttccac

SEQ ID NO: 11296 - DNA, 50 bp, synthetic construct
  source 1..50: mol_type = other DNA
craacttaatttccacraaaaacrccttcttattaaacttaaaaaaaccc

SEQ ID NO: 11297 - DNA, 50 bp, synthetic construct
  source 1..50: mol_type = other DNA
aacaacaaccrcattaaactaaacattaaaaacctaataaacaaaaaaac

SEQ ID NO: 11298 - DNA, 50 bp, synthetic construct
  source 1..50: mol_type = other DNA
ctacaccaacrttcccttacttaccaaactcttaatacccaacttaatac

SEQ ID NO: 11299 - DNA, 50 bp, synthetic construct
  source 1..50: mol_type = other DNA
cttaccaaactcttaatacccaacttaatacractattattcttctccac

SEQ ID NO: 11300 - DNA, 50 bp, synthetic construct
  source 1..50: mol_type = other DNA
accaaactcttaatacccaacttaatacractattattcttctccacrtc

SEQ ID NO: 11301 - DNA, 50 bp, synthetic construct
  source 1..50: mol_type = other DNA
tcctcctctaaaaaacrtaataatatatcrttaacaactcttaaaaaaac

SEQ ID NO: 11302 - DNA, 50 bp, synthetic construct
  source 1..50: mol_type = other DNA
aaactaatcrtacaaactacttcctcctctaaaaaacrtaataatatatc

SEQ ID NO: 11303 - DNA, 50 bp, synthetic construct
  source 1..50: mol_type = other DNA
cccttccrtatcaaaactaatcrtacaaactacttcctcctctaaaaaac

SEQ ID NO: 11304 - DNA, 50 bp, synthetic construct
  source 1..50: mol_type = other DNA
aaaaaacaaaaaaacctactaaaactacaacaacctccaaaaaaaaaccc

SEQ ID NO: 11305 - DNA, 50 bp, synthetic construct
  source 1..50: mol_type = other DNA
aatttctttaccttcttaccaactaaaaatttctcaaaaacaacaaaaac

SEQ ID NO: 11306 - DNA, 50 bp, synthetic construct
  source 1..50: mol_type = other DNA
tttaatatactatattaatcaccatatctaaaacaatacctcccrccccc

SEQ ID NO: 11307 - DNA, 50 bp, synthetic construct
  source 1..50: mol_type = other DNA
ttctttaccttcttaccaactaaaaatttctcaaaaacaacaaaaacrac

SEQ ID NO: 11308 - DNA, 50 bp, synthetic construct
  source 1..50: mol_type = other DNA
ctaacacaacacaccaaataaaataatataaacctaacraaacaaaatac

SEQ ID NO: 11309 - DNA, 50 bp, synthetic construct
  source 1..50: mol_type = other DNA
actaaacracaatctacctacaatttccttcacaataaaacaaccaaaac

SEQ ID NO: 11310 - DNA, 50 bp, synthetic construct
  source 1..50: mol_type = other DNA
aaaaaccrctctaattacctcattataaaaaaaattataaacaaactacc

SEQ ID NO: 11311 - DNA, 50 bp, synthetic construct
  source 1..50: mol_type = other DNA
tataaaaaaaattataaacaaactaccrcccaataacatcaaaaaatacc

SEQ ID NO: 11312 - DNA, 50 bp, synthetic construct
  source 1..50: mol_type = other DNA
aaatttctaataaaactcctcraatacttataacactacatttataaacc

SEQ ID NO: 11313 - DNA, 50 bp, synthetic construct
  source 1..50: mol_type = other DNA
aactaacatctctaacaacraacctctaaaaatttctaataaaactcctc

SEQ ID NO: 11314 - DNA, 50 bp, synthetic construct
  source 1..50: mol_type = other DNA
aacctaaatatactctaccaatcacaaaataacrtttctccaacactacc

SEQ ID NO: 11315 - DNA, 50 bp, synthetic construct
  source 1..50: mol_type = other DNA
aaaaaaaacaactcccaactaataatacctaacracaatactaaaaaaac

SEQ ID NO: 11316 - DNA, 50 bp, synthetic construct
  source 1..50: mol_type = other DNA
tataaaacrtctttctcttaattatactctttaaatcctaaacttacaac

SEQ ID NO: 11317 - DNA, 50 bp, synthetic construct
  source 1..50: mol_type = other DNA
ctcaaacataataaaattacactattactcaaaaacattttctataaaac

SEQ ID NO: 11318 - DNA, 50 bp, synthetic construct
  source 1..50: mol_type = other DNA
taaaacattacaaaaaaatccaattcttataaaaaatttcaaaaattccc

SEQ ID NO: 11319 - DNA, 50 bp, synthetic construct
  source 1..50: mol_type = other DNA
atccaattcttataaaaaatttcaaaaattcccrtaaaaaatacatttcc

SEQ ID NO: 11320 - DNA, 50 bp, synthetic construct
  source 1..50: mol_type = other DNA
aactacacrattattactaacttaaaaataaaccaatcaaaatatataac

SEQ ID NO: 11321 - DNA, 50 bp, synthetic construct
  source 1..50: mol_type = other DNA
attactaacttaaaaataaaccaatcaaaatatataacrtcatatttaac

SEQ ID NO: 11322 - DNA, 50 bp, synthetic construct
  source 1..50: mol_type = other DNA
atttacrctaatattaaatattccrctatactatttttccrtcataactc

SEQ ID NO: 11323 - DNA, 50 bp, synthetic construct
  source 1..50: mol_type = other DNA
atctactaataacaaaacrccacrcaaacaattaaccactaaaacaaccc

SEQ ID NO: 11324 - DNA, 50 bp, synthetic construct
  source 1..50: mol_type = other DNA
ccrttatcaaaaatccactaaactacttattcrtaaactacctttccaac

SEQ ID NO: 11325 - DNA, 50 bp, synthetic construct
  source 1..50: mol_type = other DNA
aaaatccactaaactacttattcrtaaactacctttccaacrcctaatac

SEQ ID NO: 11326 - DNA, 50 bp, synthetic construct
  source 1..50: mol_type = other DNA
acaacraaactctaaaaacrcaaatctattttaaaatcctacrcaatctc

SEQ ID NO: 11327 - DNA, 50 bp, synthetic construct
  source 1..50: mol_type = other DNA
aaaacaaacctacrtttccaaaactccrctataataactctacaaaaaac

SEQ ID NO: 11328 - DNA, 50 bp, synthetic construct
  source 1..50: mol_type = other DNA
aaacrtacraaacctacttaataaaactatttaaaaacactaacctatac

SEQ ID NO: 11329 - DNA, 50 bp, synthetic construct
  source 1..50: mol_type = other DNA
aaacctacttaataaaactatttaaaaacactaacctatacrccatccac

SEQ ID NO: 11330 - DNA, 50 bp, synthetic construct
  source 1..50: mol_type = other DNA
cttaataaaactatttaaaaacactaacctatacrccatccacrccaaac

SEQ ID NO: 11331 - DNA, 50 bp, synthetic construct
  source 1..50: mol_type = other DNA
actctaaaaaaaacctttacttaaaccrtcaaaaaaaccacaataatcac

SEQ ID NO: 11332 - DNA, 50 bp, synthetic construct
  source 1..50: mol_type = other DNA
cattaaaaacacttttcrttttaatactactaaaaacttcaaaaccaatc

SEQ ID NO: 11333 - DNA, 50 bp, synthetic construct
  source 1..50: mol_type = other DNA
aaacacttttcrttttaatactactaaaaacttcaaaaccaatcratttc

SEQ ID NO: 11334 - DNA, 50 bp, synthetic construct
  source 1..50: mol_type = other DNA
acttttcrttttaatactactaaaaacttcaaaaccaatcratttcracc

SEQ ID NO: 11335 - DNA, 50 bp, synthetic construct
  source 1..50: mol_type = other DNA
tttctaataatccrcccrcctcaacctctcaaaatacttaaattacaaac

SEQ ID NO: 11336 - DNA, 50 bp, synthetic construct
  source 1..50: mol_type = other DNA
aacaaaaatttcaataaatcraaataactctaatatactccaatctaaac

SEQ ID NO: 11337 - DNA, 50 bp, synthetic construct
  source 1..50: mol_type = other DNA
aattaaaaattaaatataaacccattctaactccaaaattattttaaatc

SEQ ID NO: 11338 - DNA, 50 bp, synthetic construct
  source 1..50: mol_type = other DNA
cttactcttaattcacttcttaaaaaatcatatctaaacrtaataaaaac

SEQ ID NO: 11339 - DNA, 50 bp, synthetic construct
  source 1..50: mol_type = other DNA
tccataacaataactatcttacrcttaacrtactccrtataaataacaac

SEQ ID NO: 11340 - DNA, 50 bp, synthetic construct
  source 1..50: mol_type = other DNA
atactcaaaatatttttaaaaaacrtaatccrtaacrctatcacctatac

SEQ ID NO: 11341 - DNA, 50 bp, synthetic construct
  source 1..50: mol_type = other DNA
aaaaaatcaacaaccttaaccrccaaaaccataaaaaatacrtccctaac

SEQ ID NO: 11342 - DNA, 50 bp, synthetic construct
  source 1..50: mol_type = other DNA
aaacctttaattcaaaaatacaaactataaaaaaatcaacaaccttaacc

SEQ ID NO: 11343 - DNA, 50 bp, synthetic construct
  source 1..50: mol_type = other DNA
aaatttttaacactactttttttccactctttcttcaaaattaaaatatc

SEQ ID NO: 11344 - DNA, 50 bp, synthetic construct
  source 1..50: mol_type = other DNA
tcaattctaattaattaacaactacraataaccctcattaattaaacaac

SEQ ID NO: 11345 - DNA, 50 bp, synthetic construct
  source 1..50: mol_type = other DNA
acttacctcaaaaaatattaactcatcaattctaattaattaacaactac

SEQ ID NO: 11346 - DNA, 50 bp, synthetic construct
  source 1..50: mol_type = other DNA
aaccaatcaaaactaataaactaatatttcctaaaacaaaccaaaaaacc

SEQ ID NO: 11347 - DNA, 50 bp, synthetic construct
  source 1..50: mol_type = other DNA
aacatttaaatatccctcaatcatatactaaaaacaatactaaatttatc

SEQ ID NO: 11348 - DNA, 50 bp, synthetic construct
  source 1..50: mol_type = other DNA
ttaactaacttctaaaaatctaatcacctaactttaacacttcctaaatc

SEQ ID NO: 11349 - DNA, 50 bp, synthetic construct
  source 1..50: mol_type = other DNA
tttcaatcctcaaactaaaaactcccctaaacaaactacctacrcaattc

SEQ ID NO: 11350 - DNA, 50 bp, synthetic construct
  source 1..50: mol_type = other DNA
ttactattttcaatcctcaaactaaaaactcccctaaacaaactacctac

SEQ ID NO: 11351 - DNA, 50 bp, synthetic construct
  source 1..50: mol_type = other DNA
aaaaacctttacttccatttctaattaaacttaacrtcctactaaataac

SEQ ID NO: 11352 - DNA, 50 bp, synthetic construct
  source 1..50: mol_type = other DNA
cctaccrataacrccaaaaacctttacttccatttctaattaaacttaac

SEQ ID NO: 11353 - DNA, 50 bp, synthetic construct
  source 1..50: mol_type = other DNA
aacaaaaactatacttttaacttccctaataacacctaccrtccttaacc

SEQ ID NO: 11354 - DNA, 50 bp, synthetic construct
  source 1..50: mol_type = other DNA
taaattaaaataaatatcaaatctattttcccaaacrtatctaacttaac

SEQ ID NO: 11355 - DNA, 50 bp, synthetic construct
  source 1..50: mol_type = other DNA
ccattttaatccacctactcaattccaaacaactaacatcttaaactctc

SEQ ID NO: 11356 - DNA, 50 bp, synthetic construct
  source 1..50: mol_type = other DNA
cacctactcaattccaaacaactaacatcttaaactctcrtacaaataac

SEQ ID NO: 11357 - DNA, 50 bp, synthetic construct
  source 1..50: mol_type = other DNA
aattccaaacaactaacatcttaaactctcrtacaaataacrcacaactc

SEQ ID NO: 11358 - DNA, 50 bp, synthetic construct
  source 1..50: mol_type = other DNA
caaaactatcactaccataaatataatttacrcrctcaaacrtcaaaaac

SEQ ID NO: 11359 - DNA, 50 bp, synthetic construct
  source 1..50: mol_type = other DNA
crccaaacrcaaaactatcactaccataaatataatttacrcrctcaaac

SEQ ID NO: 11360 - DNA, 50 bp, synthetic construct
  source 1..50: mol_type = other DNA
acacraaacacrccaaacrcaaaactatcactaccataaatataatttac

SEQ ID NO: 11361 - DNA, 50 bp, synthetic construct
  source 1..50: mol_type = other DNA
ccraataaccratttaataataccttaaatattatcccrcaacacttttc

SEQ ID NO: 11362 - DNA, 50 bp, synthetic construct
  source 1..50: mol_type = other DNA
aaccratttaataataccttaaatattatcccrcaacacttttcrataac

SEQ ID NO: 11363 - DNA, 50 bp, synthetic construct
  source 1..50: mol_type = other DNA
acctaatttttattatcaactaattaaacatatctaatcrcracaaaaac

SEQ ID NO: 11364 - DNA, 50 bp, synthetic construct
  source 1..50: mol_type = other DNA
tcttttcrcrtacctaatttttattatcaactaattaaacatatctaatc

SEQ ID NO: 11365 - DNA, 50 bp, synthetic construct
  source 1..50: mol_type = other DNA
actaaaaccaaaaaaattctatacaaaccttacactaacccttactaaac

SEQ ID NO: 11366 - DNA, 50 bp, synthetic construct
  source 1..50: mol_type = other DNA
ctaactactttttttaaactttcattaccttataaaaacacctatatcac

SEQ ID NO: 11367 - DNA, 50 bp, synthetic construct
  source 1..50: mol_type = other DNA
attaaaaatcccctaaatatcatcataacccratttacaaataaaaacac

SEQ ID NO: 11368 - DNA, 50 bp, synthetic construct
  source 1..50: mol_type = other DNA
acctcrttcacattaactaattaaaaatcccctaaatatcatcataaccc

SEQ ID NO: 11369 - DNA, 50 bp, synthetic construct
  source 1..50: mol_type = other DNA
tctaaaatttacaaattttaaccattttctttctattaatcttacttttc

SEQ ID NO: 11370 - DNA, 50 bp, synthetic construct
  source 1..50: mol_type = other DNA
ctctcattttatccataactaactacccactttaaatctatcaatctatc

SEQ ID NO: 11371 - DNA, 50 bp, synthetic construct
  source 1..50: mol_type = other DNA
attaaactaaaaaaatcttcctaaacattttaaaaaaaacactaaaactc

SEQ ID NO: 11372 - DNA, 50 bp, synthetic construct
  source 1..50: mol_type = other DNA
aaacacaattttctaatcttttcaaaactttacaaaaatacctaataaac

SEQ ID NO: 11373 - DNA, 50 bp, synthetic construct
  source 1..50: mol_type = other DNA
aacaccttaataaaatcaaaaataacctacactacaaaactaaccaaacc

SEQ ID NO: 11374 - DNA, 50 bp, synthetic construct
  source 1..50: mol_type = other DNA
aaaccrttatttctattaatcaactttaaaaccataatctaatactttcc

SEQ ID NO: 11375 - DNA, 50 bp, synthetic construct
  source 1..50: mol_type = other DNA
tctataattttaccataactcrtactaaacaaacaactcraaaatccacc

SEQ ID NO: 11376 - DNA, 50 bp, synthetic construct
  source 1..50: mol_type = other DNA
cctacaattaaccatccrcaataacraaaaacttaataaactcttaaaac

SEQ ID NO: 11377 - DNA, 50 bp, synthetic construct
  source 1..50: mol_type = other DNA
caaaaatttattaaactcctcrtcattacraataaccaattacaaataac

SEQ ID NO: 11378 - DNA, 50 bp, synthetic construct
  source 1..50: mol_type = other DNA
aactcratcttctcrtacaaatttacaatttcctataaaccraatacacc

SEQ ID NO: 11379 - DNA, 50 bp, synthetic construct
  source 1..50: mol_type = other DNA
caaaactaaaactcratcttctcrtacaaatttacaatttcctataaacc

SEQ ID NO: 11380 - DNA, 50 bp, synthetic construct
  source 1..50: mol_type = other DNA
atataaaatttatatttaacccaatccccaatctaacttaacraaccttc

SEQ ID NO: 11381 - DNA, 50 bp, synthetic construct
  source 1..50: mol_type = other DNA
cctcccctttttttatctttaaaacacaatcttctaactctatcrcccac

SEQ ID NO: 11382 - DNA, 50 bp, synthetic construct
  source 1..50: mol_type = other DNA
aatcaaaaaaacttataaacttctacaattcactaaaatttaaaatattc

SEQ ID NO: 11383 - DNA, 50 bp, synthetic construct
  source 1..50: mol_type = other DNA
ctaaactacattcccaaaaaatcaatcattcctaacttctaaatatttac

SEQ ID NO: 11384 - DNA, 50 bp, synthetic construct
  source 1..50: mol_type = other DNA
atatatacaaatattatacctaaaataaataccttcctcctcttactttc

SEQ ID NO: 11385 - DNA, 50 bp, synthetic construct
  source 1..50: mol_type = other DNA
tcctcctcttactttcraaaatatcctactccrtctataaaataattatc

SEQ ID NO: 11386 - DNA, 50 bp, synthetic construct
  source 1..50: mol_type = other DNA
taaacttacatttactttacactacraactcaccctaaactctttcttac

SEQ ID NO: 11387 - DNA, 50 bp, synthetic construct
  source 1..50: mol_type = other DNA
atccaaaaccataaaaatcataaattccttcrtcaacracatcttcraac

SEQ ID NO: 11388 - DNA, 50 bp, synthetic construct
  source 1..50: mol_type = other DNA
tctcatccaaaaccataaaaatcataaattccttcrtcaacracatcttc

SEQ ID NO: 11389 - DNA, 50 bp, synthetic construct
  source 1..50: mol_type = other DNA
actattctatctatatatacaaaattctaaaacaaatccaccccracacc

SEQ ID NO: 11390 - DNA, 50 bp, synthetic construct
  source 1..50: mol_type = other DNA
ataaacctacttcaaaaccttatacacataaataaaataactctccttac

SEQ ID NO: 11391 - DNA, 50 bp, synthetic construct; identical to SEQ ID NO: 11390
  source 1..50: mol_type = other DNA

SEQ ID NO: 11392 - DNA, 50 bp, synthetic construct
  source 1..50: mol_type = other DNA
caaaaccttatacacataaataaaataactctccttacractacrcttac

SEQ ID NO: 11393 - DNA, 50 bp, synthetic construct
  source 1..50: mol_type = other DNA
ataacttcctattacaaccttacaatttatataaaaaaatttattcaaac

SEQ ID NO: 11394 - DNA, 50 bp, synthetic construct
  source 1..50: mol_type = other DNA
acttacttatctttcacaattttccrctactttcataaatcrctatttac

SEQ ID NO: 11395 - DNA, 50 bp, synthetic construct
  source 1..50: mol_type = other DNA
acttatctttcacaattttccrctactttcataaatcrctatttacraac

SEQ ID NO: 11396 - DNA, 50 bp, synthetic construct
  source 1..50: mol_type = other DNA
aaaaaaataacraactctaccctattaaaaactacaaacccrataacrac

SEQ ID NO: 11397 - DNA, 50 bp, synthetic construct
  source 1..50: mol_type = other DNA
aaaacttattcrtcrctaccraacttacaattcccaataaaacaaaatcc

SEQ ID NO: 11398 - DNA, 50 bp, synthetic construct
  source 1..50: mol_type = other DNA
tacccaccaattctaaaatctcracraccaaatattataaatacactaac

SEQ ID NO: 11399 - DNA, 50 bp, synthetic construct
  source 1..50: mol_type = other DNA
tcraataaccaactacaaataacraaaaataatactacraatcttatcac

SEQ ID NO: 11400 - DNA, 50 bp, synthetic construct
  source 1..50: mol_type = other DNA
acraaaaaatcaacaaacaactaaacaacrtcactattactcaaaaaaac

SEQ ID NO: 11401 - DNA, 50 bp, synthetic construct
  source 1..50: mol_type = other DNA
taaacaacrtcactattactcaaaaaaacrtcctatccaatattcaaacc

SEQ ID NO: 11402 - DNA, 50 bp, synthetic construct
  source 1..50: mol_type = other DNA
tccaacctaaataacaaaactaaactatctcaaaacaaaccaatccaaac

SEQ ID NO: 11403 - DNA, 50 bp, synthetic construct
  source 1..50: mol_type = other DNA
ttctcatacctcaacctcctatatacttaaaattacaaacrtctactacc

SEQ ID NO: 11404 - DNA, 50 bp, synthetic construct
  source 1..50: mol_type = other DNA
aaaaccaaaaattcaaaacaaccctaactaaaataataaaaccccrtctc

SEQ ID NO: 11405 - DNA, 50 bp, synthetic construct
  source 1..50: mol_type = other DNA
cactaaaaaccaaaaattcaaaacaaccctaactaaaataataaaacccc

SEQ ID NO: 11406 - DNA, 50 bp, synthetic construct
  source 1..50: mol_type = other DNA
atttcaccattttaaccaaaattatcttaaactcctaacctctaataatc

SEQ ID NO: 11407 - DNA, 50 bp, synthetic construct
  source 1..50: mol_type = other DNA
tttaaccaaaattatcttaaactcctaacctctaataatcrtcccatctc

SEQ ID NO: 11408 - DNA, 50 bp, synthetic construct
  source 1..50: mol_type = other DNA
ctcraaacttaactttttaacaccattaaactaaaaaaacrataactcac

SEQ ID NO: 11409 - DNA, 50 bp, synthetic construct
  source 1..50: mol_type = other DNA
atattattttctcraaacttaactttttaacaccattaaactaaaaaaac

SEQ ID NO: 11410 - DNA, 50 bp, synthetic construct
  source 1..50: mol_type = other DNA
rattcaataaatttaaataaaacttaaaattctacattcctaacaatctc

SEQ ID NO: 11411 - DNA, 50 bp, synthetic construct
  source 1..50: mol_type = other DNA
raaactatcaaaaatacaaaatttcaaatcccactcaaacttactaaatc

SEQ ID NO: 11412 - DNA, 50 bp, synthetic construct
  source 1..50: mol_type = other DNA
tacactctattctttaaaactaaataaactaaaattttaaacaatttatc

SEQ ID NO: 11413 - DNA, 50 bp, synthetic construct
  source 1..50: mol_type = other DNA
ctaaacaatcttattaaataaattaccccaccrcccatcctatccttttc

SEQ ID NO: 11414 - DNA, 50 bp, synthetic construct
  source 1..50: mol_type = other DNA
tctcaattcactacacttttatatatactctcattacaaataactcrtac

SEQ ID NO: 11415 - DNA, 50 bp, synthetic construct
  source 1..50: mol_type = other DNA
taatatcttcraaaaatcccaccaaataaacctcacaaacctcctacaac

SEQ ID NO: 11416 - DNA, 50 bp, synthetic construct
  source 1..50: mol_type = other DNA
crataataacrctacaaaaaacttataaaacctacctaataaaactcttc

SEQ ID NO: 11417 - DNA, 50 bp, synthetic construct
  source 1..50: mol_type = other DNA
aaacttataaaacctacctaataaaactcttcraaaacaccaatctatac

SEQ ID NO: 11418 - DNA, 50 bp, synthetic construct
  source 1..50: mol_type = other DNA
aaacctacctaataaaactcttcraaaacaccaatctatacrctattcac

SEQ ID NO: 11419 - DNA, 50 bp, synthetic construct
  source 1..50: mol_type = other DNA
tccccacraatacracrtaccaactaaatatctttaaacataataataac

SEQ ID NO: 11420 - DNA, 50 bp, synthetic construct
  source 1..50: mol_type = other DNA
tcttttcaaaaccactcacaatttcacttaaaaacaattataacccattc

SEQ ID NO: 11421 - DNA, 50 bp, synthetic construct
  source 1..50: mol_type = other DNA
ctacacacaaattttataactacaaacaaatctatcaaaccttttcaacc

SEQ ID NO: 11422 - DNA, 50 bp, synthetic construct
  source 1..50: mol_type = other DNA
ttttataactacaaacaaatctatcaaaccttttcaaccrattttactac

SEQ ID NO: 11423 - DNA, 50 bp, synthetic construct
  source 1..50: mol_type = other DNA
tacatattaaaaaactcctaaaaacaccaccrtcactccttttaatccac

SEQ ID NO: 11424 - DNA, 50 bp, synthetic construct
  source 1..50: mol_type = other DNA
actttacaattaccacccttcattctcaaattccctaaataaaaataacc

SEQ ID NO: 11425 - DNA, 50 bp, synthetic construct
  source 1..50: mol_type = other DNA
ctttatctcattactaacattctatcatctcacatcatcacaaataaaac

SEQ ID NO: 11426 - DNA, 50 bp, synthetic construct
  source 1..50: mol_type = other DNA
ccaccctccacrctcctatcaattttaactattttatcataaactaatac

SEQ ID NO: 11427 - DNA, 50 bp, synthetic construct
  source 1..50: mol_type = other DNA
aaaattataacrtattaacctataacaaaacaaccaaaattaataaaaac

SEQ ID NO: 11428 - DNA, 50 bp, synthetic construct
  source 1..50: mol_type = other DNA
aaaacttcratttttaaatattactatctatctaaacaaaataaacaacc

SEQ ID NO: 11429 - DNA, 50 bp, synthetic construct
  source 1..50: mol_type = other DNA
crattttaaacrtatcraaaacacaacttttaaccaaccattttatcctc

SEQ ID NO: 11430 - DNA, 50 bp, synthetic construct
  source 1..50: mol_type = other DNA
acaatcrtaaacctaaaaaattttttataccacataacatataaccttcc

SEQ ID NO: 11431 - DNA, 50 bp, synthetic construct
  source 1..50: mol_type = other DNA
ctcattcctataacaacraaaaaatacatttaaaaaacaaccacaacaac

SEQ ID NO: 11432 - DNA, 50 bp, synthetic construct
  source 1..50: mol_type = other DNA
taccactacctccaaaaaacatcaacttaactaccaacaacataaaaaac

SEQ ID NO: 11433 - DNA, 50 bp, synthetic construct
  source 1..50: mol_type = other DNA
actacctccaaaaaacatcaacttaactaccaacaacataaaaaacrtcc

SEQ ID NO: 11434 - DNA, 50 bp, synthetic construct
  source 1..50: mol_type = other DNA
aaaacaaaacttttaaatcacaataaaacaaaaaacacaaaataaacaac

SEQ ID NO: 11435 - DNA, 50 bp, synthetic construct
  source 1..50: mol_type = other DNA
aattaaactaaaaaattttcaaaaatcccrccctactcccraattaatcc

SEQ ID NO: 11436 - DNA, 50 bp, synthetic construct
  source 1..50: mol_type = other DNA
acaaaataaaaatcatatactaaaaaaacraaccaacccraaaacaaaac

SEQ ID NO: 11437 - DNA, 50 bp, synthetic construct
  source 1..50: mol_type = other DNA
caaaaaaaaccrcaaaacaaaaaccaatttcttaatctaaaaaaatatcc

SEQ ID NO: 11438 - DNA, 50 bp, synthetic construct
  source 1..50: mol_type = other DNA
taatccaatccraacatccctttaaactaaaaaactaactcttattttac

SEQ ID NO: 11439 - DNA, 50 bp, synthetic construct
  source 1..50: mol_type = other DNA
acatccctttaaactaaaaaactaactcttattttacratcttttctacc

SEQ ID NO: 11440 - DNA, 50 bp, synthetic construct
  source 1..50: mol_type = other DNA
cctaaccraaaacttttctcrctaacraataattttaaaataacaatccc

SEQ ID NO: 11441 - DNA, 50 bp, synthetic construct
  source 1..50: mol_type = other DNA
catttaaacctttattacracttctaaatccctaaccraaaacttttctc

SEQ ID NO: 11442 - DNA, 50 bp, synthetic construct
  source 1..50: mol_type = other DNA
rcaataaaaatttaaatactataacctcaccacraccactctccaacccc

SEQ ID NO: 11443 - DNA, 50 bp, synthetic construct
  source 1..50: mol_type = other DNA
ttctttactatctaccttttcttattctaccctattacttaaaattaatc

SEQ ID NO: 11444 - DNA, 50 bp, synthetic construct
  source 1..50: mol_type = other DNA
ataaaacccaaaaccrctaaacccaaaattatcaaacctaaaaaaacrac

SEQ ID NO: 11445 - DNA, 50 bp, synthetic construct
  source 1..50: mol_type = other DNA
aaccttttaaattttaaaaataaacrttcrcctatttcttcttaaacrcc

SEQ ID NO: 11446 - DNA, 50 bp, synthetic construct
  source 1..50: mol_type = other DNA
aacccaaaaaaactaccaaaaatactactaaaactataaaacccaaaacc

SEQ ID NO: 11447 - DNA, 50 bp, synthetic construct
  source 1..50: mol_type = other DNA
ccttaaacttcacaaccttaacaacacttttaacaactttcttaaacttc

SEQ ID NO: 11448 - DNA, 50 bp, synthetic construct
  source 1..50: mol_type = other DNA
accttaaccttctttaaactcttaaccactttcttaattacaataaccrc

SEQ ID NO: 11449 - DNA, 50 bp, synthetic construct
  source 1..50: mol_type = other DNA
aacctaaaaaaccaattaaaacaaccaaaaaacccaaaaaaacractaac

SEQ ID NO: 11450 - DNA, 50 bp, synthetic construct
  source 1..50: mol_type = other DNA
raaaccaaacctaaaaaaccaattaaaacaaccaaaaaacccaaaaaaac

SEQ ID NO: 11451 - DNA, 50 bp, synthetic construct
  source 1..50: mol_type = other DNA
rccttcttaaacttcttaactaccccaactaacttcttaaatttaattcc

SEQ ID NO: 11452 - DNA, 50 bp, synthetic construct
  source 1..50: mol_type = other DNA
tcttaaacttcttaactaccccaactaacttcttaaatttaattccrccc

SEQ ID NO: 11453 - DNA, 50 bp, synthetic construct
  source 1..50: mol_type = other DNA
aaaacaccratacttctaactcctttaaactcaacaaaaaaacaacctcc

SEQ ID NO: 11454 - DNA, 50 bp, synthetic construct
  source 1..50: mol_type = other DNA
atcaaacttaatctcaaaaacctaataaacaaaaacactctaatacaaac

SEQ ID NO: 11455 - DNA, 50 bp, synthetic construct
  source 1..50: mol_type = other DNA
ttacaccaaaatacccttactcaccaaactcttaaaaccaaatttaatac

SEQ ID NO: 11456 - DNA, 50 bp, synthetic construct
  source 1..50: mol_type = other DNA
ctcttaaaaccaaatttaatacractattatttttctccacatcataacc

SEQ ID NO: 11457 - DNA, 50 bp, synthetic construct
  source 1..50: mol_type = other DNA
aaaaacrtaacraaatttctctaactactctaaaaaaaacrttaactacc

SEQ ID NO: 11458 - DNA, 50 bp, synthetic construct
  source 1..50: mol_type = other DNA
atttaatacractattatttttctccacatcataaccracracaaccaac

SEQ ID NO: 11459 - DNA, 50 bp, synthetic construct
  source 1..50: mol_type = other DNA
rtaaaacrtctaatcccccratatcaaaactcatcaccaaaactataacc

SEQ ID NO: 11460 - DNA, 50 bp, synthetic construct
  source 1..50: mol_type = other DNA
taaaaacraccacaaccttaataataaactctaacaccraaaaaccaaac

SEQ ID NO: 11461 - DNA, 50 bp, synthetic construct
  source 1..50: mol_type = other DNA
caaccttaataataaactctaacaccraaaaaccaaacrccttacraaac

SEQ ID NO: 11462 - DNA, 50 bp, synthetic construct
  source 1..50: mol_type = other DNA
caacctttttaaccrccttcttctttacaaaaaccttctccrcaaaaaac

SEQ ID NO: 11463 - DNA, 50 bp, synthetic construct
  source 1..50: mol_type = other DNA
cacttatacccraatttttaattctcaacatatccraaactactcctacc

SEQ ID NO: 11464 - DNA, 50 bp, synthetic construct
  source 1..50: mol_type = other DNA
acaatctcraacatattaaaaatcaaaaactcraatacaaataacaaaac

SEQ ID NO: 11465 - DNA, 50 bp, synthetic construct
  source 1..50: mol_type = other DNA
acccraaacttctaaaatcctttcctaaccaaacccaaataatttaatac

SEQ ID NO: 11466 - DNA, 50 bp, synthetic construct
  source 1..50: mol_type = other DNA
ttcttcacaaaaaaaataacacaaatcctctataaattcttcrtacaatc

SEQ ID NO: 11467 - DNA, 50 bp, synthetic construct
  source 1..50: mol_type = other DNA
tttcaatatcttcaaatcaaaaatttaaatctataaccccccaccacccc

SEQ ID NO: 11468 - DNA, 50 bp, synthetic construct
  source 1..50: mol_type = other DNA
cacaactcaaaaaaaaacctcaaaactctttaaaaaaaacccaatttctc

SEQ ID NO: 11469 - DNA, 50 bp, synthetic construct
  source 1..50: mol_type = other DNA
caaaccccrtaaaaaaatacctaccactaaactacaaataaaaatccctc

SEQ ID NO: 11470 - DNA, 50 bp, synthetic construct
  source 1..50: mol_type = other DNA
attcctcacttaaactaaactaaacctaaaactccttaaacctaaaactc

SEQ ID NO: 11471 - DNA, 50 bp, synthetic construct
  source 1..50: mol_type = other DNA
aatataaatacacrtaataccaaaactcaaaatactatactaaaaccrac

SEQ ID NO: 11472 - DNA, 50 bp, synthetic construct
  source 1..50: mol_type = other DNA
acaataattttaccctataatataacacaatattctataaatcacacrcc

SEQ ID NO: 11473 - DNA, 50 bp, synthetic construct
  source 1..50: mol_type = other DNA
ttttattttttaaacaaaaataaatcttataaacattctaaaaaactccc

SEQ ID NO: 11474 - DNA, 50 bp, synthetic construct
  source 1..50: mol_type = other DNA
aaaaaaatatttacaaattaaatacrctatattcctatcaacttaataac

SEQ ID NO: 11475 - DNA, 50 bp, synthetic construct
  source 1..50: mol_type = other DNA
aaccrattttataataccctaaatattatcccraaacaccttacrataac

SEQ ID NO: 11476 - DNA, 50 bp, synthetic construct
  source 1..50: mol_type = other DNA
acraataaccrattttataataccctaaatattatcccraaacaccttac

SEQ ID NO: 11477 - DNA, 50 bp, synthetic construct
  source 1..50: mol_type = other DNA
tcrtaaaatactccraaataacatccaaaacattacaaaaccractattc

SEQ ID NO: 11478 - DNA, 50 bp, synthetic construct
  source 1..50: mol_type = other DNA
ttaaacacacctcraatctcctcataaataaaaccraaaatacrcttaac

SEQ ID NO: 11479 - DNA, 50 bp, synthetic construct
  source 1..50: mol_type = other DNA
aaaaaccttaaacacacctcraatctcctcataaataaaaccraaaatac

SEQ ID NO: 11480 - DNA, 50 bp, synthetic construct
  source 1..50: mol_type = other DNA
ttctctaaaaaaaccttaaacacacctcraatctcctcataaataaaacc

SEQ ID NO: 11481 - DNA, 50 bp, synthetic construct
  source 1..50: mol_type = other DNA
acatccataactataacaattttacrcttaacrtactccrtataaataac

SEQ ID NO: 11482 - DNA, 50 bp, synthetic construct
  source 1..50: mol_type = other DNA
crccaaacrcaaaactatcacaaccataaatataatatataccctaaaac

SEQ ID NO: 11483 - DNA, 50 bp, synthetic construct
  source 1..50: mol_type = other DNA
caaaactatcacaaccataaatataatatataccctaaaacrtcaaaaac

SEQ ID NO: 11484 - DNA, 50 bp, synthetic construct
  source 1..50: mol_type = other DNA
tttattttttaaaattctcaaaaaaccrcrtattcttaaattcaaccrcc

SEQ ID NO: 11485 - DNA, 50 bp, synthetic construct
  source 1..50: mol_type = other DNA
atataatatataccctaaaacrtcaaaaacrcactctatataacttcrac

SEQ ID NO: 11486 - DNA, 50 bp, synthetic construct
  source 1..50: mol_type = other DNA
tatttctatcatccaaactcattctcrcaacrcatttcaactctttaaac

SEQ ID NO: 11487 - DNA, 50 bp, synthetic construct
  source 1..50: mol_type = other DNA
ttatacaaaatatcacrattatttctatcatccaaactcattctcrcaac

SEQ ID NO: 11488 - DNA, 50 bp, synthetic construct
  source 1..50: mol_type = other DNA
cattcttatacaaaatatcacrattatttctatcatccaaactcattctc

SEQ ID NO: 11489 - DNA, 50 bp, synthetic construct
  source 1..50: mol_type = other DNA
tctaaaacacrtttttaacacctaaaaatttactttctccattaaaaacc

SEQ ID NO: 11490 - DNA, 50 bp, synthetic construct
  source 1..50: mol_type = other DNA
ataaaaaattaaacrtaatctacctatctttttattcaaatctaaaacac

SEQ ID NO: 11491 - DNA, 50 bp, synthetic construct
  source 1..50: mol_type = other DNA
catacactatatctcctaaaaaactctcccttcctaaacaactacaaacc

SEQ ID NO: 11492 - DNA, 50 bp, synthetic construct
  source 1..50: mol_type = other DNA
taaattaacaaaccttcraacactaaactaaaaaccaataaaaactaaac

SEQ ID NO: 11493 - DNA, 50 bp, synthetic construct
  source 1..50: mol_type = other DNA
tactttaaaaaaaaccaactcttaactactaaataaattaacaaaccttc

SEQ ID NO: 11494 - DNA, 50 bp, synthetic construct
  source 1..50: mol_type = other DNA
actcaatcaaccataaataatatattacctaattaaaacttaaaatctcc

SEQ ID NO: 11495 - DNA, 50 bp, synthetic construct
  source 1..50: mol_type = other DNA
attttaataacaacactaaaacaatacaaaactaaaaatataaacactac

SEQ ID NO: 11496 - DNA, 50 bp, synthetic construct
  source 1..50: mol_type = other DNA
atctcctaaatttccaactaccccrataataatcttttaacctaatatac

SEQ ID NO: 11497 - DNA, 50 bp, synthetic construct
  source 1..50: mol_type = other DNA
caccttcrtaatatactaaaaaatatatctcctaaatttccaactacccc

SEQ ID NO: 11498 - DNA, 50 bp, synthetic construct
  source 1..50: mol_type = other DNA
tattaccraaacaattaaaaacccaaaaaacacacccttcaatatactac

SEQ ID NO: 11499 - DNA, 50 bp, synthetic construct
  source 1..50: mol_type = other DNA
acaattaaaaacccaaaaaacacacccttcaatatactacraaaatatac

SEQ ID NO: 11500 - DNA, 50 bp, synthetic construct
  source 1..50: mol_type = other DNA
aaaaaaaatccttccttaaacaattactacccaaattcccactccratcc

SEQ ID NO: 11501 - DNA, 50 bp, synthetic construct
  source 1..50: mol_type = other DNA
accaacttctaaccaataaactatcctatcattttaaatattaaccaatc

SEQ ID NO: 11502 - DNA, 50 bp, synthetic construct
  source 1..50: mol_type = other DNA
taacaaaacaacctattaactaaaaactaataacraaattataacattac

SEQ ID NO: 11503 - DNA, 50 bp, synthetic construct
  source 1..50: mol_type = other DNA
taatcctaacracrtaaacaaaaacaaacaactaaatctaaaacctaaac

SEQ ID NO: 11504 - DNA, 50 bp, synthetic construct
  source 1..50: mol_type = other DNA
caaacaactaaatctaaaacctaaacraacctacratttcttccraaaac

SEQ ID NO: 11505 - DNA, 50 bp, synthetic construct
  source 1..50: mol_type = other DNA
rccraattaacaaaataaccrcttatctccattttaaatttaaacacaac

SEQ ID NO: 11506 - DNA, 50 bp, synthetic construct
  source 1..50: mol_type = other DNA
taaacacaacraattaaccccaaaaccatttttaataactaacttctttc

SEQ ID NO: 11507 - DNA, 50 bp, synthetic construct
  source 1..50: mol_type = other DNA
aaatacccactaaaaaaactataaccaaacrccaaattttatttaacrac

SEQ ID NO: 11508 - DNA, 50 bp, synthetic construct
  source 1..50: mol_type = other DNA
cccaaatacccactaaaaaaactataaccaaacrccaaattttatttaac

SEQ ID NO: 11509 - DNA, 50 bp, synthetic construct
  source 1..50: mol_type = other DNA
aaaatatttacttaaaactaatatacttaataacraccttaataccctcc

SEQ ID NO: 11510 - DNA, 50 bp, synthetic construct
  source 1..50: mol_type = other DNA
atttacttaaaactaatatacttaataacraccttaataccctccracac

SEQ ID NO: 11511 - DNA, 50 bp, synthetic construct
  source 1..50: mol_type = other DNA
atcccracactaacatctcttccaaaaccataaacatcataaattctttc

SEQ ID NO: 11512 - DNA, 50 bp, synthetic construct
  source 1..50: mol_type = other DNA
aaaaaaattactctatatacrtatacaaaatactaaaacaaatccatccc

SEQ ID NO: 11513 - DNA, 50 bp, synthetic construct
  source 1..50: mol_type = other DNA
ttaaaaaaaataccaatatcraaataaacctatttcaacaccttatacac

SEQ ID NO: 11514 - DNA, 50 bp, synthetic construct
  source 1..50: mol_type = other DNA
ataaacctatttcaacaccttatacacrtacacaaaataactctccttac

SEQ ID NO: 11515 - DNA, 50 bp, synthetic construct
  source 1..50: mol_type = other DNA
ctatttcaacaccttatacacrtacacaaaataactctccttacractac

SEQ ID NO: 11516 - DNA, 50 bp, synthetic construct
  source 1..50: mol_type = other DNA
catttctaatattttaaaatacctaaaccaaccaaatctactcccrcccc

SEQ ID NO: 11517 - DNA, 50 bp, synthetic construct
  source 1..50: mol_type = other DNA
cracacatttctaatattttaaaatacctaaaccaaccaaatctactccc

SEQ ID NO: 11518 - DNA, 50 bp, synthetic construct
  source 1..50: mol_type = other DNA
ccraccaatcaaaaaatcraatttactccccaaaaactacctataaaaac

SEQ ID NO: 11519 - DNA, 50 bp, synthetic construct
  source 1..50: mol_type = other DNA
ctctcratcttcttaaacaaaaacacracctaaatattaaaaaaaacrcc

SEQ ID NO: 11520 - DNA, 50 bp, synthetic construct
  source 1..50: mol_type = other DNA
acraaaaactcaacaaactactaaaccraataaccattactcaaaacrac

SEQ ID NO: 11521 - DNA, 50 bp, synthetic construct
  source 1..50: mol_type = other DNA
cacttacccttaaccttataataactctcratcttcttaaacaaaaacac

SEQ ID NO: 11522 - DNA, 50 bp, synthetic construct
  source 1..50: mol_type = other DNA
aaactcaaatacctatcaaatcacttacccttaaccttataataactctc

SEQ ID NO: 11523 - DNA, 50 bp, synthetic construct
  source 1..50: mol_type = other DNA
ccacaaaaccaaaaacaaataatttaacaaatatctaaactcccraaaac

SEQ ID NO: 11524 - DNA, 50 bp, synthetic construct
  source 1..50: mol_type = other DNA
ccttttttccttctacctacaaacaataaaattaactcttcctttaaaac

SEQ ID NO: 11525 - DNA, 50 bp, synthetic construct
  source 1..50: mol_type = other DNA
ctattacatacaaacaaaccaacctttaataacaacrctccccaaaaacc

SEQ ID NO: 11526 - DNA, 50 bp, synthetic construct
  source 1..50: mol_type = other DNA
craaacaatacaaaacrcttcaataaaattccaaaaacrttaaactaaac

SEQ ID NO: 11527 - DNA, 50 bp, synthetic construct
  source 1..50: mol_type = other DNA
ctcctaccacacactcraatttaaaaactccaaacraaacaatacaaaac

SEQ ID NO: 11528 - DNA, 50 bp, synthetic construct
  source 1..50: mol_type = other DNA
rtcaacaataaacaacttctactaaaattattatctcctaccacacactc

SEQ ID NO: 11529 - DNA, 50 bp, synthetic construct
  source 1..50: mol_type = other DNA
raatatataacaaaaaataataatcctaacaaaaactatttactactaac

SEQ ID NO: 11530 - DNA, 50 bp, synthetic construct
  source 1..50: mol_type = other DNA
atatataacaaaaaataataatcctaacaaaaactatttactactaacrc

SEQ ID NO: 11531 - DNA, 50 bp, synthetic construct
  source 1..50: mol_type = other DNA
attctcaacccaactacccattaaaatcrttataatttaaaaataccctc

SEQ ID NO: 11532 - DNA, 50 bp, synthetic construct
  source 1..50: mol_type = other DNA
aaccaaaccttcaaatctaataattctcaacccaactacccattaaaatc

SEQ ID NO: 11533 - DNA, 50 bp, synthetic construct
  source 1..50: mol_type = other DNA
tcatcaaatttaaaaatctaatttcacataactcttaaactaaaaaaacc

SEQ ID NO: 11534 - DNA, 50 bp, synthetic construct
  source 1..50: mol_type = other DNA
aaaaattccaaaacccataaaacaattctaaccttaaaatcraaattctc

SEQ ID NO: 11535 - DNA, 50 bp, synthetic construct
  source 1..50: mol_type = other DNA
ataaataaaaaaaattccaaaacccataaaacaattctaaccttaaaatc

SEQ ID NO: 11536 - DNA, 50 bp, synthetic construct
  source 1..50: mol_type = other DNA
aaatcctttttattcactaaccaaattacctttaattccaactcccaatc

SEQ ID NO: 11537 - DNA, 50 bp, synthetic construct
  source 1..50: mol_type = other DNA
tacaacttaaattctttaaactatttcttaatttactcatctcaaaattc

SEQ ID NO: 11538 - DNA, 50 bp, synthetic construct
  source 1..50: mol_type = other DNA
ttttttccctaaatttacaatattaatacattatcaaaatttacctcttc

SEQ ID NO: 11539 - DNA, 50 bp, synthetic construct
  source 1..50: mol_type = other DNA
ctctaaattaacaaacttaacacaatatatcattcactactaaataaacc

SEQ ID NO: 11540 - DNA, 50 bp, synthetic construct
  source 1..50: mol_type = other DNA
acctaaaaaatactactaaaaacctaatccctaaacaaaaaacattcctc

SEQ ID NO: 11541 - DNA, 50 bp, synthetic construct
  source 1..50: mol_type = other DNA
aaaaaccctaattacttccaaaaaaaattatctattaaacaataaatttc

SEQ ID NO: 11542 - DNA, 50 bp, synthetic construct
  source 1..50: mol_type = other DNA
aatacctttaataattaaaaaacctctaaatttaacatcctcatccactc

SEQ ID NO: 11543 - DNA, 50 bp, synthetic construct
  source 1..50: mol_type = other DNA
aacaattctttaaataattctttccctttctactcccaaaaattaaaaac

SEQ ID NO: 11544 - DNA, 50 bp, synthetic construct
  source 1..50: mol_type = other DNA
racaacaactttaataataaactcraacaccraaaacccaaacrctttac

SEQ ID NO: 11545 - DNA, 50 bp, synthetic construct
  source 1..50: mol_type = other DNA
taaaaacracaacaactttaataataaactcraacaccraaaacccaaac

SEQ ID NO: 11546 - DNA, 50 bp, synthetic construct
  source 1..50: mol_type = other DNA
ttaaaacccaacttaatacractattattcttctccacrtcataaccaac

SEQ ID NO: 11547 - DNA, 50 bp, synthetic construct
  source 1..50: mol_type = other DNA
aaacttctaaacaattaaccaaaaaaactttctactttttcttaactacc

SEQ ID NO: 11548 - DNA, 50 bp, synthetic construct
  source 1..50: mol_type = other DNA
ctacttaaaaacccaacacaacccaaaaactcttttcaaaaccacccacc

SEQ ID NO: 11549 - DNA, 50 bp, synthetic construct
  source 1..50: mol_type = other DNA
caaaaccacccaccrctctcaataaaaaaactattacactattaaaaaac

SEQ ID NO: 11550 - DNA, 50 bp, synthetic construct
  source 1..50: mol_type = other DNA
acccaccrctctcaataaaaaaactattacactattaaaaaacrtaactc

SEQ ID NO: 11551 - DNA, 50 bp, synthetic construct
  source 1..50: mol_type = other DNA
ctctcaataaaaaaactattacactattaaaaaacrtaactcraaaaaac

SEQ ID NO: 11552 - DNA, 50 bp, synthetic construct
  source 1..50: mol_type = other DNA
tacaaaacacaaaaaaaacccaaataaattcaactccracactcraaaac

SEQ ID NO: 11553 - DNA, 50 bp, synthetic construct
  source 1..50: mol_type = other DNA
taaaaatacaaaacacaaaaaaaacccaaataaattcaactccracactc

SEQ ID NO: 11554 - DNA, 50 bp, synthetic construct
  source 1..50: mol_type = other DNA
taatacactataccrtatttaaaactcraaaaaacccaacttaaaaaccc

SEQ ID NO: 11555 - DNA, 50 bp, synthetic construct
  source 1..50: mol_type = other DNA
aaacttataaccaacacaaaaactaatacactataccrtatttaaaactc

SEQ ID NO: 11556 - DNA, 50 bp, synthetic construct
  source 1..50: mol_type = other DNA
acaatatatcaatttctatactaattacaaacctactaattatccctatc

SEQ ID NO: 11557 - DNA, 50 bp, synthetic construct
  source 1..50: mol_type = other DNA
tttcaattatataacaataatctccccaaacacttaaaatataacccttc

SEQ ID NO: 11558 - DNA, 50 bp, synthetic construct
  source 1..50: mol_type = other DNA
taatccatccaaataccacatttaaaaaccaaatatttttctacaatatc

SEQ ID NO: 11559 - DNA, 50 bp, synthetic construct
  source 1..50: mol_type = other DNA
tacttaatccttaaatataacatttaaataaattaaaaacttaccraaac

SEQ ID NO: 11560 - DNA, 50 bp, synthetic construct
  source 1..50: mol_type = other DNA
aaattaaaaaaactcacattcctttcttcctttaacaaaatataaaactc

SEQ ID NO: 11561 - DNA, 50 bp, synthetic construct
  source 1..50: mol_type = other DNA
taatttttaaaatccracttttttaacattataatatcaaaacttacacc

SEQ ID NO: 11562 - DNA, 50 bp, synthetic construct
  source 1..50: mol_type = other DNA
taaacaaaacaactatacacttcrcttaaaacaattaatttttaaaatcc

SEQ ID NO: 11563 - DNA, 50 bp, synthetic construct
  source 1..50: mol_type = other DNA
cccraaactactataaataaacctctttaaacaaaacaactatacacttc

SEQ ID NO: 11564 - DNA, 50 bp, synthetic construct
  source 1..50: mol_type = other DNA
rtttacattaacatttataacracactctaaaattaatccaatcataaac

SEQ ID NO: 11565 - DNA, 50 bp, synthetic construct
  source 1..50: mol_type = other DNA
cctaaacctaccaaatctactcctaccccaaaaaaaaactccaaaaaaac

SEQ ID NO: 11566 - DNA, 50 bp, synthetic construct
  source 1..50: mol_type = other DNA
caacaccttatacacatacactaaataactctccttacractacrcttac

SEQ ID NO: 11567 - DNA, 50 bp, synthetic construct
  source 1..50: mol_type = other DNA
ctacttcaacaccttatacacatacactaaataactctccttacractac

SEQ ID NO: 11568 - DNA, 50 bp, synthetic construct
  source 1..50: mol_type = other DNA
aaaaaaactattcaatatatatatacaaaatactaaaacaaatccatccc

SEQ ID NO: 11569 - DNA, 50 bp, synthetic construct
  source 1..50: mol_type = other DNA
accttcacctaaaaaaatatatcaaactctataccctaatcaatttccac

SEQ ID NO: 11570 - DNA, 50 bp, synthetic construct
  source 1..50: mol_type = other DNA
aattctaaacaatataaattctactactaaaacttaaactacaaaccatc

SEQ ID NO: 11571 - DNA, 50 bp, synthetic construct
  source 1..50: mol_type = other DNA
craaaataaaaaatcctaaaaaataacaacratcatcctactcccratac

SEQ ID NO: 11572 - DNA, 50 bp, synthetic construct
  source 1..50: mol_type = other DNA
actacraaccctaaacaccrtacctactatttaataaaatacracactac

SEQ ID NO: 11573 - DNA, 50 bp, synthetic construct
  source 1..50: mol_type = other DNA
aattaaaatattttcataaacctccaaaaaaactacraaccctaaacacc

SEQ ID NO: 11574 - DNA, 50 bp, synthetic construct
  source 1..50: mol_type = other DNA
tacacrcaataccrtactccattaaacaacaaacacratatctaaaatcc

SEQ ID NO: 11575 - DNA, 50 bp, synthetic construct
  source 1..50: mol_type = other DNA
ttctaactacctattcctatctcataatattaaccaaaccctataatacc

SEQ ID NO: 11576 - DNA, 50 bp, synthetic construct
  source 1..50: mol_type = other DNA
tttcctaactacaaaacaacaaaaataacatacctaaaccaacraaatcc

SEQ ID NO: 11577 - DNA, 50 bp, synthetic construct
  source 1..50: mol_type = other DNA
aactacaaaacaacaaaaataacatacctaaaccaacraaatccrctccc

SEQ ID NO: 11578 - DNA, 50 bp, synthetic construct
  source 1..50: mol_type = other DNA
aaaaaaactactccrtatacrtatacaaaatactaaaacaaatccacccc

SEQ ID NO: 11579 - DNA, 50 bp, synthetic construct; identical to SEQ ID NO: 11578
  source 1..50: mol_type = other DNA

SEQ ID NO: 11580 - DNA, 50 bp, synthetic construct
  source 1..50: mol_type = other DNA
tacttcccraaaaactaaccaaacacrctatatcaaaaaacaccaaaacc

SEQ ID NO: 11581 - DNA, 50 bp, synthetic construct
  source 1..50: mol_type = other DNA
tactccaatccttacaatcrcaaaactatcaatataccactatattattc

SEQ ID NO: 11582 - DNA, 50 bp, synthetic construct
  source 1..50: mol_type = other DNA
tccactaaaaaatattaaatcttatatactttcataattatttctcccac

SEQ ID NO: 11583 - DNA, 50 bp, synthetic construct
  source 1..50: mol_type = other DNA
aataactactactctttctcctaaataaataaataaccctaaaaaaaacc

SEQ ID NO: 11584 - DNA, 50 bp, synthetic construct
  source 1..50: mol_type = other DNA
aaattttcctaaaaaatataatccrcratactatcacctacacraaacac

SEQ ID NO: 11585 - DNA, 50 bp, synthetic construct
  source 1..50: mol_type = other DNA
atactaaaaattttcctaaaaaatataatccrcratactatcacctacac

SEQ ID NO: 11586 - DNA, 50 bp, synthetic construct
  source 1..50: mol_type = other DNA
ataactataactatcttacrtttaacrtattccrtataaataacaacatc

SEQ ID NO: 11587 - DNA, 50 bp, synthetic construct
  source 1..50: mol_type = other DNA
taaataacaacatcrcraattacattttccaaaaaaactttcaacactcc

SEQ ID NO: 11588 - DNA, 50 bp, synthetic construct
  source 1..50: mol_type = other DNA
aaaaactttcaacactccrcraatttcctcataaataaaaccaaaaatac

SEQ ID NO: 11589 - DNA, 50 bp, synthetic construct
  source 1..50: mol_type = other DNA
ccrtaaaatattacrtaacaatatccaaaaaatcaccaaacccrctatcc

SEQ ID NO: 11590 - DNA, 50 bp, synthetic construct
  source 1..50: mol_type = other DNA
aacrtcaccrtaaaatattacrtaacaatatccaaaaaatcaccaaaccc

SEQ ID NO: 11591 - DNA, 50 bp, synthetic construct
  source 1..50: mol_type = other DNA
acraataacraacttaataattccttaaatattatcacrcaataccttac

SEQ ID NO: 11592 - DNA, 50 bp, synthetic construct
  source 1..50: mol_type = other DNA
aacraacttaataattccttaaatattatcacrcaataccttacrataac

SEQ ID NO: 11593 - DNA, 50 bp, synthetic construct
  source 1..50: mol_type = other DNA
ttaataattccttaaatattatcacrcaataccttacrataacrcttaac

SEQ ID NO: 11594 - DNA, 50 bp, synthetic construct
  source 1..50: mol_type = other DNA
aaacrtattacrttacaaatttaacaactataatttcaaaatatctaacc

SEQ ID NO: 11595 - DNA, 50 bp, synthetic construct
  source 1..50: mol_type = other DNA
aatatcaaaaaaatcaataatcattatatttcccattttcccaaaaaaac

SEQ ID NO: 11596 - DNA, 50 bp, synthetic construct
  source 1..50: mol_type = other DNA
tcccaaaaaaacrttaaacatttactaaaaccctcccaaaataactaaac

SEQ ID NO: 11597 - DNA, 50 bp, synthetic construct
  source 1..50: mol_type = other DNA
ttttcaaccccaactaattttatcaaaaaaaactattattctaaatatcc

SEQ ID NO: 11598 - DNA, 50 bp, synthetic construct
  source 1..50: mol_type = other DNA
aattcaaaaaaaacctattatttctcttctcatataaaacaaatttcctc

SEQ ID NO: 11599 - DNA, 50 bp, synthetic construct
  source 1..50: mol_type = other DNA
tcaaaaaaacaacttcttaattttcatttaaaatataaattcttccattc

SEQ ID NO: 11600 - DNA, 50 bp, synthetic construct
  source 1..50: mol_type = other DNA
aatatattaaacaaactaatctcraactcttaacatcacrtaatccrccc

SEQ ID NO: 11601 - DNA, 50 bp, synthetic construct
  source 1..50: mol_type = other DNA
crcccrccttaacatcctaaaatactataattacaaacctaaaccacctc

SEQ ID NO: 11602 - DNA, 50 bp, synthetic construct
  source 1..50: mol_type = other DNA
aaccaaactaaaaaattttaaaaccaacctaaataacacaataaaacctc

SEQ ID NO: 11603 - DNA, 50 bp, synthetic construct
  source 1..50: mol_type = other DNA
taacraaaataaacctaaaacrctacactccttaacacraaaataccctc

SEQ ID NO: 11604 - DNA, 50 bp, synthetic construct
  source 1..50: mol_type = other DNA
cactacctaatttaacraaaataaacctaaaacrctacactccttaacac

SEQ ID NO: 11605 - DNA, 50 bp, synthetic construct
  source 1..50: mol_type = other DNA
ratcttaattttcctaacactacctaatttaacraaaataaacctaaaac

SEQ ID NO: 11606 - DNA, 50 bp, synthetic construct
  source 1..50: mol_type = other DNA
aaacctacraaacctacctaataaaactatttaaaaacaccaacctatac

SEQ ID NO: 11607 - DNA, 50 bp, synthetic construct
  source 1..50: mol_type = other DNA
taaataacrcataaattaatatcctcaaacaaccccaccaaataaacctc

SEQ ID NO: 11608 - DNA, 50 bp, synthetic construct
  source 1..50: mol_type = other DNA
taactaaaacrctctttcraacaaccttaataaccaactacttacrtaac

SEQ ID NO: 11609 - DNA, 50 bp, synthetic construct
  source 1..50: mol_type = other DNA
caatctacttaatacraaccattacraacttctaaaccctactaaataac

SEQ ID NO: 11610 - DNA, 50 bp, synthetic construct
  source 1..50: mol_type = other DNA
aaaactaccttatccaatcaaaacaaaaatatctttatatatacraatac

SEQ ID NO: 11611 - DNA, 50 bp, synthetic construct
  source 1..50: mol_type = other DNA
aatctacatacaaaaaatattctatcaaaaaataaacrtctccaccaatc

SEQ ID NO: 11612 - DNA, 50 bp, synthetic construct
  source 1..50: mol_type = other DNA
aacrtactttaattttccttaacaaaattatatctaactactaaaataac

SEQ ID NO: 11613 - DNA, 50 bp, synthetic construct
  source 1..50: mol_type = other DNA
ctctcaatcttcttaaaaaacaatacracctaaatattaaacaaaacacc

SEQ ID NO: 11614 - DNA, 50 bp, synthetic construct
  source 1..50: mol_type = other DNA
ccrccctaaacaattataactttacccaacaacttatttaactcctcrtc

SEQ ID NO: 11615 - DNA, 50 bp, synthetic construct
  source 1..50: mol_type = other DNA
ctaaacaattataactttacccaacaacttatttaactcctcrtcrttac

SEQ ID NO: 11616 - DNA, 50 bp, synthetic construct
  source 1..50: mol_type = other DNA
caacaacttatttaactcctcrtcrttacraataaccaactacaaatatc

SEQ ID NO: 11617 - DNA, 50 bp, synthetic construct
  source 1..50: mol_type = other DNA
craataaccaactacaaatatcraaaaataatacraatcttcttattatc

SEQ ID NO: 11618 - DNA, 50 bp, synthetic construct
  source 1..50: mol_type = other DNA
acttactaacaaaattcacttttacatttttatcttcattacttaacatc

SEQ ID NO: 11619 - DNA, 50 bp, synthetic construct
  source 1..50: mol_type = other DNA
ttaaattataaacraaatatttatttatcatacctaaacctactaaatcc

SEQ ID NO: 11620 - DNA, 50 bp, synthetic construct
  source 1..50: mol_type = other DNA
ctactttaacaccttatacacrtacacraaataactctccttacractac

SEQ ID NO: 11621 - DNA, 50 bp, synthetic construct
  source 1..50: mol_type = other DNA
ataaacctactttaacaccttatacacrtacacraaataactctccttac

SEQ ID NO: 11622 - DNA, 50 bp, synthetic construct
  source 1..50: mol_type = other DNA
ttaaataaaataccratatcraaataaacctactttaacaccttatacac

SEQ ID NO: 11623 - DNA, 50 bp, synthetic construct
  source 1..50: mol_type = other DNA
atatcrttaacraaaaaattcataatacccataaccttaaataaaatacc

SEQ ID NO: 11624 - DNA, 50 bp, synthetic construct
  source 1..50: mol_type = other DNA
craccrtctaaatctccctaaaaataataataaaacrcttattataatac

SEQ ID NO: 11625 - DNA, 50 bp, synthetic construct
  source 1..50: mol_type = other DNA
aattacttaaaactaatatacttaataacraccttaataccctctaacac

SEQ ID NO: 11626 - DNA, 50 bp, synthetic construct
  source 1..50: mol_type = other DNA
attacattattttaaccaactaaattcrccaatactacrataactaaacc

SEQ ID NO: 11627 - DNA, 50 bp, synthetic construct
  source 1..50: mol_type = other DNA
ttaaaaaatttaattacattattttaaccaactaaattcrccaatactac

SEQ ID NO: 11628 - DNA, 50 bp, synthetic construct
  source 1..50: mol_type = other DNA
ctttaactaaaccaaaaacaatattaattattaatactacatccaaactc

SEQ ID NO: 11629 - DNA, 50 bp, synthetic construct
  source 1..50: mol_type = other DNA
ttaaaaacrcaaaacttacaaaaataactccataaaaaacraactctacc

SEQ ID NO: 11630 - DNA, 50 bp, synthetic construct
  source 1..50: mol_type = other DNA
aaaacrcaaaacttacaaaaataactccataaaaaacraactctaccrac

SEQ ID NO: 11631 - DNA, 50 bp, synthetic construct
  source 1..50: mol_type = other DNA
tacaaaaataactccataaaaaacraactctaccracraaaactaaaatc

SEQ ID NO: 11632 - DNA, 50 bp, synthetic construct
  source 1..50: mol_type = other DNA
ttcaatcttcatttaaatccraattcccracatataaaaatactaccrtc

SEQ ID NO: 11633 - DNA, 50 bp, synthetic construct
  source 1..50: mol_type = other DNA
ttaataataccctaaatattatctcrcaaaaccttacrataacrcttaac

SEQ ID NO: 11634 - DNA, 50 bp, synthetic construct
  source 1..50: mol_type = other DNA
acraacaaaacrccraataacaaacttaataataccctaaatattatctc

SEQ ID NO: 11635 - DNA, 50 bp, synthetic construct
  source 1..50: mol_type = other DNA
taaaatcctacraaataacatccaaaacattaccaaacctaccatccrac

SEQ ID NO: 11636 - DNA, 50 bp, synthetic construct
  source 1..50: mol_type = other DNA
atctcatctacraaaaaactcrcraaattctaaaaatatttctaaaaaac

SEQ ID NO: 11637 - DNA, 50 bp, synthetic construct
  source 1..50: mol_type = other DNA
aactctataaaacatatatatattccaactccccttcactaccacaaaac

SEQ ID NO: 11638 - DNA, 50 bp, synthetic construct
  source 1..50: mol_type = other DNA
tacccaacccaaacttacratttttctatcacttaaaatttacataaacc

SEQ ID NO: 11639 - DNA, 50 bp, synthetic construct
  source 1..50: mol_type = other DNA
taaaaaaatcrcaaatttaaactaaacacaataactcatacctctattcc

SEQ ID NO: 11640 - DNA, 50 bp, synthetic construct
  source 1..50: mol_type = other DNA
aatcrcaaatttaaactaaacacaataactcatacctctattccraacac

SEQ ID NO: 11641 - DNA, 50 bp, synthetic construct
  source 1..50: mol_type = other DNA
ataaaataacttaaactctcraactaaaaactacaaaaacatataaatac

SEQ ID NO: 11642 - DNA, 50 bp, synthetic construct
  source 1..50: mol_type = other DNA
caaactaaaattacactaacrtattcacatattcctacaatctctaaccc

SEQ ID NO: 11643 - DNA, 50 bp, synthetic construct
  source 1..50: mol_type = other DNA
aaataaaactaaccaaatataacracttacrtctatactatcatttactc

SEQ ID NO: 11644 - DNA, 50 bp, synthetic construct
  source 1..50: mol_type = other DNA
actttcttcaactcaaaaattaacaaatttacctaaacaacataaaactc

SEQ ID NO: 11645 - DNA, 50 bp, synthetic construct
  source 1..50: mol_type = other DNA
acacacatttacttaaaacttatatacttaataacaaccttaataccttc

SEQ ID NO: 11646 - DNA, 50 bp, synthetic construct
  source 1..50: mol_type = other DNA
tctcatccaaaaccataaacatcataaattccttcrttaacracatcttc

SEQ ID NO: 11647 - DNA, 50 bp, synthetic construct
  source 1..50: mol_type = other DNA
accccratactaacatctcatccaaaaccataaacatcataaattccttc

SEQ ID NO: 11648 - DNA, 50 bp, synthetic construct
  source 1..50: mol_type = other DNA
aaaaaaactactccrtatatatatacaaaatactaaaacaaattcacccc

SEQ ID NO: 11649 - DNA, 50 bp, synthetic construct
  source 1..50: mol_type = other DNA
aaaataccaatatcraaataaacctattttaacaccttatacacatacac

SEQ ID NO: 11650 - DNA, 50 bp, synthetic construct
  source 1..50: mol_type = other DNA
ataaacctattttaacaccttatacacatacacraaataactctccttac

SEQ ID NO: 11651 - DNA, 50 bp, synthetic construct
  source 1..50: mol_type = other DNA
ctattttaacaccttatacacatacacraaataactctccttacractac

SEQ ID NO: 11652 - DNA, 50 bp, synthetic construct
  source 1..50: mol_type = other DNA
aaatcaactcctactccraaaaaaaattccaaaaaaactataaccaaaac

SEQ ID NO: 11653 - DNA, 50 bp, synthetic construct
  source 1..50: mol_type = other DNA
aattcttctactattaaaaaaccactatatctaaacrtaaaaaacaaaac

SEQ ID NO: 11654 - DNA, 50 bp, synthetic construct
  source 1..50: mol_type = other DNA
aaaaactaaaacrcrttcttccaaaaccratcttcaatttccaattaacc

SEQ ID NO: 11655 - DNA, 50 bp, synthetic construct
  source 1..50: mol_type = other DNA
caacratactaaaatatctaacraccraaatcttaaaactaactaacaac

SEQ ID NO: 11656 - DNA, 50 bp, synthetic construct
  source 1..50: mol_type = other DNA
craataactaactacaaataacrcraaataatacraatcttcttattatc

SEQ ID NO: 11657 - DNA, 50 bp, synthetic construct
  source 1..50: mol_type = other DNA
taaaaacttatttaactcctcrtcrttacraataactaactacaaataac

SEQ ID NO: 11658 - DNA, 50 bp, synthetic construct
  source 1..50: mol_type = other DNA
ctctccrtcttcttaaacaacaatacracctaaatattaaacaaaacacc

SEQ ID NO: 11659 - DNA, 50 bp, synthetic construct
  source 1..50: mol_type = other DNA
aaaaccaaaaacaaataaaataattactaatcaaatccrtcaataatccc

SEQ ID NO: 11660 - DNA, 50 bp, synthetic construct
  source 1..50: mol_type = other DNA
ctcttttcaaaaccacccaccttttctataaaatactaaaatacacatac

SEQ ID NO: 11661 - DNA, 50 bp, synthetic construct
  source 1..50: mol_type = other DNA
aaaccttaatatcacaacctcratttctattcttatatacctttataaac

SEQ ID NO: 11662 - DNA, 50 bp, synthetic construct
  source 1..50: mol_type = other DNA
aaaaacccrccctaaaatactaataaacaactatccttctttattctctc

SEQ ID NO: 11663 - DNA, 50 bp, synthetic construct
  source 1..50: mol_type = other DNA
aaccactaaacccaaccraaatacaatcatctttaaaacttaaaaaaccc

SEQ ID NO: 11664 - DNA, 50 bp, synthetic construct
  source 1..50: mol_type = other DNA
actttcattatattaaacaaactaatttcraactcctaaccctataatcc

SEQ ID NO: 11665 - DNA, 50 bp, synthetic construct
  source 1..50: mol_type = other DNA
attaactaaactaatctcratttcctaaccttaaataatccatccacctc

SEQ ID NO: 11666 - DNA, 50 bp, synthetic construct
  source 1..50: mol_type = other DNA
cttacaaacatccrcraacatttacraacaataataaatttaatttaacc

SEQ ID NO: 11667 - DNA, 50 bp, synthetic construct
  source 1..50: mol_type = other DNA
caacatattcataatatcaatcrccttaaactacataccaacrtcattac

SEQ ID NO: 11668 - DNA, 50 bp, synthetic construct
  source 1..50: mol_type = other DNA
taatctattaactactttaattcaaacaaaattttaatttacaaattcrc

SEQ ID NO: 11669 - DNA, 50 bp, synthetic construct
  source 1..50: mol_type = other DNA
tttaatctattaactactttaattcaaacaaaattttaatttacaaattc

SEQ ID NO: 11670 - DNA, 50 bp, synthetic construct
  source 1..50: mol_type = other DNA
tcatttaacttaataaactaatctattatcctatttaactataaaaaatc

SEQ ID NO: 11671 - DNA, 50 bp, synthetic construct
  source 1..50: mol_type = other DNA
aactctttcaaacaaatcrttttccrttacaaatttctttaatatttcac

SEQ ID NO: 11672 - DNA, 50 bp, synthetic construct
  source 1..50: mol_type = other DNA
aatatctttacaaatcataatctacrtaaaacatcaaaaaaacctataac

SEQ ID NO: 11673 - DNA, 50 bp, synthetic construct
  source 1..50: mol_type = other DNA
ttacaaatcataatctacrtaaaacatcaaaaaaacctataacraaaaac

SEQ ID NO: 11674 - DNA, 50 bp, synthetic construct
  source 1..50: mol_type = other DNA
aaaaacaaaccaatcttcctaactcatttactttacaaataaactataac

SEQ ID NO: 11675 - DNA, 50 bp, synthetic construct
  source 1..50: mol_type = other DNA
ttcctaactcatttactttacaaataaactataacrcrtactaaacaaac

SEQ ID NO: 11676 - DNA, 50 bp, synthetic construct
  source 1..50: mol_type = other DNA
ctaaaaacrcaaatcratcttaaaatcctaaactatttctcrcaccaaac

SEQ ID NO: 11677 - DNA, 50 bp, synthetic construct
  source 1..50: mol_type = other DNA
crcraaactctaaaaacrcaaatcratcttaaaatcctaaactatttctc

SEQ ID NO: 11678 - DNA, 50 bp, synthetic construct
  source 1..50: mol_type = other DNA
actttattttactattcaaaccctctactactttcttatacattattctc

SEQ ID NO: 11679 - DNA, 50 bp, synthetic construct
  source 1..50: mol_type = other DNA
aaaaacctatacaattaaaacctaaaatacaaaccaccacataaaaaaac

SEQ ID NO: 11680 - DNA, 50 bp, synthetic construct
  source 1..50: mol_type = other DNA
tacatcaaactaccttactccactaatattttaaaacccaactacttacc

SEQ ID NO: 11681 - DNA, 50 bp, synthetic construct
  source 1..50: mol_type = other DNA
atcaaactaccttactccactaatattttaaaacccaactacttaccrac

SEQ ID NO: 11682 - DNA, 50 bp, synthetic construct
  source 1..50: mol_type = other DNA
ataaccttaaccttaaaccaatatcaaacrcacaaaaaataacrttaacc

SEQ ID NO: 11683 - DNA, 50 bp, synthetic construct
  source 1..50: mol_type = other DNA
ccaactaataaccttaaccttaaaccaatatcaaacrcacaaaaaataac

SEQ ID NO: 11684 - DNA, 50 bp, synthetic construct
  source 1..50: mol_type = other DNA
craatctaaatattccaactaataaccttaaccttaaaccaatatcaaac

SEQ ID NO: 11685 - DNA, 50 bp, synthetic construct
  source 1..50: mol_type = other DNA
crcctaatactaatctaaaactaaaattattaactaaaacacctaaaccc

SEQ ID NO: 11686 - DNA, 50 bp, synthetic construct
  source 1..50: mol_type = other DNA
aaatttttcaccaatcaaattacratattaacaattatatatactaaaac

SEQ ID NO: 11687 - DNA, 50 bp, synthetic construct
  source 1..50: mol_type = other DNA
aaaaaaacaaacttttcractacrtcccaacatacacaactattaatatc

SEQ ID NO: 11688 - DNA, 50 bp, synthetic construct
  source 1..50: mol_type = other DNA
acatacacaactattaatatcrcaacctaattaataaaaaattttctctc

SEQ ID NO: 11689 - DNA, 50 bp, synthetic construct
  source 1..50: mol_type = other DNA
tattaatatcrcaacctaattaataaaaaattttctctcraaaaaaccac

SEQ ID NO: 11690 - DNA, 50 bp, synthetic construct
  source 1..50: mol_type = other DNA
cttactttttctattaatttacaaaacctactaaattaaccaatcaaaac

SEQ ID NO: 11691 - DNA, 50 bp, synthetic construct
  source 1..50: mol_type = other DNA
aaaacaaattttacaaaactaaaccaaaaactataataaactatccctcc

SEQ ID NO: 11692 - DNA, 50 bp, synthetic construct
  source 1..50: mol_type = other DNA
crtaacaaaacaaatcttacttttaacrcraatataatcttacttcccac

SEQ ID NO: 11693 - DNA, 50 bp, synthetic construct
  source 1..50: mol_type = other DNA
attacatttttttctaacattacctaaacrtaaaaaacaaaaccacactc

SEQ ID NO: 11694 - DNA, 50 bp, synthetic construct
  source 1..50: mol_type = other DNA
tatatttacraaaaacrcratatattaaccctactaacaactataaaccc

SEQ ID NO: 11695 - DNA, 50 bp, synthetic construct
  source 1..50: mol_type = other DNA
aaacctactttaccacrcraacctacaattaccaataaaactaatacacc

SEQ ID NO: 11696 - DNA, 50 bp, synthetic construct
  source 1..50: mol_type = other DNA
crtctcaaaataaaaaatatacccattatctttttctatcaataaccaac

SEQ ID NO: 11697 - DNA, 50 bp, synthetic construct
  source 1..50: mol_type = other DNA
atttttttttaacaaaaataaaacttcaccatattcttcaaactaacctc

SEQ ID NO: 11698 - DNA, 50 bp, synthetic construct
  source 1..50: mol_type = other DNA
aaaataaaacttcaccatattcttcaaactaacctcraactcctaacctc

SEQ ID NO: 11699 - DNA, 50 bp, synthetic construct
  source 1..50: mol_type = other DNA
raccctcaaatactatatttataaataatataaaaactacactacrtaac

SEQ ID NO: 11700 - DNA, 50 bp, synthetic construct
  source 1..50: mol_type = other DNA
cratatctatcttttcrcaaacctttaataaaccttaactttaaaatatc

SEQ ID NO: 11701 - DNA, 50 bp, synthetic construct
  source 1..50: mol_type = other DNA
taatcrttaaaaataaccaactactaataatacccratatctatcttttc

SEQ ID NO: 11702 - DNA, 50 bp, synthetic construct
  source 1..50: mol_type = other DNA
aacrttaaaataacttcctaaacacatcccrtcctaattataaacaatac

SEQ ID NO: 11703 - DNA, 50 bp, synthetic construct
  source 1..50: mol_type = other DNA
cacrtactactcacaaccaaaacraaatatactcaaaaaatcacctcaac

SEQ ID NO: 11704 - DNA, 50 bp, synthetic construct
  source 1..50: mol_type = other DNA
caccacatccctatatcaaaaataaaattttttcaaaaccacttttaaac

SEQ ID NO: 11705 - DNA, 50 bp, synthetic construct
  source 1..50: mol_type = other DNA
cacatccctatatcaaaaataaaattttttcaaaaccacttttaaacrcc

SEQ ID NO: 11706 - DNA, 50 bp, synthetic construct
  source 1..50: mol_type = other DNA
aaatcctactttttcttcaaattcccrcrataatatataattaaccracc

SEQ ID NO: 11707 - DNA, 50 bp, synthetic construct
  source 1..50: mol_type = other DNA
caccaaatcctactttttcttcaaattcccrcrataatatataattaacc

SEQ ID NO: 11708 - DNA, 50 bp, synthetic construct
  source 1..50: mol_type = other DNA
aaaaatcaattattaacaactcccaacaacctaaacrcaaaaatccttcc

SEQ ID NO: 11709 - DNA, 50 bp, synthetic construct
  source 1..50: mol_type = other DNA
taatcrtactaattaaaaatcaattattaacaactcccaacaacctaaac

SEQ ID NO: 11710 - DNA, 50 bp, synthetic construct
  source 1..50: mol_type = other DNA
actaaaaactattaataactaacccccaaccaacacractaaaataaacc

SEQ ID NO: 11711 - DNA, 50 bp, synthetic construct
  source 1..50: mol_type = other DNA
aactattaataactaacccccaaccaacacractaaaataaaccrtaacc

SEQ ID NO: 11712 - DNA, 50 bp, synthetic construct
  source 1..50: mol_type = other DNA
rccaatttcactttttcttcraaactaccttctttacctttataaccttc

SEQ ID NO: 11713 - DNA, 50 bp, synthetic construct
  source 1..50: mol_type = other DNA
aaaaaaactaccaaaaatccaactaaaaccaaaacccctaaacccaaaac

SEQ ID NO: 11714 - DNA, 50 bp, synthetic construct
  source 1..50: mol_type = other DNA
taactaaactcttaacaactttttttaactaaaatattttcacctttttc

SEQ ID NO: 11715 - DNA, 50 bp, synthetic construct
  source 1..50: mol_type = other DNA
aatattttcacctttttcrcactcttaaccactttcttaatcccaacaac

SEQ ID NO: 11716 - DNA, 50 bp, synthetic construct
  source 1..50: mol_type = other DNA
crattactaacttctttaccttcttaaaaatctttttaatacttttcttc

SEQ ID NO: 11717 - DNA, 50 bp, synthetic construct
  source 1..50: mol_type = other DNA
ctaaaaaacctactaaaacaaccaaaaaacccaaaaaaataactaacrcc

SEQ ID NO: 11718 - DNA, 50 bp, synthetic construct
  source 1..50: mol_type = other DNA
ttctttaccttcttaaaaatctttttaatacttttcttcraaataacrac

SEQ ID NO: 11719 - DNA, 50 bp, synthetic construct
  source 1..50: mol_type = other DNA
accttcttaaacttcttaactaccccaacaaacttcctaaacttaactac

SEQ ID NO: 11720 - DNA, 50 bp, synthetic construct
  source 1..50: mol_type = other DNA
caaaccaaaaataccratacttctaactccttcaaactcaacaaaaaaac

SEQ ID NO: 11721 - DNA, 50 bp, synthetic construct
  source 1..50: mol_type = other DNA
aaccaaacttaatacractattatttttttctacatcrtaaccaacaacc

SEQ ID NO: 11722 - DNA, 50 bp, synthetic construct
  source 1..50: mol_type = other DNA
acttaatacractattatttttttctacatcrtaaccaacaaccrcaaac

SEQ ID NO: 11723 - DNA, 50 bp, synthetic construct
  source 1..50: mol_type = other DNA
tattatttttttctacatcrtaaccaacaaccrcaaacrctttcttaaac

SEQ ID NO: 11724 - DNA, 50 bp, synthetic construct
  source 1..50: mol_type = other DNA
tatctaaacttatcaccaaaacaataacaacttctaaaaaacrcaacrac

SEQ ID NO: 11725 - DNA, 50 bp, synthetic construct
  source 1..50: mol_type = other DNA
caatatctaaacttatcaccaaaacaataacaacttctaaaaaacrcaac

SEQ ID NO: 11726 - DNA, 50 bp, synthetic construct
  source 1..50: mol_type = other DNA
acccccaatatctaaacttatcaccaaaacaataacaacttctaaaaaac

SEQ ID NO: 11727 - DNA, 50 bp, synthetic construct
  source 1..50: mol_type = other DNA
tccttaaaaactaccactaccttaataataaactcaaatactaaaaatcc

SEQ ID NO: 11728 - DNA, 50 bp, synthetic construct
  source 1..50: mol_type = other DNA
ataaactcaaatactaaaaatccraatactttacrtttcccaacaattac

SEQ ID NO: 11729 - DNA, 50 bp, synthetic construct
  source 1..50: mol_type = other DNA
ctaaaaatccraatactttacrtttcccaacaattacrcctaccttcttc

SEQ ID NO: 11730 - DNA, 50 bp, synthetic construct
  source 1..50: mol_type = other DNA
acaattacrcctaccttcttcrcctttttcttcacaaatattttttctac

SEQ ID NO: 11731 - DNA, 50 bp, synthetic construct
  source 1..50: mol_type = other DNA
tttaaaataaaattactcttatccaaactataatacaataacrcaatctc

SEQ ID NO: 11732 - DNA, 50 bp, synthetic construct
  source 1..50: mol_type = other DNA
aaaattactcttatccaaactataatacaataacrcaatctcractcacc

SEQ ID NO: 11733 - DNA, 50 bp, synthetic construct
  source 1..50: mol_type = other DNA
ctataaccccaattactcraaaaattaaatcaaaaaaaccrcttaaaccc

SEQ ID NO: 11734 - DNA, 50 bp, synthetic construct
  source 1..50: mol_type = other DNA
taacrcatacctataaccccaattactcraaaaattaaatcaaaaaaacc

SEQ ID NO: 11735 - DNA, 50 bp, synthetic construct
  source 1..50: mol_type = other DNA
accaacacaaaaaaaccccttctatactaaaaataaaaaattaaccaaac

SEQ ID NO: 11736 - DNA, 50 bp, synthetic construct
  source 1..50: mol_type = other DNA
cractataaacaaatcaattactaataaacttaatccactacttatatcc

SEQ ID NO: 11737 - DNA, 50 bp, synthetic construct
  source 1..50: mol_type = other DNA
tataaacaaatcaattactaataaacttaatccactacttatatccraac

SEQ ID NO: 11738 - DNA, 50 bp, synthetic construct
  source 1..50: mol_type = other DNA
taaacaaatcaattactaataaacttaatccactacttatatccraacrc

SEQ ID NO: 11739 - DNA, 50 bp, synthetic construct
  source 1..50: mol_type = other DNA
accattttaattacccaaactaatctcraactcctaaactctaataatcc

SEQ ID NO: 11740 - DNA, 50 bp, synthetic construct
  source 1..50: mol_type = other DNA
ttttttttaaccaatcctttaccttaccactaaaaacaacttataaaaac

SEQ ID NO: 11741 - DNA, 50 bp, synthetic construct
  source 1..50: mol_type = other DNA
acactttataaaaaaataacaccacttccatatttcataaaataaacrtc

SEQ ID NO: 11742 - DNA, 50 bp, synthetic construct
  source 1..50: mol_type = other DNA
aaaacactttataaaaaaataacaccacttccatatttcataaaataaac

SEQ ID NO: 11743 - DNA, 50 bp, synthetic construct
  source 1..50: mol_type = other DNA
ctatattaaacaaactaatctcraattcctaacctttatataaataaccc

SEQ ID NO: 11744 - DNA, 50 bp, synthetic construct
  source 1..50: mol_type = other DNA
cttttatatcttaaccattatcttcaaaataaccrataataacractcac

SEQ ID NO: 11745 - DNA, 50 bp, synthetic construct
  source 1..50: mol_type = other DNA
aactaaacttttatatcttaaccattatcttcaaaataaccrataataac

SEQ ID NO: 11746 - DNA, 50 bp, synthetic construct
  source 1..50: mol_type = other DNA
actcttctaaactaaacttttatatcttaaccattatcttcaaaataacc

SEQ ID NO: 11747 - DNA, 50 bp, synthetic construct
  source 1..50: mol_type = other DNA
attttaaaaacaataaccaaaacacaaaaacctaatttaaaaaaaccacc

SEQ ID NO: 11748 - DNA, 50 bp, synthetic construct
  source 1..50: mol_type = other DNA
ctttaatttaaattaacrcacaccctcaatacaacttataccctctctcc

SEQ ID NO: 11749 - DNA, 50 bp, synthetic construct
  source 1..50: mol_type = other DNA
cctaataaaactctttaaaaacaccaacctatatactatccacrccaaac

SEQ ID NO: 11750 - DNA, 50 bp, synthetic construct
  source 1..50: mol_type = other DNA
taaataacacacaaattaatatcctcaaaaaaccccaccaaataaacctc

SEQ ID NO: 11751 - DNA, 50 bp, synthetic construct
  source 1..50: mol_type = other DNA
taaataacrcacaaattaatatcctcaaaaaaccccaccaaataaacctc

SEQ ID NO: 11752 - DNA, 50 bp, synthetic construct
  source 1..50: mol_type = other DNA
aaaatcractaaactactaattcrcaaactaccattccaacrtctaatac

SEQ ID NO: 11753 - DNA, 50 bp, synthetic construct
  source 1..50: mol_type = other DNA
tctcacrtaccaaacrctaaaataataacttacraatcaataactcaatc

SEQ ID NO: 11754 - DNA, 50 bp, synthetic construct
  source 1..50: mol_type = other DNA
atttcacraaaaacracaataccaaacctataacrataaaacttcttcac

SEQ ID NO: 11755 - DNA, 50 bp, synthetic construct
  source 1..50: mol_type = other DNA
taaccattacttaaaacccattcctataacacrcacraaacaaacaactc

SEQ ID NO: 11756 - DNA, 50 bp, synthetic construct
  source 1..50: mol_type = other DNA
tatttattcaattataaccattacttaaaacccattcctataacacrcac

SEQ ID NO: 11757 - DNA, 50 bp, synthetic construct
  source 1..50: mol_type = other DNA
ttcaaattaaaactacctaaacctaacctttttactaactaccaaccaac

SEQ ID NO: 11758 - DNA, 50 bp, synthetic construct
  source 1..50: mol_type = other DNA
aattaacaatcaacaaaaaaaccaaactcaaacaatcttaacttaaaaac

SEQ ID NO: 11759 - DNA, 50 bp, synthetic construct
  source 1..50: mol_type = other DNA
aaactatatatacaactcctactataaattttttaaatatcaaaattacc

SEQ ID NO: 11760 - DNA, 50 bp, synthetic construct
  source 1..50: mol_type = other DNA
aatacaactcaaacataaaaattcraatatccttaaaaattccctctcac

SEQ ID NO: 11761 - DNA, 50 bp, synthetic construct
  source 1..50: mol_type = other DNA
caactcaaacataaaaattcraatatccttaaaaattccctctcacracc

SEQ ID NO: 11762 - DNA, 50 bp, synthetic construct
  source 1..50: mol_type = other DNA
ctcaaacataaaaattcraatatccttaaaaattccctctcacraccrac

SEQ ID NO: 11763 - DNA, 50 bp, synthetic construct
  source 1..50: mol_type = other DNA
aaacctaataaatcaattaaccccacccaaattaataaactaactcatcc

SEQ ID NO: 11764 - DNA, 50 bp, synthetic construct
  source 1..50: mol_type = other DNA
aaaaacraaaaccaaattaacctctacattactaacaacataaacattac

SEQ ID NO: 11765 - DNA, 50 bp, synthetic construct
  source 1..50: mol_type = other DNA
tcccacrtaatacccatactaccaataatataaaaaccaatctaactttc

SEQ ID NO: 11766 - DNA, 50 bp, synthetic construct
  source 1..50: mol_type = other DNA
atacccatactaccaataatataaaaaccaatctaactttcrtttctacc

SEQ ID NO: 11767 - DNA, 50 bp, synthetic construct
  source 1..50: mol_type = other DNA
ccactctaccaaataactaaatttttctttcaaataatctaaaataaccc

SEQ ID NO: 11768 - DNA, 50 bp, synthetic construct
  source 1..50: mol_type = other DNA
tcacttcatttttaaatcctctcttctcrattaatctacratccaaaaac

SEQ ID NO: 11769 - DNA, 50 bp, synthetic construct
  source 1..50: mol_type = other DNA
acrtcttccaaatcttaaaataatcrtttacraactacaacttaaaaaac

SEQ ID NO: 11770 - DNA, 50 bp, synthetic construct
  source 1..50: mol_type = other DNA
caacacatctactaaataaaaattaacrtcttccaaatcttaaaataatc

SEQ ID NO: 11771 - DNA, 50 bp, synthetic construct
  source 1..50: mol_type = other DNA
acrcttctcaaactataatccrtaaacractactttaaaacttaaaaaac

SEQ ID NO: 11772 - DNA, 50 bp, synthetic construct
  source 1..50: mol_type = other DNA
aataactcaaaaaaacracacaaaataaacttctcaaaacrtaatcctcc

SEQ ID NO: 11773 - DNA, 50 bp, synthetic construct
  source 1..50: mol_type = other DNA
caacaatccaaataactcaaaaaaacracacaaaataaacttctcaaaac

SEQ ID NO: 11774 - DNA, 50 bp, synthetic construct
  source 1..50: mol_type = other DNA
taataatcaaaaatttccaactaacaacaatccaaataactcaaaaaaac

SEQ ID NO: 11775 - DNA, 50 bp, synthetic construct
  source 1..50: mol_type = other DNA
ttcaattaacatttattactcactattatatatcrataacttcttaactc

SEQ ID NO: 11776 - DNA, 50 bp, synthetic construct
  source 1..50: mol_type = other DNA
acaaaattcctaaataatatacctaaaaaatcacraaccaaaaaatcacc

SEQ ID NO: 11777 - DNA, 50 bp, synthetic construct
  source 1..50: mol_type = other DNA
cacttatataaacaaaacaacaacacracctaaatattaaacaaaacacc

SEQ ID NO: 11778 - DNA, 50 bp, synthetic construct
  source 1..50: mol_type = other DNA
ataaacaaaacaacaacacracctaaatattaaacaaaacaccrccctac

SEQ ID NO: 11779 - DNA, 50 bp, synthetic construct
  source 1..50: mol_type = other DNA
tcrccatccacracraaaaactcaacaaactattaaacaaaattactatc

SEQ ID NO: 11780 - DNA, 50 bp, synthetic construct
  source 1..50: mol_type = other DNA
rcrataataactttacccaacaacttattaaacttctcrtcrtaaataac

SEQ ID NO: 11781 - DNA, 50 bp, synthetic construct
  source 1..50: mol_type = other DNA
tttacccaacaacttattaaacttctcrtcrtaaataacraactacaaac

SEQ ID NO: 11782 - DNA, 50 bp, synthetic construct
  source 1..50: mol_type = other DNA
tacctaaaaacratactaaaatacctaaccrccaaaatcctaaaattaac

SEQ ID NO: 11783 - DNA, 50 bp, synthetic construct
  source 1..50: mol_type = other DNA
aacrcactcttccaaaactaatctccaattttctataaaccraatacacc

SEQ ID NO: 11784 - DNA, 50 bp, synthetic construct
  source 1..50: mol_type = other DNA
acrtctaaatataaaatacaaaacaacaaaactcrcrccaaaactaaaac

SEQ ID NO: 11785 - DNA, 50 bp, synthetic construct
  source 1..50: mol_type = other DNA
ataacacaatctactttaccraatataaattataaaaatttaactcttac

SEQ ID NO: 11786 - DNA, 50 bp, synthetic construct
  source 1..50: mol_type = other DNA
tttcrattaactaaaatctatattcaaaaaataacacaatctactttacc

SEQ ID NO: 11787 - DNA, 50 bp, synthetic construct
  source 1..50: mol_type = other DNA
attcracaaaataaactatactatctcctaaacacaaatttcaaccaatc

SEQ ID NO: 11788 - DNA, 50 bp, synthetic construct
  source 1..50: mol_type = other DNA
ataaacctacttcaacaccttatacacatacacaaaataactctccttac

SEQ ID NO: 11789 - DNA, 50 bp, synthetic construct
  source 1..50: mol_type = other DNA
aaaaaaactattccrtatacrtatacaaaatactaaaacaaatccacccc

SEQ ID NO: 11790 - DNA, 50 bp, synthetic construct; identical to SEQ ID NO: 11789
  source 1..50: mol_type = other DNA

SEQ ID NO: 11791 - DNA, 50 bp, synthetic construct
  source 1..50: mol_type = other DNA
atatcrttaacraaaaaattcataatccccataaccttaaacraaatacc

SEQ ID NO: 11792 - DNA, 50 bp, synthetic construct
  source 1..50: mol_type = other DNA
tctcrtccaaaactataaaaattataaactccttcrtcaacracattttc

SEQ ID NO: 11793 - DNA, 50 bp, synthetic construct
  source 1..50: mol_type = other DNA
rtccaaaactataaaaattataaactccttcrtcaacracattttcraac

SEQ ID NO: 11794 - DNA, 50 bp, synthetic construct
  source 1..50: mol_type = other DNA
caaccrtttaaatctccctaaaaataataatcraacrcttattataatac

SEQ ID NO: 11795 - DNA, 50 bp, synthetic construct
  source 1..50: mol_type = other DNA
taacaacaaacrcacaaccrtttaaatctccctaaaaataataatcraac

SEQ ID NO: 11796 - DNA, 50 bp, synthetic construct
  source 1..50: mol_type = other DNA
craataacaacaaacrcacaaccrtttaaatctccctaaaaataataatc

SEQ ID NO: 11797 - DNA, 50 bp, synthetic construct
  source 1..50: mol_type = other DNA
aactaatttacttaaaactaatatacttaataaccrccttaataccctcc

SEQ ID NO: 11798 - DNA, 50 bp, synthetic construct
  source 1..50: mol_type = other DNA
ccttaaaaccttaaaaaaacttacaaataaaaacrtctaaatataacacc

SEQ ID NO: 11799 - DNA, 50 bp, synthetic construct
  source 1..50: mol_type = other DNA
ttaaaaaaaacacaatccttaaaaccttaaaaaaacttacaaataaaaac

SEQ ID NO: 11800 - DNA, 50 bp, synthetic construct
  source 1..50: mol_type = other DNA
ctatcattcactcctatacttctcaaaaccataaacaatacctaacatac

SEQ ID NO: 11801 - DNA, 50 bp, synthetic construct
  source 1..50: mol_type = other DNA
tattaaatttatatcctcatacaaaccaataccttaactctaataacatc

SEQ ID NO: 11802 - DNA, 50 bp, synthetic construct
  source 1..50: mol_type = other DNA
tttcctctttataatcaacaaacaaattataaaattataactttaaaatc

SEQ ID NO: 11803 - DNA, 50 bp, synthetic construct
  source 1..50: mol_type = other DNA
caacaaacaaaaaccttaaccaccraaaccrtaaaaaatacrtccctatc

SEQ ID NO: 11804 - DNA, 50 bp, synthetic construct
  source 1..50: mol_type = other DNA
acacaaaacacrccaaacrcaaaaccrtaacaacaataaatataatctac

SEQ ID NO: 11805 - DNA, 50 bp, synthetic construct
  source 1..50: mol_type = other DNA
aaatattcctaaaaaacrtaattcrtaacrctatcacttacacaaaacac

SEQ ID NO: 11806 - DNA, 50 bp, synthetic construct
  source 1..50: mol_type = other DNA
tccattactatcacratcttacrtttaacrtactctatataaataacaac

SEQ ID NO: 11807 - DNA, 50 bp, synthetic construct
  source 1..50: mol_type = other DNA
aaaacaccacraatctcctcataaataaaaccaaaaattcrcttaacacc

SEQ ID NO: 11808 - DNA, 50 bp, synthetic construct
  source 1..50: mol_type = other DNA
ccraataactaacttaataataccctaaatattatcrcrcaaaaccttac

SEQ ID NO: 11809 - DNA, 50 bp, synthetic construct
  source 1..50: mol_type = other DNA
aactaacttaataataccctaaatattatcrcrcaaaaccttacrataac

SEQ ID NO: 11810 - DNA, 50 bp, synthetic construct
  source 1..50: mol_type = other DNA
aacaacttctaaaaccaacttaaaaaacctaaacrccaaaacaaaacaac

SEQ ID NO: 11811 - DNA, 50 bp, synthetic construct
  source 1..50: mol_type = other DNA
aaccttaaaactctcattcctatttcccaacaattacaaaaaacrcctcc

SEQ ID NO: 11812 - DNA, 50 bp, synthetic construct
  source 1..50: mol_type = other DNA
ataaccttaaaaacaaaactacactcctcaaacttccratcttataaacc

SEQ ID NO: 11813 - DNA, 50 bp, synthetic construct
  source 1..50: mol_type = other DNA
aacaaaataaacccraatatttctttaattccaaaattacaaacatttcc

SEQ ID NO: 11814 - DNA, 50 bp, synthetic construct
  source 1..50: mol_type = other DNA
caatttactatttactcatataccctccaataatatattaaattaatcac

SEQ ID NO: 11815 - DNA, 50 bp, synthetic construct
  source 1..50: mol_type = other DNA
cttctaaaaaacaaaaaccctaaacttctacaacccttcatatttattac

SEQ ID NO: 11816 - DNA, 50 bp, synthetic construct
  source 1..50: mol_type = other DNA
tctttattcaacaaactccaaatattcctataaataaccttaaaaaacac

SEQ ID NO: 11817 - DNA, 50 bp, synthetic construct
  source 1..50: mol_type = other DNA
ttcctttaacctccaacaaataaaaactaaaaaaaactttctcatccaac

SEQ ID NO: 11818 - DNA, 50 bp, synthetic construct
  source 1..50: mol_type = other DNA
catttatctctataaataaataccataataataacccttactaaaatatc

SEQ ID NO: 11819 - DNA, 50 bp, synthetic construct
  source 1..50: mol_type = other DNA
ccctaataattcattctattcctaaatacaaaccttctataaccttacac

SEQ ID NO: 11820 - DNA, 50 bp, synthetic construct
  source 1..50: mol_type = other DNA
ataaaatcaataatcatattaccaacaaaaaattattaataccaacacac

SEQ ID NO: 11821 - DNA, 50 bp, synthetic construct
  source 1..50: mol_type = other DNA
acttttttaaaaatttcccctcaataaaatatcrtctactatacctcccc

SEQ ID NO: 11822 - DNA, 50 bp, synthetic construct
  source 1..50: mol_type = other DNA
ctttccctactaactaaacttttttaaaaatttcccctcaataaaatatc

SEQ ID NO: 11823 - DNA, 50 bp, synthetic construct
  source 1..50: mol_type = other DNA
aacaatttcatttaacaattcctattcttttattaaatattttcaataac

SEQ ID NO: 11824 - DNA, 50 bp, synthetic construct
  source 1..50: mol_type = other DNA
aatacaaattctcaaataactcaatttataatttacacatattcataccc

SEQ ID NO: 11825 - DNA, 50 bp, synthetic construct
  source 1..50: mol_type = other DNA
taatttacacatattcatacccraatccaaaaataacataaaaaacattc

SEQ ID NO: 11826 - DNA, 50 bp, synthetic construct
  source 1..50: mol_type = other DNA
taaccccataatataataattaacactctaaactttaaatccaacratcc

SEQ ID NO: 11827 - DNA, 50 bp, synthetic construct
  source 1..50: mol_type = other DNA
craatcrctaaattcaaaatccaaaatactaaccattacaccataaaacc

SEQ ID NO: 11828 - DNA, 50 bp, synthetic construct
  source 1..50: mol_type = other DNA
ctaaattcaaaatccaaaatactaaccattacaccataaaaccrccttcc

SEQ ID NO: 11829 - DNA, 50 bp, synthetic construct
  source 1..50: mol_type = other DNA
aaaaactccaaaaaactcacatacactacaaacctatctaaaccaaatcc

SEQ ID NO: 11830 - DNA, 50 bp, synthetic construct
  source 1..50: mol_type = other DNA
ctttcacctaccaaacctcaattctttccttttttaaacaatactcaaac

SEQ ID NO: 11831 - DNA, 50 bp, synthetic construct
  source 1..50: mol_type = other DNA
aaaaaaacrtacacctaatcacttaaacaccttaacatcccatcccaatc

SEQ ID NO: 11832 - DNA, 50 bp, synthetic construct
  source 1..50: mol_type = other DNA
acttttaatactctttctttctctcaaattaccattatacccaaaaaaac

SEQ ID NO: 11833 - DNA, 50 bp, synthetic construct
  source 1..50: mol_type = other DNA
attattaaccccataatataataattaacactctaaactttaaatccaac

SEQ ID NO: 11834 - DNA, 50 bp, synthetic construct
  source 1..50: mol_type = other DNA
caacaacacaataatctcctaacatatttttaataacataaatataatac

SEQ ID NO: 11835 - DNA, 50 bp, synthetic construct
  source 1..50: mol_type = other DNA
aaatactatttactttaacctctcaaaataaatacataatcccaaattcc

SEQ ID NO: 11836 - DNA, 50 bp, synthetic construct
  source 1..50: mol_type = other DNA
taaaaaatactactccatattattctatataattacacaaataatacacc

SEQ ID NO: 11837 - DNA, 50 bp, synthetic construct
  source 1..50: mol_type = other DNA
crtaaccraataattaaaacrataaacttaaaatccattaaaatctcccc

SEQ ID NO: 11838 - DNA, 50 bp, synthetic construct
  source 1..50: mol_type = other DNA
racaaaattcraacctacrcraaaaaaccccaataaatttcaaatccatc

SEQ ID NO: 11839 - DNA, 50 bp, synthetic construct
  source 1..50: mol_type = other DNA
atttaaaaaccatttaaaaattaacrtataaccccctcrtaaaatctttc

SEQ ID NO: 11840 - DNA, 50 bp, synthetic construct
  source 1..50: mol_type = other DNA
ccaatttcrtaaatttaaaaaccatttaaaaattaacrtataaccccctc

SEQ ID NO: 11841 - DNA, 50 bp, synthetic construct
  source 1..50: mol_type = other DNA
caatatctataatcctactaattaaatataaaaaactttcaaccaatttc

SEQ ID NO: 11842 - DNA, 50 bp, synthetic construct
  source 1..50: mol_type = other DNA
caacraacctaacccrtataaaaatccacaaaatatcctaataaaaatac

SEQ ID NO: 11843 - DNA, 50 bp, synthetic construct
  source 1..50: mol_type = other DNA
aaaacctacaaatacrcatttccaccaaaataccttataaattcttacac

SEQ ID NO: 11844 - DNA, 50 bp, synthetic construct
  source 1..50: mol_type = other DNA
atttccaccaaaataccttataaattcttacacraatcaaatccrctaac

SEQ ID NO: 11845 - DNA, 50 bp, synthetic construct
  source 1..50: mol_type = other DNA
aaaataccttataaattcttacacraatcaaatccrctaacrtttaacac

SEQ ID NO: 11846 - DNA, 50 bp, synthetic construct
  source 1..50: mol_type = other DNA
acccataacccaaaaatcrataaatcraaaccatcctctactatataacc

SEQ ID NO: 11847 - DNA, 50 bp, synthetic construct
  source 1..50: mol_type = other DNA
actatttcaacattactcttatcaaatatatattaaaaactacaattttc

SEQ ID NO: 11848 - DNA, 50 bp, synthetic construct
  source 1..50: mol_type = other DNA
aaacrttctaaaaaatattcttacrtatttacttacttctatattcaaac

SEQ ID NO: 11849 - DNA, 50 bp, synthetic construct
  source 1..50: mol_type = other DNA
caaactttctacttacttctacrttcaaacrttctaaaaaatattcttac

SEQ ID NO: 11850 - DNA, 50 bp, synthetic construct
  source 1..50: mol_type = other DNA
ttaaaaatctccaaaaatcacrtatcaacaaactttctacttacttctac

SEQ ID NO: 11851 - DNA, 50 bp, synthetic construct
  source 1..50: mol_type = other DNA
aaattacaaacttaaatatctttttcactttaaaaatctccaaaaatcac

SEQ ID NO: 11852 - DNA, 50 bp, synthetic construct
  source 1..50: mol_type = other DNA
actcccaaattatattactaattcaaaaactaaaccaaattttaaataac

SEQ ID NO: 11853 - DNA, 50 bp, synthetic construct
  source 1..50: mol_type = other DNA
ccctaaaccaataacataacctaaaaacttcttaaaaataacaacttttc

SEQ ID NO: 11854 - DNA, 50 bp, synthetic construct
  source 1..50: mol_type = other DNA
taaccraataattaaaacrataaactaaaaatccattaaaatctccccrc

SEQ ID NO: 11855 - DNA, 50 bp, synthetic construct; identical to SEQ ID NO: 11854
  source 1..50: mol_type = other DNA

SEQ ID NO: 11856 - DNA, 50 bp, synthetic construct
  source 1..50: mol_type = other DNA
taattaaaacrataaactaaaaatccattaaaatctccccrcrcaaattc

SEQ ID NO: 11857 - DNA, 50 bp, synthetic construct
  source 1..50: mol_type = other DNA
tatataaacctcaaaatttccactaaaatcraacraaccaaccaaaaatc

SEQ ID NO: 11858 - DNA, 50 bp, synthetic construct
  source 1..50: mol_type = other DNA
ttctttttttaaaatatatcactatatcrcccaaactacaaaacaataac

SEQ ID NO: 11859 - DNA, 50 bp, synthetic construct
  source 1..50: mol_type = other DNA
rccatattaaccaaactaatctaaaactcctaatctcaaataatcaaccc

SEQ ID NO: 11860 - DNA, 50 bp, synthetic construct
  source 1..50: mol_type = other DNA
attaaccaaactaatctaaaactcctaatctcaaataatcaacccrcctc

SEQ ID NO: 11861 - DNA, 50 bp, synthetic construct
  source 1..50: mol_type = other DNA
aactctcacaaaataacacaaaattttcccaaacraacrtaataactcac

SEQ ID NO: 11862 - DNA, 50 bp, synthetic construct
  source 1..50: mol_type = other DNA
attctcaatcrtaactctcacaaaataacacaaaattttcccaaacraac

SEQ ID NO: 11863 - DNA, 50 bp, synthetic construct
  source 1..50: mol_type = other DNA
ataaattctcaatcrtaactctcacaaaataacacaaaattttcccaaac

SEQ ID NO: 11864 - DNA, 50 bp, synthetic construct
  source 1..50: mol_type = other DNA
aaaccaccacrtccrtttaaaaaaaccttatatcattctataaaaattac

SEQ ID NO: 11865 - DNA, 50 bp, synthetic construct
  source 1..50: mol_type = other DNA
caaaaaatttctaaataacaaacaattttaatttcttttctatccttttc

SEQ ID NO: 11866 - DNA, 50 bp, synthetic construct
  source 1..50: mol_type = other DNA
aaaaaaataaaactttctcaaacccacracacaaacaataatacatatcc

SEQ ID NO: 11867 - DNA, 50 bp, synthetic construct
  source 1..50: mol_type = other DNA
aaacaaataatcctccttctaatatatcataaaatcaacaataacctaac

SEQ ID NO: 11868 - DNA, 50 bp, synthetic construct
  source 1..50: mol_type = other DNA
aaatcaacaataacctaacrttccatcacaatacctacttcactcatctc

SEQ ID NO: 11869 - DNA, 50 bp, synthetic construct
  source 1..50: mol_type = other DNA
aatacactataataaaaattatataaataaaatctctctctcaaaatatc

SEQ ID NO: 11870 - DNA, 50 bp, synthetic construct
  source 1..50: mol_type = other DNA
caataaataacacatttacatcrttcaaaactacatacacataaaatcac

SEQ ID NO: 11871 - DNA, 50 bp, synthetic construct
  source 1..50: mol_type = other DNA
tttaaaaaaaaaatccttatttaacctcataaaataaattccccaccccc

SEQ ID NO: 11872 - DNA, 50 bp, synthetic construct
  source 1..50: mol_type = other DNA
aacaacaaaataaacaaaatccctaccaaaactacratccaaaactaaac

SEQ ID NO: 11873 - DNA, 50 bp, synthetic construct
  source 1..50: mol_type = other DNA
aacaaaacaattatttccttctattatctccacaaaaaataactaactcc

SEQ ID NO: 11874 - DNA, 50 bp, synthetic construct
  source 1..50: mol_type = other DNA
aaattttcaaactaaaacatacaaaccaaaaacttaaattctctacttac

SEQ ID NO: 11875 - DNA, 50 bp, synthetic construct
  source 1..50: mol_type = other DNA
cacctctctcccctaccctaacactacatcatatttaaaatttatttccc

SEQ ID NO: 11876 - DNA, 50 bp, synthetic construct
  source 1..50: mol_type = other DNA
atcttaaaactttttaaacacccaaaaaacaaatcccaaataccraatcc

SEQ ID NO: 11877 - DNA, 50 bp, synthetic construct
  source 1..50: mol_type = other DNA
aactaacctctattttcttttcccctctaatcctcacataacrattttcc

SEQ ID NO: 11878 - DNA, 50 bp, synthetic construct
  source 1..50: mol_type = other DNA
aaatctcaaaaacacaaaatacccaaaacraactccccaatatttccttc

SEQ ID NO: 11879 - DNA, 50 bp, synthetic construct
  source 1..50: mol_type = other DNA
taaaacaaaaacaacctcaataattactactcccaaaaattaatactacc

SEQ ID NO: 11880 - DNA, 50 bp, synthetic construct
  source 1..50: mol_type = other DNA
tattctttacactacttctcccctttccatatatccacatatatacrtac

SEQ ID NO: 11881 - DNA, 50 bp, synthetic construct
  source 1..50: mol_type = other DNA
accaataatatcraaccttatttctcaacaattactaaataaaatacacc

SEQ ID NO: 11882 - DNA, 50 bp, synthetic construct
  source 1..50: mol_type = other DNA
aaattttctttacctcccacttactcrcratatataaaattataaaaccc

SEQ ID NO: 11883 - DNA, 50 bp, synthetic construct
  source 1..50: mol_type = other DNA
actataaaaacccaaaaaatctaatcccraatcccacaacttcacatatc

SEQ ID NO: 11884 - DNA, 50 bp, synthetic construct
  source 1..50: mol_type = other DNA
actaaaacataaataacatctctaaactaccaaatcaaccctaaactacc

SEQ ID NO: 11885 - DNA, 50 bp, synthetic construct
  source 1..50: mol_type = other DNA
tccttcaaaataaaaaccaaaataactaaaaatataaatatacactctcc

SEQ ID NO: 11886 - DNA, 50 bp, synthetic construct
  source 1..50: mol_type = other DNA
cctcttctccatatacccacatatatacataaatacccatacrcacacac

SEQ ID NO: 11887 - DNA, 50 bp, synthetic construct
  source 1..50: mol_type = other DNA
actacttacctcttctccatatacccacatatatacataaatacccatac

SEQ ID NO: 11888 - DNA, 50 bp, synthetic construct
  source 1..50: mol_type = other DNA
cctaaaaatcctaacctaaaataacttaatcctactaacacctctctctc

SEQ ID NO: 11889 - DNA, 50 bp, synthetic construct
  source 1..50: mol_type = other DNA
ctaaaatattctcracctcttctaacacccaaatcttttactattcccac

SEQ ID NO: 11890 - DNA, 50 bp, synthetic construct
  source 1..50: mol_type = other DNA
acctacttcctccaaaaacaactctaaatattcctacctaaaatattctc

SEQ ID NO: 11891 - DNA, 50 bp, synthetic construct
  source 1..50: mol_type = other DNA
ttttcccataccataactttcatttcaattacttactccatctctacccc

SEQ ID NO: 11892 - DNA, 50 bp, synthetic construct
  source 1..50: mol_type = other DNA
tttacaattaatacrctaacaataactccacaataaccttacatcacaac

SEQ ID NO: 11893 - DNA, 50 bp, synthetic construct
  source 1..50: mol_type = other DNA
aaaaacctccaattcccttctaattcaattcaaaactttacaattaatac

SEQ ID NO: 11894 - DNA, 50 bp, synthetic construct
  source 1..50: mol_type = other DNA
cttttcrtcaatatatacaattcaatatcrtttcaattttcattctaacc

SEQ ID NO: 11895 - DNA, 50 bp, synthetic construct
  source 1..50: mol_type = other DNA
ctatacactcratccraaaaacactaaaaaaatcctctttataaaaattc

SEQ ID NO: 11896 - DNA, 50 bp, synthetic construct
  source 1..50: mol_type = other DNA
aaccaatcaaaacacraattcctacaaaaaaaattctcttaatatttctc

SEQ ID NO: 11897 - DNA, 50 bp, synthetic construct
  source 1..50: mol_type = other DNA
aaaatatacttttataacaaataactaaatctcaaccaatcccaataacc

SEQ ID NO: 11898 - DNA, 50 bp, synthetic construct
  source 1..50: mol_type = other DNA
accttatttaaacataatctaatcacttaactacaaaattaactaccrcc

SEQ ID NO: 11899 - DNA, 50 bp, synthetic construct
  source 1..50: mol_type = other DNA
atcacttcccttataaaataaaactcactaaacctctctaataactaccc

SEQ ID NO: 11900 - DNA, 50 bp, synthetic construct
  source 1..50: mol_type = other DNA
cttcccttataaaataaaactcactaaacctctctaataactacccratc

SEQ ID NO: 11901 - DNA, 50 bp, synthetic construct
  source 1..50: mol_type = other DNA
caaaaaatttaccaaatataataacrtatacctatattcccaactactcc

SEQ ID NO: 11902 - DNA, 50 bp, synthetic construct
  source 1..50: mol_type = other DNA
accaaaataaataaatcacttaaaatcaaaaattcaataccaacctaacc

SEQ ID NO: 11903 - DNA, 50 bp, synthetic construct
  source 1..50: mol_type = other DNA
aaaaaacctaacttatcttacctctctatcraaatttataaaaaatttac

SEQ ID NO: 11904 - DNA, 50 bp, synthetic construct
  source 1..50: mol_type = other DNA
ttcccaaaaaattttaaacttactccaatttttactaaaacaaaatactc

SEQ ID NO: 11905 - DNA, 50 bp, synthetic construct
  source 1..50: mol_type = other DNA
attcaacaaaattaccattattttaactaaaattcaattaaaaacaaaac

SEQ ID NO: 11906 - DNA, 50 bp, synthetic construct
  source 1..50: mol_type = other DNA
attattttaactaaaattcaattaaaaacaaaacrccatcrccrtcttcc

SEQ ID NO: 11907 - DNA, 50 bp, synthetic construct
  source 1..50: mol_type = other DNA
tttctcaaaatataaacattcctaaattaaaaaataaaccrcctctccrc

SEQ ID NO: 11908 - DNA, 50 bp, synthetic construct
  source 1..50: mol_type = other DNA
tttttctcaaaatataaacattcctaaattaaaaaataaaccrcctctcc

SEQ ID NO: 11909 - DNA, 50 bp, synthetic construct
  source 1..50: mol_type = other DNA
aacaaaaataaatcctaaacacaatataacataaacrcrtcaaaataacc

SEQ ID NO: 11910 - DNA, 50 bp, synthetic construct
  source 1..50: mol_type = other DNA
aaaataaatcctaaacacaatataacataaacrcrtcaaaataaccraac

SEQ ID NO: 11911 - DNA, 50 bp, synthetic construct
  source 1..50: mol_type = other DNA
ttcraatcccactcctaacaattcrtacttttaatatttaaacacaaatc

SEQ ID NO: 11912 - DNA, 50 bp, synthetic construct
  source 1..50: mol_type = other DNA
aaaaacaacaaaaaatactctatactccraaaataatttcaaaacctacc

SEQ ID NO: 11913 - DNA, 50 bp, synthetic construct
  source 1..50: mol_type = other DNA
ccraaaacctctactataactacccactaactaaacccaaaccttaaaac

SEQ ID NO: 11914 - DNA, 50 bp, synthetic construct
  source 1..50: mol_type = other DNA
ctactataactacccactaactaaacccaaaccttaaaacrataacraac

SEQ ID NO: 11915 - DNA, 50 bp, synthetic construct
  source 1..50: mol_type = other DNA
actccatcaaaatattttatatacrtccratataaaacctccttatttac

SEQ ID NO: 11916 - DNA, 50 bp, synthetic construct
  source 1..50: mol_type = other DNA
aaaaattattttcccctataaaactccatcaaaatattttatatacrtcc

SEQ ID NO: 11917 - DNA, 50 bp, synthetic construct
  source 1..50: mol_type = other DNA
caaatttatctttacttctttttcrtaaacaaaaaaatttcacaccraac

SEQ ID NO: 11918 - DNA, 50 bp, synthetic construct
  source 1..50: mol_type = other DNA
tattataattttcctacattcaaaatacccacraaacaattaaaatatac

SEQ ID NO: 11919 - DNA, 50 bp, synthetic construct
  source 1..50: mol_type = other DNA
ttcaactattccrtaaatactttaaatacaaaaaaactacaacaaacccc

SEQ ID NO: 11920 - DNA, 50 bp, synthetic construct
  source 1..50: mol_type = other DNA
tctatacattaatacactttcttattactaaaatttaaaaataactacac

SEQ ID NO: 11921 - DNA, 50 bp, synthetic construct
  source 1..50: mol_type = other DNA
ttaaaaataactacacrcttcttcaaacactaaaaattaaccttaacttc

SEQ ID NO: 11922 - DNA, 50 bp, synthetic construct
  source 1..50: mol_type = other DNA
tcaaacactaaaaattaaccttaacttcrccccaaaaaacctaaaaaacc

SEQ ID NO: 11923 - DNA, 50 bp, synthetic construct
  source 1..50: mol_type = other DNA
tctatcacaatctaaaacaaacattaacatatacctttacctatatatac

SEQ ID NO: 11924 - DNA, 50 bp, synthetic construct
  source 1..50: mol_type = other DNA
aaaaccctacaataaaaacaacatacaataaaaaaacctaacacaatttc

SEQ ID NO: 11925 - DNA, 50 bp, synthetic construct
  source 1..50: mol_type = other DNA
tcttcaccrttatctacaataccttaaacactaatactaattaaataaac

SEQ ID NO: 11926 - DNA, 50 bp, synthetic construct
  source 1..50: mol_type = other DNA
aaaataacrataaaaaacaaaccctacatcctctctaccccaatatcacc

SEQ ID NO: 11927 - DNA, 50 bp, synthetic construct
  source 1..50: mol_type = other DNA
ctaatccaaactcrcaacrcataaactctctaataactacttctacacac

SEQ ID NO: 11928 - DNA, 50 bp, synthetic construct
  source 1..50: mol_type = other DNA
aaataaaaaccacraaacrtatacaaaaataactaccaaaaaatccatac

SEQ ID NO: 11929 - DNA, 50 bp, synthetic construct
  source 1..50: mol_type = other DNA
aaaaccacraaacrtatacaaaaataactaccaaaaaatccatacrctac

SEQ ID NO: 11930 - DNA, 50 bp, synthetic construct
  source 1..50: mol_type = other DNA
taaaaaactaaattatacccrtaatatctaaataaacrcctataaaccrc

SEQ ID NO: 11931 - DNA, 50 bp, synthetic construct
  source 1..50: mol_type = other DNA
cataaaaaactaaattatacccrtaatatctaaataaacrcctataaacc

SEQ ID NO: 11932 - DNA, 50 bp, synthetic construct
  source 1..50: mol_type = other DNA
acrttcacccaaatattacraatacaacctaatttcttataaaatacctc

SEQ ID NO: 11933 - DNA, 50 bp, synthetic construct
  source 1..50: mol_type = other DNA
ttacraatacaacctaatttcttataaaatacctcrcccctaaaatacrc

SEQ ID NO: 11934 - DNA, 50 bp, synthetic construct
  source 1..50: mol_type = other DNA
aatcaaaaaattataaaacraccctacttacaccraaccaaccaaaaatc

SEQ ID NO: 11935 - DNA, 50 bp, synthetic construct
  source 1..50: mol_type = other DNA
atcaaaaaattccaaattcractcctaactaactcratataaacaaaatc

SEQ ID NO: 11936 - DNA, 50 bp, synthetic construct
  source 1..50: mol_type = other DNA
ctcctaactaactcratataaacaaaatcrttttacaactttctaactcc

SEQ ID NO: 11937 - DNA, 50 bp, synthetic construct
  source 1..50: mol_type = other DNA
taatcaataacaaaatactccrcaaaaaaataataaccccatatattatc

SEQ ID NO: 11938 - DNA, 50 bp, synthetic construct
  source 1..50: mol_type = other DNA
rtttctctaacrtaattaacrttaccacrtaatcaataacaaaatactcc

SEQ ID NO: 11939 - DNA, 50 bp, synthetic construct
  source 1..50: mol_type = other DNA
taaaattatcatttctttacraaacattctaccactaaccacrtaataac

SEQ ID NO: 11940 - DNA, 50 bp, synthetic construct
  source 1..50: mol_type = other DNA
taaccaaacaaaactaaacacaacttaaataaaacraacrtttctctaac

SEQ ID NO: 11941 - DNA, 50 bp, synthetic construct
  source 1..50: mol_type = other DNA
aaaacacaataaaaactttaatttaatctctaaacratccttcrttcttc

SEQ ID NO: 11942 - DNA, 50 bp, synthetic construct
  source 1..50: mol_type = other DNA
caaattatacccaaccttacctaaccattttaaccraaaaacraaaaacc

SEQ ID NO: 11943 - DNA, 50 bp, synthetic construct
  source 1..50: mol_type = other DNA
cccactaaaaacttatttttcaaaataaataattcttcctacctaattcc

SEQ ID NO: 11944 - DNA, 50 bp, synthetic construct
  source 1..50: mol_type = other DNA
taaacaaaaaaaactatttactctaaaaaataaacccttaataaatttcc

SEQ ID NO: 11945 - DNA, 50 bp, synthetic construct
  source 1..50: mol_type = other DNA
actctaaaaaataaacccttaataaatttccrtaatataataattatcac

SEQ ID NO: 11946 - DNA, 50 bp, synthetic construct
  source 1..50: mol_type = other DNA
aacccttaataaatttccrtaatataataattatcacrttcrcctcacac

SEQ ID NO: 11947 - DNA, 50 bp, synthetic construct
  source 1..50: mol_type = other DNA
tcattttccraaataacrcacaaaatctataaaacacttacccraatctc

SEQ ID NO: 11948 - DNA, 50 bp, synthetic construct
  source 1..50: mol_type = other DNA
tcataaccraaaccaactaacaaaaaaatcctaaatatacraaaaacrac

SEQ ID NO: 11949 - DNA, 50 bp, synthetic construct
  source 1..50: mol_type = other DNA
taatcataaccraaaccaactaacaaaaaaatcctaaatatacraaaaac

SEQ ID NO: 11950 - DNA, 50 bp, synthetic construct
  source 1..50: mol_type = other DNA
aaacccctaatcataaccraaaccaactaacaaaaaaatcctaaatatac

SEQ ID NO: 11951 - DNA, 50 bp, synthetic construct
  source 1..50: mol_type = other DNA
aaaaattcacactcraaactcaaaaaaaatactacrattactctaaaaac

SEQ ID NO: 11952 - DNA, 50 bp, synthetic construct
  source 1..50: mol_type = other DNA
aattcaacttttcccaaaaattcacactcraaactcaaaaaaaatactac

SEQ ID NO: 11953 - DNA, 50 bp, synthetic construct
  source 1..50: mol_type = other DNA
ctctctataaccccacctctaaattcaacttttcccaaaaattcacactc

SEQ ID NO: 11954 - DNA, 50 bp, synthetic construct
  source 1..50: mol_type = other DNA
ccctaaaaaaaactaaatccaaaaataaaatcacaaaaaaccrcaaaccc

SEQ ID NO: 11955 - DNA, 50 bp, synthetic construct
  source 1..50: mol_type = other DNA
aataaaatcacaaaaaaccrcaaacccraccraaataaaaaatcctaatc

SEQ ID NO: 11956 - DNA, 50 bp, synthetic construct
  source 1..50: mol_type = other DNA
catctccccatacttacaaatatatatctaaaataaacactttcctccrc

SEQ ID NO: 11957 - DNA, 50 bp, synthetic construct
  source 1..50: mol_type = other DNA
cacatctccccatacttacaaatatatatctaaaataaacactttcctcc

SEQ ID NO: 11958 - DNA, 50 bp, synthetic construct
  source 1..50: mol_type = other DNA
aaaaactaaaaatacctaactttctaaaaatacaacccaacaaaaatccc

SEQ ID NO: 11959 - DNA, 50 bp, synthetic construct
  source 1..50: mol_type = other DNA
taaaaatacctaactttctaaaaatacaacccaacaaaaatcccracctc

SEQ ID NO: 11960 - DNA, 50 bp, synthetic construct
  source 1..50: mol_type = other DNA
tttataactctccctaattatttataaaaaatttctactaccaccccacc

SEQ ID NO: 11961 - DNA, 50 bp, synthetic construct
  source 1..50: mol_type = other DNA
taccctaaaaacaaaccatataccacaaataaaactcattaataaattcc

SEQ ID NO: 11962 - DNA, 50 bp, synthetic construct
  source 1..50: mol_type = other DNA
atttttattattcccctacraaaaaccratacactaaaacaaccaaattc

SEQ ID NO: 11963 - DNA, 50 bp, synthetic construct
  source 1..50: mol_type = other DNA
aaaaataaatctcaactcaacacraacraatttaactactctaatacacc

SEQ ID NO: 11964 - DNA, 50 bp, synthetic construct
  source 1..50: mol_type = other DNA
ttttaaaacttcttaaaaacaaataaccrattaactcaattaattaaaac

SEQ ID NO: 11965 - DNA, 50 bp, synthetic construct
  source 1..50: mol_type = other DNA
ataacaatcctcaaacaattaatttttccttatctttaaccrtaaattac

SEQ ID NO: 11966 - DNA, 50 bp, synthetic construct
  source 1..50: mol_type = other DNA
tttcttataataacaatcctcaaacaattaatttttccttatctttaacc

SEQ ID NO: 11967 - DNA, 50 bp, synthetic construct
  source 1..50: mol_type = other DNA
ctttcrcccaaccttaatatataaattaaaacttaccaattaaaaacrcc

SEQ ID NO: 11968 - DNA, 50 bp, synthetic construct
  source 1..50: mol_type = other DNA
aaacaaaaccrtaatctatataacaaaataatacttaacrctataacaac

SEQ ID NO: 11969 - DNA, 50 bp, synthetic construct
  source 1..50: mol_type = other DNA
caaaatattaaaaacctttaaattatttaaactttcctcrttactacaac

SEQ ID NO: 11970 - DNA, 50 bp, synthetic construct
  source 1..50: mol_type = other DNA
acrattctactttcttctaaaaaaaaacattttttctctcctcctaaaac

SEQ ID NO: 11971 - DNA, 50 bp, synthetic construct
  source 1..50: mol_type = other DNA
atcaaatactttatattaaaatataattacaaccctacccccttttctac

SEQ ID NO: 11972 - DNA, 50 bp, synthetic construct
  source 1..50: mol_type = other DNA
caattcttacccctcctaccaaactatataaccctcaaaaaaatatctac

SEQ ID NO: 11973 - DNA, 50 bp, synthetic construct
  source 1..50: mol_type = other DNA
atcctcraacccaaacaatttcctaaaccctctctataacccaataaaac

SEQ ID NO: 11974 - DNA, 50 bp, synthetic construct
  source 1..50: mol_type = other DNA
cccrattaccaatataactccaaacataatcccaaaaaccttaaatcctc

SEQ ID NO: 11975 - DNA, 50 bp, synthetic construct
  source 1..50: mol_type = other DNA
ctcraaaacctaaaatccttaaaactatacttaaaaccacattaataacc

SEQ ID NO: 11976 - DNA, 50 bp, synthetic construct
  source 1..50: mol_type = other DNA
tctacattttccctcttttccccattctcaccaatttatattaataaacc

SEQ ID NO: 11977 - DNA, 50 bp, synthetic construct
  source 1..50: mol_type = other DNA
ctaaaattaaaaatctcatactctaccractaaactaaccraactcaccc

SEQ ID NO: 11978 - DNA, 50 bp, synthetic construct
  source 1..50: mol_type = other DNA
aaacccractaactcaatcrataaaacataaaactcttaatctcaaaatc

SEQ ID NO: 11979 - DNA, 50 bp, synthetic construct
  source 1..50: mol_type = other DNA
tcrataaaacataaaactcttaatctcaaaatcrtaaattcraaccccac

SEQ ID NO: 11980 - DNA, 50 bp, synthetic construct
  source 1..50: mol_type = other DNA
aacataaaactcttaatctcaaaatcrtaaattcraaccccacrttaaac

SEQ ID NO: 11981 - DNA, 50 bp, synthetic construct
  source 1..50: mol_type = other DNA
attcccttcttccaaaaaaataaactttaataataccctttttttaaacc

SEQ ID NO: 11982 - DNA, 50 bp, synthetic construct
  source 1..50: mol_type = other DNA
aaaaattatataatcatcrtaaccattttaaccttactaacttaactaac

SEQ ID NO: 11983 - DNA, 50 bp, synthetic construct
  source 1..50: mol_type = other DNA
aaatcaacccaaaaacttattaaatatacaaaaactcataccctaccaac

SEQ ID NO: 11984 - DNA, 50 bp, synthetic construct
  source 1..50: mol_type = other DNA
caaaaaaaacccataaccataaattaaaaaaacataccacacacctcttc

SEQ ID NO: 11985 - DNA, 50 bp, synthetic construct
  source 1..50: mol_type = other DNA
tccttaacattttatatttctttttataaactaataaaaataatactccc

SEQ ID NO: 11986 - DNA, 50 bp, synthetic construct
  source 1..50: mol_type = other DNA
ctctacraaaaattaaacaatcrtaaatacttatcrtcctatttacctac

SEQ ID NO: 11987 - DNA, 50 bp, synthetic construct
  source 1..50: mol_type = other DNA
ractttcacttcccrctaaaaataccatctctacraaaaattaaacaatc

SEQ ID NO: 11988 - DNA, 50 bp, synthetic construct
  source 1..50: mol_type = other DNA
rattacccaaccttccrcaaaaataacatccccaacraaaaataaaaatc

SEQ ID NO: 11989 - DNA, 50 bp, synthetic construct
  source 1..50: mol_type = other DNA
craaccaacracctaaaaatatctaaaaacacaaccaactacaatcctcc

SEQ ID NO: 11990 - DNA, 50 bp, synthetic construct
  source 1..50: mol_type = other DNA
taataaaacraaaaactataattaactatatccttaaacatccttaaatc

SEQ ID NO: 11991 - DNA, 50 bp, synthetic construct
  source 1..50: mol_type = other DNA
craaaaactataattaactatatccttaaacatccttaaatcrctaattc

SEQ ID NO: 11992 - DNA, 50 bp, synthetic construct
  source 1..50: mol_type = other DNA
actataattaactatatccttaaacatccttaaatcrctaattcraatcc

SEQ ID NO: 11993 - DNA, 50 bp, synthetic construct
  source 1..50: mol_type = other DNA
aattaactatatccttaaacatccttaaatcrctaattcraatccractc

SEQ ID NO: 11994 - DNA, 50 bp, synthetic construct
  source 1..50: mol_type = other DNA
atcaattacaaactaaaccactaacrtctaaaccctatacatctaaaacc

SEQ ID NO: 11995 - DNA, 50 bp, synthetic construct
  source 1..50: mol_type = other DNA
aaatctccccaaataattctaatatcraccacatattctctactaaaatc

SEQ ID NO: 11996 - DNA, 50 bp, synthetic construct
  source 1..50: mol_type = other DNA
aaacccaaacataaatactttataaaatctccccaaataattctaatatc

SEQ ID NO: 11997 - DNA, 50 bp, synthetic construct
  source 1..50: mol_type = other DNA
taattccctaatcctcaaattattctatcrtaaacaaaactaaatacttc

SEQ ID NO: 11998 - DNA, 50 bp, synthetic construct
  source 1..50: mol_type = other DNA
cataaaaacccatctactcrataattccctaatcctcaaattattctatc

SEQ ID NO: 11999 - DNA, 50 bp, synthetic construct
  source 1..50: mol_type = other DNA
aatacccaactctatctacrataaaacaatctaaaaactaaaaaaccacc

SEQ ID NO: 12000 - DNA, 50 bp, synthetic construct
  source 1..50: mol_type = other DNA
tctttccataaatatcttactaacacataaacaactaacaacacactccc

SEQ ID NO: 12001 - DNA, 50 bp, synthetic construct
  source 1..50: mol_type = other DNA
ataaaaaacrttttcccacacraaaaattaactcaaataataaaacrctc

SEQ ID NO: 12002 - DNA, 50 bp, synthetic construct
  source 1..50: mol_type = other DNA
atactaaacraacrctctaccatttaaactaattccccrtataaaaaaac

SEQ ID NO: 12003 - DNA, 50 bp, synthetic construct
  source 1..50: mol_type = other DNA
ctatatacaataataactaaaaaacctcaacataacttccrcccctcaac

SEQ ID NO: 12004 - DNA, 50 bp, synthetic construct
  source 1..50: mol_type = other DNA
caatattaaactcttcccraacccccaaaacaactatttctataaacttc

SEQ ID NO: 12005 - DNA, 50 bp, synthetic construct
  source 1..50: mol_type = other DNA
aaccaaaaccraacctcattacttaaaaaacttaattttcccttctaacc

SEQ ID NO: 12006 - DNA, 50 bp, synthetic construct
  source 1..50: mol_type = other DNA
tttttatctaactttatcrctaccraaaaaccttataaccacaaaaaaac

SEQ ID NO: 12007 - DNA, 50 bp, synthetic construct
  source 1..50: mol_type = other DNA
tatctaactttatcrctaccraaaaaccttataaccacaaaaaaacrtac

SEQ ID NO: 12008 - DNA, 50 bp, synthetic construct
  source 1..50: mol_type = other DNA
acrtacrtcccatttaatttctttattctaatttctataatcctaatttc

SEQ ID NO: 12009 - DNA, 50 bp, synthetic construct
  source 1..50: mol_type = other DNA
caaatattaaaaattatcttaaaatctttaaaaaacctactataccctac

SEQ ID NO: 12010 - DNA, 50 bp, synthetic construct
  source 1..50: mol_type = other DNA
acccccaccattttaaacaaaaaaattaaaaactcaaatattaaccaaac

SEQ ID NO: 12011 - DNA, 50 bp, synthetic construct
  source 1..50: mol_type = other DNA
acaaaaatcaaccrtaaacrataacraataactataatcttaactacttc

SEQ ID NO: 12012 - DNA, 50 bp, synthetic construct
  source 1..50: mol_type = other DNA
ttacaataaacaaaaattacaccactactctccaacctaaataacacaac

SEQ ID NO: 12013 - DNA, 50 bp, synthetic construct
  source 1..50: mol_type = other DNA
tttaacctccccttactcttttctatttattttctataactctattaaac

SEQ ID NO: 12014 - DNA, 50 bp, synthetic construct
  source 1..50: mol_type = other DNA
ctcaaattctctaataactaaaactactacaaacacatactaccaaaccc

SEQ ID NO: 12015 - DNA, 50 bp, synthetic construct
  source 1..50: mol_type = other DNA
acaataataccaaaatactttattcacaaccctaaaatcctcatcaaccc

SEQ ID NO: 12016 - DNA, 50 bp, synthetic construct
  source 1..50: mol_type = other DNA
attaaaatatttatatataactcaaaccaaaaaccttactaaaatccccc

SEQ ID NO: 12017 - DNA, 50 bp, synthetic construct
  source 1..50: mol_type = other DNA
tttataaacccataaaaccaattacctaaaacattacacaaaatacttcc

SEQ ID NO: 12018 - DNA, 50 bp, synthetic construct
  source 1..50: mol_type = other DNA
aaaacattacacaaaatacttccratatataaaaatactactttaaaacc

SEQ ID NO: 12019 - DNA, 50 bp, synthetic construct
  source 1..50: mol_type = other DNA
cattacacaaaatacttccratatataaaaatactactttaaaaccratc

SEQ ID NO: 12020 - DNA, 50 bp, synthetic construct
  source 1..50: mol_type = other DNA
ataaacactaacatcttcaaaacacaatacaattaataaaataaaaacac

SEQ ID NO: 12021 - DNA, 50 bp, synthetic construct
  source 1..50: mol_type = other DNA
atttataattaaataacaataaacraaatttatcrctctcatcrtacccc

SEQ ID NO: 12022 - DNA, 50 bp, synthetic construct
  source 1..50: mol_type = other DNA
aaacacctacctaacaaaaaattctcttcaataaaattaataaaacaaac

SEQ ID NO: 12023 - DNA, 50 bp, synthetic construct
  source 1..50: mol_type = other DNA
aaccctacactctttcataaaatatctaaaaatctaataataaacttctc

SEQ ID NO: 12024 - DNA, 50 bp, synthetic construct
  source 1..50: mol_type = other DNA
ctatcaacataaatccrtccttactacracctaacaaaatttcccatctc

SEQ ID NO: 12025 - DNA, 50 bp, synthetic construct
  source 1..50: mol_type = other DNA
cracaaactaactacaaaaaacaatactaaaaaccrcrtacaaataatcc

SEQ ID NO: 12026 - DNA, 50 bp, synthetic construct
  source 1..50: mol_type = other DNA
craattacttatacrcrattcccaacactatcctttacaatcaacttatc

SEQ ID NO: 12027 - DNA, 50 bp, synthetic construct
  source 1..50: mol_type = other DNA
ctaaacttaacttaaaaataatccrcaaaccrcctaataaaaacaaaacc

SEQ ID NO: 12028 - DNA, 50 bp, synthetic construct
  source 1..50: mol_type = other DNA
aacttaacttaaaaataatccrcaaaccrcctaataaaaacaaaaccrcc

SEQ ID NO: 12029 - DNA, 50 bp, synthetic construct
  source 1..50: mol_type = other DNA
aattccctatcaaatcacaaaccacttttccttctataacctacrcaacc

SEQ ID NO: 12030 - DNA, 50 bp, synthetic construct
  source 1..50: mol_type = other DNA
tcctcaaattccctatcaaatcacaaaccacttttccttctataacctac

SEQ ID NO: 12031 - DNA, 50 bp, synthetic construct
  source 1..50: mol_type = other DNA
acaaatatttacaacataaatatacatataaataatatatcaatacacac

SEQ ID NO: 12032 - DNA, 50 bp, synthetic construct
  source 1..50: mol_type = other DNA
ctatatattctaacratcaaaataacattttattcaaaaaccccraatac

SEQ ID NO: 12033 - DNA, 50 bp, synthetic construct
  source 1..50: mol_type = other DNA
aaatttataaactttaaaaaataaatcattcctcaactaaaatcrcaccc

SEQ ID NO: 12034 - DNA, 50 bp, synthetic construct
  source 1..50: mol_type = other DNA
taaaaatctaccttttctaattctacctatcctaaattaaaaatctaacc

SEQ ID NO: 12035 - DNA, 50 bp, synthetic construct
  source 1..50: mol_type = other DNA
aacaacaaaaaacraataataccaaatattatatacctaaaccatatccc

SEQ ID NO: 12036 - DNA, 50 bp, synthetic construct
  source 1..50: mol_type = other DNA
aacaaaaaacraataataccaaatattatatacctaaaccatatcccrcc

SEQ ID NO: 12037 - DNA, 50 bp, synthetic construct
  source 1..50: mol_type = other DNA
caaaaaacraataataccaaatattatatacctaaaccatatcccrccrc

SEQ ID NO: 12038 - DNA, 50 bp, synthetic construct
  source 1..50: mol_type = other DNA
atacttaactcctaactaataaatcaatctataaaaatactaaaataaac

SEQ ID NO: 12039 - DNA, 50 bp, synthetic construct
  source 1..50: mol_type = other DNA
atcctacaccaaaaactacaccraaaaataaataaaattccrtaacaaac

SEQ ID NO: 12040 - DNA, 50 bp, synthetic construct
  source 1..50: mol_type = other DNA
aattccaaaaatcataacraaaaaaactacrcctacraacacccataaac

SEQ ID NO: 12041 - DNA, 50 bp, synthetic construct
  source 1..50: mol_type = other DNA
tcttctcaccttaaaattccaaaaatcataacraaaaaaactacrcctac

SEQ ID NO: 12042 - DNA, 50 bp, synthetic construct
  source 1..50: mol_type = other DNA
atataacaaaaaaatctatcttctcaccttaaaattccaaaaatcataac

SEQ ID NO: 12043 - DNA, 50 bp, synthetic construct
  source 1..50: mol_type = other DNA
ttatttattttactacctaaacttttaatatctatcatatttataaaatc

SEQ ID NO: 12044 - DNA, 50 bp, synthetic construct
  source 1..50: mol_type = other DNA
ctaaatttaaaatacaaccaaataaccttttattaattaaaaatcacacc

SEQ ID NO: 12045 - DNA, 50 bp, synthetic construct
  source 1..50: mol_type = other DNA
accttttattaattaaaaatcacaccratactctaaaattccttaaaaac

SEQ ID NO: 12046 - DNA, 50 bp, synthetic construct
  source 1..50: mol_type = other DNA
acaaatttcaaactttaatttacataaaaaaactaattaaaaaccttaac

SEQ ID NO: 12047 - DNA, 50 bp, synthetic construct
  source 1..50: mol_type = other DNA
ttcaaactttaatttacataaaaaaactaattaaaaaccttaacraaaac

SEQ ID NO: 12048 - DNA, 50 bp, synthetic construct
  source 1..50: mol_type = other DNA
cacctaaaaaataaatctaaatatcaaacctcaaaacaaatcataaaacc

SEQ ID NO: 12049 - DNA, 50 bp, synthetic construct
  source 1..50: mol_type = other DNA
attcacaccattcttctacctcaaccttccaaataactaaaactacaaac

SEQ ID NO: 12050 - DNA, 50 bp, synthetic construct
  source 1..50: mol_type = other DNA
ctacataatataacacctctacrttatcttcaacctcacaaaccatctcc

SEQ ID NO: 12051 - DNA, 50 bp, synthetic construct
  source 1..50: mol_type = other DNA
cacaacacttatcaccattcaactttataatatacattttatatttattc

SEQ ID NO: 12052 - DNA, 50 bp, synthetic construct
  source 1..50: mol_type = other DNA
atattactttaaaaaataccttacaatatttactatctctaaaaactacc

SEQ ID NO: 12053 - DNA, 50 bp, synthetic construct
  source 1..50: mol_type = other DNA
aaaattctcttctttcaacttttcattaaccatctttcaatcctccrtcc

SEQ ID NO: 12054 - DNA, 50 bp, synthetic construct
  source 1..50: mol_type = other DNA
acraaaaccaaaccatactcaatatccaaaaacaaaaactactcccactc

SEQ ID NO: 12055 - DNA, 50 bp, synthetic construct
  source 1..50: mol_type = other DNA
aaccatactcaatatccaaaaacaaaaactactcccactcractataacc

SEQ ID NO: 12056 - DNA, 50 bp, synthetic construct
  source 1..50: mol_type = other DNA
craatatccraaaaataaccraaaatactatccccaaacctaaaaacrac

SEQ ID NO: 12057 - DNA, 50 bp, synthetic construct
  source 1..50: mol_type = other DNA
attcraatatccraaaaataaccraaaatactatccccaaacctaaaaac

SEQ ID NO: 12058 - DNA, 50 bp, synthetic construct
  source 1..50: mol_type = other DNA
caactcctctaatctaaacrcacraaaaaaattactcctaaatcttatcc

SEQ ID NO: 12059 - DNA, 50 bp, synthetic construct
  source 1..50: mol_type = other DNA
ctattaaaacrctctataaacracctaaccccaactcctctaatctaaac

SEQ ID NO: 12060 - DNA, 50 bp, synthetic construct
  source 1..50: mol_type = other DNA
aaaaatttacrtaaccraccttataaacccttaaaacrctctattaaaac

SEQ ID NO: 12061 - DNA, 50 bp, synthetic construct
  source 1..50: mol_type = other DNA
ccaaccaacttaaaaaaatttacrtaaccraccttataaacccttaaaac

SEQ ID NO: 12062 - DNA, 50 bp, synthetic construct
  source 1..50: mol_type = other DNA
aaatccaccacttttaaaaacatttcttccatctcrctaaccacatcttc

SEQ ID NO: 12063 - DNA, 50 bp, synthetic construct
  source 1..50: mol_type = other DNA
aaattctaaaacacaataacaacrctatcatccacraaaatataaccaac

SEQ ID NO: 12064 - DNA, 50 bp, synthetic construct
  source 1..50: mol_type = other DNA
caaaaacataatcaacaaaaactaaaaaacctcccacaatactttctctc

SEQ ID NO: 12065 - DNA, 50 bp, synthetic construct
  source 1..50: mol_type = other DNA
cacctataattcaatatctacrtctaaaaaaacactttattactacaccc

SEQ ID NO: 12066 - DNA, 50 bp, synthetic construct
  source 1..50: mol_type = other DNA
acaatatttcttccccataacraatacaacaacaaaatactctcttaaac

SEQ ID NO: 12067 - DNA, 50 bp, synthetic construct
  source 1..50: mol_type = other DNA
acaacttatcaaaacttatcaaatataacaaaaacaatactaaaaaaaac

SEQ ID NO: 12068 - DNA, 50 bp, synthetic construct
  source 1..50: mol_type = other DNA
tttctttcttctactaactttacrtttaatttattcttctttctaatccc

SEQ ID NO: 12069 - DNA, 50 bp, synthetic construct
  source 1..50: mol_type = other DNA
atttatttctatactaatctttattattttctttcttctactaactttac

SEQ ID NO: 12070 - DNA, 50 bp, synthetic construct
  source 1..50: mol_type = other DNA
caactaaaacaaacccaaaactaaatctctaaaattcataatatctctac

SEQ ID NO: 12071 - DNA, 50 bp, synthetic construct
  source 1..50: mol_type = other DNA
cctaaacctacttcaattactttaacctaaaatttcaactcccaaatccc

SEQ ID NO: 12072 - DNA, 50 bp, synthetic construct
  source 1..50: mol_type = other DNA
actaaccacaaaaaatacaacccaacrccacttcctttcaataacaacac

SEQ ID NO: 12073 - DNA, 50 bp, synthetic construct
  source 1..50: mol_type = other DNA
raaatccttaaaataaaatttaccaaacrcattcctttccrctcacttcc

SEQ ID NO: 12074 - DNA, 50 bp, synthetic construct
  source 1..50: mol_type = other DNA
aaaaaattacraaatccttaaaataaaatttaccaaacrcattcctttcc

SEQ ID NO: 12075 - DNA, 50 bp, synthetic construct
  source 1..50: mol_type = other DNA
taaatcccactttaaaaatttcrtaatcctcccaaaaattcccaccaccc

SEQ ID NO: 12076 - DNA, 50 bp, synthetic construct
  source 1..50: mol_type = other DNA
caaatattccctaaaaaaccttcaaataaccrccrtataaacraactaac

SEQ ID NO: 12077 - DNA, 50 bp, synthetic construct
  source 1..50: mol_type = other DNA
acaaacrctcccactacctcaaatattccctaaaaaaccttcaaataacc

SEQ ID NO: 12078 - DNA, 50 bp, synthetic construct
  source 1..50: mol_type = other DNA
cacracraccacttaaaaatcctccaaaaaacacctaaaacaataaaaac

SEQ ID NO: 12079 - DNA, 50 bp, synthetic construct
  source 1..50: mol_type = other DNA
aacaataaaaacrtctaccctttcctaaatctccttaaaaaaaaatattc

SEQ ID NO: 12080 - DNA, 50 bp, synthetic construct
  source 1..50: mol_type = other DNA
ttttccaacccaaaataacattacttaaaatacctttccccctataatcc

SEQ ID NO: 12081 - DNA, 50 bp, synthetic construct
  source 1..50: mol_type = other DNA
ccaaaataacattacttaaaatacctttccccctataatccractccatc

SEQ ID NO: 12082 - DNA, 50 bp, synthetic construct
  source 1..50: mol_type = other DNA
tacttctcttttattaattaaatttacaccttaaatatcattctaatacc

SEQ ID NO: 12083 - DNA, 50 bp, synthetic construct
  source 1..50: mol_type = other DNA
aaatacttatatattcctctaccaatatatttatcttaacrtccaaccrc

SEQ ID NO: 12084 - DNA, 50 bp, synthetic construct
  source 1..50: mol_type = other DNA
ccaaatacttatatattcctctaccaatatatttatcttaacrtccaacc

SEQ ID NO: 12085 - DNA, 50 bp, synthetic construct
  source 1..50: mol_type = other DNA
ctccacatccaaatacttatatattcctctaccaatatatttatcttaac

SEQ ID NO: 12086 - DNA, 50 bp, synthetic construct
  source 1..50: mol_type = other DNA
tctaaacccaaatataatctaattcttccaatacaccaaaacaaaaaccc

SEQ ID NO: 12087 - DNA, 50 bp, synthetic construct
  source 1..50: mol_type = other DNA
accccaataaacrtacrccctatactcttttaattttactacctataaac

SEQ ID NO: 12088 - DNA, 50 bp, synthetic construct
  source 1..50: mol_type = other DNA
tcaccttattaaccaaactaatcttaaactcttaacttcataatccaccc

SEQ ID NO: 12089 - DNA, 50 bp, synthetic construct
  source 1..50: mol_type = other DNA
raatataaaaaatcccraattcaaatcccraacraacccacttcattttc

SEQ ID NO: 12090 - DNA, 50 bp, synthetic construct
  source 1..50: mol_type = other DNA
rcatcaacattccratatctacccttaaaaaaaatccraattcaatactc

SEQ ID NO: 12091 - DNA, 50 bp, synthetic construct
  source 1..50: mol_type = other DNA
tatctaaacaaacraatactaaatccraacttcttctaaaaacaaacacc

SEQ ID NO: 12092 - DNA, 50 bp, synthetic construct
  source 1..50: mol_type = other DNA
raatactaaatccraacttcttctaaaaacaaacaccraaatattaatac

SEQ ID NO: 12093 - DNA, 50 bp, synthetic construct
  source 1..50: mol_type = other DNA
craacttcttctaaaaacaaacaccraaatattaatacractacaactac

SEQ ID NO: 12094 - DNA, 50 bp, synthetic construct
  source 1..50: mol_type = other DNA
aaataaaaatctccccaaatactactaataccactactcccactacaatc

SEQ ID NO: 12095 - DNA, 50 bp, synthetic construct
  source 1..50: mol_type = other DNA
caactttcaacactaaaaaataacatatcatactcattaactatacatcc

SEQ ID NO: 12096 - DNA, 50 bp, synthetic construct
  source 1..50: mol_type = other DNA
tcaaaacataataaaaacrtaattaccraaccratctctccctttcttcc

SEQ ID NO: 12097 - DNA, 50 bp, synthetic construct
  source 1..50: mol_type = other DNA
taaaactcacacaaatattcaaaacataataaaaacrtaattaccraacc

SEQ ID NO: 12098 - DNA, 50 bp, synthetic construct
  source 1..50: mol_type = other DNA
tttcrtaaaactcacacaaatattcaaaacataataaaaacrtaattacc

SEQ ID NO: 12099 - DNA, 50 bp, synthetic construct
  source 1..50: mol_type = other DNA
raacttaactttcrtaaaactcacacaaatattcaaaacataataaaaac

SEQ ID NO: 12100 - DNA, 50 bp, synthetic construct
  source 1..50: mol_type = other DNA
acccracaattacrtttctatcatatcttaaacatttatataaatcccac

SEQ ID NO: 12101 - DNA, 50 bp, synthetic construct
  source 1..50: mol_type = other DNA
ttaaacatttatataaatcccacraaaactaaacccrtttattccccctc

SEQ ID NO: 12102 - DNA, 50 bp, synthetic construct
  source 1..50: mol_type = other DNA
taaccraataattaaaacrataaactactaatccattatactctacacrc

SEQ ID NO: 12103 - DNA, 50 bp, synthetic construct
  source 1..50: mol_type = other DNA
taaaacctaatattttatctttaatatactacaattaaccacttttattc

SEQ ID NO: 12104 - DNA, 50 bp, synthetic construct
  source 1..50: mol_type = other DNA
aacccaaataattccccactatcaataattactaaataaaatctattttc

SEQ ID NO: 12105 - DNA, 50 bp, synthetic construct
  source 1..50: mol_type = other DNA
ccaaaaaaatttactatttatttcaatcaacrtctaaaaataaaaccctc

SEQ ID NO: 12106 - DNA, 50 bp, synthetic construct
  source 1..50: mol_type = other DNA
aaaaactcaattaataccrccaaaaaaatttactatttatttcaatcaac

SEQ ID NO: 12107 - DNA, 50 bp, synthetic construct
  source 1..50: mol_type = other DNA
aataaccccratcttctcaaatacctacctaaaaaaactcaattaatacc

SEQ ID NO: 12108 - DNA, 50 bp, synthetic construct
  source 1..50: mol_type = other DNA
cttaatctataaaaacctaaacaaacccraacataattactaataacccc

SEQ ID NO: 12109 - DNA, 50 bp, synthetic construct
  source 1..50: mol_type = other DNA
ctcttctaaactaaataaccaccttaatctataaaaacctaaacaaaccc

SEQ ID NO: 12110 - DNA, 50 bp, synthetic construct
  source 1..50: mol_type = other DNA
aattcccccatctacttaacaaaaattctctttttaaccaaactctaaac

SEQ ID NO: 12111 - DNA, 50 bp, synthetic construct
  source 1..50: mol_type = other DNA
aaatatacaaaaaatactataaaccatcacatccccaacaacccccaacc

SEQ ID NO: 12112 - DNA, 50 bp, synthetic construct
  source 1..50: mol_type = other DNA
rccatcttataacaataacraataaactaatataaccaaaactttatttc

SEQ ID NO: 12113 - DNA, 50 bp, synthetic construct
  source 1..50: mol_type = other DNA
ctaatcraaatcataaaacraaacaaaattttaactacattaacctatcc

SEQ ID NO: 12114 - DNA, 50 bp, synthetic construct
  source 1..50: mol_type = other DNA
caactcataaaactaaacaaaattttaactacattatcccatccattatc

SEQ ID NO: 12115 - DNA, 50 bp, synthetic construct
  source 1..50: mol_type = other DNA
taaacaaaattttaactacattatcccatccattatcrccacaaaataac

SEQ ID NO: 12116 - DNA, 50 bp, synthetic construct
  source 1..50: mol_type = other DNA
cttctctacatataaattcctctcaaaataaccctttattaaccaaaaac

SEQ ID NO: 12117 - DNA, 50 bp, synthetic construct
  source 1..50: mol_type = other DNA
atcctaaaacaaacacaaaaatataaaaaatcctacacttcccaaatctc

SEQ ID NO: 12118 - DNA, 50 bp, synthetic construct
  source 1..50: mol_type = other DNA
ctaaaacaaacacaaaaatataaaaaatcctacacttcccaaatctcrtc

SEQ ID NO: 12119 - DNA, 50 bp, synthetic construct
  source 1..50: mol_type = other DNA
rcacaaacttcaacaattaccaacatcttacccattttatttcattatcc

SEQ ID NO: 12120 - DNA, 50 bp, synthetic construct
  source 1..50: mol_type = other DNA
acatattttaaaaactctacaaacaattttcaaaaactaaacaaatatcc

SEQ ID NO: 12121 - DNA, 50 bp, synthetic construct
  source 1..50: mol_type = other DNA
aacatctaaaacaattaatatttttattaaatccactatcaaatacacac

SEQ ID NO: 12122 - DNA, 50 bp, synthetic construct
  source 1..50: mol_type = other DNA
atatctatataaacaaaaacattaaaaacctaaacaaaacaattcraaac

SEQ ID NO: 12123 - DNA, 50 bp, synthetic construct
  source 1..50: mol_type = other DNA
aaaaaaacrctctatccaacraaaactaattaaaaataaatctccttccc

SEQ ID NO: 12124 - DNA, 50 bp, synthetic construct
  source 1..50: mol_type = other DNA
tccttacaaactcaataaactatcaatttctcattctttaatattttatc

SEQ ID NO: 12125 - DNA, 50 bp, synthetic construct
  source 1..50: mol_type = other DNA
rcccttcctctacatcctaattaattattatatccaaaaaatccacratc

SEQ ID NO: 12126 - DNA, 50 bp, synthetic construct
  source 1..50: mol_type = other DNA
aaaacaataccaaattacaacrattatcaatttaaatttacccraacaac

SEQ ID NO: 12127 - DNA, 50 bp, synthetic construct
  source 1..50: mol_type = other DNA
aattcaaactaacaaccrctacaacttaacactattccaaatcactaacc

SEQ ID NO: 12128 - DNA, 50 bp, synthetic construct
  source 1..50: mol_type = other DNA
aaaccaattaaaatacrttaaaaaccaattaaaatactcrtcratccccc

SEQ ID NO: 12129 - DNA, 50 bp, synthetic construct
  source 1..50: mol_type = other DNA
aaaaaaccrttaaaattaaaaatttacaaccaactcactatttacttaac

SEQ ID NO: 12130 - DNA, 50 bp, synthetic construct
  source 1..50: mol_type = other DNA
aaaatttacaaccaactcactatttacttaacrctaatatacttaataac

SEQ ID NO: 12131 - DNA, 50 bp, synthetic construct
  source 1..50: mol_type = other DNA
ctcactatttacttaacrctaatatacttaataacraccttaataccctc

SEQ ID NO: 12132 - DNA, 50 bp, synthetic construct
  source 1..50: mol_type = other DNA
atttacttaacrctaatatacttaataacraccttaataccctcraacac

SEQ ID NO: 12133 - DNA, 50 bp, synthetic construct
  source 1..50: mol_type = other DNA
tttcrtccaaaaccataaacatcataaattcrtttataaacracattttc

SEQ ID NO: 12134 - DNA, 50 bp, synthetic construct
  source 1..50: mol_type = other DNA
acrctttataactacacaatactataccaaaaccaacraaatctactccc

SEQ ID NO: 12135 - DNA, 50 bp, synthetic construct
  source 1..50: mol_type = other DNA
ttccttttcrttaacrctttataactacacaatactataccaaaaccaac

SEQ ID NO: 12136 - DNA, 50 bp, synthetic construct
  source 1..50: mol_type = other DNA
acraaaacaaacttcrctaactctaacataacactatataactataaaac

SEQ ID NO: 12137 - DNA, 50 bp, synthetic construct
  source 1..50: mol_type = other DNA
tatttacataaacrattctatataaaaacrccttatcataccctactcac

SEQ ID NO: 12138 - DNA, 50 bp, synthetic construct
  source 1..50: mol_type = other DNA
aactaccaatcaaacacaaaacttcaactcttcaccttatttacataaac

SEQ ID NO: 12139 - DNA, 50 bp, synthetic construct
  source 1..50: mol_type = other DNA
taattaaaattaaactacaaccctaaccaacaacacrtcttctttttcrc

SEQ ID NO: 12140 - DNA, 50 bp, synthetic construct
  source 1..50: mol_type = other DNA
caacaacttattaaactcctcrtcrttacraataaccaattaaaaataac

SEQ ID NO: 12141 - DNA, 50 bp, synthetic construct; identical to SEQ ID NO: 12140
  source 1..50: mol_type = other DNA

SEQ ID NO: 12142 - DNA, 50 bp, synthetic construct
  source 1..50: mol_type = other DNA
ctatacrataataactttacccaacaacttattaaactcctcrtcrttac

SEQ ID NO: 12143 - DNA, 50 bp, synthetic construct
  source 1..50: mol_type = other DNA
tttttaaacaataacacracctaaatattaaacaaaacaccrccctatac

SEQ ID NO: 12144 - DNA, 50 bp, synthetic construct
  source 1..50: mol_type = other DNA
ctctcaatctttttaaacaataacacracctaaatattaaacaaaacacc

SEQ ID NO: 12145 - DNA, 50 bp, synthetic construct
  source 1..50: mol_type = other DNA
tacttacccttcrccttataataactctcaatctttttaaacaataacac

SEQ ID NO: 12146 - DNA, 50 bp, synthetic construct
  source 1..50: mol_type = other DNA
crattttacttaaactaccacaaactaatacaaataattacttacccttc

SEQ ID NO: 12147 - DNA, 50 bp, synthetic construct
  source 1..50: mol_type = other DNA
acttaattttaaacttaatcaatatatatccacaaaacaccaataacttc

SEQ ID NO: 12148 - DNA, 50 bp, synthetic construct
  source 1..50: mol_type = other DNA
caccaataacttcrtaaattcttaaaacactttaacccaaaaaaattatc

SEQ ID NO: 12149 - DNA, 50 bp, synthetic construct
  source 1..50: mol_type = other DNA
acccaaaaaaattatcrcccraactaaaatttaacaaacaactattccac

SEQ ID NO: 12150 - DNA, 50 bp, synthetic construct
  source 1..50: mol_type = other DNA
aaaaataaactattatatcacaaaattcttcaacctcrctctcrtacaac

SEQ ID NO: 12151 - DNA, 50 bp, synthetic construct
  source 1..50: mol_type = other DNA
tttacaaaaaaataaactattatatcacaaaattcttcaacctcrctctc

SEQ ID NO: 12152 - DNA, 50 bp, synthetic construct
  source 1..50: mol_type = other DNA
aaaacctttacaaaaaaataaactattatatcacaaaattcttcaacctc

SEQ ID NO: 12153 - DNA, 50 bp, synthetic construct
  source 1..50: mol_type = other DNA
ttacaaaaaactaccaatcttactaaaaaacctcaatttatatcaaaaac

SEQ ID NO: 12154 - DNA, 50 bp, synthetic construct
  source 1..50: mol_type = other DNA
acataaatattccttatttaactacaacaccaaaaattatttacactacc

SEQ ID NO: 12155 - DNA, 50 bp, synthetic construct
  source 1..50: mol_type = other DNA
raaaccrataaatcacraaatcaaaacatcaaaaccatcctaactaacac

SEQ ID NO: 12156 - DNA, 50 bp, synthetic construct
  source 1..50: mol_type = other DNA
actaatattctaaaataaactaatattctaaatttatttactattcccac

SEQ ID NO: 12157 - DNA, 50 bp, synthetic construct
  source 1..50: mol_type = other DNA
taatattctaaaataaactaatattctaaatttatttactattcccacrc

SEQ ID NO: 12158 - DNA, 50 bp, synthetic construct
  source 1..50: mol_type = other DNA
ttcccacrcrttttaactttaaatacacatacccctaatctattttaatc

SEQ ID NO: 12159 - DNA, 50 bp, synthetic construct
  source 1..50: mol_type = other DNA
atttcaaaaaaaccttactatccaattcaaaccaaatcaaaacataaacc

SEQ ID NO: 12160 - DNA, 50 bp, synthetic construct
  source 1..50: mol_type = other DNA
atcttttatcaaatcttcccttaactcrctcttaatactactcttacaac

SEQ ID NO: 12161 - DNA, 50 bp, synthetic construct
  source 1..50: mol_type = other DNA
tacttatttaaaaaataaaatcaatcttttatcaaatcttcccttaactc

SEQ ID NO: 12162 - DNA, 50 bp, synthetic construct
  source 1..50: mol_type = other DNA
atactaaccaaacaaatctcaaactcctaatcttataatccacccacctc

SEQ ID NO: 12163 - DNA, 50 bp, synthetic construct
  source 1..50: mol_type = other DNA
caatttattactcttaaaacactactcaaataaaaatataatataaccac

SEQ ID NO: 12164 - DNA, 50 bp, synthetic construct
  source 1..50: mol_type = other DNA
taaaacaaataaacaaatttcccaaacccaatacrataactcactaaccc

SEQ ID NO: 12165 - DNA, 50 bp, synthetic construct
  source 1..50: mol_type = other DNA
aataaacaaatttcccaaacccaatacrataactcactaacccrattcac

SEQ ID NO: 12166 - DNA, 50 bp, synthetic construct
  source 1..50: mol_type = other DNA
tctaaaccacaacaattcaatctaacaattattacaacctactaaaaaac

SEQ ID NO: 12167 - DNA, 50 bp, synthetic construct
  source 1..50: mol_type = other DNA
aaaacrccatcraaaaccaaatttactaatatataaactcacrttaaaac

SEQ ID NO: 12168 - DNA, 50 bp, synthetic construct
  source 1..50: mol_type = other DNA
tcraatactataacttcctattaaaacttattaaaaacctattatatcac

SEQ ID NO: 12169 - DNA, 50 bp, synthetic construct
  source 1..50: mol_type = other DNA
acrtaacacaataaactttcaacaaattctaacaaaaaatcacaacactc

SEQ ID NO: 12170 - DNA, 50 bp, synthetic construct
  source 1..50: mol_type = other DNA
aatatacaaaaaacttatattaacaaaaaatacttcctaactcttaacrc

SEQ ID NO: 12171 - DNA, 50 bp, synthetic construct
  source 1..50: mol_type = other DNA
ttctaacaaaaaatcacaacactcracacaacraaaatatccattttcrc

SEQ ID NO: 12172 - DNA, 50 bp, synthetic construct
  source 1..50: mol_type = other DNA
aaacactttctattaacacaaatttcctacacatccctaattttttaaac

SEQ ID NO: 12173 - DNA, 50 bp, synthetic construct
  source 1..50: mol_type = other DNA
tcctcactcaatactaacaaaatatatataacttctccttaaccaaactc

SEQ ID NO: 12174 - DNA, 50 bp, synthetic construct
  source 1..50: mol_type = other DNA
ttaaaaaaaataccratatcraaataaacctacttcaacaccttatacac

SEQ ID NO: 12175 - DNA, 50 bp, synthetic construct
  source 1..50: mol_type = other DNA
tacttaccacrtccaaacatactaatcacaacttactaaaaataaccaac

SEQ ID NO: 12176 - DNA, 50 bp, synthetic construct
  source 1..50: mol_type = other DNA
acctttcctcrttaactactttcaataaattataaccaatatatctaaac

SEQ ID NO: 12177 - DNA, 50 bp, synthetic construct
  source 1..50: mol_type = other DNA
actactttcaataaattataaccaatatatctaaacrtaacaaacaaaac

SEQ ID NO: 12178 - DNA, 50 bp, synthetic construct
  source 1..50: mol_type = other DNA
ataaattataaccaatatatctaaacrtaacaaacaaaacrataaaactc

SEQ ID NO: 12179 - DNA, 50 bp, synthetic construct
  source 1..50: mol_type = other DNA
actaaaatacctaaccrctaaaatcctaaaactaactaacaatacraccc

SEQ ID NO: 12180 - DNA, 50 bp, synthetic construct
  source 1..50: mol_type = other DNA
tcttcttaaacaacaacacracctaaatattaaacaaaacaccaccctac

SEQ ID NO: 12181 - DNA, 50 bp, synthetic construct
  source 1..50: mol_type = other DNA
atataaaataactctaaaaaaaacctttattttccaattttcacaacctc

SEQ ID NO: 12182 - DNA, 50 bp, synthetic construct
  source 1..50: mol_type = other DNA
ctattaatataataaaattattacactaaaaaccraacrctataactcac

SEQ ID NO: 12183 - DNA, 50 bp, synthetic construct
  source 1..50: mol_type = other DNA
tatttaacaacactattaatataataaaattattacactaaaaaccraac

SEQ ID NO: 12184 - DNA, 50 bp, synthetic construct
  source 1..50: mol_type = other DNA
taactatttaacaacactattaatataataaaattattacactaaaaacc

SEQ ID NO: 12185 - DNA, 50 bp, synthetic construct
  source 1..50: mol_type = other DNA
ttctcctatattattaaataaaattctatttaatctctataaaatctttc

SEQ ID NO: 12186 - DNA, 50 bp, synthetic construct
  source 1..50: mol_type = other DNA
ttctttctataaaatcattctaatcttaaactcctaaactcaactaatcc

SEQ ID NO: 12187 - DNA, 50 bp, synthetic construct
  source 1..50: mol_type = other DNA
accccrcttactattttaaaaacrtaacctctaaaatcaaaatcctaatc

SEQ ID NO: 12188 - DNA, 50 bp, synthetic construct
  source 1..50: mol_type = other DNA
aacacraccaaaaccttaactctaaaaactacrttcctaaaacaacaaac

SEQ ID NO: 12189 - DNA, 50 bp, synthetic construct
  source 1..50: mol_type = other DNA
atataacttcrtcctaacccaaatacctataaaaaaccaataaaacrctc

SEQ ID NO: 12190 - DNA, 50 bp, synthetic construct
  source 1..50: mol_type = other DNA
tcracaaataccaaaaataaatttctcatcacraaaaactatataacttc

SEQ ID NO: 12191 - DNA, 50 bp, synthetic construct
  source 1..50: mol_type = other DNA
ataatactatacttataaactcattattctcacttctatctccaacccac

SEQ ID NO: 12192 - DNA, 50 bp, synthetic construct
  source 1..50: mol_type = other DNA
ataataaatttacaaacacaatattaccaacccccaaaaacaaccaccac

SEQ ID NO: 12193 - DNA, 50 bp, synthetic construct
  source 1..50: mol_type = other DNA
accaaaaaccrctacttataaaactcttcctttacttatttcccaaaaac

SEQ ID NO: 12194 - DNA, 50 bp, synthetic construct
  source 1..50: mol_type = other DNA
cactccaatatattaaaaaattaaaacracrtcaaaatactactcaatac

SEQ ID NO: 12195 - DNA, 50 bp, synthetic construct
  source 1..50: mol_type = other DNA
aataccttaatatcrcctcaatttctcaacrtactaaacaataccttaac

SEQ ID NO: 12196 - DNA, 50 bp, synthetic construct
  source 1..50: mol_type = other DNA
taccttaacrtcrcctcaatttttcaacatactaaaataaaaacaatctc

SEQ ID NO: 12197 - DNA, 50 bp, synthetic construct
  source 1..50: mol_type = other DNA
taaaataaaaacaatctcraaaaaacccttacaaaattaaattaacttac

SEQ ID NO: 12198 - DNA, 50 bp, synthetic construct
  source 1..50: mol_type = other DNA
ccaaccaaataaactcttaaacctaaaaacctaaaaaaatacactatctc

SEQ ID NO: 12199 - DNA, 50 bp, synthetic construct
  source 1..50: mol_type = other DNA
ctcttaaacctaaaaacctaaaaaaatacactatctcrcctcctaacctc

SEQ ID NO: 12200 - DNA, 50 bp, synthetic construct
  source 1..50: mol_type = other DNA
cttaaaacrcacaactataaatttcraatcctaataactacraaaccacc

SEQ ID NO: 12201 - DNA, 50 bp, synthetic construct
  source 1..50: mol_type = other DNA
aactacaaacttaaaacrcacaactataaatttcraatcctaataactac

SEQ ID NO: 12202 - DNA, 50 bp, synthetic construct
  source 1..50: mol_type = other DNA
taaacttacaactccacaaacrataaaatcaaacttaaccctacaatacc

SEQ ID NO: 12203 - DNA, 50 bp, synthetic construct
  source 1..50: mol_type = other DNA
aaaaatcaaaaactcttaaaaaaaaccrtcccrctaatcctttcatttac

SEQ ID NO: 12204 - DNA, 50 bp, synthetic construct
  source 1..50: mol_type = other DNA
aataaaaaaaccaacraaacractcctttcaaaaatctctaactccttcc

SEQ ID NO: 12205 - DNA, 50 bp, synthetic construct
  source 1..50: mol_type = other DNA
aatctttaaaaaaaaacttaattatcccaacactctaaattacctaaccc

SEQ ID NO: 12206 - DNA, 50 bp, synthetic construct
  source 1..50: mol_type = other DNA
ctttcttatcataaattacaaaaattatacrtcaatcctacctacccccc

SEQ ID NO: 12207 - DNA, 50 bp, synthetic construct
  source 1..50: mol_type = other DNA
crattaactaaaacttaaactttaacaaataaaataaaccctaaatttac

SEQ ID NO: 12208 - DNA, 50 bp, synthetic construct
  source 1..50: mol_type = other DNA
crcaaatccaaaatttaccctatttaccaaaatttaaatcttaaccaatc

SEQ ID NO: 12209 - DNA, 50 bp, synthetic construct
  source 1..50: mol_type = other DNA
aaaataaacctccraaccaaccaaaaatcraacctaaaatcttctaatcc

SEQ ID NO: 12210 - DNA, 50 bp, synthetic construct
  source 1..50: mol_type = other DNA
ccacaaaaacaatcrcrctttactaaaatccacaatcttattcaatatac

SEQ ID NO: 12211 - DNA, 50 bp, synthetic construct
  source 1..50: mol_type = other DNA
tacaatacaaccaaacrtacattaaacaaaactataaattctaacaaaac

SEQ ID NO: 12212 - DNA, 50 bp, synthetic construct
  source 1..50: mol_type = other DNA
caatacaaccaaacrtacattaaacaaaactataaattctaacaaaacrc

SEQ ID NO: 12213 - DNA, 50 bp, synthetic construct
  source 1..50: mol_type = other DNA
aaaccctatctctattaaaaacacaaaaaattaacctaacrtaataacrc

SEQ ID NO: 12214 - DNA, 50 bp, synthetic construct
  source 1..50: mol_type = other DNA
taaaaccctatctctattaaaaacacaaaaaattaacctaacrtaataac

SEQ ID NO: 12215 - DNA, 50 bp, synthetic construct
  source 1..50: mol_type = other DNA
caacataataaaaccctatctctattaaaaacacaaaaaattaacctaac

SEQ ID NO: 12216 - DNA, 50 bp, synthetic construct
  source 1..50: mol_type = other DNA
aacrcaaactaaataaccaataatcaaaaacrcaaccraaaaccaataac

SEQ ID NO: 12217 - DNA, 50 bp, synthetic construct
  source 1..50: mol_type = other DNA
ataaccaataatcaaaaacrcaaccraaaaccaataacrcaataaataac

SEQ ID NO: 12218 - DNA, 50 bp, synthetic construct
  source 1..50: mol_type = other DNA
aaaattaacacccraaccaaccaaaaatcraacctaaaatcttctaatcc

SEQ ID NO: 12219 - DNA, 50 bp, synthetic construct
  source 1..50: mol_type = other DNA
ttcttctatacctatacttacccaaacaatttcttcatttattttccccc

SEQ ID NO: 12220 - DNA, 50 bp, synthetic construct
  source 1..50: mol_type = other DNA
raaactaaatcrcrttaacaaacataaaacaaaacattaccaaaatcrcc

SEQ ID NO: 12221 - DNA, 50 bp, synthetic construct
  source 1..50: mol_type = other DNA
atcraaactaaatcrcrttaacaaacataaaacaaaacattaccaaaatc

SEQ ID NO: 12222 - DNA, 50 bp, synthetic construct
  source 1..50: mol_type = other DNA
tataacaaaaaaactcrcaaactcttcttaatacratcrtaaaactaaac

SEQ ID NO: 12223 - DNA, 50 bp, synthetic construct
  source 1..50: mol_type = other DNA
ttaatatcaatatataacaaaaaaactcrcaaactcttcttaatacratc

SEQ ID NO: 12224 - DNA, 50 bp, synthetic construct
  source 1..50: mol_type = other DNA
tttcttaatatcaatatataacaaaaaaactcrcaaactcttcttaatac

SEQ ID NO: 12225 - DNA, 50 bp, synthetic construct
  source 1..50: mol_type = other DNA
aatccctttcaaatccratttcttaatatcaatatataacaaaaaaactc

SEQ ID NO: 12226 - DNA, 50 bp, synthetic construct
  source 1..50: mol_type = other DNA
actacatactaacattaaaaaaccraacttaaaaaaaatcccaaacaaac

SEQ ID NO: 12227 - DNA, 50 bp, synthetic construct
  source 1..50: mol_type = other DNA
ataaaacaaataactctcctttccaaatatttctaaatttaatccccrac

SEQ ID NO: 12228 - DNA, 50 bp, synthetic construct
  source 1..50: mol_type = other DNA
actctcctttccaaatatttctaaatttaatccccracrcctaaaacatc

SEQ ID NO: 12229 - DNA, 50 bp, synthetic construct
  source 1..50: mol_type = other DNA
cccracrcctaaaacatcrtaaaaaaacttacataaaaaatcaaaatatc

SEQ ID NO: 12230 - DNA, 50 bp, synthetic construct
  source 1..50: mol_type = other DNA
acacrcacaaacaaaaaataccttaatttataatatactcaatatttatc

SEQ ID NO: 12231 - DNA, 50 bp, synthetic construct
  source 1..50: mol_type = other DNA
taaaaaattcrttaaattcccaacacccatcacatcrcacattatctatc

SEQ ID NO: 12232 - DNA, 50 bp, synthetic construct
  source 1..50: mol_type = other DNA
aaaatctaaacrcrtaaaaaattcrttaaattcccaacacccatcacatc

SEQ ID NO: 12233 - DNA, 50 bp, synthetic construct
  source 1..50: mol_type = other DNA
ataaacaatatacratataataaatactaaaaacttaacraactctccac

SEQ ID NO: 12234 - DNA, 50 bp, synthetic construct
  source 1..50: mol_type = other DNA
ataaatcccraaaaactaaatataatactccttctcaaaaattctccaac

SEQ ID NO: 12235 - DNA, 50 bp, synthetic construct
  source 1..50: mol_type = other DNA
ttaataaacctcatcaaaaaatcracrtaaaatcactaaaaataaatccc

SEQ ID NO: 12236 - DNA, 50 bp, synthetic construct
  source 1..50: mol_type = other DNA
taatcracatcacccaactaaaaattaataaacctcatcaaaaaatcrac

SEQ ID NO: 12237 - DNA, 50 bp, synthetic construct
  source 1..50: mol_type = other DNA
atctaatcracatcacccaactaaaaattaataaacctcatcaaaaaatc

SEQ ID NO: 12238 - DNA, 50 bp, synthetic construct
  source 1..50: mol_type = other DNA
tctacrtcrattctttaataaaacccattaatttttaactaaataatacc

SEQ ID NO: 12239 - DNA, 50 bp, synthetic construct
  source 1..50: mol_type = other DNA
ttaatttttaactaaataataccraccaaactataaataacactatattc

SEQ ID NO: 12240 - DNA, 50 bp, synthetic construct
  source 1..50: mol_type = other DNA
aataccraccaaactataaataacactatattcrtacattttcttttatc

SEQ ID NO: 12241 - DNA, 50 bp, synthetic construct
  source 1..50: mol_type = other DNA
aaaattataaatcccactcccrataaacrctcaatttttcaccttctacc

SEQ ID NO: 12242 - DNA, 50 bp, synthetic construct
  source 1..50: mol_type = other DNA
attaattaaaacccaataacataaaattataaatcccactcccrataaac

SEQ ID NO: 12243 - DNA, 50 bp, synthetic construct
  source 1..50: mol_type = other DNA
tacctcrattaattaaaacccaataacataaaattataaatcccactccc

SEQ ID NO: 12244 - DNA, 50 bp, synthetic construct
  source 1..50: mol_type = other DNA
cctataatatcttaactaaacatttctaatctaaaaaactatttacattc

SEQ ID NO: 12245 - DNA, 50 bp, synthetic construct
  source 1..50: mol_type = other DNA
aactaaacatttctaatctaaaaaactatttacattcracaatcttactc

SEQ ID NO: 12246 - DNA, 50 bp, synthetic construct
  source 1..50: mol_type = other DNA
tacttataaaattcrcttttacctacatcaaaaccaaaaaaaacctaaac

SEQ ID NO: 12247 - DNA, 50 bp, synthetic construct
  source 1..50: mol_type = other DNA
aaacctaaacrcaaaatatttcacaatttcccttcttttaaaactaaatc

SEQ ID NO: 12248 - DNA, 50 bp, synthetic construct
  source 1..50: mol_type = other DNA
actaatataacaaccttctcactttacrtataaacrcttcaaataataac

SEQ ID NO: 12249 - DNA, 50 bp, synthetic construct
  source 1..50: mol_type = other DNA
tatacttacataaaaactaatataacaaccttctcactttacrtataaac

SEQ ID NO: 12250 - DNA, 50 bp, synthetic construct
  source 1..50: mol_type = other DNA
tattaatttttatataaacatacctaacttccaactctacracaaaaacc

SEQ ID NO: 12251 - DNA, 50 bp, synthetic construct
  source 1..50: mol_type = other DNA
tttttatataaacatacctaacttccaactctacracaaaaaccrcaaac

SEQ ID NO: 12252 - DNA, 50 bp, synthetic construct
  source 1..50: mol_type = other DNA
ataactaaataattaaaacrttaaacttaaaatccaataaacaaatatcc

SEQ ID NO: 12253 - DNA, 50 bp, synthetic construct
  source 1..50: mol_type = other DNA
rttaacaacaaaactaactattatcaccraaataactaaataattaaaac

SEQ ID NO: 12254 - DNA, 50 bp, synthetic construct
  source 1..50: mol_type = other DNA
tacaaattctaacctaataaacrttaacaacaaaactaactattatcacc

SEQ ID NO: 12255 - DNA, 50 bp, synthetic construct
  source 1..50: mol_type = other DNA
ataaaattactcataatcttccaaaaactacaaattctaacctaataaac

SEQ ID NO: 12256 - DNA, 50 bp, synthetic construct
  source 1..50: mol_type = other DNA
aaaaatttattaactttatacactcttttaaacataatcctaattttcrc

SEQ ID NO: 12257 - DNA, 50 bp, synthetic construct
  source 1..50: mol_type = other DNA
aaaaaaatttattaactttatacactcttttaaacataatcctaattttc

SEQ ID NO: 12258 - DNA, 50 bp, synthetic construct
  source 1..50: mol_type = other DNA
aaaaatcaaaaataattcrtctttccctaacacctaacataatacctatc

SEQ ID NO: 12259 - DNA, 50 bp, synthetic construct
  source 1..50: mol_type = other DNA
aaaattcaactctaatcctaacattaacaaacrtaaatttccctcaacac

SEQ ID NO: 12260 - DNA, 50 bp, synthetic construct
  source 1..50: mol_type = other DNA
raaaattactaaatctttaaaattcaactctaatcctaacattaacaaac

SEQ ID NO: 12261 - DNA, 50 bp, synthetic construct
  source 1..50: mol_type = other DNA
rcctatcaatactaaaatcaaaactaaatcctaaaaattcaacaacctcc

SEQ ID NO: 12262 - DNA, 50 bp, synthetic construct
  source 1..50: mol_type = other DNA
aatactaaaatcaaaactaaatcctaaaaattcaacaacctccrcctccc

SEQ ID NO: 12263 - DNA, 50 bp, synthetic construct
  source 1..50: mol_type = other DNA
tatataaaaaactcttttctctaacatattctttcctacacccaacaatc

SEQ ID NO: 12264 - DNA, 50 bp, synthetic construct
  source 1..50: mol_type = other DNA
tatttatttaatattattctatcccctaaataataaaactatttttctac

SEQ ID NO: 12265 - DNA, 50 bp, synthetic construct
  source 1..50: mol_type = other DNA
caaaataacattaaacaaacaaacaaaactaaaaacacaaacaataaacc

SEQ ID NO: 12266 - DNA, 50 bp, synthetic construct
  source 1..50: mol_type = other DNA
tacaaaaattaaccraaaataataacatacrcctataaccccaactactc

SEQ ID NO: 12267 - DNA, 50 bp, synthetic construct
  source 1..50: mol_type = other DNA
tataatctcraactcttataaaaacaacttatacaaaattctttaaacrc

SEQ ID NO: 12268 - DNA, 50 bp, synthetic construct
  source 1..50: mol_type = other DNA
tatataatctcraactcttataaaaacaacttatacaaaattctttaaac

SEQ ID NO: 12269 - DNA, 50 bp, synthetic construct
  source 1..50: mol_type = other DNA
aaaatcrcatatctttctacctctatatcacttactcrctatataatctc

SEQ ID NO: 12270 - DNA, 50 bp, synthetic construct
  source 1..50: mol_type = other DNA
aataatctaacraaacratttctaaacatctcaacttcrttcatataacc

SEQ ID NO: 12271 - DNA, 50 bp, synthetic construct
  source 1..50: mol_type = other DNA
aaaaaaatcataaataatctaacraaacratttctaaacatctcaacttc

SEQ ID NO: 12272 - DNA, 50 bp, synthetic construct
  source 1..50: mol_type = other DNA
aaattataaacractacataaacraaattaaaatactcaaaaatcrtccc

SEQ ID NO: 12273 - DNA, 50 bp, synthetic construct
  source 1..50: mol_type = other DNA
attactacaaatattctccaaaccttcctctataatttcttccrataacc

SEQ ID NO: 12274 - DNA, 50 bp, synthetic construct
  source 1..50: mol_type = other DNA
atttaataacaataattttctaacracattaataacaaataaaacccaac

SEQ ID NO: 12275 - DNA, 50 bp, synthetic construct
  source 1..50: mol_type = other DNA
cccaacaatctaaatttctacaatttatttaataacaataattttctaac

SEQ ID NO: 12276 - DNA, 50 bp, synthetic construct
  source 1..50: mol_type = other DNA
aacaaaatattcctaacctcttcaccacaaaaatttctaaaatcraaacc

SEQ ID NO: 12277 - DNA, 50 bp, synthetic construct
  source 1..50: mol_type = other DNA
tataataaaaaaatcaaaaatactctactaaatacraactaacattatcc

SEQ ID NO: 12278 - DNA, 50 bp, synthetic construct
  source 1..50: mol_type = other DNA
caaaaatactctactaaatacraactaacattatccrccttatcraaacc

SEQ ID NO: 12279 - DNA, 50 bp, synthetic construct
  source 1..50: mol_type = other DNA
attatatttaactaaatattcaaaaaccccaatttcccacaatctatctc

SEQ ID NO: 12280 - DNA, 50 bp, synthetic construct
  source 1..50: mol_type = other DNA
aaccattatttcccaaaaactttaccattatttttaatatcttatttatc

SEQ ID NO: 12281 - DNA, 50 bp, synthetic construct
  source 1..50: mol_type = other DNA
tactaaaaatataattctaatcaccattccaaaaaccrttaaacccaatc

SEQ ID NO: 12282 - DNA, 50 bp, synthetic construct
  source 1..50: mol_type = other DNA
taatattaaaaaatactaaaaatataattctaatcaccattccaaaaacc

SEQ ID NO: 12283 - DNA, 50 bp, synthetic construct
  source 1..50: mol_type = other DNA
ctatatattccttcaaattcctaaaataacctcaaatcaaaaatcrcttc

SEQ ID NO: 12284 - DNA, 50 bp, synthetic construct
  source 1..50: mol_type = other DNA
tcttcctatatattccttcaaattcctaaaataacctcaaatcaaaaatc

SEQ ID NO: 12285 - DNA, 50 bp, synthetic construct
  source 1..50: mol_type = other DNA
aaaaaatattcccaacraatctaattctcrataatcccataatcraaatc

SEQ ID NO: 12286 - DNA, 50 bp, synthetic construct
  source 1..50: mol_type = other DNA
atacttaaaaaatattcccaacraatctaattctcrataatcccataatc

SEQ ID NO: 12287 - DNA, 50 bp, synthetic construct
  source 1..50: mol_type = other DNA
taaaaatctaaacataaaaaacctaaaacratctcratcataaaaccatc

SEQ ID NO: 12288 - DNA, 50 bp, synthetic construct
  source 1..50: mol_type = other DNA
ataaaaaacctaaaacratctcratcataaaaccatcraaaatcaaactc

SEQ ID NO: 12289 - DNA, 50 bp, synthetic construct
  source 1..50: mol_type = other DNA
tactaccttctaaatatctaatcaatacatacaaacaataaatcaaattc

SEQ ID NO: 12290 - DNA, 50 bp, synthetic construct
  source 1..50: mol_type = other DNA
atatttccataaattactaaaccattaaccacaatttaaaatatttaaac

SEQ ID NO: 12291 - DNA, 50 bp, synthetic construct
  source 1..50: mol_type = other DNA
aaaccattaaccacaatttaaaatatttaaacrtcctctttcaaatctac

SEQ ID NO: 12292 - DNA, 50 bp, synthetic construct
  source 1..50: mol_type = other DNA
aaacrtcctctttcaaatctacraatacaaccattttactttatttttac

SEQ ID NO: 12293 - DNA, 50 bp, synthetic construct
  source 1..50: mol_type = other DNA
tttacttaaattaaactctcttactcactatcactcctttatacrcttcc

SEQ ID NO: 12294 - DNA, 50 bp, synthetic construct
  source 1..50: mol_type = other DNA
tacatttttacttaaattaaactctcttactcactatcactcctttatac

SEQ ID NO: 12295 - DNA, 50 bp, synthetic construct
  source 1..50: mol_type = other DNA
ttttaaatcaacaataaattaaatccattacatacaaaacccataattac

SEQ ID NO: 12296 - DNA, 50 bp, synthetic construct
  source 1..50: mol_type = other DNA
atacaataaattcaacctactactaatctaaaatacttaaaaaaccctac

SEQ ID NO: 12297 - DNA, 50 bp, synthetic construct
  source 1..50: mol_type = other DNA
attcaacctactactaatctaaaatacttaaaaaaccctacrtctatacc

SEQ ID NO: 12298 - DNA, 50 bp, synthetic construct
  source 1..50: mol_type = other DNA
atttacatcacrtaaaacaacaatccccaacctttttaacactaaaaacc

SEQ ID NO: 12299 - DNA, 50 bp, synthetic construct
  source 1..50: mol_type = other DNA
ccaacctttttaacactaaaaaccratttaataaaaaacaatttttccac

SEQ ID NO: 12300 - DNA, 50 bp, synthetic construct
  source 1..50: mol_type = other DNA
cctttttaacactaaaaaccratttaataaaaaacaatttttccacraac

SEQ ID NO: 12301 - DNA, 50 bp, synthetic construct
  source 1..50: mol_type = other DNA
taacactaaaaaccratttaataaaaaacaatttttccacraacraaacc

SEQ ID NO: 12302 - DNA, 50 bp, synthetic construct
  source 1..50: mol_type = other DNA
ccatttctaaattatttatcacaccttatatcaaaaatccccaacctccc

SEQ ID NO: 12303 - DNA, 50 bp, synthetic construct
  source 1..50: mol_type = other DNA
ccttaatataaaataatcraatatttacttataacctatatacaccttcc

SEQ ID NO: 12304 - DNA, 50 bp, synthetic construct
  source 1..50: mol_type = other DNA
ctacraataataaaatctaccaatactcaaatccttaatataaaataatc

SEQ ID NO: 12305 - DNA, 50 bp, synthetic construct
  source 1..50: mol_type = other DNA
taaaatcaataatcttcaaaaaccrcttaacaaaataacrcaacraaaac

SEQ ID NO: 12306 - DNA, 50 bp, synthetic construct
  source 1..50: mol_type = other DNA
ataattaaaattaaaatcaataatcttcaaaaaccrcttaacaaaataac

SEQ ID NO: 12307 - DNA, 50 bp, synthetic construct
  source 1..50: mol_type = other DNA
ctaaaaaccactaatcttaatttcaatcatcaaaatcacctttcaatacc

SEQ ID NO: 12308 - DNA, 50 bp, synthetic construct
  source 1..50: mol_type = other DNA
caataccracaaaattttcattatctaattatttcattttatatctaatc

SEQ ID NO: 12309 - DNA, 50 bp, synthetic construct
  source 1..50: mol_type = other DNA
tcattttatatctaatcrtttacactatccctatctctaccaaacaaatc

SEQ ID NO: 12310 - DNA, 50 bp, synthetic construct
  source 1..50: mol_type = other DNA
tatctaatcrtttacactatccctatctctaccaaacaaatcraaaattc

SEQ ID NO: 12311 - DNA, 50 bp, synthetic construct
  source 1..50: mol_type = other DNA
attaaaaaaacacaaatctaaaaattataacctaaaaccatctaattatc

SEQ ID NO: 12312 - DNA, 50 bp, synthetic construct
  source 1..50: mol_type = other DNA
aaaataaacctaatatataactcaaattattacataacaactacaatttc

SEQ ID NO: 12313 - DNA, 50 bp, synthetic construct
  source 1..50: mol_type = other DNA
aactcaaattattacataacaactacaatttcrattaaatcccttttaac

SEQ ID NO: 12314 - DNA, 50 bp, synthetic construct
  source 1..50: mol_type = other DNA
tcaaattattacataacaactacaatttcrattaaatcccttttaacrcc

SEQ ID NO: 12315 - DNA, 50 bp, synthetic construct
  source 1..50: mol_type = other DNA
caactacaatttcrattaaatcccttttaacrccrttttaacaaaaacac

SEQ ID NO: 12316 - DNA, 50 bp, synthetic construct
  source 1..50: mol_type = other DNA
atatcaatcaaaaaacaaaacttttaaaaaatccctaaacaccaactctc

SEQ ID NO: 12317 - DNA, 50 bp, synthetic construct
  source 1..50: mol_type = other DNA
taaaaaatccctaaacaccaactctcrtttataacttcctttataataac

SEQ ID NO: 12318 - DNA, 50 bp, synthetic construct
  source 1..50: mol_type = other DNA
acactaaaactaaaaaactaccctctttaattttccttaataaaatactc

SEQ ID NO: 12319 - DNA, 50 bp, synthetic construct
  source 1..50: mol_type = other DNA
aattatatatataactaacaattcrataaaaatcctcraactccaaaccc

SEQ ID NO: 12320 - DNA, 50 bp, synthetic construct
  source 1..50: mol_type = other DNA
acatcrctccttacctaaaaaattcttaaacataacatcaaaaataattc

SEQ ID NO: 12321 - DNA, 50 bp, synthetic construct
  source 1..50: mol_type = other DNA
ttcacraattatttctaatatcatatctaaaaactcttcaaacaaaaaac

SEQ ID NO: 12322 - DNA, 50 bp, synthetic construct
  source 1..50: mol_type = other DNA
aacaaaaacttaaaccctaaaccctcaaattaaaaatctaatactctacc

SEQ ID NO: 12323 - DNA, 50 bp, synthetic construct
  source 1..50: mol_type = other DNA
raataataattaaactaattctataaaacttccactaaattactcttttc

SEQ ID NO: 12324 - DNA, 50 bp, synthetic construct
  source 1..50: mol_type = other DNA
raaaaaaataattcaataaaaattccacaaaatcaattcaaccaccattc

SEQ ID NO: 12325 - DNA, 50 bp, synthetic construct
  source 1..50: mol_type = other DNA
aacccaaaaaaaaattttaatcrtcttcatacaacccctactacacaaac

SEQ ID NO: 12326 - DNA, 50 bp, synthetic construct
  source 1..50: mol_type = other DNA
aaaaaacctaaaatcactaaaaaaacataaccaacrataatacaaaaaac

SEQ ID NO: 12327 - DNA, 50 bp, synthetic construct
  source 1..50: mol_type = other DNA
ataaccctaaacctcttacaaaaaaatccctaatcccaaccaacraaaac

SEQ ID NO: 12328 - DNA, 50 bp, synthetic construct
  source 1..50: mol_type = other DNA
ctatttctaacctctaaaaaccraactaaacccraaattttataaccaac

SEQ ID NO: 12329 - DNA, 50 bp, synthetic construct
  source 1..50: mol_type = other DNA
atttctcrcaaaactcccraaaacccttcttaatatcaataaccacaatc

SEQ ID NO: 12330 - DNA, 50 bp, synthetic construct
  source 1..50: mol_type = other DNA
raacctactcraaactctataaaattaaaaatcrtaaaaaacttctaaac

SEQ ID NO: 12331 - DNA, 50 bp, synthetic construct
  source 1..50: mol_type = other DNA
atatcctacraaaacccraacctactcraaactctataaaattaaaaatc

SEQ ID NO: 12332 - DNA, 50 bp, synthetic construct
  source 1..50: mol_type = other DNA
aaaataaaaactctcttttatacctacrtctatcrctaattccaaaaaac

SEQ ID NO: 12333 - DNA, 50 bp, synthetic construct
  source 1..50: mol_type = other DNA
ataaaaaaacctaaaacttctaaaaataccttactctttcaaaaaaaaac

SEQ ID NO: 12334 - DNA, 50 bp, synthetic construct
  source 1..50: mol_type = other DNA
aacttcaaactcctccacaaacraatacctacccacctatcaaataaaac

SEQ ID NO: 12335 - DNA, 50 bp, synthetic construct
  source 1..50: mol_type = other DNA
aatttacctatccraaaaaaactacrcttacataactctaactataaacc

SEQ ID NO: 12336 - DNA, 50 bp, synthetic construct
  source 1..50: mol_type = other DNA
aaaaaactacrcttacataactctaactataaaccractaactcttatcc

SEQ ID NO: 12337 - DNA, 50 bp, synthetic construct
  source 1..50: mol_type = other DNA
ataaaccractaactcttatccrcaaactacatttcccaaaattatctac

SEQ ID NO: 12338 - DNA, 50 bp, synthetic construct
  source 1..50: mol_type = other DNA
rttataccctaatcacaataaaaatatcacataaatcaaactctccaacc

SEQ ID NO: 12339 - DNA, 50 bp, synthetic construct
  source 1..50: mol_type = other DNA
tatcccttccttactttatataatttattcaattctttattcaaaacrcc

SEQ ID NO: 12340 - DNA, 50 bp, synthetic construct
  source 1..50: mol_type = other DNA
ctttatcccttccttactttatataatttattcaattctttattcaaaac

SEQ ID NO: 12341 - DNA, 50 bp, synthetic construct
  source 1..50: mol_type = other DNA
cratctaaactatactttacaatatattaaaataatcttcracacctctc

SEQ ID NO: 12342 - DNA, 50 bp, synthetic construct
  source 1..50: mol_type = other DNA
aaaattttacaaaacccctcccctaatatacraaaaactaaaaaattaac

SEQ ID NO: 12343 - DNA, 50 bp, synthetic construct
  source 1..50: mol_type = other DNA
rcttacrcctaaaaaccaactacaacaaaactatactaaaattcactttc

SEQ ID NO: 12344 - DNA, 50 bp, synthetic construct
  source 1..50: mol_type = other DNA
ttccacraaaataaatcccaacacaaccctactataactaactctcaaac

SEQ ID NO: 12345 - DNA, 50 bp, synthetic construct
  source 1..50: mol_type = other DNA
taacrcraacraccaattacaaaacaaaaaccacactaaaactaaacaac

SEQ ID NO: 12346 - DNA, 50 bp, synthetic construct
  source 1..50: mol_type = other DNA
ctactaatacrttactcaatctcaatataatctctattttacaactaatc

SEQ ID NO: 12347 - DNA, 50 bp, synthetic construct
  source 1..50: mol_type = other DNA
taatacrttactcaatctcaatataatctctattttacaactaatcrtcc

SEQ ID NO: 12348 - DNA, 50 bp, synthetic construct
  source 1..50: mol_type = other DNA
atacrttactcaatctcaatataatctctattttacaactaatcrtccrc

SEQ ID NO: 12349 - DNA, 50 bp, synthetic construct
  source 1..50: mol_type = other DNA
actaatcatactctactcratatacraaaccaatcattatctaaacaatc

SEQ ID NO: 12350 - DNA, 50 bp, synthetic construct
  source 1..50: mol_type = other DNA
caaacactcttccactcaaactactactaatcatactctactcratatac

SEQ ID NO: 12351 - DNA, 50 bp, synthetic construct
  source 1..50: mol_type = other DNA
aatacctataatcttaaaaaacctaataaacrttaaaacaacrattcrac

SEQ ID NO: 12352 - DNA, 50 bp, synthetic construct
  source 1..50: mol_type = other DNA
cttacaaaaccccraaaccaaaataaatactcttaaaaattctaaaaaac

SEQ ID NO: 12353 - DNA, 50 bp, synthetic construct
  source 1..50: mol_type = other DNA
aaaaaatcrcrtataatttaactacaaatcraatcaaaaaacacctccac

SEQ ID NO: 12354 - DNA, 50 bp, synthetic construct
  source 1..50: mol_type = other DNA
crtataatttaactacaaatcraatcaaaaaacacctccacrattaaaac

SEQ ID NO: 12355 - DNA, 50 bp, synthetic construct
  source 1..50: mol_type = other DNA
ataatttaactacaaatcraatcaaaaaacacctccacrattaaaacrcc

SEQ ID NO: 12356 - DNA, 50 bp, synthetic construct
  source 1..50: mol_type = other DNA
cccraaaaaaaccactaactatcactaccrcaaaaaaactaaactaaccc

SEQ ID NO: 12357 - DNA, 50 bp, synthetic construct
  source 1..50: mol_type = other DNA
aaaaaaacaaaaaacaaccctactctttttcatctcccaaaaatacaccc

SEQ ID NO: 12358 - DNA, 50 bp, synthetic construct
  source 1..50: mol_type = other DNA
cttaaaacaatacctacactcaataaacacctaaaaaacaccccaatacc

SEQ ID NO: 12359 - DNA, 50 bp, synthetic construct
  source 1..50: mol_type = other DNA
atttaattattcaataccttaactatcctttctaacttaataccactaac

SEQ ID NO: 12360 - DNA, 50 bp, synthetic construct
  source 1..50: mol_type = other DNA
tcaaatatttaatactccaatcataactattctcaaacctccatcacccc

SEQ ID NO: 12361 - DNA, 50 bp, synthetic construct
  source 1..50: mol_type = other DNA
actaaaaaaacrctacctaacraaccctaatattcaaattccaaaaaaac

SEQ ID NO: 12362 - DNA, 50 bp, synthetic construct
  source 1..50: mol_type = other DNA
aaacatctaaatcctaaaccraaataccaactaaaaaaacrctacctaac

SEQ ID NO: 12363 - DNA, 50 bp, synthetic construct
  source 1..50: mol_type = other DNA
aaaaaaaattaaacatctaaatcctaaaccraaataccaactaaaaaaac

SEQ ID NO: 12364 - DNA, 50 bp, synthetic construct
  source 1..50: mol_type = other DNA
acrtatactactaacrccatcctatatcttttaaaataaacaacctcaac

SEQ ID NO: 12365 - DNA, 50 bp, synthetic construct
  source 1..50: mol_type = other DNA
aaaaatctacaacacrctaaaattatctaccctaaaaaacacaaaataac

SEQ ID NO: 12366 - DNA, 50 bp, synthetic construct
  source 1..50: mol_type = other DNA
acrctaaaattatctaccctaaaaaacacaaaataacrtcaacaacatac

SEQ ID NO: 12367 - DNA, 50 bp, synthetic construct
  source 1..50: mol_type = other DNA
tacacaaaaaaaataccccaaaaaaacactaaaaaaatatataacactcc

SEQ ID NO: 12368 - DNA, 50 bp, synthetic construct
  source 1..50: mol_type = other DNA
ccccaactttctcctacaaaaacctctaaacrcraaatcaaaaaaataac

SEQ ID NO: 12369 - DNA, 50 bp, synthetic construct
  source 1..50: mol_type = other DNA
cactccrcraaaatattcctaaacttcatttcccaaaaactttaactaac

SEQ ID NO: 12370 - DNA, 50 bp, synthetic construct
  source 1..50: mol_type = other DNA
aacrtacatttcttataatcaattcaatcaaacaaatttacaatacacac

SEQ ID NO: 12371 - DNA, 50 bp, synthetic construct
  source 1..50: mol_type = other DNA
tataaacttatctaactaaactaattataaaaaatacacrtctactaacc

SEQ ID NO: 12372 - DNA, 50 bp, synthetic construct
  source 1..50: mol_type = other DNA
aacttatctaactaaactaattataaaaaatacacrtctactaaccraac

SEQ ID NO: 12373 - DNA, 50 bp, synthetic construct
  source 1..50: mol_type = other DNA
taaactaattataaaaaatacacrtctactaaccraacrcaataactcac

SEQ ID NO: 12374 - DNA, 50 bp, synthetic construct
  source 1..50: mol_type = other DNA
aattccaaaaaaaaattcataacaatctctttccttctaaaaaaacctcc

SEQ ID NO: 12375 - DNA, 50 bp, synthetic construct
  source 1..50: mol_type = other DNA
tactttaaactaaaaaaacaacctcaaaatcaaaatctctctaaccttcc

SEQ ID NO: 12376 - DNA, 50 bp, synthetic construct
  source 1..50: mol_type = other DNA
aatatattttcttttcctcttatacttccrtcttaaaatctaaaactacc

SEQ ID NO: 12377 - DNA, 50 bp, synthetic construct
  source 1..50: mol_type = other DNA
ctttaatttttaaccaaaacaaacrctccttctctcaaaatctaacccac

SEQ ID NO: 12378 - DNA, 50 bp, synthetic construct
  source 1..50: mol_type = other DNA
ataaaaactcataaacaatctataaatttctttcttaacccaactaaaac

SEQ ID NO: 12379 - DNA, 50 bp, synthetic construct
  source 1..50: mol_type = other DNA
tttcttaacccaactaaaacrtaaaaacrcattataaaatacaaaatacc

SEQ ID NO: 12380 - DNA, 50 bp, synthetic construct
  source 1..50: mol_type = other DNA
ctaaatctctaaactcacaccaacccaaaaaaatatatctacccratctc

SEQ ID NO: 12381 - DNA, 50 bp, synthetic construct
  source 1..50: mol_type = other DNA
caaatataaaatcctatttcctcrctaaactattctcaataaaacatccc

SEQ ID NO: 12382 - DNA, 50 bp, synthetic construct
  source 1..50: mol_type = other DNA
craatttctttactcccaaactaaaaacaaatataaaatcctatttcctc

SEQ ID NO: 12383 - DNA, 50 bp, synthetic construct
  source 1..50: mol_type = other DNA
aatcracaaaaattcaaactatattaaataacacrcaaaaactctatcac

SEQ ID NO: 12384 - DNA, 50 bp, synthetic construct
  source 1..50: mol_type = other DNA
caataaaacatcccraaatcracaaaaattcaaactatattaaataacac

SEQ ID NO: 12385 - DNA, 50 bp, synthetic construct
  source 1..50: mol_type = other DNA
taacatcrtatttcctctctaaactattctcaataaaacatcccraaatc

SEQ ID NO: 12386 - DNA, 50 bp, synthetic construct
  source 1..50: mol_type = other DNA
caaatataacatcrtatttcctctctaaactattctcaataaaacatccc

SEQ ID NO: 12387 - DNA, 50 bp, synthetic construct
  source 1..50: mol_type = other DNA
aactctattacraattcctttactcccaaactaaaaacaaatataacatc

SEQ ID NO: 12388 - DNA, 50 bp, synthetic construct
  source 1..50: mol_type = other DNA
aatcracaaaaattcaaactacrttaaataacacrcaaaaactctattac

SEQ ID NO: 12389 - DNA, 50 bp, synthetic construct
  source 1..50: mol_type = other DNA
caataaaacatcccraaatcracaaaaattcaaactacrttaaataacac

SEQ ID NO: 12390 - DNA, 50 bp, synthetic construct
  source 1..50: mol_type = other DNA
cctctctattctcaataaaacatcccraaatcracaaaaattcaaactac

SEQ ID NO: 12391 - DNA, 50 bp, synthetic construct
  source 1..50: mol_type = other DNA
tctaaaataaatacrattcctctctattctcaataaaacatcccraaatc

SEQ ID NO: 12392 - DNA, 50 bp, synthetic construct
  source 1..50: mol_type = other DNA
ttcctctctaaaataaatacrattcctctctattctcaataaaacatccc

SEQ ID NO: 12393 - DNA, 50 bp, synthetic construct
  source 1..50: mol_type = other DNA
aattcaaaatacrtcaaataacacrcaaaaactttatcacraattccctc

SEQ ID NO: 12394 - DNA, 50 bp, synthetic construct
  source 1..50: mol_type = other DNA
cctaaactttaaaaatacatctacaaactctttatctattttacctcaac

SEQ ID NO: 12395 - DNA, 50 bp, synthetic construct
  source 1..50: mol_type = other DNA
actttaaaaatacatctacaaactctttatctattttacctcaacraaac

SEQ ID NO: 12396 - DNA, 50 bp, synthetic construct
  source 1..50: mol_type = other DNA
tatattcaaccataattaaaaccctaactaacataaaaattacaaatccc

SEQ ID NO: 12397 - DNA, 50 bp, synthetic construct
  source 1..50: mol_type = other DNA
atttataactcctatattaactaaaactccaaccataattaaacataaac

SEQ ID NO: 12398 - DNA, 50 bp, synthetic construct
  source 1..50: mol_type = other DNA
tatattaactaaaactccaaccataattaaacataaacraaaaccaatac

SEQ ID NO: 12399 - DNA, 50 bp, synthetic construct
  source 1..50: mol_type = other DNA
tatccatctttctttactctataatcacacrtttcccctaccaaatatac

SEQ ID NO: 12400 - DNA, 50 bp, synthetic construct
  source 1..50: mol_type = other DNA
aaaaattaacrtaaaaataaaactcttaaaaaatccctataaaattactc

SEQ ID NO: 12401 - DNA, 50 bp, synthetic construct
  source 1..50: mol_type = other DNA
aataacttcacaaaaatttcctaaaaactccattttcacrtcaattcctc

SEQ ID NO: 12402 - DNA, 50 bp, synthetic construct
  source 1..50: mol_type = other DNA
aaactccattttcacrtcaattcctcrttaatataataataaatatcccc

SEQ ID NO: 12403 - DNA, 50 bp, synthetic construct
  source 1..50: mol_type = other DNA
tttcacrtcaattcctcrttaatataataataaatatccccrcctatcac

SEQ ID NO: 12404 - DNA, 50 bp, synthetic construct
  source 1..50: mol_type = other DNA
raatctacattatataccttttttacaaaatatactcataaaaacacaac

SEQ ID NO: 12405 - DNA, 50 bp, synthetic construct
  source 1..50: mol_type = other DNA
tcaaacaaacccatattaaaaaaaattttaacaaaataactaacttatac

SEQ ID NO: 12406 - DNA, 50 bp, synthetic construct
  source 1..50: mol_type = other DNA
aaaaaaaaacacaatcctctcaacattcaaaaaataaatcccacttaatc

SEQ ID NO: 12407 - DNA, 50 bp, synthetic construct
  source 1..50: mol_type = other DNA
tttaatttcaatactcaataaccctataaatatacaaaattctcttatcc

SEQ ID NO: 12408 - DNA, 50 bp, synthetic construct
  source 1..50: mol_type = other DNA
atatcraataaacccccaaattaaaatccattaaaaacatccraaaaaac

SEQ ID NO: 12409 - DNA, 50 bp, synthetic construct
  source 1..50: mol_type = other DNA
ctcacttacattccattttactcttttattaaattaataaacrtcccttc

SEQ ID NO: 12410 - DNA, 50 bp, synthetic construct
  source 1..50: mol_type = other DNA
cattcctatcacaaaatactatacaactattaaaaaattaaattcttatc

SEQ ID NO: 12411 - DNA, 50 bp, synthetic construct
  source 1..50: mol_type = other DNA
aattacaaaaactccactaccaaaactcaaaccacaacctacttccraac

SEQ ID NO: 12412 - DNA, 50 bp, synthetic construct
  source 1..50: mol_type = other DNA
aaacaaaaaatacaaacttcacrttaataaacaataaacraactcccrtc

SEQ ID NO: 12413 - DNA, 50 bp, synthetic construct
  source 1..50: mol_type = other DNA
atcaacrttccaaacaaaaaatacaaacttcacrttaataaacaataaac

SEQ ID NO: 12414 - DNA, 50 bp, synthetic construct
  source 1..50: mol_type = other DNA
aaaacaaaacaccaaaaaatactttctacttcccraaaaaactccacctc

SEQ ID NO: 12415 - DNA, 50 bp, synthetic construct
  source 1..50: mol_type = other DNA
ccaaaactaattaacacrccrcctcaatttaaatcatccataatttatac

SEQ ID NO: 12416 - DNA, 50 bp, synthetic construct
  source 1..50: mol_type = other DNA
ccracrttctttactcctaacrctaaaaacacttttaaaaattccatttc

SEQ ID NO: 12417 - DNA, 50 bp, synthetic construct
  source 1..50: mol_type = other DNA
catccataatttatacrttacraaataaaactttcaaaaatattcctaac

SEQ ID NO: 12418 - DNA, 50 bp, synthetic construct
  source 1..50: mol_type = other DNA
aaactttcaaaaatattcctaacrttaaaaacaaaaaacrccraacaaac

SEQ ID NO: 12419 - DNA, 50 bp, synthetic construct
  source 1..50: mol_type = other DNA
ccraaactaaaaaaccccrcaaactattactaaaaatccaaaaaaaacac

SEQ ID NO: 12420 - DNA, 50 bp, synthetic construct
  source 1..50: mol_type = other DNA
raacttaccttatctacccctaaaaacaaatttactcttaaatcttacac

SEQ ID NO: 12421 - DNA, 50 bp, synthetic construct
  source 1..50: mol_type = other DNA
tatcttccctttaaaaacctaaatttctaccctaatattcrttatctacc

SEQ ID NO: 12422 - DNA, 50 bp, synthetic construct
  source 1..50: mol_type = other DNA
raactcaaactatcttccctttaaaaacctaaatttctaccctaatattc

SEQ ID NO: 12423 - DNA, 50 bp, synthetic construct
  source 1..50: mol_type = other DNA
ataactcrtatttttaacaaaccttcctaaaaaaatatatcttcatttcc

SEQ ID NO: 12424 - DNA, 50 bp, synthetic construct
  source 1..50: mol_type = other DNA
ttcaaaatccaaaatactaaccattacaccataaaacctcrcaataactc

SEQ ID NO: 12425 - DNA, 50 bp, synthetic construct
  source 1..50: mol_type = other DNA
aatcrctaaattcaaaatccaaaatactaaccattacaccataaaacctc

SEQ ID NO: 12426 - DNA, 50 bp, synthetic construct
  source 1..50: mol_type = other DNA
tctaaactctaaatccaacratccraattcaaatctcrataaaacctatc

SEQ ID NO: 12427 - DNA, 50 bp, synthetic construct
  source 1..50: mol_type = other DNA
cctactctaaacataaaacaaaaaatcaataaaccccrtacaaaatccrc

SEQ ID NO: 12428 - DNA, 50 bp, synthetic construct
  source 1..50: mol_type = other DNA
ctcctactctaaacataaaacaaaaaatcaataaaccccrtacaaaatcc

SEQ ID NO: 12429 - DNA, 50 bp, synthetic construct
  source 1..50: mol_type = other DNA
aatataaaaatctcctactctaaacataaaacaaaaaatcaataaacccc

SEQ ID NO: 12430 - DNA, 50 bp, synthetic construct
  source 1..50: mol_type = other DNA
atttaaacactattaaatcctcacataataacttcaatcactatcaacac

SEQ ID NO: 12431 - DNA, 50 bp, synthetic construct
  source 1..50: mol_type = other DNA
atttctataacattaacccrccacacaaaattactatcaatactaaatac

SEQ ID NO: 12432 - DNA, 50 bp, synthetic construct
  source 1..50: mol_type = other DNA
aaatattatcttatttattataccacttaaaaataatacttaccattacc

SEQ ID NO: 12433 - DNA, 50 bp, synthetic construct
  source 1..50: mol_type = other DNA
rtattaacccaccrtattaaaataatctcratttcctaacctcrtaatcc

SEQ ID NO: 12434 - DNA, 50 bp, synthetic construct
  source 1..50: mol_type = other DNA
tataaaaattttaaacaaaactattcctaaattttacctaacttacatac

SEQ ID NO: 12435 - DNA, 50 bp, synthetic construct
  source 1..50: mol_type = other DNA
craatataataacaaacrcctatattcccaactactccraaaactaaaac

SEQ ID NO: 12436 - DNA, 50 bp, synthetic construct
  source 1..50: mol_type = other DNA
racaaaattcraacctacrcraaaaaaccccaataaatttctaatccatc

SEQ ID NO: 12437 - DNA, 50 bp, synthetic construct; identical to SEQ ID NO: 12436
  source 1..50: mol_type = other DNA

SEQ ID NO: 12438 - DNA, 50 bp, synthetic construct
  source 1..50: mol_type = other DNA
aacacaaaaaaaataaaccctcraaatataaatccaaaaactttaatatc

SEQ ID NO: 12439 - DNA, 50 bp, synthetic construct
  source 1..50: mol_type = other DNA
ctacttaaaaaaaacattcaacracatcaaaatccttaaatctacatttc

SEQ ID NO: 12440 - DNA, 50 bp, synthetic construct
  source 1..50: mol_type = other DNA
tacaaaattaacraaacrtaataacrcataactataatctcaactactcc

SEQ ID NO: 12441 - DNA, 50 bp, synthetic construct
  source 1..50: mol_type = other DNA
tttctctatattaatcaaactaatcrcraactcccaacttcaaataatcc

SEQ ID NO: 12442 - DNA, 50 bp, synthetic construct
  source 1..50: mol_type = other DNA
tttctccttattaatcaaactattctcraactcccrtcctcaaataattc

SEQ ID NO: 12443 - DNA, 50 bp, synthetic construct
  source 1..50: mol_type = other DNA
ttaataaaaataaaatttctccttattaatcaaactattctcraactccc

SEQ ID NO: 12444 - DNA, 50 bp, synthetic construct
  source 1..50: mol_type = other DNA
ttaaatttattattccttacaacaaacaaaaacacacaccataaaaaaac

SEQ ID NO: 12445 - DNA, 50 bp, synthetic construct
  source 1..50: mol_type = other DNA
ttccttacaacaaacaaaaacacacaccataaaaaaacrtaaaacacctc

SEQ ID NO: 12446 - DNA, 50 bp, synthetic construct
  source 1..50: mol_type = other DNA
aaaacaaaactaaactaacttcttaaaaaacctattctctaaaactatac

SEQ ID NO: 12447 - DNA, 50 bp, synthetic construct
  source 1..50: mol_type = other DNA
aaaaaaaacttctttaaaacacccatccctccttcactaaaaaacaaaac

SEQ ID NO: 12448 - DNA, 50 bp, synthetic construct
  source 1..50: mol_type = other DNA
tcccaactcaaaaaattactatatattcaaaaatacaattaaaaccraac

SEQ ID NO: 12449 - DNA, 50 bp, synthetic construct
  source 1..50: mol_type = other DNA
ttcttcccaactcaaaaaattactatatattcaaaaatacaattaaaacc

SEQ ID NO: 12450 - DNA, 50 bp, synthetic construct
  source 1..50: mol_type = other DNA
aaaaatttcaaatttacataatacttcatactttttcaaaacattttcac

SEQ ID NO: 12451 - DNA, 50 bp, synthetic construct
  source 1..50: mol_type = other DNA
aataaaatctaactctatcacccaaaataaaatacaataacrccatctcc

SEQ ID NO: 12452 - DNA, 50 bp, synthetic construct
  source 1..50: mol_type = other DNA
taccactatcttttccttcttcaaaattctcttaactaatataatcaccc

SEQ ID NO: 12453 - DNA, 50 bp, synthetic construct
  source 1..50: mol_type = other DNA
aaattctacttccactcrtaaaaaataaattactaaaaaaattatccccc

SEQ ID NO: 12454 - DNA, 50 bp, synthetic construct
  source 1..50: mol_type = other DNA
ctaatttttttataaccraaaaacaattctcctaacaattcatttttcac

SEQ ID NO: 12455 - DNA, 50 bp, synthetic construct
  source 1..50: mol_type = other DNA
tacccaaactaatctcctaaactcaaataatccaataaccttaacctccc

SEQ ID NO: 12456 - DNA, 50 bp, synthetic construct
  source 1..50: mol_type = other DNA
cctcaaaaaacaacrcccctaccaaaaattacactctctcaaaactaaac

SEQ ID NO: 12457 - DNA, 50 bp, synthetic construct
  source 1..50: mol_type = other DNA
accccaaaaaaaacrtctaatcctaaaaaaatacaatctttaacaaaaac

SEQ ID NO: 12458 - DNA, 50 bp, synthetic construct
  source 1..50: mol_type = other DNA
acacaacctaatcttttatttttccctaccaaatttataccraaaatttc

SEQ ID NO: 12459 - DNA, 50 bp, synthetic construct
  source 1..50: mol_type = other DNA
ccacttctaacacaacctaatcttttatttttccctaccaaatttatacc

SEQ ID NO: 12460 - DNA, 50 bp, synthetic construct
  source 1..50: mol_type = other DNA
aaaaaactacrtcctcraaataaaacaaacrcataaaacctaaattcccc

SEQ ID NO: 12461 - DNA, 50 bp, synthetic construct
  source 1..50: mol_type = other DNA
aaataaaaaaataaactaaaccataaatctaaaatctcctatcccaaatc

SEQ ID NO: 12462 - DNA, 50 bp, synthetic construct
  source 1..50: mol_type = other DNA
acttaaaacaaaaaacttcaaatttataatttaatttacttttctacccc

SEQ ID NO: 12463 - DNA, 50 bp, synthetic construct
  source 1..50: mol_type = other DNA
aacttcaaatttataatttaatttacttttctaccccratctacttatcc

SEQ ID NO: 12464 - DNA, 50 bp, synthetic construct
  source 1..50: mol_type = other DNA
cccaaaaaataaatccttaccatatttctacttctccactaaacracacc

SEQ ID NO: 12465 - DNA, 50 bp, synthetic construct
  source 1..50: mol_type = other DNA
cctccacccaaaaaataaatccttaccatatttctacttctccactaaac

SEQ ID NO: 12466 - DNA, 50 bp, synthetic construct
  source 1..50: mol_type = other DNA
aaaaatttactccctaaataaaaaatccaaaataatacaatcttaaaaac

SEQ ID NO: 12467 - DNA, 50 bp, synthetic construct
  source 1..50: mol_type = other DNA
aaaaaaaacaataaaacacctcccraaaacaaaaacccaaaaaaaactcc

SEQ ID NO: 12468 - DNA, 50 bp, synthetic construct
  source 1..50: mol_type = other DNA
tacttttcactctacttaatacccaaatattctaaacttcaattcttaac

SEQ ID NO: 12469 - DNA, 50 bp, synthetic construct
  source 1..50: mol_type = other DNA
caaatccctacattctctaataattttaacctcccctccaattaactttc

SEQ ID NO: 12470 - DNA, 50 bp, synthetic construct
  source 1..50: mol_type = other DNA
tttataaaaaacrcraactatttaacttcttcrtaacttcacctaacacc

SEQ ID NO: 12471 - DNA, 50 bp, synthetic construct
  source 1..50: mol_type = other DNA
taactctaaaaacaaccacaaaccaacraaacratactaaataaaactac

SEQ ID NO: 12472 - DNA, 50 bp, synthetic construct
  source 1..50: mol_type = other DNA
caaaccaacraaacratactaaataaaactacraaaaaaccaaataactc

SEQ ID NO: 12473 - DNA, 50 bp, synthetic construct
  source 1..50: mol_type = other DNA
cracttctccttaccaacrttctaacaaaaacacratttttataaaaaac

SEQ ID NO: 12474 - DNA, 50 bp, synthetic construct
  source 1..50: mol_type = other DNA
aatttcctaaaaatatacaaatactcttttcaaaaaacccraaaaaaacc

SEQ ID NO: 12475 - DNA, 50 bp, synthetic construct
  source 1..50: mol_type = other DNA
rccrtctaaaaaatatacccaataactcattaaaaacraaccataataac

SEQ ID NO: 12476 - DNA, 50 bp, synthetic construct
  source 1..50: mol_type = other DNA
taaaaaatatacccaataactcattaaaaacraaccataataacrataac

SEQ ID NO: 12477 - DNA, 50 bp, synthetic construct
  source 1..50: mol_type = other DNA
tctctacacaaacacaataacaatctaatctctattttccccacatttcc

SEQ ID NO: 12478 - DNA, 50 bp, synthetic construct
  source 1..50: mol_type = other DNA
ccttaatccrtttaacccttaataaacacaacacatatttcaaaaaacac

SEQ ID NO: 12479 - DNA, 50 bp, synthetic construct
  source 1..50: mol_type = other DNA
cccaaccccrtactctctaaaacatatactatatccactaaaaattaaac

SEQ ID NO: 12480 - DNA, 50 bp, synthetic construct
  source 1..50: mol_type = other DNA
aacraatatactaccttcaaacatctatttaacaaaacacatcttacacc

SEQ ID NO: 12481 - DNA, 50 bp, synthetic construct
  source 1..50: mol_type = other DNA
aaatacttaaaaacaacatactcrttaaaaatcatcaccactccctaatc

SEQ ID NO: 12482 - DNA, 50 bp, synthetic construct
  source 1..50: mol_type = other DNA
tataaacaaaaatctctaattttcctaaacaaaaaaccctaccrccttcc

SEQ ID NO: 12483 - DNA, 50 bp, synthetic construct; identical to SEQ ID NO: 12482
  source 1..50: mol_type = other DNA

SEQ ID NO: 12484 - DNA, 50 bp, synthetic construct
  source 1..50: mol_type = other DNA
cttttcaaatcataaaatttctctcccccrcaaataataacccttacttc

SEQ ID NO: 12485 - DNA, 50 bp, synthetic construct
  source 1..50: mol_type = other DNA
cctaaacaaaaccaaacccccaaaacaataataaaaattacraaaccaac

SEQ ID NO: 12486 - DNA, 50 bp, synthetic construct
  source 1..50: mol_type = other DNA
cacctcctccctaaacaaaaccaaacccccaaaacaataataaaaattac

SEQ ID NO: 12487 - DNA, 50 bp, synthetic construct
  source 1..50: mol_type = other DNA
taaaaacaaatactcaaaaaaaactatccccaccrtccttttatctcaac

SEQ ID NO: 12488 - DNA, 50 bp, synthetic construct
  source 1..50: mol_type = other DNA
ctatcctaaaacraaaactacaacracaaatatataactttcttaaaccc

SEQ ID NO: 12489 - DNA, 50 bp, synthetic construct
  source 1..50: mol_type = other DNA
aacracaaatatataactttcttaaacccraaaccacaaacctaaaaaac

SEQ ID NO: 12490 - DNA, 50 bp, synthetic construct
  source 1..50: mol_type = other DNA
racaaatatataactttcttaaacccraaaccacaaacctaaaaaacrcc

SEQ ID NO: 12491 - DNA, 50 bp, synthetic construct
  source 1..50: mol_type = other DNA
cttaaacccraaaccacaaacctaaaaaacrccrctaaaacttcaaaatc

SEQ ID NO: 12492 - DNA, 50 bp, synthetic construct
  source 1..50: mol_type = other DNA
ctaaaaaacrccrctaaaacttcaaaatcrtaataacaaaaaaaccaccc

SEQ ID NO: 12493 - DNA, 50 bp, synthetic construct
  source 1..50: mol_type = other DNA
ccctaaactcttatacccaaaaaaaatcrccaaattttttaatacraatc

SEQ ID NO: 12494 - DNA, 50 bp, synthetic construct
  source 1..50: mol_type = other DNA
caaaaatatataccctaaaaaccaactcaaatcccaaacctaaatttctc

SEQ ID NO: 12495 - DNA, 50 bp, synthetic construct
  source 1..50: mol_type = other DNA
aacacacattcttattcaaaaaaaacacattacaaaaatcraaaaataac

SEQ ID NO: 12496 - DNA, 50 bp, synthetic construct
  source 1..50: mol_type = other DNA
tcctcatttccaaaaaccccataaattacactaaaatcccraaacraaac

SEQ ID NO: 12497 - DNA, 50 bp, synthetic construct
  source 1..50: mol_type = other DNA
atcatcracttcctcatttccaaaaaccccataaattacactaaaatccc

SEQ ID NO: 12498 - DNA, 50 bp, synthetic construct
  source 1..50: mol_type = other DNA
tccaaaattttcaattccaccaaaaactaaacctctaaaactatttaacc

SEQ ID NO: 12499 - DNA, 50 bp, synthetic construct
  source 1..50: mol_type = other DNA
ttcaattcctaataaaattaaaaatcctaaaataaaccataaatataaac

SEQ ID NO: 12500 - DNA, 50 bp, synthetic construct
  source 1..50: mol_type = other DNA
cccctttacrttaacactaacrtttttttatcttcaaatctaaaaaaatc

SEQ ID NO: 12501 - DNA, 50 bp, synthetic construct
  source 1..50: mol_type = other DNA
tacrcraaaataacttaattatttctctacccctttacrttaacactaac

SEQ ID NO: 12502 - DNA, 50 bp, synthetic construct
  source 1..50: mol_type = other DNA
acatttaaaaaatacrcraaaataacttaattatttctctacccctttac

SEQ ID NO: 12503 - DNA, 50 bp, synthetic construct
  source 1..50: mol_type = other DNA
rataaattaaattttcractcctttcaataccaacatttaaaaaatacrc

SEQ ID NO: 12504 - DNA, 50 bp, synthetic construct
  source 1..50: mol_type = other DNA
tcrataaattaaattttcractcctttcaataccaacatttaaaaaatac

SEQ ID NO: 12505 - DNA, 50 bp, synthetic construct
  source 1..50: mol_type = other DNA
aaccraataattaaaacrttaaacttaaaatccaataaactaatacccrc

SEQ ID NO: 12506 - DNA, 50 bp, synthetic construct
  source 1..50: mol_type = other DNA
ataaccraataattaaaacrttaaacttaaaatccaataaactaataccc

SEQ ID NO: 12507 - DNA, 50 bp, synthetic construct
  source 1..50: mol_type = other DNA
attataaaaaaataattaccttaaaacttaccccaatcaccraaataacc

SEQ ID NO: 12508 - DNA, 50 bp, synthetic construct
  source 1..50: mol_type = other DNA
acctttattattataaaaaaataattaccttaaaacttaccccaatcacc

SEQ ID NO: 12509 - DNA, 50 bp, synthetic construct
  source 1..50: mol_type = other DNA
accrctcccttatttttcttttcaaatcaaatacaaacaaaaatttctcc

SEQ ID NO: 12510 - DNA, 50 bp, synthetic construct
  source 1..50: mol_type = other DNA
atattcatcaatcacttctcctaaatctcctcacttaatcaaaaatttcc

SEQ ID NO: 12511 - DNA, 50 bp, synthetic construct
  source 1..50: mol_type = other DNA
cacaacattaacaccacctactacttctacttcactaaaaacactatccc

SEQ ID NO: 12512 - DNA, 50 bp, synthetic construct
  source 1..50: mol_type = other DNA
actacctttctatccactaaaaatcttaaaatttaccccaacataaactc

SEQ ID NO: 12513 - DNA, 50 bp, synthetic construct
  source 1..50: mol_type = other DNA
attataacaattacraacttttccraaaacacttaaaattctaaaacrac

SEQ ID NO: 12514 - DNA, 50 bp, synthetic construct
  source 1..50: mol_type = other DNA
tcaacaaaaaaaccatattaaactatatataaactacacaaaaatacrcc

SEQ ID NO: 12515 - DNA, 50 bp, synthetic construct
  source 1..50: mol_type = other DNA
ctttaaccacaaaaattaaattctctattataacaattacraacttttcc

SEQ ID NO: 12516 - DNA, 50 bp, synthetic construct
  source 1..50: mol_type = other DNA
ccaaaaaatactttaaccacaaaaattaaattctctattataacaattac

SEQ ID NO: 12517 - DNA, 50 bp, synthetic construct
  source 1..50: mol_type = other DNA
taaaatatctcctaaaaaacttattacaaatataaattctaaaacccctc

SEQ ID NO: 12518 - DNA, 50 bp, synthetic construct
  source 1..50: mol_type = other DNA
attacaaatataaattctaaaacccctcrtacaataatcctaactaaaac

SEQ ID NO: 12519 - DNA, 50 bp, synthetic construct
  source 1..50: mol_type = other DNA
ataaatttttaaattccccataacaactttaacacccttcactaaatacc

SEQ ID NO: 12520 - DNA, 50 bp, synthetic construct
  source 1..50: mol_type = other DNA
actaaataaactactcaaactataaaaaccaaaccactatacacaataac

SEQ ID NO: 12521 - DNA, 50 bp, synthetic construct
  source 1..50: mol_type = other DNA
tatacacaataacrccaaaaaattatttcctccaacaatatctctccatc

SEQ ID NO: 12522 - DNA, 50 bp, synthetic construct
  source 1..50: mol_type = other DNA
cttactccataacaataaaacraaactaaaccctttaaatattttctatc

SEQ ID NO: 12523 - DNA, 50 bp, synthetic construct
  source 1..50: mol_type = other DNA
attacctctcaacaacaaaatcacttttccttactccataacaataaaac

SEQ ID NO: 12524 - DNA, 50 bp, synthetic construct
  source 1..50: mol_type = other DNA
tatttaaattcraaccaatccaaaaaaaatcaacattttctcttctatcc

SEQ ID NO: 12525 - DNA, 50 bp, synthetic construct
  source 1..50: mol_type = other DNA
aataaaacaaactttcttaaaatccaaaaaacaacacttacraatttttc

SEQ ID NO: 12526 - DNA, 50 bp, synthetic construct
  source 1..50: mol_type = other DNA
cacctcrcaaataaaacaaactttcttaaaatccaaaaaacaacacttac

SEQ ID NO: 12527 - DNA, 50 bp, synthetic construct
  source 1..50: mol_type = other DNA
tactactctctaaattccaaaaaaacctatctcacctacraaatacaaac

SEQ ID NO: 12528 - DNA, 50 bp, synthetic construct
  source 1..50: mol_type = other DNA
aaaaacctatctcacctacraaatacaaacraataaaattctaaaactcc

SEQ ID NO: 12529 - DNA, 50 bp, synthetic construct
  source 1..50: mol_type = other DNA
caaacraataaaattctaaaactccratacctattaaaattaacaccacc

SEQ ID NO: 12530 - DNA, 50 bp, synthetic construct
  source 1..50: mol_type = other DNA
tctaaaactccratacctattaaaattaacaccaccraaatcactcaaac

SEQ ID NO: 12531 - DNA, 50 bp, synthetic construct
  source 1..50: mol_type = other DNA
tttaaatattttcatttaaaccaataaaatctttactttttaccraacac

SEQ ID NO: 12532 - DNA, 50 bp, synthetic construct
  source 1..50: mol_type = other DNA
tctatttttaaatattttcatttaaaccaataaaatctttactttttacc

SEQ ID NO: 12533 - DNA, 50 bp, synthetic construct
  source 1..50: mol_type = other DNA
aatacaaaccrattatttatcaaatattcctcaacttaaattaaaacatc

SEQ ID NO: 12534 - DNA, 50 bp, synthetic construct
  source 1..50: mol_type = other DNA
ttttaatatttaattataaccaactaataacttcaataataactcaattc

SEQ ID NO: 12535 - DNA, 50 bp, synthetic construct
  source 1..50: mol_type = other DNA
tcaccaaaaaaatacaaaccaaaaaaacacttcctcctattaacactaac

SEQ ID NO: 12536 - DNA, 50 bp, synthetic construct
  source 1..50: mol_type = other DNA
aaaaaaacacttcctcctattaacactaacraaactaataaaacccaacc

SEQ ID NO: 12537 - DNA, 50 bp, synthetic construct
  source 1..50: mol_type = other DNA
ttttctctcctatcctaaacttaaaatcracttatccaaaccctaaaaac

SEQ ID NO: 12538 - DNA, 50 bp, synthetic construct
  source 1..50: mol_type = other DNA
ttatttaaacaaaactcttttattttctctcctatcctaaacttaaaatc

SEQ ID NO: 12539 - DNA, 50 bp, synthetic construct
  source 1..50: mol_type = other DNA
tttcatactatctaattttcattcaattaaataattctcccaaatccttc

SEQ ID NO: 12540 - DNA, 50 bp, synthetic construct
  source 1..50: mol_type = other DNA
actcatcaaaaaaactatacaaaaataaacacttatttaatacccatacc

SEQ ID NO: 12541 - DNA, 50 bp, synthetic construct
  source 1..50: mol_type = other DNA
ttctataaaaccactacaaaactaaactaaaatttcactaataaacattc

SEQ ID NO: 12542 - DNA, 50 bp, synthetic construct
  source 1..50: mol_type = other DNA
caaaaccaacaatacccaaaatccataattcaaaaccaaaaaaaactttc

SEQ ID NO: 12543 - DNA, 50 bp, synthetic construct
  source 1..50: mol_type = other DNA
cccaaaaactatctttaaaatttaaaataaacatttcctaaataactcac

SEQ ID NO: 12544 - DNA, 50 bp, synthetic construct
  source 1..50: mol_type = other DNA
cccataaaaaaatatttctacccaatttccatttcrcrtaaataacacac

SEQ ID NO: 12545 - DNA, 50 bp, synthetic construct
  source 1..50: mol_type = other DNA
aaataaacrataatttttataatacaataattatcacrtataccacccac

SEQ ID NO: 12546 - DNA, 50 bp, synthetic construct
  source 1..50: mol_type = other DNA
aaaaactaaacaaaaatatctccttataaatctctctctctccctctctc

SEQ ID NO: 12547 - DNA, 50 bp, synthetic construct
  source 1..50: mol_type = other DNA
cttctaaaaaatatcaaacaccctatttaacattttcattttaatccacc

SEQ ID NO: 12548 - DNA, 50 bp, synthetic construct
  source 1..50: mol_type = other DNA
aaatctacraaattcaataaaactatacccaaataaccaatacraaccac

SEQ ID NO: 12549 - DNA, 50 bp, synthetic construct
  source 1..50: mol_type = other DNA
aaaaaaaaataactctcataattctctacattctcaatacaacrtaaccc

SEQ ID NO: 12550 - DNA, 50 bp, synthetic construct
  source 1..50: mol_type = other DNA
accaaaatcaatccaaaacaatccaaatttaaaaatccaatcccttctcc

SEQ ID NO: 12551 - DNA, 50 bp, synthetic construct
  source 1..50: mol_type = other DNA
aactaaaaacccaaaaactataaaactaaactaataaaaccactactacc

SEQ ID NO: 12552 - DNA, 50 bp, synthetic construct
  source 1..50: mol_type = other DNA
aaaactataaaactaaactaataaaaccactactaccractaaacaatac

SEQ ID NO: 12553 - DNA, 50 bp, synthetic construct
  source 1..50: mol_type = other DNA
aacatcacaaaaaataacrcraatccttattaccctataccttaacttcc

SEQ ID NO: 12554 - DNA, 50 bp, synthetic construct
  source 1..50: mol_type = other DNA
aaaacraaattcrctaatacraaaaccaaaacacaaaacaataaaaatcc

SEQ ID NO: 12555 - DNA, 50 bp, synthetic construct
  source 1..50: mol_type = other DNA
aaacaataaaaatccrcrccatttcttataatatcacctaaaaccttaac

SEQ ID NO: 12556 - DNA, 50 bp, synthetic construct
  source 1..50: mol_type = other DNA
aaattcttcaaactctttcaaaactaccrataactaaaaccctatcctcc

SEQ ID NO: 12557 - DNA, 50 bp, synthetic construct
  source 1..50: mol_type = other DNA
ttaaataccatctataaacaataaattcttcaaactctttcaaaactacc

SEQ ID NO: 12558 - DNA, 50 bp, synthetic construct
  source 1..50: mol_type = other DNA
tacaccrcraaaaattcacaactatcaatacrtaaaacaaaattataacc

SEQ ID NO: 12559 - DNA, 50 bp, synthetic construct
  source 1..50: mol_type = other DNA
aaccaatccttaaccaacctcatcctaacctcttaatttataaaatcttc

SEQ ID NO: 12560 - DNA, 50 bp, synthetic construct
  source 1..50: mol_type = other DNA
aaaaataactctcacrttaacctttaattactactcttcttacacatcac

SEQ ID NO: 12561 - DNA, 50 bp, synthetic construct
  source 1..50: mol_type = other DNA
racaactaattcttatttactaaaaaaatactttaaaaaataactctcac

SEQ ID NO: 12562 - DNA, 50 bp, synthetic construct
  source 1..50: mol_type = other DNA
aacaaacaaaaatcaactatcraattaccaactcctataactccttcccc

SEQ ID NO: 12563 - DNA, 50 bp, synthetic construct
  source 1..50: mol_type = other DNA
acctactctccaaaactaccaaaccttactaaatttacacaaaaaaacrc

SEQ ID NO: 12564 - DNA, 50 bp, synthetic construct
  source 1..50: mol_type = other DNA
aaacctactctccaaaactaccaaaccttactaaatttacacaaaaaaac

SEQ ID NO: 12565 - DNA, 50 bp, synthetic construct
  source 1..50: mol_type = other DNA
acaaactcaacaaaacctaacaaccttaaaaaacaaacctttaacaaacc

SEQ ID NO: 12566 - DNA, 50 bp, synthetic construct
  source 1..50: mol_type = other DNA
aacaaacctttaacaaaccrcraaaacrcaactaaataccaaaattactc

SEQ ID NO: 12567 - DNA, 50 bp, synthetic construct
  source 1..50: mol_type = other DNA
attcaaaatccaaaatactaaccattacaccataaaaccaaattcttaac

SEQ ID NO: 12568 - DNA, 50 bp, synthetic construct
  source 1..50: mol_type = other DNA
cctttctaaaatctaatataattttccaatatcaacacaccccacccttc

SEQ ID NO: 12569 - DNA, 50 bp, synthetic construct
  source 1..50: mol_type = other DNA
caaaacactaatcacaaaacctaacacacrataaaaactcrattttattc

SEQ ID NO: 12570 - DNA, 50 bp, synthetic construct
  source 1..50: mol_type = other DNA
aaaaaatcttttttatatccrtttaaaaatctcccctacrcatatttccc

SEQ ID NO: 12571 - DNA, 50 bp, synthetic construct
  source 1..50: mol_type = other DNA
tataaaaatactaaaataaaaccractaaaaacatccccaaaaacccatc

SEQ ID NO: 12572 - DNA, 50 bp, synthetic construct
  source 1..50: mol_type = other DNA
cctacaccacaactaattactacrataaatctctaaaaatattctcaatc

SEQ ID NO: 12573 - DNA, 50 bp, synthetic construct
  source 1..50: mol_type = other DNA
aaatctctaaaaatattctcaatcraccctaccctaacatctttataaac

SEQ ID NO: 12574 - DNA, 50 bp, synthetic construct
  source 1..50: mol_type = other DNA
ccctaacatctttataaacrcctcctaataacttttaactaaataaaaac

SEQ ID NO: 12575 - DNA, 50 bp, synthetic construct
  source 1..50: mol_type = other DNA
accacaaaaaaattactaaaacrctcrcttctaaatatatactaaatatc

SEQ ID NO: 12576 - DNA, 50 bp, synthetic construct
  source 1..50: mol_type = other DNA
taaaacaaaactacattcctctctaccacaaaaaaattactaaaacrctc

SEQ ID NO: 12577 - DNA, 50 bp, synthetic construct
  source 1..50: mol_type = other DNA
actctactccaaataatttaacctaaattcracrcctattcataaacaac

SEQ ID NO: 12578 - DNA, 50 bp, synthetic construct
  source 1..50: mol_type = other DNA
raaaaccacttccaaaatatcratatatccrtttaaaaatctaaaatccc

SEQ ID NO: 12579 - DNA, 50 bp, synthetic construct
  source 1..50: mol_type = other DNA
aaaaaaaacatacratcctcraaaaccacttccaaaatatcratatatcc

SEQ ID NO: 12580 - DNA, 50 bp, synthetic construct
  source 1..50: mol_type = other DNA
raaatttcaaatttttaaacraacacaccracactctaaaaataatcttc

SEQ ID NO: 12581 - DNA, 50 bp, synthetic construct
  source 1..50: mol_type = other DNA
caaatttttaaacraacacaccracactctaaaaataatcttcraaaacc

SEQ ID NO: 12582 - DNA, 50 bp, synthetic construct
  source 1..50: mol_type = other DNA
aatcttcraaaaccrcatactccctcttataaataacaacaattcccaac

SEQ ID NO: 12583 - DNA, 50 bp, synthetic construct
  source 1..50: mol_type = other DNA
cttactacattttattacaacccacaatacattacaatcctaattaactc

SEQ ID NO: 12584 - DNA, 50 bp, synthetic construct
  source 1..50: mol_type = other DNA
raaccaaaattcaatctaaaataaaaatttactaacctacaacattactc

SEQ ID NO: 12585 - DNA, 50 bp, synthetic construct
  source 1..50: mol_type = other DNA
raacaatattacaaactaataaactttcatcttaaactaaactttaattc

SEQ ID NO: 12586 - DNA, 50 bp, synthetic construct
  source 1..50: mol_type = other DNA
acaaactaataaactttcatcttaaactaaactttaattcraataaaaac

SEQ ID NO: 12587 - DNA, 50 bp, synthetic construct
  source 1..50: mol_type = other DNA
acaaaatacactaaacccctacttaaataacratacctacttatcractc

SEQ ID NO: 12588 - DNA, 50 bp, synthetic construct
  source 1..50: mol_type = other DNA
aaaaaacaaaatacactaaacccctacttaaataacratacctacttatc

SEQ ID NO: 12589 - DNA, 50 bp, synthetic construct
  source 1..50: mol_type = other DNA
aaaaaatcatatatacaataatccatttccaaaacaaaataccttaaatc

SEQ ID NO: 12590 - DNA, 50 bp, synthetic construct
  source 1..50: mol_type = other DNA
aacactttatcttaaaaataaaccactatatacataatttcctttaaatc

SEQ ID NO: 12591 - DNA, 50 bp, synthetic construct
  source 1..50: mol_type = other DNA
ttttactatattacccaaactaattacraactcctaaactcaaaaaatcc

SEQ ID NO: 12592 - DNA, 50 bp, synthetic construct
  source 1..50: mol_type = other DNA
attaaaaacrccaaccttattttcctaatactatttttaatttttacctc

SEQ ID NO: 12593 - DNA, 50 bp, synthetic construct
  source 1..50: mol_type = other DNA
tttacttaaaactaatatacttaataacraccttaataccctccracacc

SEQ ID NO: 12594 - DNA, 50 bp, synthetic construct
  source 1..50: mol_type = other DNA
cracratctaaatctccctaaaaataataatcraacrcttattataatac

SEQ ID NO: 12595 - DNA, 50 bp, synthetic construct
  source 1..50: mol_type = other DNA
ttctaaaaccataaaaatcataaactccttcrtcaacracatcttcraac

SEQ ID NO: 12596 - DNA, 50 bp, synthetic construct
  source 1..50: mol_type = other DNA
tctcttctaaaaccataaaaatcataaactccttcrtcaacracatcttc

SEQ ID NO: 12597 - DNA, 50 bp, synthetic construct
  source 1..50: mol_type = other DNA
aaaaaaccracttcttattttaattttaccactattatttcattataccc

SEQ ID NO: 12598 - DNA, 50 bp, synthetic construct
  source 1..50: mol_type = other DNA
accaaaacaaaaaatcratctcctctttttatataataatttatacracc

SEQ ID NO: 12599 - DNA, 50 bp, synthetic construct
  source 1..50: mol_type = other DNA
ttcaatctttcttaaccrtataaataataaaccttttaccatatctaaac

SEQ ID NO: 12600 - DNA, 50 bp, synthetic construct
  source 1..50: mol_type = other DNA
taataaaccttttaccatatctaaacrtaacaaacaaaaaaacaaaactc

SEQ ID NO: 12601 - DNA, 50 bp, synthetic construct
  source 1..50: mol_type = other DNA
accaacttaaaaaaaactaaattttcttccactaaacttaaaataaaaac

SEQ ID NO: 12602 - DNA, 50 bp, synthetic construct
  source 1..50: mol_type = other DNA
ttttcctaaactaacattatccaaatatattaaattctatataattcacc

SEQ ID NO: 12603 - DNA, 50 bp, synthetic construct
  source 1..50: mol_type = other DNA
aaccccaaaacaaacatatttacttcaacaaactaaaaataaaacccrac

SEQ ID NO: 12604 - DNA, 50 bp, synthetic construct
  source 1..50: mol_type = other DNA
tcctaaactaacattatccaaatatattaaattctatataattcaccrtc

SEQ ID NO: 12605 - DNA, 50 bp, synthetic construct
  source 1..50: mol_type = other DNA
tctaaccccaaaacaaacatatttacttcaacaaactaaaaataaaaccc

SEQ ID NO: 12606 - DNA, 50 bp, synthetic construct
  source 1..50: mol_type = other DNA
atatctactttaaaaccaaatattttctaaatcttaataaataacaaacc

SEQ ID NO: 12607 - DNA, 50 bp, synthetic construct
  source 1..50: mol_type = other DNA
tttaaaaccaaatattttctaaatcttaataaataacaaaccraacattc

SEQ ID NO: 12608 - DNA, 50 bp, synthetic construct
  source 1..50: mol_type = other DNA
taataaataacaaaccraacattcracrttcaatccaaatctaaatcaac

SEQ ID NO: 12609 - DNA, 50 bp, synthetic construct
  source 1..50: mol_type = other DNA
ccaaatctaaatcaacracttaaattcttcatttctaaaaaatatctctc

SEQ ID NO: 12610 - DNA, 50 bp, synthetic construct
  source 1..50: mol_type = other DNA
taattctctttaaaacattttctaaaaattcattaaaattaaaatttccc

SEQ ID NO: 12611 - DNA, 50 bp, synthetic construct
  source 1..50: mol_type = other DNA
cacataaaattatttctttaacattttttaaccttaaatttctcacatac

SEQ ID NO: 12612 - DNA, 50 bp, synthetic construct
  source 1..50: mol_type = other DNA
tttttaatattttacttaatccaatataaccaacatatttcaatattatc

SEQ ID NO: 12613 - DNA, 50 bp, synthetic construct
  source 1..50: mol_type = other DNA
tcctaaataaatataaattacttatattactctcatttccactaaaaatc

SEQ ID NO: 12614 - DNA, 50 bp, synthetic construct
  source 1..50: mol_type = other DNA
ctccatattttattttctattttcrctatacaattattcactatactaac

SEQ ID NO: 12615 - DNA, 50 bp, synthetic construct
  source 1..50: mol_type = other DNA
actttctctttctcctaaaataaatctaactctaaaaacataacrcrtac

SEQ ID NO: 12616 - DNA, 50 bp, synthetic construct
  source 1..50: mol_type = other DNA
aacaactttctaatcaacaactcrataaacttctaataacracraatctc

SEQ ID NO: 12617 - DNA, 50 bp, synthetic construct
  source 1..50: mol_type = other DNA
ctaaaaaaacaactttctaatcaacaactcrataaacttctaataacrac

SEQ ID NO: 12618 - DNA, 50 bp, synthetic construct
  source 1..50: mol_type = other DNA
acrctaaaaaaacaactttctaatcaacaactcrataaacttctaataac

SEQ ID NO: 12619 - DNA, 50 bp, synthetic construct
  source 1..50: mol_type = other DNA
raactactaatcaaaaaactaccttttcaacrtctaatacrtaaaatcrc

SEQ ID NO: 12620 - DNA, 50 bp, synthetic construct
  source 1..50: mol_type = other DNA
taatatcctcaaaaaaccccaccaaataaacctcrcatacctcttacaac

SEQ ID NO: 12621 - DNA, 50 bp, synthetic construct
  source 1..50: mol_type = other DNA
cctttaaatatataatcaataaatccttaaaactcaaaccctctcrccrc

SEQ ID NO: 12622 - DNA, 50 bp, synthetic construct
  source 1..50: mol_type = other DNA
aaaaacctttaaatatataatcaataaatccttaaaactcaaaccctctc

SEQ ID NO: 12623 - DNA, 50 bp, synthetic construct
  source 1..50: mol_type = other DNA
attaacctaaatttttccaacttcaatacaaccttaattttatttctaac

SEQ ID NO: 12624 - DNA, 50 bp, synthetic construct
  source 1..50: mol_type = other DNA
aattcaaattaatataactcatactaactaaaataaaacrttctctcccc

SEQ ID NO: 12625 - DNA, 50 bp, synthetic construct
  source 1..50: mol_type = other DNA
crccccccrttcctaaacaatattaaattttctttaaattttttcaaacc

SEQ ID NO: 12626 - DNA, 50 bp, synthetic construct
  source 1..50: mol_type = other DNA
aaccatctatcattaactacatttaaataatttaaacaaacccaaaatcc

SEQ ID NO: 12627 - DNA, 50 bp, synthetic construct
  source 1..50: mol_type = other DNA
atttatccaacaaatactaatcaaaaactcctacrttactaaaaatatac

SEQ ID NO: 12628 - DNA, 50 bp, synthetic construct
  source 1..50: mol_type = other DNA
acccatacattcattcatttatccaacaaatactaatcaaaaactcctac

SEQ ID NO: 12629 - DNA, 50 bp, synthetic construct
  source 1..50: mol_type = other DNA
caataaaataccttcaaaataccacaaactaacctaacrcaataactcac

SEQ ID NO: 12630 - DNA, 50 bp, synthetic construct
  source 1..50: mol_type = other DNA
acacrtattttcaaaaattttaccttaataaccaaactaatctctaactc

SEQ ID NO: 12631 - DNA, 50 bp, synthetic construct
  source 1..50: mol_type = other DNA
aatcraatcaaaaaccaacctaaccaccaaaataaaacccctaaaaacac

SEQ ID NO: 12632 - DNA, 50 bp, synthetic construct
  source 1..50: mol_type = other DNA
aaaaaaactactctatatatatatacaaaatactaaaacaaatccacccc

SEQ ID NO: 12633 - DNA, 50 bp, synthetic construct
  source 1..50: mol_type = other DNA
ttccaaaactataaaaatcataaactccttcrtcaacracatctttaaac

SEQ ID NO: 12634 - DNA, 50 bp, synthetic construct
  source 1..50: mol_type = other DNA
aaactataaaaatcataaactccttcrtcaacracatctttaaacrtatc

SEQ ID NO: 12635 - DNA, 50 bp, synthetic construct
  source 1..50: mol_type = other DNA
actcacttaaaactaatatacttaataacraccttaataccctcraacac

SEQ ID NO: 12636 - DNA, 50 bp, synthetic construct
  source 1..50: mol_type = other DNA
aaactattactacaacraaaaactcacttaaaactaatatacttaataac

SEQ ID NO: 12637 - DNA, 50 bp, synthetic construct
  source 1..50: mol_type = other DNA
ataaaaaacaaacttaacaataaactaactctttcttaaaaaacrtaaac

SEQ ID NO: 12638 - DNA, 50 bp, synthetic construct
  source 1..50: mol_type = other DNA
tacctaataaaaaacaaacttaacaataaactaactctttcttaaaaaac

SEQ ID NO: 12639 - DNA, 50 bp, synthetic construct
  source 1..50: mol_type = other DNA
taccaaaacaacaattaaattaaattaaaacattaatccaacataataac

SEQ ID NO: 12640 - DNA, 50 bp, synthetic construct
  source 1..50: mol_type = other DNA
attaatatatatcttctacrttcaaaaacaattttttaaaacctcataac

SEQ ID NO: 12641 - DNA, 50 bp, synthetic construct
  source 1..50: mol_type = other DNA
acctcatctacraaaaaactcrcraaatactaaaaatattcctaaaaaac

SEQ ID NO: 12642 - DNA, 50 bp, synthetic construct
  source 1..50: mol_type = other DNA
rtaattaatcctacctacaataaccccraataaataaccacacrtatacc

SEQ ID NO: 12643 - DNA, 50 bp, synthetic construct
  source 1..50: mol_type = other DNA
acatctcrtaattaatcctacctacaataaccccraataaataaccacac

SEQ ID NO: 12644 - DNA, 50 bp, synthetic construct
  source 1..50: mol_type = other DNA
aacaaatttaaacattacatctcrtaattaatcctacctacaataacccc

SEQ ID NO: 12645 - DNA, 50 bp, synthetic construct
  source 1..50: mol_type = other DNA
actacacattctatatacraatattttctccattacrtaaacaaacttac

SEQ ID NO: 12646 - DNA, 50 bp, synthetic construct
  source 1..50: mol_type = other DNA
aaatactcrtacacaaaatatacaataccaaaaacrtttatataaccccc

SEQ ID NO: 12647 - DNA, 50 bp, synthetic construct
  source 1..50: mol_type = other DNA
ataccaaaaacrtttatataacccccrtaataaacttaacaataataatc

SEQ ID NO: 12648 - DNA, 50 bp, synthetic construct
  source 1..50: mol_type = other DNA
aaacrtttatataacccccrtaataaacttaacaataataatcraaaatc

SEQ ID NO: 12649 - DNA, 50 bp, synthetic construct
  source 1..50: mol_type = other DNA
ttacatatacaatctaatctaacatatattcattatataataattacatc

SEQ ID NO: 12650 - DNA, 50 bp, synthetic construct
  source 1..50: mol_type = other DNA
taactattatcaccatactttaaaataaatctccaatatttatacctccc

SEQ ID NO: 12651 - DNA, 50 bp, synthetic construct
  source 1..50: mol_type = other DNA
caattttactcaattcaacatttttaaattcctcatataaataaaatcac

SEQ ID NO: 12652 - DNA, 50 bp, synthetic construct
  source 1..50: mol_type = other DNA
aactttaaaccaaaaattaaaaaccattctaacctatatattaaaacccc

SEQ ID NO: 12653 - DNA, 50 bp, synthetic construct
  source 1..50: mol_type = other DNA
aactaaataaacttactataatttttatctttccctatattctcactacc

SEQ ID NO: 12654 - DNA, 50 bp, synthetic construct
  source 1..50: mol_type = other DNA
aacctattaatatttaaacaaaaaactttccttcctaattcttacatacc

SEQ ID NO: 12655 - DNA, 50 bp, synthetic construct
  source 1..50: mol_type = other DNA
atctaacccacaaaataataatatccttaaaccaattaaatcaaaatctc

SEQ ID NO: 12656 - DNA, 50 bp, synthetic construct
  source 1..50: mol_type = other DNA
caacaaaaactaacttatcctttattacttaacrtaaacaaaactttacc

SEQ ID NO: 12657 - DNA, 50 bp, synthetic construct
  source 1..50: mol_type = other DNA
atacaacaaaataatcacaacaaaaactaacttatcctttattacttaac

SEQ ID NO: 12658 - DNA, 50 bp, synthetic construct
  source 1..50: mol_type = other DNA
tctactcaaaaattcaaattctcacctttctcaaaaattaaaccaaaacc

SEQ ID NO: 12659 - DNA, 50 bp, synthetic construct
  source 1..50: mol_type = other DNA
tactaaacataacaaaaacttattatacaacaacctttaatcaataaacc

SEQ ID NO: 12660 - DNA, 50 bp, synthetic construct
  source 1..50: mol_type = other DNA
acaaaatactatacacrttacaaaattcaaaacacraaaacaaaaaactc

SEQ ID NO: 12661 - DNA, 50 bp, synthetic construct
  source 1..50: mol_type = other DNA
cctcataacrtaataacaaaatactatacacrttacaaaattcaaaacac

SEQ ID NO: 12662 - DNA, 50 bp, synthetic construct
  source 1..50: mol_type = other DNA
aaaaaacctaacttacaatatccttcattcatactatttttaaataacac

SEQ ID NO: 12663 - DNA, 50 bp, synthetic construct
  source 1..50: mol_type = other DNA
tattttacttttataaaaatcaaactaacttcraactccaaaactctaac

SEQ ID NO: 12664 - DNA, 50 bp, synthetic construct
  source 1..50: mol_type = other DNA
tttataaaaatcaaactaacttcraactccaaaactctaacratccttcc

SEQ ID NO: 12665 - DNA, 50 bp, synthetic construct
  source 1..50: mol_type = other DNA
acctaaaactatttaacaccatccrataaacaaaaccrctttaaaaaacc

SEQ ID NO: 12666 - DNA, 50 bp, synthetic construct
  source 1..50: mol_type = other DNA
ccraacaccaaaaacctaaaactatttaacaccatccrataaacaaaacc

SEQ ID NO: 12667 - DNA, 50 bp, synthetic construct
  source 1..50: mol_type = other DNA
crtccaatttctaccraacaccaaaaacctaaaactatttaacaccatcc

SEQ ID NO: 12668 - DNA, 50 bp, synthetic construct
  source 1..50: mol_type = other DNA
acrattctatttaccraataataccaaacaattccaaactcttaataccc

SEQ ID NO: 12669 - DNA, 50 bp, synthetic construct
  source 1..50: mol_type = other DNA
ctaactataaattaaacaacactaaaaacaaaaaacatacacacacrcac

SEQ ID NO: 12670 - DNA, 50 bp, synthetic construct
  source 1..50: mol_type = other DNA
aatactaactataaattaaacaacactaaaaacaaaaaacatacacacac

SEQ ID NO: 12671 - DNA, 50 bp, synthetic construct
  source 1..50: mol_type = other DNA
acataatatataacccatatacataaaccttaaataactaattatcatac

SEQ ID NO: 12672 - DNA, 50 bp, synthetic construct
  source 1..50: mol_type = other DNA
aaatctaaaacaaaccaatttaaaaaacaactcttcaaaaataaacatac

SEQ ID NO: 12673 - DNA, 50 bp, synthetic construct
  source 1..50: mol_type = other DNA
ctctaaaaaactacctcttaaactaatttattccaaatcttaccraccac

SEQ ID NO: 12674 - DNA, 50 bp, synthetic construct
  source 1..50: mol_type = other DNA
cacattatctcttttatttcractacaaaaaattcactacttattatctc

SEQ ID NO: 12675 - DNA, 50 bp, synthetic construct
  source 1..50: mol_type = other DNA
aaacctttttaatttaaaccraaatataaataataaactactccaacccc

SEQ ID NO: 12676 - DNA, 50 bp, synthetic construct
  source 1..50: mol_type = other DNA
ttaataaaataaccatcrcccaaaataatatcctacccaatatccaaacc

SEQ ID NO: 12677 - DNA, 50 bp, synthetic construct
  source 1..50: mol_type = other DNA
ccatccrcaacracraaaaactcaacaaactacttaataaaataaccatc

SEQ ID NO: 12678 - DNA, 50 bp, synthetic construct
  source 1..50: mol_type = other DNA
ccaccctaaacrataatcactttaccaaacaacttattaaactcctcrtc

SEQ ID NO: 12679 - DNA, 50 bp, synthetic construct
  source 1..50: mol_type = other DNA
ctaaacrataatcactttaccaaacaacttattaaactcctcrtcrttac

SEQ ID NO: 12680 - DNA, 50 bp, synthetic construct
  source 1..50: mol_type = other DNA
aaacaacttattaaactcctcrtcrttacraataaccaactacaaataac

SEQ ID NO: 12681 - DNA, 50 bp, synthetic construct
  source 1..50: mol_type = other DNA
craataaccaactacaaataacrcraaataatacraatcttcttattatc

SEQ ID NO: 12682 - DNA, 50 bp, synthetic construct; identical to SEQ ID NO: 12681
  source 1..50: mol_type = other DNA

SEQ ID NO: 12683 - DNA, 50 bp, synthetic construct; identical to SEQ ID NO: 12681
  source 1..50: mol_type = other DNA

SEQ ID NO: 12684 - DNA, 50 bp, synthetic construct
  source 1..50: mol_type = other DNA
cracratattaaaatacctaaccrccraaatcctaaaactaactaacaac

SEQ ID NO: 12685 - DNA, 50 bp, synthetic construct
  source 1..50: mol_type = other DNA
caaaactaaaacccrttcttcaaaaacraatcttcaattcccaataaacc

SEQ ID NO: 12686 - DNA, 50 bp, synthetic construct
  source 1..50: mol_type = other DNA
crtcccracataacrtaaaaaattcaatcaataacrttcctaaaactaac

SEQ ID NO: 12687 - DNA, 50 bp, synthetic construct
  source 1..50: mol_type = other DNA
cacaacttaattttcrtacctctattaactataaataacraaactttaac

SEQ ID NO: 12688 - DNA, 50 bp, synthetic construct
  source 1..50: mol_type = other DNA
aaaaaattcaatcaataacrttcctaaaactaacrtaacrctaaaactcc

SEQ ID NO: 12689 - DNA, 50 bp, synthetic construct
  source 1..50: mol_type = other DNA
crcacaacttcattctctaccccacttacrttaaaaaacaataaataaac

SEQ ID NO: 12690 - DNA, 50 bp, synthetic construct
  source 1..50: mol_type = other DNA
crataaattaacaaaactaccrtcttcctatttttttcctccaattttcc

SEQ ID NO: 12691 - DNA, 50 bp, synthetic construct
  source 1..50: mol_type = other DNA
actaccttcttaaaacctttcttcraaacaaaaacraactttaaaaactc

SEQ ID NO: 12692 - DNA, 50 bp, synthetic construct
  source 1..50: mol_type = other DNA
ttctaaacctttatcactaccttcttaaaacctttcttcraaacaaaaac

SEQ ID NO: 12693 - DNA, 50 bp, synthetic construct
  source 1..50: mol_type = other DNA
craaaattttattatacraatttcacttatccaaactcaatttcaacacc

SEQ ID NO: 12694 - DNA, 50 bp, synthetic construct
  source 1..50: mol_type = other DNA
cratattaaaattaaacctaaataaataaaattcrcacaataaaactccc

SEQ ID NO: 12695 - DNA, 50 bp, synthetic construct
  source 1..50: mol_type = other DNA
ccaaaaccrtaaccaaacacaccaactccaaataaactccttactaattc

SEQ ID NO: 12696 - DNA, 50 bp, synthetic construct
  source 1..50: mol_type = other DNA
aaataaacraaccaacaaaaaactcacttaaaactaatatacttaattac

SEQ ID NO: 12697 - DNA, 50 bp, synthetic construct
  source 1..50: mol_type = other DNA
caaaaaactcacttaaaactaatatacttaattacractttaatactctc

SEQ ID NO: 12698 - DNA, 50 bp, synthetic construct
  source 1..50: mol_type = other DNA
tatacttaattacractttaatactctcraacacaacatacrtaacaaac

SEQ ID NO: 12699 - DNA, 50 bp, synthetic construct
  source 1..50: mol_type = other DNA
acatacrtaacaaacraacaaccrtctaaatctccctaaaaataataatc

SEQ ID NO: 12700 - DNA, 50 bp, synthetic construct
  source 1..50: mol_type = other DNA
aacaaccrtctaaatctccctaaaaataataatcraacrcttattataac

SEQ ID NO: 12701 - DNA, 50 bp, synthetic construct
  source 1..50: mol_type = other DNA
aacaataaaaatcttaaacaccttcrttataccatcttcraacrtattac

SEQ ID NO: 12702 - DNA, 50 bp, synthetic construct
  source 1..50: mol_type = other DNA
crtccaaaacaataaaaatcttaaacaccttcrttataccatcttcraac

SEQ ID NO: 12703 - DNA, 50 bp, synthetic construct
  source 1..50: mol_type = other DNA
atctcrtccaaaacaataaaaatcttaaacaccttcrttataccatcttc

SEQ ID NO: 12704 - DNA, 50 bp, synthetic construct
  source 1..50: mol_type = other DNA
ccrtatacttatacaaaatactaaaacaaatccaccaacaccracatctc

SEQ ID NO: 12705 - DNA, 50 bp, synthetic construct
  source 1..50: mol_type = other DNA
aataacataacraaaatattcaaaatccccattactttaaacraaatacc

SEQ ID NO: 12706 - DNA, 50 bp, synthetic construct
  source 1..50: mol_type = other DNA
acraaataccratattaataaacctacttcaacaccttatacaaatacac

SEQ ID NO: 12707 - DNA, 50 bp, synthetic construct
  source 1..50: mol_type = other DNA
ctacttcaacaccttatacaaatacacraaacaactctccttacractac

SEQ ID NO: 12708 - DNA, 50 bp, synthetic construct
  source 1..50: mol_type = other DNA
tacatttatttaaaaaatcataatttcrccatattattcaaactactctc

SEQ ID NO: 12709 - DNA, 50 bp, synthetic construct
  source 1..50: mol_type = other DNA
accraaaaaaattcaccaaaactccactacttataatcaatactaaacrc

SEQ ID NO: 12710 - DNA, 50 bp, synthetic construct
  source 1..50: mol_type = other DNA
cracratactaaaatacctaactaccraaatcctaaaactaacraacaac

SEQ ID NO: 12711 - DNA, 50 bp, synthetic construct
  source 1..50: mol_type = other DNA
ctaaacrataattactttacccaacaacttattaaactcctcrtcrttac

SEQ ID NO: 12712 - DNA, 50 bp, synthetic construct
  source 1..50: mol_type = other DNA
acaccaccctaaacrataattactttacccaacaacttattaaactcctc

SEQ ID NO: 12713 - DNA, 50 bp, synthetic construct
  source 1..50: mol_type = other DNA
ctacaccaaaatacccttactcaccaaactcttaaaacccaacttaatac

SEQ ID NO: 12714 - DNA, 50 bp, synthetic construct; identical to SEQ ID NO: 12713
  source 1..50: mol_type = other DNA

SEQ ID NO: 12715 - DNA, 50 bp, synthetic construct
  source 1..50: mol_type = other DNA
ctcaccaaactcttaaaacccaacttaatacractattattcttctccac

SEQ ID NO: 12716 - DNA, 50 bp, synthetic construct; identical to SEQ ID NO: 12715
  source 1..50: mol_type = other DNA

SEQ ID NO: 12717 - DNA, 50 bp, synthetic construct
  source 1..50: mol_type = other DNA
accaaactcttaaaacccaacttaatacractattattcttctccacrtc

SEQ ID NO: 12718 - DNA, 50 bp, synthetic construct
  source 1..50: mol_type = other DNA
aaaaacrcaataacctttctttaacaacccttaaaaaaaccttaacracc

SEQ ID NO: 12719 - DNA, 50 bp, synthetic construct
  source 1..50: mol_type = other DNA
tctaaaaaacrcaataacctttctttaacaacccttaaaaaaaccttaac

SEQ ID NO: 12720 - DNA, 50 bp, synthetic construct
  source 1..50: mol_type = other DNA
acccccaatctcaaaactaatcaccaaaactataactacttctaaaaaac

SEQ ID NO: 12721 - DNA, 50 bp, synthetic construct
  source 1..50: mol_type = other DNA
taaaaacaaccacaaccttaataatcaactctaaaactaaaaaccccrtc

SEQ ID NO: 12722 - DNA, 50 bp, synthetic construct
  source 1..50: mol_type = other DNA
aaccacaaccttaataatcaactctaaaactaaaaaccccrtcrctttac

SEQ ID NO: 12723 - DNA, 50 bp, synthetic construct
  source 1..50: mol_type = other DNA
ttaataatcaactctaaaactaaaaaccccrtcrctttacrcttaacaac

SEQ ID NO: 12724 - DNA, 50 bp, synthetic construct
  source 1..50: mol_type = other DNA
caaattttaaaaactaacaaacacaatttaaaaatccaaccrcraacrac

SEQ ID NO: 12725 - DNA, 50 bp, synthetic construct
  source 1..50: mol_type = other DNA
aatcaaattttaaaaactaacaaacacaatttaaaaatccaaccrcraac

SEQ ID NO: 12726 - DNA, 50 bp, synthetic construct
  source 1..50: mol_type = other DNA
atttaatcaaattttaaaaactaacaaacacaatttaaaaatccaaccrc

SEQ ID NO: 12727 - DNA, 50 bp, synthetic construct
  source 1..50: mol_type = other DNA
aacttttcataaaaatccattaaactaaaaacatcatattaattaataac

SEQ ID NO: 12728 - DNA, 50 bp, synthetic construct
  source 1..50: mol_type = other DNA
ttcataaaaatccattaaactaaaaacatcatattaattaataacrtatc

SEQ ID NO: 12729 - DNA, 50 bp, synthetic construct
  source 1..50: mol_type = other DNA
aacaaataacacaataaatatccacaaactctaataaaaccraaacaaac

SEQ ID NO: 12730 - DNA, 50 bp, synthetic construct
  source 1..50: mol_type = other DNA
ataaacactcattatactacttattcccttcaataaaaacaaataaatac

SEQ ID NO: 12731 - DNA, 50 bp, synthetic construct
  source 1..50: mol_type = other DNA
ccactaccacrttttatccacaacttatatttaacataaaactaaaacac

SEQ ID NO: 12732 - DNA, 50 bp, synthetic construct
  source 1..50: mol_type = other DNA
taaataacrcacaaattaatatcctcaaataaccccaccaaataaacctc

SEQ ID NO: 12733 - DNA, 50 bp, synthetic construct
  source 1..50: mol_type = other DNA
aattccrtatataaaacrtaacataacacaatctactatccaatcaaaac

SEQ ID NO: 12734 - DNA, 50 bp, synthetic construct
  source 1..50: mol_type = other DNA
ttttttttatttccrtttttatttttctttaactaacaaaaccattttac

SEQ ID NO: 12735 - DNA, 50 bp, synthetic construct
  source 1..50: mol_type = other DNA
aaatatttttaaaaaatataatccrcratacaattacctacacraaacac

SEQ ID NO: 12736 - DNA, 50 bp, synthetic construct
  source 1..50: mol_type = other DNA
aaacactttaaaaactccrcrtatctcctcrtatataaaacctaaaatac

SEQ ID NO: 12737 - DNA, 50 bp, synthetic construct
  source 1..50: mol_type = other DNA
ctacraaacttaccrtattacattttatttaatacaaaacatatctaaac

SEQ ID NO: 12738 - DNA, 50 bp, synthetic construct
  source 1..50: mol_type = other DNA
cttttccattttttcctaaaatcrtaaacaaaacrcaaaatctataaatc

SEQ ID NO: 12739 - DNA, 50 bp, synthetic construct
  source 1..50: mol_type = other DNA
aaaatttaaatacccccttttccattttttcctaaaatcrtaaacaaaac

SEQ ID NO: 12740 - DNA, 50 bp, synthetic construct
  source 1..50: mol_type = other DNA
ataaacttctatatctcattaataaataaatcctcattttaaaatctccc

SEQ ID NO: 12741 - DNA, 50 bp, synthetic construct
  source 1..50: mol_type = other DNA
taaataaatcctcattttaaaatctcccrtatctatatactaaatcaacc

SEQ ID NO: 12742 - DNA, 50 bp, synthetic construct
  source 1..50: mol_type = other DNA
cattttaaaatctcccrtatctatatactaaatcaaccracctcatatcc

SEQ ID NO: 12743 - DNA, 50 bp, synthetic construct
  source 1..50: mol_type = other DNA
tcatatccrtaattttcaacaaacttccaaaaaacccaaaaacaataccc

SEQ ID NO: 12744 - DNA, 50 bp, synthetic construct
  source 1..50: mol_type = other DNA
tattcacrccaaacrtatcactattatacctaaaaacatccaacttacrc

SEQ ID NO: 12745 - DNA, 50 bp, synthetic construct
  source 1..50: mol_type = other DNA
actattcacrccaaacrtatcactattatacctaaaaacatccaacttac

SEQ ID NO: 12746 - DNA, 50 bp, synthetic construct
  source 1..50: mol_type = other DNA
tctaataaatctctttaaaaacaccaacctctatactattcacrccaaac

SEQ ID NO: 12747 - DNA, 50 bp, synthetic construct
  source 1..50: mol_type = other DNA
aaacctatctaataaatctctttaaaaacaccaacctctatactattcac

SEQ ID NO: 12748 - DNA, 50 bp, synthetic construct
  source 1..50: mol_type = other DNA
taacacaaaaattaatatcttcaaaaaaacccaccaaataaacctcrcac

SEQ ID NO: 12749 - DNA, 50 bp, synthetic construct
  source 1..50: mol_type = other DNA
acrctaaaataacaatttacraataaacaactcaatcracttctaataac

SEQ ID NO: 12750 - DNA, 50 bp, synthetic construct
  source 1..50: mol_type = other DNA
cattcaactacttactttcaaaacataactttctcaactataacccraac

SEQ ID NO: 12751 - DNA, 50 bp, synthetic construct
  source 1..50: mol_type = other DNA
tactcattcaactacttactttcaaaacataactttctcaactataaccc

SEQ ID NO: 12752 - DNA, 50 bp, synthetic construct
  source 1..50: mol_type = other DNA
tctcaaattatccrcctacctcraacttccaaaatacttaaattacaaac

SEQ ID NO: 12753 - DNA, 50 bp, synthetic construct
  source 1..50: mol_type = other DNA
aattcccccaataaaaaaataatctaacctaaaatttatataaatcaatc

SEQ ID NO: 12754 - DNA, 50 bp, synthetic construct
  source 1..50: mol_type = other DNA
aatcaatcrtaatcttaaactcatttccaataaatcatttttcctatttc

SEQ ID NO: 12755 - DNA, 50 bp, synthetic construct
  source 1..50: mol_type = other DNA
aatcatttttcctatttcraatcrtataaaaatacatacaataaaacaac

SEQ ID NO: 12756 - DNA, 50 bp, synthetic construct
  source 1..50: mol_type = other DNA
aactatcctaaatctttaaaaaacttaaaaccraacrcrataatttatac

SEQ ID NO: 12757 - DNA, 50 bp, synthetic construct
  source 1..50: mol_type = other DNA
atcccctccccacaaactatcctaaatctttaaaaaacttaaaaccraac

SEQ ID NO: 12758 - DNA, 50 bp, synthetic construct
  source 1..50: mol_type = other DNA
aattatcccctccccacaaactatcctaaatctttaaaaaacttaaaacc

SEQ ID NO: 12759 - DNA, 50 bp, synthetic construct
  source 1..50: mol_type = other DNA
ttaataaaattaccatcrctcaaaacratattctacctaacatccaaacc

SEQ ID NO: 12760 - DNA, 50 bp, synthetic construct
  source 1..50: mol_type = other DNA
ccatccrcaacracraaaaactcaacaaactacttaataaaattaccatc

SEQ ID NO: 12761 - DNA, 50 bp, synthetic construct
  source 1..50: mol_type = other DNA
acaccrccctaaacrataataactttaccaaacaacttattaaactcctc

SEQ ID NO: 12762 - DNA, 50 bp, synthetic construct
  source 1..50: mol_type = other DNA
ctaaacrataataactttaccaaacaacttattaaactcctcrtcrttac

SEQ ID NO: 12763 - DNA, 50 bp, synthetic construct
  source 1..50: mol_type = other DNA
ctctaaaactaaactccaatttcctataaaacraatacaccrcctactcc

SEQ ID NO: 12764 - DNA, 50 bp, synthetic construct
  source 1..50: mol_type = other DNA
caaaaccaaaacccrctcctctaaaactaaactccaatttcctataaaac

SEQ ID NO: 12765 - DNA, 50 bp, synthetic construct
  source 1..50: mol_type = other DNA
caaacratacactcrtcctacaaaaaattaaaacccaactctaaaaaaac

SEQ ID NO: 12766 - DNA, 50 bp, synthetic construct
  source 1..50: mol_type = other DNA
taaaacccaactctaaaaaaacraattttaaccttaacrcraaccttacc

SEQ ID NO: 12767 - DNA, 50 bp, synthetic construct
  source 1..50: mol_type = other DNA
tttcactcactttctaacttaaaccacaaatcrttttaccatatctaaac

SEQ ID NO: 12768 - DNA, 50 bp, synthetic construct
  source 1..50: mol_type = other DNA
ttacttcaacaccttatacacrtaaataaaataactctctttacractac

SEQ ID NO: 12769 - DNA, 50 bp, synthetic construct
  source 1..50: mol_type = other DNA
ataaacttacttcaacaccttatacacrtaaataaaataactctctttac

SEQ ID NO: 12770 - DNA, 50 bp, synthetic construct
  source 1..50: mol_type = other DNA
atatcattaacraaaaaattcataatacccataaccttcrataaaatacc

SEQ ID NO: 12771 - DNA, 50 bp, synthetic construct
  source 1..50: mol_type = other DNA
aaaccataaacatcataaactccttcrtcaataacatctttaaacrcatc

SEQ ID NO: 12772 - DNA, 50 bp, synthetic construct
  source 1..50: mol_type = other DNA
craattattctttcaatacctataacrtcccccttctttaattaatcaac

SEQ ID NO: 12773 - DNA, 50 bp, synthetic construct
  source 1..50: mol_type = other DNA
tctatttaaaaaacccrccaaaaactacaatttaccaaataatctcatcc

SEQ ID NO: 12774 - DNA, 50 bp, synthetic construct
  source 1..50: mol_type = other DNA
atctcatccraattatttttcraaaaaattctcccraaataaaaataacc

SEQ ID NO: 12775 - DNA, 50 bp, synthetic construct
  source 1..50: mol_type = other DNA
aataaaaaaaacrattaattcacaacttccaactcttaacrccaaaatcc

SEQ ID NO: 12776 - DNA, 50 bp, synthetic construct
  source 1..50: mol_type = other DNA
ctcccraaataaaaataaccrttatctacaaaaatacatcraactctaac

SEQ ID NO: 12777 - DNA, 50 bp, synthetic construct
  source 1..50: mol_type = other DNA
caaaaatacatcraactctaacrccaaaaactaaaaactataaattaacc

SEQ ID NO: 12778 - DNA, 50 bp, synthetic construct
  source 1..50: mol_type = other DNA
tctctcacccactcraaaaataatcacccctcaaatattctctcaaaaac

SEQ ID NO: 12779 - DNA, 50 bp, synthetic construct
  source 1..50: mol_type = other DNA
aaacttatacttttacttttttaccacaaaataacaaaaaaaaaccacac

SEQ ID NO: 12780 - DNA, 50 bp, synthetic construct
  source 1..50: mol_type = other DNA
accttctcctaccatcttataacaaaaaaacaaaaacacaaattcaaaac

SEQ ID NO: 12781 - DNA, 50 bp, synthetic construct
  source 1..50: mol_type = other DNA
ttcactccttttaattacaaaattcaaatttcttcaaaaattattaatac

SEQ ID NO: 12782 - DNA, 50 bp, synthetic construct
  source 1..50: mol_type = other DNA
tctaaccaaatcacaaaactcaacaaaactttctcctttacccactcctc

SEQ ID NO: 12783 - DNA, 50 bp, synthetic construct
  source 1..50: mol_type = other DNA
atttaaaaaccctatcttcaaataccaaccacactaaaaactaaaacttc

SEQ ID NO: 12784 - DNA, 50 bp, synthetic construct
  source 1..50: mol_type = other DNA
taaaaaattcactacaaatatcactaccrtataaaacaaaataacrcaac

SEQ ID NO: 12785 - DNA, 50 bp, synthetic construct
  source 1..50: mol_type = other DNA
catcataaaaaattcactacaaatatcactaccrtataaaacaaaataac

SEQ ID NO: 12786 - DNA, 50 bp, synthetic construct
  source 1..50: mol_type = other DNA
ccaaattttaaaaaaaacatcataaaaaattcactacaaatatcactacc

SEQ ID NO: 12787 - DNA, 50 bp, synthetic construct
  source 1..50: mol_type = other DNA
ccaaaaaccactaattctatttatactacaaacataaaaataaattcaac

SEQ ID NO: 12788 - DNA, 50 bp, synthetic construct
  source 1..50: mol_type = other DNA
cataataaaacaaacaaaccaacracatactattttcttacaaaaacatc

SEQ ID NO: 12789 - DNA, 50 bp, synthetic construct
  source 1..50: mol_type = other DNA
ttttaccttacccttacattttaactacataataaaacaaacaaaccaac

SEQ ID NO: 12790 - DNA, 50 bp, synthetic construct
  source 1..50: mol_type = other DNA
aaaaaatatccaccttctaaaataaaatacrtaattttcaaaaataaaac

SEQ ID NO: 12791 - DNA, 50 bp, synthetic construct
  source 1..50: mol_type = other DNA
tatccaccttctaaaataaaatacrtaattttcaaaaataaaacrtcatc

SEQ ID NO: 12792 - DNA, 50 bp, synthetic construct
  source 1..50: mol_type = other DNA
ttttatacrcraaacattaataattcaataataaaattctcrcctaccac

SEQ ID NO: 12793 - DNA, 50 bp, synthetic construct
  source 1..50: mol_type = other DNA
tcctaaaaaacracaaaaccttcctaaaaacracaaaacttcttttatac

SEQ ID NO: 12794 - DNA, 50 bp, synthetic construct
  source 1..50: mol_type = other DNA
cctataatattaattaaattcctaaaaaacracaaaaccttcctaaaaac

SEQ ID NO: 12795 - DNA, 50 bp, synthetic construct
  source 1..50: mol_type = other DNA
caatacctcrcrtacaaaaaaaaccttatcrtctctaaaaaaactttatc

SEQ ID NO: 12796 - DNA, 50 bp, synthetic construct
  source 1..50: mol_type = other DNA
caactaataccataaactatattttcaaaaaaatatttaaataactttcc

SEQ ID NO: 12797 - DNA, 50 bp, synthetic construct
  source 1..50: mol_type = other DNA
ataacttcaaaacrtctcctacaacactaaaaactaacccacrtataaac

SEQ ID NO: 12798 - DNA, 50 bp, synthetic construct
  source 1..50: mol_type = other DNA
ttaatcaaaaaaattaactatattattatatataatcaaaacaaacrccc

SEQ ID NO: 12799 - DNA, 50 bp, synthetic construct
  source 1..50: mol_type = other DNA
ccaccaattctaatcaataattcacatctattcccctaataacctactcc

SEQ ID NO: 12800 - DNA, 50 bp, synthetic construct
  source 1..50: mol_type = other DNA
ctaatcacctactctaacctaaatcacctttaatcacctattccrtaacc

SEQ ID NO: 12801 - DNA, 50 bp, synthetic construct
  source 1..50: mol_type = other DNA
tatcrttcccctactaactaaaattaaaccrcacaatctaaattaattcc

SEQ ID NO: 12802 - DNA, 50 bp, synthetic construct
  source 1..50: mol_type = other DNA
aactacaattccaaaaatccttcctaaatctcttcraacrcaaacttttc

SEQ ID NO: 12803 - DNA, 50 bp, synthetic construct
  source 1..50: mol_type = other DNA
aacraaatacctttaaactacaattccaaaaatccttcctaaatctcttc

SEQ ID NO: 12804 - DNA, 50 bp, synthetic construct
  source 1..50: mol_type = other DNA
tacacttcaaaaattccrtccacaaaaacttataaatctacrcaaaaaac

SEQ ID NO: 12805 - DNA, 50 bp, synthetic construct
  source 1..50: mol_type = other DNA
aaacracrctacacttcaaaaattccrtccacaaaaacttataaatctac

SEQ ID NO: 12806 - DNA, 50 bp, synthetic construct
  source 1..50: mol_type = other DNA
ctacrcaaactcacaaatccctataaacraaattcttaaaatataacrcc

SEQ ID NO: 12807 - DNA, 50 bp, synthetic construct
  source 1..50: mol_type = other DNA
accctatccraaaaataaatccraatttaaaaatccaaatatccaacccc

SEQ ID NO: 12808 - DNA, 50 bp, synthetic construct
  source 1..50: mol_type = other DNA
atttcttttcrcaaacaataacaaatctaaaacatataacacccctcccc

SEQ ID NO: 12809 - DNA, 50 bp, synthetic construct
  source 1..50: mol_type = other DNA
aaataccacatatctcaaatctaccattatctacraaaaaaaactactac

SEQ ID NO: 12810 - DNA, 50 bp, synthetic construct
  source 1..50: mol_type = other DNA
aataaatttcaaaacaaacraaattatccccaaatatcctacaaaacrac

SEQ ID NO: 12811 - DNA, 50 bp, synthetic construct
  source 1..50: mol_type = other DNA
atcaataaatttcaaaacaaacraaattatccccaaatatcctacaaaac

SEQ ID NO: 12812 - DNA, 50 bp, synthetic construct
  source 1..50: mol_type = other DNA
ccrcttatcctaaaatttattaacacrataaataatatttcctatatacc

SEQ ID NO: 12813 - DNA, 50 bp, synthetic construct
  source 1..50: mol_type = other DNA
ctttaccaacataccccttaaaatctctattctactttataatctctacc

SEQ ID NO: 12814 - DNA, 50 bp, synthetic construct
  source 1..50: mol_type = other DNA
ttaaaaaacaaaactcctaataaataaacatatcttaataaacatattac

SEQ ID NO: 12815 - DNA, 50 bp, synthetic construct
  source 1..50: mol_type = other DNA
caaaaaccctactctttaacctccaactttctcatcataattaattactc

SEQ ID NO: 12816 - DNA, 50 bp, synthetic construct
  source 1..50: mol_type = other DNA
tccaactttctcatcataattaattactcrttcctctctattctcctaac

SEQ ID NO: 12817 - DNA, 50 bp, synthetic construct
  source 1..50: mol_type = other DNA
ctaacaatactatctccaaatattttatcacttctcatctatttaaaacc

SEQ ID NO: 12818 - DNA, 50 bp, synthetic construct
  source 1..50: mol_type = other DNA
aattataaaacaaaaccccatacccaaataaccccatttaaaaactccrc

SEQ ID NO: 12819 - DNA, 50 bp, synthetic construct
  source 1..50: mol_type = other DNA
acttccaacracttcaaaaaaatatacaacrtataaaatccccaatacrc

SEQ ID NO: 12820 - DNA, 50 bp, synthetic construct
  source 1..50: mol_type = other DNA
caacttccaacracttcaaaaaaatatacaacrtataaaatccccaatac

SEQ ID NO: 12821 - DNA, 50 bp, synthetic construct
  source 1..50: mol_type = other DNA
ctacctaaactaaataacaactccaacccaactctaactaactcctctac

SEQ ID NO: 12822 - DNA, 50 bp, synthetic construct
  source 1..50: mol_type = other DNA
aaaaaataatccrcataaaccraccaaatcracatctataaaccaaaatc

SEQ ID NO: 12823 - DNA, 50 bp, synthetic construct
  source 1..50: mol_type = other DNA
accatcaaaacctaacaaatcacaaaaaacttccaataatcracratcac

SEQ ID NO: 12824 - DNA, 50 bp, synthetic construct
  source 1..50: mol_type = other DNA
ccttaaaccatcaaaacctaacaaatcacaaaaaacttccaataatcrac

SEQ ID NO: 12825 - DNA, 50 bp, synthetic construct
  source 1..50: mol_type = other DNA
ttctcttatatataataacttaatctctaaatttttattccttttctacc

SEQ ID NO: 12826 - DNA, 50 bp, synthetic construct
  source 1..50: mol_type = other DNA
ataaacaataataaaaaacataaactaaaaattccaaaaaccctaaactc

SEQ ID NO: 12827 - DNA, 50 bp, synthetic construct
  source 1..50: mol_type = other DNA
tatataaatacattacttatccatattactcaataattaaaccraaaaac

SEQ ID NO: 12828 - DNA, 50 bp, synthetic construct
  source 1..50: mol_type = other DNA
tattcraaactatccaaaaaacrctaactattacacctattcctccctac

SEQ ID NO: 12829 - DNA, 50 bp, synthetic construct
  source 1..50: mol_type = other DNA
ctctcccraaaaactaaaccaaatcctctcctataaatctattaaaaaac

SEQ ID NO: 12830 - DNA, 50 bp, synthetic construct
  source 1..50: mol_type = other DNA
ctataaacaacacttcaaaaaactctactatcaaaatacacctaaacccc

SEQ ID NO: 12831 - DNA, 50 bp, synthetic construct
  source 1..50: mol_type = other DNA
actaaaacaattcctaaacattcttcctaaaaacctacaaacataaatac

SEQ ID NO: 12832 - DNA, 50 bp, synthetic construct
  source 1..50: mol_type = other DNA
ctattaaacaatcctattctacaatatccttaacatctacttaaatctcc

SEQ ID NO: 12833 - DNA, 50 bp, synthetic construct
  source 1..50: mol_type = other DNA
accatattttaaatactcaataaccacattttactaataactaccatatc

SEQ ID NO: 12834 - DNA, 50 bp, synthetic construct
  source 1..50: mol_type = other DNA
aaacaaaaactaatctctacaattcaaaacactaaaaaataaaattcaac

SEQ ID NO: 12835 - DNA, 50 bp, synthetic construct
  source 1..50: mol_type = other DNA
taattcatataaccttcccaaaaaaaccaacttatccataaatatatccc

SEQ ID NO: 12836 - DNA, 50 bp, synthetic construct
  source 1..50: mol_type = other DNA
attattaataaaaaccctaaccataataatcraaataatctaaaactccc

SEQ ID NO: 12837 - DNA, 50 bp, synthetic construct
  source 1..50: mol_type = other DNA
caaacctaactaattttatattattaataaaaaccctaaccataataatc

SEQ ID NO: 12838 - DNA, 50 bp, synthetic construct
  source 1..50: mol_type = other DNA
atctttttaaataatactcrtaatcttaacaattaacataattttaaacc

SEQ ID NO: 12839 - DNA, 50 bp, synthetic construct
  source 1..50: mol_type = other DNA
ttaaataaatcccaaaaaacactatctaacatctaatttaaacraaactc

SEQ ID NO: 12840 - DNA, 50 bp, synthetic construct
  source 1..50: mol_type = other DNA
aataaatcccaaaaaacactatctaacatctaatttaaacraaactcrac

SEQ ID NO: 12841 - DNA, 50 bp, synthetic construct
  source 1..50: mol_type = other DNA
aaataaacccactacaaacctataaaaacctccraaatacctaaaaaccc

SEQ ID NO: 12842 - DNA, 50 bp, synthetic construct
  source 1..50: mol_type = other DNA
raaatcacaataaacaaaacaccaacaaatacaatctacraccrcraaac

SEQ ID NO: 12843 - DNA, 50 bp, synthetic construct
  source 1..50: mol_type = other DNA
atcctacraaatcacaataaacaaaacaccaacaaatacaatctacracc

SEQ ID NO: 12844 - DNA, 50 bp, synthetic construct
  source 1..50: mol_type = other DNA
caaaatcctacraaatcacaataaacaaaacaccaacaaatacaatctac

SEQ ID NO: 12845 - DNA, 50 bp, synthetic construct
  source 1..50: mol_type = other DNA
crctaaaacaataaacrtactaaaaaataacraaccttaatatcccctcc

SEQ ID NO: 12846 - DNA, 50 bp, synthetic construct
  source 1..50: mol_type = other DNA
tacctcaaacttacrctatcrctaaaacaataaacrtactaaaaaataac

SEQ ID NO: 12847 - DNA, 50 bp, synthetic construct
  source 1..50: mol_type = other DNA
tccraaaatacctttaaaacaaaatacrtactaaccratattatacctcc

SEQ ID NO: 12848 - DNA, 50 bp, synthetic construct
  source 1..50: mol_type = other DNA
atattatacctccrcaaatttaaaaattaataaccraaaaaacctaatcc

SEQ ID NO: 12849 - DNA, 50 bp, synthetic construct
  source 1..50: mol_type = other DNA
aatttaaaaattaataaccraaaaaacctaatccraatacaactttcatc

SEQ ID NO: 12850 - DNA, 50 bp, synthetic construct
  source 1..50: mol_type = other DNA
tactcataactaaccaaaattttaaaaataaaaccctcccaaaattcctc

SEQ ID NO: 12851 - DNA, 50 bp, synthetic construct
  source 1..50: mol_type = other DNA
taactaccaccaccacctttaaaaacatatttctattatttattaattcc

SEQ ID NO: 12852 - DNA, 50 bp, synthetic construct
  source 1..50: mol_type = other DNA
ccaaaattaaaactacttccctttcaattacaaccctaatttttactacc

SEQ ID NO: 12853 - DNA, 50 bp, synthetic construct
  source 1..50: mol_type = other DNA
craatccttctaccactttattctacattcaaaaaattaatttacttccc

SEQ ID NO: 12854 - DNA, 50 bp, synthetic construct
  source 1..50: mol_type = other DNA
craaaaacaaatcaaccctttaaatacaaaataaaataacaaaaaaaccc

SEQ ID NO: 12855 - DNA, 50 bp, synthetic construct
  source 1..50: mol_type = other DNA
aaaacaaatcaaccctttaaatacaaaataaaataacaaaaaaacccrac

SEQ ID NO: 12856 - DNA, 50 bp, synthetic construct
  source 1..50: mol_type = other DNA
aataccracattcattaataaacaaaaatcacctacttttttattaaccc

SEQ ID NO: 12857 - DNA, 50 bp, synthetic construct
  source 1..50: mol_type = other DNA
acctattattaaatatttaccaaataacttcactactctaaataacaatc

SEQ ID NO: 12858 - DNA, 50 bp, synthetic construct
  source 1..50: mol_type = other DNA
cttcrtctatataatactcccaataaatcttataaaaacataatctaatc

SEQ ID NO: 12859 - DNA, 50 bp, synthetic construct
  source 1..50: mol_type = other DNA
ttatttttaaaaatcataaccataactacctacttcccccaaccctcrac

SEQ ID NO: 12860 - DNA, 50 bp, synthetic construct
  source 1..50: mol_type = other DNA
aaattatttttaaaaatcataaccataactacctacttcccccaaccctc

SEQ ID NO: 12861 - DNA, 50 bp, synthetic construct
  source 1..50: mol_type = other DNA
tataatcataactcccaaaaataattccttcaacrcttaaaaaattaaac

SEQ ID NO: 12862 - DNA, 50 bp, synthetic construct
  source 1..50: mol_type = other DNA
ctcccaaaaataattccttcaacrcttaaaaaattaaacractaaaaaac

SEQ ID NO: 12863 - DNA, 50 bp, synthetic construct
  source 1..50: mol_type = other DNA
tattaataaaaactccataatctattttaactccaaaacrataataactc

SEQ ID NO: 12864 - DNA, 50 bp, synthetic construct
  source 1..50: mol_type = other DNA
aatatcttatatattaataaaaactccataatctattttaactccaaaac

SEQ ID NO: 12865 - DNA, 50 bp, synthetic construct
  source 1..50: mol_type = other DNA
cataaaccaccatacccaaccttaaataaattttattaatacaaaaaaac

SEQ ID NO: 12866 - DNA, 50 bp, synthetic construct
  source 1..50: mol_type = other DNA
atttaaaactaaacataataactcatacctataccaacactttaccaaac

SEQ ID NO: 12867 - DNA, 50 bp, synthetic construct
  source 1..50: mol_type = other DNA
tataaaccrcacacaaattttaaacraaaaacrttaataaaacataaacc

SEQ ID NO: 12868 - DNA, 50 bp, synthetic construct
  source 1..50: mol_type = other DNA
acttttaaaaatcatcattttcaataattaacratctatacttcatcaac

SEQ ID NO: 12869 - DNA, 50 bp, synthetic construct; identical to SEQ ID NO: 12868
  source 1..50: mol_type = other DNA

SEQ ID NO: 12870 - DNA, 50 bp, synthetic construct
  source 1..50: mol_type = other DNA
aaaatcatcattttcaataattaacratctatacttcatcaacrttttcc

SEQ ID NO: 12871 - DNA, 50 bp, synthetic construct
  source 1..50: mol_type = other DNA
tcacataatcaaaatatcatacrtatataaaccrcacacaaattttaaac

SEQ ID NO: 12872 - DNA, 50 bp, synthetic construct
  source 1..50: mol_type = other DNA
ctaaatcctaaacctattatcrttattcaccraaataacccttcaacctc

SEQ ID NO: 12873 - DNA, 50 bp, synthetic construct
  source 1..50: mol_type = other DNA
ctcccraatatttctttccctaaatcctaaacctattatcrttattcacc

SEQ ID NO: 12874 - DNA, 50 bp, synthetic construct
  source 1..50: mol_type = other DNA
ttaacttcctctcccraatatttctttccctaaatcctaaacctattatc

SEQ ID NO: 12875 - DNA, 50 bp, synthetic construct
  source 1..50: mol_type = other DNA
ctccatcrtaaaaactaccaaaatcttaattatccttaacttcctctccc

SEQ ID NO: 12876 - DNA, 50 bp, synthetic construct
  source 1..50: mol_type = other DNA
aaaaaatcraaaactactacattctacrcttaaaaaccaatccattcaac

SEQ ID NO: 12877 - DNA, 50 bp, synthetic construct
  source 1..50: mol_type = other DNA
ctcccttaatccaaaaatctcttaataacacaactatcraaaataccttc

SEQ ID NO: 12878 - DNA, 50 bp, synthetic construct
  source 1..50: mol_type = other DNA
ctttatactcacatataacctcaaccactaataacaaaattcctaaaatc

SEQ ID NO: 12879 - DNA, 50 bp, synthetic construct
  source 1..50: mol_type = other DNA
cacatttttctctaacaaatctcccttcctacctcatattataattcatc

SEQ ID NO: 12880 - DNA, 50 bp, synthetic construct
  source 1..50: mol_type = other DNA
cttactatacatctcaaactacaaccattatccrcaaaattctcraaacc

SEQ ID NO: 12881 - DNA, 50 bp, synthetic construct
  source 1..50: mol_type = other DNA
aaaaacraccctacaaaaacacraactataaaaaaaatctatacaactac

SEQ ID NO: 12882 - DNA, 50 bp, synthetic construct
  source 1..50: mol_type = other DNA
atattcaaaataaaaactttcttttccatattatcaataaaaatactatc

SEQ ID NO: 12883 - DNA, 50 bp, synthetic construct
  source 1..50: mol_type = other DNA
cttatttttataaactataataatcatatttctaccaaatccattcatac

SEQ ID NO: 12884 - DNA, 50 bp, synthetic construct
  source 1..50: mol_type = other DNA
aaaaactaacataaatactacctactaaaaacractaaaaaaatcatttc

SEQ ID NO: 12885 - DNA, 50 bp, synthetic construct
  source 1..50: mol_type = other DNA
ttccacccacctccttcaaatttctactcaaatattaccttctcrataac

SEQ ID NO: 12886 - DNA, 50 bp, synthetic construct
  source 1..50: mol_type = other DNA
tttcatccattcaacrcaattttaaataaatattaaaaataaacrccacc

SEQ ID NO: 12887 - DNA, 50 bp, synthetic construct
  source 1..50: mol_type = other DNA
atttaaccctcacacaaccctataaaaaaaacactattcctaatttcttc

SEQ ID NO: 12888 - DNA, 50 bp, synthetic construct
  source 1..50: mol_type = other DNA
tatacataaatttaaaacrtacttacaccrtccraataaacctaaaatcc

SEQ ID NO: 12889 - DNA, 50 bp, synthetic construct
  source 1..50: mol_type = other DNA
taataaaccaaaaattcaaaaacrcrcacaacaaaaacrtaactaacctc

SEQ ID NO: 12890 - DNA, 50 bp, synthetic construct
  source 1..50: mol_type = other DNA
ctaattattaattaataaaccaaaaattcaaaaacrcrcacaacaaaaac

SEQ ID NO: 12891 - DNA, 50 bp, synthetic construct
  source 1..50: mol_type = other DNA
ctaaactccctcraaaacctttcacraaatcaactacrtctttattatac

SEQ ID NO: 12892 - DNA, 50 bp, synthetic construct
  source 1..50: mol_type = other DNA
cttttaatccattaaccaacaattaaacacrccratattcaatacctaac

SEQ ID NO: 12893 - DNA, 50 bp, synthetic construct
  source 1..50: mol_type = other DNA
aacrcrcccctaaatatatttttctaaaattacacccaacatctaacacc

SEQ ID NO: 12894 - DNA, 50 bp, synthetic construct
  source 1..50: mol_type = other DNA
aacrcratactaaatactaaatataatctcaaaaaaatacattcaaaaac

SEQ ID NO: 12895 - DNA, 50 bp, synthetic construct
  source 1..50: mol_type = other DNA
crcratactaaatactaaatataatctcaaaaaaatacattcaaaaacrc

SEQ ID NO: 12896 - DNA, 50 bp, synthetic construct
  source 1..50: mol_type = other DNA
acacrtacctaatattcaaaaaatactaataaacttcttcacraatacac

SEQ ID NO: 12897 - DNA, 50 bp, synthetic construct
  source 1..50: mol_type = other DNA
crcrcctaaaaatactaactactaacatctcaaatactttacrtacattc

SEQ ID NO: 12898 - DNA, 50 bp, synthetic construct
  source 1..50: mol_type = other DNA
attcttaaaaacaaaaatttatctctacataaactctacatacccracac

SEQ ID NO: 12899 - DNA, 50 bp, synthetic construct
  source 1..50: mol_type = other DNA
accraacatataaaatctatacaaaaataaactcctatcctcaaaaaccc

SEQ ID NO: 12900 - DNA, 50 bp, synthetic construct
  source 1..50: mol_type = other DNA
aaaataaaatattcccataaaaaactacacccaaccctcatctccatctc

SEQ ID NO: 12901 - DNA, 50 bp, synthetic construct
  source 1..50: mol_type = other DNA
ctctatacaatcaaaaccrcccttctaaaaataaattcccaaaacccaac

SEQ ID NO: 12902 - DNA, 50 bp, synthetic construct
  source 1..50: mol_type = other DNA
atttccctacataaccacaaaattattaacacacccaactaaatataaac

SEQ ID NO: 12903 - DNA, 50 bp, synthetic construct
  source 1..50: mol_type = other DNA
aaaaaataaaacttttaacaaaaaaaaacccttctctacctctaaacctc

SEQ ID NO: 12904 - DNA, 50 bp, synthetic construct
  source 1..50: mol_type = other DNA
taaaacttttaacaaaaaaaaacccttctctacctctaaacctcratttc

SEQ ID NO: 12905 - DNA, 50 bp, synthetic construct
  source 1..50: mol_type = other DNA
tatacaaatttttatccaaataaacccraaatttttctatctatacaacc

SEQ ID NO: 12906 - DNA, 50 bp, synthetic construct
  source 1..50: mol_type = other DNA
aaatattatacctaaaaatatacccacractacataaataaaaaaacctc

SEQ ID NO: 12907 - DNA, 50 bp, synthetic construct
  source 1..50: mol_type = other DNA
atcaacaaattcccaaaaaaaatttcttctccttttataaatataaacac

SEQ ID NO: 12908 - DNA, 50 bp, synthetic construct
  source 1..50: mol_type = other DNA
acttaacttaacccaaaacctatcaaaaaccraaataaaaatttaacccc

SEQ ID NO: 12909 - DNA, 50 bp, synthetic construct
  source 1..50: mol_type = other DNA
ataataattcataactactacttaacttaacccaaaacctatcaaaaacc

SEQ ID NO: 12910 - DNA, 50 bp, synthetic construct
  source 1..50: mol_type = other DNA
ccaaactaaacaacaactataaatcatcatttcaactcctaattaatccc

SEQ ID NO: 12911 - DNA, 50 bp, synthetic construct
  source 1..50: mol_type = other DNA
taaatcatcatttcaactcctaattaatcccraaccaaactaaatcaaac

SEQ ID NO: 12912 - DNA, 50 bp, synthetic construct
  source 1..50: mol_type = other DNA
tcatcatttcaactcctaattaatcccraaccaaactaaatcaaacrttc

SEQ ID NO: 12913 - DNA, 50 bp, synthetic construct
  source 1..50: mol_type = other DNA
accccttctctactaacaaaaaactttttcctttcrcttattaaactttc

SEQ ID NO: 12914 - DNA, 50 bp, synthetic construct
  source 1..50: mol_type = other DNA
ttttcctttcrcttattaaactttcrctctaacctcacctttatatctac

SEQ ID NO: 12915 - DNA, 50 bp, synthetic construct
  source 1..50: mol_type = other DNA
tcccrccccttatcctaaaaattaaacaacctttctttatctaaaataac

SEQ ID NO: 12916 - DNA, 50 bp, synthetic construct
  source 1..50: mol_type = other DNA
aaaaactatttaatcttcaaaataaaaaacraaacctccacctactccac

SEQ ID NO: 12917 - DNA, 50 bp, synthetic construct
  source 1..50: mol_type = other DNA
aaacctccacctactccacraaaacttcaaaccaataaatatataaaaac

SEQ ID NO: 12918 - DNA, 50 bp, synthetic construct
  source 1..50: mol_type = other DNA
cctactccacraaaacttcaaaccaataaatatataaaaacraaaatcac

SEQ ID NO: 12919 - DNA, 50 bp, synthetic construct
  source 1..50: mol_type = other DNA
ccacraaaacttcaaaccaataaatatataaaaacraaaatcacrcctac

SEQ ID NO: 12920 - DNA, 50 bp, synthetic construct
  source 1..50: mol_type = other DNA
rcracccrccaaattcccaaaaaatttcaaatctataccttaaaataaac

SEQ ID NO: 12921 - DNA, 50 bp, synthetic construct
  source 1..50: mol_type = other DNA
ccrcctactccaaaacacaaacctaaaatcttctaaaaacctaacraatc

SEQ ID NO: 12922 - DNA, 50 bp, synthetic construct
  source 1..50: mol_type = other DNA
aaaaattccaaaaataactactacttaataactcccttattacaaacccc

SEQ ID NO: 12923 - DNA, 50 bp, synthetic construct
  source 1..50: mol_type = other DNA
tctacrtttatatcttcctaacaccttccractctaatattttaaatctc

SEQ ID NO: 12924 - DNA, 50 bp, synthetic construct
  source 1..50: mol_type = other DNA
attaaaactatttaaacactttccaactaaaaacaaatataattaaaacc

SEQ ID NO: 12925 - DNA, 50 bp, synthetic construct
  source 1..50: mol_type = other DNA
acactttccaactaaaaacaaatataattaaaaccrttaaactctattac

SEQ ID NO: 12926 - DNA, 50 bp, synthetic construct
  source 1..50: mol_type = other DNA
catttatttcctacatacrtacttaacatattccaaaaactattctcatc

SEQ ID NO: 12927 - DNA, 50 bp, synthetic construct
  source 1..50: mol_type = other DNA
tcttccacrccacraattcaaactaatacatacatttatttcctacatac

SEQ ID NO: 12928 - DNA, 50 bp, synthetic construct
  source 1..50: mol_type = other DNA
ctactaaatcttattttaccccattaattttcctctctcttccacrccac

SEQ ID NO: 12929 - DNA, 50 bp, synthetic construct
  source 1..50: mol_type = other DNA
aattcctactaaatcttattttaccccattaattttcctctctcttccac

SEQ ID NO: 12930 - DNA, 50 bp, synthetic construct
  source 1..50: mol_type = other DNA
ractctcctcctatcratcctacaattcttttatccccraataaaaatac

SEQ ID NO: 12931 - DNA, 50 bp, synthetic construct
  source 1..50: mol_type = other DNA
taaatatatcaatattattttcctaccataaacttcctcccttccccacc

SEQ ID NO: 12932 - DNA, 50 bp, synthetic construct
  source 1..50: mol_type = other DNA
attccacttaaactccaaattcactctaaattaaactataactctctctc

SEQ ID NO: 12933 - DNA, 50 bp, synthetic construct
  source 1..50: mol_type = other DNA
tatttctaaactataaactcctaatccctatcctaaactacctcccaaac

SEQ ID NO: 12934 - DNA, 50 bp, synthetic construct
  source 1..50: mol_type = other DNA
ctacaacaactactactaaataaaatcatattttacctacctacaacccc

SEQ ID NO: 12935 - DNA, 50 bp, synthetic construct
  source 1..50: mol_type = other DNA
ttatataacaaataaaataatacrcctacrttccaaactcrctaaatcac

SEQ ID NO: 12936 - DNA, 50 bp, synthetic construct
  source 1..50: mol_type = other DNA
taccaaacctatatattaaacctatatacccaaaaacctatatctccctc

SEQ ID NO: 12937 - DNA, 50 bp, synthetic construct
  source 1..50: mol_type = other DNA
cattcctcttaatcracattactccaaaaaaccaaaaacactttaccttc

SEQ ID NO: 12938 - DNA, 50 bp, synthetic construct
  source 1..50: mol_type = other DNA
taaaataataccactatataataaacttaaccaatacattcctcttaatc

SEQ ID NO: 12939 - DNA, 50 bp, synthetic construct
  source 1..50: mol_type = other DNA
aacaccatcccaattctattatcaaataacctatcaaatccataataaac

SEQ ID NO: 12940 - DNA, 50 bp, synthetic construct
  source 1..50: mol_type = other DNA
aaactaatcaataaaaataaaacctatatctttaaacctcracatcracc

SEQ ID NO: 12941 - DNA, 50 bp, synthetic construct
  source 1..50: mol_type = other DNA
tcaaacataaaaaaaacatccacaatacataaacaaaaaactaaacracc

SEQ ID NO: 12942 - DNA, 50 bp, synthetic construct
  source 1..50: mol_type = other DNA
ataaaaaaaacatccacaatacataaacaaaaaactaaacraccratacc

SEQ ID NO: 12943 - DNA, 50 bp, synthetic construct
  source 1..50: mol_type = other DNA
ccraaatccaaaaatacaaatttcactttcactaaccaactttcataacc

SEQ ID NO: 12944 - DNA, 50 bp, synthetic construct
  source 1..50: mol_type = other DNA
caatatataaactcracaaaccactaatccctaaacctaaataaatttcc

SEQ ID NO: 12945 - DNA, 50 bp, synthetic construct
  source 1..50: mol_type = other DNA
atacaactctacccraaaacttattcaaatttaaaaaccaataacttacc

SEQ ID NO: 12946 - DNA, 50 bp, synthetic construct
  source 1..50: mol_type = other DNA
aatttaaaaaccaataacttaccraatccacatattacctttaattatcc

SEQ ID NO: 12947 - DNA, 50 bp, synthetic construct
  source 1..50: mol_type = other DNA
tttacatttctacctaactacaacaaataatctttaaactaaaacrctcc

SEQ ID NO: 12948 - DNA, 50 bp, synthetic construct
  source 1..50: mol_type = other DNA
acatttctacctaactacaacaaataatctttaaactaaaacrctccrac

SEQ ID NO: 12949 - DNA, 50 bp, synthetic construct
  source 1..50: mol_type = other DNA
cttccacaaaaaaattataaataaattaaaaccacattaaccaactttcc

SEQ ID NO: 12950 - DNA, 50 bp, synthetic construct
  source 1..50: mol_type = other DNA
ctattctttaatataaatctctaacctcaaccactaataacaaaattctc

SEQ ID NO: 12951 - DNA, 50 bp, synthetic construct
  source 1..50: mol_type = other DNA
tttaatataaatctctaacctcaaccactaataacaaaattctcraaatc

SEQ ID NO: 12952 - DNA, 50 bp, synthetic construct
  source 1..50: mol_type = other DNA
cttccrtcaatacttcaaacaattctactaccaaaaaacatctaatcccc

SEQ ID NO: 12953 - DNA, 50 bp, synthetic construct
  source 1..50: mol_type = other DNA
ctatctaaaatactaacraaaaacctctctactataaatattatttttac

SEQ ID NO: 12954 - DNA, 50 bp, synthetic construct
  source 1..50: mol_type = other DNA
taaacctaaataacccaaataaataccattttaactatactaaaactacc

SEQ ID NO: 12955 - DNA, 50 bp, synthetic construct
  source 1..50: mol_type = other DNA
aaattcaacrcttaccracatttctaaacaataataaatcacaaacrctc

SEQ ID NO: 12956 - DNA, 50 bp, synthetic construct
  source 1..50: mol_type = other DNA
ccttaaattcaacrcttaccracatttctaaacaataataaatcacaaac

SEQ ID NO: 12957 - DNA, 50 bp, synthetic construct
  source 1..50: mol_type = other DNA
caaaaatatcrataaacrctaaacccaaaaatacacaacccraaacaaac

SEQ ID NO: 12958 - DNA, 50 bp, synthetic construct
  source 1..50: mol_type = other DNA
ttaactcccaatctctacaacaattccaaactataaaacccataccttcc

SEQ ID NO: 12959 - DNA, 50 bp, synthetic construct
  source 1..50: mol_type = other DNA
taaacraaaaattactatattccaactactaaacccctcaaaccctaacc

SEQ ID NO: 12960 - DNA, 50 bp, synthetic construct
  source 1..50: mol_type = other DNA
tccracctttataaatcacttttaataaattccraatcccaaaaaaattc

SEQ ID NO: 12961 - DNA, 50 bp, synthetic construct
  source 1..50: mol_type = other DNA
aataaaaacrcaaaaaatttccctatcttaaaatcaattctacaaacctc

SEQ ID NO: 12962 - DNA, 50 bp, synthetic construct
  source 1..50: mol_type = other DNA
ttaaaacatctctaacctcaaaaacacaaaatcccaaaataaataaaaac

SEQ ID NO: 12963 - DNA, 50 bp, synthetic construct
  source 1..50: mol_type = other DNA
ttaaaattctatatctctaaaattaaaaatacctcaaaaaaatattctcc

SEQ ID NO: 12964 - DNA, 50 bp, synthetic construct
  source 1..50: mol_type = other DNA
caaccractaacccttaaaaaatctatataaaaaaaatcccttcrccacc

SEQ ID NO: 12965 - DNA, 50 bp, synthetic construct
  source 1..50: mol_type = other DNA
tcttactattttactaaattatcctttttttataatttttccattaaacc

SEQ ID NO: 12966 - DNA, 50 bp, synthetic construct
  source 1..50: mol_type = other DNA
cttacaccttacatatcaaactatttatatcactacttaaaacttattac

SEQ ID NO: 12967 - DNA, 50 bp, synthetic construct
  source 1..50: mol_type = other DNA
cacttctccatttctctataaaaaaattatatacaattctaattacccac

SEQ ID NO: 12968 - DNA, 50 bp, synthetic construct
  source 1..50: mol_type = other DNA
acaaacatttcttcatatccraatctatttaaatcctaaaatacaaatac

SEQ ID NO: 12969 - DNA, 50 bp, synthetic construct
  source 1..50: mol_type = other DNA
aaaaattactccrcaacctaaaaaaactttattaaccaaaaatcaacrtc

SEQ ID NO: 12970 - DNA, 50 bp, synthetic construct
  source 1..50: mol_type = other DNA
aaaaaaaattactccrcaacctaaaaaaactttattaaccaaaaatcaac

SEQ ID NO: 12971 - DNA, 50 bp, synthetic construct
  source 1..50: mol_type = other DNA
aactaaatataaaaatttaacracaaaatcttcttaaccaaaaataaacc

SEQ ID NO: 12972 - DNA, 50 bp, synthetic construct
  source 1..50: mol_type = other DNA
raaaaaaccaatctatacactacracctaaactaaatataaaaatttaac

SEQ ID NO: 12973 - DNA, 50 bp, synthetic construct
  source 1..50: mol_type = other DNA
caaaacaaatataatctacrctaaataacatctcctctcacraatacctc

SEQ ID NO: 12974 - DNA, 50 bp, synthetic construct
  source 1..50: mol_type = other DNA
tcaaaaattcaaaacaaatataatctacrctaaataacatctcctctcac

SEQ ID NO: 12975 - DNA, 50 bp, synthetic construct
  source 1..50: mol_type = other DNA
atcattctttaaactacrattatcaaaaattcaaaacaaatataatctac

SEQ ID NO: 12976 - DNA, 50 bp, synthetic construct
  source 1..50: mol_type = other DNA
aacrattacattcttaaaacrttttctaatcccaaacacttattaaatac

SEQ ID NO: 12977 - DNA, 50 bp, synthetic construct
  source 1..50: mol_type = other DNA
aattctattaaaaacatattctttacatataattttttcactataaatac

SEQ ID NO: 12978 - DNA, 50 bp, synthetic construct
  source 1..50: mol_type = other DNA
aaaaatacatacataataacaatctatttatacccccaccccatcctacc

SEQ ID NO: 12979 - DNA, 50 bp, synthetic construct
  source 1..50: mol_type = other DNA
crctaaattaaaactccaatctcttcraaaacrtaaatttaaatcccacc

SEQ ID NO: 12980 - DNA, 50 bp, synthetic construct
  source 1..50: mol_type = other DNA
taaccraataatctaaaacrctaaattaaaactccaatctcttcraaaac

SEQ ID NO: 12981 - DNA, 50 bp, synthetic construct
  source 1..50: mol_type = other DNA
ataacrtaaccraataatctaaaacrctaaattaaaactccaatctcttc

SEQ ID NO: 12982 - DNA, 50 bp, synthetic construct
  source 1..50: mol_type = other DNA
taaatcctaatactaaactaacrtaataacrtaaccraataatctaaaac

SEQ ID NO: 12983 - DNA, 50 bp, synthetic construct
  source 1..50: mol_type = other DNA
tatcttttaaatcattaaaataaatcctaatactaaactaacrtaataac

SEQ ID NO: 12984 - DNA, 50 bp, synthetic construct
  source 1..50: mol_type = other DNA
taatcttatatcttttaaatcattaaaataaatcctaatactaaactaac

SEQ ID NO: 12985 - DNA, 50 bp, synthetic construct
  source 1..50: mol_type = other DNA
ccaatattaaaactcatcttaataatttaaaaaacacaaaattattctac

SEQ ID NO: 12986 - DNA, 50 bp, synthetic construct
  source 1..50: mol_type = other DNA
ctacrtcttactatttttttttctcaaaacatttctacacaaataattcc

SEQ ID NO: 12987 - DNA, 50 bp, synthetic construct
  source 1..50: mol_type = other DNA
tcttactatttttttttctcaaaacatttctacacaaataattccrtaac

SEQ ID NO: 12988 - DNA, 50 bp, synthetic construct
  source 1..50: mol_type = other DNA
ttttctcaaaacatttctacacaaataattccrtaacratctcaactacc

SEQ ID NO: 12989 - DNA, 50 bp, synthetic construct
  source 1..50: mol_type = other DNA
crtactacrtcracctaaacrtaaaatttctaatcatattcttaaaaacc

SEQ ID NO: 12990 - DNA, 50 bp, synthetic construct
  source 1..50: mol_type = other DNA
caacaaatcccaaaaaaatcrattcttaaaaacataattaaaaatcccac

SEQ ID NO: 12991 - DNA, 50 bp, synthetic construct
  source 1..50: mol_type = other DNA
ccaaaaaaatcrattcttaaaaacataattaaaaatcccacrcctaaacc

SEQ ID NO: 12992 - DNA, 50 bp, synthetic construct
  source 1..50: mol_type = other DNA
aaaaaatcrattcttaaaaacataattaaaaatcccacrcctaaaccrac

SEQ ID NO: 12993 - DNA, 50 bp, synthetic construct
  source 1..50: mol_type = other DNA
ttccacctctttcacaaaaaaaaatcacrcacaaacacataaaccaaaac

SEQ ID NO: 12994 - DNA, 50 bp, synthetic construct
  source 1..50: mol_type = other DNA
acaaatctatttacataattctttccacctctttcacaaaaaaaaatcac

SEQ ID NO: 12995 - DNA, 50 bp, synthetic construct
  source 1..50: mol_type = other DNA
taaaatccraaaaaaatataatactccrcaccaaatacaaactaatcctc

SEQ ID NO: 12996 - DNA, 50 bp, synthetic construct
  source 1..50: mol_type = other DNA
aacraacaaacracacatcctattaaaatccraaaaaaatataatactcc

SEQ ID NO: 12997 - DNA, 50 bp, synthetic construct
  source 1..50: mol_type = other DNA
taacaaatcacttaaactcactaaatctcactttcctcatatataaaacc

SEQ ID NO: 12998 - DNA, 50 bp, synthetic construct
  source 1..50: mol_type = other DNA
acaatatacactactctaataacaaatacaccaaaatctcaacaatcacc

SEQ ID NO: 12999 - DNA, 50 bp, synthetic construct
  source 1..50: mol_type = other DNA
aatctcaacaatcaccrctaaataacctactcatataaccaaacaccacc

SEQ ID NO: 13000 - DNA, 50 bp, synthetic construct
  source 1..50: mol_type = other DNA
aaatataaattttccacrtaccatcttaacttaaaaaaaataattcactc

SEQ ID NO: 13001 - DNA, 50 bp, synthetic construct
  source 1..50: mol_type = other DNA
ctccatacraaaaatacctattccttctctaataaatttaacaacttcac

SEQ ID NO: 13002 - DNA, 50 bp, synthetic construct
  source 1..50: mol_type = other DNA
ttaaaatcttataatatcattttcaaaaaaccaataaaattctatatcac

SEQ ID NO: 13003 - DNA, 50 bp, synthetic construct
  source 1..50: mol_type = other DNA
caaaaaaccaataaaattctatatcacrtaaaacctctcaaaaaaaatac

SEQ ID NO: 13004 - DNA, 50 bp, synthetic construct
  source 1..50: mol_type = other DNA
ttaattcccaaaatccaaaacraaaatccttttacrttatacrtatcttc

SEQ ID NO: 13005 - DNA, 50 bp, synthetic construct
  source 1..50: mol_type = other DNA
tcaaaaccttaattcccaaaatccaaaacraaaatccttttacrttatac

SEQ ID NO: 13006 - DNA, 50 bp, synthetic construct
  source 1..50: mol_type = other DNA
aattaaaaccctaaacacattaaacaaaaaataaatctatctatacaaac

SEQ ID NO: 13007 - DNA, 50 bp, synthetic construct
  source 1..50: mol_type = other DNA
aaacacattaaacaaaaaataaatctatctatacaaacrtttctttccac

SEQ ID NO: 13008 - DNA, 50 bp, synthetic construct
  source 1..50: mol_type = other DNA
tttctttccacrtctttcataataaaaactttattaaaaaacaaacactc

SEQ ID NO: 13009 - DNA, 50 bp, synthetic construct
  source 1..50: mol_type = other DNA
ttttctaattatacacattaaaaataactctctactacctactcctaaac

SEQ ID NO: 13010 - DNA, 50 bp, synthetic construct
  source 1..50: mol_type = other DNA
aattatacacattaaaaataactctctactacctactcctaaacrcaacc

SEQ ID NO: 13011 - DNA, 50 bp, synthetic construct
  source 1..50: mol_type = other DNA
aaaataactctctactacctactcctaaacrcaaccracaaaaataaaac

SEQ ID NO: 13012 - DNA, 50 bp, synthetic construct
  source 1..50: mol_type = other DNA
taacacaaactacctataaataactaaactaaaaacaccctataacacac

SEQ ID NO: 13013 - DNA, 50 bp, synthetic construct
  source 1..50: mol_type = other DNA
aaaattaaaactccacaatctactaatttatatactccccctctactccc

SEQ ID NO: 13014 - DNA, 50 bp, synthetic construct
  source 1..50: mol_type = other DNA
aaaacaacctaaactactcataaattaaaattcataaaataacacaaaac

SEQ ID NO: 13015 - DNA, 50 bp, synthetic construct
  source 1..50: mol_type = other DNA
taataattaacactctaaactttaaatccaacratccraattcaaatctc

SEQ ID NO: 13016 - DNA, 50 bp, synthetic construct
  source 1..50: mol_type = other DNA
tccctaataaaataaacccratacctcaaattaaaatacaaaaatcaccc

SEQ ID NO: 13017 - DNA, 50 bp, synthetic construct
  source 1..50: mol_type = other DNA
tcaatctaaaataccraattcatctcactaaaaaataccaaacaataaac

SEQ ID NO: 13018 - DNA, 50 bp, synthetic construct
  source 1..50: mol_type = other DNA
tcactaaaaaataccaaacaataaacacaaaacaataaatacaacrcacc

SEQ ID NO: 13019 - DNA, 50 bp, synthetic construct
  source 1..50: mol_type = other DNA
tcactaaaaaataccaaacaataaacrcaaaacaataaatacaacrcacc

SEQ ID NO: 13020 - DNA, 50 bp, synthetic construct
  source 1..50: mol_type = other DNA
rtcraaaaaacrcaatattaaaataataataacccrattttccaaatacc

SEQ ID NO: 13021 - DNA, 50 bp, synthetic construct
  source 1..50: mol_type = other DNA
aaataacaaacracacctaaaaaatcraatcactaccaccccaatactac

SEQ ID NO: 13022 - DNA, 50 bp, synthetic construct
  source 1..50: mol_type = other DNA
raaccaaatacraaatataatctcctaatataccrttttttaaacccrtc

SEQ ID NO: 13023 - DNA, 50 bp, synthetic construct
  source 1..50: mol_type = other DNA
tacctaaataccaacaacrataactacaaaacaacraattttcataaacc

SEQ ID NO: 13024 - DNA, 50 bp, synthetic construct
  source 1..50: mol_type = other DNA
aaatttactaaaaatccactctaaaccctatttacctaaataccaacaac

SEQ ID NO: 13025 - DNA, 50 bp, synthetic construct
  source 1..50: mol_type = other DNA
ccttacaaccatctctattctctccccaatcttaaatccaaaaaattttc

SEQ ID NO: 13026 - DNA, 50 bp, synthetic construct
  source 1..50: mol_type = other DNA
rtaaacacaatttacataactatttcttcaaaattatatcaataattcac

SEQ ID NO: 13027 - DNA, 50 bp, synthetic construct
  source 1..50: mol_type = other DNA
tttatatcaaaaactatctaaactatttaccttaaaataccttttctacc

SEQ ID NO: 13028 - DNA, 50 bp, synthetic construct
  source 1..50: mol_type = other DNA
cttcttccatttactcctttctaaactaactcaaactacttaacacatac

SEQ ID NO: 13029 - DNA, 50 bp, synthetic construct
  source 1..50: mol_type = other DNA
ccatttactcctttctaaactaactcaaactacttaacacatacrcaaac

SEQ ID NO: 13030 - DNA, 50 bp, synthetic construct
  source 1..50: mol_type = other DNA
taaactaactcaaactacttaacacatacrcaaacratattaaaaaaatc

SEQ ID NO: 13031 - DNA, 50 bp, synthetic construct
  source 1..50: mol_type = other DNA
aaaacraacaaaaccacrcaacrataataacaaaattaaaaacaaaaccc

SEQ ID NO: 13032 - DNA, 50 bp, synthetic construct
  source 1..50: mol_type = other DNA
craactccaaaactaataaaacaactaatttacrctaaaaccccaaccac

SEQ ID NO: 13033 - DNA, 50 bp, synthetic construct
  source 1..50: mol_type = other DNA
tacaattatttaaaacacaattaaaaataattctaccctctctcaaccac

SEQ ID NO: 13034 - DNA, 50 bp, synthetic construct
  source 1..50: mol_type = other DNA
aacactataaaaatataccrtattaaatacatctaacctttaaaaccacc

SEQ ID NO: 13035 - DNA, 50 bp, synthetic construct
  source 1..50: mol_type = other DNA
aatacatctaacctttaaaaccaccracctatttccaaatatttaaaaac

SEQ ID NO: 13036 - DNA, 50 bp, synthetic construct
  source 1..50: mol_type = other DNA
ctaaaataaaaacrccaaaaatcraaaccraaacctcatacatacaaaac

SEQ ID NO: 13037 - DNA, 50 bp, synthetic construct
  source 1..50: mol_type = other DNA
ttatttactcatataacccttaacaatataaaataacactacccaattcc

SEQ ID NO: 13038 - DNA, 50 bp, synthetic construct
  source 1..50: mol_type = other DNA
tttactcatataacccttaacaatataaaataacactacccaattccrtc

SEQ ID NO: 13039 - DNA, 50 bp, synthetic construct
  source 1..50: mol_type = other DNA
ctacccaattccrtcractttttcaatttatattcataaaaaatcaaatc

SEQ ID NO: 13040 - DNA, 50 bp, synthetic construct
  source 1..50: mol_type = other DNA
caaatattatccaaaatttctccccatataataacctaaaataaaacrtc

SEQ ID NO: 13041 - DNA, 50 bp, synthetic construct
  source 1..50: mol_type = other DNA
accctttataaatatcaaactaaaaaacaatcaaatctttcccttcccac

SEQ ID NO: 13042 - DNA, 50 bp, synthetic construct
  source 1..50: mol_type = other DNA
actattttctcctatttcaataaataaaacatacaatcraattttacacc

SEQ ID NO: 13043 - DNA, 50 bp, synthetic construct
  source 1..50: mol_type = other DNA
tccaaccttaaaactattttctcctatttcaataaataaaacatacaatc

SEQ ID NO: 13044 - DNA, 50 bp, synthetic construct
  source 1..50: mol_type = other DNA
catactaacaacaatactactctttaatacacccaaaaatatttatatac

SEQ ID NO: 13045 - DNA, 50 bp, synthetic construct
  source 1..50: mol_type = other DNA
aaatatttatatacraaatatttttatacatacacatcaaaacacaacac

SEQ ID NO: 13046 - DNA, 50 bp, synthetic construct
  source 1..50: mol_type = other DNA
ctaatctctaaattccctcaatatttattaatcattatctctaccrtctc

SEQ ID NO: 13047 - DNA, 50 bp, synthetic construct
  source 1..50: mol_type = other DNA
taacactaatctctaaattccctcaatatttattaatcattatctctacc

SEQ ID NO: 13048 - DNA, 50 bp, synthetic construct
  source 1..50: mol_type = other DNA
aaatacraaacttaccaatataaactttaaaaactcatttacraccraac

SEQ ID NO: 13049 - DNA, 50 bp, synthetic construct
  source 1..50: mol_type = other DNA
taaaaaatacraaacttaccaatataaactttaaaaactcatttacracc

SEQ ID NO: 13050 - DNA, 50 bp, synthetic construct
  source 1..50: mol_type = other DNA
ttcttaaaaaatacraaacttaccaatataaactttaaaaactcatttac

SEQ ID NO: 13051 - DNA, 50 bp, synthetic construct
  source 1..50: mol_type = other DNA
aaataaattttcaaaattcacattaacaaactccrcattccttaaaaaac

SEQ ID NO: 13052 - DNA, 50 bp, synthetic construct
  source 1..50: mol_type = other DNA
ataaattttcaaaattcacattaacaaactccrcattccttaaaaaacrc

SEQ ID NO: 13053 - DNA, 50 bp, synthetic construct
  source 1..50: mol_type = other DNA
aataaaaataccaaaaattaaaccaaaaacctcrtacatacraaacatac

SEQ ID NO: 13054 - DNA, 50 bp, synthetic construct
  source 1..50: mol_type = other DNA
aaaaatcctaaaatcaaaaacratactattcaaactaaaatctattactc

SEQ ID NO: 13055 - DNA, 50 bp, synthetic construct
  source 1..50: mol_type = other DNA
tatataataacttcattaaacraataacaaattttaatctaaataacacc

SEQ ID NO: 13056 - DNA, 50 bp, synthetic construct
  source 1..50: mol_type = other DNA
aattctaaaaccttcccattcctattaacttactccaaaatccacttacc

SEQ ID NO: 13057 - DNA, 50 bp, synthetic construct
  source 1..50: mol_type = other DNA
aacccrcractacctctaaactaaaaaacacttttttctaaatcattatc

SEQ ID NO: 13058 - DNA, 50 bp, synthetic construct
  source 1..50: mol_type = other DNA
atattaacaaaacctccracccaacataatataaaaatcaaaaaaaaccc

SEQ ID NO: 13059 - DNA, 50 bp, synthetic construct
  source 1..50: mol_type = other DNA
caaattctaaaattatcctactctaattccacaccccatctctatttctc

SEQ ID NO: 13060 - DNA, 50 bp, synthetic construct
  source 1..50: mol_type = other DNA
taaaattatcctactctaattccacaccccatctctatttctcrcttaac

SEQ ID NO: 13061 - DNA, 50 bp, synthetic construct
  source 1..50: mol_type = other DNA
actttttctttcaaatatatacatatataacaaaattcctccttatatcc

SEQ ID NO: 13062 - DNA, 50 bp, synthetic construct
  source 1..50: mol_type = other DNA
aaaaaacaattttataaaaaacatcttaaaaaccacrcccraactctttc

SEQ ID NO: 13063 - DNA, 50 bp, synthetic construct
  source 1..50: mol_type = other DNA
aatccraacrtaactttcaaaatattctttataaaattacctttccccac

SEQ ID NO: 13064 - DNA, 50 bp, synthetic construct
  source 1..50: mol_type = other DNA
attcatacrattctcctaccttaacctaccraataactaaaaccacaaac

SEQ ID NO: 13065 - DNA, 50 bp, synthetic construct
  source 1..50: mol_type = other DNA
caaactaactttttaaaaatactccaaccttaccraacraaacractcac

SEQ ID NO: 13066 - DNA, 50 bp, synthetic construct
  source 1..50: mol_type = other DNA
tcattactaaattcttcatcccacaaaatactactttttccaaaatacrc

SEQ ID NO: 13067 - DNA, 50 bp, synthetic construct
  source 1..50: mol_type = other DNA
tttcattactaaattcttcatcccacaaaatactactttttccaaaatac

SEQ ID NO: 13068 - DNA, 50 bp, synthetic construct
  source 1..50: mol_type = other DNA
tctataaccaatacrattcacaaaactttaaactccacacattatataac

SEQ ID NO: 13069 - DNA, 50 bp, synthetic construct
  source 1..50: mol_type = other DNA
aaaaacaaaacttcrttacacaatatataaaacccaaaatcctataaacc

SEQ ID NO: 13070 - DNA, 50 bp, synthetic construct
  source 1..50: mol_type = other DNA
aaaccaacaaaactctcatacratcaaaaaatataactcaataataaaac

SEQ ID NO: 13071 - DNA, 50 bp, synthetic construct
  source 1..50: mol_type = other DNA
aaactctcatacratcaaaaaatataactcaataataaaacrcrtacttc

SEQ ID NO: 13072 - DNA, 50 bp, synthetic construct
  source 1..50: mol_type = other DNA
aatttcaccatattaactaaaatattcttaatctcctacrtaatccrccc

SEQ ID NO: 13073 - DNA, 50 bp, synthetic construct
  source 1..50: mol_type = other DNA
acraaatttcaccatattaactaaaatattcttaatctcctacrtaatcc

SEQ ID NO: 13074 - DNA, 50 bp, synthetic construct
  source 1..50: mol_type = other DNA
tttaaccactttatttctaaattctaaccatccttcaaaactataaactc

SEQ ID NO: 13075 - DNA, 50 bp, synthetic construct
  source 1..50: mol_type = other DNA
taataaaaactcaattacaacaacctaaaactcatataattaaaacactc

SEQ ID NO: 13076 - DNA, 50 bp, synthetic construct
  source 1..50: mol_type = other DNA
taaaaataataataacttacaaaacctataccattctctctaatttctac

SEQ ID NO: 13077 - DNA, 50 bp, synthetic construct
  source 1..50: mol_type = other DNA
cctaaaaaacaaatacaactctaacraaattcttatactaattaacatcc

SEQ ID NO: 13078 - DNA, 50 bp, synthetic construct
  source 1..50: mol_type = other DNA
tataaaaactctaatatcttctaaatttttctataaaactaaaactattc

SEQ ID NO: 13079 - DNA, 50 bp, synthetic construct
  source 1..50: mol_type = other DNA
tacccctactattataataatccttactattaaaataatacttttctacc

SEQ ID NO: 13080 - DNA, 50 bp, synthetic construct
  source 1..50: mol_type = other DNA
ataaaaccccttctctaccaacaatacaaaaatcaaccaaacataataac

SEQ ID NO: 13081 - DNA, 50 bp, synthetic construct
  source 1..50: mol_type = other DNA
atatcctatatacactaatttattaaataataacccatatttaaaaccac

SEQ ID NO: 13082 - DNA, 50 bp, synthetic construct
  source 1..50: mol_type = other DNA
ctatatacactaatttattaaataataacccatatttaaaaccacraaac

SEQ ID NO: 13083 - DNA, 50 bp, synthetic construct
  source 1..50: mol_type = other DNA
taaaaaacaacaaaaaacctttcttttatctacccaaactcatctaatcc

SEQ ID NO: 13084 - DNA, 50 bp, synthetic construct
  source 1..50: mol_type = other DNA
aactaaatcacaccaaaaacccttattcaatctaatactcctcataaaac

SEQ ID NO: 13085 - DNA, 50 bp, synthetic construct
  source 1..50: mol_type = other DNA
tactaatttaaattcccaccaaaaatatactaaaattctcctttctccac

SEQ ID NO: 13086 - DNA, 50 bp, synthetic construct
  source 1..50: mol_type = other DNA
ataataatatttttaattttctaaaaaacctccatactattctccaaaac

SEQ ID NO: 13087 - DNA, 50 bp, synthetic construct
  source 1..50: mol_type = other DNA
taacaaaacctcattcttttcataaccraataataccccrttatatatac

SEQ ID NO: 13088 - DNA, 50 bp, synthetic construct
  source 1..50: mol_type = other DNA
crctttacaaataacaaaacctcattcttttcataaccraataatacccc

SEQ ID NO: 13089 - DNA, 50 bp, synthetic construct
  source 1..50: mol_type = other DNA
cataattccatccrctttacaaataacaaaacctcattcttttcataacc

SEQ ID NO: 13090 - DNA, 50 bp, synthetic construct
  source 1..50: mol_type = other DNA
tctcrtaaacttcataaaacctctccttctctatacataaacraataacc

SEQ ID NO: 13091 - DNA, 50 bp, synthetic construct
  source 1..50: mol_type = other DNA
craaaaactctcrtaaacttcataaaacctctccttctctatacataaac

SEQ ID NO: 13092 - DNA, 50 bp, synthetic construct
  source 1..50: mol_type = other DNA
aacaatcrcaaaaacaaattaaccttttcttattccttaaactcaatcrc

SEQ ID NO: 13093 - DNA, 50 bp, synthetic construct
  source 1..50: mol_type = other DNA
caaacaatcrcaaaaacaaattaaccttttcttattccttaaactcaatc

SEQ ID NO: 13094 - DNA, 50 bp, synthetic construct
  source 1..50: mol_type = other DNA
ctatttcaatctattcctatacrttaattattaaaaaacaacaaacaatc

SEQ ID NO: 13095 - DNA, 50 bp, synthetic construct
  source 1..50: mol_type = other DNA
ttcatccaatactattttaaaaaaatctctatttcaatctattcctatac

SEQ ID NO: 13096 - DNA, 50 bp, synthetic construct
  source 1..50: mol_type = other DNA
aaaaattcatacaacctattcaaaatttaataaccattatttatatccac

SEQ ID NO: 13097 - DNA, 50 bp, synthetic construct
  source 1..50: mol_type = other DNA
tttaataaccattatttatatccacrttcaattaaattcaaatttaatac

SEQ ID NO: 13098 - DNA, 50 bp, synthetic construct
  source 1..50: mol_type = other DNA
caaaacaacacaccaactaaaaacccttaaaataaaatactaaatacatc

SEQ ID NO: 13099 - DNA, 50 bp, synthetic construct
  source 1..50: mol_type = other DNA
aaaaaatcacttaaccttaaaaactaaaaactacaaaaaactataatcac

SEQ ID NO: 13100 - DNA, 50 bp, synthetic construct
  source 1..50: mol_type = other DNA
ctccttctatttaacaataacctatttatttttctaaaccactttccccc

SEQ ID NO: 13101 - DNA, 50 bp, synthetic construct
  source 1..50: mol_type = other DNA
tacctaaattctccatataacatcctcacaatataccccacaaatacacc

SEQ ID NO: 13102 - DNA, 50 bp, synthetic construct
  source 1..50: mol_type = other DNA
taaacttttccttttctctaaactcttatttttctatcttactcttcaac

SEQ ID NO: 13103 - DNA, 50 bp, synthetic construct
  source 1..50: mol_type = other DNA
aaaaatcctaaacraaaaaattcattttcrctattcccttcctttcactc

SEQ ID NO: 13104 - DNA, 50 bp, synthetic construct
  source 1..50: mol_type = other DNA
cttacacaaaattcaaaaacatacatattcatctatttttcacaattctc

SEQ ID NO: 13105 - DNA, 50 bp, synthetic construct
  source 1..50: mol_type = other DNA
taaactctatacaaaacaaaaacacactaccactaaaccacacctctctc

SEQ ID NO: 13106 - DNA, 50 bp, synthetic construct
  source 1..50: mol_type = other DNA
ttttaaaaacctctcaaaaatataactaatacrtcaaaaaaaatcttcac

SEQ ID NO: 13107 - DNA, 50 bp, synthetic construct
  source 1..50: mol_type = other DNA
ctaaaccacacctctctcrctacaaaaacatcrtaaaaatcttttttaac

SEQ ID NO: 13108 - DNA, 50 bp, synthetic construct
  source 1..50: mol_type = other DNA
cattcaataaaacctattactcaatttcctatttttattctaaaaatccc

SEQ ID NO: 13109 - DNA, 50 bp, synthetic construct
  source 1..50: mol_type = other DNA
aaacaaacaaacacrcacacacataaatacatataaattttatatataac

SEQ ID NO: 13110 - DNA, 50 bp, synthetic construct
  source 1..50: mol_type = other DNA
aattcctcaaaaaaatactataataaataaactcatcctacacattatac

SEQ ID NO: 13111 - DNA, 50 bp, synthetic construct
  source 1..50: mol_type = other DNA
cattcttctaaaaaattaaacatttaattttaaaaacaaaacaccctcac

SEQ ID NO: 13112 - DNA, 50 bp, synthetic construct
  source 1..50: mol_type = other DNA
tccccratatttactatttccrtcttttatatccaattttaataatatac

SEQ ID NO: 13113 - DNA, 50 bp, synthetic construct
  source 1..50: mol_type = other DNA
tttctccatattaatcaaactaatcttaaactcccratctcaaataatcc

SEQ ID NO: 13114 - DNA, 50 bp, synthetic construct
  source 1..50: mol_type = other DNA
aaaaaatataactcaataataaaacrcrtacttaacatacacraaacccc

SEQ ID NO: 13115 - DNA, 50 bp, synthetic construct
  source 1..50: mol_type = other DNA
cccaacrctcaacrtaaaccaaaatatttctataacctattactattatc

SEQ ID NO: 13116 - DNA, 50 bp, synthetic construct
  source 1..50: mol_type = other DNA
taaaacatctctaaaactcaaaaccctcttataactatataaaaacatac

SEQ ID NO: 13117 - DNA, 50 bp, synthetic construct
  source 1..50: mol_type = other DNA
aactaacacatatacaatcctctaactaaccataaaaattatccaaatcc

SEQ ID NO: 13118 - DNA, 50 bp, synthetic construct
  source 1..50: mol_type = other DNA
cacatatacaatcctctaactaaccataaaaattatccaaatccrcaccc

SEQ ID NO: 13119 - DNA, 50 bp, synthetic construct
  source 1..50: mol_type = other DNA
acrcraataataaaaaacttatcatctaaaccaacaactacraaaaaaac

SEQ ID NO: 13120 - DNA, 50 bp, synthetic construct
  source 1..50: mol_type = other DNA
atatcttaaacrcraataataaaaaacttatcatctaaaccaacaactac

SEQ ID NO: 13121 - DNA, 50 bp, synthetic construct
  source 1..50: mol_type = other DNA
attaatacatccacaaaccataaactaatacraattaatatcttaaacrc

SEQ ID NO: 13122 - DNA, 50 bp, synthetic construct
  source 1..50: mol_type = other DNA
taattaatacatccacaaaccataaactaatacraattaatatcttaaac

SEQ ID NO: 13123 - DNA, 50 bp, synthetic construct
  source 1..50: mol_type = other DNA
ttaactaaataaaatactaattaatacatccacaaaccataaactaatac

SEQ ID NO: 13124 - DNA, 50 bp, synthetic construct
  source 1..50: mol_type = other DNA
ttctatttaatttcaaaactccattaaaatttataaccttaaaacttccc

SEQ ID NO: 13125 - DNA, 50 bp, synthetic construct
  source 1..50: mol_type = other DNA
ctaaacaaaaatcatccctcccactaaaacaaaaacccctaaaaaccaac

SEQ ID NO: 13126 - DNA, 50 bp, synthetic construct
  source 1..50: mol_type = other DNA
aatatatttattaaacctctaccrtatttaccaaacactattacctaaac

SEQ ID NO: 13127 - DNA, 50 bp, synthetic construct
  source 1..50: mol_type = other DNA
aataacatatataaaccaataccrtccaaataacaatacctaacaaacac

SEQ ID NO: 13128 - DNA, 50 bp, synthetic construct
  source 1..50: mol_type = other DNA
tcaacaatactataaaaactatccttacataaatattttcaaacatccac

SEQ ID NO: 13129 - DNA, 50 bp, synthetic construct
  source 1..50: mol_type = other DNA
attacaataaaccaaatcrtactactacactccaccctaaataacaaaac

SEQ ID NO: 13130 - DNA, 50 bp, synthetic construct
  source 1..50: mol_type = other DNA
tatattttctatacrttaaaaacttcaaaaatacrtacacaattatatcc

SEQ ID NO: 13131 - DNA, 50 bp, synthetic construct
  source 1..50: mol_type = other DNA
aaaatccataatactatatattttctatacrttaaaaacttcaaaaatac

SEQ ID NO: 13132 - DNA, 50 bp, synthetic construct
  source 1..50: mol_type = other DNA
atacacttcttttaaactatcaaaaaaatatctccrtatacaatatatcc

SEQ ID NO: 13133 - DNA, 50 bp, synthetic construct
  source 1..50: mol_type = other DNA
ctcrccaactacaaattttcctccaaatctaaatactaaaactctaaaac

SEQ ID NO: 13134 - DNA, 50 bp, synthetic construct
  source 1..50: mol_type = other DNA
tacaaaaatactaaaccaaaataacataaaaaaaatatcaacactaaacc

SEQ ID NO: 13135 - DNA, 50 bp, synthetic construct
  source 1..50: mol_type = other DNA
tcctattactcacatcracaatcatttttcatattcaaaacccctaaacc

SEQ ID NO: 13136 - DNA, 50 bp, synthetic construct
  source 1..50: mol_type = other DNA
ctcatttcttccctactaaactctttaattaatttactaaacaacatctc

SEQ ID NO: 13137 - DNA, 50 bp, synthetic construct
  source 1..50: mol_type = other DNA
tactaaactctttaattaatttactaaacaacatctcraaaacaaccccc

SEQ ID NO: 13138 - DNA, 50 bp, synthetic construct
  source 1..50: mol_type = other DNA
tatattttttcttatcatactatatattctttcttattcaaaacaaaatc

SEQ ID NO: 13139 - DNA, 50 bp, synthetic construct
  source 1..50: mol_type = other DNA
tattttttcttatcatactatatattctttcttattcaaaacaaaatcrc

SEQ ID NO: 13140 - DNA, 50 bp, synthetic construct
  source 1..50: mol_type = other DNA
atattctttcttattcaaaacaaaatcrcractaaattattaaaatactc

SEQ ID NO: 13141 - DNA, 50 bp, synthetic construct
  source 1..50: mol_type = other DNA
taaacaaaacrttctatttaaataaaatcaaaaaccrtaactcaacttac

SEQ ID NO: 13142 - DNA, 50 bp, synthetic construct
  source 1..50: mol_type = other DNA
acrctaaattctaacctaaattaataaaaaaacctcrcaaactaaatcac

SEQ ID NO: 13143 - DNA, 50 bp, synthetic construct
  source 1..50: mol_type = other DNA
aaaaaacctcrcaaactaaatcacrattcctaattccatttaaataaaac

SEQ ID NO: 13144 - DNA, 50 bp, synthetic construct
  source 1..50: mol_type = other DNA
acrttttattcacttataaaaatttccttttccatttctttcattaaatc

SEQ ID NO: 13145 - DNA, 50 bp, synthetic construct
  source 1..50: mol_type = other DNA
tattcacttataaaaatttccttttccatttctttcattaaatcrcraac

SEQ ID NO: 13146 - DNA, 50 bp, synthetic construct
  source 1..50: mol_type = other DNA
tttccttttccatttctttcattaaatcrcraacrtaataataacttaac

SEQ ID NO: 13147 - DNA, 50 bp, synthetic construct
  source 1..50: mol_type = other DNA
ccattaaaaaccaaaatcctcaacacraaaaaaccaaacttaaatctaac

SEQ ID NO: 13148 - DNA, 50 bp, synthetic construct
  source 1..50: mol_type = other DNA
atcaaaataaccraataatctaaaacrccaaactcaaacttaacttcctc

SEQ ID NO: 13149 - DNA, 50 bp, synthetic construct
  source 1..50: mol_type = other DNA
aactcaaacttaacttcctcrtattaaaaattctaatctccaataaaaac

SEQ ID NO: 13150 - DNA, 50 bp, synthetic construct
  source 1..50: mol_type = other DNA
cttaacttcctcrtattaaaaattctaatctccaataaaaacrtaaattc

SEQ ID NO: 13151 - DNA, 50 bp, synthetic construct
  source 1..50: mol_type = other DNA
aaataatacactctcaataaaatctacccccttacttttcaatcttattc

SEQ ID NO: 13152 - DNA, 50 bp, synthetic construct
  source 1..50: mol_type = other DNA
aatctacccccttacttttcaatcttattcrctatttaataataaatcac

SEQ ID NO: 13153 - DNA, 50 bp, synthetic construct
  source 1..50: mol_type = other DNA
cttacttttcaatcttattcrctatttaataataaatcacrttttacccc

SEQ ID NO: 13154 - DNA, 50 bp, synthetic construct
  source 1..50: mol_type = other DNA
ttattcrctatttaataataaatcacrttttaccccrctttaatcaattc

SEQ ID NO: 13155 - DNA, 50 bp, synthetic construct
  source 1..50: mol_type = other DNA
atttcctcccaatacrcctctaaataaatactcatataataaataaatac

SEQ ID NO: 13156 - DNA, 50 bp, synthetic construct
  source 1..50: mol_type = other DNA
tctatatacatatctttctattcctacctaatctaatttcctcccaatac

SEQ ID NO: 13157 - DNA, 50 bp, synthetic construct
  source 1..50: mol_type = other DNA
actactttcaatttcaatttcatcacttttatttttaataatttctaacc

SEQ ID NO: 13158 - DNA, 50 bp, synthetic construct
  source 1..50: mol_type = other DNA
aaatcraaaaacttactccctaaaatccaaataaatataaaacccataac

SEQ ID NO: 13159 - DNA, 50 bp, synthetic construct
  source 1..50: mol_type = other DNA
aaaaacaacaaactcaaaccaaacrattaaccttacttactcctaaaatc

SEQ ID NO: 13160 - DNA, 50 bp, synthetic construct
  source 1..50: mol_type = other DNA
taaattccaaaaaataaacctctcracttcaaaaataaacaaaaccaacc

SEQ ID NO: 13161 - DNA, 50 bp, synthetic construct
  source 1..50: mol_type = other DNA
aatctttccctctataattaaaactttcrtaaatataccrcctctaaaac

SEQ ID NO: 13162 - DNA, 50 bp, synthetic construct
  source 1..50: mol_type = other DNA
caaaaacraaaaatctttccctctataattaaaactttcrtaaatatacc

SEQ ID NO: 13163 - DNA, 50 bp, synthetic construct
  source 1..50: mol_type = other DNA
crtaactataattcaattcacttctaaaacactttaaataacaaaactac

SEQ ID NO: 13164 - DNA, 50 bp, synthetic construct
  source 1..50: mol_type = other DNA
aaccaacractctaccaaaataattataaaacattttaataaaattttac

SEQ ID NO: 13165 - DNA, 50 bp, synthetic construct
  source 1..50: mol_type = other DNA
aaaaaacrtaaaaccttattaaaatacctcataatcatcttaataaaacc

SEQ ID NO: 13166 - DNA, 50 bp, synthetic construct
  source 1..50: mol_type = other DNA
cttaccccctctaaaattcraactcaaaaccttcaaattataaaactaac

SEQ ID NO: 13167 - DNA, 50 bp, synthetic construct
  source 1..50: mol_type = other DNA
ttaacrcaataaacaacrcrtcaatctcataatctaaaaatcctaaattc

SEQ ID NO: 13168 - DNA, 50 bp, synthetic construct
  source 1..50: mol_type = other DNA
taccccctctaaaattcraactcaaaaccttcaaattataaaactaacrc

SEQ ID NO: 13169 - DNA, 50 bp, synthetic construct
  source 1..50: mol_type = other DNA
ctaccrctccaaattaccaaaaatacctaataaaactaactaaaaaaacc

SEQ ID NO: 13170 - DNA, 50 bp, synthetic construct
  source 1..50: mol_type = other DNA
tctacratctcttcaactaattctatcaaacacttctaacaatctaaaac

SEQ ID NO: 13171 - DNA, 50 bp, synthetic construct
  source 1..50: mol_type = other DNA
tctcttcaactaattctatcaaacacttctaacaatctaaaacracaacc

SEQ ID NO: 13172 - DNA, 50 bp, synthetic construct
  source 1..50: mol_type = other DNA
actaattctatcaaacacttctaacaatctaaaacracaaccractaaac

SEQ ID NO: 13173 - DNA, 50 bp, synthetic construct
  source 1..50: mol_type = other DNA
acataccaaataaattcactaataaaactaatatatactaccctttactc

SEQ ID NO: 13174 - DNA, 50 bp, synthetic construct
  source 1..50: mol_type = other DNA
tacaacataaaaaaatttccaaaataataaatcactaacraatttcttcc

SEQ ID NO: 13175 - DNA, 50 bp, synthetic construct
  source 1..50: mol_type = other DNA
cccctcaaaaaataataattcattcaatcaataaaaaccraaaaaaactc

SEQ ID NO: 13176 - DNA, 50 bp, synthetic construct
  source 1..50: mol_type = other DNA
caaataaacctaacaaaaaattcaaaaacctaactaaaatttaaccaaac

SEQ ID NO: 13177 - DNA, 50 bp, synthetic construct
  source 1..50: mol_type = other DNA
atcaaacttctaaatcttctactaaacccatctatacacttccttataac

SEQ ID NO: 13178 - DNA, 50 bp, synthetic construct
  source 1..50: mol_type = other DNA
aacccctcccaccttataataatataccttataacattcttcccttaccc

SEQ ID NO: 13179 - DNA, 50 bp, synthetic construct
  source 1..50: mol_type = other DNA
caccttataataatataccttataacattcttcccttacccrcaataaac

SEQ ID NO: 13180 - DNA, 50 bp, synthetic construct
  source 1..50: mol_type = other DNA
aatataaacaacaaactatttattcactctaatccraacraactaaatcc

SEQ ID NO: 13181 - DNA, 50 bp, synthetic construct
  source 1..50: mol_type = other DNA
taaacaaactaaatataaacaacaaactatttattcactctaatccraac

SEQ ID NO: 13182 - DNA, 50 bp, synthetic construct
  source 1..50: mol_type = other DNA
aacctaaacaaactaaatataaacaacaaactatttattcactctaatcc

SEQ ID NO: 13183 - DNA, 50 bp, synthetic construct
  source 1..50: mol_type = other DNA
acaacttattactcacacttaacctattcaaattatctcttcaattaaac

SEQ ID NO: 13184 - DNA, 50 bp, synthetic construct
  source 1..50: mol_type = other DNA
aacaattacaaattaatactacaatttattctcrattaaatacacacatc

SEQ ID NO: 13185 - DNA, 50 bp, synthetic construct
  source 1..50: mol_type = other DNA
ttaatactacaatttattctcrattaaatacacacatcraaacaaaacac

SEQ ID NO: 13186 - DNA, 50 bp, synthetic construct
  source 1..50: mol_type = other DNA
cactaacctcctattttacaccaaccaataaaatctaaacracaaaaaac

SEQ ID NO: 13187 - DNA, 50 bp, synthetic construct
  source 1..50: mol_type = other DNA
ctctcrtattcactaacctcctattttacaccaaccaataaaatctaaac

SEQ ID NO: 13188 - DNA, 50 bp, synthetic construct
  source 1..50: mol_type = other DNA
acacaattaacttctacttttccracraattaatacacratcatactctc

SEQ ID NO: 13189 - DNA, 50 bp, synthetic construct
  source 1..50: mol_type = other DNA
tataaaacraaaactcaacacatacrcacacaattaacttctacttttcc

SEQ ID NO: 13190 - DNA, 50 bp, synthetic construct
  source 1..50: mol_type = other DNA
attttaataaacctacttcaacttccctaataatctaataattaaaattc

SEQ ID NO: 13191 - DNA, 50 bp, synthetic construct
  source 1..50: mol_type = other DNA
ctacttcaacttccctaataatctaataattaaaattcracrctctcacc

SEQ ID NO: 13192 - DNA, 50 bp, synthetic construct
  source 1..50: mol_type = other DNA
cttcaacttccctaataatctaataattaaaattcracrctctcaccrcc

SEQ ID NO: 13193 - DNA, 50 bp, synthetic construct
  source 1..50: mol_type = other DNA
aaaaaataaaatttttctattttaacctccaaattctttcatccaaaaac

SEQ ID NO: 13194 - DNA, 50 bp, synthetic construct
  source 1..50: mol_type = other DNA
cttttcaaaaaattatactaatctcaactaactcctaataaattatctcc

SEQ ID NO: 13195 - DNA, 50 bp, synthetic construct
  source 1..50: mol_type = other DNA
acaacttcaaaaacttaaacacaacratcaaatctcccaaaaataacttc

SEQ ID NO: 13196 - DNA, 50 bp, synthetic construct
  source 1..50: mol_type = other DNA
aaatatctaaaccaccraaactctaacaacttcaaaaacttaaacacaac

SEQ ID NO: 13197 - DNA, 50 bp, synthetic construct
  source 1..50: mol_type = other DNA
tctaaaaaatttaatcrctatattcaaacttctaaaactactaaaacctc

SEQ ID NO: 13198 - DNA, 50 bp, synthetic construct
  source 1..50: mol_type = other DNA
caaacaataaattcaacaccatctctaaatacacatttaataaatttacc

SEQ ID NO: 13199 - DNA, 50 bp, synthetic construct
  source 1..50: mol_type = other DNA
ataaatcaataacataatacacaaaaacaatcaaccaattatccaaatcc

SEQ ID NO: 13200 - DNA, 50 bp, synthetic construct
  source 1..50: mol_type = other DNA
ctctatacccaataaaaaatttactcacttaacraaacrcrataactcac

SEQ ID NO: 13201 - DNA, 50 bp, synthetic construct
  source 1..50: mol_type = other DNA
taacaaataactctatacccaataaaaaatttactcacttaacraaacrc

SEQ ID NO: 13202 - DNA, 50 bp, synthetic construct
  source 1..50: mol_type = other DNA
ttcattttaacaaataactctatacccaataaaaaatttactcacttaac

SEQ ID NO: 13203 - DNA, 50 bp, synthetic construct
  source 1..50: mol_type = other DNA
ataattcaaaattcaaaattctaaaaatctaaaaactttcacaactctac

SEQ ID NO: 13204 - DNA, 50 bp, synthetic construct
  source 1..50: mol_type = other DNA
ataaccaaaaaacttaaaattaaaatcttaataccatcccataattaacc

SEQ ID NO: 13205 - DNA, 50 bp, synthetic construct
  source 1..50: mol_type = other DNA
aaaacctaccaacttaaaaaattttctaaaaaacacttaaatacctatac

SEQ ID NO: 13206 - DNA, 50 bp, synthetic construct
  source 1..50: mol_type = other DNA
ctcatttcttaaaaaaaataccracraaaaaatctataccttaaaccrtc

SEQ ID NO: 13207 - DNA, 50 bp, synthetic construct
  source 1..50: mol_type = other DNA
accaaaaaattaacrcctttcctaaaaaatcaccraaaataataattaac

SEQ ID NO: 13208 - DNA, 50 bp, synthetic construct
  source 1..50: mol_type = other DNA
aaaaactaaaacraacrccaaaactctaaataaccctaaaatccaaactc

SEQ ID NO: 13209 - DNA, 50 bp, synthetic construct
  source 1..50: mol_type = other DNA
tcataactaaaacaccaaaaacaatacaacaaaaaccaaaattaacaaac

SEQ ID NO: 13210 - DNA, 50 bp, synthetic construct
  source 1..50: mol_type = other DNA
aaataaataaccaaaattttctcccattctataaatttcctattcaatcc

SEQ ID NO: 13211 - DNA, 50 bp, synthetic construct
  source 1..50: mol_type = other DNA
rccaacatctactatttacaaactttttaataatttccattcaaactaac

SEQ ID NO: 13212 - DNA, 50 bp, synthetic construct
  source 1..50: mol_type = other DNA
atattaattccaaatctttactactttaaataataccacaataaacctac

SEQ ID NO: 13213 - DNA, 50 bp, synthetic construct
  source 1..50: mol_type = other DNA
ccataataatttactacactaatcaacacrtcatctcrattttaaacccc

SEQ ID NO: 13214 - DNA, 50 bp, synthetic construct
  source 1..50: mol_type = other DNA
aaatatacatataccataataatttactacactaatcaacacrtcatctc

SEQ ID NO: 13215 - DNA, 50 bp, synthetic construct
  source 1..50: mol_type = other DNA
tattacataaatatacatataccataataatttactacactaatcaacac

SEQ ID NO: 13216 - DNA, 50 bp, synthetic construct
  source 1..50: mol_type = other DNA
ccataaaaataatttcaactatcctctatatactaatatattacaaattc

SEQ ID NO: 13217 - DNA, 50 bp, synthetic construct
  source 1..50: mol_type = other DNA
taaataaacttaaactcataatccracaaaatatccctacractattcac

SEQ ID NO: 13218 - DNA, 50 bp, synthetic construct
  source 1..50: mol_type = other DNA
ttttaccatattaaccaaactaatctcaaattcctttcctcaaataatcc

SEQ ID NO: 13219 - DNA, 50 bp, synthetic construct
  source 1..50: mol_type = other DNA
craaaacrattccaactaactaacccctaaatactaaattcaaaatctcc

SEQ ID NO: 13220 - DNA, 50 bp, synthetic construct
  source 1..50: mol_type = other DNA
accaacataaaaaaaccctatctctactaaaaacacaaaattaacctaac

SEQ ID NO: 13221 - DNA, 50 bp, synthetic construct
  source 1..50: mol_type = other DNA
aaaaaaaccctatctctactaaaaacacaaaattaacctaacrtaataac

SEQ ID NO: 13222 - DNA, 50 bp, synthetic construct
  source 1..50: mol_type = other DNA
aaattcttcattataaaacataaaaacaaataccaaacrcracaactcac

SEQ ID NO: 13223 - DNA, 50 bp, synthetic construct
  source 1..50: mol_type = other DNA
tcaattacccataatcaaccataattcaaaaatattaaataaaaaattcc

SEQ ID NO: 13224 - DNA, 50 bp, synthetic construct
  source 1..50: mol_type = other DNA
tacaaaatttaatactattcataatttcaaaatatccactaaaataaaac

SEQ ID NO: 13225 - DNA, 50 bp, synthetic construct
  source 1..50: mol_type = other DNA
ataattctacctcaacatcctaaacaactaaaactacaacrtaccaccac

SEQ ID NO: 13226 - DNA, 50 bp, synthetic construct
  source 1..50: mol_type = other DNA
acraattcaaataattctacctcaacatcctaaacaactaaaactacaac

SEQ ID NO: 13227 - DNA, 50 bp, synthetic construct
  source 1..50: mol_type = other DNA
ctaaacataactcatcaaactttcractataaaaactaaaaaccrcctac

SEQ ID NO: 13228 - DNA, 50 bp, synthetic construct
  source 1..50: mol_type = other DNA
craacctatccccacccttccaaaatataaatcctctaaaaaaatatatc

SEQ ID NO: 13229 - DNA, 50 bp, synthetic construct
  source 1..50: mol_type = other DNA
acctatccccacccttccaaaatataaatcctctaaaaaaatatatcrtc

SEQ ID NO: 13230 - DNA, 50 bp, synthetic construct
  source 1..50: mol_type = other DNA
accaaaaaaccrtacractacaaaaaaaccattttacttaactaacaaac

SEQ ID NO: 13231 - DNA, 50 bp, synthetic construct
  source 1..50: mol_type = other DNA
aataaaaccrtttctaaacacataaacrcattcaataaatactaacaaac

SEQ ID NO: 13232 - DNA, 50 bp, synthetic construct
  source 1..50: mol_type = other DNA
atacrcttatatactcaaaaacratcccattaattaaaactaccttcccc

SEQ ID NO: 13233 - DNA, 50 bp, synthetic construct
  source 1..50: mol_type = other DNA
crcccctaatcttaaaaaaacttccaacctctaaaatcctccraaaaaac

SEQ ID NO: 13234 - DNA, 50 bp, synthetic construct
  source 1..50: mol_type = other DNA
aaaccaacaactatcaattaatcraaaactcraaataataatacataacc

SEQ ID NO: 13235 - DNA, 50 bp, synthetic construct
  source 1..50: mol_type = other DNA
aacctccraccaactaataactactaatcccaaataacrctaaaattttc

SEQ ID NO: 13236 - DNA, 50 bp, synthetic construct
  source 1..50: mol_type = other DNA
attaaccaaaataatcttaaactcctaacttcaaataattcaccaacctc

SEQ ID NO: 13237 - DNA, 50 bp, synthetic construct
  source 1..50: mol_type = other DNA
taaaaaaaccaccatacaaaaactatctataaccaaaaaacaactacaac

SEQ ID NO: 13238 - DNA, 50 bp, synthetic construct
  source 1..50: mol_type = other DNA
acataaacttttaaacataaacccacctactattctaaaaactaaaccac

SEQ ID NO: 13239 - DNA, 50 bp, synthetic construct
  source 1..50: mol_type = other DNA
tccaaaacaataaataaacttatacctaaaaacctatataacaaaaacac

SEQ ID NO: 13240 - DNA, 50 bp, synthetic construct
  source 1..50: mol_type = other DNA
aaatcataaaactaaaacaaccctctcctcatctataaaaacctaaacac

SEQ ID NO: 13241 - DNA, 50 bp, synthetic construct
  source 1..50: mol_type = other DNA
aaaccctatctctactaaaactacaaaaacaattaaccaaacrtaataac

SEQ ID NO: 13242 - DNA, 50 bp, synthetic construct
  source 1..50: mol_type = other DNA
acataaaaaaaccctatctctactaaaactacaaaaacaattaaccaaac

SEQ ID NO: 13243 - DNA, 50 bp, synthetic construct
  source 1..50: mol_type = other DNA
aaaaacacaatcacccctaataaccctaaaaaaactcttctctaacacac

SEQ ID NO: 13244 - DNA, 50 bp, synthetic construct
  source 1..50: mol_type = other DNA
ctaaacactaaaactacttaactactaaaataaaactacactccttcaac

SEQ ID NO: 13245 - DNA, 50 bp, synthetic construct
  source 1..50: mol_type = other DNA
aaaaactccttatttataaactaaataactacaccacttccaacaaaatc

SEQ ID NO: 13246 - DNA, 50 bp, synthetic construct
  source 1..50: mol_type = other DNA
tactacaaaatattctaaccacaaacccaaaatataatttacrcactatc

SEQ ID NO: 13247 - DNA, 50 bp, synthetic construct
  source 1..50: mol_type = other DNA
tacctctttactacaaaatattctaaccacaaacccaaaatataatttac

SEQ ID NO: 13248 - DNA, 50 bp, synthetic construct
  source 1..50: mol_type = other DNA
aataaaacrtaaaatatatatactaatatatacaaccacaatacatacac

SEQ ID NO: 13249 - DNA, 50 bp, synthetic construct
  source 1..50: mol_type = other DNA
taatttatttccttctatttttataatattatccatacataatatttccc

SEQ ID NO: 13250 - DNA, 50 bp, synthetic construct
  source 1..50: mol_type = other DNA
acaattatttttacatcaacctataaaaattcaaaatcactatcttaacc

SEQ ID NO: 13251 - DNA, 50 bp, synthetic construct
  source 1..50: mol_type = other DNA
atacaatattcratctaatatacaaaataattccatcttacaaaaaattc

SEQ ID NO: 13252 - DNA, 50 bp, synthetic construct
  source 1..50: mol_type = other DNA
aataacaatactatttaaaatcataataatatccaaatcatatctaccac

SEQ ID NO: 13253 - DNA, 50 bp, synthetic construct
  source 1..50: mol_type = other DNA
ccaaaaactaactactaaataaacattccataataaacttaacatctttc

SEQ ID NO: 13254 - DNA, 50 bp, synthetic construct
  source 1..50: mol_type = other DNA
ttcacttctatctaataaaataactattaatataaaacaaaaaacttacc

SEQ ID NO: 13255 - DNA, 50 bp, synthetic construct
  source 1..50: mol_type = other DNA
aactattaaaaaaaacctcaattccttattatctaatcccraaaaacctc

SEQ ID NO: 13256 - DNA, 50 bp, synthetic construct
  source 1..50: mol_type = other DNA
tcataaacaaacctataaaaaaatccatataactaaaaccraaacctccc

SEQ ID NO: 13257 - DNA, 50 bp, synthetic construct
  source 1..50: mol_type = other DNA
tatcaaaaaaccaaaataacaatttttacacataaaattcctaattaatc

SEQ ID NO: 13258 - DNA, 50 bp, synthetic construct
  source 1..50: mol_type = other DNA
aaaaaaccaaaataacaatttttacacataaaattcctaattaatcraac

SEQ ID NO: 13259 - DNA, 50 bp, synthetic construct
  source 1..50: mol_type = other DNA
aaaaccaaaataacaatttttacacataaaattcctaattaatcraacrc

SEQ ID NO: 13260 - DNA, 50 bp, synthetic construct
  source 1..50: mol_type = other DNA
aatattaaaaattccccatctccccaaaatttctctttctctcccaaccc

SEQ ID NO: 13261 - DNA, 50 bp, synthetic construct
  source 1..50: mol_type = other DNA
ccaacccrcraaaattttaacctaaactaaaaataaacctaaataaaaac

SEQ ID NO: 13262 - DNA, 50 bp, synthetic construct
  source 1..50: mol_type = other DNA
taaattcctaaactactcctataaataacattcraaaacccttccaacrc

SEQ ID NO: 13263 - DNA, 50 bp, synthetic construct
  source 1..50: mol_type = other DNA
cctaaattcctaaactactcctataaataacattcraaaacccttccaac

SEQ ID NO: 13264 - DNA, 50 bp, synthetic construct
  source 1..50: mol_type = other DNA
tcacaaaaacaacccaaaaacccaaaaacctcaaaaaaactaatttatcc

SEQ ID NO: 13265 - DNA, 50 bp, synthetic construct
  source 1..50: mol_type = other DNA
tcacaaaaacaacccraaaacccaaaaacctcaaaaaaactaatttatcc

SEQ ID NO: 13266 - DNA, 50 bp, synthetic construct
  source 1..50: mol_type = other DNA
ataacaaaaaatttctaataaaccttcrcractccrctaaattaacaacc

SEQ ID NO: 13267 - DNA, 50 bp, synthetic construct
  source 1..50: mol_type = other DNA
aaaaacccaatacratcrcttacaaaacccaaaacraaattaaactaaac

SEQ ID NO: 13268 - DNA, 50 bp, synthetic construct
  source 1..50: mol_type = other DNA
tttctcaaacaactcctaaaccaaaactcaaaaaaacattaaaacaaaac

SEQ ID NO: 13269 - DNA, 50 bp, synthetic construct; identical to SEQ ID NO: 13268
  source 1..50: mol_type = other DNA

SEQ ID NO: 13270 - DNA, 50 bp, synthetic construct
  source 1..50: mol_type = other DNA
raaatcccaaaacctcaaacrtaactctcaaaatctcaaaccccaaaaac

SEQ ID NO: 13271 - DNA, 50 bp, synthetic construct
  source 1..50: mol_type = other DNA
aaaactatactttaaccttaacratccctatctcctcttcccaatattcc

SEQ ID NO: 13272 - DNA, 50 bp, synthetic construct
  source 1..50: mol_type = other DNA
cctccacraccttactcaactctccttaaattacctatactctaaaatac

SEQ ID NO: 13273 - DNA, 50 bp, synthetic construct
  source 1..50: mol_type = other DNA
caaacaaactttctctccttctatccaacacttaaaatcacacttacatc

SEQ ID NO: 13274 - DNA, 50 bp, synthetic construct
  source 1..50: mol_type = other DNA
ctaactcacttcccatattcccttacraatatatccccttataaaatatc

SEQ ID NO: 13275 - DNA, 50 bp, synthetic construct
  source 1..50: mol_type = other DNA
tttctcaaacaactcctaaaccaaaactcaaaaaaacactaaaacaaaac

SEQ ID NO: 13276 - DNA, 50 bp, synthetic construct
  source 1..50: mol_type = other DNA
ttatacaacaaatctctaaaacttttcatcttacaaaactaaaactctac

SEQ ID NO: 13277 - DNA, 50 bp, synthetic construct
  source 1..50: mol_type = other DNA
aactctactaaaaacacctacactctacaaccaaacracctaaattaaac

SEQ ID NO: 13278 - DNA, 50 bp, synthetic construct
  source 1..50: mol_type = other DNA
actttttacrcttattataatacctatataatcaatccatattaatacac

SEQ ID NO: 13279 - DNA, 50 bp, synthetic construct
  source 1..50: mol_type = other DNA
tactaatacrtacaccaacataaattaatcacataaatattacaacaaac

SEQ ID NO: 13280 - DNA, 50 bp, synthetic construct
  source 1..50: mol_type = other DNA
aaacaaaatcccaaacaactcctattcctaatataaaaaatatttctacc

SEQ ID NO: 13281 - DNA, 50 bp, synthetic construct
  source 1..50: mol_type = other DNA
tttctaccrctttaaacaaaacttactttaaaacactaacacaaacttcc

SEQ ID NO: 13282 - DNA, 50 bp, synthetic construct
  source 1..50: mol_type = other DNA
crcttttaaacacatttatacatcataaaaccaaaatcacattttttacc

SEQ ID NO: 13283 - DNA, 50 bp, synthetic construct
  source 1..50: mol_type = other DNA
aaccaaaactcaaaaaaacactaaaacaaaacrcttaacacaaaaaaaac

SEQ ID NO: 13284 - DNA, 50 bp, synthetic construct
  source 1..50: mol_type = other DNA
raacacaattctcattcccactaaatatcraatttctaaaaaaaccaatc

SEQ ID NO: 13285 - DNA, 50 bp, synthetic construct
  source 1..50: mol_type = other DNA
accraaacacracratactaaaataccttataaaataaatacctaaaaac

SEQ ID NO: 13286 - DNA, 50 bp, synthetic construct
  source 1..50: mol_type = other DNA
cracataaacaaattcactcttatcaatctatacrcraacctaatattcc

SEQ ID NO: 13287 - DNA, 50 bp, synthetic construct
  source 1..50: mol_type = other DNA
actttaaatttaccatcattccttaactctaaatttctatataaatccac

SEQ ID NO: 13288 - DNA, 50 bp, synthetic construct
  source 1..50: mol_type = other DNA
aattctcactcccattaaatatcraatttccaaaaaaaccaatcaatatc

SEQ ID NO: 13289 - DNA, 50 bp, synthetic construct
  source 1..50: mol_type = other DNA
tctcactcccattaaatatcraatttccaaaaaaaccaatcaatatcrtc

SEQ ID NO: 13290 - DNA, 50 bp, synthetic construct
  source 1..50: mol_type = other DNA
atacctcataaaataaaaacctaaaaacraacaataactaaaacctaccc

SEQ ID NO: 13291 - DNA, 50 bp, synthetic construct
  source 1..50: mol_type = other DNA
caatctataactaaaccttcacattccrtatctcctaatcccaatactcc

SEQ ID NO: 13292 - DNA, 50 bp, synthetic construct
  source 1..50: mol_type = other DNA
tttaacctaaactaaaaataaaaccraataaaaacrcctaaacctctccc

SEQ ID NO: 13293 - DNA, 50 bp, synthetic construct
  source 1..50: mol_type = other DNA
aaataaaacaactatacaaacaactaatcaaaaataaacacattacactc

SEQ ID NO: 13294 - DNA, 50 bp, synthetic construct
  source 1..50: mol_type = other DNA
ttaacttaaaaaatttcttaaataatctatacacttccaatttaccttcc

SEQ ID NO: 13295 - DNA, 50 bp, synthetic construct
  source 1..50: mol_type = other DNA
aataaacttaaaataaaattaataactaacctaaaaactaaccrtcccac

SEQ ID NO: 13296 - DNA, 50 bp, synthetic construct
  source 1..50: mol_type = other DNA
ataaaaactataaaactcctaactctcaaactaaaaaattaaaacctacc

SEQ ID NO: 13297 - DNA, 50 bp, synthetic construct
  source 1..50: mol_type = other DNA
cttatcattttccrtaaaccaaaacraaataataaataatcccaatcctc

SEQ ID NO: 13298 - DNA, 50 bp, synthetic construct
  source 1..50: mol_type = other DNA
aactacaaaaaacataaacttctacctccaaatataccaaaatacatctc

SEQ ID NO: 13299 - DNA, 50 bp, synthetic construct
  source 1..50: mol_type = other DNA
attataaaaaaatctatacccaacctacttttatccatttttaaaaaaac

SEQ ID NO: 13300 - DNA, 50 bp, synthetic construct
  source 1..50: mol_type = other DNA
aaaaacrattaccaataccctaaaatcttaacaacaatactccaccttcc

SEQ ID NO: 13301 - DNA, 50 bp, synthetic construct
  source 1..50: mol_type = other DNA
ctcttaataaacaataaataacrctatctttcaaaacaaaacaccatttc

SEQ ID NO: 13302 - DNA, 50 bp, synthetic construct
  source 1..50: mol_type = other DNA
aaatcattcaactattttcracaactatctcttaataaacaataaataac

SEQ ID NO: 13303 - DNA, 50 bp, synthetic construct
  source 1..50: mol_type = other DNA
ctaccaccctccccaaaacaaacaataaacaaaatcattcaactattttc

SEQ ID NO: 13304 - DNA, 50 bp, synthetic construct
  source 1..50: mol_type = other DNA
tctatacattcttaaatattccatcaccacctcaaattcaatataccttc

SEQ ID NO: 13305 - DNA, 50 bp, synthetic construct
  source 1..50: mol_type = other DNA
cratacacaattattaacactatacaaatcctataacctccctaaaaccc

SEQ ID NO: 13306 - DNA, 50 bp, synthetic construct
  source 1..50: mol_type = other DNA
craacctcaaaaaaattacaaaatctacataatactaacaactatacatc

SEQ ID NO: 13307 - DNA, 50 bp, synthetic construct
  source 1..50: mol_type = other DNA
atactaacaactatacatcrataaaataaaaatctaaatccraacactcc

SEQ ID NO: 13308 - DNA, 50 bp, synthetic construct
  source 1..50: mol_type = other DNA
catcrataaaataaaaatctaaatccraacactccrcctataaaatccac

SEQ ID NO: 13309 - DNA, 50 bp, synthetic construct
  source 1..50: mol_type = other DNA
tcacttatttaatcatccataaaaaaaaatctactctatcttaatacaac

SEQ ID NO: 13310 - DNA, 50 bp, synthetic construct
  source 1..50: mol_type = other DNA
taaaccactctctaaaaatctccaactaaatcctaaactcaaatcccaac

SEQ ID NO: 13311 - DNA, 50 bp, synthetic construct
  source 1..50: mol_type = other DNA
tataaaatactataaaaaattaacctcacaaacaaaaaaaatcatccrcc

SEQ ID NO: 13312 - DNA, 50 bp, synthetic construct
  source 1..50: mol_type = other DNA
tactaaaatcctactttatcctaaaaacaaatttaaaccacrttaaaaac

SEQ ID NO: 13313 - DNA, 50 bp, synthetic construct
  source 1..50: mol_type = other DNA
ctaaactaaacccaaacccttaaactcctaaaacctcaatttttccttcc

SEQ ID NO: 13314 - DNA, 50 bp, synthetic construct
  source 1..50: mol_type = other DNA
aaaattccaaaaacttaaaaatctaaacccaattcaaaaaaattattttc

SEQ ID NO: 13315 - DNA, 50 bp, synthetic construct
  source 1..50: mol_type = other DNA
caaaaacttaaaaatctaaacccaattcaaaaaaattattttcrctcctc

SEQ ID NO: 13316 - DNA, 50 bp, synthetic construct
  source 1..50: mol_type = other DNA
ccraaacttaaattccccaaatccttaataaaaaaatttccaaaaaactc

SEQ ID NO: 13317 - DNA, 50 bp, synthetic construct
  source 1..50: mol_type = other DNA
ctaaatctctacccttaaaaacaaaacactaactaacccraaaaacctac

SEQ ID NO: 13318 - DNA, 50 bp, synthetic construct
  source 1..50: mol_type = other DNA
racraaaacraaaccataattctcacaccatccaaaaaaaacataactac

SEQ ID NO: 13319 - DNA, 50 bp, synthetic construct
  source 1..50: mol_type = other DNA
raaaacraaaccataattctcacaccatccaaaaaaaacataactacrac

SEQ ID NO: 13320 - DNA, 50 bp, synthetic construct
  source 1..50: mol_type = other DNA
caaaaatacaaatcctcrttcaaaacratataatccttaccatcrtaaac

SEQ ID NO: 13321 - DNA, 50 bp, synthetic construct
  source 1..50: mol_type = other DNA
ctacaaaaaacraaaccttccaaaaataaataactataataataccttcc

SEQ ID NO: 13322 - DNA, 50 bp, synthetic construct
  source 1..50: mol_type = other DNA
atcaaactaacctaaaaaaaatctactctcttcttaaaataacatttcac

SEQ ID NO: 13323 - DNA, 50 bp, synthetic construct
  source 1..50: mol_type = other DNA
aaaaaacaacctcracaaaaaatcctcttcaccraaaaatccctaaaaac

SEQ ID NO: 13324 - DNA, 50 bp, synthetic construct
  source 1..50: mol_type = other DNA
aaaaactcctacraatcccacacccaacatccatctacaataaaaaaaac

SEQ ID NO: 13325 - DNA, 50 bp, synthetic construct
  source 1..50: mol_type = other DNA
ttccttcctcttaccrcaatattcctcacttaatcttaaataaaaacttc

SEQ ID NO: 13326 - DNA, 50 bp, synthetic construct
  source 1..50: mol_type = other DNA
tctaacratcacacaaaaactaaaaccrataaaatccacaaatcaactac

SEQ ID NO: 13327 - DNA, 50 bp, synthetic construct
  source 1..50: mol_type = other DNA
catcaaaaataaaactacaaacttctaacratcacacaaaaactaaaacc

SEQ ID NO: 13328 - DNA, 50 bp, synthetic construct
  source 1..50: mol_type = other DNA
tcctcaaaaaccttcaaaactcatcaaaaataaaactacaaacttctaac

SEQ ID NO: 13329 - DNA, 50 bp, synthetic construct
  source 1..50: mol_type = other DNA
ttctaaaaacccctaaaaaaaactaaacccaaaaaactttttaattccac

SEQ ID NO: 13330 - DNA, 50 bp, synthetic construct
  source 1..50: mol_type = other DNA
cctaaaaaaaactaaacccaaaaaactttttaattccacraaaatacttc

SEQ ID NO: 13331 - DNA, 50 bp, synthetic construct
  source 1..50: mol_type = other DNA
tacccaatctaatcccaaacatccttataacccaatataattacaactcc

SEQ ID NO: 13332 - DNA, 50 bp, synthetic construct
  source 1..50: mol_type = other DNA
tcctaaatccctccaaaataaaattaaaaaatcaactaataaattccrac

SEQ ID NO: 13333 - DNA, 50 bp, synthetic construct
  source 1..50: mol_type = other DNA
aaaacactaaaaaattaaatactaaacrcacaatatatctataaaatcac

SEQ ID NO: 13334 - DNA, 50 bp, synthetic construct
  source 1..50: mol_type = other DNA
ttcataccttattattactaaactacaaactttatttaaaattcattaac

SEQ ID NO: 13335 - DNA, 50 bp, synthetic construct
  source 1..50: mol_type = other DNA
tttctatatttcaaaattccataaaaaatatcacactacatttaatctcc

SEQ ID NO: 13336 - DNA, 50 bp, synthetic construct
  source 1..50: mol_type = other DNA
ctatatttcaaaattccataaaaaatatcacactacatttaatctccrtc

SEQ ID NO: 13337 - DNA, 50 bp, synthetic construct
  source 1..50: mol_type = other DNA
aaacaaattaataaataaattaatcrccattaaaataaaactcccraccc

SEQ ID NO: 13338 - DNA, 50 bp, synthetic construct
  source 1..50: mol_type = other DNA
aacttaaaataatcaaaactattctcacrctaaaataactaaaactaaac

SEQ ID NO: 13339 - DNA, 50 bp, synthetic construct
  source 1..50: mol_type = other DNA
ttcaaaaaacraaactctacaaacctaaaataaaaaatctaccaaaaacc

SEQ ID NO: 13340 - DNA, 50 bp, synthetic construct
  source 1..50: mol_type = other DNA
aaaatactcccacaactaaaactctaataacttcaaaacacaaaaccttc

SEQ ID NO: 13341 - DNA, 50 bp, synthetic construct
  source 1..50: mol_type = other DNA
tcctcactaatttcttttttcttattacccaaactaaaaaacaataacac

SEQ ID NO: 13342 - DNA, 50 bp, synthetic construct
  source 1..50: mol_type = other DNA
ttttttcttattacccaaactaaaaaacaataacacratcttaactcacc

SEQ ID NO: 13343 - DNA, 50 bp, synthetic construct
  source 1..50: mol_type = other DNA
tatctctacacactcttaaaaattaatcctaactaaacrcrataactcac

SEQ ID NO: 13344 - DNA, 50 bp, synthetic construct
  source 1..50: mol_type = other DNA
aattccrcaaccttaaaataaatctaaaacccraaaattcraaaaaaccc

SEQ ID NO: 13345 - DNA, 50 bp, synthetic construct
  source 1..50: mol_type = other DNA
caaaatctcacaccctacaataaatacataactacraactaaaacccrac

SEQ ID NO: 13346 - DNA, 50 bp, synthetic construct
  source 1..50: mol_type = other DNA
aaataaactctctaatactccrcctcaaaaacatcatttaacttttactc

SEQ ID NO: 13347 - DNA, 50 bp, synthetic construct
  source 1..50: mol_type = other DNA
tataaaaccactccacrcatatatcttccaaataaactctctaatactcc

SEQ ID NO: 13348 - DNA, 50 bp, synthetic construct
  source 1..50: mol_type = other DNA
aaaaatcctaaatataaatttttactttaccatttcttcctatataacac

SEQ ID NO: 13349 - DNA, 50 bp, synthetic construct
  source 1..50: mol_type = other DNA
aaatcctaaatataaatttttactttaccatttcttcctatataacacrc

SEQ ID NO: 13350 - DNA, 50 bp, synthetic construct
  source 1..50: mol_type = other DNA
aaatactttatattaactttataataactctcccaaaaaaacaataccac

SEQ ID NO: 13351 - DNA, 50 bp, synthetic construct
  source 1..50: mol_type = other DNA
atcctccaaaaaacatatattaaaaactaaatccacaatacaaccatatc

SEQ ID NO: 13352 - DNA, 50 bp, synthetic construct
  source 1..50: mol_type = other DNA
ccacttacctttaccaaaaaataatacaacaaaaaaactcaccaaatacc

SEQ ID NO: 13353 - DNA, 50 bp, synthetic construct
  source 1..50: mol_type = other DNA
ataaactccaatcattcctatatctctaaactccaatttatacttactcc

SEQ ID NO: 13354 - DNA, 50 bp, synthetic construct
  source 1..50: mol_type = other DNA
taatacaacctaactatcctattttacttttaactattcaaaacttttcc

SEQ ID NO: 13355 - DNA, 50 bp, synthetic construct
  source 1..50: mol_type = other DNA
taactataaaatataaacattcacrtatacttataacctaattcctctac

SEQ ID NO: 13356 - DNA, 50 bp, synthetic construct
  source 1..50: mol_type = other DNA
taaaaccaaaacracccctaaaacrtaaaaaaaccaaatcacaaacatac

SEQ ID NO: 13357 - DNA, 50 bp, synthetic construct
  source 1..50: mol_type = other DNA
crcaaaccaaataaaaatacraccaacatttttcattaaatattctcaac

SEQ ID NO: 13358 - DNA, 50 bp, synthetic construct
  source 1..50: mol_type = other DNA
taatacaaaatacaaacrtaatctcctatccaaaaaacaaaaacaaaacc

SEQ ID NO: 13359 - DNA, 50 bp, synthetic construct
  source 1..50: mol_type = other DNA
acaccttcttcctatttcctaacacaaacttataaataaatttcctaccc

SEQ ID NO: 13360 - DNA, 50 bp, synthetic construct
  source 1..50: mol_type = other DNA
tacatctaaaacaataaataaactattccaacrcracttacrctataaac

SEQ ID NO: 13361 - DNA, 50 bp, synthetic construct
  source 1..50: mol_type = other DNA
aaccrcrctaaaacaactcacttattaccccaaatatatataaaataacc

SEQ ID NO: 13362 - DNA, 50 bp, synthetic construct
  source 1..50: mol_type = other DNA
cccaaatatatataaaataaccrccttcaatttcctaattctaaatttcc

SEQ ID NO: 13363 - DNA, 50 bp, synthetic construct
  source 1..50: mol_type = other DNA
ccctaaactactaaataaacaaaattaaccttttcattctctaaatcttc

SEQ ID NO: 13364 - DNA, 50 bp, synthetic construct
  source 1..50: mol_type = other DNA
aaatacacttttccaaaaaacatttttataatacctaattaactacatac

SEQ ID NO: 13365 - DNA, 50 bp, synthetic construct
  source 1..50: mol_type = other DNA
tactcaatcactacattttctattctcaaaaaaaccctctcatataacac

SEQ ID NO: 13366 - DNA, 50 bp, synthetic construct
  source 1..50: mol_type = other DNA
ttctattctcaaaaaaaccctctcatataacacrtacaaaaaacaataac

SEQ ID NO: 13367 - DNA, 50 bp, synthetic construct
  source 1..50: mol_type = other DNA
ctaccccaaccaaaattttaaaaaatcattctaacrctaccaaatacccc

SEQ ID NO: 13368 - DNA, 50 bp, synthetic construct
  source 1..50: mol_type = other DNA
aacaaaaacctataactaccccaaccaaaattttaaaaaatcattctaac

SEQ ID NO: 13369 - DNA, 50 bp, synthetic construct
  source 1..50: mol_type = other DNA
craacatccctcttatctaccccacatatatttctttaccaaaaaccacc

SEQ ID NO: 13370 - DNA, 50 bp, synthetic construct
  source 1..50: mol_type = other DNA
crataacctctaacaaaaaaacacatataaaacaaacaaaaaaaatactc

SEQ ID NO: 13371 - DNA, 50 bp, synthetic construct
  source 1..50: mol_type = other DNA
atacaaaaatcacccatcttctatattaatcttactaaaaactacaaacc

SEQ ID NO: 13372 - DNA, 50 bp, synthetic construct
  source 1..50: mol_type = other DNA
aattcatctcattaaaactaattaaacaataaatacaacccataaaaaac

SEQ ID NO: 13373 - DNA, 50 bp, synthetic construct
  source 1..50: mol_type = other DNA
aaacaataaatacaacccataaaaaacraaccaaaacaaaacaaaacatc

SEQ ID NO: 13374 - DNA, 50 bp, synthetic construct
  source 1..50: mol_type = other DNA
acccaatatttaaacaaaaatatactattcctccaaatacaatctatcac

SEQ ID NO: 13375 - DNA, 50 bp, synthetic construct
  source 1..50: mol_type = other DNA
taaacttttcccataatcttcacaactaacaaaccaaaaaattccctccc

SEQ ID NO: 13376 - DNA, 50 bp, synthetic construct
  source 1..50: mol_type = other DNA
aaaactactacactaacaataaacaaaaatccataaacataaaccccacc

SEQ ID NO: 13377 - DNA, 50 bp, synthetic construct
  source 1..50: mol_type = other DNA
cattcctaaaacttaaataaacaattttatactcacaatataaacaaacc

SEQ ID NO: 13378 - DNA, 50 bp, synthetic construct
  source 1..50: mol_type = other DNA
aacraaatttcactcttattacccaaaataaaatacactaacrcaatctc

SEQ ID NO: 13379 - DNA, 50 bp, synthetic construct
  source 1..50: mol_type = other DNA
ttttttaaaacraaatttcactcttattacccaaaataaaatacactaac

SEQ ID NO: 13380 - DNA, 50 bp, synthetic construct
  source 1..50: mol_type = other DNA
taaaaaaaaactattactctccctaccacaacaaaacrataaaataaacc

SEQ ID NO: 13381 - DNA, 50 bp, synthetic construct
  source 1..50: mol_type = other DNA
aaataccrccaatcacrtctataaaataaccattatttactatttattcc

SEQ ID NO: 13382 - DNA, 50 bp, synthetic construct
  source 1..50: mol_type = other DNA
aaaaatacaaaaacacraaacaaacaataaacaataattatctcataaac

SEQ ID NO: 13383 - DNA, 50 bp, synthetic construct
  source 1..50: mol_type = other DNA
aaaccattttaaaatttcacctcaacatttcracaaaaatcaactctctc

SEQ ID NO: 13384 - DNA, 50 bp, synthetic construct
  source 1..50: mol_type = other DNA
ttaactcattaattactccttaaacatctcataactccaaaaaaaacrtc

SEQ ID NO: 13385 - DNA, 50 bp, synthetic construct
  source 1..50: mol_type = other DNA
ataaccacaaaattactctaaatatctcratccctattcccttaaatacc

SEQ ID NO: 13386 - DNA, 50 bp, synthetic construct
  source 1..50: mol_type = other DNA
actaataaaaacrataaacctaaaataccacaattctccrctaaccactc

SEQ ID NO: 13387 - DNA, 50 bp, synthetic construct
  source 1..50: mol_type = other DNA
tccactaaaatcaaacccraaactttataatataacctcaacrtatccac

SEQ ID NO: 13388 - DNA, 50 bp, synthetic construct
  source 1..50: mol_type = other DNA
caacraaaactactactatatcrataactaataataattctacttctttc

SEQ ID NO: 13389 - DNA, 50 bp, synthetic construct
  source 1..50: mol_type = other DNA
aactaaacaaactctcttcttaccatttccttttaaaaatcctcaaaaac

SEQ ID NO: 13390 - DNA, 50 bp, synthetic construct
  source 1..50: mol_type = other DNA
aacatatttaaattttttcacttaaactatatacttctttaatatttcac

SEQ ID NO: 13391 - DNA, 50 bp, synthetic construct
  source 1..50: mol_type = other DNA
atttctaacaaattcccaattactaaaactactacactaccctaaaatac

SEQ ID NO: 13392 - DNA, 50 bp, synthetic construct
  source 1..50: mol_type = other DNA
cctatatattacraaaacaacratactctcctccccaaatcaaaaactac

SEQ ID NO: 13393 - DNA, 50 bp, synthetic construct
  source 1..50: mol_type = other DNA
ttatcacctaaaaacaaaataaaattcatcctatatattacraaaacaac

SEQ ID NO: 13394 - DNA, 50 bp, synthetic construct
  source 1..50: mol_type = other DNA
aaaataaccttatcacctaaaaacaaaataaaattcatcctatatattac

SEQ ID NO: 13395 - DNA, 50 bp, synthetic construct
  source 1..50: mol_type = other DNA
tattaccaaactaccctactctcattccaaaacataactcccttaaaacc

SEQ ID NO: 13396 - DNA, 50 bp, synthetic construct
  source 1..50: mol_type = other DNA
caaactaccctactctcattccaaaacataactcccttaaaaccrtaaac

SEQ ID NO: 13397 - DNA, 50 bp, synthetic construct
  source 1..50: mol_type = other DNA
atcaattcccataacaaaatattcaactctccaaaacatttacacctatc

SEQ ID NO: 13398 - DNA, 50 bp, synthetic construct
  source 1..50: mol_type = other DNA
aaacaaattccttaaacrcaaaaatttaaaaccaaccttaacaacataac

SEQ ID NO: 13399 - DNA, 50 bp, synthetic construct
  source 1..50: mol_type = other DNA
aaaccaaccttaacaacataacraaacctcatctctacaaaacataaatc

SEQ ID NO: 13400 - DNA, 50 bp, synthetic construct
  source 1..50: mol_type = other DNA
aatcacaactcattataacctcaatatccctaaactcaaacaatcctccc

SEQ ID NO: 13401 - DNA, 50 bp, synthetic construct
  source 1..50: mol_type = other DNA
aatctaaaataaaaacttaaaaaaactttctaaaaccacaaataatccac

SEQ ID NO: 13402 - DNA, 50 bp, synthetic construct
  source 1..50: mol_type = other DNA
ccttataccaataaaatataactctacctaaaacattctccataaaaaac

SEQ ID NO: 13403 - DNA, 50 bp, synthetic construct
  source 1..50: mol_type = other DNA
cccttatatctttcccatctccctctacacacatatatacatacacacac

SEQ ID NO: 13404 - DNA, 50 bp, synthetic construct
  source 1..50: mol_type = other DNA
ctccrtctttattatttttctcccccttttaccatcctaaacttaaaacc

SEQ ID NO: 13405 - DNA, 50 bp, synthetic construct
  source 1..50: mol_type = other DNA
aaaccraataactttttaatttaaatcctctttctccattacaaaataac

SEQ ID NO: 13406 - DNA, 50 bp, synthetic construct
  source 1..50: mol_type = other DNA
tcactcatccaacrtttacttttttaaatccactcaaaacttttttctac

SEQ ID NO: 13407 - DNA, 50 bp, synthetic construct
  source 1..50: mol_type = other DNA
crcaaaattttacccactaaacracaaaataaacaaacttacctctaaac

SEQ ID NO: 13408 - DNA, 50 bp, synthetic construct
  source 1..50: mol_type = other DNA
aatcaattaacraattatcatttaaattaaccaataaattcacrcctcrc

SEQ ID NO: 13409 - DNA, 50 bp, synthetic construct
  source 1..50: mol_type = other DNA
taaatttctaccaatcctaaataaaaaatattctccaaaacraaaataac

SEQ ID NO: 13410 - DNA, 50 bp, synthetic construct
  source 1..50: mol_type = other DNA
aaaaaaactaatttcaactacrtcacaatcraattaaaccccaaaattac

SEQ ID NO: 13411 - DNA, 50 bp, synthetic construct
  source 1..50: mol_type = other DNA
aactacrcatacttcaaaaaactaaataaaacaaaaccaaaaacaaaccc

SEQ ID NO: 13412 - DNA, 50 bp, synthetic construct
  source 1..50: mol_type = other DNA
cactacraacttatccttaaccctaccctactcaatttcctaaaacatac

SEQ ID NO: 13413 - DNA, 50 bp, synthetic construct
  source 1..50: mol_type = other DNA
caccaaaacctaatactacracrttcctacaaatttcraataaacctaac

SEQ ID NO: 13414 - DNA, 50 bp, synthetic construct
  source 1..50: mol_type = other DNA
aaatcrcaatctacattttaacaaaaaccttaaatacatattaaaaattc

SEQ ID NO: 13415 - DNA, 50 bp, synthetic construct
  source 1..50: mol_type = other DNA
caaaacraaatcccraaccracccactaaaatccaaaatatcaatatctc

SEQ ID NO: 13416 - DNA, 50 bp, synthetic construct
  source 1..50: mol_type = other DNA
raaatcccraaccracccactaaaatccaaaatatcaatatctcrtaaac

SEQ ID NO: 13417 - DNA, 50 bp, synthetic construct
  source 1..50: mol_type = other DNA
ccaatttctctaacrccccctaataatcaatctataaatacttcrctcac

SEQ ID NO: 13418 - DNA, 50 bp, synthetic construct
  source 1..50: mol_type = other DNA
acccctaccaacrtacaaaacaaaatctaatattttaaaataatataatc

SEQ ID NO: 13419 - DNA, 50 bp, synthetic construct
  source 1..50: mol_type = other DNA
caaacataaactaaaaatcaaatatatacaaactaaaccacccrcaaatc

SEQ ID NO: 13420 - DNA, 50 bp, synthetic construct
  source 1..50: mol_type = other DNA
aattccacaaacataaactaaaaatcaaatatatacaaactaaaccaccc

SEQ ID NO: 13421 - DNA, 50 bp, synthetic construct
  source 1..50: mol_type = other DNA
tctaataacaacaaccaaactacttatatcccaaattctcaaaaaaaacc

SEQ ID NO: 13422 - DNA, 50 bp, synthetic construct
  source 1..50: mol_type = other DNA
aaaacacaaacctctctcaataaaaaataacttttctaaacacctcaccc

SEQ ID NO: 13423 - DNA, 50 bp, synthetic construct
  source 1..50: mol_type = other DNA
aaaataaattaaaaaatcaaataaacccccctccacccaaaacttaaccc

SEQ ID NO: 13424 - DNA, 50 bp, synthetic construct
  source 1..50: mol_type = other DNA
ctacaaaactatccraaaccctaacaaaaaaaacccaaaacaacaattcc

SEQ ID NO: 13425 - DNA, 50 bp, synthetic construct
  source 1..50: mol_type = other DNA
ttaaaactacccctaaaactaaccactcttcttttctcccacattcttcc

SEQ ID NO: 13426 - DNA, 50 bp, synthetic construct
  source 1..50: mol_type = other DNA
cctatactaaaaactataaaaactaaacctccaaacccraataaatctac

SEQ ID NO: 13427 - DNA, 50 bp, synthetic construct
  source 1..50: mol_type = other DNA
aaaaaacctaaccctatactaaaaactataaaaactaaacctccaaaccc

SEQ ID NO: 13428 - DNA, 50 bp, synthetic construct
  source 1..50: mol_type = other DNA
tcatctaaatctataaatccaacctctaaaatcctttattttacraaatc

SEQ ID NO: 13429 - DNA, 50 bp, synthetic construct
  source 1..50: mol_type = other DNA
aaacttataaccaaaataaactcctcactctacctccccatcctaaaacc

SEQ ID NO: 13430 - DNA, 50 bp, synthetic construct
  source 1..50: mol_type = other DNA
aaatcctaacaattaaatccccaaaaaaaaccaaatataaaaaaaatacc

SEQ ID NO: 13431 - DNA, 50 bp, synthetic construct
  source 1..50: mol_type = other DNA
actctcctctcaacaatcctctctacaaaacactttacttaaaatactcc

SEQ ID NO: 13432 - DNA, 50 bp, synthetic construct
  source 1..50: mol_type = other DNA
tctcaacaatcctctctacaaaacactttacttaaaatactccratcacc

SEQ ID NO: 13433 - DNA, 50 bp, synthetic construct
  source 1..50: mol_type = other DNA
tccttaaattcctaatttaaaactcaaatctccctcccctataacttctc

SEQ ID NO: 13434 - DNA, 50 bp, synthetic construct
  source 1..50: mol_type = other DNA
aaacaccacctatttaaactctaaaaaaacraaactttaaatatacctcc

SEQ ID NO: 13435 - DNA, 50 bp, synthetic construct
  source 1..50: mol_type = other DNA
aataaacraacaaacrataataaattatcccttaaaactacccaatcrac

SEQ ID NO: 13436 - DNA, 50 bp, synthetic construct
  source 1..50: mol_type = other DNA
aataaaaaaactatatcataaacrtccracrtatctaataaaaccaaaac

SEQ ID NO: 13437 - DNA, 50 bp, synthetic construct
  source 1..50: mol_type = other DNA
aaatccaaatctcctacccacrtaaaaaacttctaatttcacaaatcccc

SEQ ID NO: 13438 - DNA, 50 bp, synthetic construct
  source 1..50: mol_type = other DNA
cratttctctaaactattttattctttaaacatactctccaaacaacatc

SEQ ID NO: 13439 - DNA, 50 bp, synthetic construct
  source 1..50: mol_type = other DNA
crcaaaatcrtttttcatttacaaaacaaaaaccccataaaaaccaaacc

SEQ ID NO: 13440 - DNA, 50 bp, synthetic construct
  source 1..50: mol_type = other DNA
catttacaaaacaaaaaccccataaaaaccaaaccratacccacccattc

SEQ ID NO: 13441 - DNA, 50 bp, synthetic construct
  source 1..50: mol_type = other DNA
aactttccctactctaaatatatacaacraatcccaaatactcrataaac

SEQ ID NO: 13442 - DNA, 50 bp, synthetic construct
  source 1..50: mol_type = other DNA
aaacataattaactaaaacttaacctattataatctcrttactccccctc

SEQ ID NO: 13443 - DNA, 50 bp, synthetic construct
  source 1..50: mol_type = other DNA
acttcattataatacacaaaaatacratccaactacaaatcrctatcccc

SEQ ID NO: 13444 - DNA, 50 bp, synthetic construct
  source 1..50: mol_type = other DNA
ccttatcccctttaaataaatctatcattttatccctttcrtaaaccacc

SEQ ID NO: 13445 - DNA, 50 bp, synthetic construct
  source 1..50: mol_type = other DNA
ttttcttaaaataaaatcttactatattacccaaattaaaacacattaac

SEQ ID NO: 13446 - DNA, 50 bp, synthetic construct
  source 1..50: mol_type = other DNA
tcccttctatccacaaatcccaactaattatacaaacraaaacaaaaacc

SEQ ID NO: 13447 - DNA, 50 bp, synthetic construct
  source 1..50: mol_type = other DNA
acaacataataaaattccrtctctacaaaacatacaaaaattaaccaaac

SEQ ID NO: 13448 - DNA, 50 bp, synthetic construct
  source 1..50: mol_type = other DNA
atattacttaaacccaaacaattaaaactataataaactaaaattatacc

SEQ ID NO: 13449 - DNA, 50 bp, synthetic construct
  source 1..50: mol_type = other DNA
aaaactataataaactaaaattataccrctacactctaacctaaaaaacc

SEQ ID NO: 13450 - DNA, 50 bp, synthetic construct
  source 1..50: mol_type = other DNA
aaactaaaattataccrctacactctaacctaaaaaaccraataaaaccc

SEQ ID NO: 13451 - DNA, 50 bp, synthetic construct
  source 1..50: mol_type = other DNA
ctacctaaccacaaaccacrtataactaactaactaactaactatctatc

SEQ ID NO: 13452 - DNA, 50 bp, synthetic construct
  source 1..50: mol_type = other DNA
ctaaccacaaaccacrtataactaactaactaactaactatctatcrtcc

SEQ ID NO: 13453 - DNA, 50 bp, synthetic construct
  source 1..50: mol_type = other DNA
rtaaaaatcrcttaaatccaaaaaacacaataaaccraaattacrccacc

SEQ ID NO: 13454 - DNA, 50 bp, synthetic construct
  source 1..50: mol_type = other DNA
rataacrcaatctcractcactataccttctaaattcaaacrattctcac

SEQ ID NO: 13455 - DNA, 50 bp, synthetic construct
  source 1..50: mol_type = other DNA
taaccaacaataaaaccctatctctaccaaaaatacaaaaaatattaacc

SEQ ID NO: 13456 - DNA, 50 bp, synthetic construct
  source 1..50: mol_type = other DNA
caaatctaatctcaaacaccacttcctcataaaaactttctctaccaccc

SEQ ID NO: 13457 - DNA, 50 bp, synthetic construct
  source 1..50: mol_type = other DNA
taaataaatccttctttcctaaacacctaacacactacctaatacataac

SEQ ID NO: 13458 - DNA, 50 bp, synthetic construct
  source 1..50: mol_type = other DNA
accatattacccaaactaaccttaaactcctaaaatcaaacaatcaaccc

SEQ ID NO: 13459 - DNA, 50 bp, synthetic construct
  source 1..50: mol_type = other DNA
taaatcaccacacccractaaccttttctttaaaacttttcaactataac

SEQ ID NO: 13460 - DNA, 50 bp, synthetic construct
  source 1..50: mol_type = other DNA
ctacctaaaaaaaccrcaaactaaacaataaaaaactacatccracaacc

SEQ ID NO: 13461 - DNA, 50 bp, synthetic construct
  source 1..50: mol_type = other DNA
caaacaccraataacrtctccrctataatattctaaattcaaattacctc

SEQ ID NO: 13462 - DNA, 50 bp, synthetic construct
  source 1..50: mol_type = other DNA
ctaacataaaacacacctcctctataaacaaaaacrcattactttcccac

SEQ ID NO: 13463 - DNA, 50 bp, synthetic construct
  source 1..50: mol_type = other DNA
aaactttactatcrctatcrtcactacacaattattcctaattcaacrac

SEQ ID NO: 13464 - DNA, 50 bp, synthetic construct
  source 1..50: mol_type = other DNA
ccaaaactttactatcrctatcrtcactacacaattattcctaattcaac

SEQ ID NO: 13465 - DNA, 50 bp, synthetic construct
  source 1..50: mol_type = other DNA
ctatatcaaaaattataaaaaacrcraaccaaaactttactatcrctatc

SEQ ID NO: 13466 - DNA, 50 bp, synthetic construct
  source 1..50: mol_type = other DNA
aaatcaaaaacaattatacaataacracaacracaacaaaaccctaaccc

SEQ ID NO: 13467 - DNA, 50 bp, synthetic construct
  source 1..50: mol_type = other DNA
aaataaaacaacaaacctaactcactcctatatcaaaaattataaaaaac

SEQ ID NO: 13468 - DNA, 50 bp, synthetic construct
  source 1..50: mol_type = other DNA
aacaaaatcctccttattactttccaaacacraaaaaattaaattatccc

SEQ ID NO: 13469 - DNA, 50 bp, synthetic construct
  source 1..50: mol_type = other DNA
aacaaaaataactcacaaaaaacacaaccraaaccaatacatcaaaaccc

SEQ ID NO: 13470 - DNA, 50 bp, synthetic construct
  source 1..50: mol_type = other DNA
aactttaacaaataaaacttctaaatatacatttatcaatctttccactc

SEQ ID NO: 13471 - DNA, 50 bp, synthetic construct
  source 1..50: mol_type = other DNA
aacraaacactatactccaaatcaaaaaacrtaaatctaaacaaaaaaac

SEQ ID NO: 13472 - DNA, 50 bp, synthetic construct
  source 1..50: mol_type = other DNA
accrctctcctactcaaacttacrttttctaacttaaaatacaatactcc

SEQ ID NO: 13473 - DNA, 50 bp, synthetic construct
  source 1..50: mol_type = other DNA
ctatcaactaacrctacaaccaacctcatactcaacacatcacataattc

SEQ ID NO: 13474 - DNA, 50 bp, synthetic construct
  source 1..50: mol_type = other DNA
aacrtcacctaatccaaataacraaaaccattacccaaccataaaaaatc

SEQ ID NO: 13475 - DNA, 50 bp, synthetic construct
  source 1..50: mol_type = other DNA
aaaaatactaacaaaaatccaaataactaacrtcacctaatccaaataac

SEQ ID NO: 13476 - DNA, 50 bp, synthetic construct
  source 1..50: mol_type = other DNA
aaccraaaataactcaaaacccaaacaaccraaaatctatttcctaaacc

SEQ ID NO: 13477 - DNA, 50 bp, synthetic construct
  source 1..50: mol_type = other DNA
ttttcaattcctcactttacraattacaaaacccactcacccaaaaaacc

SEQ ID NO: 13478 - DNA, 50 bp, synthetic construct
  source 1..50: mol_type = other DNA
ctaaactctaaaccatcttcracctcctaaataaataaatcttacaattc

SEQ ID NO: 13479 - DNA, 50 bp, synthetic construct
  source 1..50: mol_type = other DNA
cataaatacttccccaaatcttctaaacctaattcaataatatttacttc

SEQ ID NO: 13480 - DNA, 50 bp, synthetic construct
  source 1..50: mol_type = other DNA
taaaaacaacccctataccccaaaaactactaaaattattcaaactaacc

SEQ ID NO: 13481 - DNA, 50 bp, synthetic construct
  source 1..50: mol_type = other DNA
aaaacatttactcacaattccctaaaaacatacataaaacataacataac

SEQ ID NO: 13482 - DNA, 50 bp, synthetic construct
  source 1..50: mol_type = other DNA
atccrtaacttcattcttaaaatcaataaaaccaaaaacccaccaattcc

SEQ ID NO: 13483 - DNA, 50 bp, synthetic construct
  source 1..50: mol_type = other DNA
cttttattctcttatctaaccacacccacatcctactaattaataaaacc

SEQ ID NO: 13484 - DNA, 50 bp, synthetic construct
  source 1..50: mol_type = other DNA
tactaattaatacrtttacaatccctaaactacatacaaaaattctccac

SEQ ID NO: 13485 - DNA, 50 bp, synthetic construct
  source 1..50: mol_type = other DNA
ttatttaaatataccatacttcrtatatatatatcctctccttccaaacc

SEQ ID NO: 13486 - DNA, 50 bp, synthetic construct
  source 1..50: mol_type = other DNA
ccaacaaaataaaaccccrtctctattaaaacacaaaaatttaaccraac

SEQ ID NO: 13487 - DNA, 50 bp, synthetic construct
  source 1..50: mol_type = other DNA
ctaaccaacaaaataaaaccccrtctctattaaaacacaaaaatttaacc

SEQ ID NO: 13488 - DNA, 50 bp, synthetic construct
  source 1..50: mol_type = other DNA
ttatatatcaataatacaaatctccatatacaaaatccttaatactattc

SEQ ID NO: 13489 - DNA, 50 bp, synthetic construct
  source 1..50: mol_type = other DNA
cttaatactattcraaatacttccatacccatacccaaactaaacccaac

SEQ ID NO: 13490 - DNA, 50 bp, synthetic construct
  source 1..50: mol_type = other DNA
tacaaaaaaccaaaaaccctttaaacctactctatcaaatttcttttctc

SEQ ID NO: 13491 - DNA, 50 bp, synthetic construct
  source 1..50: mol_type = other DNA
aacaataactttaaaatatactctccaactatcctctctactaaacttcc

SEQ ID NO: 13492 - DNA, 50 bp, synthetic construct
  source 1..50: mol_type = other DNA
cacacaccttcctttaaaataaactccttactattaaacccttaaatctc

SEQ ID NO: 13493 - DNA, 50 bp, synthetic construct
  source 1..50: mol_type = other DNA
cttatcataacccaaaccccacaaattccaaatcatattcaaaaataacc

SEQ ID NO: 13494 - DNA, 50 bp, synthetic construct
  source 1..50: mol_type = other DNA
ctattttataattatccattacatacaaccactaataactaaaaaaactc

SEQ ID NO: 13495 - DNA, 50 bp, synthetic construct
  source 1..50: mol_type = other DNA
ttcttccttataaacccacttaactaatttacaaacatctcactaaaacc

SEQ ID NO: 13496 - DNA, 50 bp, synthetic construct
  source 1..50: mol_type = other DNA
aatattcacttaaaaatcaaaccactataaaattacaaccaaacaaaaac

SEQ ID NO: 13497 - DNA, 50 bp, synthetic construct
  source 1..50: mol_type = other DNA
attacccttcccaaaaaccaatattcaaaactaaatcttatataacaatc

SEQ ID NO: 13498 - DNA, 50 bp, synthetic construct
  source 1..50: mol_type = other DNA
ccacacttccaccctcttcaaaaaaactaaaataacttactactaacttc

SEQ ID NO: 13499 - DNA, 50 bp, synthetic construct
  source 1..50: mol_type = other DNA
actaaaaacttcctacccctaacaaaaaaatctttataataaaaataaac

SEQ ID NO: 13500 - DNA, 50 bp, synthetic construct
  source 1..50: mol_type = other DNA
aaaacctccttaccaaaaataaaaaacctttaatctaaaccttaaactcc

SEQ ID NO: 13501 - DNA, 50 bp, synthetic construct
  source 1..50: mol_type = other DNA
acctccttaccaaaaataaaaaacctttaatctaaaccttaaactccrtc

SEQ ID NO: 13502 - DNA, 50 bp, synthetic construct
  source 1..50: mol_type = other DNA
aaacctcaaaatattaaccataaaaacatcataaataaacrcrataactc

SEQ ID NO: 13503 - DNA, 50 bp, synthetic construct
  source 1..50: mol_type = other DNA
cctttaaaaaacctcaaaatattaaccataaaaacatcataaataaacrc

SEQ ID NO: 13504 - DNA, 50 bp, synthetic construct
  source 1..50: mol_type = other DNA
tacctttaaaaaacctcaaaatattaaccataaaaacatcataaataaac

SEQ ID NO: 13505 - DNA, 50 bp, synthetic construct
  source 1..50: mol_type = other DNA
tataaaactaaaaataatctccaccccacaaaaatccacctacctcaacc

SEQ ID NO: 13506 - DNA, 50 bp, synthetic construct
  source 1..50: mol_type = other DNA
ataaaaaaacacaaaatcctttctcctaacttaaaaatacaaaataatac

SEQ ID NO: 13507 - DNA, 50 bp, synthetic construct
  source 1..50: mol_type = other DNA
tcaaactactaaaatccacttcaacctcctaaataaataaaactacaaac

SEQ ID NO: 13508 - DNA, 50 bp, synthetic construct
  source 1..50: mol_type = other DNA
taactaaactaaaaaacaaaattctacatcaatattaccaaactaatctc

SEQ ID NO: 13509 - DNA, 50 bp, synthetic construct
  source 1..50: mol_type = other DNA
caacctaacaatactaatacaaaactttactcctcaattcaactaaaacc

SEQ ID NO: 13510 - DNA, 50 bp, synthetic construct
  source 1..50: mol_type = other DNA
aaattaattccaaaccacacacaataactaaaaaaaccaaactcctcccc

SEQ ID NO: 13511 - DNA, 50 bp, synthetic construct
  source 1..50: mol_type = other DNA
aaaatcccaataaaattaaaccaaaaaattcattaaattcattactcatc

SEQ ID NO: 13512 - DNA, 50 bp, synthetic construct
  source 1..50: mol_type = other DNA
aactcaatcccactaaaaccttcaaaaaactactatataaaacatacctc

SEQ ID NO: 13513 - DNA, 50 bp, synthetic construct
  source 1..50: mol_type = other DNA
atactcctataactaaaataaatcctcaacaatatcaaaaacttaaaaac

SEQ ID NO: 13514 - DNA, 50 bp, synthetic construct
  source 1..50: mol_type = other DNA
aaaaaccraaaaactaaataaatccatcctaaaaaaaacaactctaaaac

SEQ ID NO: 13515 - DNA, 50 bp, synthetic construct
  source 1..50: mol_type = other DNA
taacaaaatcacacataaaccaaatatcaaaaaaactataaacaaaaacc

SEQ ID NO: 13516 - DNA, 50 bp, synthetic construct
  source 1..50: mol_type = other DNA
taaaatacttcctaccattccctacccaaacctaaatctctttcctaacc

SEQ ID NO: 13517 - DNA, 50 bp, synthetic construct
  source 1..50: mol_type = other DNA
aaacccraccttaataaacttatcraaatattctttaaaccttataatcc

SEQ ID NO: 13518 - DNA, 50 bp, synthetic construct
  source 1..50: mol_type = other DNA
aaataaccttcctattcactatccraaccataaaacctaaaaaatactcc

SEQ ID NO: 13519 - DNA, 50 bp, synthetic construct
  source 1..50: mol_type = other DNA
ctatccraaccataaaacctaaaaaatactccrataaatttatcaaaacc

SEQ ID NO: 13520 - DNA, 50 bp, synthetic construct
  source 1..50: mol_type = other DNA
aaatttatcaaaaccraacttccrcaaaaacaaaactcaccaaacttaac

SEQ ID NO: 13521 - DNA, 50 bp, synthetic construct
  source 1..50: mol_type = other DNA
cacttaccattaaataacaattaaattactattacaatttaaaataaatc

SEQ ID NO: 13522 - DNA, 50 bp, synthetic construct
  source 1..50: mol_type = other DNA
atcrcaacccctctaaacctaattttcttttttctcactctttttttaac

SEQ ID NO: 13523 - DNA, 50 bp, synthetic construct
  source 1..50: mol_type = other DNA
aaacctactaacaaacaaccccaaaatcactcraaaaacaacttcttccc

SEQ ID NO: 13524 - DNA, 50 bp, synthetic construct
  source 1..50: mol_type = other DNA
aactaaccaactaaatattaactaaacraaaacttaacaattaaataccc

SEQ ID NO: 13525 - DNA, 50 bp, synthetic construct
  source 1..50: mol_type = other DNA
atacctatcccaaataaatcatcaaaaccacacaaaaccraaaaaaaccc

SEQ ID NO: 13526 - DNA, 50 bp, synthetic construct
  source 1..50: mol_type = other DNA
tataataacataatcctaactcactacaactccrcctccaaaattcaaac

SEQ ID NO: 13527 - DNA, 50 bp, synthetic construct
  source 1..50: mol_type = other DNA
tcraaactcctattaaaaatccccccaactccttaataacaaccctaaac

SEQ ID NO: 13528 - DNA, 50 bp, synthetic construct
  source 1..50: mol_type = other DNA
accrcactactaactatcataactttattaaacaaaaaaaaccctaacrc

SEQ ID NO: 13529 - DNA, 50 bp, synthetic construct
  source 1..50: mol_type = other DNA
aacttttcttatttaataaaattataataactaacaatacratcccraac

SEQ ID NO: 13530 - DNA, 50 bp, synthetic construct
  source 1..50: mol_type = other DNA
ttatttaataaaattataataactaacaatacratcccraacrcctcccc

SEQ ID NO: 13531 - DNA, 50 bp, synthetic construct
  source 1..50: mol_type = other DNA
ataaatttacatcttaaaacaaaaatcaatacacaataacatcaataacc

SEQ ID NO: 13532 - DNA, 50 bp, synthetic construct
  source 1..50: mol_type = other DNA
caacattaaacactaaataattaaaactccrtctacaatcccaacacctc

SEQ ID NO: 13533 - DNA, 50 bp, synthetic construct
  source 1..50: mol_type = other DNA
caatcaaaacaactataaaaacaatatccataacaacaaataacctaatc

SEQ ID NO: 13534 - DNA, 50 bp, synthetic construct
  source 1..50: mol_type = other DNA
acctatatcttcctaataaaatatctaataaccccctaataacaataacc

SEQ ID NO: 13535 - DNA, 50 bp, synthetic construct
  source 1..50: mol_type = other DNA
aaaatatctaataaccccctaataacaataaccraataataaccctctac

SEQ ID NO: 13536 - DNA, 50 bp, synthetic construct
  source 1..50: mol_type = other DNA
aataaccccctaataacaataaccraataataaccctctacraaataaac

SEQ ID NO: 13537 - DNA, 50 bp, synthetic construct
  source 1..50: mol_type = other DNA
taaccraataataaccctctacraaataaacrcctctctaaaaattaaac

SEQ ID NO: 13538 - DNA, 50 bp, synthetic construct
  source 1..50: mol_type = other DNA
taaacrccacttctaaaaacctaaaaaaattaacttattttacatcccac

SEQ ID NO: 13539 - DNA, 50 bp, synthetic construct
  source 1..50: mol_type = other DNA
acaacraaactttaaatacaataaaaaacaacaattatttataaacatac

SEQ ID NO: 13540 - DNA, 50 bp, synthetic construct
  source 1..50: mol_type = other DNA
acaacrtatatccacaaacaactactactcctcattacatctaaaactcc

SEQ ID NO: 13541 - DNA, 50 bp, synthetic construct
  source 1..50: mol_type = other DNA
acccrctatattttcctcttaatactacataaaataataatatattttcc

SEQ ID NO: 13542 - DNA, 50 bp, synthetic construct
  source 1..50: mol_type = other DNA
tcttaaataaaaatacrtcttacaatcaataacrtatcataatttaaccc

SEQ ID NO: 13543 - DNA, 50 bp, synthetic construct
  source 1..50: mol_type = other DNA
ttttcccatttatcatctcttaaataaaaatacrtcttacaatcaataac

SEQ ID NO: 13544 - DNA, 50 bp, synthetic construct
  source 1..50: mol_type = other DNA
tataaaacatatatttattttcccatttatcatctcttaaataaaaatac

SEQ ID NO: 13545 - DNA, 50 bp, synthetic construct
  source 1..50: mol_type = other DNA
ctaaaattacaaatataaaccacctcaccctataatataatataaatacc

SEQ ID NO: 13546 - DNA, 50 bp, synthetic construct
  source 1..50: mol_type = other DNA
actatattatccraactaatctccaactcctaaactcaaacaaaccactc

SEQ ID NO: 13547 - DNA, 50 bp, synthetic construct
  source 1..50: mol_type = other DNA
tcattctactcacatttattaaatataaattattaaacaaacacactaac

SEQ ID NO: 13548 - DNA, 50 bp, synthetic construct
  source 1..50: mol_type = other DNA
taacttcttatctaatatctattttcactctaaaactcacttaaaatcac

SEQ ID NO: 13549 - DNA, 50 bp, synthetic construct
  source 1..50: mol_type = other DNA
aatttatttaatctatctcaaccttattttatctacttataatctatcac

SEQ ID NO: 13550 - DNA, 50 bp, synthetic construct
  source 1..50: mol_type = other DNA
crccataaacactatttccacaactactttactattttaattatcattac

SEQ ID NO: 13551 - DNA, 50 bp, synthetic construct
  source 1..50: mol_type = other DNA
aacacctcacatttctaaaaaacaaccctaaataaacttcaaaaccctac

SEQ ID NO: 13552 - DNA, 50 bp, synthetic construct
  source 1..50: mol_type = other DNA
acctcacatttctaaaaaacaaccctaaataaacttcaaaaccctacrtc

SEQ ID NO: 13553 - DNA, 50 bp, synthetic construct
  source 1..50: mol_type = other DNA
atctcacaaattcccaaaaacacaaaactatttacraccacaacaactcc

SEQ ID NO: 13554 - DNA, 50 bp, synthetic construct
  source 1..50: mol_type = other DNA
ctaacracatattacatctcacaaattcccaaaaacacaaaactatttac

SEQ ID NO: 13555 - DNA, 50 bp, synthetic construct
  source 1..50: mol_type = other DNA
atacatataccctcctcaattccatctcctaaacttaccaaatataaatc

SEQ ID NO: 13556 - DNA, 50 bp, synthetic construct
  source 1..50: mol_type = other DNA
accaaataaatccttctttaaaactaatatcataaaaattactcaatacc

SEQ ID NO: 13557 - DNA, 50 bp, synthetic construct
  source 1..50: mol_type = other DNA
tattcaacaatccaaactaatatctatcttacttcctaaatataaatctc

SEQ ID NO: 13558 - DNA, 50 bp, synthetic construct
  source 1..50: mol_type = other DNA
tctatttttaccttccacraaaaatcttacraaaaacttccacattaccc

SEQ ID NO: 13559 - DNA, 50 bp, synthetic construct
  source 1..50: mol_type = other DNA
aaaataacaaaatttatcttattttctttatcacattcctcctaactacc

SEQ ID NO: 13560 - DNA, 50 bp, synthetic construct
  source 1..50: mol_type = other DNA
tcctaacccactcccaataaaaaatatcctctaaattatttttcctatac

SEQ ID NO: 13561 - DNA, 50 bp, synthetic construct
  source 1..50: mol_type = other DNA
tcccataaaaacacctaaactaaaaaaaatcaatcttcrcaaaaatattc

SEQ ID NO: 13562 - DNA, 50 bp, synthetic construct
  source 1..50: mol_type = other DNA
aaatataaccaatcccataaaaacacctaaactaaaaaaaatcaatcttc

SEQ ID NO: 13563 - DNA, 50 bp, synthetic construct
  source 1..50: mol_type = other DNA
aacraaaacaaaaaatcaaaactcacraactataaattccacccttaatc

SEQ ID NO: 13564 - DNA, 50 bp, synthetic construct
  source 1..50: mol_type = other DNA
tctataacttctttcctataataaacratcaaaaataaaatctacaatcc

SEQ ID NO: 13565 - DNA, 50 bp, synthetic construct
  source 1..50: mol_type = other DNA
aacratcaaaaataaaatctacaatccrtaaaccctaacttcttaccttc

SEQ ID NO: 13566 - DNA, 50 bp, synthetic construct
  source 1..50: mol_type = other DNA
cccacratccraaaataataatttctattacatttcaaaaccactaaaac

SEQ ID NO: 13567 - DNA, 50 bp, synthetic construct
  source 1..50: mol_type = other DNA
taaaaactcaataaacrcacctatactttacccactaacataaaacccac

SEQ ID NO: 13568 - DNA, 50 bp, synthetic construct
  source 1..50: mol_type = other DNA
aaaatatcaccaaatacctaccacaactatatactaaaaactcaataaac

SEQ ID NO: 13569 - DNA, 50 bp, synthetic construct
  source 1..50: mol_type = other DNA
aaaaaatatacrcaaacrcaataacrtctaaatttaaacccactaaatac

SEQ ID NO: 13570 - DNA, 50 bp, synthetic construct
  source 1..50: mol_type = other DNA
acctatcaatacaaaaaatacaaaaacattaaccaaacrtaataatacac

SEQ ID NO: 13571 - DNA, 50 bp, synthetic construct
  source 1..50: mol_type = other DNA
aacataaaaaaaacctatcaatacaaaaaatacaaaaacattaaccaaac

SEQ ID NO: 13572 - DNA, 50 bp, synthetic construct
  source 1..50: mol_type = other DNA
cctcatattccctaaactaatctcaaactcctatatccaaacaatcctcc

SEQ ID NO: 13573 - DNA, 50 bp, synthetic construct
  source 1..50: mol_type = other DNA
atccaataaaaacctcccratacrctcaactaaaaaataaacraaactac

SEQ ID NO: 13574 - DNA, 50 bp, synthetic construct
  source 1..50: mol_type = other DNA
atcacaaaatcaaaaaatcraaaccatcctaactaacactataaaacccc

SEQ ID NO: 13575 - DNA, 50 bp, synthetic construct
  source 1..50: mol_type = other DNA
aacaaaaatttaccatataacactctttttacataaattctacctccccc

SEQ ID NO: 13576 - DNA, 50 bp, synthetic construct
  source 1..50: mol_type = other DNA
aaccaatctatttcacaaattctaaattttcctaatatcacaataacatc

SEQ ID NO: 13577 - DNA, 50 bp, synthetic construct
  source 1..50: mol_type = other DNA
aaaaatactccacaaaacaaacctaaaccacccaaaaaactaccttaacc

SEQ ID NO: 13578 - DNA, 50 bp, synthetic construct
  source 1..50: mol_type = other DNA
tcrtcctactacatttcttaattccctaaacaaaaaacraaataactaac

SEQ ID NO: 13579 - DNA, 50 bp, synthetic construct
  source 1..50: mol_type = other DNA
tttatctaaaactcrtcctactacatttcttaattccctaaacaaaaaac

SEQ ID NO: 13580 - DNA, 50 bp, synthetic construct
  source 1..50: mol_type = other DNA
aaaccaaaaaatataacaaaacraaccccaaacaaaacctttcaaacacc

SEQ ID NO: 13581 - DNA, 50 bp, synthetic construct
  source 1..50: mol_type = other DNA
acaatttcctaactaatctctacctaaacaaaactaaaacaaccttaaac

SEQ ID NO: 13582 - DNA, 50 bp, synthetic construct
  source 1..50: mol_type = other DNA
cattacaaacaattccttcattaaataaatatttatcaaatacctaccac

SEQ ID NO: 13583 - DNA, 50 bp, synthetic construct
  source 1..50: mol_type = other DNA
tcraaatttaaaaaatcttctcccaaccacttttaacctactttcattcc

SEQ ID NO: 13584 - DNA, 50 bp, synthetic construct
  source 1..50: mol_type = other DNA
aaataaaaaaattccaaaaaaaaacttcaaaaatccctatacccaacatc

SEQ ID NO: 13585 - DNA, 50 bp, synthetic construct
  source 1..50: mol_type = other DNA
tattccrtttctatatcaataaacacttatcattttccrtaaaccaaaac

SEQ ID NO: 13586 - DNA, 50 bp, synthetic construct
  source 1..50: mol_type = other DNA
ttttcaaaaaaccaaaattaaaattaaaaacatctcatccaaaccctacc

SEQ ID NO: 13587 - DNA, 50 bp, synthetic construct
  source 1..50: mol_type = other DNA
taactcaattcccactaaaaaaccaactataaataaaaatttaaactctc

SEQ ID NO: 13588 - DNA, 50 bp, synthetic construct
  source 1..50: mol_type = other DNA
aatatataaacaaacatatacaactactacacacrtacacccaaaaaacc

SEQ ID NO: 13589 - DNA, 50 bp, synthetic construct
  source 1..50: mol_type = other DNA
aatatttttcctttataataaattactttatacttcatctcctttactac

SEQ ID NO: 13590 - DNA, 50 bp, synthetic construct
  source 1..50: mol_type = other DNA
aaaccaacraaacaaacaaacctctaaatcataacaccraaaatattaac

SEQ ID NO: 13591 - DNA, 50 bp, synthetic construct
  source 1..50: mol_type = other DNA
caacaaccrtcaacatttccrataccataactcaaaaatttatctacttc

SEQ ID NO: 13592 - DNA, 50 bp, synthetic construct
  source 1..50: mol_type = other DNA
atttaactactacttttacaatatttacaattaccttatttaaataaaac

SEQ ID NO: 13593 - DNA, 50 bp, synthetic construct
  source 1..50: mol_type = other DNA
ttctatttctaaaacccaacttccttatactctcttattcctaattaccc

SEQ ID NO: 13594 - DNA, 50 bp, synthetic construct
  source 1..50: mol_type = other DNA
taccataccctaacatattttacacaataaaaaataacctctctcttctc

SEQ ID NO: 13595 - DNA, 50 bp, synthetic construct
  source 1..50: mol_type = other DNA
tttacacaataaaaaataacctctctcttctcrctaaaacaacccttccc

SEQ ID NO: 13596 - DNA, 50 bp, synthetic construct
  source 1..50: mol_type = other DNA
tccaacttttctaaatcctacaacctccactcaaatcaaaaccaaaaatc

SEQ ID NO: 13597 - DNA, 50 bp, synthetic construct
  source 1..50: mol_type = other DNA
aattccrcaaatccaccttaaaataaatctcaaacraaaaaactctaaac

SEQ ID NO: 13598 - DNA, 50 bp, synthetic construct
  source 1..50: mol_type = other DNA
crcaaatccaccttaaaataaatctcaaacraaaaaactctaaacraccc

SEQ ID NO: 13599 - DNA, 50 bp, synthetic construct
  source 1..50: mol_type = other DNA
atattaaaaccraaaaacacaaaaatacaaacrccaaacacaaactaacc

SEQ ID NO: 13600 - DNA, 50 bp, synthetic construct
  source 1..50: mol_type = other DNA
actaaataactactcaaacacctaaaacataacaaaaaaataatactacc

SEQ ID NO: 13601 - DNA, 50 bp, synthetic construct
  source 1..50: mol_type = other DNA
ataaaaaatctccaaaatccttcctaaactccaaaatacccaaaaaaacc

SEQ ID NO: 13602 - DNA, 50 bp, synthetic construct
  source 1..50: mol_type = other DNA
ccttaactcttatttttcccccaaaactaataaaaacrtccaaataaaac

SEQ ID NO: 13603 - DNA, 50 bp, synthetic construct
  source 1..50: mol_type = other DNA
ataacttctctaaaacccraaaccaactaataaaaacrtcccatctaaac

SEQ ID NO: 13604 - DNA, 50 bp, synthetic construct
  source 1..50: mol_type = other DNA
aatccttatatcaactttaaaaaataaccaccatactaatcccaatttac

SEQ ID NO: 13605 - DNA, 50 bp, synthetic construct
  source 1..50: mol_type = other DNA
aaaaataaccaccatactaatcccaatttacraataaataataactttac

SEQ ID NO: 13606 - DNA, 50 bp, synthetic construct
  source 1..50: mol_type = other DNA
aatcccaatttacraataaataataactttacrtaactccaaccaaaaac

SEQ ID NO: 13607 - DNA, 50 bp, synthetic construct
  source 1..50: mol_type = other DNA
aacactatcrctacctaaaataaaacaaaaacaaaacctaatcaaaaccc

SEQ ID NO: 13608 - DNA, 50 bp, synthetic construct
  source 1..50: mol_type = other DNA
attttaacctcaactaaaaataaaaccraataaacrcrcctaaaactctc

SEQ ID NO: 13609 - DNA, 50 bp, synthetic construct
  source 1..50: mol_type = other DNA
aaaaaaactctaaatccraataaatacrtaaaaactttaaaactaaaacc

SEQ ID NO: 13610 - DNA, 50 bp, synthetic construct
  source 1..50: mol_type = other DNA
ttctaaaacacaacracratacaatttaacaaacraaccataacaacaac

SEQ ID NO: 13611 - DNA, 50 bp, synthetic construct
  source 1..50: mol_type = other DNA
tacaatttaacaaacraaccataacaacaacrataaactcctccaaaccc

SEQ ID NO: 13612 - DNA, 50 bp, synthetic construct
  source 1..50: mol_type = other DNA
ataactcatcctccaatttccaaataaaaaccttccraccaatcttaacc

SEQ ID NO: 13613 - DNA, 50 bp, synthetic construct
  source 1..50: mol_type = other DNA
aaataacrctactacrctacttctactccctaaaaataaatacccaaaac

SEQ ID NO: 13614 - DNA, 50 bp, synthetic construct
  source 1..50: mol_type = other DNA
ctcaaaactatacrtaatctacaaaaaaaacrcatcraccaccaaataac

SEQ ID NO: 13615 - DNA, 50 bp, synthetic construct
  source 1..50: mol_type = other DNA
cctaaataattccratatataatcaaattttaaaactactaatttaaccc

SEQ ID NO: 13616 - DNA, 50 bp, synthetic construct
  source 1..50: mol_type = other DNA
aaattcaaaccacraactaaatcaataattctaaaacttaactacacatc

SEQ ID NO: 13617 - DNA, 50 bp, synthetic construct
  source 1..50: mol_type = other DNA
acaaaaccctaaccrtacttataaaattaaaactatactctcaactactc

SEQ ID NO: 13618 - DNA, 50 bp, synthetic construct
  source 1..50: mol_type = other DNA
aaactaaaaaacccaaccctaataaattaaaaaccccactttctatactc

SEQ ID NO: 13619 - DNA, 50 bp, synthetic construct
  source 1..50: mol_type = other DNA
aaataactcctactatcaaaaacaataaaaaaacaaccatccaacaaacc

SEQ ID NO: 13620 - DNA, 50 bp, synthetic construct
  source 1..50: mol_type = other DNA
atactaaaaatttttctctaatttctcaaacaactccraaaccaaaattc

SEQ ID NO: 13621 - DNA, 50 bp, synthetic construct
  source 1..50: mol_type = other DNA
aaaataaaacctctacaccaatactactaaaaatatcaaaacacaaaaac

SEQ ID NO: 13622 - DNA, 50 bp, synthetic construct
  source 1..50: mol_type = other DNA
acattacaactaccacaaaaaaattaaacaatatatatccaaaaaccaac

SEQ ID NO: 13623 - DNA, 50 bp, synthetic construct
  source 1..50: mol_type = other DNA
ctttaatttttaaaatacaccatatcctaaaaaataacaccctcccaccc

SEQ ID NO: 13624 - DNA, 50 bp, synthetic construct
  source 1..50: mol_type = other DNA
taataataaaaccaataaatcccacaacataaccacactacacctccttc

SEQ ID NO: 13625 - DNA, 50 bp, synthetic construct
  source 1..50: mol_type = other DNA
ttaatattcctaatccacaaacttaacactactctccrtacaatatcttc

SEQ ID NO: 13626 - DNA, 50 bp, synthetic construct
  source 1..50: mol_type = other DNA
tctctaaaaactattaatattcctaatccacaaacttaacactactctcc

SEQ ID NO: 13627 - DNA, 50 bp, synthetic construct
  source 1..50: mol_type = other DNA
aaacaaaaacactaaaattaaccaaccttccccataaatcaacccaaacc

SEQ ID NO: 13628 - DNA, 50 bp, synthetic construct
  source 1..50: mol_type = other DNA
atacttaaccataaaacacaaaacaaccatataattccaaatacccctac

SEQ ID NO: 13629 - DNA, 50 bp, synthetic construct
  source 1..50: mol_type = other DNA
ccccaccactaacactttcaacaccaaaaaatctaaaaaataataactac

SEQ ID NO: 13630 - DNA, 50 bp, synthetic construct
  source 1..50: mol_type = other DNA
taaaattcccrctacattataaaaataaaacttctacaacatcttccaac

SEQ ID NO: 13631 - DNA, 50 bp, synthetic construct
  source 1..50: mol_type = other DNA
attatcaaataaataccctccaataccctctaaacatacaaaaaaaactc

SEQ ID NO: 13632 - DNA, 50 bp, synthetic construct
  source 1..50: mol_type = other DNA
atataaaaacctctacaatatctcataaaaaaacccttatttcctataac

SEQ ID NO: 13633 - DNA, 50 bp, synthetic construct
  source 1..50: mol_type = other DNA
cctatcattattatataaaaacttctatcacaccacctaccataacaccc

SEQ ID NO: 13634 - DNA, 50 bp, synthetic construct
  source 1..50: mol_type = other DNA
aaatccataacacaaaatacaactaaactactataaatatccccaacacc

SEQ ID NO: 13635 - DNA, 50 bp, synthetic construct
  source 1..50: mol_type = other DNA
ctaaccaacacaaataacttcaaaaataatccataaacacaaacaaaaac

SEQ ID NO: 13636 - DNA, 50 bp, synthetic construct
  source 1..50: mol_type = other DNA
tattttttctctccccttttcttcctatctcttccctcctttcttaacac

SEQ ID NO: 13637 - DNA, 50 bp, synthetic construct
  source 1..50: mol_type = other DNA
rcttcaataaaaatcctaatttacaccccraatttaaccccrtcaaaaac

SEQ ID NO: 13638 - DNA, 50 bp, synthetic construct
  source 1..50: mol_type = other DNA
aaaacaaatctacaaatctaatcactaatctcattacaataacrctatac

SEQ ID NO: 13639 - DNA, 50 bp, synthetic construct
  source 1..50: mol_type = other DNA
aacaaatctacaaatctaatcactaatctcattacaataacrctatacrc

SEQ ID NO: 13640 - DNA, 50 bp, synthetic construct
  source 1..50: mol_type = other DNA
cttctaaatttccccaaatctccaaaccrctaaaattttctcttctaaac

SEQ ID NO: 13641 - DNA, 50 bp, synthetic construct
  source 1..50: mol_type = other DNA
tcataattaaccctaaattccraacctcaattttcactaaataaacratc

SEQ ID NO: 13642 - DNA, 50 bp, synthetic construct
  source 1..50: mol_type = other DNA
ctaaaacccctaaattcccraactactcctataaataacattaaaaaacc

SEQ ID NO: 13643 - DNA, 50 bp, synthetic construct
  source 1..50: mol_type = other DNA
cctaaattcccraactactcctataaataacattaaaaaaccrttccaac

SEQ ID NO: 13644 - DNA, 50 bp, synthetic construct
  source 1..50: mol_type = other DNA
ccctcatctatcacccttaactaataactactaaattaaacatccataac

SEQ ID NO: 13645 - DNA, 50 bp, synthetic construct
  source 1..50: mol_type = other DNA
ctccctatttaaataaactttaaccttcrctacaatccrtttccatctac

SEQ ID NO: 13646 - DNA, 50 bp, synthetic construct
  source 1..50: mol_type = other DNA
aaacaaacattttccaaaaacaaacctaaaacrcacraatctatataacc

SEQ ID NO: 13647 - DNA, 50 bp, synthetic construct
  source 1..50: mol_type = other DNA
aatacctatctaaaatttattttaaaaccrtttctaacttcactactacc

SEQ ID NO: 13648 - DNA, 50 bp, synthetic construct
  source 1..50: mol_type = other DNA
taactaataccctaaaaccaataaatcaaaaaaatattctaaatccraac

SEQ ID NO: 13649 - DNA, 50 bp, synthetic construct
  source 1..50: mol_type = other DNA
accctaaaaccaataaatcaaaaaaatattctaaatccraacraaaaaac

SEQ ID NO: 13650 - DNA, 50 bp, synthetic construct
  source 1..50: mol_type = other DNA
aacraaaccaaaaacattctactcraattaacaatattaataaaccraac

SEQ ID NO: 13651 - DNA, 50 bp, synthetic construct
  source 1..50: mol_type = other DNA
tccaaattaaacaataaaactattaaaacraaaccaaaaacattctactc

SEQ ID NO: 13652 - DNA, 50 bp, synthetic construct
  source 1..50: mol_type = other DNA
cccattattcaacctaaatttttttcctaaataaaacatttactatcccc

SEQ ID NO: 13653 - DNA, 50 bp, synthetic construct
  source 1..50: mol_type = other DNA
ctataactttttaaaactcaaatttctactaataaaaattttccccatcc

SEQ ID NO: 13654 - DNA, 50 bp, synthetic construct
  source 1..50: mol_type = other DNA
aaaatttacctaaactcctaaaccttaaaccaattatttacccttttctc

SEQ ID NO: 13655 - DNA, 50 bp, synthetic construct
  source 1..50: mol_type = other DNA
taaacaaaatcaaccccraaccraaacaacaaacacaaaacaaaaacatc

SEQ ID NO: 13656 - DNA, 50 bp, synthetic construct
  source 1..50: mol_type = other DNA
tccaaacaatctaactccaaaacctaccttctatactactttttaactac

SEQ ID NO: 13657 - DNA, 50 bp, synthetic construct
  source 1..50: mol_type = other DNA
acactaccaaataaaaatttaaaaactactaacccatttcctcttacccc

SEQ ID NO: 13658 - DNA, 50 bp, synthetic construct
  source 1..50: mol_type = other DNA
caacaatcatttaaaaaaaacttactctaccrccraccataattattacc

SEQ ID NO: 13659 - DNA, 50 bp, synthetic construct
  source 1..50: mol_type = other DNA
tcctctaaaatactcttccctaaacccraccctaattaacttaaattctc

SEQ ID NO: 13660 - DNA, 50 bp, synthetic construct
  source 1..50: mol_type = other DNA
aatctcaatctaacttcraaatcrctacaaaaaacratcaaaataccaac

SEQ ID NO: 13661 - DNA, 50 bp, synthetic construct
  source 1..50: mol_type = other DNA
aactctaaaaaaatacttaaaaatccaacaaatccrctaacaccctaacc

SEQ ID NO: 13662 - DNA, 50 bp, synthetic construct
  source 1..50: mol_type = other DNA
ccrcttcctacaacrattccraaaccaaattaaaacctaaaaactaaacc

SEQ ID NO: 13663 - DNA, 50 bp, synthetic construct
  source 1..50: mol_type = other DNA
tacactaaaatcttatccaccctacaatctataactaaaaaaataaatac

SEQ ID NO: 13664 - DNA, 50 bp, synthetic construct
  source 1..50: mol_type = other DNA
acaaaactttccctttactaaatcactaaataaacraattaaaaataacc

SEQ ID NO: 13665 - DNA, 50 bp, synthetic construct
  source 1..50: mol_type = other DNA
aaactttccctttactaaatcactaaataaacraattaaaaataaccrac

SEQ ID NO: 13666 - DNA, 50 bp, synthetic construct
  source 1..50: mol_type = other DNA
aactacccaaaaataaactcaaatttaaaataaaacaacaactaaataac

SEQ ID NO: 13667 - DNA, 50 bp, synthetic construct
  source 1..50: mol_type = other DNA
ataataaaatctacctatcttaatttccaaaaaacccccctctctcctcc

SEQ ID NO: 13668 - DNA, 50 bp, synthetic construct
  source 1..50: mol_type = other DNA
cttacaaccctatcctttctttttaccaaattcccaattatatcctaaac

SEQ ID NO: 13669 - DNA, 50 bp, synthetic construct
  source 1..50: mol_type = other DNA
aaaaattacataaaaccaaaacaaaataaaccctaaaacctaaacccacc

SEQ ID NO: 13670 - DNA, 50 bp, synthetic construct
  source 1..50: mol_type = other DNA
ccataaactcatctaaaaaaaacrataataaaccctacaccttctatctc

SEQ ID NO: 13671 - DNA, 50 bp, synthetic construct
  source 1..50: mol_type = other DNA
attacttctctccctcttaactaatcctctactatccttactaaaaaaac

SEQ ID NO: 13672 - DNA, 50 bp, synthetic construct
  source 1..50: mol_type = other DNA
aaaccttaaaccttcctctctccaaatatttccaaacttccttaaaacac

SEQ ID NO: 13673 - DNA, 50 bp, synthetic construct
  source 1..50: mol_type = other DNA
tatcctaaaaaacccaatataaaaactaccttaactcaaacatattttcc

SEQ ID NO: 13674 - DNA, 50 bp, synthetic construct
  source 1..50: mol_type = other DNA
atcctacaactcaaataaaatttccractattacaactaaccaacaatcc

SEQ ID NO: 13675 - DNA, 50 bp, synthetic construct
  source 1..50: mol_type = other DNA
ccraatctctaaaaatcccttaactatataattcaaatacctaaaaatac

SEQ ID NO: 13676 - DNA, 50 bp, synthetic construct
  source 1..50: mol_type = other DNA
ccrcattctcaaatacctaaatcacacaaccaaaaaacttccaaaaattc

SEQ ID NO: 13677 - DNA, 50 bp, synthetic construct
  source 1..50: mol_type = other DNA
accaatttccaactattctatccccttccattctctcaataaataaaatc

SEQ ID NO: 13678 - DNA, 50 bp, synthetic construct
  source 1..50: mol_type = other DNA
acccaaaaatttaaaattacaataaactataatcataccactataccccc

SEQ ID NO: 13679 - DNA, 50 bp, synthetic construct
  source 1..50: mol_type = other DNA
ttacaataaactataatcataccactatacccccrtctaaataacaaaac

SEQ ID NO: 13680 - DNA, 50 bp, synthetic construct
  source 1..50: mol_type = other DNA
ctaatttccraactcaataaaaactcccaatctaaaaaaactcaatttcc

SEQ ID NO: 13681 - DNA, 50 bp, synthetic construct
  source 1..50: mol_type = other DNA
taattttctcctacctaacaccccaaaactaaaaataaaacctaatttcc

SEQ ID NO: 13682 - DNA, 50 bp, synthetic construct
  source 1..50: mol_type = other DNA
aaaacraaaaaatatacrtcaacatcaatcaccccratataataaacttc

SEQ ID NO: 13683 - DNA, 50 bp, synthetic construct
  source 1..50: mol_type = other DNA
taaaattcctaacctccaaaccaatccctaatccctaacctaatattatc

SEQ ID NO: 13684 - DNA, 50 bp, synthetic construct
  source 1..50: mol_type = other DNA
caaaactctctctatacaaatacaaaaaacactttacttaccatcattcc

SEQ ID NO: 13685 - DNA, 50 bp, synthetic construct
  source 1..50: mol_type = other DNA
tcctcctccttcraactaaattctatactatcaactttctctctataacc

SEQ ID NO: 13686 - DNA, 50 bp, synthetic construct
  source 1..50: mol_type = other DNA
cctccatcccacatcctctaattaaatatccctaaaataacaaccacttc

SEQ ID NO: 13687 - DNA, 50 bp, synthetic construct
  source 1..50: mol_type = other DNA
aaataactaccaccccaaaaatatctaactaaaaaatataaaataaaaac

SEQ ID NO: 13688 - DNA, 50 bp, synthetic construct
  source 1..50: mol_type = other DNA
aacatatcataaaccctcaataatatttaaaacttaaataaaccraaacc

SEQ ID NO: 13689 - DNA, 50 bp, synthetic construct
  source 1..50: mol_type = other DNA
aacaaaaataaactaaaaataactcrttcatcaaaatataaacaaccatc

SEQ ID NO: 13690 - DNA, 50 bp, synthetic construct
  source 1..50: mol_type = other DNA
atctttattcaaataatttacatacattatacaaataaataaaactaccc

SEQ ID NO: 13691 - DNA, 50 bp, synthetic construct
  source 1..50: mol_type = other DNA
tcctttttttttttaccattcctatttccatatattttccacctactttc

SEQ ID NO: 13692 - DNA, 50 bp, synthetic construct
  source 1..50: mol_type = other DNA
ttttccacctactttcrtattcattattttctattaattttaatctattc

SEQ ID NO: 13693 - DNA, 50 bp, synthetic construct
  source 1..50: mol_type = other DNA
ttttcccttcatatatttatcttcacaaattaacctcctcaaacacctac

SEQ ID NO: 13694 - DNA, 50 bp, synthetic construct
  source 1..50: mol_type = other DNA
aatttccctactttcttccccactatttctcatctctttacactattccc

SEQ ID NO: 13695 - DNA, 50 bp, synthetic construct
  source 1..50: mol_type = other DNA
acaaaccraacracaaatctctcaatccattccaaaataaccaaacattc

SEQ ID NO: 13696 - DNA, 50 bp, synthetic construct
  source 1..50: mol_type = other DNA
tcrttttcctatcctcattaaaaatatccatcaccaatatttctttactc

SEQ ID NO: 13697 - DNA, 50 bp, synthetic construct
  source 1..50: mol_type = other DNA
ccctataaccataaaccaaaaaacaaaaaaccaaaaccaaaaccatcttc

SEQ ID NO: 13698 - DNA, 50 bp, synthetic construct
  source 1..50: mol_type = other DNA
caaaaaataattccctacaaataataatctcttctctctccaccaaaatc

SEQ ID NO: 13699 - DNA, 50 bp, synthetic construct
  source 1..50: mol_type = other DNA
cccaaataaaacacctcactaattctaaaaaacacctttaacttttcctc

SEQ ID NO: 13700 - DNA, 50 bp, synthetic construct
  source 1..50: mol_type = other DNA
aaacaccrtaaaaaaacaataaacrcraacaatcaactaacaaatctatc

SEQ ID NO: 13701 - DNA, 50 bp, synthetic construct
  source 1..50: mol_type = other DNA
atccacccrtctaaattctaaataaaacraatcaaacctcattaatttcc

SEQ ID NO: 13702 - DNA, 50 bp, synthetic construct
  source 1..50: mol_type = other DNA
aacattaatcataataactataactaacattcatatattacatactatac

SEQ ID NO: 13703 - DNA, 50 bp, synthetic construct
  source 1..50: mol_type = other DNA
aaaaacaaaacacaataaaacataaatctaaactaaaatttccccttacc

SEQ ID NO: 13704 - DNA, 50 bp, synthetic construct
  source 1..50: mol_type = other DNA
ctctttctttctctaacaaattcaatctaaaatctctaaaaatcaaaaac

SEQ ID NO: 13705 - DNA, 50 bp, synthetic construct
  source 1..50: mol_type = other DNA
aatccrctaaatccttattacctattaaacccctaatacraatcaatccc

SEQ ID NO: 13706 - DNA, 50 bp, synthetic construct
  source 1..50: mol_type = other DNA
ctaacraaactaattcrcactaaaaacccaacaaacaataaaaacccaac

SEQ ID NO: 13707 - DNA, 50 bp, synthetic construct
  source 1..50: mol_type = other DNA
tcaatttatatctttttcttttttttaaaactaaatctcactctatcacc

SEQ ID NO: 13708 - DNA, 50 bp, synthetic construct
  source 1..50: mol_type = other DNA
tttatccaatatataaaaaaaactattatatccatccttactttctatac

SEQ ID NO: 13709 - DNA, 50 bp, synthetic construct
  source 1..50: mol_type = other DNA
ataaatacaacaaccttttccatacactaaataaacatactaaacataac

SEQ ID NO: 13710 - DNA, 50 bp, synthetic construct
  source 1..50: mol_type = other DNA
aacaacaaatctatccaatcttctaactatatctcaaattcattaacccc

SEQ ID NO: 13711 - DNA, 50 bp, synthetic construct
  source 1..50: mol_type = other DNA
attactaactaactatcatctctctccctaaccaacctcaatttataacc

SEQ ID NO: 13712 - DNA, 50 bp, synthetic construct
  source 1..50: mol_type = other DNA
aaataacaaaaacaaaacccttacccaacataaaaatcctcactattcac

SEQ ID NO: 13713 - DNA, 50 bp, synthetic construct
  source 1..50: mol_type = other DNA
rcaaaataaaactaataccataaatataataatccaatttaccatccacc

SEQ ID NO: 13714 - DNA, 50 bp, synthetic construct
  source 1..50: mol_type = other DNA
actaaattttataaaataaactacrtctccacrcccctaaaaaataaaac

SEQ ID NO: 13715 - DNA, 50 bp, synthetic construct
  source 1..50: mol_type = other DNA
caacataccacacaataacaataatcacaaaaaataacaaacccraaaac

SEQ ID NO: 13716 - DNA, 50 bp, synthetic construct
  source 1..50: mol_type = other DNA
aacaatcaacataccacacaataacaataatcacaaaaaataacaaaccc

SEQ ID NO: 13717 - DNA, 50 bp, synthetic construct
  source 1..50: mol_type = other DNA
atcctaactctacccatctattataaaaattcatacaaatcccaccattc

SEQ ID NO: 13718 - DNA, 50 bp, synthetic construct
  source 1..50: mol_type = other DNA
aataaacaaaaccaaaactaaaacccaactccctaaactcctaacttaac

SEQ ID NO: 13719 - DNA, 50 bp, synthetic construct
  source 1..50: mol_type = other DNA
ttaaacccaaacaacctaacctcaaaatctcctacctccataaaacaacc

SEQ ID NO: 13720 - DNA, 50 bp, synthetic construct
  source 1..50: mol_type = other DNA
ccaatttcatctcctataaaataaactaatataaacaatacctatctcac

SEQ ID NO: 13721 - DNA, 50 bp, synthetic construct
  source 1..50: mol_type = other DNA
ttcatctatttctctatcacaaaatttcactacatcacaaaatctttaac

SEQ ID NO: 13722 - DNA, 50 bp, synthetic construct
  source 1..50: mol_type = other DNA
actactaacctataataacaataaaattaacaccatatttataaaccrac

SEQ ID NO: 13723 - DNA, 50 bp, synthetic construct
  source 1..50: mol_type = other DNA
ctaacccttacatcttaaccattacrtcttccrtactcaatataataaac

SEQ ID NO: 13724 - DNA, 50 bp, synthetic construct
  source 1..50: mol_type = other DNA
crcaataaccaaaatacaaaaatcaaaaaaccacatcacaaaaataaaac

SEQ ID NO: 13725 - DNA, 50 bp, synthetic construct
  source 1..50: mol_type = other DNA
aaaactttaaaaaatatacraacaaaaaaacctcacctcttccaccaatc

SEQ ID NO: 13726 - DNA, 50 bp, synthetic construct
  source 1..50: mol_type = other DNA
tactacaaacttcaatattctaatccatctcttattactcctctcccttc

SEQ ID NO: 13727 - DNA, 50 bp, synthetic construct
  source 1..50: mol_type = other DNA
tctttaactacaaaaacaactattctttctaacacaattcctataataac

SEQ ID NO: 13728 - DNA, 50 bp, synthetic construct
  source 1..50: mol_type = other DNA
acactcccctttaatatataacactactttctctaaaaacaacctaaacc

SEQ ID NO: 13729 - DNA, 50 bp, synthetic construct
  source 1..50: mol_type = other DNA
aacctacccataataaatacaaacctatacrcacaaaaatacttaactcc

SEQ ID NO: 13730 - DNA, 50 bp, synthetic construct
  source 1..50: mol_type = other DNA
ctatattctctttaacaacccaattacccaacccaaaaactaaaaatcac

SEQ ID NO: 13731 - DNA, 50 bp, synthetic construct
  source 1..50: mol_type = other DNA
aaaataaccctccttaaccaccccttacatatactttaataccctaaaac

SEQ ID NO: 13732 - DNA, 50 bp, synthetic construct
  source 1..50: mol_type = other DNA
acctatatttcaatttataaaaaatttacatatactataaactccccaac

SEQ ID NO: 13733 - DNA, 50 bp, synthetic construct
  source 1..50: mol_type = other DNA
atccttaaaatcacaatttaaataccacctttaaaatttcctaaaactcc

SEQ ID NO: 13734 - DNA, 50 bp, synthetic construct
  source 1..50: mol_type = other DNA
aatttttcrtaaacctctccaaataaaccaatcaccraaaaactaaaatc

SEQ ID NO: 13735 - DNA, 50 bp, synthetic construct
  source 1..50: mol_type = other DNA
tacaacaaaaataaaaactacccccctaaacacaacttctacactatctc

SEQ ID NO: 13736 - DNA, 50 bp, synthetic construct
  source 1..50: mol_type = other DNA
aatccaaaatatctttaaataaaaaatctaatcaaaaaaccctaaacctc

SEQ ID NO: 13737 - DNA, 50 bp, synthetic construct
  source 1..50: mol_type = other DNA
tccaaaatatctttaaataaaaaatctaatcaaaaaaccctaaacctcrc

SEQ ID NO: 13738 - DNA, 50 bp, synthetic construct
  source 1..50: mol_type = other DNA
taatatcaatattaactttaactaactaacataactacccacaaaatatc

SEQ ID NO: 13739 - DNA, 50 bp, synthetic construct
  source 1..50: mol_type = other DNA
craactaccrtaactaaaaaatctaaacrctaattaacctatttaccttc

SEQ ID NO: 13740 - DNA, 50 bp, synthetic construct
  source 1..50: mol_type = other DNA
aatctctaaactaaatccraacctctccaatcaacaacrattaaaaaaac

SEQ ID NO: 13741 - DNA, 50 bp, synthetic construct
  source 1..50: mol_type = other DNA
aaaaaattcataattccatccccacctctctaaaaaaacttaaaactctc

SEQ ID NO: 13742 - DNA, 50 bp, synthetic construct
  source 1..50: mol_type = other DNA
ttttttctaaacaaaatcttactctattacccaaactcaaatacaataac

SEQ ID NO: 13743 - DNA, 50 bp, synthetic construct
  source 1..50: mol_type = other DNA
crtctatactaaaaacacacacaaaaaactaactaaatataataacacac

SEQ ID NO: 13744 - DNA, 50 bp, synthetic construct
  source 1..50: mol_type = other DNA
aaaaaatacacaaaacaaacctaattaaaactcaaaaactaaccaaacac

SEQ ID NO: 13745 - DNA, 50 bp, synthetic construct
  source 1..50: mol_type = other DNA
taaaaaaaacatatatacaactttattcacaaaccaactataatcaatac

SEQ ID NO: 13746 - DNA, 50 bp, synthetic construct
  source 1..50: mol_type = other DNA
aaaacatatatacaactttattcacaaaccaactataatcaatacrttac

SEQ ID NO: 13747 - DNA, 50 bp, synthetic construct
  source 1..50: mol_type = other DNA
attcatcaataaaaaccaacractatacaataacattattcactactttc

SEQ ID NO: 13748 - DNA, 50 bp, synthetic construct
  source 1..50: mol_type = other DNA
ccttatacccaacaaataacraaaacaataaacaataccactacacaatc

SEQ ID NO: 13749 - DNA, 50 bp, synthetic construct
  source 1..50: mol_type = other DNA
cccaacracaacaacaaaactatataaaaaacctacaccaaaaacacccc

SEQ ID NO: 13750 - DNA, 50 bp, synthetic construct
  source 1..50: mol_type = other DNA
tctaacraaatacccttaatacaaactccctacacaatcctactactacc

SEQ ID NO: 13751 - DNA, 50 bp, synthetic construct
  source 1..50: mol_type = other DNA
taaatctaccctttatatttccattcaacttaaaaacccacaatattccc

SEQ ID NO: 13752 - DNA, 50 bp, synthetic construct
  source 1..50: mol_type = other DNA
acctacatcctacrtaactaaaaaaaacaatcacaaaaactaactctcac

SEQ ID NO: 13753 - DNA, 50 bp, synthetic construct
  source 1..50: mol_type = other DNA
accctactataacrtaaaaatcaacctctataattacctttcccaactac

SEQ ID NO: 13754 - DNA, 50 bp, synthetic construct
  source 1..50: mol_type = other DNA
aaattaacraaaatcctaaaatcaaaatcctaaaaacccraaaaactaac

SEQ ID NO: 13755 - DNA, 50 bp, synthetic construct
  source 1..50: mol_type = other DNA
aaaaacaaaaactacaatactaaactaaaaaacaaccctatacaaacrcc

SEQ ID NO: 13756 - DNA, 50 bp, synthetic construct
  source 1..50: mol_type = other DNA
caaaaactacaatactaaactaaaaaacaaccctatacaaacrccrcccc

SEQ ID NO: 13757 - DNA, 50 bp, synthetic construct
  source 1..50: mol_type = other DNA
tatatatccctaataatccrataaaaccctcaaattatctaaataacaac

SEQ ID NO: 13758 - DNA, 50 bp, synthetic construct
  source 1..50: mol_type = other DNA
ctaaaaaactatactctcctacttaaataaaaacactaaataaaaaacac

SEQ ID NO: 13759 - DNA, 50 bp, synthetic construct
  source 1..50: mol_type = other DNA
aatataaaaacctacatacctaaaactaaacttaaaatccacatataatc

SEQ ID NO: 13760 - DNA, 50 bp, synthetic construct
  source 1..50: mol_type = other DNA
aaaacaacttaacaacttccrtttatacttaatataaatatacccctacc

SEQ ID NO: 13761 - DNA, 50 bp, synthetic construct
  source 1..50: mol_type = other DNA
ttaaatacccctactctatatacttactaaaacatatataaaaaaatttc

SEQ ID NO: 13762 - DNA, 50 bp, synthetic construct
  source 1..50: mol_type = other DNA
cttaaaccacaaataaaatacactaacactaactaaaaacaataactcac

SEQ ID NO: 13763 - DNA, 50 bp, synthetic construct
  source 1..50: mol_type = other DNA
aaaaaaaatcatttatttcctattccaaatcctaaacccacctacccrcc

SEQ ID NO: 13764 - DNA, 50 bp, synthetic construct
  source 1..50: mol_type = other DNA
actaaaaaaaatcatttatttcctattccaaatcctaaacccacctaccc

SEQ ID NO: 13765 - DNA, 50 bp, synthetic construct
  source 1..50: mol_type = other DNA
tatactaaaaaccctaaacaaaaccctaaaccccttaaaaaaataacttc

SEQ ID NO: 13766 - DNA, 50 bp, synthetic construct
  source 1..50: mol_type = other DNA
craacaaaaacrataaacractctccaaataaccctaattccctaaaatc

SEQ ID NO: 13767 - DNA, 50 bp, synthetic construct
  source 1..50: mol_type = other DNA
actaaaactatatactcattaaataactcccrttttcccctccctttatc

SEQ ID NO: 13768 - DNA, 50 bp, synthetic construct
  source 1..50: mol_type = other DNA
aaaaaacraaaccatcctaactaccatcctaactaacacrataaaacctc

SEQ ID NO: 13769 - DNA, 50 bp, synthetic construct
  source 1..50: mol_type = other DNA
aaaaaatactaaaaaattccctaattaatttaaacctaaaatatataaac

SEQ ID NO: 13770 - DNA, 50 bp, synthetic construct
  source 1..50: mol_type = other DNA
ttaatattaaaaaaacccccacctactcrctaaaactacrtaatctaaac

SEQ ID NO: 13771 - DNA, 50 bp, synthetic construct
  source 1..50: mol_type = other DNA
tccaaactaacccataaaatcaaaaacaatatctccattataacrtaacc

SEQ ID NO: 13772 - DNA, 50 bp, synthetic construct
  source 1..50: mol_type = other DNA
aattataaaaacttactaaacctacrcaattataaacaaaaaactaatac

SEQ ID NO: 13773 - DNA, 50 bp, synthetic construct
  source 1..50: mol_type = other DNA
atcccctccaataaatcccaaaaaactctaaaaaattctaaacaaaaaac

SEQ ID NO: 13774 - DNA, 50 bp, synthetic construct
  source 1..50: mol_type = other DNA
atcacraaatcaaaaaatccaaaaccatcctaactaacacaataaaaccc

SEQ ID NO: 13775 - DNA, 50 bp, synthetic construct
  source 1..50: mol_type = other DNA
aaaacraatttcattatattaaccaaaataatcttaaatctcctaacctc

SEQ ID NO: 13776 - DNA, 50 bp, synthetic construct
  source 1..50: mol_type = other DNA
atttcattatattaaccaaaataatcttaaatctcctaacctcrtaatcc

SEQ ID NO: 13777 - DNA, 50 bp, synthetic construct
  source 1..50: mol_type = other DNA
cattatattaaccaaaataatcttaaatctcctaacctcrtaatccrccc

SEQ ID NO: 13778 - DNA, 50 bp, synthetic construct
  source 1..50: mol_type = other DNA
acrattctcctaccttatcctaccaaataactaaaattatataccaccac

SEQ ID NO: 13779 - DNA, 50 bp, synthetic construct
  source 1..50: mol_type = other DNA
actttcaaaaactaaaactaacraatcacctaaattcraaaaaccaaccc

SEQ ID NO: 13780 - DNA, 50 bp, synthetic construct
  source 1..50: mol_type = other DNA
tcacaacactttcactttcaaaaactaaaactaacraatcacctaaattc

SEQ ID NO: 13781 - DNA, 50 bp, synthetic construct
  source 1..50: mol_type = other DNA
acatttataaacataaaaaacttcaaaacctaacataataactcataccc

SEQ ID NO: 13782 - DNA, 50 bp, synthetic construct
  source 1..50: mol_type = other DNA
ataaacataaaaaacttcaaaacctaacataataactcatacccrtaatc

SEQ ID NO: 13783 - DNA, 50 bp, synthetic construct
  source 1..50: mol_type = other DNA
aaacttcaaaacctaacataataactcatacccrtaatcrcaactaaaac

SEQ ID NO: 13784 - DNA, 50 bp, synthetic construct
  source 1..50: mol_type = other DNA
ttctcaaccttaaaccaaaaaactaccaaaaacaacaacaaaaaaatcrc

SEQ ID NO: 13785 - DNA, 50 bp, synthetic construct
  source 1..50: mol_type = other DNA
taaaaatattttattaactcaataaatctataactcattctctccacrac

SEQ ID NO: 13786 - DNA, 50 bp, synthetic construct
  source 1..50: mol_type = other DNA
atctcctcctaaacractaacatacattttttccrctaattcttatcatc

SEQ ID NO: 13787 - DNA, 50 bp, synthetic construct
  source 1..50: mol_type = other DNA
atcaaaaacaaaaatctctaactctccraaaccaaaactccaaaaccctc

SEQ ID NO: 13788 - DNA, 50 bp, synthetic construct
  source 1..50: mol_type = other DNA
taaaaaattcaaaacatcccccaaatactacctcaaccaaaactacatac

SEQ ID NO: 13789 - DNA, 50 bp, synthetic construct
  source 1..50: mol_type = other DNA
taaaaatatttttactttaaaaactactctttcaaatataacatttctcc

SEQ ID NO: 13790 - DNA, 50 bp, synthetic construct
  source 1..50: mol_type = other DNA
ctctccttctttcctacaaaaaataaaacrtatccraactataaccaaac

SEQ ID NO: 13791 - DNA, 50 bp, synthetic construct
  source 1..50: mol_type = other DNA
ccctaaaaacctaataatccrctacattcaacrcctaactaaaatatatc

SEQ ID NO: 13792 - DNA, 50 bp, synthetic construct
  source 1..50: mol_type = other DNA
ataaaacattcactaaatataaaaactaaccrcaaatacratatcccrcc

SEQ ID NO: 13793 - DNA, 50 bp, synthetic construct
  source 1..50: mol_type = other DNA
aacaaaaaataacttcccaaacractacrtaacacaaaacaaaaaaccac

SEQ ID NO: 13794 - DNA, 50 bp, synthetic construct
  source 1..50: mol_type = other DNA
acctacacacatatactactcaaatttatatcccatatacataaactccc

SEQ ID NO: 13795 - DNA, 50 bp, synthetic construct
  source 1..50: mol_type = other DNA
aaaaccataataacrtaacraaaacacctaacaaaactactaacracacc

SEQ ID NO: 13796 - DNA, 50 bp, synthetic construct
  source 1..50: mol_type = other DNA
tattccaaaaaccaacacaacaaataatccaacctttcctaaacctcctc

SEQ ID NO: 13797 - DNA, 50 bp, synthetic construct
  source 1..50: mol_type = other DNA
aaaaaaatataaacttcacraaaaaaattaacaccaacrtaaccaccrac

SEQ ID NO: 13798 - DNA, 50 bp, synthetic construct
  source 1..50: mol_type = other DNA
taatctaccatctctactttaccctcrtaaaacaaaaaatacaacaaaac

SEQ ID NO: 13799 - DNA, 50 bp, synthetic construct
  source 1..50: mol_type = other DNA
ctaaaccacraaaaaatcaaaaaaaccctaaactaccrtccaaaacaaac

SEQ ID NO: 13800 - DNA, 50 bp, synthetic construct
  source 1..50: mol_type = other DNA
aaaaacaaaaaaaccacraaacttcctaaactactataactctataaacc

SEQ ID NO: 13801 - DNA, 50 bp, synthetic construct
  source 1..50: mol_type = other DNA
cccrcaaatacaaattcctactctttaaactccaaaataaaaaacrccac

SEQ ID NO: 13802 - DNA, 50 bp, synthetic construct
  source 1..50: mol_type = other DNA
acaaacctctcctcctctttaaaaactttaacccataaataaactccctc

SEQ ID NO: 13803 - DNA, 50 bp, synthetic construct
  source 1..50: mol_type = other DNA
aactctcatacaaaccaaaaataaccttaccattactaaattctataaac

SEQ ID NO: 13804 - DNA, 50 bp, synthetic construct
  source 1..50: mol_type = other DNA
taaacctccacrtaataaataataccraacctaaaatcraacaaactaac

SEQ ID NO: 13805 - DNA, 50 bp, synthetic construct
  source 1..50: mol_type = other DNA
caccttcaaatttctattccataatcatatcctttaatatatatatacac

SEQ ID NO: 13806 - DNA, 50 bp, synthetic construct
  source 1..50: mol_type = other DNA
aaccattcttcctaaataataaaaccaaaacataaaacataaacacacrc

SEQ ID NO: 13807 - DNA, 50 bp, synthetic construct
  source 1..50: mol_type = other DNA
ttaaccattcttcctaaataataaaaccaaaacataaaacataaacacac

SEQ ID NO: 13808 - DNA, 50 bp, synthetic construct
  source 1..50: mol_type = other DNA
ttaaaataattcccctttttcttatctccttctttataccttaaaacaac

SEQ ID NO: 13809 - DNA, 50 bp, synthetic construct
  source 1..50: mol_type = other DNA
ctcataactcataacacacaaatcatttaaatcatttctttatcacccac

SEQ ID NO: 13810 - DNA, 50 bp, synthetic construct
  source 1..50: mol_type = other DNA
tctaaaatttaactaactaaatctaaacttacttccaactcaaacrtttc

SEQ ID NO: 13811 - DNA, 50 bp, synthetic construct
  source 1..50: mol_type = other DNA
caattatattaactaataacrtctccatataaatacttaatcccttccac

SEQ ID NO: 13812 - DNA, 50 bp, synthetic construct
  source 1..50: mol_type = other DNA
attccccctctacaataaaaaattcaacacctaatcactctacttccacc

SEQ ID NO: 13813 - DNA, 50 bp, synthetic construct
  source 1..50: mol_type = other DNA
aaaaacaaaaatataaaaaccttactaccccaaaactcratccttttacc

SEQ ID NO: 13814 - DNA, 50 bp, synthetic construct
  source 1..50: mol_type = other DNA
ttttttttttaaacaaaaacacaaccaaataattattattcttcccttac

SEQ ID NO: 13815 - DNA, 50 bp, synthetic construct
  source 1..50: mol_type = other DNA
tcccctaccaaacctcattaatatattccaacaaataacraaaactatac

SEQ ID NO: 13816 - DNA, 50 bp, synthetic construct
  source 1..50: mol_type = other DNA
tacatcaataaaatctaacaaaaaacacctaaatacaaaacrttaaaaac

SEQ ID NO: 13817 - DNA, 50 bp, synthetic construct
  source 1..50: mol_type = other DNA
caactccctaaaaaactaaacaaacccaaaaaaataactttcaattcccc

SEQ ID NO: 13818 - DNA, 50 bp, synthetic construct
  source 1..50: mol_type = other DNA
aacattcaaaccaataataattaaaaaaccttaaaacctacccaacratc

SEQ ID NO: 13819 - DNA, 50 bp, synthetic construct
  source 1..50: mol_type = other DNA
caaatcattactaatctccctaaaaattaaaaaactacaacaaaaacccc

SEQ ID NO: 13820 - DNA, 50 bp, synthetic construct
  source 1..50: mol_type = other DNA
aaattaaaaaactacaacaaaaaccccrcttaccaatttccattccaacc

SEQ ID NO: 13821 - DNA, 50 bp, synthetic construct
  source 1..50: mol_type = other DNA
aacctcrcaaatactctacttcaactacatctaaataacrctaaactttc

SEQ ID NO: 13822 - DNA, 50 bp, synthetic construct
  source 1..50: mol_type = other DNA
ccacraacctaatacractctactccctcaacaaattcataacataaatc

SEQ ID NO: 13823 - DNA, 50 bp, synthetic construct
  source 1..50: mol_type = other DNA
caccctctaccaaaaacatattatccaaacrcatcaactataaatccacc

SEQ ID NO: 13824 - DNA, 50 bp, synthetic construct
  source 1..50: mol_type = other DNA
aattttctccttaatttcacacaaaacrctaaaaaaaacaaacttcattc

SEQ ID NO: 13825 - DNA, 50 bp, synthetic construct
  source 1..50: mol_type = other DNA
tcacacaaaacrctaaaaaaaacaaacttcattcrataacaatttaaaac

SEQ ID NO: 13826 - DNA, 50 bp, synthetic construct
  source 1..50: mol_type = other DNA
caaaaatctaaacratataaactcaaaccrctaaaatacctaaattcacc

SEQ ID NO: 13827 - DNA, 50 bp, synthetic construct
  source 1..50: mol_type = other DNA
caaatctcaacaaatatatataaaaaaccraaacctttactcctccattc

SEQ ID NO: 13828 - DNA, 50 bp, synthetic construct
  source 1..50: mol_type = other DNA
ctaataactaaaaataatactataaaactattctctatcctcraaaaaac

SEQ ID NO: 13829 - DNA, 50 bp, synthetic construct
  source 1..50: mol_type = other DNA
ccactaaaatctactaacrctactaaaaaaaactaaaccaccaaaaaccc

SEQ ID NO: 13830 - DNA, 50 bp, synthetic construct
  source 1..50: mol_type = other DNA
ctctaataacccaaccccttccaacaacrtcaacaaatcccaataattac

SEQ ID NO: 13831 - DNA, 50 bp, synthetic construct
  source 1..50: mol_type = other DNA
caacaaaattaaataaaacaaaaaacttcccacaaaacaatcaaacrcac

SEQ ID NO: 13832 - DNA, 50 bp, synthetic construct
  source 1..50: mol_type = other DNA
taatccaccaatcrcaaaaatccataaaaaaaacataatttcctaaaatc

SEQ ID NO: 13833 - DNA, 50 bp, synthetic construct
  source 1..50: mol_type = other DNA
caactaaaatatccaaatacttacattaaaactcatcaaaaaaacaactc

SEQ ID NO: 13834 - DNA, 50 bp, synthetic construct
  source 1..50: mol_type = other DNA
acaatatcatttaactaaaaaacaacaaaaatatcaattctcttcaaatc

SEQ ID NO: 13835 - DNA, 50 bp, synthetic construct
  source 1..50: mol_type = other DNA
aaattaacatctttattatcttccaattaaataacactacatatctctcc

SEQ ID NO: 13836 - DNA, 50 bp, synthetic construct
  source 1..50: mol_type = other DNA
aaaaaataaaacctatcaacccaaaaacttatatccaaaaataatactcc

SEQ ID NO: 13837 - DNA, 50 bp, synthetic construct
  source 1..50: mol_type = other DNA
aaaaaaatttttaacaaacatatcaacaatacaccrctcactaaactacc

SEQ ID NO: 13838 - DNA, 50 bp, synthetic construct
  source 1..50: mol_type = other DNA
tcctccctaattaactatattcctaaatatttcrtatatatataacaatc

SEQ ID NO: 13839 - DNA, 50 bp, synthetic construct
  source 1..50: mol_type = other DNA
caccacaacaatcaaactaaaaaccaaatcaaaaacrtaatcccattcac

SEQ ID NO: 13840 - DNA, 50 bp, synthetic construct
  source 1..50: mol_type = other DNA
ctcactactcctatccaacataatattaaaaatcttaaccaaaacaacac

SEQ ID NO: 13841 - DNA, 50 bp, synthetic construct
  source 1..50: mol_type = other DNA
ttccccatacaacacttccctttattatattaacctatatcaaacaaaac

SEQ ID NO: 13842 - DNA, 50 bp, synthetic construct
  source 1..50: mol_type = other DNA
ctacraaattataaaaaacttcacaatacaacracraaataaacataacc

SEQ ID NO: 13843 - DNA, 50 bp, synthetic construct
  source 1..50: mol_type = other DNA
ctataaaactctccacaaccccrtaattatatctacaataaatatccacc

SEQ ID NO: 13844 - DNA, 50 bp, synthetic construct
  source 1..50: mol_type = other DNA
crcctactccaaaatatccttctaactattccaatactcaacrtcaaacc

SEQ ID NO: 13845 - DNA, 50 bp, synthetic construct
  source 1..50: mol_type = other DNA
acraatacrattcctaaacaaatacttctataaccaaaaaaaatccrtac

SEQ ID NO: 13846 - DNA, 50 bp, synthetic construct
  source 1..50: mol_type = other DNA
craaacraatacrattcctaaacaaatacttctataaccaaaaaaaatcc

SEQ ID NO: 13847 - DNA, 50 bp, synthetic construct
  source 1..50: mol_type = other DNA
aaaataacactccctcttaaactaccacaaaaaacrtactataaaaacac

SEQ ID NO: 13848 - DNA, 50 bp, synthetic construct
  source 1..50: mol_type = other DNA
tatatccaatccctcataactaaccttaaattataaaaattttactactc

SEQ ID NO: 13849 - DNA, 50 bp, synthetic construct
  source 1..50: mol_type = other DNA
atcttatctctccacataaaatatcttatttctttccataaaactacatc

SEQ ID NO: 13850 - DNA, 50 bp, synthetic construct
  source 1..50: mol_type = other DNA
aaaaaaacattaaattaaaatcttctctaatatatacatatctaccaatc

SEQ ID NO: 13851 - DNA, 50 bp, synthetic construct
  source 1..50: mol_type = other DNA
taaaatcattccatcaattatatactctataaatatttaaaatattaccc

SEQ ID NO: 13852 - DNA, 50 bp, synthetic construct
  source 1..50: mol_type = other DNA
caaaactttcctccctttcctaaatataaaaaaacaaattccaaaaaccc

SEQ ID NO: 13853 - DNA, 50 bp, synthetic construct
  source 1..50: mol_type = other DNA
taaaaattcaacraaataacraaataaatccaaaaattaaacctaacctc

SEQ ID NO: 13854 - DNA, 50 bp, synthetic construct
  source 1..50: mol_type = other DNA
raaataacraaataaatccaaaaattaaacctaacctcrttctaacacrc

SEQ ID NO: 13855 - DNA, 50 bp, synthetic construct
  source 1..50: mol_type = other DNA
tttcttaatccaatttaaaaacatatactacttcaccaacraaacaaaac

SEQ ID NO: 13856 - DNA, 50 bp, synthetic construct
  source 1..50: mol_type = other DNA
aataacacatacccttaaactaaaccaaaaaatcctctacraaaaatcac

SEQ ID NO: 13857 - DNA, 50 bp, synthetic construct
  source 1..50: mol_type = other DNA
aatttcatacraaaacrccctaatctaaaaacaaaaatcaatattaaatc

SEQ ID NO: 13858 - DNA, 50 bp, synthetic construct
  source 1..50: mol_type = other DNA
aaaaaaaaacctaaaaataccctcaatatcctctcaatccccacctcaac

SEQ ID NO: 13859 - DNA, 50 bp, synthetic construct
  source 1..50: mol_type = other DNA
attacccaaattaatttcaatatcctaacctcaaacaatcctcccacctc

SEQ ID NO: 13860 - DNA, 50 bp, synthetic construct
  source 1..50: mol_type = other DNA
ctcaaataaaattttaaccaatcaaaaaataactctaaactaacactttc

SEQ ID NO: 13861 - DNA, 50 bp, synthetic construct
  source 1..50: mol_type = other DNA
aaacctcatctaaaaccaaatacaataactcacccctataattttctaac

SEQ ID NO: 13862 - DNA, 50 bp, synthetic construct
  source 1..50: mol_type = other DNA
tcatctaaaaccaaatacaataactcacccctataattttctaacrcttc

SEQ ID NO: 13863 - DNA, 50 bp, synthetic construct
  source 1..50: mol_type = other DNA
tataataatacatacctataatctcaattactcaataaactaaaacaaac

SEQ ID NO: 13864 - DNA, 50 bp, synthetic construct
  source 1..50: mol_type = other DNA
taatacatacctataatctcaattactcaataaactaaaacaaacraatc

SEQ ID NO: 13865 - DNA, 50 bp, synthetic construct
  source 1..50: mol_type = other DNA
taacccataataacaacaatatctttatcccatcttcccacataaaatac

SEQ ID NO: 13866 - DNA, 50 bp, synthetic construct
  source 1..50: mol_type = other DNA
accttataaaactacttacatatttctcttatatcaacttttaaataacc

SEQ ID NO: 13867 - DNA, 50 bp, synthetic construct
  source 1..50: mol_type = other DNA
accataaaaaaactccataataaaaatcaaataaaaacttaaaaaatacc

SEQ ID NO: 13868 - DNA, 50 bp, synthetic construct
  source 1..50: mol_type = other DNA
aaaaaaaacctataaaaacaaatcaaaaaacaaaactccrttatacacac

SEQ ID NO: 13869 - DNA, 50 bp, synthetic construct
  source 1..50: mol_type = other DNA
tcttcttccaatcaatctcatccatacatcacctcaactaaaccactaac

SEQ ID NO: 13870 - DNA, 50 bp, synthetic construct
  source 1..50: mol_type = other DNA
catcacccaaaactaacctacacatatcactctttacaacatatctattc

SEQ ID NO: 13871 - DNA, 50 bp, synthetic construct
  source 1..50: mol_type = other DNA
ttcatttcccrtttattaaaaatacaaaactccaaccacaaataacctac

SEQ ID NO: 13872 - DNA, 50 bp, synthetic construct
  source 1..50: mol_type = other DNA
caatccataaactcttactcttaaaaattacrtaaacataaacaatcaac

SEQ ID NO: 13873 - DNA, 50 bp, synthetic construct
  source 1..50: mol_type = other DNA
tcttatttaaaatccttattatatatatcaacctcaatcaatacctaaac

SEQ ID NO: 13874 - DNA, 50 bp, synthetic construct
  source 1..50: mol_type = other DNA
cacaaaaatatactaatacccaaacccttttaccacctccaactcacaac

SEQ ID NO: 13875 - DNA, 50 bp, synthetic construct
  source 1..50: mol_type = other DNA
taaaaaatcataaaaataaaatcccaatccttatccctaccctcctaccc

SEQ ID NO: 13876 - DNA, 50 bp, synthetic construct
  source 1..50: mol_type = other DNA
aaaaacaaaaacrtaaaataaataatcacttaaactacrtccctattaac

SEQ ID NO: 13877 - DNA, 50 bp, synthetic construct
  source 1..50: mol_type = other DNA
aataaccrccactaaaaacraataaaactcattacaaacctatacaatac

SEQ ID NO: 13878 - DNA, 50 bp, synthetic construct
  source 1..50: mol_type = other DNA
ctaattcrcactatacaaacctacaataaatctcactcrcctttaataac

SEQ ID NO: 13879 - DNA, 50 bp, synthetic construct
  source 1..50: mol_type = other DNA
taaaaccacatttcttaaataaaaatctaaaccccttctccaaaaaaaac

SEQ ID NO: 13880 - DNA, 50 bp, synthetic construct
  source 1..50: mol_type = other DNA
aaaaatacraactcaacaaccaaaaaaaaccrataaaatacatcttctac

SEQ ID NO: 13881 - DNA, 50 bp, synthetic construct
  source 1..50: mol_type = other DNA
cctaaaataaaccccrtaaaaaaattcaaaaactacrccctctccctaac

SEQ ID NO: 13882 - DNA, 50 bp, synthetic construct
  source 1..50: mol_type = other DNA
aatcccaaccctaaaaacacaaatatctccctaaactaaaaataatcccc

SEQ ID NO: 13883 - DNA, 50 bp, synthetic construct
  source 1..50: mol_type = other DNA
craaacttaccttattccraaaactaatctcataaaaaacccccraatcc

SEQ ID NO: 13884 - DNA, 50 bp, synthetic construct
  source 1..50: mol_type = other DNA
aaccccaaaactaactaactaacttctactctaaactactaccaccactc

SEQ ID NO: 13885 - DNA, 50 bp, synthetic construct
  source 1..50: mol_type = other DNA
aaaaaacaaaattaacttcaaattaaaaactattcctctctaacaaaacc

SEQ ID NO: 13886 - DNA, 50 bp, synthetic construct
  source 1..50: mol_type = other DNA
acttaaaattaaccctattctttaaccctctattcataataaatcratcc

SEQ ID NO: 13887 - DNA, 50 bp, synthetic construct
  source 1..50: mol_type = other DNA
taaaattaaccctattctttaaccctctattcataataaatcratccrtc

SEQ ID NO: 13888 - DNA, 50 bp, synthetic construct
  source 1..50: mol_type = other DNA
ttcactatatctttcttaccaaaccrtaaattactctaaccccaaaaaac

SEQ ID NO: 13889 - DNA, 50 bp, synthetic construct
  source 1..50: mol_type = other DNA
taacaatcaactctaacctattactatataatctttaaaccaatcacttc

SEQ ID NO: 13890 - DNA, 50 bp, synthetic construct
  source 1..50: mol_type = other DNA
cttctttccaaatacatacatcttcacttttactcaccctacaaacactc

SEQ ID NO: 13891 - DNA, 50 bp, synthetic construct
  source 1..50: mol_type = other DNA
caatccccatatatcatcttaaaatctacaataaataaccccatacattc

SEQ ID NO: 13892 - DNA, 50 bp, synthetic construct
  source 1..50: mol_type = other DNA
aatttccrcctatactctcaatttaaaaattcccctacacattcctaccc

SEQ ID NO: 13893 - DNA, 50 bp, synthetic construct
  source 1..50: mol_type = other DNA
aaaaaaaataacaactcraacttttcctctaacrtaatttctcttctctc

SEQ ID NO: 13894 - DNA, 50 bp, synthetic construct
  source 1..50: mol_type = other DNA
ractaataaataattatccrcaaaccaacctctctaaaacactaaaaaac

SEQ ID NO: 13895 - DNA, 50 bp, synthetic construct
  source 1..50: mol_type = other DNA
crcctcaaacacaaactataattaacctaactaaacrtcaatcaaaactc

SEQ ID NO: 13896 - DNA, 50 bp, synthetic construct
  source 1..50: mol_type = other DNA
caaaaacaaacactacractcaaaaccccaaaaataaatacctattatac

SEQ ID NO: 13897 - DNA, 50 bp, synthetic construct
  source 1..50: mol_type = other DNA
taaaaaacacaatcaccrtctcaaatctcaccctacaactacatccaaac

SEQ ID NO: 13898 - DNA, 50 bp, synthetic construct
  source 1..50: mol_type = other DNA
aaaaaaaatctttaaaaatctatatccctccttcaccaccccrcctaaac

SEQ ID NO: 13899 - DNA, 50 bp, synthetic construct
  source 1..50: mol_type = other DNA
ataaaataaaaaacaacaataacaataattctcatccctaaacctcctcc

SEQ ID NO: 13900 - DNA, 50 bp, synthetic construct
  source 1..50: mol_type = other DNA
aaaatctatattctaaacaaattatcatatttaaacatacaaataatctc

SEQ ID NO: 13901 - DNA, 50 bp, synthetic construct
  source 1..50: mol_type = other DNA
tactcaatatctaaaaatcatctacccaaactaaaacttctaaaacaaac

SEQ ID NO: 13902 - DNA, 50 bp, synthetic construct
  source 1..50: mol_type = other DNA
aaataaattaaattataaattataactcttctctttctctctttctcaac

SEQ ID NO: 13903 - DNA, 50 bp, synthetic construct
  source 1..50: mol_type = other DNA
caaatcttatctttcctatcctcaaaattccttctactctaaaaaccacc

SEQ ID NO: 13904 - DNA, 50 bp, synthetic construct
  source 1..50: mol_type = other DNA
ttactttaatataaactatttaaaatatttattctcactccccaattaac

SEQ ID NO: 13905 - DNA, 50 bp, synthetic construct
  source 1..50: mol_type = other DNA
aacrccaacttcctttctccccaaaacctctaaaaaaaacattactatac

SEQ ID NO: 13906 - DNA, 50 bp, synthetic construct
  source 1..50: mol_type = other DNA
aaaaacaataacacaacaactttacaaaaaccttttcccctccccctaac

SEQ ID NO: 13907 - DNA, 50 bp, synthetic construct
  source 1..50: mol_type = other DNA
aaaaataaaaaaatctcccccacccraaaaaacctaaactttaataaaac

SEQ ID NO: 13908 - DNA, 50 bp, synthetic construct
  source 1..50: mol_type = other DNA
tccctaaaatcracraaccacaactcaaccaattaacttaaaaatataac

SEQ ID NO: 13909 - DNA, 50 bp, synthetic construct
  source 1..50: mol_type = other DNA
ctctaaaacraactaaaaaattctacctaccratacaaaaccttcraatc

SEQ ID NO: 13910 - DNA, 50 bp, synthetic construct
  source 1..50: mol_type = other DNA
cacraaaacaatctctttaaaacctctcraaaaactccraacaacttaac

SEQ ID NO: 13911 - DNA, 50 bp, synthetic construct
  source 1..50: mol_type = other DNA
tacaaaacrctaaaaatatccrtaaatcccccctaaaaaactaacaaacc

SEQ ID NO: 13912 - DNA, 50 bp, synthetic construct
  source 1..50: mol_type = other DNA
aaaaaaaattcacraacacctctaacrccctataaaattaccataataac

SEQ ID NO: 13913 - DNA, 50 bp, synthetic construct
  source 1..50: mol_type = other DNA
cctaccacctaaaaattaaaacatcatataaaaatctcattatttacatc

SEQ ID NO: 13914 - DNA, 50 bp, synthetic construct
  source 1..50: mol_type = other DNA
aaaactaatcraaaaaacaccaaaaaaactataaataaaccactattaac

SEQ ID NO: 13915 - DNA, 50 bp, synthetic construct
  source 1..50: mol_type = other DNA
aaaaaacaccaaaaaaactataaataaaccactattaacrtttaatatcc

SEQ ID NO: 13916 - DNA, 50 bp, synthetic construct
  source 1..50: mol_type = other DNA
attattcrcaccaaatcaaaatctcctcactccaaaaaaatcaaaaaacc

SEQ ID NO: 13917 - DNA, 50 bp, synthetic construct
  source 1..50: mol_type = other DNA
aaattaatataattcttcctctaaatttctaatctatattctattataac

SEQ ID NO: 13918 - DNA, 50 bp, synthetic construct
  source 1..50: mol_type = other DNA
aaacttcctcctcactaaaaatttaataattaccataataattaaacrcc

SEQ ID NO: 13919 - DNA, 50 bp, synthetic construct
  source 1..50: mol_type = other DNA
acccattttacttaaaccccatccccataaaactataattctaaaatatc

SEQ ID NO: 13920 - DNA, 50 bp, synthetic construct
  source 1..50: mol_type = other DNA
caaaataataataaaaactctataaaaacatcaattcrcataaccattcc

SEQ ID NO: 13921 - DNA, 50 bp, synthetic construct
  source 1..50: mol_type = other DNA
ctataaatactatcaaactaaatctaccrataaataaaaacattaaaacc

SEQ ID NO: 13922 - DNA, 50 bp, synthetic construct
  source 1..50: mol_type = other DNA
acaacaaaataaaccatttactttactacattcctaattctaatttccac

SEQ ID NO: 13923 - DNA, 50 bp, synthetic construct
  source 1..50: mol_type = other DNA
ttaccatctcccraacttttaaaaattattactcaaaccccaatttaacc

SEQ ID NO: 13924 - DNA, 50 bp, synthetic construct
  source 1..50: mol_type = other DNA
acaaacaataacaaataattcacaaacctaattttttattaccatctccc

SEQ ID NO: 13925 - DNA, 50 bp, synthetic construct
  source 1..50: mol_type = other DNA
aatttatatctcatcacctattacccaacrcrtatctattaaatacttac

SEQ ID NO: 13926 - DNA, 50 bp, synthetic construct
  source 1..50: mol_type = other DNA
ctccrattttcaaaactttaatttatatctcatcacctattacccaacrc

SEQ ID NO: 13927 - DNA, 50 bp, synthetic construct
  source 1..50: mol_type = other DNA
tactccrattttcaaaactttaatttatatctcatcacctattacccaac

SEQ ID NO: 13928 - DNA, 50 bp, synthetic construct
  source 1..50: mol_type = other DNA
aaatataatccttaacataaacatacacttaacttaaatctatttactcc

SEQ ID NO: 13929 - DNA, 50 bp, synthetic construct
  source 1..50: mol_type = other DNA
tactactttttccctctcccctcatactaccatttactaccttttattac

SEQ ID NO: 13930 - DNA, 50 bp, synthetic construct
  source 1..50: mol_type = other DNA
aattcccttaattaccttttcaacaaactattaaacctataaacctaaac

SEQ ID NO: 13931 - DNA, 50 bp, synthetic construct
  source 1..50: mol_type = other DNA
tcaatcaatataattaccacaccataataattaataattacaccctattc

SEQ ID NO: 13932 - DNA, 50 bp, synthetic construct
  source 1..50: mol_type = other DNA
cttcatactaatcactcataaaaacaaaaccttccaatcaaaataatccc

SEQ ID NO: 13933 - DNA, 50 bp, synthetic construct
  source 1..50: mol_type = other DNA
taaaaatactcacaaaatcccactaactaatctccaacactaaataaaac

SEQ ID NO: 13934 - DNA, 50 bp, synthetic construct
  source 1..50: mol_type = other DNA
attaatatataatctctaacttcatctcaatatatatactaaacacatcc

SEQ ID NO: 13935 - DNA, 50 bp, synthetic construct
  source 1..50: mol_type = other DNA
ctctaacttcatctcaatatatatactaaacacatccrtctaaatattcc

SEQ ID NO: 13936 - DNA, 50 bp, synthetic construct
  source 1..50: mol_type = other DNA
tataactccaactctccctccaacaaattttaattaaacattcattctac

SEQ ID NO: 13937 - DNA, 50 bp, synthetic construct
  source 1..50: mol_type = other DNA
caattaaattacccaaaacacratttaaaaccactaatctaaataaattc

SEQ ID NO: 13938 - DNA, 50 bp, synthetic construct
  source 1..50: mol_type = other DNA
cactatactactaaaatcacctcccctcaacttccaaaactcttctctac

SEQ ID NO: 13939 - DNA, 50 bp, synthetic construct
  source 1..50: mol_type = other DNA
aataatctcratttaaaaactttctactattctcataacctccttccatc

SEQ ID NO: 13940 - DNA, 50 bp, synthetic construct
  source 1..50: mol_type = other DNA
tcaacttctaatcctaacaaatattaatccaaaaattattcactccactc

SEQ ID NO: 13941 - DNA, 50 bp, synthetic construct
  source 1..50: mol_type = other DNA
aaaacactaaaacctacaccaacctctcctcaaacactaaaatataaaac

SEQ ID NO: 13942 - DNA, 50 bp, synthetic construct
  source 1..50: mol_type = other DNA
aaaaactaatacaaaccccaatactccccctaaaaatcacaaatatcctc

SEQ ID NO: 13943 - DNA, 50 bp, synthetic construct
  source 1..50: mol_type = other DNA
tcctacccaacaaaaaactcaaattacacaaattccactatctaaccctc

SEQ ID NO: 13944 - DNA, 50 bp, synthetic construct
  source 1..50: mol_type = other DNA
accctcrtctaccatattaacaaattcttcccaccaatactaaacatcac

SEQ ID NO: 13945 - DNA, 50 bp, synthetic construct
  source 1..50: mol_type = other DNA
aaccacrtaatattcaacactaataaaaaaaacttatcaacataacaaac

SEQ ID NO: 13946 - DNA, 50 bp, synthetic construct
  source 1..50: mol_type = other DNA
cattatttccatacaaaaaaaccctcraaactcaaaacatctaaccaaac

SEQ ID NO: 13947 - DNA, 50 bp, synthetic construct
  source 1..50: mol_type = other DNA
aaaccttacatactcttaccraaacaacaaaaactacacaataaacaaac

SEQ ID NO: 13948 - DNA, 50 bp, synthetic construct
  source 1..50: mol_type = other DNA
tcttcatataaatacctataactataaccataaaaatcctcttacaaatc

SEQ ID NO: 13949 - DNA, 50 bp, synthetic construct
  source 1..50: mol_type = other DNA
tataaatatccataatcrtaatcrtaaatatatccataccaaatactctc

SEQ ID NO: 13950 - DNA, 50 bp, synthetic construct
  source 1..50: mol_type = other DNA
acrataatctaaacaaaaacraaatcaattaaaaacrcaattctaacccc

SEQ ID NO: 13951 - DNA, 50 bp, synthetic construct
  source 1..50: mol_type = other DNA
taataaaacaaaacraaacracatctcaactctcrccttttcaaaattcc

SEQ ID NO: 13952 - DNA, 50 bp, synthetic construct
  source 1..50: mol_type = other DNA
rtcracaacraaaaatatcctaaataaatctataactaccraacacaccc

SEQ ID NO: 13953 - DNA, 50 bp, synthetic construct
  source 1..50: mol_type = other DNA
tcaacttaaacttatcccaaaaaaacccttaaaacaatatctaaaactac

SEQ ID NO: 13954 - DNA, 50 bp, synthetic construct
  source 1..50: mol_type = other DNA
aacttaaacttatcccaaaaaaacccttaaaacaatatctaaaactacrc

SEQ ID NO: 13955 - DNA, 50 bp, synthetic construct
  source 1..50: mol_type = other DNA
ccatattaacccaactaatcttaaaactcctaacctcaaataattcaccc

SEQ ID NO: 13956 - DNA, 50 bp, synthetic construct
  source 1..50: mol_type = other DNA
tacctacataccaaatacaatcttacacatattcatctaatcctaacrac

SEQ ID NO: 13957 - DNA, 50 bp, synthetic construct
  source 1..50: mol_type = other DNA
aaaaaataataacacaaaaaaactaattaacttacccaaaaacacacaac

SEQ ID NO: 13958 - DNA, 50 bp, synthetic construct
  source 1..50: mol_type = other DNA
acctaactaaatttataaaaatataacttaaataccacaacttccratac

SEQ ID NO: 13959 - DNA, 50 bp, synthetic construct
  source 1..50: mol_type = other DNA
ttctcctaaatcrcaccrcctcttcctcctaaaaactatataataatatc

SEQ ID NO: 13960 - DNA, 50 bp, synthetic construct
  source 1..50: mol_type = other DNA
atactacaaccataataaaactaaaatccrtaccrtaatccaacracatc

SEQ ID NO: 13961 - DNA, 50 bp, synthetic construct
  source 1..50: mol_type = other DNA
rtaacaaaaaccaaaattccccatatacrcccaaaccttaaacaactttc

SEQ ID NO: 13962 - DNA, 50 bp, synthetic construct
  source 1..50: mol_type = other DNA
cacttatataacaaacttaacctttttatataaaattcrtttaccttatc

SEQ ID NO: 13963 - DNA, 50 bp, synthetic construct
  source 1..50: mol_type = other DNA
accraatctaaaaaaaatctcacaaactcrtaattcaaaaaaatcttaac

SEQ ID NO: 13964 - DNA, 50 bp, synthetic construct
  source 1..50: mol_type = other DNA
atatttctctccacaaacctaataaattcttaactttctaaatacataac

SEQ ID NO: 13965 - DNA, 50 bp, synthetic construct
  source 1..50: mol_type = other DNA
caaaactaaacctatcttcttaacttctattacataataaatacttaaac

SEQ ID NO: 13966 - DNA, 50 bp, synthetic construct
  source 1..50: mol_type = other DNA
aactaaacctatcttcttaacttctattacataataaatacttaaacrac

SEQ ID NO: 13967 - DNA, 50 bp, synthetic construct
  source 1..50: mol_type = other DNA
aaaaattaacttaaaccctaaaaatcraaactacaataaaaaataattcc

SEQ ID NO: 13968 - DNA, 50 bp, synthetic construct
  source 1..50: mol_type = other DNA
aaacctactataacaaattcatataaactaaacaaaaaattactcttaac

SEQ ID NO: 13969 - DNA, 50 bp, synthetic construct
  source 1..50: mol_type = other DNA
tctaaaacccaccctaatcaaatataacrtcattttacctaattatttcc

SEQ ID NO: 13970 - DNA, 50 bp, synthetic construct
  source 1..50: mol_type = other DNA
aacccaccctaatcaaatataacrtcattttacctaattatttccrtaac

SEQ ID NO: 13971 - DNA, 50 bp, synthetic construct
  source 1..50: mol_type = other DNA
aataaaaattacaacaaaccaaaatcacrcaaccacactctaacctaaac

SEQ ID NO: 13972 - DNA, 50 bp, synthetic construct
  source 1..50: mol_type = other DNA
ttaaaaacrtatcraaccataaaacaatatttctcaacccaattcaaccc

SEQ ID NO: 13973 - DNA, 50 bp, synthetic construct
  source 1..50: mol_type = other DNA
taaatccaaatcctaaataaaaacaaattaactaacaaaactaatttttc

SEQ ID NO: 13974 - DNA, 50 bp, synthetic construct
  source 1..50: mol_type = other DNA
ataactctctctaataaaataaaatatttcctaaaactactaactccacc

SEQ ID NO: 13975 - DNA, 50 bp, synthetic construct
  source 1..50: mol_type = other DNA
aaacaaaatcaacrcrctaaaatacaaaaacctttactttacraattacc

SEQ ID NO: 13976 - DNA, 50 bp, synthetic construct
  source 1..50: mol_type = other DNA
ctcttataaaaaaaaaccttcccacaataacacaaaaaaatcttattccc

SEQ ID NO: 13977 - DNA, 50 bp, synthetic construct
  source 1..50: mol_type = other DNA
ccaaatataacacattataaacaaatacactaaactactccraaaaaacc

SEQ ID NO: 13978 - DNA, 50 bp, synthetic construct
  source 1..50: mol_type = other DNA
ataaaatattatcattattcttttctctttttcttcccaaaaaccccccc

SEQ ID NO: 13979 - DNA, 50 bp, synthetic construct
  source 1..50: mol_type = other DNA
ttaaaaaaacatcrccacattccaccttaaaaaatcaaatcccctcctcc

SEQ ID NO: 13980 - DNA, 50 bp, synthetic construct
  source 1..50: mol_type = other DNA
tacaaattaacattaactatccccttactcaaaattaacccaatatcccc

SEQ ID NO: 13981 - DNA, 50 bp, synthetic construct
  source 1..50: mol_type = other DNA
cacactccactccctatcctattttcaaaatcaaaaaatttcattctcac

SEQ ID NO: 13982 - DNA, 50 bp, synthetic construct
  source 1..50: mol_type = other DNA
catccactaaataactttttaaaatcraatcrtaaaacacctacracctc

SEQ ID NO: 13983 - DNA, 50 bp, synthetic construct
  source 1..50: mol_type = other DNA
acrctaaaaacaacctcctaaaaatacratttaaatacttttacraaacc

SEQ ID NO: 13984 - DNA, 50 bp, synthetic construct
  source 1..50: mol_type = other DNA
atacttattaaaccacaaacatccactaaataactttttaaaatcraatc

SEQ ID NO: 13985 - DNA, 50 bp, synthetic construct
  source 1..50: mol_type = other DNA
aaaaaaccttacattatttttttacaccatttcaaccaatacattataac

SEQ ID NO: 13986 - DNA, 50 bp, synthetic construct
  source 1..50: mol_type = other DNA
attacctatactaaaatacaattactcaatcttaactcactataacctcc

SEQ ID NO: 13987 - DNA, 50 bp, synthetic construct
  source 1..50: mol_type = other DNA
caatcttaactcactataacctccrtttcctaaactcataccatcctctc

SEQ ID NO: 13988 - DNA, 50 bp, synthetic construct
  source 1..50: mol_type = other DNA
aaaataacaacattaccaaaaaataaacaaaccaaaccactcacatccac

SEQ ID NO: 13989 - DNA, 50 bp, synthetic construct
  source 1..50: mol_type = other DNA
attcatttattacatttattatctatatccccataaaataacaactccac

SEQ ID NO: 13990 - DNA, 50 bp, synthetic construct
  source 1..50: mol_type = other DNA
ctcccctatatcctcaaccttaaatttctccttttctccacaacacttac

SEQ ID NO: 13991 - DNA, 50 bp, synthetic construct
  source 1..50: mol_type = other DNA
tattaaaaacccaatcatcacctaaaaatcaaaaaacrttaaaatatcrc

SEQ ID NO: 13992 - DNA, 50 bp, synthetic construct
  source 1..50: mol_type = other DNA
aaaaaaaaaatcactcaaaaatttacccaaaaaaacccactcccttacac

SEQ ID NO: 13993 - DNA, 50 bp, synthetic construct
  source 1..50: mol_type = other DNA
aataattaaaacccaaaattccttaatcccaactttaacaaattttattc

SEQ ID NO: 13994 - DNA, 50 bp, synthetic construct
  source 1..50: mol_type = other DNA
cactcatacracctacrctaatacaaaaaaattaatctcaaaaaccacac

SEQ ID NO: 13995 - DNA, 50 bp, synthetic construct
  source 1..50: mol_type = other DNA
cataactcctccttcatcaaaaaataaacaaaccrcrccataataaaatc

SEQ ID NO: 13996 - DNA, 50 bp, synthetic construct
  source 1..50: mol_type = other DNA
aataataaataacctaatttattttaaaaatccccttacccccctccccc

SEQ ID NO: 13997 - DNA, 50 bp, synthetic construct
  source 1..50: mol_type = other DNA
acattcaaaaataataaaaactacaacaaaacaataaaactaaaactatc

SEQ ID NO: 13998 - DNA, 50 bp, synthetic construct
  source 1..50: mol_type = other DNA
ctcratatcaaccracaaataaaacatattaaaaacccaaaccactatcc

SEQ ID NO: 13999 - DNA, 50 bp, synthetic construct
  source 1..50: mol_type = other DNA
tttaaatactccttaaacttatactcttcccrctcratataaacactctc

SEQ ID NO: 14000 - DNA, 50 bp, synthetic construct
  source 1..50: mol_type = other DNA
ccractctcatccatcrattttaaatactccttaaacttatactcttccc

SEQ ID NO: 14001 - DNA, 50 bp, synthetic construct
  source 1..50: mol_type = other DNA
aataaataaactaaaacaacccctcraaaacatcracttcaataacactc

SEQ ID NO: 14002 - DNA, 50 bp, synthetic construct
  source 1..50: mol_type = other DNA
tactaaaataacaaactaaaaaatctaatttaacacatcctacaacrtac

SEQ ID NO: 14003 - DNA, 50 bp, synthetic construct
  source 1..50: mol_type = other DNA
tacttactaaaataacaaactaaaaaatctaatttaacacatcctacaac

SEQ ID NO: 14004 - DNA, 50 bp, synthetic construct
  source 1..50: mol_type = other DNA
atcttatttttatatcaaacaaaaaacttaaaatttacctataccaaatc

SEQ ID NO: 14005 - DNA, 50 bp, synthetic construct
  source 1..50: mol_type = other DNA
tatttttatatcaaacaaaaaacttaaaatttacctataccaaatcraac

SEQ ID NO: 14006 - DNA, 50 bp, synthetic construct
  source 1..50: mol_type = other DNA
aatatcccaaatataatcacaatacattacaaccttaaactcctaaaccc

SEQ ID NO: 14007 - DNA, 50 bp, synthetic construct
  source 1..50: mol_type = other DNA
ctcaactacaattatatattacttaataataaaaatacattctcaaaaac

SEQ ID NO: 14008 - DNA, 50 bp, synthetic construct
  source 1..50: mol_type = other DNA
tactccataatattaataaaacaactaatttacttaacactacatttctc

SEQ ID NO: 14009 - DNA, 50 bp, synthetic construct
  source 1..50: mol_type = other DNA
caaaactacaaacctatataacatataactactaaatactaaatataaac

SEQ ID NO: 14010 - DNA, 50 bp, synthetic construct
  source 1..50: mol_type = other DNA
acaaacctatataacatataactactaaatactaaatataaacraaacac

SEQ ID NO: 14011 - DNA, 50 bp, synthetic construct
  source 1..50: mol_type = other DNA
aatataataacacacacctaaaatcccaactactaaaaaaattaaaacac

SEQ ID NO: 14012 - DNA, 50 bp, synthetic construct
  source 1..50: mol_type = other DNA
ctaaaaccactataccttcctctactcataaccaccctaaatcaaaaacc

SEQ ID NO: 14013 - DNA, 50 bp, synthetic construct
  source 1..50: mol_type = other DNA
atcacrctataaaatttatctcaaacccaaatacctaacaaaaaaacccc

SEQ ID NO: 14014 - DNA, 50 bp, synthetic construct
  source 1..50: mol_type = other DNA
aaaactatctaaaaacaccaacatttaaacaccctaatcctataaacatc

SEQ ID NO: 14015 - DNA, 50 bp, synthetic construct
  source 1..50: mol_type = other DNA
attcaccaaaaaactaaaaattcttctaaatattccatacatacttttcc

SEQ ID NO: 14016 - DNA, 50 bp, synthetic construct
  source 1..50: mol_type = other DNA
aacatacataaaatactcaaaaaaatccccaatctcctaataaactaaac

SEQ ID NO: 14017 - DNA, 50 bp, synthetic construct
  source 1..50: mol_type = other DNA
aatatcttaacrtaaacttaaactttcattctaaataacctacaaaatac

SEQ ID NO: 14018 - DNA, 50 bp, synthetic construct
  source 1..50: mol_type = other DNA
aaatttcrtcatattaacctaactaatcttaaacccttaacaactaatcc

SEQ ID NO: 14019 - DNA, 50 bp, synthetic construct
  source 1..50: mol_type = other DNA
aatcaattatcaaaaattcaaaaccaaccaaaccaacataacraaacccc

SEQ ID NO: 14020 - DNA, 50 bp, synthetic construct
  source 1..50: mol_type = other DNA
atacaaaccaaaactttttaaactaccccacccatacctttccrattaac

SEQ ID NO: 14021 - DNA, 50 bp, synthetic construct
  source 1..50: mol_type = other DNA
tccaacctctaaactttaaacaacatacracattaaacracraacaaatc

SEQ ID NO: 14022 - DNA, 50 bp, synthetic construct
  source 1..50: mol_type = other DNA
raaacctttaaaacrcacccactccaacctctaaactttaaacaacatac

SEQ ID NO: 14023 - DNA, 50 bp, synthetic construct
  source 1..50: mol_type = other DNA
rcatactattcaaaacccaaaaactaaaataaatacrccccaaaaacccc

SEQ ID NO: 14024 - DNA, 50 bp, synthetic construct
  source 1..50: mol_type = other DNA
acaatataaaactcrcraacacaaatttaaaaaacccaaaatacraaatc

SEQ ID NO: 14025 - DNA, 50 bp, synthetic construct
  source 1..50: mol_type = other DNA
craaaaacaatataaaactcrcraacacaaatttaaaaaacccaaaatac

SEQ ID NO: 14026 - DNA, 50 bp, synthetic construct
  source 1..50: mol_type = other DNA
aaaataaaaacttaccaccaaaaaactaactcraattttacrtaaaaacc

SEQ ID NO: 14027 - DNA, 50 bp, synthetic construct
  source 1..50: mol_type = other DNA
atcacccaaaaaataaaaacttaccaccaaaaaactaactcraattttac

SEQ ID NO: 14028 - DNA, 50 bp, synthetic construct
  source 1..50: mol_type = other DNA
aaacacccrtttccttatctataaataataatttaaatacccccaccccc

SEQ ID NO: 14029 - DNA, 50 bp, synthetic construct
  source 1..50: mol_type = other DNA
acracrctacaaacaataataactaaaaaataattactacaaaacacccc

SEQ ID NO: 14030 - DNA, 50 bp, synthetic construct
  source 1..50: mol_type = other DNA
cttaccaaaccccttttccctccacaaaatcttcaaaatctaatacaaac

SEQ ID NO: 14031 - DNA, 50 bp, synthetic construct
  source 1..50: mol_type = other DNA
aaatataaaataaacacaataccaccraaacaaaaaactaaatcacraac

SEQ ID NO: 14032 - DNA, 50 bp, synthetic construct
  source 1..50: mol_type = other DNA
aaataaatataaaataaacacaataccaccraaacaaaaaactaaatcac

SEQ ID NO: 14033 - DNA, 50 bp, synthetic construct
  source 1..50: mol_type = other DNA
aataaaaatcttcctaccccctcacccatcccataaccataaatactatc

SEQ ID NO: 14034 - DNA, 50 bp, synthetic construct
  source 1..50: mol_type = other DNA
cctaaaaaataacttcraaacaaaacccaaatcctcccaaacaaaaatac

SEQ ID NO: 14035 - DNA, 50 bp, synthetic construct
  source 1..50: mol_type = other DNA
aaaaacctaaaccttaccccraaaccatttttcaaatctcaataaaaaac

SEQ ID NO: 14036 - DNA, 50 bp, synthetic construct
  source 1..50: mol_type = other DNA
ataaaacctctaaaaacaaccttcataaaccattaactaaacaataactc

SEQ ID NO: 14037 - DNA, 50 bp, synthetic construct
  source 1..50: mol_type = other DNA
ccctctaactaaccaaaacacacctattttttaactctaaactattaacc

SEQ ID NO: 14038 - DNA, 50 bp, synthetic construct
  source 1..50: mol_type = other DNA
ctctataaataataaacactaaaaactcacataaacccaacaaaataaac

SEQ ID NO: 14039 - DNA, 50 bp, synthetic construct
  source 1..50: mol_type = other DNA
craaaattcaaacaaacaacctaactttccrtaactaacratataacctc

SEQ ID NO: 14040 - DNA, 50 bp, synthetic construct
  source 1..50: mol_type = other DNA
acataaactcacraaaattcaaacaaacaacctaactttccrtaactaac

SEQ ID NO: 14041 - DNA, 50 bp, synthetic construct
  source 1..50: mol_type = other DNA
rtattaaatacataaactcacraaaattcaaacaaacaacctaactttcc

SEQ ID NO: 14042 - DNA, 50 bp, synthetic construct
  source 1..50: mol_type = other DNA
craaatcacatcrttaatcacraaaaatcaaattatttatctaaatctcc

SEQ ID NO: 14043 - DNA, 50 bp, synthetic construct
  source 1..50: mol_type = other DNA
raaaaatcaaattatttatctaaatctccrtaaatccatatactcaacac

SEQ ID NO: 14044 - DNA, 50 bp, synthetic construct
  source 1..50: mol_type = other DNA
aaacaaattataaaacttcaaaaaaaaccctaatcctaaaaactccctcc

SEQ ID NO: 14045 - DNA, 50 bp, synthetic construct
  source 1..50: mol_type = other DNA
aaaaaaaccctcaaaatcaaaaccttctttaaaaccccataacctacctc

SEQ ID NO: 14046 - DNA, 50 bp, synthetic construct
  source 1..50: mol_type = other DNA
actaaacctaaccctactacccatctcatctctaaaaaaccaaatatatc

SEQ ID NO: 14047 - DNA, 50 bp, synthetic construct
  source 1..50: mol_type = other DNA
ttctcctaaacttcctaaccaaaacccataatatccttaactcaaacccc

SEQ ID NO: 14048 - DNA, 50 bp, synthetic construct
  source 1..50: mol_type = other DNA
aaacctaaaaacctcttcccaaacacacaatatcctaaactaatttctac

SEQ ID NO: 14049 - DNA, 50 bp, synthetic construct
  source 1..50: mol_type = other DNA
tctaaaacctttcaaaaacrcttaaactctcaccattctaaccttaaccc

SEQ ID NO: 14050 - DNA, 50 bp, synthetic construct
  source 1..50: mol_type = other DNA
aataataaaaacccaaacrttcctaaaaaacctcaaaaaacactacaaac

SEQ ID NO: 14051 - DNA, 50 bp, synthetic construct
  source 1..50: mol_type = other DNA
aacrttcctaaaaaacctcaaaaaacactacaaacrcaaacctacaaaac

SEQ ID NO: 14052 - DNA, 50 bp, synthetic construct
  source 1..50: mol_type = other DNA
taaaaaaaacrccttaaccaacacctctactcaataaaaaaccaaacccc

SEQ ID NO: 14053 - DNA, 50 bp, synthetic construct
  source 1..50: mol_type = other DNA
aaacctaaaataacctaacaatcrtaaccraaacrtatttactacacttc

SEQ ID NO: 14054 - DNA, 50 bp, synthetic construct
  source 1..50: mol_type = other DNA
tcccctccaaacctaaacactttctattatacaataaaaaaacttttcac

SEQ ID NO: 14055 - DNA, 50 bp, synthetic construct
  source 1..50: mol_type = other DNA
aaaaataaatcccraatttactctacaaaaaaataaacrcrcctctaaac

SEQ ID NO: 14056 - DNA, 50 bp, synthetic construct
  source 1..50: mol_type = other DNA
ctctcraaactaccatccctaaaaaacccaaacrtaataaaaaactctcc

SEQ ID NO: 14057 - DNA, 50 bp, synthetic construct
  source 1..50: mol_type = other DNA
aaaaaaactaaacatttcactcataactacraccctccraaacccaaaac

SEQ ID NO: 14058 - DNA, 50 bp, synthetic construct
  source 1..50: mol_type = other DNA
raaatcrataataaaaaattacraactccaaactaaacctacccactccc

SEQ ID NO: 14059 - DNA, 50 bp, synthetic construct
  source 1..50: mol_type = other DNA
aaaaaatacracccctcaaaaacaccacraaatcrataataaaaaattac

SEQ ID NO: 14060 - DNA, 50 bp, synthetic construct
  source 1..50: mol_type = other DNA
actatcraaaataaacaaactcaacttaaaacccrtaatcctctattacc

SEQ ID NO: 14061 - DNA, 50 bp, synthetic construct
  source 1..50: mol_type = other DNA
ttaaaacccrtaatcctctattaccratcccrtaatacctttaaaaaatc

SEQ ID NO: 14062 - DNA, 50 bp, synthetic construct
  source 1..50: mol_type = other DNA
rctaaataaaaacrtaaataatttctccaaccaaaccccaaaacaaaatc

SEQ ID NO: 14063 - DNA, 50 bp, synthetic construct
  source 1..50: mol_type = other DNA
aaataatttctccaaccaaaccccaaaacaaaatcractatctttatccc

SEQ ID NO: 14064 - DNA, 50 bp, synthetic construct
  source 1..50: mol_type = other DNA
tttcaccatattacccaaactaatctctaactcctaaactcaaacaatcc

SEQ ID NO: 14065 - DNA, 50 bp, synthetic construct
  source 1..50: mol_type = other DNA
ccctaatcttattaaatctcacaaatactaaacaaaacacrataattcac

SEQ ID NO: 14066 - DNA, 50 bp, synthetic construct
  source 1..50: mol_type = other DNA
aaaatattttccctaatcttattaaatctcacaaatactaaacaaaacac

SEQ ID NO: 14067 - DNA, 50 bp, synthetic construct
  source 1..50: mol_type = other DNA
tacctataaaaactaaaaccractaacaatcaaacaaacaaatcctaaac

SEQ ID NO: 14068 - DNA, 50 bp, synthetic construct
  source 1..50: mol_type = other DNA
aacaaacaaatcctaaacrtattaaacaaaataaaaacaaacaacaacac

SEQ ID NO: 14069 - DNA, 50 bp, synthetic construct
  source 1..50: mol_type = other DNA
aaataaaaacaaacaacaacacrctaaacctactaccaccaaatctaccc

SEQ ID NO: 14070 - DNA, 50 bp, synthetic construct
  source 1..50: mol_type = other DNA
cctatattaaaccaattattaaatattttaaatatcacctcracccttac

SEQ ID NO: 14071 - DNA, 50 bp, synthetic construct
  source 1..50: mol_type = other DNA
accccaaaacatcaccctaaaatccraaaaaactaaataaaaattcaaac

SEQ ID NO: 14072 - DNA, 50 bp, synthetic construct
  source 1..50: mol_type = other DNA
aaccaccacraaaacccaaaaaaaccatatacatctcaaaaacaaaatcc

SEQ ID NO: 14073 - DNA, 50 bp, synthetic construct
  source 1..50: mol_type = other DNA
aaatacatataatctctctaaatccccrtaataactaacactatataacc

SEQ ID NO: 14074 - DNA, 50 bp, synthetic construct
  source 1..50: mol_type = other DNA
cctacaaaccaccaacaacctatcacaaaaaaccaaatccaaaacactac

SEQ ID NO: 14075 - DNA, 50 bp, synthetic construct
  source 1..50: mol_type = other DNA
taaacctaactccctataacaaattactaataatctacaaacttcraccc

SEQ ID NO: 14076 - DNA, 50 bp, synthetic construct
  source 1..50: mol_type = other DNA
aaaactaaaacraaacacctataataactaaacacattctcrtcrtaaac

SEQ ID NO: 14077 - DNA, 50 bp, synthetic construct
  source 1..50: mol_type = other DNA
aaaccccacctaaaactatcaaaactcatcctcaacaaaaattaactaac

SEQ ID NO: 14078 - DNA, 50 bp, synthetic construct
  source 1..50: mol_type = other DNA
taaaaataaactctaacaacctcaaataaaactcctacctcctcaaaaac

SEQ ID NO: 14079 - DNA, 50 bp, synthetic construct
  source 1..50: mol_type = other DNA
tattcraaacacacaatcctcttcactcaaccttcctaaaataaaacttc

SEQ ID NO: 14080 - DNA, 50 bp, synthetic construct
  source 1..50: mol_type = other DNA
ctaaatttctttaaaacctaattcctataccraaccacccaatactattc

SEQ ID NO: 14081 - DNA, 50 bp, synthetic construct
  source 1..50: mol_type = other DNA
atacatatttaaaaacaatctaaatttctttaaaacctaattcctatacc

SEQ ID NO: 14082 - DNA, 50 bp, synthetic construct
  source 1..50: mol_type = other DNA
ataaaaaacccaaccctcaaaataaatcaaaaactccctccactctaacc

SEQ ID NO: 14083 - DNA, 50 bp, synthetic construct
  source 1..50: mol_type = other DNA
taataaaatataaaaacctcctctcaacataaaacaacraacacccctac

SEQ ID NO: 14084 - DNA, 50 bp, synthetic construct
  source 1..50: mol_type = other DNA
aaaataaccctatctaactattaaccctaaaaaaccaaacaaaaaaactc

SEQ ID NO: 14085 - DNA, 50 bp, synthetic construct
  source 1..50: mol_type = other DNA
aacaaaaaaactcraacaactacaaacacttattaaaaaatcaacaaaac

SEQ ID NO: 14086 - DNA, 50 bp, synthetic construct
  source 1..50: mol_type = other DNA
aaaaatcaacaaaacraaaaacaacaactaaaaacaactctaaactacac

SEQ ID NO: 14087 - DNA, 50 bp, synthetic construct
  source 1..50: mol_type = other DNA
aacaaaacraaaaacaacaactaaaaacaactctaaactacacraaaacc

SEQ ID NO: 14088 - DNA, 50 bp, synthetic construct
  source 1..50: mol_type = other DNA
aaaataaacaaataatactaataccaacaaaaaactcaaactcaactacc

SEQ ID NO: 14089 - DNA, 50 bp, synthetic construct
  source 1..50: mol_type = other DNA
ataaacaaataatactaataccaacaaaaaactcaaactcaactaccrac

SEQ ID NO: 14090 - DNA, 50 bp, synthetic construct
  source 1..50: mol_type = other DNA
craaaccaaaataaactaacaatcaaccctcttatcaaccctctaccacc

SEQ ID NO: 14091 - DNA, 50 bp, synthetic construct
  source 1..50: mol_type = other DNA
actcrtcaaaaatatatcataaaaaaatctaaattaacctaatcctcccc

SEQ ID NO: 14092 - DNA, 50 bp, synthetic construct
  source 1..50: mol_type = other DNA
ccccraaaaaaaccaaatcaattcaaattttcccataacacatccctaac

SEQ ID NO: 14093 - DNA, 50 bp, synthetic construct
  source 1..50: mol_type = other DNA
accaatccaaattcttattctaaaaaacatcaccaataaattaaacaaac

SEQ ID NO: 14094 - DNA, 50 bp, synthetic construct
  source 1..50: mol_type = other DNA
ttaacccactaataatatttttcaaaacaaaaacctaaactaattccccc

SEQ ID NO: 14095 - DNA, 50 bp, synthetic construct
  source 1..50: mol_type = other DNA
cactaataatatttttcaaaacaaaaacctaaactaattcccccraatac

SEQ ID NO: 14096 - DNA, 50 bp, synthetic construct
  source 1..50: mol_type = other DNA
ataaaattaaacttatcctaaaaaatccraatctcattctactccccctc

SEQ ID NO: 14097 - DNA, 50 bp, synthetic construct
  source 1..50: mol_type = other DNA
aaaataaaacaccaacttcataataaaattaaacttatcctaaaaaatcc

SEQ ID NO: 14098 - DNA, 50 bp, synthetic construct
  source 1..50: mol_type = other DNA
tactacaaatcttttcttatcctatcaaaaaaaacatttaataaacttac

SEQ ID NO: 14099 - DNA, 50 bp, synthetic construct
  source 1..50: mol_type = other DNA
taaaacttactataaaaacaaattctcaacaaatttcctaaactaaactc

SEQ ID NO: 14100 - DNA, 50 bp, synthetic construct
  source 1..50: mol_type = other DNA
attctcaacaaatttcctaaactaaactcrctaccaaaacaaactacaac

SEQ ID NO: 14101 - DNA, 50 bp, synthetic construct
  source 1..50: mol_type = other DNA
ataaaaaacaaacaacaacraaaactaaaaaataatcccrccattaatcc

SEQ ID NO: 14102 - DNA, 50 bp, synthetic construct
  source 1..50: mol_type = other DNA
aacctctacaaataaaaaacaaacaacaacraaaactaaaaaataatccc

SEQ ID NO: 14103 - DNA, 50 bp, synthetic construct
  source 1..50: mol_type = other DNA
tattttattcacctcaaaacaacctctacaaataaaaaacaaacaacaac

SEQ ID NO: 14104 - DNA, 50 bp, synthetic construct
  source 1..50: mol_type = other DNA
aaactatccaaaaccctcacaataatatacatcaatactactaattacac

SEQ ID NO: 14105 - DNA, 50 bp, synthetic construct
  source 1..50: mol_type = other DNA
aataactctaaaacatacctaattaaactcatatctaacccacaaaccac

SEQ ID NO: 14106 - DNA, 50 bp, synthetic construct
  source 1..50: mol_type = other DNA
aaaccccactaataacattacccttttatcacrctaccctattttctatc

SEQ ID NO: 14107 - DNA, 50 bp, synthetic construct
  source 1..50: mol_type = other DNA
tttatcacrctaccctattttctatcratcacaatacttatctatcttac

SEQ ID NO: 14108 - DNA, 50 bp, synthetic construct
  source 1..50: mol_type = other DNA
rtacacttacctacttattatatcctaaactacaatataaaacttcatac

SEQ ID NO: 14109 - DNA, 50 bp, synthetic construct
  source 1..50: mol_type = other DNA
ttcatacraacaaaacttcacctatttaacactactatttccctaacacc

SEQ ID NO: 14110 - DNA, 50 bp, synthetic construct
  source 1..50: mol_type = other DNA
ttcctccaaattaacrctacaactctaaaattcattcattcatataactc

SEQ ID NO: 14111 - DNA, 50 bp, synthetic construct
  source 1..50: mol_type = other DNA
ttttcttaaactctataaaaaataaccaataaacraaaccaaacraaacc

SEQ ID NO: 14112 - DNA, 50 bp, synthetic construct
  source 1..50: mol_type = other DNA
ttctaatccccaaaaattttcctttaataatcttaactcctaacatcttc

SEQ ID NO: 14113 - DNA, 50 bp, synthetic construct
  source 1..50: mol_type = other DNA
aatcaaaaccattaaaaaaaaacctctaaaaaccaaaatatataataccc

SEQ ID NO: 14114 - DNA, 50 bp, synthetic construct
  source 1..50: mol_type = other DNA
aacctaataaaattaatcaaaaaaactttctaaaaaaaatacccttaaac

SEQ ID NO: 14115 - DNA, 50 bp, synthetic construct
  source 1..50: mol_type = other DNA
atctatttacttaccaaaatccaaacacctaaaactatactaaatacccc

SEQ ID NO: 14116 - DNA, 50 bp, synthetic construct
  source 1..50: mol_type = other DNA
ctctacctcctaaaacaaatataaaccaatcaaatactcttcaaaaccac

SEQ ID NO: 14117 - DNA, 50 bp, synthetic construct
  source 1..50: mol_type = other DNA
caatcttaaaaaccccaaacccaaaaaatctccctaaaaaaacaaaaaac

SEQ ID NO: 14118 - DNA, 50 bp, synthetic construct
  source 1..50: mol_type = other DNA
atcaaaattacacaaccaaactctacatctctacctctctatctttctac

SEQ ID NO: 14119 - DNA, 50 bp, synthetic construct
  source 1..50: mol_type = other DNA
tatctccaactcttatctatctttccctatcacaccctctataactcaac

SEQ ID NO: 14120 - DNA, 50 bp, synthetic construct
  source 1..50: mol_type = other DNA
aactaaaaaccaaactaaaacttacataactcttaaacaaatcaaacacc

SEQ ID NO: 14121 - DNA, 50 bp, synthetic construct
  source 1..50: mol_type = other DNA
atctccaacttaccctatatatctataaaaacaaaaccttaaaaacccac

SEQ ID NO: 14122 - DNA, 50 bp, synthetic construct
  source 1..50: mol_type = other DNA
ataccaattataacaataaactctcttatctatccaactaacataatctc

SEQ ID NO: 14123 - DNA, 50 bp, synthetic construct
  source 1..50: mol_type = other DNA
tactaccacaactaacatacccaaaacatctcaacacttttaatttaacc

SEQ ID NO: 14124 - DNA, 50 bp, synthetic construct
  source 1..50: mol_type = other DNA
ccaaaacatctcaacacttttaatttaaccraataacttcctaaacctcc

SEQ ID NO: 14125 - DNA, 50 bp, synthetic construct
  source 1..50: mol_type = other DNA
actaccatctataatataaatcraatcaattattaaccaactaaacttac

SEQ ID NO: 14126 - DNA, 50 bp, synthetic construct
  source 1..50: mol_type = other DNA
ttattaaccaactaaacttacraatatatcctcattccccaatactaacc

SEQ ID NO: 14127 - DNA, 50 bp, synthetic construct
  source 1..50: mol_type = other DNA
ataataaacaaaaataccactccaaaaaacaacctcttaaatcaaaattc

SEQ ID NO: 14128 - DNA, 50 bp, synthetic construct
  source 1..50: mol_type = other DNA
catttctaaaataaccaccacataccacaaaatacatattctcccttctc

SEQ ID NO: 14129 - DNA, 50 bp, synthetic construct
  source 1..50: mol_type = other DNA
tcaaatacccctaacctaaaatcctaactaaataaccctaaacaaatcac

SEQ ID NO: 14130 - DNA, 50 bp, synthetic construct
  source 1..50: mol_type = other DNA
ccacataaaccaactccactcaactacactattactaaaaaaataaactc

SEQ ID NO: 14131 - DNA, 50 bp, synthetic construct
  source 1..50: mol_type = other DNA
caaaaaccaaacctcaaaacttaaaatcctaactctacctctcaatatcc

SEQ ID NO: 14132 - DNA, 50 bp, synthetic construct
  source 1..50: mol_type = other DNA
acactaattcacacaatcctcrcaacacactaaaacaaaaacctttatcc

SEQ ID NO: 14133 - DNA, 50 bp, synthetic construct
  source 1..50: mol_type = other DNA
aaataacctatttaaaccttacaatccataataaccctataaaacaattc

SEQ ID NO: 14134 - DNA, 50 bp, synthetic construct
  source 1..50: mol_type = other DNA
aaccttacaatccataataaccctataaaacaattcrtattaccaacccc

SEQ ID NO: 14135 - DNA, 50 bp, synthetic construct
  source 1..50: mol_type = other DNA
tatactaactaaatacaaataaaaaaactacttaacctctctatacctcc

SEQ ID NO: 14136 - DNA, 50 bp, synthetic construct
  source 1..50: mol_type = other DNA
tttaaaatatataaacaacaaccctcaaccccctacaatataaccraaac

SEQ ID NO: 14137 - DNA, 50 bp, synthetic construct
  source 1..50: mol_type = other DNA
aaaaaattacaacaaaaaccaattccctactaaaaataacaatacctctc

SEQ ID NO: 14138 - DNA, 50 bp, synthetic construct
  source 1..50: mol_type = other DNA
ctctaatctcaaatattctcaaaaaccctaactatacctcctcaaaaaac

SEQ ID NO: 14139 - DNA, 50 bp, synthetic construct
  source 1..50: mol_type = other DNA
aacacaacaataaaaactcccttacccctaaacttaaacraattaacaac

SEQ ID NO: 14140 - DNA, 50 bp, synthetic construct
  source 1..50: mol_type = other DNA
taaactaaaaaaaatcctaccaacttaaataatttaattaaaacttaccc

SEQ ID NO: 14141 - DNA, 50 bp, synthetic construct
  source 1..50: mol_type = other DNA
aaaaacaaaacaaacccaaaacrttaatcaaaaacaaaacccataccaac

SEQ ID NO: 14142 - DNA, 50 bp, synthetic construct
  source 1..50: mol_type = other DNA
aacttctaactcttacccaaaactcttaaaaaacaaaacaaacccaaaac

SEQ ID NO: 14143 - DNA, 50 bp, synthetic construct
  source 1..50: mol_type = other DNA
tttcctaaaaaccttaaacaaaaatcaaaaatccaaaatctactccaaac

SEQ ID NO: 14144 - DNA, 50 bp, synthetic construct
  source 1..50: mol_type = other DNA
actctaaaacttaacttatcaccctctaccacaaccttatcataatactc

SEQ ID NO: 14145 - DNA, 50 bp, synthetic construct
  source 1..50: mol_type = other DNA
aactcataaaaatcratcctaaaaataatacaaacaataacaaaccctac

SEQ ID NO: 14146 - DNA, 50 bp, synthetic construct
  source 1..50: mol_type = other DNA
aatctcctaaaataaaacccaacrttacttcattcaaaacataatacaac

SEQ ID NO: 14147 - DNA, 50 bp, synthetic construct
  source 1..50: mol_type = other DNA
tctctatatcctcctaccctatcrttacatcatatcctaaataaaataac

SEQ ID NO: 14148 - DNA, 50 bp, synthetic construct
  source 1..50: mol_type = other DNA
tcactccaaaaaactccaaaactaatttctactaataaaacrcaaacacc

SEQ ID NO: 14149 - DNA, 50 bp, synthetic construct
  source 1..50: mol_type = other DNA
aattattaaataaaaccctaaactatctataccaatacaaaccctactcc

SEQ ID NO: 14150 - DNA, 50 bp, synthetic construct
  source 1..50: mol_type = other DNA
aaacttttcaaaaacatctacctaataaaaacaaaacttcaactaccatc

SEQ ID NO: 14151 - DNA, 50 bp, synthetic construct
  source 1..50: mol_type = other DNA
ccaaaccccaaacaactactataaatactaatatcatccaacctaatacc

SEQ ID NO: 14152 - DNA, 50 bp, synthetic construct
  source 1..50: mol_type = other DNA
aaaactactaaactaaaacatactattcctatacccaaaaaatactaccc

SEQ ID NO: 14153 - DNA, 50 bp, synthetic construct
  source 1..50: mol_type = other DNA
aactactaaactaaaacatactattcctatacccaaaaaatactacccrc

SEQ ID NO: 14154 - DNA, 50 bp, synthetic construct
  source 1..50: mol_type = other DNA
aaaaaatactacccrcrtttcttaaacaccracctctattaaaaattaac

SEQ ID NO: 14155 - DNA, 50 bp, synthetic construct
  source 1..50: mol_type = other DNA
ataaaaaatcaatataaaaccttactctttacaacaacaacaaaacaaac

SEQ ID NO: 14156 - DNA, 50 bp, synthetic construct
  source 1..50: mol_type = other DNA
accctatatatatttactactatatatctcaaatcacatattaaaaactc

SEQ ID NO: 14157 - DNA, 50 bp, synthetic construct
  source 1..50: mol_type = other DNA
ttaatatataatctaaaacatacaacaataaacacacacaaaaccccacc

SEQ ID NO: 14158 - DNA, 50 bp, synthetic construct
  source 1..50: mol_type = other DNA
aaaacactttatttctattttccaacttcaaccaatttctctccataatc

SEQ ID NO: 14159 - DNA, 50 bp, synthetic construct
  source 1..50: mol_type = other DNA
atctaaaaactaacctaaaatactccaatccacaaaataataaataccac

SEQ ID NO: 14160 - DNA, 50 bp, synthetic construct
  source 1..50: mol_type = other DNA
atctccctcatttaaacaatactctcatttcctctaatatctaaataatc

SEQ ID NO: 14161 - DNA, 50 bp, synthetic construct
  source 1..50: mol_type = other DNA
ttctaaaacctacctcccaaaaaacaaactaaaaaactaacraaaaaacc

SEQ ID NO: 14162 - DNA, 50 bp, synthetic construct
  source 1..50: mol_type = other DNA
aaaacaaaacratcttcrcacacaacaaatacraaactctaaaccctaac

SEQ ID NO: 14163 - DNA, 50 bp, synthetic construct
  source 1..50: mol_type = other DNA
aacaaataactataaaaaaaaccrtctaaaaacaccaaacccaaacacac

SEQ ID NO: 14164 - DNA, 50 bp, synthetic construct
  source 1..50: mol_type = other DNA
cactcctcctaacctaaaaaaccrtatatctaaacctaatatttctaaac

SEQ ID NO: 14165 - DNA, 50 bp, synthetic construct
  source 1..50: mol_type = other DNA
ttttcctacraaccraactcctctaaaaaatataacaaacctttaaaatc

SEQ ID NO: 14166 - DNA, 50 bp, synthetic construct
  source 1..50: mol_type = other DNA
atcaccaaacctacratactaaattcacacttaccttaactttcaatctc

SEQ ID NO: 14167 - DNA, 50 bp, synthetic construct
  source 1..50: mol_type = other DNA
taataaccctcctatacctctaaaataaactatcctaaaacaaactaacc

SEQ ID NO: 14168 - DNA, 50 bp, synthetic construct
  source 1..50: mol_type = other DNA
tacctctaaaataaactatcctaaaacaaactaaccraaaacaaatcccc

SEQ ID NO: 14169 - DNA, 50 bp, synthetic construct
  source 1..50: mol_type = other DNA
taaaaataaactaaaccctcttccttctctaactcaaaacrataaacccc

SEQ ID NO: 14170 - DNA, 50 bp, synthetic construct
  source 1..50: mol_type = other DNA
aaaaaaaaaaacttaatccatctccacaccaacatatcctctcctacaac

SEQ ID NO: 14171 - DNA, 50 bp, synthetic construct
  source 1..50: mol_type = other DNA
aaaaaaacatccacaaactaactcacctcracaataccaaacaaaacccc

SEQ ID NO: 14172 - DNA, 50 bp, synthetic construct
  source 1..50: mol_type = other DNA
atacaaaactatactaaactaactaactcttactaaaacctattacctac

SEQ ID NO: 14173 - DNA, 50 bp, synthetic construct
  source 1..50: mol_type = other DNA
ataaatccaataaataaatataataaaacacccccaactataacacaccc

SEQ ID NO: 14174 - DNA, 50 bp, synthetic construct
  source 1..50: mol_type = other DNA
tcatttacataaataaaacaatcaatacaaaactaaccaaaaaaccatac

SEQ ID NO: 14175 - DNA, 50 bp, synthetic construct
  source 1..50: mol_type = other DNA
aattataataccataacactcccaaatctccttaatttctctaacaaatc

SEQ ID NO: 14176 - DNA, 50 bp, synthetic construct
  source 1..50: mol_type = other DNA
aatacccaaaaaaacraacaataaccctaaactaacccaaaacaaaaacc

SEQ ID NO: 14177 - DNA, 50 bp, synthetic construct
  source 1..50: mol_type = other DNA
aacraacaataaccctaaactaacccaaaacaaaaaccraaaaaaccaac

SEQ ID NO: 14178 - DNA, 50 bp, synthetic construct
  source 1..50: mol_type = other DNA
aatatcrataataaatcctaactaaaaacccaaaacctacaactcccrcc

SEQ ID NO: 14179 - DNA, 50 bp, synthetic construct
  source 1..50: mol_type = other DNA
attactacaaaattaaacattacattcataacttcccttctatttctatc

SEQ ID NO: 14180 - DNA, 50 bp, synthetic construct
  source 1..50: mol_type = other DNA
aactaaacraatactaacctcatataaaatctacctaaaaccccctcatc

SEQ ID NO: 14181 - DNA, 50 bp, synthetic construct
  source 1..50: mol_type = other DNA
aaattctaatcactacctataattacaaaacaaaccaaaccactaataac

SEQ ID NO: 14182 - DNA, 50 bp, synthetic construct
  source 1..50: mol_type = other DNA
acaccttaattataacctcaattacattttttttaatactcataccaccc

SEQ ID NO: 14183 - DNA, 50 bp, synthetic construct
  source 1..50: mol_type = other DNA
ttaaatcaatcatataaataacctccaaacaacaccctctctaaaacccc

SEQ ID NO: 14184 - DNA, 50 bp, synthetic construct
  source 1..50: mol_type = other DNA
ctaaacaataccaataacttcctctctctatcaaccaaaaaatataatac

SEQ ID NO: 14185 - DNA, 50 bp, synthetic construct
  source 1..50: mol_type = other DNA
aaaatataatacrtttttaacctcaaaatctctaatcaaacaaattccac

SEQ ID NO: 14186 - DNA, 50 bp, synthetic construct
  source 1..50: mol_type = other DNA
atacrtttttaacctcaaaatctctaatcaaacaaattccacraatcctc

SEQ ID NO: 14187 - DNA, 50 bp, synthetic construct
  source 1..50: mol_type = other DNA
taaaacttaattataaacttcacctcatccactttaaccaccatattttc

SEQ ID NO: 14188 - DNA, 50 bp, synthetic construct
  source 1..50: mol_type = other DNA
aaacttaaataaaatttaaaccctaccaacaccttcacccataacaaccc

SEQ ID NO: 14189 - DNA, 50 bp, synthetic construct
  source 1..50: mol_type = other DNA
aaaaacacccaccaaaattaaaacttttaaaataaccctaatcttaaccc

SEQ ID NO: 14190 - DNA, 50 bp, synthetic construct
  source 1..50: mol_type = other DNA
ttaacaaccaaataaatattatacacaaactcatcrtctatcatcttcac

SEQ ID NO: 14191 - DNA, 50 bp, synthetic construct
  source 1..50: mol_type = other DNA
aataacaccaaaaaattaacaaccaaataaatattatacacaaactcatc

SEQ ID NO: 14192 - DNA, 50 bp, synthetic construct
  source 1..50: mol_type = other DNA
aaaaacaaaatccctacccccaaaaaattataatataactacaaaaccac

SEQ ID NO: 14193 - DNA, 50 bp, synthetic construct
  source 1..50: mol_type = other DNA
aaacaaaaaccttacctttctactactaccacaaaccatacctaaaaccc

SEQ ID NO: 14194 - DNA, 50 bp, synthetic construct
  source 1..50: mol_type = other DNA
catctcacaactaaatcaaaataactattaataaaaaatcaaaaccraac

SEQ ID NO: 14195 - DNA, 50 bp, synthetic construct
  source 1..50: mol_type = other DNA
ataatatttcacaaacrctaactaaataattcattaaactaaacatatcc

SEQ ID NO: 14196 - DNA, 50 bp, synthetic construct
  source 1..50: mol_type = other DNA
tctataaactacacaaaaacaccaaacattataaataatatttcacaaac

SEQ ID NO: 14197 - DNA, 50 bp, synthetic construct
  source 1..50: mol_type = other DNA
aaaacctataaactctaccccatccctaatctctatatttccataaatcc

SEQ ID NO: 14198 - DNA, 50 bp, synthetic construct
  source 1..50: mol_type = other DNA
aaaaaaaatctctatcctaataactaaaacatacaactaaaaaaccaaac

SEQ ID NO: 14199 - DNA, 50 bp, synthetic construct
  source 1..50: mol_type = other DNA
aaatctctatcctaataactaaaacatacaactaaaaaaccaaacrtcac

SEQ ID NO: 14200 - DNA, 50 bp, synthetic construct
  source 1..50: mol_type = other DNA
ctataaaccccccactaacttcatttcttaactaaattcatctcraacac

SEQ ID NO: 14201 - DNA, 50 bp, synthetic construct
  source 1..50: mol_type = other DNA
ttaatcctataaaccccccactaacttcatttcttaactaaattcatctc

SEQ ID NO: 14202 - DNA, 50 bp, synthetic construct
  source 1..50: mol_type = other DNA
ctccaaaaaccttaactactacraaaaaaaattcaacacctttccraatc

SEQ ID NO: 14203 - DNA, 50 bp, synthetic construct
  source 1..50: mol_type = other DNA
tacaaaaaactctttatctactcctctatcctcatccaaataaaaaaaac

SEQ ID NO: 14204 - DNA, 50 bp, synthetic construct
  source 1..50: mol_type = other DNA
cctccatactaaaacccaaaaatctaatcctcaacaactccrtaactaac

SEQ ID NO: 14205 - DNA, 50 bp, synthetic construct
  source 1..50: mol_type = other DNA
ttaaaaattcrtacrccaaccaaatcctcacaactaataaacrcattctc

SEQ ID NO: 14206 - DNA, 50 bp, synthetic construct
  source 1..50: mol_type = other DNA
ttaccactaatcrcccctacaccaaccaaatataaaatctttaaaaattc

SEQ ID NO: 14207 - DNA, 50 bp, synthetic construct
  source 1..50: mol_type = other DNA
taactaacrcacraacttccaaaaacctcacatctaattaatataaaaac

SEQ ID NO: 14208 - DNA, 50 bp, synthetic construct
  source 1..50: mol_type = other DNA
aaaaacccrcaaaaactatacrtaataccttcaaaactatatataacacc

SEQ ID NO: 14209 - DNA, 50 bp, synthetic construct
  source 1..50: mol_type = other DNA
taccttcaaaactatatataacaccraaaaaatcaaaaacrataacccrc

SEQ ID NO: 14210 - DNA, 50 bp, synthetic construct
  source 1..50: mol_type = other DNA
ctcacctccacctataatacaaataaaaacctaacractaaacacrcaac

SEQ ID NO: 14211 - DNA, 50 bp, synthetic construct
  source 1..50: mol_type = other DNA
acttcctcacctccacctataatacaaataaaaacctaacractaaacac

SEQ ID NO: 14212 - DNA, 50 bp, synthetic construct
  source 1..50: mol_type = other DNA
ctttctatcttaaacrctcccctaactataactactaaaaccctaaaccc

SEQ ID NO: 14213 - DNA, 50 bp, synthetic construct
  source 1..50: mol_type = other DNA
craaattctacaaaatctaaaaatctaaaaaaacccctaatcctaaactc

SEQ ID NO: 14214 - DNA, 50 bp, synthetic construct
  source 1..50: mol_type = other DNA
tcctatatacraaaactcacaaaatccttcctaatcctaaactcraaacc

SEQ ID NO: 14215 - DNA, 50 bp, synthetic construct
  source 1..50: mol_type = other DNA
aaaaaaaacctcrcataatacctctccctttaaaaataaataaccttccc

SEQ ID NO: 14216 - DNA, 50 bp, synthetic construct
  source 1..50: mol_type = other DNA
ataatctaaccctactcaaaaaaacacaaccrctctaataataatacrac

SEQ ID NO: 14217 - DNA, 50 bp, synthetic construct
  source 1..50: mol_type = other DNA
craataatctaaccctactcaaaaaaacacaaccrctctaataataatac

SEQ ID NO: 14218 - DNA, 50 bp, synthetic construct
  source 1..50: mol_type = other DNA
tatatcacctataaacaccttctaaaaacttataattttttttaaaaaac

SEQ ID NO: 14219 - DNA, 50 bp, synthetic construct
  source 1..50: mol_type = other DNA
aaaattaaattttttaaccctaataaaacaaatttactatacaaatatcc

SEQ ID NO: 14220 - DNA, 50 bp, synthetic construct
  source 1..50: mol_type = other DNA
aattttttaaccctaataaaacaaatttactatacaaatatccrttaacc

SEQ ID NO: 14221 - DNA, 50 bp, synthetic construct
  source 1..50: mol_type = other DNA
atcatattaaccaaactaatctaaaatacccaacctcaaataatctaccc

SEQ ID NO: 14222 - DNA, 50 bp, synthetic construct
  source 1..50: mol_type = other DNA
ataacttttatacttttaaaaattacactaaaccraacttaataactcac

SEQ ID NO: 14223 - DNA, 50 bp, synthetic construct
  source 1..50: mol_type = other DNA
attatcacratttctaataacttttatacttttaaaaattacactaaacc

SEQ ID NO: 14224 - DNA, 50 bp, synthetic construct
  source 1..50: mol_type = other DNA
crctaaccttacccraacttatcttttattacattattacatcatcatac

SEQ ID NO: 14225 - DNA, 50 bp, synthetic construct
  source 1..50: mol_type = other DNA
caccctacaaaaccrcataataatacaacaatacaacaaaaaacaaaccc

SEQ ID NO: 14226 - DNA, 50 bp, synthetic construct
  source 1..50: mol_type = other DNA
crcataataatacaacaatacaacaaaaaacaaacccraacaaaaccaac

SEQ ID NO: 14227 - DNA, 50 bp, synthetic construct
  source 1..50: mol_type = other DNA
caacaatacaacaaaaaacaaacccraacaaaaccaacraaaactctacc

SEQ ID NO: 14228 - DNA, 50 bp, synthetic construct
  source 1..50: mol_type = other DNA
ccaaaaacatacttaaacaacaaactataactctaattaactttctaacc

SEQ ID NO: 14229 - DNA, 50 bp, synthetic construct
  source 1..50: mol_type = other DNA
tactaaacatttaacaaccaaccctttaaataatttaaatatataaaaac

SEQ ID NO: 14230 - DNA, 50 bp, synthetic construct
  source 1..50: mol_type = other DNA
atatctactaattcttctaacaaacacaaaaataaataatatatctatcc

SEQ ID NO: 14231 - DNA, 50 bp, synthetic construct
  source 1..50: mol_type = other DNA
aaattactttttaaaccttaataaaattacttaacaaaaaaacaaaacac

SEQ ID NO: 14232 - DNA, 50 bp, synthetic construct
  source 1..50: mol_type = other DNA
cccttaaaatttaaaacttatcacctaaaaaattaaaacctaaaaacccc

SEQ ID NO: 14233 - DNA, 50 bp, synthetic construct
  source 1..50: mol_type = other DNA
ttttccaaataacaaacctcaaaccccaaaaaacccattatccccacatc

SEQ ID NO: 14234 - DNA, 50 bp, synthetic construct
  source 1..50: mol_type = other DNA
taaaaaaccataaacraaaatttttctacccccacaaaactctataaacc

SEQ ID NO: 14235 - DNA, 50 bp, synthetic construct
  source 1..50: mol_type = other DNA
acctacraaaaaaatccttacaaaacctattaatataaaaaaccataaac

SEQ ID NO: 14236 - DNA, 50 bp, synthetic construct
  source 1..50: mol_type = other DNA
caaccaacaaacctataacrccctttactaaaaaaaccttctaaataccc

SEQ ID NO: 14237 - DNA, 50 bp, synthetic construct
  source 1..50: mol_type = other DNA
aataaactccaaccratctcaaaaaaatttccaaccaacaaacctataac

SEQ ID NO: 14238 - DNA, 50 bp, synthetic construct
  source 1..50: mol_type = other DNA
tttcaacaaaaaacrccacaaacctactaactaaaaattctcctaaaatc

SEQ ID NO: 14239 - DNA, 50 bp, synthetic construct
  source 1..50: mol_type = other DNA
cttttttatataatacctacttctcaattaccttcaactcaaaataatcc

SEQ ID NO: 14240 - DNA, 50 bp, synthetic construct
  source 1..50: mol_type = other DNA
ccccattaacaaacataacccaaattatttaacccatctacaattaaaac

SEQ ID NO: 14241 - DNA, 50 bp, synthetic construct
  source 1..50: mol_type = other DNA
taatcctttataaacacatccataccctcataaaaaatataattcactcc

SEQ ID NO: 14242 - DNA, 50 bp, synthetic construct
  source 1..50: mol_type = other DNA
caactaaaacctaacaaaacctccctttaaacaaataaaaacaaataccc

SEQ ID NO: 14243 - DNA, 50 bp, synthetic construct
  source 1..50: mol_type = other DNA
actcaaaccttctcaactcaaaaaataaacaaaaaatataaaacctaaac

SEQ ID NO: 14244 - DNA, 50 bp, synthetic construct
  source 1..50: mol_type = other DNA
caaactctacatttcctacccaccccttaaattaaaaaaacttaaacttc

SEQ ID NO: 14245 - DNA, 50 bp, synthetic construct
  source 1..50: mol_type = other DNA
catttttactaaaattttacacaaaacaacttctctatacctatttcctc

SEQ ID NO: 14246 - DNA, 50 bp, synthetic construct
  source 1..50: mol_type = other DNA
catatcactcaccactttatcaaacactaaatacttacactaaataatac

SEQ ID NO: 14247 - DNA, 50 bp, synthetic construct
  source 1..50: mol_type = other DNA
tattattcaatacaaacatttaatacctaacaaaataataaataacatac

SEQ ID NO: 14248 - DNA, 50 bp, synthetic construct
  source 1..50: mol_type = other DNA
aaatccttaactactaaaacaataatctaataaaaaccctactaaaacac

SEQ ID NO: 14249 - DNA, 50 bp, synthetic construct
  source 1..50: mol_type = other DNA
caattaaataaccactaaactccctccaacctcacattttataatttacc

SEQ ID NO: 14250 - DNA, 50 bp, synthetic construct
  source 1..50: mol_type = other DNA
aacctatcttaaaaattaacaaaaaataactcacrctctaaacatttctc

SEQ ID NO: 14251 - DNA, 50 bp, synthetic construct
  source 1..50: mol_type = other DNA
attaactaatttctccaacctatcttaaaaattaacaaaaaataactcac

SEQ ID NO: 14252 - DNA, 50 bp, synthetic construct
  source 1..50: mol_type = other DNA
ctaccaacctccaaaacaaactaaaaaaaccaaccaacaactccttaaac

SEQ ID NO: 14253 - DNA, 50 bp, synthetic construct
  source 1..50: mol_type = other DNA
ttaaaataaaactttataaaaataacaaattacacaaacraataataccc

SEQ ID NO: 14254 - DNA, 50 bp, synthetic construct
  source 1..50: mol_type = other DNA
cctactactttcacaaaattttactccaaacccttaaaaaatatctccrc

SEQ ID NO: 14255 - DNA, 50 bp, synthetic construct
  source 1..50: mol_type = other DNA
aaattttactccaaacccttaaaaaatatctccrcraaataaaccttccc

SEQ ID NO: 14256 - DNA, 50 bp, synthetic construct
  source 1..50: mol_type = other DNA
aaaacccraacccacraaataaaaactaatacctaaaatactaaaaacrc

SEQ ID NO: 14257 - DNA, 50 bp, synthetic construct
  source 1..50: mol_type = other DNA
ataaaacccraacccacraaataaaaactaatacctaaaatactaaaaac

SEQ ID NO: 14258 - DNA, 50 bp, synthetic construct
  source 1..50: mol_type = other DNA
cracaaaataacraaaaaatccctcaacccraacctaaacaaaatcttcc

SEQ ID NO: 14259 - DNA, 50 bp, synthetic construct
  source 1..50: mol_type = other DNA
tctactaaaaacraaaaattttacccaaactcraactaaaaaaccctccc

SEQ ID NO: 14260 - DNA, 50 bp, synthetic construct
  source 1..50: mol_type = other DNA
attcacrttccttaaaaaaaacctaacaaacrtaacactaaccctaaaac

SEQ ID NO: 14261 - DNA, 50 bp, synthetic construct
  source 1..50: mol_type = other DNA
ataaaaacacraaaaaataacaccaaacttaactcccaaactccraaaac

SEQ ID NO: 14262 - DNA, 50 bp, synthetic construct
  source 1..50: mol_type = other DNA
aaaaaatctaacttaaaaattaactcacatactctaattcaccaaaaaac

SEQ ID NO: 14263 - DNA, 50 bp, synthetic construct
  source 1..50: mol_type = other DNA
acaacttcctcaaactaaaaaccaaaacttaaaaatactaaaaattcccc

SEQ ID NO: 14264 - DNA, 50 bp, synthetic construct
  source 1..50: mol_type = other DNA
aaccaatcaaaaatacrataataataaacctttcacraaaactaactcac

SEQ ID NO: 14265 - DNA, 50 bp, synthetic construct
  source 1..50: mol_type = other DNA
aaaaaaccaaattcaattactataaaatatccatacrtaaactaacctcc

SEQ ID NO: 14266 - DNA, 50 bp, synthetic construct
  source 1..50: mol_type = other DNA
tataaaatatccatacrtaaactaacctccrtaaaaaacttatcaccacc

SEQ ID NO: 14267 - DNA, 50 bp, synthetic construct
  source 1..50: mol_type = other DNA
tacctccaacaatataatttaattcctctacacatacttttcttctcttc

SEQ ID NO: 14268 - DNA, 50 bp, synthetic construct
  source 1..50: mol_type = other DNA
aaaactcaaccactatcacraaacaaaacccataaacaaatcaaaaactc

SEQ ID NO: 14269 - DNA, 50 bp, synthetic construct
  source 1..50: mol_type = other DNA
ttcctaaaattaaaaaaacraatttctaacttatttataaattctacccc

SEQ ID NO: 14270 - DNA, 50 bp, synthetic construct
  source 1..50: mol_type = other DNA
tttctaaattcacatttaatattatacaactaataaatttcaaaaaactc

SEQ ID NO: 14271 - DNA, 50 bp, synthetic construct
  source 1..50: mol_type = other DNA
attttttaaactacttaaactctatcatctcatctactaatacraataac

SEQ ID NO: 14272 - DNA, 50 bp, synthetic construct
  source 1..50: mol_type = other DNA
tatacatattttttaaactacttaaactctatcatctcatctactaatac

SEQ ID NO: 14273 - DNA, 50 bp, synthetic construct
  source 1..50: mol_type = other DNA
catacctatttttaaatactaaaattaaaacatctatttcaaatcaaaac

SEQ ID NO: 14274 - DNA, 50 bp, synthetic construct
  source 1..50: mol_type = other DNA
aacccccaatcttctaaaaaccaacaaccccttaaattccaaatatcaac

SEQ ID NO: 14275 - DNA, 50 bp, synthetic construct
  source 1..50: mol_type = other DNA
accaacaaccccttaaattccaaatatcaacrtaaaaattcaaaaaccac

SEQ ID NO: 14276 - DNA, 50 bp, synthetic construct
  source 1..50: mol_type = other DNA
aacrtaaaaattcaaaaaccacracaatctacccatctctatttaaaaac

SEQ ID NO: 14277 - DNA, 50 bp, synthetic construct
  source 1..50: mol_type = other DNA
aaaaacaaaatatctaacccaataacaaacctaataaatattataacttc

SEQ ID NO: 14278 - DNA, 50 bp, synthetic construct
  source 1..50: mol_type = other DNA
taaacactttacctctctatacctcaatttccttatctataaaaaacatc

SEQ ID NO: 14279 - DNA, 50 bp, synthetic construct
  source 1..50: mol_type = other DNA
caaaacttatcraaacaaatacaaaaatataaacaacatcttttcctctc

SEQ ID NO: 14280 - DNA, 50 bp, synthetic construct
  source 1..50: mol_type = other DNA
aaccaaaataaaaaccctatttataatatctacratccctccctaaaatc

SEQ ID NO: 14281 - DNA, 50 bp, synthetic construct
  source 1..50: mol_type = other DNA
ccraccaacaaaacccaaaccaaaataaaaaccctatttataatatctac

SEQ ID NO: 14282 - DNA, 50 bp, synthetic construct
  source 1..50: mol_type = other DNA
atctaaataacccttaaataaaaaaatttcccaacacaaaattaaatccc

SEQ ID NO: 14283 - DNA, 50 bp, synthetic construct
  source 1..50: mol_type = other DNA
ctatctctctcctacccrctaaatcccaaaaatcaaactaaatataaaac

SEQ ID NO: 14284 - DNA, 50 bp, synthetic construct
  source 1..50: mol_type = other DNA
cractaaaaacaaaaatccatttcttatatataacatataactctaaaac

SEQ ID NO: 14285 - DNA, 50 bp, synthetic construct
  source 1..50: mol_type = other DNA
rccttaactcatccccaaactctaactataaatcatcttatcattacatc

SEQ ID NO: 14286 - DNA, 50 bp, synthetic construct
  source 1..50: mol_type = other DNA
rctaaccctaaaatcaaactaatatatctctacaaacctctaaaaacacc

SEQ ID NO: 14287 - DNA, 50 bp, synthetic construct
  source 1..50: mol_type = other DNA
ratacttttaaaaacctacaaaaacacaccaatctaattccaaaatcaac

SEQ ID NO: 14288 - DNA, 50 bp, synthetic construct
  source 1..50: mol_type = other DNA
tcaataataccaccaaacatccaataacatactaaaaactaaaaatcacc

SEQ ID NO: 14289 - DNA, 50 bp, synthetic construct
  source 1..50: mol_type = other DNA
tccataacacaattctaatcatttcctctctaaattcttactataaccac

SEQ ID NO: 14290 - DNA, 50 bp, synthetic construct
  source 1..50: mol_type = other DNA
attctacacttacttaactctaataaaaaacaaaaatcracacaaaaaac

SEQ ID NO: 14291 - DNA, 50 bp, synthetic construct
  source 1..50: mol_type = other DNA
ttaaaaccttaaattctacacttacttaactctaataaaaaacaaaaatc

SEQ ID NO: 14292 - DNA, 50 bp, synthetic construct
  source 1..50: mol_type = other DNA
taaatcacaaaaattcttaacttctaaacaaacattctctttatcraacc

SEQ ID NO: 14293 - DNA, 50 bp, synthetic construct
  source 1..50: mol_type = other DNA
caaattaaatcacaaaaattcttaacttctaaacaaacattctctttatc

SEQ ID NO: 14294 - DNA, 50 bp, synthetic construct
  source 1..50: mol_type = other DNA
aaaaacracactaaaaaatcttccacataaaactaaatttaaatcactac

SEQ ID NO: 14295 - DNA, 50 bp, synthetic construct
  source 1..50: mol_type = other DNA
aatataaaatcrcttacctatactaataataacctaataaatatctatac

SEQ ID NO: 14296 - DNA, 50 bp, synthetic construct
  source 1..50: mol_type = other DNA
taaacrtatacrcacaaatatttaccaaatcatcatcaacacaaataaac

SEQ ID NO: 14297 - DNA, 50 bp, synthetic construct
  source 1..50: mol_type = other DNA
atatttaccaaatcatcatcaacacaaataaacrattccatattcttatc

SEQ ID NO: 14298 - DNA, 50 bp, synthetic construct
  source 1..50: mol_type = other DNA
aataaacrattccatattcttatcrcacttaactttactctatctatctc

SEQ ID NO: 14299 - DNA, 50 bp, synthetic construct
  source 1..50: mol_type = other DNA
actcrctacacattactaataaaaaatactttttttctttcctaactatc

SEQ ID NO: 14300 - DNA, 50 bp, synthetic construct
  source 1..50: mol_type = other DNA
ccrcccctataataactaaaaaattcattaaaaaatatctcctaaaaacc

SEQ ID NO: 14301 - DNA, 50 bp, synthetic construct
  source 1..50: mol_type = other DNA
ataacctaaactatcttataaatacrtaaaaatcrtacttaaaaataacc

SEQ ID NO: 14302 - DNA, 50 bp, synthetic construct
  source 1..50: mol_type = other DNA
ataacttcaattcaacataacctaaactatcttataaatacrtaaaaatc

SEQ ID NO: 14303 - DNA, 50 bp, synthetic construct
  source 1..50: mol_type = other DNA
taaactctttaaccactacaaaaacratcattcctaaacacracttccac

SEQ ID NO: 14304 - DNA, 50 bp, synthetic construct
  source 1..50: mol_type = other DNA
catactaaattaaaaccatccccttcaatactaacacttaccaaaactac

SEQ ID NO: 14305 - DNA, 50 bp, synthetic construct
  source 1..50: mol_type = other DNA
aaatacatcttatcacttatactataacrtttattaataaccrcraaacc

SEQ ID NO: 14306 - DNA, 50 bp, synthetic construct
  source 1..50: mol_type = other DNA
accrtaaaaaatacatcttatcacttatactataacrtttattaataacc

SEQ ID NO: 14307 - DNA, 50 bp, synthetic construct
  source 1..50: mol_type = other DNA
aaactacaaactaaaccrtaaaaaatacatcttatcacttatactataac

SEQ ID NO: 14308 - DNA, 50 bp, synthetic construct
  source 1..50: mol_type = other DNA
ctataatcaaaacaacatacccaacrtaataataaactacaaactaaacc

SEQ ID NO: 14309 - DNA, 50 bp, synthetic construct
  source 1..50: mol_type = other DNA
ataacttataattaaacaaaaacaactataatcaaaacaacatacccaac

SEQ ID NO: 14310 - DNA, 50 bp, synthetic construct
  source 1..50: mol_type = other DNA
actacccctacctaactacaaatcacccrctatatcttaaaactaaatac

SEQ ID NO: 14311 - DNA, 50 bp, synthetic construct
  source 1..50: mol_type = other DNA
ataaaaatctaacccaatataaccccaaaacctattattcactacccttc

SEQ ID NO: 14312 - DNA, 50 bp, synthetic construct
  source 1..50: mol_type = other DNA
aaataactcrcataaaaatttttaataactcataataaacatatcttaac

SEQ ID NO: 14313 - DNA, 50 bp, synthetic construct
  source 1..50: mol_type = other DNA
aaaaaaaaattatacaataatatcattcccccattcccataataaccttc

SEQ ID NO: 14314 - DNA, 50 bp, synthetic construct
  source 1..50: mol_type = other DNA
actattactaataaccaataaaacaaaccatatatatacctttaccaccc

SEQ ID NO: 14315 - DNA, 50 bp, synthetic construct
  source 1..50: mol_type = other DNA
craaataaaaaatctaacraattaaaacaaatctaaatcaataccttacc

SEQ ID NO: 14316 - DNA, 50 bp, synthetic construct
  source 1..50: mol_type = other DNA
ataaaatccctctccctttctaacccaaaacaaataaataaatacccacc

SEQ ID NO: 14317 - DNA, 50 bp, synthetic construct
  source 1..50: mol_type = other DNA
tttctaacccaaaacaaataaataaatacccaccratataaaataaaacc

SEQ ID NO: 14318 - DNA, 50 bp, synthetic construct
  source 1..50: mol_type = other DNA
atatattctcccccttacccttaaataaatactttataatattctccccc

SEQ ID NO: 14319 - DNA, 50 bp, synthetic construct
  source 1..50: mol_type = other DNA
tataaacaacaaaactatttatcttacctaaatacaaacraattaaatcc

SEQ ID NO: 14320 - DNA, 50 bp, synthetic construct
  source 1..50: mol_type = other DNA
aacaaacttcrtataaacaacaaaactatttatcttacctaaatacaaac

SEQ ID NO: 14321 - DNA, 50 bp, synthetic construct
  source 1..50: mol_type = other DNA
actaatcaactactcatatcaataatcaaaatcaaaaataaaccttatac

SEQ ID NO: 14322 - DNA, 50 bp, synthetic construct
  source 1..50: mol_type = other DNA
tataaaactcatttctaactttaattactaacataaacaattaattaacc

SEQ ID NO: 14323 - DNA, 50 bp, synthetic construct
  source 1..50: mol_type = other DNA
aaacttcaacaacacatttattttctattttcccattcaactaaaaaaac

SEQ ID NO: 14324 - DNA, 50 bp, synthetic construct
  source 1..50: mol_type = other DNA
atcaaaaaaccaatacaaaattcccaaaaaaaacccaaaatcctaaaccc

SEQ ID NO: 14325 - DNA, 50 bp, synthetic construct
  source 1..50: mol_type = other DNA
atataactcccaaattcataaaataaaaaacratacrtctaacaaatacc

SEQ ID NO: 14326 - DNA, 50 bp, synthetic construct
  source 1..50: mol_type = other DNA
cactatcctaaaatatataactcccaaattcataaaataaaaaacratac

SEQ ID NO: 14327 - DNA, 50 bp, synthetic construct
  source 1..50: mol_type = other DNA
aaatacactatcctaaaatatataactcccaaattcataaaataaaaaac

SEQ ID NO: 14328 - DNA, 50 bp, synthetic construct
  source 1..50: mol_type = other DNA
acaaaaatatactctttaaaaataacacrtttcaacacrctaactaccac

SEQ ID NO: 14329 - DNA, 50 bp, synthetic construct
  source 1..50: mol_type = other DNA
rtctaccaaaatacaaaaatatactctttaaaaataacacrtttcaacac

SEQ ID NO: 14330 - DNA, 50 bp, synthetic construct
  source 1..50: mol_type = other DNA
atttaaaaacrtctaccaaaatacaaaaatatactctttaaaaataacac

SEQ ID NO: 14331 - DNA, 50 bp, synthetic construct
  source 1..50: mol_type = other DNA
caactccataatttactaaaatataacccraatccaaaaaatttaaaaac

SEQ ID NO: 14332 - DNA, 50 bp, synthetic construct
  source 1..50: mol_type = other DNA
aatccatcatccttcaccttacaactccataatttactaaaatataaccc

SEQ ID NO: 14333 - DNA, 50 bp, synthetic construct
  source 1..50: mol_type = other DNA
aattaaactcaaacaaaatattttcatttaaacctctcctataataaaac

SEQ ID NO: 14334 - DNA, 50 bp, synthetic construct
  source 1..50: mol_type = other DNA
accaccctaataatatttaccactcaaaaatttatactaacraacaaccc

SEQ ID NO: 14335 - DNA, 50 bp, synthetic construct
  source 1..50: mol_type = other DNA
atacttaatatttatataatacctatctctttatatttcttcatttctcc

SEQ ID NO: 14336 - DNA, 50 bp, synthetic construct
  source 1..50: mol_type = other DNA
taaaaacrattccaaacctattaatcattaatcacccrcctaacaattac

SEQ ID NO: 14337 - DNA, 50 bp, synthetic construct
  source 1..50: mol_type = other DNA
aaaaaaaaacctaaaactactcactataactaaccaaaaacaaactcacc

SEQ ID NO: 14338 - DNA, 50 bp, synthetic construct
  source 1..50: mol_type = other DNA
aataaatctcttcaaatattttacaaaatttaactcttctcrttcaaacc

SEQ ID NO: 14339 - DNA, 50 bp, synthetic construct
  source 1..50: mol_type = other DNA
aaataacctctcaaaaaatcataaaaacrtataccccaaataattaaaac

SEQ ID NO: 14340 - DNA, 50 bp, synthetic construct
  source 1..50: mol_type = other DNA
ctctcaaaaaatcataaaaacrtataccccaaataattaaaacrcaactc

SEQ ID NO: 14341 - DNA, 50 bp, synthetic construct
  source 1..50: mol_type = other DNA
caaaaaccaaaatttcctaaaaatatacaaatactcttttcaaaaaaccc

SEQ ID NO: 14342 - DNA, 50 bp, synthetic construct
  source 1..50: mol_type = other DNA
cttcatttataaaactaaaataatcctactaaaattactttctttacttc

SEQ ID NO: 14343 - DNA, 50 bp, synthetic construct
  source 1..50: mol_type = other DNA
ttatattttttacaaaaacaaaatctcaccttattacccaaactaatctc

SEQ ID NO: 14344 - DNA, 50 bp, synthetic construct
  source 1..50: mol_type = other DNA
acaacatctcacatttatacaatatttccatttttcaaaacattttaacc

SEQ ID NO: 14345 - DNA, 50 bp, synthetic construct
  source 1..50: mol_type = other DNA
ttaattaatcatccaacttcttaactatctttttctcataataaaatacc

SEQ ID NO: 14346 - DNA, 50 bp, synthetic construct
  source 1..50: mol_type = other DNA
cacacatacaatctattaaaaacaaaatacraaaataaattccacctccc

SEQ ID NO: 14347 - DNA, 50 bp, synthetic construct
  source 1..50: mol_type = other DNA
aaatcccaacaataacracccacacatacaatctattaaaaacaaaatac

SEQ ID NO: 14348 - DNA, 50 bp, synthetic construct
  source 1..50: mol_type = other DNA
aataaaacccacccccrcaccctacctccaataaattatatatataaatc

SEQ ID NO: 14349 - DNA, 50 bp, synthetic construct
  source 1..50: mol_type = other DNA
accctacctccaataaattatatatataaatcrctattactaaaacccac

SEQ ID NO: 14350 - DNA, 50 bp, synthetic construct
  source 1..50: mol_type = other DNA
taaacrttcaaaatcatacccataatataaataatataataacataccac

SEQ ID NO: 14351 - DNA, 50 bp, synthetic construct
  source 1..50: mol_type = other DNA
caatactttaactcatttcttctacaactctaaccaaacctaatataacc

SEQ ID NO: 14352 - DNA, 50 bp, synthetic construct
  source 1..50: mol_type = other DNA
ctataactaattatcttatactaactattactataccaaatatcrttacc

SEQ ID NO: 14353 - DNA, 50 bp, synthetic construct
  source 1..50: mol_type = other DNA
tttaaaatttctaataataccaaaaactaataaacttccaaacattcaac

SEQ ID NO: 14354 - DNA, 50 bp, synthetic construct
  source 1..50: mol_type = other DNA
ttatttatcttttaaccaatattattatcaatcttaacctaaatactaac

SEQ ID NO: 14355 - DNA, 50 bp, synthetic construct
  source 1..50: mol_type = other DNA
atcatctaccaaaactttttataccttccctttctatttttaaaaattac

SEQ ID NO: 14356 - DNA, 50 bp, synthetic construct
  source 1..50: mol_type = other DNA
tatcacaaattcatcatcatttacaacaaaacrttttaaaaaataaaatc

SEQ ID NO: 14357 - DNA, 50 bp, synthetic construct
  source 1..50: mol_type = other DNA
caaaaaaaaacccaactctaatctaactcaaccccractatttaaaaatc

SEQ ID NO: 14358 - DNA, 50 bp, synthetic construct
  source 1..50: mol_type = other DNA
acttactttataactcaaaaaaaaacccaactctaatctaactcaacccc

SEQ ID NO: 14359 - DNA, 50 bp, synthetic construct
  source 1..50: mol_type = other DNA
tttttcaattacttatcatttactattattttatctaaataaatcatcac

SEQ ID NO: 14360 - DNA, 50 bp, synthetic construct
  source 1..50: mol_type = other DNA
crtaaaaactaaaaccaaacaactaaaaaactacataaaaccrataaaac

SEQ ID NO: 14361 - DNA, 50 bp, synthetic construct
  source 1..50: mol_type = other DNA
tctattatcrtaaataatttctataccattaactataaaatccraaatcc

SEQ ID NO: 14362 - DNA, 50 bp, synthetic construct
  source 1..50: mol_type = other DNA
atattcctctattatcrtaaataatttctataccattaactataaaatcc

SEQ ID NO: 14363 - DNA, 50 bp, synthetic construct
  source 1..50: mol_type = other DNA
aaacaaaaacaaaccctttaaatttatactaaacaaacaaaaaataatcc

SEQ ID NO: 14364 - DNA, 50 bp, synthetic construct
  source 1..50: mol_type = other DNA
aaaaaactcrtctattaaaacaataataaccaccrataaatttctattcc

SEQ ID NO: 14365 - DNA, 50 bp, synthetic construct
  source 1..50: mol_type = other DNA
aaccacctaataaataaaaaaactcrtctattaaaacaataataaccacc

SEQ ID NO: 14366 - DNA, 50 bp, synthetic construct
  source 1..50: mol_type = other DNA
aacaatatttcacaccactatttccatatttaataactaaaactcctatc

SEQ ID NO: 14367 - DNA, 50 bp, synthetic construct
  source 1..50: mol_type = other DNA
ctaaaaataatttcattatactttcaccccaaattctaaatacaacctcc

SEQ ID NO: 14368 - DNA, 50 bp, synthetic construct
  source 1..50: mol_type = other DNA
actcttattaacctattattaatactttccttaataccctctttactccc

SEQ ID NO: 14369 - DNA, 50 bp, synthetic construct
  source 1..50: mol_type = other DNA
craccttaaaaaatttaaaaaacaatcacataatctaactctaactaccc

SEQ ID NO: 14370 - DNA, 50 bp, synthetic construct
  source 1..50: mol_type = other DNA
ttcctcaaaatctaaaacatattacaaacrattaattacctttatttctc

SEQ ID NO: 14371 - DNA, 50 bp, synthetic construct
  source 1..50: mol_type = other DNA
acctaaattacaattccaattttcctcaaaatctaaaacatattacaaac

SEQ ID NO: 14372 - DNA, 50 bp, synthetic construct
  source 1..50: mol_type = other DNA
aattccaattccttaaaaacatactttataacaaaatcctataaaatccc

SEQ ID NO: 14373 - DNA, 50 bp, synthetic construct
  source 1..50: mol_type = other DNA
acaccaaaatctatacatatattttcttccccaaaaaaactataaacatc

SEQ ID NO: 14374 - DNA, 50 bp, synthetic construct
  source 1..50: mol_type = other DNA
aactcaaaaaactataaaaatcactcatttcctacatcaaaacttacttc

SEQ ID NO: 14375 - DNA, 50 bp, synthetic construct
  source 1..50: mol_type = other DNA
tatcactcratatacttttcttcctttcatctctaatctttacttttttc

SEQ ID NO: 14376 - DNA, 50 bp, synthetic construct
  source 1..50: mol_type = other DNA
aaatatataaaacatctatcccaatatctaactaacacataatatcactc

SEQ ID NO: 14377 - DNA, 50 bp, synthetic construct
  source 1..50: mol_type = other DNA
actaattaaacacctccacaattttaaaacattttctacttaactataac

SEQ ID NO: 14378 - DNA, 50 bp, synthetic construct
  source 1..50: mol_type = other DNA
cctctcttaaaaatcatttattaaatcatcatctatctcaaacttaatac

SEQ ID NO: 14379 - DNA, 50 bp, synthetic construct
  source 1..50: mol_type = other DNA
ttccaaaacattcaatcttcracracaacacttaaaacaaataactaacc

SEQ ID NO: 14380 - DNA, 50 bp, synthetic construct
  source 1..50: mol_type = other DNA
cattcttatattcacattacaacraccaatcatctaccctaaatactacc

SEQ ID NO: 14381 - DNA, 50 bp, synthetic construct
  source 1..50: mol_type = other DNA
tttatcataataaaaatataacaacaaactttccaaaacattcaatcttc

SEQ ID NO: 14382 - DNA, 50 bp, synthetic construct
  source 1..50: mol_type = other DNA
atcctaaaaaatttactatcacatctccattataacaaaaacattatacc

SEQ ID NO: 14383 - DNA, 50 bp, synthetic construct
  source 1..50: mol_type = other DNA
taataaaaacctttctccaattaatttattccrtaaaactcaaacccacc

SEQ ID NO: 14384 - DNA, 50 bp, synthetic construct
  source 1..50: mol_type = other DNA
aacaaccaaattaaacrcactattccrtaaacaactttattaaaaacaac

SEQ ID NO: 14385 - DNA, 50 bp, synthetic construct
  source 1..50: mol_type = other DNA
caaccaaattaaacrcactattccrtaaacaactttattaaaaacaacrc

SEQ ID NO: 14386 - DNA, 50 bp, synthetic construct
  source 1..50: mol_type = other DNA
acaaaataactcttcaaaacaaaacacaacracaattcctcrtaaccaac

SEQ ID NO: 14387 - DNA, 50 bp, synthetic construct
  source 1..50: mol_type = other DNA
aaaaatctttaaaatattatataaaatttctacctaatacrataactcac

SEQ ID NO: 14388 - DNA, 50 bp, synthetic construct
  source 1..50: mol_type = other DNA
attcaaaaaattctcrtaactcaacctcttacrcaactaaaactacaaac

SEQ ID NO: 14389 - DNA, 50 bp, synthetic construct
  source 1..50: mol_type = other DNA
atataatttcaccatattacccaaactaatccccaacaaactatctaccc

SEQ ID NO: 14390 - DNA, 50 bp, synthetic construct
  source 1..50: mol_type = other DNA
tcacaacaactaaaacaatataaataatttaaaatataaataccaaatcc

SEQ ID NO: 14391 - DNA, 50 bp, synthetic construct
  source 1..50: mol_type = other DNA
aaatataaattccaaaataatttcaaactaaaaaaccaataaattcttcc

SEQ ID NO: 14392 - DNA, 50 bp, synthetic construct
  source 1..50: mol_type = other DNA
taaaaaaaccaaaataacacatcctaactaataaccccacaattattccc

SEQ ID NO: 14393 - DNA, 50 bp, synthetic construct
  source 1..50: mol_type = other DNA
caacctcaatttatcaccaaactaactaaacataaaaaaaacctaactcc

SEQ ID NO: 14394 - DNA, 50 bp, synthetic construct
  source 1..50: mol_type = other DNA
aaatcaaattttcctcatactcaaccaacttaataacaaattaaaattac

SEQ ID NO: 14395 - DNA, 50 bp, synthetic construct
  source 1..50: mol_type = other DNA
acaaaccaaacraatacaaactaaaacacaacacatatactttatacccc

SEQ ID NO: 14396 - DNA, 50 bp, synthetic construct
  source 1..50: mol_type = other DNA
atttaacacataactttatcataaaacatctttttactaacctcttttcc

SEQ ID NO: 14397 - DNA, 50 bp, synthetic construct
  source 1..50: mol_type = other DNA
acacaattaaaattaaattaactctcctatcaaaataaaaaccaataacc

SEQ ID NO: 14398 - DNA, 50 bp, synthetic construct
  source 1..50: mol_type = other DNA
aaactcraaaataaataacatacccctacaaacctataataattcataac

SEQ ID NO: 14399 - DNA, 50 bp, synthetic construct
  source 1..50: mol_type = other DNA
taaaaattacttaaaaacaaacataaaaatccacraaaaaccttccctcc

SEQ ID NO: 14400 - DNA, 50 bp, synthetic construct
  source 1..50: mol_type = other DNA
caccaacrcttaaaattaaaaattacttaaaaacaaacataaaaatccac

SEQ ID NO: 14401 - DNA, 50 bp, synthetic construct
  source 1..50: mol_type = other DNA
acaatcaaaccccaaatcatatttctctacractaaaaataaacaccaac

SEQ ID NO: 14402 - DNA, 50 bp, synthetic construct
  source 1..50: mol_type = other DNA
tttacttttaaacaaccctcaaccctaaacrctaatattcattttcaacc

SEQ ID NO: 14403 - DNA, 50 bp, synthetic construct
  source 1..50: mol_type = other DNA
taacttaaaatttaaaaaatcaatatattcacttttaacttcacccaatc

SEQ ID NO: 14404 - DNA, 50 bp, synthetic construct
  source 1..50: mol_type = other DNA
atcccacctctactaacatatttaacctttaaaaaaaacaattacttcac

SEQ ID NO: 14405 - DNA, 50 bp, synthetic construct
  source 1..50: mol_type = other DNA
actaacatatttaacctttaaaaaaaacaattacttcacrtactaaaaac

SEQ ID NO: 14406 - DNA, 50 bp, synthetic construct
  source 1..50: mol_type = other DNA
aactaaacaaccttaaaaccrctaaaaactaaacaaaaactaaattaacc

SEQ ID NO: 14407 - DNA, 50 bp, synthetic construct
  source 1..50: mol_type = other DNA
acaataatataccrcaacaattccttcrataaaaaaaactaactatatcc

SEQ ID NO: 14408 - DNA, 50 bp, synthetic construct
  source 1..50: mol_type = other DNA
acaacatattctcaacacaaaaaacaataatataccrcaacaattccttc

SEQ ID NO: 14409 - DNA, 50 bp, synthetic construct
  source 1..50: mol_type = other DNA
tcracacaactcttacaacatattctcaacacaaaaaacaataatatacc

SEQ ID NO: 14410 - DNA, 50 bp, synthetic construct
  source 1..50: mol_type = other DNA
acracacattactattccttatattaaaaatatactataaaaactatatc

SEQ ID NO: 14411 - DNA, 50 bp, synthetic construct
  source 1..50: mol_type = other DNA
ccccaaacaaaaaattcttccacaatatccccaaattataaaaaaaactc

SEQ ID NO: 14412 - DNA, 50 bp, synthetic construct
  source 1..50: mol_type = other DNA
aaacaaaaaattcttccacaatatccccaaattataaaaaaaactcrctc

SEQ ID NO: 14413 - DNA, 50 bp, synthetic construct
  source 1..50: mol_type = other DNA
caacaaaacttttaaatccaaattcrccatcccatttcttattccctaac

SEQ ID NO: 14414 - DNA, 50 bp, synthetic construct
  source 1..50: mol_type = other DNA
atataataccctactaaatctaaaacaacaaaacttttaaatccaaattc

SEQ ID NO: 14415 - DNA, 50 bp, synthetic construct
  source 1..50: mol_type = other DNA
ttccaaactaacactaataacttttaaatactacaataaaaaatatatcc

SEQ ID NO: 14416 - DNA, 50 bp, synthetic construct
  source 1..50: mol_type = other DNA
aacaacaactctacaaaaaaacraccaaactactttctcttacaaatccc

SEQ ID NO: 14417 - DNA, 50 bp, synthetic construct
  source 1..50: mol_type = other DNA
actatttcacaaccttaacttaattaccrtcaaactataaaaaatccrcc

SEQ ID NO: 14418 - DNA, 50 bp, synthetic construct
  source 1..50: mol_type = other DNA
attactatttcacaaccttaacttaattaccrtcaaactataaaaaatcc

SEQ ID NO: 14419 - DNA, 50 bp, synthetic construct
  source 1..50: mol_type = other DNA
ctaaaactataaaacaacaattacaacccatccctctccctaataattcc

SEQ ID NO: 14420 - DNA, 50 bp, synthetic construct
  source 1..50: mol_type = other DNA
tcatcttattttcactaacaaataactaccatcttatacaaatatatttc

SEQ ID NO: 14421 - DNA, 50 bp, synthetic construct
  source 1..50: mol_type = other DNA
aacaatcctaatctaacrctcctataacaaacatttatccacrtaaatac

SEQ ID NO: 14422 - DNA, 50 bp, synthetic construct
  source 1..50: mol_type = other DNA
tctccttcaacaatcctaatctaacrctcctataacaaacatttatccac

SEQ ID NO: 14423 - DNA, 50 bp, synthetic construct
  source 1..50: mol_type = other DNA
tttctaaaaaactaaaactacaattacaataaaatcacaaattccrtaac

SEQ ID NO: 14424 - DNA, 50 bp, synthetic construct
  source 1..50: mol_type = other DNA
aaaaaaaacrataaaaataacccaactactactaaaactaaaaacaaccc

SEQ ID NO: 14425 - DNA, 50 bp, synthetic construct
  source 1..50: mol_type = other DNA
acaatattaaactttataatttcattccctttacttttatcaaaaaacac

SEQ ID NO: 14426 - DNA, 50 bp, synthetic construct
  source 1..50: mol_type = other DNA
caaaaacaatttctttatcatcctcttactaattaactacactaatctcc

SEQ ID NO: 14427 - DNA, 50 bp, synthetic construct
  source 1..50: mol_type = other DNA
tcttaaatatcataaatcacaacattatactttataaaaatcccaaactc

SEQ ID NO: 14428 - DNA, 50 bp, synthetic construct
  source 1..50: mol_type = other DNA
attcactcctatttattttcctttaaacataataaatcatcttttatacc

SEQ ID NO: 14429 - DNA, 50 bp, synthetic construct
  source 1..50: mol_type = other DNA
aactcaatcccaataaacaaaatttattaatctacatcactctaaattcc

SEQ ID NO: 14430 - DNA, 50 bp, synthetic construct
  source 1..50: mol_type = other DNA
aaccttctaaataaatcatttcacatcatacacttcaaaacatccaatac

SEQ ID NO: 14431 - DNA, 50 bp, synthetic construct
  source 1..50: mol_type = other DNA
acattcaaaacactcacatacatacttatacacaattcaaactccaatac

SEQ ID NO: 14432 - DNA, 50 bp, synthetic construct
  source 1..50: mol_type = other DNA
taaattaactatacaactctaccacrttaaattttacaaaccactaaatc

SEQ ID NO: 14433 - DNA, 50 bp, synthetic construct
  source 1..50: mol_type = other DNA
ttttttataaaaaaataaattactaacccaaaaccacacaactacttaac

SEQ ID NO: 14434 - DNA, 50 bp, synthetic construct
  source 1..50: mol_type = other DNA
ccraatttatcattttacttccacacttattttacaaccaaatttatctc

SEQ ID NO: 14435 - DNA, 50 bp, synthetic construct
  source 1..50: mol_type = other DNA
aataatacaatataaacactcraaatatctctcaaataaaaaatacctcc

SEQ ID NO: 14436 - DNA, 50 bp, synthetic construct
  source 1..50: mol_type = other DNA
atcctaataacatttcattttccttcactaataatacaatataaacactc

SEQ ID NO: 14437 - DNA, 50 bp, synthetic construct
  source 1..50: mol_type = other DNA
ctatcraaatattctatcaacaattctaaaaacccctcacraatccttcc

SEQ ID NO: 14438 - DNA, 50 bp, synthetic construct
  source 1..50: mol_type = other DNA
aaaacraaaaaactcrtaaaaaatccccaaaactattaacaaaacacctc

SEQ ID NO: 14439 - DNA, 50 bp, synthetic construct
  source 1..50: mol_type = other DNA
ccccaaaactattaacaaaacacctcracaaactaaaaaaaatcaaactc

SEQ ID NO: 14440 - DNA, 50 bp, synthetic construct
  source 1..50: mol_type = other DNA
ctatcttattaacrtcttaaaaaccctctttctacaaatccacaaccttc

SEQ ID NO: 14441 - DNA, 50 bp, synthetic construct
  source 1..50: mol_type = other DNA
ctcccaattcccttaaacctcracattctaaatcaaaattaattccctcc

SEQ ID NO: 14442 - DNA, 50 bp, synthetic construct
  source 1..50: mol_type = other DNA
cattcaaatacaattccrataaaaaatctataaaaactaacaaatataac

SEQ ID NO: 14443 - DNA, 50 bp, synthetic construct
  source 1..50: mol_type = other DNA
aaataacaaaaaacraattatctcttaaaattaccctaaaattaaaacac

SEQ ID NO: 14444 - DNA, 50 bp, synthetic construct
  source 1..50: mol_type = other DNA
aatacctaaacaaaaataaatataacctcaaatttataaccrccctaaac

SEQ ID NO: 14445 - DNA, 50 bp, synthetic construct
  source 1..50: mol_type = other DNA
aataaatataacctcaaatttataaccrccctaaacrcaaaacatcaacc

SEQ ID NO: 14446 - DNA, 50 bp, synthetic construct
  source 1..50: mol_type = other DNA
caataattttctccctaacattcaaccaaaaaacaattaaactatacacc

SEQ ID NO: 14447 - DNA, 50 bp, synthetic construct
  source 1..50: mol_type = other DNA
ataaaaattctaaataacattttcratcaaacraaaccaaaccccaaacc

SEQ ID NO: 14448 - DNA, 50 bp, synthetic construct
  source 1..50: mol_type = other DNA
taaaataatcatcaccaaaaccracaaataataaacaaactaacrtaaac

SEQ ID NO: 14449 - DNA, 50 bp, synthetic construct
  source 1..50: mol_type = other DNA
tctaaaaacrctttcataaaataaacactaaaataatcatcaccaaaacc

SEQ ID NO: 14450 - DNA, 50 bp, synthetic construct
  source 1..50: mol_type = other DNA
ttataacttcaacctcctaaattcaaataatcctcctatctcaacctccc

SEQ ID NO: 14451 - DNA, 50 bp, synthetic construct
  source 1..50: mol_type = other DNA
taatcacacaaaaaactattaatctatcataacctcctaaaatctcaaac

SEQ ID NO: 14452 - DNA, 50 bp, synthetic construct
  source 1..50: mol_type = other DNA
tttatttactcatctatttataaaaaccacctttcccaaaatcctattcc

SEQ ID NO: 14453 - DNA, 50 bp, synthetic construct
  source 1..50: mol_type = other DNA
caaatatcraccaaactccttaaaaccaaaacaataaaatcctactcccc

SEQ ID NO: 14454 - DNA, 50 bp, synthetic construct
  source 1..50: mol_type = other DNA
cttctcccctttttttaaccaactaactaaacaaaataatattaaatctc

SEQ ID NO: 14455 - DNA, 50 bp, synthetic construct
  source 1..50: mol_type = other DNA
tcaactctaaaaacaacaaatatattattaaattcctaaacccccttaac

SEQ ID NO: 14456 - DNA, 50 bp, synthetic construct
  source 1..50: mol_type = other DNA
ttcatcctacaaaactaataatcttattattcattctaataaattttttc

SEQ ID NO: 14457 - DNA, 50 bp, synthetic construct
  source 1..50: mol_type = other DNA
ctaaaaacctaacctctttttataataccacttctataaaaaataaattc

SEQ ID NO: 14458 - DNA, 50 bp, synthetic construct
  source 1..50: mol_type = other DNA
atctatttaaaaaaatatcattcattaaaaataccacaaaatctaacctc

SEQ ID NO: 14459 - DNA, 50 bp, synthetic construct
  source 1..50: mol_type = other DNA
ctaaaaaaattttaaataaacctttcaaaaaataccctcctaaactaaac

SEQ ID NO: 14460 - DNA, 50 bp, synthetic construct
  source 1..50: mol_type = other DNA
aatattcttcatttacacacaaatccrattttctttctaaattatttctc

SEQ ID NO: 14461 - DNA, 50 bp, synthetic construct
  source 1..50: mol_type = other DNA
ttcrtaacaaaatttcttttcaaaaatattcttcatttacacacaaatcc

SEQ ID NO: 14462 - DNA, 50 bp, synthetic construct
  source 1..50: mol_type = other DNA
aaaactaataactcaacttaacaccaccrcratctccaaatttcaatttc

SEQ ID NO: 14463 - DNA, 50 bp, synthetic construct
  source 1..50: mol_type = other DNA
crtcaattattaaaacrtaaaaaaaactaataactcaacttaacaccacc

SEQ ID NO: 14464 - DNA, 50 bp, synthetic construct
  source 1..50: mol_type = other DNA
aaaacaaacaaaaaaacatcacccaaaacaatcatcrtaatcaaaatacc

SEQ ID NO: 14465 - DNA, 50 bp, synthetic construct
  source 1..50: mol_type = other DNA
taaatcatcaattccctttacrccctaataattaacracactttaatcac

SEQ ID NO: 14466 - DNA, 50 bp, synthetic construct
  source 1..50: mol_type = other DNA
aaaaaacataaaatctatttctaacaaatattccccataatcccccaaac

SEQ ID NO: 14467 - DNA, 50 bp, synthetic construct
  source 1..50: mol_type = other DNA
ctaactaaacttacctactcaaactatcaatccctattatctcaaaaaac

SEQ ID NO: 14468 - DNA, 50 bp, synthetic construct
  source 1..50: mol_type = other DNA
aaactaataccacaattctcaaaatataatctataaattcctaaaaaccc

SEQ ID NO: 14469 - DNA, 50 bp, synthetic construct
  source 1..50: mol_type = other DNA
accctcctctaaattacataactccatttattaccctaattactctcatc

SEQ ID NO: 14470 - DNA, 50 bp, synthetic construct
  source 1..50: mol_type = other DNA
tccttttactaatctaattctcctcctatatattttaaaaaataacacac

SEQ ID NO: 14471 - DNA, 50 bp, synthetic construct
  source 1..50: mol_type = other DNA
ctcaaaacacttcactaaaaatacccaaaaattatacataaccaaacatc

SEQ ID NO: 14472 - DNA, 50 bp, synthetic construct
  source 1..50: mol_type = other DNA
aattctaaaactaccacaaacctatctctttttttatattatactaactc

SEQ ID NO: 14473 - DNA, 50 bp, synthetic construct
  source 1..50: mol_type = other DNA
ataaataatacactaaacctctatcatcrtctctaaccctttccactacc

SEQ ID NO: 14474 - DNA, 50 bp, synthetic construct
  source 1..50: mol_type = other DNA
ttcctataatcaatcaatcccacraacacaatcctatactataactctac

SEQ ID NO: 14475 - DNA, 50 bp, synthetic construct
  source 1..50: mol_type = other DNA
cacaatcctatactataactctacrctattttattattactcactactac

SEQ ID NO: 14476 - DNA, 50 bp, synthetic construct
  source 1..50: mol_type = other DNA
aaatcaaaaaaatctaatttcaaatccttaccaactacaacaataactac

SEQ ID NO: 14477 - DNA, 50 bp, synthetic construct
  source 1..50: mol_type = other DNA
atctcaaaactatcattctaaaacaataatattcctaaaaatactttccc

SEQ ID NO: 14478 - DNA, 50 bp, synthetic construct
  source 1..50: mol_type = other DNA
aataaaaccaatttcttacaaatattctaaaaacaaacataaataaattc

SEQ ID NO: 14479 - DNA, 50 bp, synthetic construct
  source 1..50: mol_type = other DNA
tttctactttaaacatttaaaaaaaacccactatatatcaaacaatatac

SEQ ID NO: 14480 - DNA, 50 bp, synthetic construct
  source 1..50: mol_type = other DNA
rcaatactattcaaaaaacaaactaaaactaaaaccatcaaaataaacac

SEQ ID NO: 14481 - DNA, 50 bp, synthetic construct
  source 1..50: mol_type = other DNA
rtattcattctaataaccctaattctaacctaccttttaaataacactac

SEQ ID NO: 14482 - DNA, 50 bp, synthetic construct
  source 1..50: mol_type = other DNA
aatcaatactaaacaaaaaacacaaatattactttaacaaaatcctatcc

SEQ ID NO: 14483 - DNA, 50 bp, synthetic construct
  source 1..50: mol_type = other DNA
ttataattaaacctacttcaaattcttcctaccaatttatccccttttcc

SEQ ID NO: 14484 - DNA, 50 bp, synthetic construct
  source 1..50: mol_type = other DNA
actcttaaaaaatacracaaatttaacaaaatctataaatattatcaaac

SEQ ID NO: 14485 - DNA, 50 bp, synthetic construct
  source 1..50: mol_type = other DNA
aataaatcaactcacrtctaacaacacctacaaattctatcaaacctacc

SEQ ID NO: 14486 - DNA, 50 bp, synthetic construct
  source 1..50: mol_type = other DNA
tcraaaaatatttccttccactaaataccccacacctaaaatataaactc

SEQ ID NO: 14487 - DNA, 50 bp, synthetic construct
  source 1..50: mol_type = other DNA
aactaacacraatattttcccttataaccctacrtaacatataataacac

SEQ ID NO: 14488 - DNA, 50 bp, synthetic construct
  source 1..50: mol_type = other DNA
ataaattaacaacattcctcacctatctaacataaacactaaaaaaaaac

SEQ ID NO: 14489 - DNA, 50 bp, synthetic construct
  source 1..50: mol_type = other DNA
tttattttttatccatataacctctataactatttcttctcttatctatc

SEQ ID NO: 14490 - DNA, 50 bp, synthetic construct
  source 1..50: mol_type = other DNA
aattaactactaaaacatactcaataaaaatatttataactaaaataaac

SEQ ID NO: 14491 - DNA, 50 bp, synthetic construct
  source 1..50: mol_type = other DNA
aacaaacaaaaaactaataatttttacaaataacctctcacaatacttac

SEQ ID NO: 14492 - DNA, 50 bp, synthetic construct
  source 1..50: mol_type = other DNA
caaccacrcataaattttaaaaaattacccaactacataccattcatacc

SEQ ID NO: 14493 - DNA, 50 bp, synthetic construct
  source 1..50: mol_type = other DNA
tcaaactctatacatacatacacatttatttataacaatcttcctaatac

SEQ ID NO: 14494 - DNA, 50 bp, synthetic construct
  source 1..50: mol_type = other DNA
ataaaaactcacccractctacatatttcctcaaactaattaactattcc

SEQ ID NO: 14495 - DNA, 50 bp, synthetic construct
  source 1..50: mol_type = other DNA
aacctatttccraaacaaaactattattcacctaaaataaaaactcaccc

SEQ ID NO: 14496 - DNA, 50 bp, synthetic construct
  source 1..50: mol_type = other DNA
tatacaaaaccraataaacttccactttaaataaacaataactctatctc

SEQ ID NO: 14497 - DNA, 50 bp, synthetic construct
  source 1..50: mol_type = other DNA
aaatataaccacctaacaaatctaaaaaaaacctaaaaacaaaatatacc

SEQ ID NO: 14498 - DNA, 50 bp, synthetic construct
  source 1..50: mol_type = other DNA
raatattctattacacaacaaaatctatctataaaaaacaccccctaaac

SEQ ID NO: 14499 - DNA, 50 bp, synthetic construct
  source 1..50: mol_type = other DNA
aacaacttttcaacccaatctataaaactctaacaaaaactaacatcacc

SEQ ID NO: 14500 - DNA, 50 bp, synthetic construct
  source 1..50: mol_type = other DNA
tataaaactctaacaaaaactaacatcaccrtacaatcataaaacaaaac

SEQ ID NO: 14501 - DNA, 50 bp, synthetic construct
  source 1..50: mol_type = other DNA
ataactcctatatatacatataaccatctaacacaatcactattcaacac

SEQ ID NO: 14502 - DNA, 50 bp, synthetic construct
  source 1..50: mol_type = other DNA
taaaataaaacaccatcttttctcatattcctttattaaacactaatcac

SEQ ID NO: 14503 - DNA, 50 bp, synthetic construct
  source 1..50: mol_type = other DNA
cctataacaccatcttacaattatctacacctcacttcttaatcacaatc

SEQ ID NO: 14504 - DNA, 50 bp, synthetic construct
  source 1..50: mol_type = other DNA
aaatctcttccaaaccttactccttaacttataaaaaatcaccttttccc

SEQ ID NO: 14505 - DNA, 50 bp, synthetic construct
  source 1..50: mol_type = other DNA
actaaatcatcctaacttttctataaacataaaaaaccaactaccaactc

SEQ ID NO: 14506 - DNA, 50 bp, synthetic construct
  source 1..50: mol_type = other DNA
ctactcrctctccttactctctatctacttcttaatataatatcaaaaac

SEQ ID NO: 14507 - DNA, 50 bp, synthetic construct
  source 1..50: mol_type = other DNA
ttccttaaacttctttaaataactactcataactaccttcccctctactc

SEQ ID NO: 14508 - DNA, 50 bp, synthetic construct
  source 1..50: mol_type = other DNA
accttaaaatccrctaaatcacraattctatcttatctattattaaaacc

SEQ ID NO: 14509 - DNA, 50 bp, synthetic construct
  source 1..50: mol_type = other DNA
caaaatacrctaattattacacttcacaaccttaaaatccrctaaatcac

SEQ ID NO: 14510 - DNA, 50 bp, synthetic construct
  source 1..50: mol_type = other DNA
rctatcttcccaaaatacrctaattattacacttcacaaccttaaaatcc

SEQ ID NO: 14511 - DNA, 50 bp, synthetic construct
  source 1..50: mol_type = other DNA
aatcaacrcactttaaaaaaataacrccaatccatttcraatattaattc

SEQ ID NO: 14512 - DNA, 50 bp, synthetic construct
  source 1..50: mol_type = other DNA
atacctacactccaaactcrctaaatcatactaaactaaatatctacctc

SEQ ID NO: 14513 - DNA, 50 bp, synthetic construct
  source 1..50: mol_type = other DNA
accatataaaatacattaaataaccactcatatatactcatacttaactc

SEQ ID NO: 14514 - DNA, 50 bp, synthetic construct
  source 1..50: mol_type = other DNA
ttaaaaaaaaacctaccacatataaaacataaacacaatctaactcaatc

SEQ ID NO: 14515 - DNA, 50 bp, synthetic construct
  source 1..50: mol_type = other DNA
atataaaacataaacacaatctaactcaatcrttttcaaactcatctcac

SEQ ID NO: 14516 - DNA, 50 bp, synthetic construct
  source 1..50: mol_type = other DNA
aatcrttttcaaactcatctcacracccttttacaaactcacaaataatc

SEQ ID NO: 14517 - DNA, 50 bp, synthetic construct
  source 1..50: mol_type = other DNA
aaaattacaacaaatatataactataattctccataacttcaatatcctc

SEQ ID NO: 14518 - DNA, 50 bp, synthetic construct
  source 1..50: mol_type = other DNA
aaacctactacttctaactaaaaataaatttctcaaaacctaaactaccc

SEQ ID NO: 14519 - DNA, 50 bp, synthetic construct
  source 1..50: mol_type = other DNA
tcaactactaaaactactttctataactattctcttaactacttactatc

SEQ ID NO: 14520 - DNA, 50 bp, synthetic construct
  source 1..50: mol_type = other DNA
aaaaatttatacttaccttaactataaaaaactccacattccttattaac

SEQ ID NO: 14521 - DNA, 50 bp, synthetic construct
  source 1..50: mol_type = other DNA
aaactccacattccttattaacraaaatttcaacttctaaaaccacaacc

SEQ ID NO: 14522 - DNA, 50 bp, synthetic construct
  source 1..50: mol_type = other DNA
aactataactactaccttaccctctttctaaaactaaatatacaaacaac

SEQ ID NO: 14523 - DNA, 50 bp, synthetic construct
  source 1..50: mol_type = other DNA
ctaaaaaactcactataaaaaaatcctaaaaaaatccacctactaaaatc

SEQ ID NO: 14524 - DNA, 50 bp, synthetic construct
  source 1..50: mol_type = other DNA
aaaacttctactccacatttcttactctaatttaaaaactcacrctttac

SEQ ID NO: 14525 - DNA, 50 bp, synthetic construct
  source 1..50: mol_type = other DNA
ctaattcaaaacttctactccacatttcttactctaatttaaaaactcac

SEQ ID NO: 14526 - DNA, 50 bp, synthetic construct
  source 1..50: mol_type = other DNA
tcccaaaaaacatctaacaatactataaacatttttaattatcataaccc

SEQ ID NO: 14527 - DNA, 50 bp, synthetic construct
  source 1..50: mol_type = other DNA
caatccttcttaaacaaaaaaaccataataataactttattttacctacc

SEQ ID NO: 14528 - DNA, 50 bp, synthetic construct
  source 1..50: mol_type = other DNA
tctattcaaatcctactaaataatctctaaaaaccattaactaaaaatac

SEQ ID NO: 14529 - DNA, 50 bp, synthetic construct
  source 1..50: mol_type = other DNA
attccaattttcctattctccctcctctactacctcaatatcatattaac

SEQ ID NO: 14530 - DNA, 50 bp, synthetic construct
  source 1..50: mol_type = other DNA
catcacaaaacaaactcattttctataaaccaaccccttaataatttacc

SEQ ID NO: 14531 - DNA, 50 bp, synthetic construct
  source 1..50: mol_type = other DNA
aaaaatttttaaaacaacacccaccaaacaaaaaccacactattaacaac

SEQ ID NO: 14532 - DNA, 50 bp, synthetic construct
  source 1..50: mol_type = other DNA
atttcccaacaccttcttcttttaaacaaaaacaaactactaaaaacrcc

SEQ ID NO: 14533 - DNA, 50 bp, synthetic construct
  source 1..50: mol_type = other DNA
caacaccttcttcttttaaacaaaaacaaactactaaaaacrccrtcctc

SEQ ID NO: 14534 - DNA, 50 bp, synthetic construct
  source 1..50: mol_type = other DNA
atctaactacctcactacaaaattcctatactcctcaacaacaaaacaac

SEQ ID NO: 14535 - DNA, 50 bp, synthetic construct
  source 1..50: mol_type = other DNA
caaacctatattatctaaaaaactactaaacccattcatctacttttcac

SEQ ID NO: 14536 - DNA, 50 bp, synthetic construct
  source 1..50: mol_type = other DNA
acctatcaaatccactaaaattaaaaaacataacctaaactataaatttc

SEQ ID NO: 14537 - DNA, 50 bp, synthetic construct
  source 1..50: mol_type = other DNA
cactaaaattaaaaaacataacctaaactataaatttcratttcctttcc

SEQ ID NO: 14538 - DNA, 50 bp, synthetic construct
  source 1..50: mol_type = other DNA
aaaaccttttaatactaaactaattctctcactctctcaatctctcttac

SEQ ID NO: 14539 - DNA, 50 bp, synthetic construct
  source 1..50: mol_type = other DNA
tataatataaaacaatcaacaaaaccctaactctaaaaactatttctccc

SEQ ID NO: 14540 - DNA, 50 bp, synthetic construct
  source 1..50: mol_type = other DNA
ctatttctcccraccattaaccatatatttaactcctcaaataaccaaac

SEQ ID NO: 14541 - DNA, 50 bp, synthetic construct
  source 1..50: mol_type = other DNA
acaaactatatccctctaaaactatatatttctttttctctctcttttcc

SEQ ID NO: 14542 - DNA, 50 bp, synthetic construct
  source 1..50: mol_type = other DNA
cattcttaataactctaccrctaccatatcaaataaaattttctttatac

SEQ ID NO: 14543 - DNA, 50 bp, synthetic construct
  source 1..50: mol_type = other DNA
aacataacaacracaaaaccattaaaaatacacaactatattataaacac

SEQ ID NO: 14544 - DNA, 50 bp, synthetic construct
  source 1..50: mol_type = other DNA
taaaaatacacaactatattataaacacrccaaaaaaccatttaccatcc

SEQ ID NO: 14545 - DNA, 50 bp, synthetic construct
  source 1..50: mol_type = other DNA
aaaatacacaactatattataaacacrccaaaaaaccatttaccatccrc

SEQ ID NO: 14546 - DNA, 50 bp, synthetic construct
  source 1..50: mol_type = other DNA
ttcttcctatccccctaaaaataaaatctacattaacaacccattttacc

SEQ ID NO: 14547 - DNA, 50 bp, synthetic construct
  source 1..50: mol_type = other DNA
tctttaccattaaacccacattcccatcataactttacaataaaaatacc

SEQ ID NO: 14548 - DNA, 50 bp, synthetic construct
  source 1..50: mol_type = other DNA
caaattctactatttatcatcatataaaaacaaaaccaaatctccacatc

SEQ ID NO: 14549 - DNA, 50 bp, synthetic construct
  source 1..50: mol_type = other DNA
ataaaaaatataataccctatttcccaattacttccttcctctctctacc

SEQ ID NO: 14550 - DNA, 50 bp, synthetic construct
  source 1..50: mol_type = other DNA
ttcaaataccattaaataaaaatacaacattcacatcctattaccaaaac

SEQ ID NO: 14551 - DNA, 50 bp, synthetic construct
  source 1..50: mol_type = other DNA
cacccacatcaacaacactaaaaccaacatcaaaatcttctaaactatac

SEQ ID NO: 14552 - DNA, 50 bp, synthetic construct
  source 1..50: mol_type = other DNA
aacactaaaaccaacatcaaaatcttctaaactatacraattaaaaaacc

SEQ ID NO: 14553 - DNA, 50 bp, synthetic construct
  source 1..50: mol_type = other DNA
aaaataaacacaaataaaaactaaacacatcaaaaatcaacrcttcaatc

SEQ ID NO: 14554 - DNA, 50 bp, synthetic construct
  source 1..50: mol_type = other DNA
taaaaactaaacacatcaaaaatcaacrcttcaatcrataatacaaatac

SEQ ID NO: 14555 - DNA, 50 bp, synthetic construct
  source 1..50: mol_type = other DNA
taaatataaccaaaaaattccataaaccctaccataatattaatactcac

SEQ ID NO: 14556 - DNA, 50 bp, synthetic construct
  source 1..50: mol_type = other DNA
tattaatcaaatccaaatcaaaactccatcaaaataaacaaacactcaac

SEQ ID NO: 14557 - DNA, 50 bp, synthetic construct
  source 1..50: mol_type = other DNA
atttactattcctttaaaaccttattaaatttctttattactcrtccacc

SEQ ID NO: 14558 - DNA, 50 bp, synthetic construct
  source 1..50: mol_type = other DNA
aaataaacaaacactcaacrccctaataaataacaaaaacaacrataaac

SEQ ID NO: 14559 - DNA, 50 bp, synthetic construct
  source 1..50: mol_type = other DNA
acaaacactaacctataaaataataatattcaccacaactaaaatcaacc

SEQ ID NO: 14560 - DNA, 50 bp, synthetic construct
  source 1..50: mol_type = other DNA
aaaatatataccacaaaaaattaccaaactacttatttttttaactaccc

SEQ ID NO: 14561 - DNA, 50 bp, synthetic construct
  source 1..50: mol_type = other DNA
caacttcttataaaactcaaaataaacttaacrtacaattcaacaactac

SEQ ID NO: 14562 - DNA, 50 bp, synthetic construct
  source 1..50: mol_type = other DNA
ataaaatactattaaaacatttcaatacatatcataaaaacaaaccaaac

SEQ ID NO: 14563 - DNA, 50 bp, synthetic construct
  source 1..50: mol_type = other DNA
aaactcccatctctactacaaacacaaaaattaacaaaatataataatac

SEQ ID NO: 14564 - DNA, 50 bp, synthetic construct
  source 1..50: mol_type = other DNA
aactaacrtaaaaaaatcacctaaacccaaaaaactactaaaactaccac

SEQ ID NO: 14565 - DNA, 50 bp, synthetic construct
  source 1..50: mol_type = other DNA
aaatcacctaaacccaaaaaactactaaaactaccacraaccataattac

SEQ ID NO: 14566 - DNA, 50 bp, synthetic construct
  source 1..50: mol_type = other DNA
attcatcaaaataaataacccaaataaatactccacaaaacaaaactacc

SEQ ID NO: 14567 - DNA, 50 bp, synthetic construct
  source 1..50: mol_type = other DNA
aaaaaaatatctactcaaaccttttacccattttataaatcaaataattc

SEQ ID NO: 14568 - DNA, 50 bp, synthetic construct
  source 1..50: mol_type = other DNA
ttaacraaaatactaaaaccaataaaaacaaatcccaaatctaaccccac

SEQ ID NO: 14569 - DNA, 50 bp, synthetic construct
  source 1..50: mol_type = other DNA
ctcctcaaatatacaattcaataacatataatacatttacaataccrtac

SEQ ID NO: 14570 - DNA, 50 bp, synthetic construct
  source 1..50: mol_type = other DNA
aaccctcctcaaatatacaattcaataacatataatacatttacaatacc

SEQ ID NO: 14571 - DNA, 50 bp, synthetic construct
  source 1..50: mol_type = other DNA
ttctttatctaacatattttttttcttcaaaatcaacttacaaaaaatcc

SEQ ID NO: 14572 - DNA, 50 bp, synthetic construct
  source 1..50: mol_type = other DNA
acctcacccctaccaaatattaaaaatctttttaaatattctctctctac

SEQ ID NO: 14573 - DNA, 50 bp, synthetic construct
  source 1..50: mol_type = other DNA
tacaacttttttaaaatatcatctaacatcatacataaatcactaactcc

SEQ ID NO: 14574 - DNA, 50 bp, synthetic construct
  source 1..50: mol_type = other DNA
taattttactacaatttaaccaaactatcaaaaatcactatcttaacttc

SEQ ID NO: 14575 - DNA, 50 bp, synthetic construct
  source 1..50: mol_type = other DNA
aatatcaccaaaaattcaaatatacrttcatctttttacaacccatttcc

SEQ ID NO: 14576 - DNA, 50 bp, synthetic construct
  source 1..50: mol_type = other DNA
ctacttaacaataccacaaccctccrcaataaatactatataaaaaaaac

SEQ ID NO: 14577 - DNA, 50 bp, synthetic construct
  source 1..50: mol_type = other DNA
actcaaatcatttcatcrtttaaaaatctctacrctaaacatctcctatc

SEQ ID NO: 14578 - DNA, 50 bp, synthetic construct
  source 1..50: mol_type = other DNA
tataattaaaaaaccaaactcaaatcatttcatcrtttaaaaatctctac

SEQ ID NO: 14579 - DNA, 50 bp, synthetic construct
  source 1..50: mol_type = other DNA
taaaaacttcaaccacataaaacaatatcaaactaatcacttacaccctc

SEQ ID NO: 14580 - DNA, 50 bp, synthetic construct
  source 1..50: mol_type = other DNA
taccaacaatacttactaactcatacaactattataacactcaactaacc

SEQ ID NO: 14581 - DNA, 50 bp, synthetic construct
  source 1..50: mol_type = other DNA
aatcaacaaacactactaataaaaaaatactaacatactaaattactctc

SEQ ID NO: 14582 - DNA, 50 bp, synthetic construct
  source 1..50: mol_type = other DNA
acacacctacctaacaaaaacaaaaacaaaatacatacaaattaacaaac

SEQ ID NO: 14583 - DNA, 50 bp, synthetic construct
  source 1..50: mol_type = other DNA
caaaaacaaaaacaaaatacatacaaattaacaaacraaaacctctctac

SEQ ID NO: 14584 - DNA, 50 bp, synthetic construct
  source 1..50: mol_type = other DNA
aatttaactacttttcctcccttctaaaaaatcaaaataattaccatatc

SEQ ID NO: 14585 - DNA, 50 bp, synthetic construct
  source 1..50: mol_type = other DNA
taaatttcccacattaaacaatacattttaaatttccacttatattaaac

SEQ ID NO: 14586 - DNA, 50 bp, synthetic construct
  source 1..50: mol_type = other DNA
aaattatttttaataatacatttatcaataaacatttcccrccttttacc

SEQ ID NO: 14587 - DNA, 50 bp, synthetic construct
  source 1..50: mol_type = other DNA
catcttactataaaaatttatataatcaactccaatatacracaaaaaac

SEQ ID NO: 14588 - DNA, 50 bp, synthetic construct
  source 1..50: mol_type = other DNA
tataatccatttacctatattctctacctaaaattatatttatttatcac

SEQ ID NO: 14589 - DNA, 50 bp, synthetic construct
  source 1..50: mol_type = other DNA
ttttcctaaaaactataaaacatactactactaatataataaaaaccrac

SEQ ID NO: 14590 - DNA, 50 bp, synthetic construct
  source 1..50: mol_type = other DNA
ttttactatcaacatactactcaacttccrtaaaactaaaaatatcctac

SEQ ID NO: 14591 - DNA, 50 bp, synthetic construct
  source 1..50: mol_type = other DNA
ctatctaaaactaaaacttaattttactatcaacatactactcaacttcc

SEQ ID NO: 14592 - DNA, 50 bp, synthetic construct
  source 1..50: mol_type = other DNA
cattaaatcccactcaaaaattaatcaacttcctttttaacaaaaaattc

SEQ ID NO: 14593 - DNA, 50 bp, synthetic construct
  source 1..50: mol_type = other DNA
ttaacatcacaaaaacctcrattaaaaattctaaaaaacaactcacaaac

SEQ ID NO: 14594 - DNA, 50 bp, synthetic construct
  source 1..50: mol_type = other DNA
aaaattctaaaaaacaactcacaaacrctaataaataactaaatcctatc

SEQ ID NO: 14595 - DNA, 50 bp, synthetic construct
  source 1..50: mol_type = other DNA
aaatacaaaatttccctctcaaaaacctaacrcccttaaatcttaactac

SEQ ID NO: 14596 - DNA, 50 bp, synthetic construct
  source 1..50: mol_type = other DNA
caactttataaaaaccaataaaacatcttttcttacccttccraaaaaac

SEQ ID NO: 14597 - DNA, 50 bp, synthetic construct
  source 1..50: mol_type = other DNA
aatccratcaactttataaaaaccaataaaacatcttttcttacccttcc

SEQ ID NO: 14598 - DNA, 50 bp, synthetic construct
  source 1..50: mol_type = other DNA
aaaacaaccttttaaatattaacttctcaatccttttcaaaaaaccctcc

SEQ ID NO: 14599 - DNA, 50 bp, synthetic construct
  source 1..50: mol_type = other DNA
tacctttcctttctacractcttaaaatattattactacccttaaaaacc

SEQ ID NO: 14600 - DNA, 50 bp, synthetic construct
  source 1..50: mol_type = other DNA
ctttcctttctacractcttaaaatattattactacccttaaaaaccrtc

SEQ ID NO: 14601 - DNA, 50 bp, synthetic construct
  source 1..50: mol_type = other DNA
taaataatatcacaaaactcccaaaacrcttcactacttcctcaacatac

SEQ ID NO: 14602 - DNA, 50 bp, synthetic construct
  source 1..50: mol_type = other DNA
aaaaataattcaaaacaacactttaaataatatcacaaaactcccaaaac

SEQ ID NO: 14603 - DNA, 50 bp, synthetic construct
  source 1..50: mol_type = other DNA
tttccttatctaaaaaccraatcrattaacaaaaaaaatctcacaatccc

SEQ ID NO: 14604 - DNA, 50 bp, synthetic construct
  source 1..50: mol_type = other DNA
ctaaaaactactcctaactctaaaacttttccttatctaaaaaccraatc

SEQ ID NO: 14605 - DNA, 50 bp, synthetic construct
  source 1..50: mol_type = other DNA
aaaaactaaaaactactcctaactctaaaacttttccttatctaaaaacc

SEQ ID NO: 14606 - DNA, 50 bp, synthetic construct
  source 1..50: mol_type = other DNA
rtcatcctataaatacacaaaaacacaaaaaactactatactcaaaaacc

SEQ ID NO: 14607 - DNA, 50 bp, synthetic construct
  source 1..50: mol_type = other DNA
taccactataaaactactttctataaaaataatataaccataacactttc

SEQ ID NO: 14608 - DNA, 50 bp, synthetic construct
  source 1..50: mol_type = other DNA
taaaataaacaataaacaacatataacaaattaacaaccctaaattccac

SEQ ID NO: 14609 - DNA, 50 bp, synthetic construct
  source 1..50: mol_type = other DNA
aataaacaacatataacaaattaacaaccctaaattccacrcttctacac

SEQ ID NO: 14610 - DNA, 50 bp, synthetic construct
  source 1..50: mol_type = other DNA
ctatctactacaccttaacacaaaacccaaaaatcaaacttcaacaaacc

SEQ ID NO: 14611 - DNA, 50 bp, synthetic construct
  source 1..50: mol_type = other DNA
tataatctcctataaacaaaaaatatctcaatctaatataactactacrc

SEQ ID NO: 14612 - DNA, 50 bp, synthetic construct
  source 1..50: mol_type = other DNA
ctatcaatacaacaatctaaaatcracctacaaaacaacaacctactaac

SEQ ID NO: 14613 - DNA, 50 bp, synthetic construct
  source 1..50: mol_type = other DNA
ataccrcccccataaaaccttactcactatcaatacaacaatctaaaatc

SEQ ID NO: 14614 - DNA, 50 bp, synthetic construct
  source 1..50: mol_type = other DNA
acaactaacaaaccaaaaaataccctcctatacctaacttaataaatacc

SEQ ID NO: 14615 - DNA, 50 bp, synthetic construct
  source 1..50: mol_type = other DNA
taaccaaaaaaaataataacaaactattcctaaaaaaactaaacactccc

SEQ ID NO: 14616 - DNA, 50 bp, synthetic construct
  source 1..50: mol_type = other DNA
ataacctctacaaacttaaatatccctatctaacaactttaaaaaaaacc

SEQ ID NO: 14617 - DNA, 50 bp, synthetic construct
  source 1..50: mol_type = other DNA
acataccctaatcctccaaataaaaaacacataaaaaccaaaaaattcac

SEQ ID NO: 14618 - DNA, 50 bp, synthetic construct
  source 1..50: mol_type = other DNA
caaacctattctcacctaaatctcataataaaaataacaattcaaataac

SEQ ID NO: 14619 - DNA, 50 bp, synthetic construct
  source 1..50: mol_type = other DNA
cacttaaaaaatttacaacaaaaacataacratataacacatttatacac

SEQ ID NO: 14620 - DNA, 50 bp, synthetic construct
  source 1..50: mol_type = other DNA
atccttaactccrttaccrtcacttaaaaaatttacaacaaaaacataac

SEQ ID NO: 14621 - DNA, 50 bp, synthetic construct
  source 1..50: mol_type = other DNA
attataaaaatatataactaacctcccaatcaatccttaactccrttacc

SEQ ID NO: 14622 - DNA, 50 bp, synthetic construct
  source 1..50: mol_type = other DNA
caccaaattataaaaatatataactaacctcccaatcaatccttaactcc

SEQ ID NO: 14623 - DNA, 50 bp, synthetic construct
  source 1..50: mol_type = other DNA
ctaactaaaaaatcaatcacacaccctcacaatctaatacactaacatcc

SEQ ID NO: 14624 - DNA, 50 bp, synthetic construct
  source 1..50: mol_type = other DNA
taatacactaacatccrttatactcaaaataatttatttctaacaattac

SEQ ID NO: 14625 - DNA, 50 bp, synthetic construct
  source 1..50: mol_type = other DNA
aaaattaaaaccttcaaatactacrtcctaaaataaatactcrttatcac

SEQ ID NO: 14626 - DNA, 50 bp, synthetic construct
  source 1..50: mol_type = other DNA
ttaaataactaaatcactaaactttcaaaattaaaaccttcaaatactac

SEQ ID NO: 14627 - DNA, 50 bp, synthetic construct
  source 1..50: mol_type = other DNA
accaacaaaaataccatctattcttaaaactaatcacaactatacctcac

SEQ ID NO: 14628 - DNA, 50 bp, synthetic construct
  source 1..50: mol_type = other DNA
ttaataatatactaaacacccccctataaatttatataaaacaactctac

SEQ ID NO: 14629 - DNA, 50 bp, synthetic construct
  source 1..50: mol_type = other DNA
atcaacaaaatatatttataaaattcacccacaacacaaacaaataccrc

SEQ ID NO: 14630 - DNA, 50 bp, synthetic construct
  source 1..50: mol_type = other DNA
ttataaaattcacccacaacacaaacaaataccrcraaacaccttaaaac

SEQ ID NO: 14631 - DNA, 50 bp, synthetic construct
  source 1..50: mol_type = other DNA
aataacracaacraaactccttaaatcatatcttaaaacccaaaaatttc

SEQ ID NO: 14632 - DNA, 50 bp, synthetic construct
  source 1..50: mol_type = other DNA
aaatccraaacctttaaatcccaaaacataacctaaaaaatcccrctatc

SEQ ID NO: 14633 - DNA, 50 bp, synthetic construct
  source 1..50: mol_type = other DNA
cracatatacrtctatctacccaattttacraaaactaaataccactcac

SEQ ID NO: 14634 - DNA, 50 bp, synthetic construct
  source 1..50: mol_type = other DNA
ccactcttcccratttaataaaaaaaacccrtaaataacatttaactctc

SEQ ID NO: 14635 - DNA, 50 bp, synthetic construct
  source 1..50: mol_type = other DNA
aaaaaaacccrtaaataacatttaactctcrcaaaactaaacaaataaac

SEQ ID NO: 14636 - DNA, 50 bp, synthetic construct
  source 1..50: mol_type = other DNA
crtaaataacatttaactctcrcaaaactaaacaaataaacrcacatatc

SEQ ID NO: 14637 - DNA, 50 bp, synthetic construct
  source 1..50: mol_type = other DNA
ctccaaacttaaccrtactaccttctaaaaaatataatccrtaactaccc

SEQ ID NO: 14638 - DNA, 50 bp, synthetic construct
  source 1..50: mol_type = other DNA
racactaaaaacttcraaaacacraaaatacracataaacaaacccactc

SEQ ID NO: 14639 - DNA, 50 bp, synthetic construct
  source 1..50: mol_type = other DNA
aaaataactacctaattccccaattctcaatatcactaaaataaatcaac

SEQ ID NO: 14640 - DNA, 50 bp, synthetic construct
  source 1..50: mol_type = other DNA
aatcccaaatctctataaaaaacaacaacctaaatataataaccrtaccc

SEQ ID NO: 14641 - DNA, 50 bp, synthetic construct
  source 1..50: mol_type = other DNA
aaaaaaaatcccaaatctctataaaaaacaacaacctaaatataataacc

SEQ ID NO: 14642 - DNA, 50 bp, synthetic construct
  source 1..50: mol_type = other DNA
tactaaatataattcracactttacctatatcaaaatccctaactaaacc

SEQ ID NO: 14643 - DNA, 50 bp, synthetic construct
  source 1..50: mol_type = other DNA
ttcccaaatatcaccrattcaaccaaaaatcctaacacaaataaaatatc

SEQ ID NO: 14644 - DNA, 50 bp, synthetic construct
  source 1..50: mol_type = other DNA
aactacraatcaaatataaaaccataaactatcaaaataacacacratac

SEQ ID NO: 14645 - DNA, 50 bp, synthetic construct
  source 1..50: mol_type = other DNA
acaaaacataactcatcaaattctcccaataccaataaaacaaataacac

SEQ ID NO: 14646 - DNA, 50 bp, synthetic construct
  source 1..50: mol_type = other DNA
tctaaaactttctttaaaaattaacctaaaaacaaacrtcccaactatcc

SEQ ID NO: 14647 - DNA, 50 bp, synthetic construct
  source 1..50: mol_type = other DNA
tccaaccccactatctaaaactttctttaaaaattaacctaaaaacaaac

SEQ ID NO: 14648 - DNA, 50 bp, synthetic construct
  source 1..50: mol_type = other DNA
tttcctaaaacactcaaaaatcaaaacttttaaaaataatttactaaatc

SEQ ID NO: 14649 - DNA, 50 bp, synthetic construct
  source 1..50: mol_type = other DNA
ttttaaatcacaaaaaaattcttttatatactaaattaacccaaaactac

SEQ ID NO: 14650 - DNA, 50 bp, synthetic construct
  source 1..50: mol_type = other DNA
aaaaaccactttctcaaaaaaccactaattatctaaccctcataaatacc

SEQ ID NO: 14651 - DNA, 50 bp, synthetic construct
  source 1..50: mol_type = other DNA
aatcaaaattctttccactatctataatcrtaaacraaaaatatctcctc

SEQ ID NO: 14652 - DNA, 50 bp, synthetic construct
  source 1..50: mol_type = other DNA
ctcataaataccrtcataaaatctaaaaacaacacraaaaaacacctctc

SEQ ID NO: 14653 - DNA, 50 bp, synthetic construct
  source 1..50: mol_type = other DNA
tttactaaattaaaatacttaaatcaaaattctttccactatctataatc

SEQ ID NO: 14654 - DNA, 50 bp, synthetic construct
  source 1..50: mol_type = other DNA
cccaaaacataaaaaatcctctccaaattaattactaactaaacaaaaac

SEQ ID NO: 14655 - DNA, 50 bp, synthetic construct
  source 1..50: mol_type = other DNA
aaaaaactaccrctaatactccataatcaccaatttttttcccaaaaaac

SEQ ID NO: 14656 - DNA, 50 bp, synthetic construct
  source 1..50: mol_type = other DNA
tttttccaaatataaactcaaataaccrattaattattttttcccttcac

SEQ ID NO: 14657 - DNA, 50 bp, synthetic construct
  source 1..50: mol_type = other DNA
ataactttcaacacatacaaaccraatattacaaaaactatcttccaccc

SEQ ID NO: 14658 - DNA, 50 bp, synthetic construct
  source 1..50: mol_type = other DNA
ttctacctatactaaatacattaatctaataaaatatttacaactaaaac

SEQ ID NO: 14659 - DNA, 50 bp, synthetic construct
  source 1..50: mol_type = other DNA
aatctcaataaaaaaacatctactcctcccaactctcataaataacttcc

SEQ ID NO: 14660 - DNA, 50 bp, synthetic construct
  source 1..50: mol_type = other DNA
atattttacctaactctaaaatttaactttcatacracattaaaccraac

SEQ ID NO: 14661 - DNA, 50 bp, synthetic construct
  source 1..50: mol_type = other DNA
ataaatattttacctaactctaaaatttaactttcatacracattaaacc

SEQ ID NO: 14662 - DNA, 50 bp, synthetic construct
  source 1..50: mol_type = other DNA
taaactacttttaatacaaaacaaatatacaaacaaataaacttaataac

SEQ ID NO: 14663 - DNA, 50 bp, synthetic construct
  source 1..50: mol_type = other DNA
aaaataaaattactatcaacctttaaaaaacaaaacctacctcaaaaaac

SEQ ID NO: 14664 - DNA, 50 bp, synthetic construct
  source 1..50: mol_type = other DNA
ttatctacattcctatcacatatatccattaaccatttaactctctccac

SEQ ID NO: 14665 - DNA, 50 bp, synthetic construct
  source 1..50: mol_type = other DNA
tcctatcacatatatccattaaccatttaactctctccacrtttaaatac

SEQ ID NO: 14666 - DNA, 50 bp, synthetic construct
  source 1..50: mol_type = other DNA
taatttcttatttcttttaccacaaaacttccaaatacaacaaaactatc

SEQ ID NO: 14667 - DNA, 50 bp, synthetic construct
  source 1..50: mol_type = other DNA
aaaataaaaacaccttcctaaccaatccttaataacccaaaaaaaataac

SEQ ID NO: 14668 - DNA, 50 bp, synthetic construct
  source 1..50: mol_type = other DNA
aattaattaaaaaaatacccccaccccttcccctaatacctttataaaac

SEQ ID NO: 14669 - DNA, 50 bp, synthetic construct
  source 1..50: mol_type = other DNA
aaaattctaacattaacctaatacttttaaataacattcaaaaacatatc

SEQ ID NO: 14670 - DNA, 50 bp, synthetic construct
  source 1..50: mol_type = other DNA
attttctacttaaattcttaactttaaatctccaacatttcaaattcttc

SEQ ID NO: 14671 - DNA, 50 bp, synthetic construct
  source 1..50: mol_type = other DNA
actttaaatctccaacatttcaaattcttcrattttatctaattaaacac

SEQ ID NO: 14672 - DNA, 50 bp, synthetic construct
  source 1..50: mol_type = other DNA
aactaaatacttaacaacaaaatattcccaaataaaaaatatcttaacrc

SEQ ID NO: 14673 - DNA, 50 bp, synthetic construct
  source 1..50: mol_type = other DNA
ataccaacctttcatacrtcattttaaatcaaccctaaaataataaaacc

SEQ ID NO: 14674 - DNA, 50 bp, synthetic construct
  source 1..50: mol_type = other DNA
tcacttcrtctaaacaaaaaacaacatcttataataccaacctttcatac

SEQ ID NO: 14675 - DNA, 50 bp, synthetic construct
  source 1..50: mol_type = other DNA
ttatttatacctaaattttattaatacttccaatataacaatatcacttc

SEQ ID NO: 14676 - DNA, 50 bp, synthetic construct
  source 1..50: mol_type = other DNA
acctaaacactcactattcccaactcraactaaaaaacaaacaataaaac

SEQ ID NO: 14677 - DNA, 50 bp, synthetic construct
  source 1..50: mol_type = other DNA
aactaaaaaactaccctaattttctaaacrtaacctaactaaattccctc

SEQ ID NO: 14678 - DNA, 50 bp, synthetic construct
  source 1..50: mol_type = other DNA
catcctaacttttaaatataacacrtcatttaacttaaaataaatttacc

SEQ ID NO: 14679 - DNA, 50 bp, synthetic construct
  source 1..50: mol_type = other DNA
ccctaaaataataaaacccaaaataacccaactataataaactttaaaac

SEQ ID NO: 14680 - DNA, 50 bp, synthetic construct
  source 1..50: mol_type = other DNA
taaccaactccatctaataaatcatcctatcrctcacctaattcctaacc

SEQ ID NO: 14681 - DNA, 50 bp, synthetic construct
  source 1..50: mol_type = other DNA
acatataacaacccaaccctaccattctctaaaactcaaccaaattaaac

SEQ ID NO: 14682 - DNA, 50 bp, synthetic construct
  source 1..50: mol_type = other DNA
taacacttaaccccaaaccaaactactttaatcacaactacaacacccac

SEQ ID NO: 14683 - DNA, 50 bp, synthetic construct
  source 1..50: mol_type = other DNA
atacccaaatctcctaaacaccttcaacttattataactctttccctccc

SEQ ID NO: 14684 - DNA, 50 bp, synthetic construct
  source 1..50: mol_type = other DNA
aaaccccaaacaaaacaatctactatatcatacaaaattaaaaaactttc

SEQ ID NO: 14685 - DNA, 50 bp, synthetic construct
  source 1..50: mol_type = other DNA
ttaaaacttatccttaccaactccaattttataaacacacataccctatc

SEQ ID NO: 14686 - DNA, 50 bp, synthetic construct
  source 1..50: mol_type = other DNA
atacaaaatattaaaataactcaacrctttcatataccactattacaaac

SEQ ID NO: 14687 - DNA, 50 bp, synthetic construct
  source 1..50: mol_type = other DNA
tcraacaacrcttatataactaccctaaattaattcttcccaaccaaaac

SEQ ID NO: 14688 - DNA, 50 bp, synthetic construct
  source 1..50: mol_type = other DNA
actcratctacaaaaattatcatttattaactacrataaaaccacrcccc

SEQ ID NO: 14689 - DNA, 50 bp, synthetic construct
  source 1..50: mol_type = other DNA
caattaaactactcraaaatcaaaaacctacttaaaaaaacaatctatcc

SEQ ID NO: 14690 - DNA, 50 bp, synthetic construct
  source 1..50: mol_type = other DNA
attcaataaacctttaaaatatttcaccacttcctactcataaattactc

SEQ ID NO: 14691 - DNA, 50 bp, synthetic construct
  source 1..50: mol_type = other DNA
ctatactactcattaactacaacctcraaaatctcraccacrtaataaac

SEQ ID NO: 14692 - DNA, 50 bp, synthetic construct
  source 1..50: mol_type = other DNA
aatcttatctctctcttaaataataactctttataactacacaacraatc

SEQ ID NO: 14693 - DNA, 50 bp, synthetic construct
  source 1..50: mol_type = other DNA
caaaaattaaattctctatcaaaacaccatactcaactctccraaaacac

SEQ ID NO: 14694 - DNA, 50 bp, synthetic construct
  source 1..50: mol_type = other DNA
ttttcctttacccaatcaatttttccctacrctaactacaattctaaaac

SEQ ID NO: 14695 - DNA, 50 bp, synthetic construct
  source 1..50: mol_type = other DNA
taacrcatctaatatttttccaaccctaataactcaaaactaaaaataac

SEQ ID NO: 14696 - DNA, 50 bp, synthetic construct
  source 1..50: mol_type = other DNA
aaaactaaaaaaatactaaatacrctactcrtaaactcrtaaatacactc

SEQ ID NO: 14697 - DNA, 50 bp, synthetic construct
  source 1..50: mol_type = other DNA
aactaacctccataaactcttactatacaaataaaacaacaacttacaac

SEQ ID NO: 14698 - DNA, 50 bp, synthetic construct
  source 1..50: mol_type = other DNA
raaaaattaaacaactcaattcratacrcattaaattaataatctttctc

SEQ ID NO: 14699 - DNA, 50 bp, synthetic construct
  source 1..50: mol_type = other DNA
raaaaaaattactaatccaatacrtaccraactaaactattcaactttcc

SEQ ID NO: 14700 - DNA, 50 bp, synthetic construct
  source 1..50: mol_type = other DNA
cttaaattctccacactactatcaaaataacctaactaaaaatataaatc

SEQ ID NO: 14701 - DNA, 50 bp, synthetic construct
  source 1..50: mol_type = other DNA
ctttacctaaaatacaaaattctccatctccctaactaatttcatctctc

SEQ ID NO: 14702 - DNA, 50 bp, synthetic construct
  source 1..50: mol_type = other DNA
taccaacttaatactcttctaacaatataatttcaactaaactaaaaatc

SEQ ID NO: 14703 - DNA, 50 bp, synthetic construct
  source 1..50: mol_type = other DNA
caaccatatcaacctttttacaatttcacaaacaaattatactatttcac

SEQ ID NO: 14704 - DNA, 50 bp, synthetic construct
  source 1..50: mol_type = other DNA
craaaaataccraaaaccaccttaatacactacaaaatataacctaaacc

SEQ ID NO: 14705 - DNA, 50 bp, synthetic construct
  source 1..50: mol_type = other DNA
attactatttcataacattaccaataaataacaacacraaattcatcttc

SEQ ID NO: 14706 - DNA, 50 bp, synthetic construct
  source 1..50: mol_type = other DNA
ataacaccaaaaacrtcaaaatcctaaaaccraattatcaataaacattc

SEQ ID NO: 14707 - DNA, 50 bp, synthetic construct
  source 1..50: mol_type = other DNA
cacctcaaattactctctaataacaccaaaaacrtcaaaatcctaaaacc

SEQ ID NO: 14708 - DNA, 50 bp, synthetic construct
  source 1..50: mol_type = other DNA
ccaaaaattttattacacacctcaaattactctctaataacaccaaaaac

SEQ ID NO: 14709 - DNA, 50 bp, synthetic construct
  source 1..50: mol_type = other DNA
atcaaaaaacaatttaaaatatacaataaaatctttaaattccccrcccc

SEQ ID NO: 14710 - DNA, 50 bp, synthetic construct
  source 1..50: mol_type = other DNA
attttatttttaatttccttactatttttccaaatcacaacaccrcaatc

SEQ ID NO: 14711 - DNA, 50 bp, synthetic construct
  source 1..50: mol_type = other DNA
ttcccttcttcttctccacaattaataattttctacaaaaaaacaactac

SEQ ID NO: 14712 - DNA, 50 bp, synthetic construct
  source 1..50: mol_type = other DNA
acctaaacatttcraaaactaaaatcacrtcacatccatataaaaatcrc

SEQ ID NO: 14713 - DNA, 50 bp, synthetic construct
  source 1..50: mol_type = other DNA
tcacctaaacatttcraaaactaaaatcacrtcacatccatataaaaatc

SEQ ID NO: 14714 - DNA, 50 bp, synthetic construct
  source 1..50: mol_type = other DNA
ccacataaatataacrtaaccccaacttccraaatacccaaataactcac

SEQ ID NO: 14715 - DNA, 50 bp, synthetic construct
  source 1..50: mol_type = other DNA
actttaccccrtttcaattatatacraattataaacccraaaatttccac

SEQ ID NO: 14716 - DNA, 50 bp, synthetic construct
  source 1..50: mol_type = other DNA
caatcaaaaactacraatacatattaaacaacracccccraactaacacc

SEQ ID NO: 14717 - DNA, 50 bp, synthetic construct
  source 1..50: mol_type = other DNA
aataatacacraaacttaaactacaactaactaataaaaaaacrcccctc

SEQ ID NO: 14718 - DNA, 50 bp, synthetic construct
  source 1..50: mol_type = other DNA
atattatttttatcctactataattttacccaattccacctataaaaaac

SEQ ID NO: 14719 - DNA, 50 bp, synthetic construct
  source 1..50: mol_type = other DNA
atactttacaattttaaaaacaatcaacattccttcaaaacctccrcacc

SEQ ID NO: 14720 - DNA, 50 bp, synthetic construct
  source 1..50: mol_type = other DNA
tccaatactccccaaatccaatactattcaaaataacctcaaaataaaac

SEQ ID NO: 14721 - DNA, 50 bp, synthetic construct
  source 1..50: mol_type = other DNA
aaatttaaaaatatcttctaaaattctctcccrtatcttcacaactttcc

SEQ ID NO: 14722 - DNA, 50 bp, synthetic construct
  source 1..50: mol_type = other DNA
ataaataatcccattaataaatttaaaaatatcttctaaaattctctccc

SEQ ID NO: 14723 - DNA, 50 bp, synthetic construct
  source 1..50: mol_type = other DNA
ccratacacactaaaaatattcaaaacttaccaattttatcctcaatttc

SEQ ID NO: 14724 - DNA, 50 bp, synthetic construct
  source 1..50: mol_type = other DNA
caccaattaaatttcttctaactttccaaaataacctaaatatttctatc

SEQ ID NO: 14725 - DNA, 50 bp, synthetic construct
  source 1..50: mol_type = other DNA
atccttaataaataaattcacaaaacaaatctactattatcacatacccc

SEQ ID NO: 14726 - DNA, 50 bp, synthetic construct
  source 1..50: mol_type = other DNA
acataaatttttaaattttaattctaaaaactcttatacattaccccaac

SEQ ID NO: 14727 - DNA, 50 bp, synthetic construct
  source 1..50: mol_type = other DNA
tttcacataaaatttcaattttataccacctactcccttcctcattcacc

SEQ ID NO: 14728 - DNA, 50 bp, synthetic construct
  source 1..50: mol_type = other DNA
ctaaaataaaactactcattatacaaataaaatcrctacaaccaataaac

SEQ ID NO: 14729 - DNA, 50 bp, synthetic construct
  source 1..50: mol_type = other DNA
caacaaaacrcaatcattactacacrtctaccaaaacacaaaacttaaac

SEQ ID NO: 14730 - DNA, 50 bp, synthetic construct
  source 1..50: mol_type = other DNA
atataaaaaatcrtattaacaacacraaattacctataacctactaatcc

SEQ ID NO: 14731 - DNA, 50 bp, synthetic construct
  source 1..50: mol_type = other DNA
tttacataaaacatttttaaaaaccraactaacaaaccataaataattcc

SEQ ID NO: 14732 - DNA, 50 bp, synthetic construct
  source 1..50: mol_type = other DNA
ccactttaacctttaaaccctaaaaatttcctctcctaatataaaaaatc

SEQ ID NO: 14733 - DNA, 50 bp, synthetic construct
  source 1..50: mol_type = other DNA
ctttatcctatcactaacacaaaaactaaattcttaaataactcraccac

SEQ ID NO: 14734 - DNA, 50 bp, synthetic construct
  source 1..50: mol_type = other DNA
aataaactttatcctatcactaacacaaaaactaaattcttaaataactc

SEQ ID NO: 14735 - DNA, 50 bp, synthetic construct
  source 1..50: mol_type = other DNA
ctaaaaattcaacttctataccaataataaaacaaaactcatcctctacc

SEQ ID NO: 14736 - DNA, 50 bp, synthetic construct
  source 1..50: mol_type = other DNA
acaaaatcaacaacaaacactatcaattaaacrtaacacctaatatctac

SEQ ID NO: 14737 - DNA, 50 bp, synthetic construct
  source 1..50: mol_type = other DNA
acatctatttaaataaaaaccacaccaacacrtaaaatttaactcccacc

SEQ ID NO: 14738 - DNA, 50 bp, synthetic construct
  source 1..50: mol_type = other DNA
taaaactaaaccactcacraaaatcctcccctacccattaattatatccc

SEQ ID NO: 14739 - DNA, 50 bp, synthetic construct
  source 1..50: mol_type = other DNA
actactaacctaaaaaccatcttcacacattttattaaaccctctcccac

SEQ ID NO: 14740 - DNA, 50 bp, synthetic construct
  source 1..50: mol_type = other DNA
aaactcaacraaaactctctactaaccccrataaaccttaaactcttaac

SEQ ID NO: 14741 - DNA, 50 bp, synthetic construct
  source 1..50: mol_type = other DNA
tcttttatttttcatctctaaatctttaaatctaattataaaaccaaaac

SEQ ID NO: 14742 - DNA, 50 bp, synthetic construct
  source 1..50: mol_type = other DNA
ttactctcctataaacctaacaaccttaatataatttaatataaactacc

SEQ ID NO: 14743 - DNA, 50 bp, synthetic construct
  source 1..50: mol_type = other DNA
taattaaaacrttaaactcraaatccaataaaatttccccrcacaaattc

SEQ ID NO: 14744 - DNA, 50 bp, synthetic construct
  source 1..50: mol_type = other DNA
cactatttcaaaaacccraaatataatttaaccaaaactaaaaaccactc

SEQ ID NO: 14745 - DNA, 50 bp, synthetic construct
  source 1..50: mol_type = other DNA
crcraatccaccaaaaataaaacracactaaacacaaatataaaactctc

SEQ ID NO: 14746 - DNA, 50 bp, synthetic construct
  source 1..50: mol_type = other DNA
ctctacccccaaaaacattatttcctcatctcaacaaaaatccaacaccc

SEQ ID NO: 14747 - DNA, 50 bp, synthetic construct
  source 1..50: mol_type = other DNA
atccatccacttcttccaaacacaacaaaaaaaaaccctctaaaaaaacc

SEQ ID NO: 14748 - DNA, 50 bp, synthetic construct
  source 1..50: mol_type = other DNA
aatttactcttcrcccaatacccacttcaactaaaaattcctaaaaaaac

SEQ ID NO: 14749 - DNA, 50 bp, synthetic construct
  source 1..50: mol_type = other DNA
aattaataaaccaaacccracacacraaaaacttaataaatcrttcatac

SEQ ID NO: 14750 - DNA, 50 bp, synthetic construct
  source 1..50: mol_type = other DNA
caatcaaaacaaatacaaaatataaaatcccrttccaaccaataaaaacc

SEQ ID NO: 14751 - DNA, 50 bp, synthetic construct
  source 1..50: mol_type = other DNA
crtaccctaaaacttatctataaaacacaaaaaataattaactaatttcc

SEQ ID NO: 14752 - DNA, 50 bp, synthetic construct
  source 1..50: mol_type = other DNA
crtacttccttcctaatctaactaactccctacttattataattaacrtc

SEQ ID NO: 14753 - DNA, 50 bp, synthetic construct
  source 1..50: mol_type = other DNA
tataaaaaatctttctactatttctccttatatcctcccttaacacaaac

SEQ ID NO: 14754 - DNA, 50 bp, synthetic construct
  source 1..50: mol_type = other DNA
taatcaaataactcaaaacaacraactccctaaaactactcaacataaac

SEQ ID NO: 14755 - DNA, 50 bp, synthetic construct
  source 1..50: mol_type = other DNA
aaaccataaatcaaccraaaacrcccatattaaacaatcccaaaaaaccc

SEQ ID NO: 14756 - DNA, 50 bp, synthetic construct
  source 1..50: mol_type = other DNA
taactaaaaatctaacttcacaccracccccaaaaataatacctctaccc

SEQ ID NO: 14757 - DNA, 50 bp, synthetic construct
  source 1..50: mol_type = other DNA
atatataactacctcctaaaaccracraataaattcctaaaactcaaaac

SEQ ID NO: 14758 - DNA, 50 bp, synthetic construct
  source 1..50: mol_type = other DNA
aaaatattaatttaattccrcaaacrctccctaatacctcctatattaac

SEQ ID NO: 14759 - DNA, 50 bp, synthetic construct
  source 1..50: mol_type = other DNA
cctatatccrctaaacrtataacrtacacacaaaatattaatttaattcc

SEQ ID NO: 14760 - DNA, 50 bp, synthetic construct
  source 1..50: mol_type = other DNA
aaaaaacaccaaaaaacrtctacraaattaaaccaacactctatatacac

SEQ ID NO: 14761 - DNA, 50 bp, synthetic construct
  source 1..50: mol_type = other DNA
acaaaaacraaaaccccaatataaaaaacctaaacctatatccrctaaac

SEQ ID NO: 14762 - DNA, 50 bp, synthetic construct
  source 1..50: mol_type = other DNA
aacaaaaatctaacccaaactaatcrataatctaaccaaaactcccaaac

SEQ ID NO: 14763 - DNA, 50 bp, synthetic construct
  source 1..50: mol_type = other DNA
aaaacaacaaaaaaatcaactttaactctccataatttcatctccaaccc

SEQ ID NO: 14764 - DNA, 50 bp, synthetic construct
  source 1..50: mol_type = other DNA
caaattataatatcataaaaccaaaaatctaaacaaaccccaaaaaaaac

SEQ ID NO: 14765 - DNA, 50 bp, synthetic construct
  source 1..50: mol_type = other DNA
tactataaaaaaaacctaaaactacaccatcctccaactaatactaaacc

SEQ ID NO: 14766 - DNA, 50 bp, synthetic construct
  source 1..50: mol_type = other DNA
ctcrcraaaccatacctaaaaactcraaataattcttttttcttcatttc

SEQ ID NO: 14767 - DNA, 50 bp, synthetic construct
  source 1..50: mol_type = other DNA
aactattaacccccaaattcctaatatacctaaaataacraaactactcc

SEQ ID NO: 14768 - DNA, 50 bp, synthetic construct
  source 1..50: mol_type = other DNA
aaaactactataaaaaaacctccaatcccctaacctaaactacaaaaacc

SEQ ID NO: 14769 - DNA, 50 bp, synthetic construct
  source 1..50: mol_type = other DNA
tataacccaaactaaactacaacracaccatcacaatttactacaacctc

SEQ ID NO: 14770 - DNA, 50 bp, synthetic construct
  source 1..50: mol_type = other DNA
taaaaccaaaactactctcacactcctaaactaaaataatcctccttacc

SEQ ID NO: 14771 - DNA, 50 bp, synthetic construct
  source 1..50: mol_type = other DNA
taaaattataaacataaattttcaaactcctaaaccacaacratccttcc

SEQ ID NO: 14772 - DNA, 50 bp, synthetic construct
  source 1..50: mol_type = other DNA
atttaaaaaacccacraacaaaactctataaaacccattcctaatcccac

SEQ ID NO: 14773 - DNA, 50 bp, synthetic construct
  source 1..50: mol_type = other DNA
cctacatcrttaatatatacaactaaactcaaactatttaaaaaacccac

SEQ ID NO: 14774 - DNA, 50 bp, synthetic construct
  source 1..50: mol_type = other DNA
taaacttcctaaacaacctaaattcaactacacacaccaacratataaac

SEQ ID NO: 14775 - DNA, 50 bp, synthetic construct
  source 1..50: mol_type = other DNA
caactacacacaccaacratataaacraattacaataaacaacaaaaaac

SEQ ID NO: 14776 - DNA, 50 bp, synthetic construct
  source 1..50: mol_type = other DNA
ccaaaaacacctaaaacttctacrtctctcttatcccctaaaactcctac

SEQ ID NO: 14777 - DNA, 50 bp, synthetic construct
  source 1..50: mol_type = other DNA
aaaaaaaacrcaaaaaccccaaatacctttaataaccaatactaaatttc

SEQ ID NO: 14778 - DNA, 50 bp, synthetic construct
  source 1..50: mol_type = other DNA
aaaaactcttataaaccaaataacaacraaaaaaataactcttattcccc

SEQ ID NO: 14779 - DNA, 50 bp, synthetic construct
  source 1..50: mol_type = other DNA
aactaaaactaaaaaacccctaaaaaaactcttataaaccaaataacaac

SEQ ID NO: 14780 - DNA, 50 bp, synthetic construct
  source 1..50: mol_type = other DNA
aatctttataaaaaatactcccccactcaatcaacctaaatatccctccc

SEQ ID NO: 14781 - DNA, 50 bp, synthetic construct
  source 1..50: mol_type = other DNA
ttataaaaatcaaatcaaatttctaaaaacaaaaaacccccaaatcctac

SEQ ID NO: 14782 - DNA, 50 bp, synthetic construct
  source 1..50: mol_type = other DNA
aaaaatcaaatcaaatttctaaaaacaaaaaacccccaaatcctacraac

SEQ ID NO: 14783 - DNA, 50 bp, synthetic construct
  source 1..50: mol_type = other DNA
tatcctccacactaaaaaatatactccaactaaaaataaacatatataac

SEQ ID NO: 14784 - DNA, 50 bp, synthetic construct
  source 1..50: mol_type = other DNA
aactcccacatacctactctattctaattaaaaatatcacaaaaaaaaac

SEQ ID NO: 14785 - DNA, 50 bp, synthetic construct
  source 1..50: mol_type = other DNA
aaaacrtaaaaatactaccaataaaaacatacracaaatacrcccccttc

SEQ ID NO: 14786 - DNA, 50 bp, synthetic construct
  source 1..50: mol_type = other DNA
caatcctaactactaaaaacccaaccccaaaaacaaacaaattaaaatcc

SEQ ID NO: 14787 - DNA, 50 bp, synthetic construct
  source 1..50: mol_type = other DNA
ctctaaaaactcctatatcctataaactaaataaacataaccaaaccttc

SEQ ID NO: 14788 - DNA, 50 bp, synthetic construct
  source 1..50: mol_type = other DNA
aaaaactcctatatcctataaactaaataaacataaccaaaccttcrctc

SEQ ID NO: 14789 - DNA, 50 bp, synthetic construct
  source 1..50: mol_type = other DNA
rcccctaatattcaatatacttaaaatattaattacraacccttttttcc

SEQ ID NO: 14790 - DNA, 50 bp, synthetic construct
  source 1..50: mol_type = other DNA
aaacaaaaaaccaactatactcaatttacaatacratcccrtccaaacac

SEQ ID NO: 14791 - DNA, 50 bp, synthetic construct
  source 1..50: mol_type = other DNA
tattttcctctaataaattccccrcaaaacctctacctcccttaacaaac

SEQ ID NO: 14792 - DNA, 50 bp, synthetic construct
  source 1..50: mol_type = other DNA
crccactatacttaaaacaaatacatcctatctaaaacttatactaaccc

SEQ ID NO: 14793 - DNA, 50 bp, synthetic construct
  source 1..50: mol_type = other DNA
cactatacttaaaacaaatacatcctatctaaaacttatactaacccrac

SEQ ID NO: 14794 - DNA, 50 bp, synthetic construct
  source 1..50: mol_type = other DNA
taacatccrataaaaaaataatcacacaaacccacaaaaccctacccaac

SEQ ID NO: 14795 - DNA, 50 bp, synthetic construct
  source 1..50: mol_type = other DNA
crataaaaaaataatcacacaaacccacaaaaccctacccaacractaac

SEQ ID NO: 14796 - DNA, 50 bp, synthetic construct
  source 1..50: mol_type = other DNA
aaaatacatattaaaattatcaactttctactactaaaaaaaaactccac

SEQ ID NO: 14797 - DNA, 50 bp, synthetic construct
  source 1..50: mol_type = other DNA
aaaaactttaaattactattacacaaataccttaaaccccaacaaatccc

SEQ ID NO: 14798 - DNA, 50 bp, synthetic construct
  source 1..50: mol_type = other DNA
aaactatatcactcataatatttttacatcaaaaataccatccttaaacc

SEQ ID NO: 14799 - DNA, 50 bp, synthetic construct
  source 1..50: mol_type = other DNA
tatatcactcataatatttttacatcaaaaataccatccttaaaccraac

SEQ ID NO: 14800 - DNA, 50 bp, synthetic construct
  source 1..50: mol_type = other DNA
cccrccaatacctaatcctaaaaaaaataccaacacctctctaaacaacc

SEQ ID NO: 14801 - DNA, 50 bp, synthetic construct
  source 1..50: mol_type = other DNA
ctaacractcctctcctaaccaattctccatctataaaataaactcttcc

SEQ ID NO: 14802 - DNA, 50 bp, synthetic construct
  source 1..50: mol_type = other DNA
taacaatccaaacataacaaaaactaccaaccaccaaatatttacccacc

SEQ ID NO: 14803 - DNA, 50 bp, synthetic construct
  source 1..50: mol_type = other DNA
taaactcacctaactacccaactaccctataacaccaatataaaaacaac

SEQ ID NO: 14804 - DNA, 50 bp, synthetic construct
  source 1..50: mol_type = other DNA
taccctatctcacctacractataaattctctacaaccaaacctcaaaac

SEQ ID NO: 14805 - DNA, 50 bp, synthetic construct
  source 1..50: mol_type = other DNA
aaaaataacaaaataaacraatcccctacctaatcaacctacctataccc

SEQ ID NO: 14806 - DNA, 50 bp, synthetic construct
  source 1..50: mol_type = other DNA
aaataaaacaaaacaaacraacacaaacaaactaaccaaacaaaaaaccc

SEQ ID NO: 14807 - DNA, 50 bp, synthetic construct
  source 1..50: mol_type = other DNA
taaccacactaaaaaaccccacaaatacaaaaaaatatccrtaaatctcc

SEQ ID NO: 14808 - DNA, 50 bp, synthetic construct
  source 1..50: mol_type = other DNA
aaaccacrtataaccacactaaaaaaccccacaaatacaaaaaaatatcc

SEQ ID NO: 14809 - DNA, 50 bp, synthetic construct
  source 1..50: mol_type = other DNA
aattcacraacacctctctatacctataaaactccccaatataatcacac

SEQ ID NO: 14810 - DNA, 50 bp, synthetic construct
  source 1..50: mol_type = other DNA
ctctatacctataaaactccccaatataatcacacrtaactcaaaaaacc

SEQ ID NO: 14811 - DNA, 50 bp, synthetic construct
  source 1..50: mol_type = other DNA
tataatcacacrtaactcaaaaaaccraaacataatacacaaaaatatcc

SEQ ID NO: 14812 - DNA, 50 bp, synthetic construct
  source 1..50: mol_type = other DNA
cacrtaactcaaaaaaccraaacataatacacaaaaatatccraatcccc

SEQ ID NO: 14813 - DNA, 50 bp, synthetic construct
  source 1..50: mol_type = other DNA
aaacacttccrcttaaccctcaaaaaaaacaactataaaaaaaccaactc

SEQ ID NO: 14814 - DNA, 50 bp, synthetic construct
  source 1..50: mol_type = other DNA
ttccctttatctaaccttaatccttcctactacacrcaaaaaacacttcc

SEQ ID NO: 14815 - DNA, 50 bp, synthetic construct
  source 1..50: mol_type = other DNA
tcattcccctctccttccaataaaaaccccttaacaacaaaaaaataaac

SEQ ID NO: 14816 - DNA, 50 bp, synthetic construct
  source 1..50: mol_type = other DNA
ataacatataatccaaaacctactcctcctaactataaaaactactcccc

SEQ ID NO: 14817 - DNA, 50 bp, synthetic construct
  source 1..50: mol_type = other DNA
atatctataacctcaaacaaaacctataccaacctaaacctatctccacc

SEQ ID NO: 14818 - DNA, 50 bp, synthetic construct
  source 1..50: mol_type = other DNA
aaacaaaacctataccaacctaaacctatctccaccracaaaaactatac

SEQ ID NO: 14819 - DNA, 50 bp, synthetic construct
  source 1..50: mol_type = other DNA
aacrtataccaaccacaaaaactactaaaaaaccctcttactcttactac

SEQ ID NO: 14820 - DNA, 50 bp, synthetic construct
  source 1..50: mol_type = other DNA
aacaaaaatacccaaaataacttctctatcctaactatacacraccacac

SEQ ID NO: 14821 - DNA, 50 bp, synthetic construct
  source 1..50: mol_type = other DNA
ctatatctaacaaaaatacccaaaataacttctctatcctaactatacac

SEQ ID NO: 14822 - DNA, 50 bp, synthetic construct
  source 1..50: mol_type = other DNA
craaaatacttattacaaaaaattaactcacrcaataacaaacaaatccc

SEQ ID NO: 14823 - DNA, 50 bp, synthetic construct
  source 1..50: mol_type = other DNA
craaacttacctatcattacrtaaaccaactccctataacaaacatctcc

SEQ ID NO: 14824 - DNA, 50 bp, synthetic construct
  source 1..50: mol_type = other DNA
ctaaacaaaattctaccraaacacaaaactcrtaaaatatatatacacac

SEQ ID NO: 14825 - DNA, 50 bp, synthetic construct
  source 1..50: mol_type = other DNA
cacacattctacraattctatatttcracaaaaccctacccaataaactc

SEQ ID NO: 14826 - DNA, 50 bp, synthetic construct
  source 1..50: mol_type = other DNA
actataattatctcttttattaatcaataaatctctaaaaacttctcttc

SEQ ID NO: 14827 - DNA, 50 bp, synthetic construct
  source 1..50: mol_type = other DNA
ttttcttctataccaaccaatactaacctaaaattaaactaaaaaaaacc

SEQ ID NO: 14828 - DNA, 50 bp, synthetic construct
  source 1..50: mol_type = other DNA
acattaaaaaatttattatttataccctttcaaaaacctattttatcacc

SEQ ID NO: 14829 - DNA, 50 bp, synthetic construct
  source 1..50: mol_type = other DNA
ccrcaaataaaatcaactattaaaaaatcataacaaatcacacccacacc

SEQ ID NO: 14830 - DNA, 50 bp, synthetic construct
  source 1..50: mol_type = other DNA
acratataaatataacttactataactttttaacaactaactccacctac

SEQ ID NO: 14831 - DNA, 50 bp, synthetic construct
  source 1..50: mol_type = other DNA
ataaaaacacacracrtcaaaaacctcctaactctttcacactaaactac

SEQ ID NO: 14832 - DNA, 50 bp, synthetic construct
  source 1..50: mol_type = other DNA
atactatatataaatacccttcctatccttaaaaaccaaactataaaacc

SEQ ID NO: 14833 - DNA, 50 bp, synthetic construct
  source 1..50: mol_type = other DNA
cactcaacacctaactacctaaaacaaccraaaaacctaaaaataacaac

SEQ ID NO: 14834 - DNA, 50 bp, synthetic construct
  source 1..50: mol_type = other DNA
aactacctaaaacaaccraaaaacctaaaaataacaacrcaccraaaaac

SEQ ID NO: 14835 - DNA, 50 bp, synthetic construct
  source 1..50: mol_type = other DNA
aaaatcrcaaacaccttccctacaaacrataaaccaaaaatatataaaac

SEQ ID NO: 14836 - DNA, 50 bp, synthetic construct
  source 1..50: mol_type = other DNA
acctaaaatcttactaaaaacacctcratttccctaccctaacattcatc

SEQ ID NO: 14837 - DNA, 50 bp, synthetic construct
  source 1..50: mol_type = other DNA
tacctacctccttaactaaaaccctctcactaactctaaaacatccaaac

SEQ ID NO: 14838 - DNA, 50 bp, synthetic construct
  source 1..50: mol_type = other DNA
aaaaataacataaaataaaaacacttactatatctattcattaaaactac

SEQ ID NO: 14839 - DNA, 50 bp, synthetic construct
  source 1..50: mol_type = other DNA
acaacataaataacctcaaaaaaaatatcctaacaaccataacacaaaac

SEQ ID NO: 14840 - DNA, 50 bp, synthetic construct
  source 1..50: mol_type = other DNA
tcaaacttccaaccaactaaattctcatttcctacracctaacaaatacc

SEQ ID NO: 14841 - DNA, 50 bp, synthetic construct
  source 1..50: mol_type = other DNA
ataaaacttcraacraatctactctactctttcctccaactaaacaaatc

SEQ ID NO: 14842 - DNA, 50 bp, synthetic construct
  source 1..50: mol_type = other DNA
tcctcaaaaaatatatctactacactaaatcactcacctaatttaatacc

SEQ ID NO: 14843 - DNA, 50 bp, synthetic construct
  source 1..50: mol_type = other DNA
ccaaataaataactcaatacaacaaacacactccctaaaaacccattccc

SEQ ID NO: 14844 - DNA, 50 bp, synthetic construct
  source 1..50: mol_type = other DNA
ctattccccaacctaaaacccaataactaaaccacatcaaaacttaacac

SEQ ID NO: 14845 - DNA, 50 bp, synthetic construct
  source 1..50: mol_type = other DNA
aatatcatctcaaaaaacrtcttcctcttcccaaactttttcaccttccc

SEQ ID NO: 14846 - DNA, 50 bp, synthetic construct
  source 1..50: mol_type = other DNA
attaataaaaacaacracctcraataccacccatttatttaccaaccaac

SEQ ID NO: 14847 - DNA, 50 bp, synthetic construct
  source 1..50: mol_type = other DNA
aatctaaaaaaccctaatcaaaaaatacaaccacctacrtctaaacttcc

SEQ ID NO: 14848 - DNA, 50 bp, synthetic construct
  source 1..50: mol_type = other DNA
acattaatttttaatctaaaaaaccctaatcaaaaaatacaaccacctac

SEQ ID NO: 14849 - DNA, 50 bp, synthetic construct
  source 1..50: mol_type = other DNA
ctatatccctaaatttcttaccttaatatactaaaacaatcaaatcacac

SEQ ID NO: 14850 - DNA, 50 bp, synthetic construct
  source 1..50: mol_type = other DNA
aaactaccraaaaaacctatactttacttatcaccaacaaaacraaaaac

SEQ ID NO: 14851 - DNA, 50 bp, synthetic construct
  source 1..50: mol_type = other DNA
taaaacaaaactaccraaaaaacctatactttacttatcaccaacaaaac

SEQ ID NO: 14852 - DNA, 50 bp, synthetic construct
  source 1..50: mol_type = other DNA
cttccctacttcrtaacacacaaaaccaaatttccccraaataatctaac

SEQ ID NO: 14853 - DNA, 50 bp, synthetic construct
  source 1..50: mol_type = other DNA
tctttaaacaaacaaacccaaaatataaaacccaaattcccaaaacaaac

SEQ ID NO: 14854 - DNA, 50 bp, synthetic construct
  source 1..50: mol_type = other DNA
caaaattaaaactaaccccacttccttcattcccrattacttacttttcc

SEQ ID NO: 14855 - DNA, 50 bp, synthetic construct
  source 1..50: mol_type = other DNA
tatataccaataacaacccaaacccaataaaatccaaccacttatccacc

SEQ ID NO: 14856 - DNA, 50 bp, synthetic construct
  source 1..50: mol_type = other DNA
actaaacctaaactatcactaatacacaaaaaacactaaactaaaactac

SEQ ID NO: 14857 - DNA, 50 bp, synthetic construct
  source 1..50: mol_type = other DNA
ataaataaaaaacccaaaaaaatatcccctaaaatacattatctaatccc

SEQ ID NO: 14858 - DNA, 50 bp, synthetic construct
  source 1..50: mol_type = other DNA
tactataaaatcraaactttttaaactaaaaacraaacrctcaaataccc

SEQ ID NO: 14859 - DNA, 50 bp, synthetic construct
  source 1..50: mol_type = other DNA
aataaacccacctactataaaatcraaactttttaaactaaaaacraaac

SEQ ID NO: 14860 - DNA, 50 bp, synthetic construct
  source 1..50: mol_type = other DNA
taaataataaacccacctactataaaatcraaactttttaaactaaaaac

SEQ ID NO: 14861 - DNA, 50 bp, synthetic construct
  source 1..50: mol_type = other DNA
craaactcctaaataacttaataaataataaacccacctactataaaatc

SEQ ID NO: 14862 - DNA, 50 bp, synthetic construct
  source 1..50: mol_type = other DNA
aaaaaaataatcaaaatatacccrtaaaaactatacttcccctaaacccc

SEQ ID NO: 14863 - DNA, 50 bp, synthetic construct
  source 1..50: mol_type = other DNA
aacctccaaactactcatattaatttaaaaaaaataatcaaaatataccc

SEQ ID NO: 14864 - DNA, 50 bp, synthetic construct
  source 1..50: mol_type = other DNA
cttcaataaaccataataataccactacacaccaacctaaacracaaaac

SEQ ID NO: 14865 - DNA, 50 bp, synthetic construct
  source 1..50: mol_type = other DNA
aataaaaacttcaataaaccataataataccactacacaccaacctaaac

SEQ ID NO: 14866 - DNA, 50 bp, synthetic construct
  source 1..50: mol_type = other DNA
cactaaaacctctacctcttaaattcaaataatcctcccacctcaacctc

SEQ ID NO: 14867 - DNA, 50 bp, synthetic construct
  source 1..50: mol_type = other DNA
atataacaataaatccccaaaaatctaaaaaaatactaacacaaacatcc

SEQ ID NO: 14868 - DNA, 50 bp, synthetic construct
  source 1..50: mol_type = other DNA
aaaaacaaaaaacacraaatacctaaaaaacctaaaaacaaaactcaacc

SEQ ID NO: 14869 - DNA, 50 bp, synthetic construct
  source 1..50: mol_type = other DNA
tcaaaaaaactatcatttaccaaaaccccraacctctaaacaacaaaacc

SEQ ID NO: 14870 - DNA, 50 bp, synthetic construct
  source 1..50: mol_type = other DNA
ttaaccctcrtttcaattactccracacaaaactaaaaaacctattttac

SEQ ID NO: 14871 - DNA, 50 bp, synthetic construct
  source 1..50: mol_type = other DNA
ctaacatctatcrcataatttcctcatttaaccctcrtttcaattactcc

SEQ ID NO: 14872 - DNA, 50 bp, synthetic construct
  source 1..50: mol_type = other DNA
ctaaacrtaaataatttcacaaaacctactatatctaaaaaaaaccatac

SEQ ID NO: 14873 - DNA, 50 bp, synthetic construct
  source 1..50: mol_type = other DNA
aaacttaaaaattaaaaaccaaccttaccaacataacaccaccacccccc

SEQ ID NO: 14874 - DNA, 50 bp, synthetic construct
  source 1..50: mol_type = other DNA
aataataatactatattaacaaaactaatctccaactcctaaactcaaac

SEQ ID NO: 14875 - DNA, 50 bp, synthetic construct
  source 1..50: mol_type = other DNA
aataactatacrtaatcaaaaaactacacrcccaaaatcaaccaaccaac

SEQ ID NO: 14876 - DNA, 50 bp, synthetic construct
  source 1..50: mol_type = other DNA
aaaaaatcacctaccaacctcaataactatacrtaatcaaaaaactacac

SEQ ID NO: 14877 - DNA, 50 bp, synthetic construct
  source 1..50: mol_type = other DNA
aaaaaaaacccrttaattaactaaccttaaacrtacaattccttaactac

SEQ ID NO: 14878 - DNA, 50 bp, synthetic construct
  source 1..50: mol_type = other DNA
ttttttaaataacaaacaaaccrcatatatttcaatatcatcaataaccc

SEQ ID NO: 14879 - DNA, 50 bp, synthetic construct
  source 1..50: mol_type = other DNA
ttattaataatactaaaacacatacracttatttatcatttaaaaaaacc

SEQ ID NO: 14880 - DNA, 50 bp, synthetic construct
  source 1..50: mol_type = other DNA
aacacatacracttatttatcatttaaaaaaaccrtacatcttaaatttc

SEQ ID NO: 14881 - DNA, 50 bp, synthetic construct
  source 1..50: mol_type = other DNA
cctacaaccacaaacccactaaacaaatataaaactaacaactactctcc

SEQ ID NO: 14882 - DNA, 50 bp, synthetic construct
  source 1..50: mol_type = other DNA
taacatcaaaaaatccccaatcaacaaacccaactaaatcccttactaac

SEQ ID NO: 14883 - DNA, 50 bp, synthetic construct
  source 1..50: mol_type = other DNA
aaaaaatccccaatcaacaaacccaactaaatcccttactaacraaaccc

SEQ ID NO: 14884 - DNA, 50 bp, synthetic construct
  source 1..50: mol_type = other DNA
ctaaaactaaataaacatcaaaaaattatcccttaatcaaaacattaccc

SEQ ID NO: 14885 - DNA, 50 bp, synthetic construct
  source 1..50: mol_type = other DNA
ccaaaaaacaactataaaataactacaatactaataactacaccctacrc

SEQ ID NO: 14886 - DNA, 50 bp, synthetic construct
  source 1..50: mol_type = other DNA
ttaccatacaactaacctaattaaccraaccaaactaaacataaaatccc

SEQ ID NO: 14887 - DNA, 50 bp, synthetic construct
  source 1..50: mol_type = other DNA
atacccaacctaacccrattaaccaaaccaactatataataataaacrac

SEQ ID NO: 14888 - DNA, 50 bp, synthetic construct
  source 1..50: mol_type = other DNA
aaaaaaaataaatcaccaaacattatccrccaactttatcctaaactaac

SEQ ID NO: 14889 - DNA, 50 bp, synthetic construct
  source 1..50: mol_type = other DNA
aactaacraacaatacctaataattcatcctccctccaaaccctttatcc

SEQ ID NO: 14890 - DNA, 50 bp, synthetic construct
  source 1..50: mol_type = other DNA
aaaaccaaatctcaatcactcraaattaaaaacaaaaaccttcrctaaac

SEQ ID NO: 14891 - DNA, 50 bp, synthetic construct
  source 1..50: mol_type = other DNA
actctaacccaaataacactaaaataaaacacttaaacccttctcaacac

SEQ ID NO: 14892 - DNA, 50 bp, synthetic construct
  source 1..50: mol_type = other DNA
aactaatctactaaaatctcaaccaaaaaataaccacctccaaaaaaccc

SEQ ID NO: 14893 - DNA, 50 bp, synthetic construct
  source 1..50: mol_type = other DNA
aactaaaccaaaacraaaccctattataaaccttcctaacataaaacrac

SEQ ID NO: 14894 - DNA, 50 bp, synthetic construct
  source 1..50: mol_type = other DNA
acaaactaaaccaaaacraaaccctattataaaccttcctaacataaaac

SEQ ID NO: 14895 - DNA, 50 bp, synthetic construct
  source 1..50: mol_type = other DNA
taccraaatccttactatctttattttttactctcaactccaacaaaacc

SEQ ID NO: 14896 - DNA, 50 bp, synthetic construct
  source 1..50: mol_type = other DNA
acttcctccttcaaaccaacatttctcctatttatttattaaataaaacc

SEQ ID NO: 14897 - DNA, 50 bp, synthetic construct
  source 1..50: mol_type = other DNA
ctaaaaaattcraaaactacccctccctcaacctcaaccaaacctaaaac

SEQ ID NO: 14898 - DNA, 50 bp, synthetic construct
  source 1..50: mol_type = other DNA
aaaccraacracaacaacacaaattaaatacraccaaaacttataaatac

SEQ ID NO: 14899 - DNA, 50 bp, synthetic construct
  source 1..50: mol_type = other DNA
rtaatccattctaataaccttctctccttaaaattctcctacrtcaactc

SEQ ID NO: 14900 - DNA, 50 bp, synthetic construct
  source 1..50: mol_type = other DNA
ttctcataaaaatatacaaaaacaaaatcatacacatataacraactaac

SEQ ID NO: 14901 - DNA, 50 bp, synthetic construct
  source 1..50: mol_type = other DNA
aacactacctatattaaacraacacacatcctcctcctctataacaaaac

SEQ ID NO: 14902 - DNA, 50 bp, synthetic construct
  source 1..50: mol_type = other DNA
ctactacaaaactaaacctctacctaaaactctaaaaaaccrataatcac

SEQ ID NO: 14903 - DNA, 50 bp, synthetic construct
  source 1..50: mol_type = other DNA
acaataaaaaaaacatcraaaataccaaaataaacrtaccccaaaaaccc

SEQ ID NO: 14904 - DNA, 50 bp, synthetic construct
  source 1..50: mol_type = other DNA
acacatcatacctccttccacaccctaacaaaaaacaactaaaaaaaacc

SEQ ID NO: 14905 - DNA, 50 bp, synthetic construct
  source 1..50: mol_type = other DNA
catacctaacccaactaaaaccctacaaaaaaactacctctacttccttc

SEQ ID NO: 14906 - DNA, 50 bp, synthetic construct
  source 1..50: mol_type = other DNA
ttactactacaaaaaataaactcaataataacttcaacaacaccaaaaac

SEQ ID NO: 14907 - DNA, 50 bp, synthetic construct
  source 1..50: mol_type = other DNA
caaaacrctacaacrtttcaaattaaaaaaccaaccttaaacacacacac

SEQ ID NO: 14908 - DNA, 50 bp, synthetic construct
  source 1..50: mol_type = other DNA
tttcaaattaaaaaaccaaccttaaacacacacacraccraaaaacaacc

SEQ ID NO: 14909 - DNA, 50 bp, synthetic construct
  source 1..50: mol_type = other DNA
taatactttcacctaataattcatcrtaactcctccacraaacacaaaac

SEQ ID NO: 14910 - DNA, 50 bp, synthetic construct
  source 1..50: mol_type = other DNA
acrcccaaaataatcacraaacttataatactttcacctaataattcatc

SEQ ID NO: 14911 - DNA, 50 bp, synthetic construct
  source 1..50: mol_type = other DNA
acctaaaaaactacttctacaccttctacaaatcaacaaaaatataaacc

SEQ ID NO: 14912 - DNA, 50 bp, synthetic construct
  source 1..50: mol_type = other DNA
aactataactcaccctatttcaaccctataaactaaaaatcctacractc

SEQ ID NO: 14913 - DNA, 50 bp, synthetic construct
  source 1..50: mol_type = other DNA
aaaacrcaaatacaaaacaaaaaatctataaaccraaaacccctacaaac

SEQ ID NO: 14914 - DNA, 50 bp, synthetic construct
  source 1..50: mol_type = other DNA
acctcraaaaaatcacctaaaaacaacaaatacttcctaccctaccatcc

SEQ ID NO: 14915 - DNA, 50 bp, synthetic construct
  source 1..50: mol_type = other DNA
ctcaaaactttaaaaataccaaccccaaaaccaataatcaaaaaactaac

SEQ ID NO: 14916 - DNA, 50 bp, synthetic construct
  source 1..50: mol_type = other DNA
catataacactaaatcttattttcttctaactaaaacaataccaaaaacc

SEQ ID NO: 14917 - DNA, 50 bp, synthetic construct
  source 1..50: mol_type = other DNA
tcctaaatatataactcaacraattttcacaaaataaacacacccaaatc

SEQ ID NO: 14918 - DNA, 50 bp, synthetic construct
  source 1..50: mol_type = other DNA
taatctaaatatcactaaacracctaaatatattcactttataaaaatcc

SEQ ID NO: 14919 - DNA, 50 bp, synthetic construct
  source 1..50: mol_type = other DNA
cctcaaaacaaaaaacaaaccctcatttaataaaccacraaccaaaaatc

SEQ ID NO: 14920 - DNA, 50 bp, synthetic construct
  source 1..50: mol_type = other DNA
acccattaaataaaaacctacctcttaccttaaaaaacccatctattatc

SEQ ID NO: 14921 - DNA, 50 bp, synthetic construct
  source 1..50: mol_type = other DNA
ttaaaaaacccatctattatcrtctctactatctataatctctataaccc

SEQ ID NO: 14922 - DNA, 50 bp, synthetic construct
  source 1..50: mol_type = other DNA
tctactatctataatctctataacccrtacatccatcctaacttataacc

SEQ ID NO: 14923 - DNA, 50 bp, synthetic construct
  source 1..50: mol_type = other DNA
taccaaaaaaaacaaatactatcctataaacaaaaatacrtcaccraaac

SEQ ID NO: 14924 - DNA, 50 bp, synthetic construct
  source 1..50: mol_type = other DNA
tactataccaaaaaaaacaaatactatcctataaacaaaaatacrtcacc

SEQ ID NO: 14925 - DNA, 50 bp, synthetic construct
  source 1..50: mol_type = other DNA
ctaaaatactataccaaaaaaaacaaatactatcctataaacaaaaatac

SEQ ID NO: 14926 - DNA, 50 bp, synthetic construct
  source 1..50: mol_type = other DNA
aacaaacraaacracaaacacaaaaccrtaataatataattaatatcaac

SEQ ID NO: 14927 - DNA, 50 bp, synthetic construct
  source 1..50: mol_type = other DNA
ctaccaaacaaaaacctatttattttcccaatctcatttcaacttctatc

SEQ ID NO: 14928 - DNA, 50 bp, synthetic construct
  source 1..50: mol_type = other DNA
ccaaaatctatcttcatttcaaacatccattaaaacaactccattacttc

SEQ ID NO: 14929 - DNA, 50 bp, synthetic construct
  source 1..50: mol_type = other DNA
aacaactccattacttcrcaactaactatttatatatctatctcctcccc

SEQ ID NO: 14930 - DNA, 50 bp, synthetic construct
  source 1..50: mol_type = other DNA
tataattcacraaacaaccaataccataaatatataatctactccctacc

SEQ ID NO: 14931 - DNA, 50 bp, synthetic construct
  source 1..50: mol_type = other DNA
tcacataaccrataaaaaacaaaccacacactcataacactaactattcc

SEQ ID NO: 14932 - DNA, 50 bp, synthetic construct
  source 1..50: mol_type = other DNA
acttcctctattaacttacctatcccaaaaaaacattttaataattcaac

SEQ ID NO: 14933 - DNA, 50 bp, synthetic construct
  source 1..50: mol_type = other DNA
atatccttctaaaacaaacaaatcaacaaaaaaaatacccaatctacccc

SEQ ID NO: 14934 - DNA, 50 bp, synthetic construct
  source 1..50: mol_type = other DNA
aaacctaaaaatctcaaacaaaaatcraaaatatctaaacaaaactaaac

SEQ ID NO: 14935 - DNA, 50 bp, synthetic construct
  source 1..50: mol_type = other DNA
tatcttaaaaaaattttaaatacatctcrtttcatacaacaccaaacatc

SEQ ID NO: 14936 - DNA, 50 bp, synthetic construct
  source 1..50: mol_type = other DNA
aaaattttaaatacatctcrtttcatacaacaccaaacatcrttcataac

SEQ ID NO: 14937 - DNA, 50 bp, synthetic construct
  source 1..50: mol_type = other DNA
attcattacccaaacccttatttattaacatatatattttattacaatac

SEQ ID NO: 14938 - DNA, 50 bp, synthetic construct
  source 1..50: mol_type = other DNA
aataaaacacacatactaataaataaaaacctaaacaataaatccaactc

SEQ ID NO: 14939 - DNA, 50 bp, synthetic construct
  source 1..50: mol_type = other DNA
ccctacaacctataaaaacccaacaaaaatatccaaacatatctattttc

SEQ ID NO: 14940 - DNA, 50 bp, synthetic construct
  source 1..50: mol_type = other DNA
aataaatatatctaaatatctctactaaatttccacaaactacaaaacac

SEQ ID NO: 14941 - DNA, 50 bp, synthetic construct
  source 1..50: mol_type = other DNA
ctccaattaaacaactaaaaacaatcratctccctaacatactaccraac

SEQ ID NO: 14942 - DNA, 50 bp, synthetic construct
  source 1..50: mol_type = other DNA
aattctccaattaaacaactaaaaacaatcratctccctaacatactacc

SEQ ID NO: 14943 - DNA, 50 bp, synthetic construct
  source 1..50: mol_type = other DNA
atataatattcccctccctatatccacraatctcaacattcttaacaacc

SEQ ID NO: 14944 - DNA, 50 bp, synthetic construct
  source 1..50: mol_type = other DNA
aaaccttcaaactaccacctacccaacractattaaaaatactaaaatcc

SEQ ID NO: 14945 - DNA, 50 bp, synthetic construct
  source 1..50: mol_type = other DNA
tacraaaaaattataaaacccaaaaaaatcacaaaccraactaatactcc

SEQ ID NO: 14946 - DNA, 50 bp, synthetic construct
  source 1..50: mol_type = other DNA
acttttttctaatacaacctcaaattccttatctacaatctcaatcttac

SEQ ID NO: 14947 - DNA, 50 bp, synthetic construct
  source 1..50: mol_type = other DNA
aaaaacaacrctccaccctaaataaattcatcacacaatctatatatacc

SEQ ID NO: 14948 - DNA, 50 bp, synthetic construct
  source 1..50: mol_type = other DNA
tctaaccacratatacacaaactatataataaacctactcaaaataaaac

SEQ ID NO: 14949 - DNA, 50 bp, synthetic construct
  source 1..50: mol_type = other DNA
aaaccaaactcttctaaaaataacacrcttatttaaatccatcaataaac

SEQ ID NO: 14950 - DNA, 50 bp, synthetic construct
  source 1..50: mol_type = other DNA
caccaaatacaaaaccactcacacacrcccactaataaatttaaacaaac

SEQ ID NO: 14951 - DNA, 50 bp, synthetic construct
  source 1..50: mol_type = other DNA
atcraacctaaaaaaacctcctaaaaaaaataactttcaaacctaaaacc

SEQ ID NO: 14952 - DNA, 50 bp, synthetic construct
  source 1..50: mol_type = other DNA
acctcctaaaaaaaataactttcaaacctaaaaccrctaaaacctactcc

SEQ ID NO: 14953 - DNA, 50 bp, synthetic construct
  source 1..50: mol_type = other DNA
aaaataactttcaaacctaaaaccrctaaaacctactccraatttcaatc

SEQ ID NO: 14954 - DNA, 50 bp, synthetic construct
  source 1..50: mol_type = other DNA
aaataaaaactttactaaacrataatactcaaaaacrctcaaaaaaacac

SEQ ID NO: 14955 - DNA, 50 bp, synthetic construct
  source 1..50: mol_type = other DNA
cttccttatctttttctaacctttcrcattttttaatctcatttcctatc

SEQ ID NO: 14956 - DNA, 50 bp, synthetic construct
  source 1..50: mol_type = other DNA
ctccacrccaacacrataataaaataaatttcaaaatatcctttcccccc

SEQ ID NO: 14957 - DNA, 50 bp, synthetic construct
  source 1..50: mol_type = other DNA
tctcataaacatacaatcrttttacacatttcrtacaaaaatacctccac

SEQ ID NO: 14958 - DNA, 50 bp, synthetic construct
  source 1..50: mol_type = other DNA
tcattttaatcrtaatattctcataaacatacaatcrttttacacatttc

SEQ ID NO: 14959 - DNA, 50 bp, synthetic construct
  source 1..50: mol_type = other DNA
aaaaaaccctaaattcattttaatcrtaatattctcataaacatacaatc

SEQ ID NO: 14960 - DNA, 50 bp, synthetic construct
  source 1..50: mol_type = other DNA
taaaactatcctcaaaacttaaatcaaaaaaccctaaattcattttaatc

SEQ ID NO: 14961 - DNA, 50 bp, synthetic construct
  source 1..50: mol_type = other DNA
taaaccttaaaaacaactccaaataatcctataaaaactctattttctac

SEQ ID NO: 14962 - DNA, 50 bp, synthetic construct
  source 1..50: mol_type = other DNA
rccacactataaataaatataacrtaccaattaccctaatattaattaac

SEQ ID NO: 14963 - DNA, 50 bp, synthetic construct
  source 1..50: mol_type = other DNA
cttaaccaccattttcttcccccrttaatcaacattaaaataattaacac

SEQ ID NO: 14964 - DNA, 50 bp, synthetic construct
  source 1..50: mol_type = other DNA
acacacatttctaatcattactataattttttcattatttataaaaaacc

SEQ ID NO: 14965 - DNA, 50 bp, synthetic construct
  source 1..50: mol_type = other DNA
atactaataatacaatccccraaaacaaacaaaacatccattacacrctc

SEQ ID NO: 14966 - DNA, 50 bp, synthetic construct
  source 1..50: mol_type = other DNA
cctaaaacrttttaaaacctaatcaattacatactaataatacaatcccc

SEQ ID NO: 14967 - DNA, 50 bp, synthetic construct
  source 1..50: mol_type = other DNA
ccaacatataactaattaaactttaaaacrctctaaattacctaaaaccc

SEQ ID NO: 14968 - DNA, 50 bp, synthetic construct
  source 1..50: mol_type = other DNA
cctaaaacccraaaaatacttcatcacctctaaatctattctcctctacc

SEQ ID NO: 14969 - DNA, 50 bp, synthetic construct
  source 1..50: mol_type = other DNA
aaacttaacaaaaatccaatatttacttttaattccccctatttaaaaac

SEQ ID NO: 14970 - DNA, 50 bp, synthetic construct
  source 1..50: mol_type = other DNA
tttacttttaattccccctatttaaaaacraaaaatatttaaccctactc

SEQ ID NO: 14971 - DNA, 50 bp, synthetic construct
  source 1..50: mol_type = other DNA
actcaaacattatatactaaaaaacaaacataactcaaaactatttatac

SEQ ID NO: 14972 - DNA, 50 bp, synthetic construct
  source 1..50: mol_type = other DNA
accaattatataaactacaacattcrtatttttaataaaccctaacttac

SEQ ID NO: 14973 - DNA, 50 bp, synthetic construct
  source 1..50: mol_type = other DNA
tttttaacacacaatatttaaatacrcaaatcaaaactcattaaaaacac

SEQ ID NO: 14974 - DNA, 50 bp, synthetic construct
  source 1..50: mol_type = other DNA
aaaataccaatcaataaaacccaaaccrtctcaattccactctaaaacac

SEQ ID NO: 14975 - DNA, 50 bp, synthetic construct
  source 1..50: mol_type = other DNA
aaaacccaatctaaatcactcaattccactataaatacatcrtaaaaccc

SEQ ID NO: 14976 - DNA, 50 bp, synthetic construct
  source 1..50: mol_type = other DNA
aaaaaccccataacaaattcttaataataatccccaattaaaaaaacctc

SEQ ID NO: 14977 - DNA, 50 bp, synthetic construct
  source 1..50: mol_type = other DNA
cccataacaaattcttaataataatccccaattaaaaaaacctcratttc

SEQ ID NO: 14978 - DNA, 50 bp, synthetic construct
  source 1..50: mol_type = other DNA
ccttcctctaaatttttcccaaatcaacaaatatctttaattactaaaac

SEQ ID NO: 14979 - DNA, 50 bp, synthetic construct
  source 1..50: mol_type = other DNA
tcttactataaataaatccracacaaccratttcaaactcccaatataac

SEQ ID NO: 14980 - DNA, 50 bp, synthetic construct
  source 1..50: mol_type = other DNA
ctaaaaaaaccataaacctatcataaaaaaaaattcaaacaaccttcttc

SEQ ID NO: 14981 - DNA, 50 bp, synthetic construct
  source 1..50: mol_type = other DNA
acaaaaaattaactaaacatactaacaaatacccataatcccaaatactc

SEQ ID NO: 14982 - DNA, 50 bp, synthetic construct
  source 1..50: mol_type = other DNA
raaaaaaataaatcataaaatcaaaaaatccaaaccatcctaactaacac

SEQ ID NO: 14983 - DNA, 50 bp, synthetic construct
  source 1..50: mol_type = other DNA
aaaatctcaaccatattacccaaattaatctaaaactcctactctcaaac

SEQ ID NO: 14984 - DNA, 50 bp, synthetic construct
  source 1..50: mol_type = other DNA
tccattcrcaactatcaaacraataattaataaccaacaaatttaaaatc

SEQ ID NO: 14985 - DNA, 50 bp, synthetic construct
  source 1..50: mol_type = other DNA
tataaaacaaacraacrcttcctaaactaaaacctaacrataaaaacccc

SEQ ID NO: 14986 - DNA, 50 bp, synthetic construct
  source 1..50: mol_type = other DNA
atttccacrtaaaaacaacaacrcacrtatacaactatacataccaaaac

SEQ ID NO: 14987 - DNA, 50 bp, synthetic construct
  source 1..50: mol_type = other DNA
aaaaaacrtaaaactacccctaaactcraaataaatctcccactaaatcc

SEQ ID NO: 14988 - DNA, 50 bp, synthetic construct
  source 1..50: mol_type = other DNA
cctaactccaacaaaacrataactataaaattcacctaactctacaaaac

SEQ ID NO: 14989 - DNA, 50 bp, synthetic construct
  source 1..50: mol_type = other DNA
aaaataaacaaaaaaacrctctacaaaaccaaataaatcccacaaccacc

SEQ ID NO: 14990 - DNA, 50 bp, synthetic construct
  source 1..50: mol_type = other DNA
ctaatctaaaaataatcaaataaacaacttcactccatcrtacctatatc

SEQ ID NO: 14991 - DNA, 50 bp, synthetic construct
  source 1..50: mol_type = other DNA
caaacacrataaaataaaattacccatttaaccattcccaaaccaaacac

SEQ ID NO: 14992 - DNA, 50 bp, synthetic construct
  source 1..50: mol_type = other DNA
cacctaaaatcaaaaactcaaaaccaacctaaccaatataataaaacccc

SEQ ID NO: 14993 - DNA, 50 bp, synthetic construct
  source 1..50: mol_type = other DNA
tttccttaaaaaaacatactttacratatcaataaacacracracttttc

SEQ ID NO: 14994 - DNA, 50 bp, synthetic construct
  source 1..50: mol_type = other DNA
ctaattctatatatctaaaacttttaattaactctaaccrattcataaac

SEQ ID NO: 14995 - DNA, 50 bp, synthetic construct
  source 1..50: mol_type = other DNA
ttaacaactacctaattctatatatctaaaacttttaattaactctaacc

SEQ ID NO: 14996 - DNA, 50 bp, synthetic construct
  source 1..50: mol_type = other DNA
ccatatcaatatcaataatatttattctaaaaatccccaaaccctaaaac

SEQ ID NO: 14997 - DNA, 50 bp, synthetic construct
  source 1..50: mol_type = other DNA
taataaatacttactcaatatctataaacaaaacacctcatacccaaaac

SEQ ID NO: 14998 - DNA, 50 bp, synthetic construct
  source 1..50: mol_type = other DNA
taaaacttattctaaaacttcacataaataaaaccaaacaataaaaaccc

SEQ ID NO: 14999 - DNA, 50 bp, synthetic construct
  source 1..50: mol_type = other DNA
ttataataccttctatacttttctatatctttaaaatatttcractaaac

SEQ ID NO: 15000 - DNA, 50 bp, synthetic construct
  source 1..50: mol_type = other DNA
ataataccttctatacttttctatatctttaaaatatttcractaaacrc

SEQ ID NO: 15001 - DNA, 50 bp, synthetic construct
  source 1..50: mol_type = other DNA
tttctccatatcaatcaaaataatctcraactttcracctcaaataatcc

SEQ ID NO: 15002 - DNA, 50 bp, synthetic construct
  source 1..50: mol_type = other DNA
crcccractaattaatttctccatatcaatcaaaataatctcraactttc

SEQ ID NO: 15003 - DNA, 50 bp, synthetic construct
  source 1..50: mol_type = other DNA
acacctactctatacccaaacctcrtacttaacactttacctacattatc

SEQ ID NO: 15004 - DNA, 50 bp, synthetic construct
  source 1..50: mol_type = other DNA
ttctctttcaatacaaaacaaaatccrtatttatcttaaattttaactac

SEQ ID NO: 15005 - DNA, 50 bp, synthetic construct
  source 1..50: mol_type = other DNA
tataacaaaacttaaaacaacatattctctttcaatacaaaacaaaatcc

SEQ ID NO: 15006 - DNA, 50 bp, synthetic construct
  source 1..50: mol_type = other DNA
aaaaataaaaactcaacttccctccaaaaccataataaaacaactccctc

SEQ ID NO: 15007 - DNA, 50 bp, synthetic construct
  source 1..50: mol_type = other DNA
taaataactttatattctcaaaaaccccaacaaatactaaattaaaattc

SEQ ID NO: 15008 - DNA, 50 bp, synthetic construct
  source 1..50: mol_type = other DNA
taactttatattctcaaaaaccccaacaaatactaaattaaaattcratc

SEQ ID NO: 15009 - DNA, 50 bp, synthetic construct
  source 1..50: mol_type = other DNA
tacaaatccctccaatttcctctaataaccacaaccraaaattctattcc

SEQ ID NO: 15010 - DNA, 50 bp, synthetic construct
  source 1..50: mol_type = other DNA
aaaaatcaaacaaatacaaatccctccaatttcctctaataaccacaacc

SEQ ID NO: 15011 - DNA, 50 bp, synthetic construct
  source 1..50: mol_type = other DNA
actaactttttattatattcttcacccactacctcaacaaattaaatttc

SEQ ID NO: 15012 - DNA, 50 bp, synthetic construct
  source 1..50: mol_type = other DNA
acaattcccctaaaaaaataaactataaatatccttaataatacaaaacc

SEQ ID NO: 15013 - DNA, 50 bp, synthetic construct
  source 1..50: mol_type = other DNA
actaaataattaattccacttacaataatatactaaccacaaatacaaac

SEQ ID NO: 15014 - DNA, 50 bp, synthetic construct
  source 1..50: mol_type = other DNA
tatccttaaattcaaaatcaaattccaattacaatataataactaaaaac

SEQ ID NO: 15015 - DNA, 50 bp, synthetic construct
  source 1..50: mol_type = other DNA
aaattccacccaacaacaacttcaacttaaactttactctcatcttactc

SEQ ID NO: 15016 - DNA, 50 bp, synthetic construct
  source 1..50: mol_type = other DNA
atcatttaaaatcaacaattaaaaaccaatctaaccaacataataaaacc

SEQ ID NO: 15017 - DNA, 50 bp, synthetic construct
  source 1..50: mol_type = other DNA
aaatataattatcttcatatatctacacaataactttctatatcctattc

SEQ ID NO: 15018 - DNA, 50 bp, synthetic construct
  source 1..50: mol_type = other DNA
taaacrataaaccactattacttattcctaaaatctaccrcaacaaacac

SEQ ID NO: 15019 - DNA, 50 bp, synthetic construct
  source 1..50: mol_type = other DNA
aaaaatacaattaaacrataaaccactattacttattcctaaaatctacc

SEQ ID NO: 15020 - DNA, 50 bp, synthetic construct
  source 1..50: mol_type = other DNA
tacaaacctatacaaattatctaatctacttaaacctcaattttcccaac

SEQ ID NO: 15021 - DNA, 50 bp, synthetic construct
  source 1..50: mol_type = other DNA
aacctatacaaattatctaatctacttaaacctcaattttcccaacratc

SEQ ID NO: 15022 - DNA, 50 bp, synthetic construct
  source 1..50: mol_type = other DNA
attttcccaacratcraataaaactcataaaacatatctcaaaactaaac

SEQ ID NO: 15023 - DNA, 50 bp, synthetic construct
  source 1..50: mol_type = other DNA
atcraataaaactcataaaacatatctcaaaactaaacrcaataattcac

SEQ ID NO: 15024 - DNA, 50 bp, synthetic construct
  source 1..50: mol_type = other DNA
tataaaataaccacaaacaaaatcaacccatatcctattaactcaaatcc

SEQ ID NO: 15025 - DNA, 50 bp, synthetic construct
  source 1..50: mol_type = other DNA
ctaaccctacctataactactttacactcttacccrtaaatatttaaaac

SEQ ID NO: 15026 - DNA, 50 bp, synthetic construct
  source 1..50: mol_type = other DNA
cctataactactttacactcttacccrtaaatatttaaaacraccttacc

SEQ ID NO: 15027 - DNA, 50 bp, synthetic construct
  source 1..50: mol_type = other DNA
tacaaaaattaactaaacrtaataacataaacctacaattccaactactc

SEQ ID NO: 15028 - DNA, 50 bp, synthetic construct
  source 1..50: mol_type = other DNA
aacaataaaatcactccrttacctaaactacaatacaataacaaaatcac

SEQ ID NO: 15029 - DNA, 50 bp, synthetic construct
  source 1..50: mol_type = other DNA
ttttattaaccaactcccctataataacaatacataaaaataataacaac

SEQ ID NO: 15030 - DNA, 50 bp, synthetic construct
  source 1..50: mol_type = other DNA
tattatataaccaacccrtatcraaacaaaaaaactataaccataaaccc

SEQ ID NO: 15031 - DNA, 50 bp, synthetic construct
  source 1..50: mol_type = other DNA
aattataaaccctatacraatttataaccacaatctccctactccratac

SEQ ID NO: 15032 - DNA, 50 bp, synthetic construct
  source 1..50: mol_type = other DNA
raactaatcatacaacaaaccccataacctaaaaaaccccttctctcttc

SEQ ID NO: 15033 - DNA, 50 bp, synthetic construct
  source 1..50: mol_type = other DNA
atactaaatttacaaacttaaaccaccrcrccctatctaacaaattcctc

SEQ ID NO: 15034 - DNA, 50 bp, synthetic construct
  source 1..50: mol_type = other DNA
aaaaataccaaataacrctttccttatcaaaactttcttctctccattcc

SEQ ID NO: 15035 - DNA, 50 bp, synthetic construct
  source 1..50: mol_type = other DNA
aaccataaactaaaaataaatatcracaatcctaacctcacctaaaaaac

SEQ ID NO: 15036 - DNA, 50 bp, synthetic construct
  source 1..50: mol_type = other DNA
taaaaataaatatcracaatcctaacctcacctaaaaaacracaaaccac

SEQ ID NO: 15037 - DNA, 50 bp, synthetic construct
  source 1..50: mol_type = other DNA
caacaaaactaactcactaccrccatctaactctaatacaaaaattcccc

SEQ ID NO: 15038 - DNA, 50 bp, synthetic construct
  source 1..50: mol_type = other DNA
tcttcactaaaaactatcaacaacaaaacraccaacaaattaaccccccc

SEQ ID NO: 15039 - DNA, 50 bp, synthetic construct
  source 1..50: mol_type = other DNA
tatattcactatttaaaccccatacttatttcttactcctacaaatttac

SEQ ID NO: 15040 - DNA, 50 bp, synthetic construct
  source 1..50: mol_type = other DNA
ttaaactatcattacaaacactacaaaactccractttacrtactaatac

SEQ ID NO: 15041 - DNA, 50 bp, synthetic construct
  source 1..50: mol_type = other DNA
aaaacaaaaaacaaacataaaacctaaacaataaacacacrcaccaacac

SEQ ID NO: 15042 - DNA, 50 bp, synthetic construct
  source 1..50: mol_type = other DNA
ctctctataccrcaaaacttaaactatcattacaaacactacaaaactcc

SEQ ID NO: 15043 - DNA, 50 bp, synthetic construct
  source 1..50: mol_type = other DNA
actatataataaacrtaaataaaaaaacratatcccctcctctctatacc

SEQ ID NO: 15044 - DNA, 50 bp, synthetic construct
  source 1..50: mol_type = other DNA
aatccctaccaaaataaatcccactatataataaacrtaaataaaaaaac

SEQ ID NO: 15045 - DNA, 50 bp, synthetic construct
  source 1..50: mol_type = other DNA
aatttataaaaaccaatccctaccaaaataaatcccactatataataaac

SEQ ID NO: 15046 - DNA, 50 bp, synthetic construct
  source 1..50: mol_type = other DNA
aaaaactaaaaaacacaacaacaaaaaccaaaaaactacctccrataccc

SEQ ID NO: 15047 - DNA, 50 bp, synthetic construct
  source 1..50: mol_type = other DNA
aaaaaccctctacttcaaccacaaactcttattccaaaaaacattaatac

SEQ ID NO: 15048 - DNA, 50 bp, synthetic construct
  source 1..50: mol_type = other DNA
tacaatttcctattactatattcctttttaaaataaactacttccaaatc

SEQ ID NO: 15049 - DNA, 50 bp, synthetic construct
  source 1..50: mol_type = other DNA
cactcaaactacttaaacaaatactcaaataaattaaccaaataaaaaac

SEQ ID NO: 15050 - DNA, 50 bp, synthetic construct
  source 1..50: mol_type = other DNA
aatcctaaacttaaaaaatattttctaaatttactctttaattactccac

SEQ ID NO: 15051 - DNA, 50 bp, synthetic construct
  source 1..50: mol_type = other DNA
ttaaaaaattaatctcattaataccatcaactatacttctaaataaaatc

SEQ ID NO: 15052 - DNA, 50 bp, synthetic construct
  source 1..50: mol_type = other DNA
aaaataaaaatttcaactaacactatttttctccaaactctctactatac

SEQ ID NO: 15053 - DNA, 50 bp, synthetic construct
  source 1..50: mol_type = other DNA
ttctccaaactctctactatacracaaaataataattatttcctctcaac

SEQ ID NO: 15054 - DNA, 50 bp, synthetic construct
  source 1..50: mol_type = other DNA
tttttcacaataacaaactactttataaaaaacatccacaaacaaaaaac

SEQ ID NO: 15055 - DNA, 50 bp, synthetic construct
  source 1..50: mol_type = other DNA
taaataaataaacaaaacraccraaaaactcaaactaaacaaatcccacc

SEQ ID NO: 15056 - DNA, 50 bp, synthetic construct
  source 1..50: mol_type = other DNA
acaataaaccttactaaattacrataaaatctacccaatctaaacttccc

SEQ ID NO: 15057 - DNA, 50 bp, synthetic construct
  source 1..50: mol_type = other DNA
taaaccttactaaattacrataaaatctacccaatctaaacttcccracc

SEQ ID NO: 15058 - DNA, 50 bp, synthetic construct
  source 1..50: mol_type = other DNA
acracacacttctacccaaatactacacttttacrataatcttaacaaac

SEQ ID NO: 15059 - DNA, 50 bp, synthetic construct
  source 1..50: mol_type = other DNA
aaatatacctaaaaaaacracacacttctacccaaatactacacttttac

SEQ ID NO: 15060 - DNA, 50 bp, synthetic construct
  source 1..50: mol_type = other DNA
atacaatatttaaacaaaaatataccrtttttccaaatacactctatcac

SEQ ID NO: 15061 - DNA, 50 bp, synthetic construct
  source 1..50: mol_type = other DNA
attaaacaataaatacaacccacaaaaaacraaccaaaacataacaaaac

SEQ ID NO: 15062 - DNA, 50 bp, synthetic construct
  source 1..50: mol_type = other DNA
ctaccctttatacttcccaaataaaataacrccctaccatactttaactc

SEQ ID NO: 15063 - DNA, 50 bp, synthetic construct
  source 1..50: mol_type = other DNA
ataaactacacccactatccaaccaatcccaataaaataaaccaaataac

SEQ ID NO: 15064 - DNA, 50 bp, synthetic construct
  source 1..50: mol_type = other DNA
tcttctatattaaacatactaaaaactacaaactaaaacaattcctattc

SEQ ID NO: 15065 - DNA, 50 bp, synthetic construct
  source 1..50: mol_type = other DNA
tatacatactaaataactctacctacaaaaaactacattttccaaacaac

SEQ ID NO: 15066 - DNA, 50 bp, synthetic construct
  source 1..50: mol_type = other DNA
aaaactaaataactttttatattatattttccaaatcrttaactacaaac

SEQ ID NO: 15067 - DNA, 50 bp, synthetic construct
  source 1..50: mol_type = other DNA
tatttccttatatatcaaactaaaatatttctatctataaccaattcccc

SEQ ID NO: 15068 - DNA, 50 bp, synthetic construct
  source 1..50: mol_type = other DNA
ctaaaatatttctatctataaccaattccccraaatactactaaaaacac

SEQ ID NO: 15069 - DNA, 50 bp, synthetic construct
  source 1..50: mol_type = other DNA
ctaacctaataactacrccttcattcrctttttataaaacaaataaacrc

SEQ ID NO: 15070 - DNA, 50 bp, synthetic construct
  source 1..50: mol_type = other DNA
aactaacctaataactacrccttcattcrctttttataaaacaaataaac

SEQ ID NO: 15071 - DNA, 50 bp, synthetic construct
  source 1..50: mol_type = other DNA
aaattttcttttcctaacatttattaatttctcrttacaatttctcccac

SEQ ID NO: 15072 - DNA, 50 bp, synthetic construct
  source 1..50: mol_type = other DNA
aacaataaaaacttatattaaacaaacaaaaaaaattacttcccaatacc

SEQ ID NO: 15073 - DNA, 50 bp, synthetic construct
  source 1..50: mol_type = other DNA
tatcccatcttttcctaaacttactcctatattaactcctaaaaaaaatc

SEQ ID NO: 15074 - DNA, 50 bp, synthetic construct
  source 1..50: mol_type = other DNA
cacctccaataaaattatattactaaaattaaaatcacractttaatctc

SEQ ID NO: 15075 - DNA, 50 bp, synthetic construct
  source 1..50: mol_type = other DNA
aatcacractttaatctcrcraaaaaacctactttacaaatccaaaactc

SEQ ID NO: 15076 - DNA, 50 bp, synthetic construct
  source 1..50: mol_type = other DNA
tcctatttacaaaaatcatttaaaaaccctaatccattcttaaaaacatc

SEQ ID NO: 15077 - DNA, 50 bp, synthetic construct
  source 1..50: mol_type = other DNA
cctatctttctaacatttaaatccactaaaaactaacttacctttaactc

SEQ ID NO: 15078 - DNA, 50 bp, synthetic construct
  source 1..50: mol_type = other DNA
atcccccactactcactatatatttattattaaaaatccactatatattc

SEQ ID NO: 15079 - DNA, 50 bp, synthetic construct
  source 1..50: mol_type = other DNA
ctaacctccaaaaaatacaacaaattatataaaccatatctccactacac

SEQ ID NO: 15080 - DNA, 50 bp, synthetic construct
  source 1..50: mol_type = other DNA
attctcatattttcaatatcaacctaacrtcaaactctctaattatatac

SEQ ID NO: 15081 - DNA, 50 bp, synthetic construct
  source 1..50: mol_type = other DNA
ataaacccaatctccaactaactatactatcttcaataaaccacaaacac

SEQ ID NO: 15082 - DNA, 50 bp, synthetic construct
  source 1..50: mol_type = other DNA
acaacataaccaactaaaaattaaacccacccacccttttaaaactatcc

SEQ ID NO: 15083 - DNA, 50 bp, synthetic construct
  source 1..50: mol_type = other DNA
aacttctcaaatactacccaaataatatataatattttctcctatactac

SEQ ID NO: 15084 - DNA, 50 bp, synthetic construct
  source 1..50: mol_type = other DNA
tctatcactaaaacaactttatattatacaacttaaaaaccaattcttac

SEQ ID NO: 15085 - DNA, 50 bp, synthetic construct
  source 1..50: mol_type = other DNA
ctaaaaactaaataccctaaaaatcccaaaaaatataaaattacctcaac

SEQ ID NO: 15086 - DNA, 50 bp, synthetic construct
  source 1..50: mol_type = other DNA
caactaaattaatctatttcttctaacctaaaaaactctaccrtacttac

SEQ ID NO: 15087 - DNA, 50 bp, synthetic construct
  source 1..50: mol_type = other DNA
tacaaaaacaactaaattaatctatttcttctaacctaaaaaactctacc

SEQ ID NO: 15088 - DNA, 50 bp, synthetic construct
  source 1..50: mol_type = other DNA
aaatctcttttatcttctaacatttaacccctttcaaattcaactctacc

SEQ ID NO: 15089 - DNA, 50 bp, synthetic construct
  source 1..50: mol_type = other DNA
aatattaaatattaacaaacaatttcatatctctaaacaactttactacc

SEQ ID NO: 15090 - DNA, 50 bp, synthetic construct
  source 1..50: mol_type = other DNA
aaaaccacacaatattattaaattactactaaaaatcaacccaaacaacc

SEQ ID NO: 15091 - DNA, 50 bp, synthetic construct
  source 1..50: mol_type = other DNA
tccttaaaaaaattttctctaaccctcccactcccccttaaaataacatc

SEQ ID NO: 15092 - DNA, 50 bp, synthetic construct
  source 1..50: mol_type = other DNA
aaataaaaaaaccatcaaaattattacaatctcaaaattccttaaaaaac

SEQ ID NO: 15093 - DNA, 50 bp, synthetic construct
  source 1..50: mol_type = other DNA
ccaatctactttatacactcaataaaattttcaaactaaaactttcacrc

SEQ ID NO: 15094 - DNA, 50 bp, synthetic construct
  source 1..50: mol_type = other DNA
tacaatataaaatattactttactactataatcaaattcacacctacaac

SEQ ID NO: 15095 - DNA, 50 bp, synthetic construct
  source 1..50: mol_type = other DNA
tacaaataaataatataattttaacccccatctttcttcctatttctacc

SEQ ID NO: 15096 - DNA, 50 bp, synthetic construct
  source 1..50: mol_type = other DNA
aatataatctaaaaataatcaaacaactattaactaaatttctacatttc

SEQ ID NO: 15097 - DNA, 50 bp, synthetic construct
  source 1..50: mol_type = other DNA
aaacactttttaacctaaaaaaaacactattaattataccratacaaaac

SEQ ID NO: 15098 - DNA, 50 bp, synthetic construct
  source 1..50: mol_type = other DNA
accttaaacttcaattttcctaaaaaatttcaatttacacrtcttacacc

SEQ ID NO: 15099 - DNA, 50 bp, synthetic construct
  source 1..50: mol_type = other DNA
aaacatacttatttatttttcttttactctccaaaaatctttatactaac

SEQ ID NO: 15100 - DNA, 50 bp, synthetic construct
  source 1..50: mol_type = other DNA
tttcacaaaaaccccattcaaaaacttctacttccatttaaatcatcatc

SEQ ID NO: 15101 - DNA, 50 bp, synthetic construct
  source 1..50: mol_type = other DNA
tataacatttcaattcctctcaataccaccttcaacaaatttaaaattcc

SEQ ID NO: 15102 - DNA, 50 bp, synthetic construct
  source 1..50: mol_type = other DNA
tctttttataaaactaatacacccatccccaactactctacattctaacc

SEQ ID NO: 15103 - DNA, 50 bp, synthetic construct
  source 1..50: mol_type = other DNA
cctccaccaaaaaaaaccacattacttaaaaatacctaaaacatcaaccc

SEQ ID NO: 15104 - DNA, 50 bp, synthetic construct
  source 1..50: mol_type = other DNA
ctattttctaccccatatcaaacaatcactaactacaaacaacctaatac

SEQ ID NO: 15105 - DNA, 50 bp, synthetic construct
  source 1..50: mol_type = other DNA
aaaataaaaaacaaaccccaaactcccaaataaaacaactttatattatc

SEQ ID NO: 15106 - DNA, 50 bp, synthetic construct
  source 1..50: mol_type = other DNA
aacaaataatttactaaaacaaacaataaaacataacaacaaacatatac

SEQ ID NO: 15107 - DNA, 50 bp, synthetic construct
  source 1..50: mol_type = other DNA
tatataaaaattaaacattattatactacctccttctcttccaaatacac

SEQ ID NO: 15108 - DNA, 50 bp, synthetic construct
  source 1..50: mol_type = other DNA
aaaataaaaaatcttccaaaattaaataatacattcttcctctcaataac

SEQ ID NO: 15109 - DNA, 50 bp, synthetic construct
  source 1..50: mol_type = other DNA
aacaacattcttcaaaaaaatactaccttactaaataatctaaaaaattc

SEQ ID NO: 15110 - DNA, 50 bp, synthetic construct
  source 1..50: mol_type = other DNA
attaatttaaaactactcaatcaactaaaacaaatcatcaaaaaaaacac

SEQ ID NO: 15111 - DNA, 50 bp, synthetic construct
  source 1..50: mol_type = other DNA
ctaaaaaaaccactacraaaataacctaccaaaacttaacataataaacc

SEQ ID NO: 15112 - DNA, 50 bp, synthetic construct
  source 1..50: mol_type = other DNA
ccaaaattaattaaacratccactatactaaaccttaacaaatcacctcc

SEQ ID NO: 15113 - DNA, 50 bp, synthetic construct
  source 1..50: mol_type = other DNA
aattctatttttcctctctaatcataaaataaaaaaccttaaacacttac

SEQ ID NO: 15114 - DNA, 50 bp, synthetic construct
  source 1..50: mol_type = other DNA
caacaatttttacctaaaaccacctccaataacaactcaaaaaaattctc

SEQ ID NO: 15115 - DNA, 50 bp, synthetic construct
  source 1..50: mol_type = other DNA
aaattcatatattacttctatcaaataaatttatactataaataaaaacc

SEQ ID NO: 15116 - DNA, 50 bp, synthetic construct
  source 1..50: mol_type = other DNA
tcctaatttaaaatcctatcctaaatttcctatccacataaaatatattc

SEQ ID NO: 15117 - DNA, 50 bp, synthetic construct
  source 1..50: mol_type = other DNA
taaaactttcaacttcttataataattcatatattacaactacaattcac

SEQ ID NO: 15118 - DNA, 50 bp, synthetic construct
  source 1..50: mol_type = other DNA
aaaacttaaccttataacccactttaaacaataaaatataaatatcttac

SEQ ID NO: 15119 - DNA, 50 bp, synthetic construct
  source 1..50: mol_type = other DNA
aacataccccaactaataaatattcatcatccaaaacccaaaaattaaac

SEQ ID NO: 15120 - DNA, 50 bp, synthetic construct
  source 1..50: mol_type = other DNA
aaaaatacaatcaatccacaaccttctaataacataaacaaaaaattaac

SEQ ID NO: 15121 - DNA, 50 bp, synthetic construct
  source 1..50: mol_type = other DNA
catcacaacatttatcccttttcatttatatttcatacttatataattac

SEQ ID NO: 15122 - DNA, 50 bp, synthetic construct
  source 1..50: mol_type = other DNA
ctctcaattctaaaactcaatctaaataactactttcaaaaaaaccaaac

SEQ ID NO: 15123 - DNA, 50 bp, synthetic construct
  source 1..50: mol_type = other DNA
aattctaaaactcaatctaaataactactttcaaaaaaaccaaacraaac

SEQ ID NO: 15124 - DNA, 50 bp, synthetic construct
  source 1..50: mol_type = other DNA
aactttacrataatatcatatcctaaaactataattttaaatatatcttc

SEQ ID NO: 15125 - DNA, 50 bp, synthetic construct
  source 1..50: mol_type = other DNA
aaaaaaacraaaatatacttaaaaccacaatcccaaaacataacaccacc

SEQ ID NO: 15126 - DNA, 50 bp, synthetic construct
  source 1..50: mol_type = other DNA
aaccaaataccttaaataataatatttctttctataatccccaaccaaac

SEQ ID NO: 15127 - DNA, 50 bp, synthetic construct
  source 1..50: mol_type = other DNA
tcaaaatattttcttaataaaattactaacacttactcttctaccactac

SEQ ID NO: 15128 - DNA, 50 bp, synthetic construct
  source 1..50: mol_type = other DNA
tacttttaatcaattctaaaaaatctcaaaaaaccaaattcatcaattcc

SEQ ID NO: 15129 - DNA, 50 bp, synthetic construct
  source 1..50: mol_type = other DNA
tctatttacatttctaccaaactcatataactcaaaatttaaaatatatc

SEQ ID NO: 15130 - DNA, 50 bp, synthetic construct
  source 1..50: mol_type = other DNA
acrtccttcttataattcatctccattacaattctattacatatttctac

SEQ ID NO: 15131 - DNA, 50 bp, synthetic construct
  source 1..50: mol_type = other DNA
ctacttcttaaatcataaatttactcttaactataacaaaataacaaaac

SEQ ID NO: 15132 - DNA, 50 bp, synthetic construct
  source 1..50: mol_type = other DNA
tacataaacraatcacaatacacractacraaactaaaaacaataacttc

SEQ ID NO: 15133 - DNA, 50 bp, synthetic construct
  source 1..50: mol_type = other DNA
aaaaaataactaaataatttcatttttaatactctcctatcttaaacaac

SEQ ID NO: 15134 - DNA, 50 bp, synthetic construct
  source 1..50: mol_type = other DNA
aaaacttctaaaccaacttaacccaataaaaaattcttaaataccracrc

SEQ ID NO: 15135 - DNA, 50 bp, synthetic construct
  source 1..50: mol_type = other DNA
ttacttcaaaacrtctccaaataaaatatataactcctttttaccaccrc

SEQ ID NO: 15136 - DNA, 50 bp, synthetic construct
  source 1..50: mol_type = other DNA
attataaaactacctaaccatcctcaaatttcrtacaattacttcaaaac

SEQ ID NO: 15137 - DNA, 50 bp, synthetic construct
  source 1..50: mol_type = other DNA
taaaataactacacraaatttaaaaataaccaaacaattctacaacaacc

SEQ ID NO: 15138 - DNA, 50 bp, synthetic construct
  source 1..50: mol_type = other DNA
tatttataaaaaccaaaaatattctaaactaaatttcctctaactccatc

SEQ ID NO: 15139 - DNA, 50 bp, synthetic construct
  source 1..50: mol_type = other DNA
aaataactaataatattaccttcttcataatcccaaacttaaaaaactac

SEQ ID NO: 15140 - DNA, 50 bp, synthetic construct
  source 1..50: mol_type = other DNA
aactcaattcaaaacatctttaatttttacaaatacaaattaactaaaac

SEQ ID NO: 15141 - DNA, 50 bp, synthetic construct
  source 1..50: mol_type = other DNA
ttttcaaaaaacataactttaacttattttttttctctttataaaacttc

SEQ ID NO: 15142 - DNA, 50 bp, synthetic construct
  source 1..50: mol_type = other DNA
tccttctccacaaataaatacaaaaaatccttaaccctaaaactaccaac

SEQ ID NO: 15143 - DNA, 50 bp, synthetic construct
  source 1..50: mol_type = other DNA
ttctccacaaataaatacaaaaaatccttaaccctaaaactaccaacrac

SEQ ID NO: 15144 - DNA, 50 bp, synthetic construct
  source 1..50: mol_type = other DNA
aaaataaactaacaacacaactaaaaacctacctctactactaaccrccc

SEQ ID NO: 15145 - DNA, 50 bp, synthetic construct
  source 1..50: mol_type = other DNA
craccaacaacaaaaacaaactcccaactatactatcaactcacccctac

SEQ ID NO: 15146 - DNA, 50 bp, synthetic construct
  source 1..50: mol_type = other DNA
ctaccttccctaccccaatacccccaaaaaaaaattccaaaaatataacc

SEQ ID NO: 15147 - DNA, 50 bp, synthetic construct
  source 1..50: mol_type = other DNA
tctcaaaactaaaataccrtcraaaatataccraatttatttatcaattc

SEQ ID NO: 15148 - DNA, 50 bp, synthetic construct
  source 1..50: mol_type = other DNA
attaaaaattaattactataaaccaaacacaatactaatataatcccaac

SEQ ID NO: 15149 - DNA, 50 bp, synthetic construct
  source 1..50: mol_type = other DNA
taaaataaattatcatatcctacaaccactaattctatacctacaacttc

SEQ ID NO: 15150 - DNA, 50 bp, synthetic construct
  source 1..50: mol_type = other DNA
catttaccraaaaaccctcaaactaaactacaaaaactccttaaaactac

SEQ ID NO: 15151 - DNA, 50 bp, synthetic construct
  source 1..50: mol_type = other DNA
aaaaatacccattaacaacaacaatctaaaatacccatactacatttacc

SEQ ID NO: 15152 - DNA, 50 bp, synthetic construct
  source 1..50: mol_type = other DNA
tttttcctttttaaaacaatcrctatatacccaaactaaaatataataac

SEQ ID NO: 15153 - DNA, 50 bp, synthetic construct
  source 1..50: mol_type = other DNA
atctacaaccctaactaaaaaatattaacaaatccttacaataaataacc

SEQ ID NO: 15154 - DNA, 50 bp, synthetic construct
  source 1..50: mol_type = other DNA
aatatcaccttattaaccaaactaatcttaaactcctaaactaataattc

SEQ ID NO: 15155 - DNA, 50 bp, synthetic construct
  source 1..50: mol_type = other DNA
tctcacaatttaaactaaataattaaaaaacaatttaacaaaccraatac

SEQ ID NO: 15156 - DNA, 50 bp, synthetic construct
  source 1..50: mol_type = other DNA
aatatctctcacaatttaaactaaataattaaaaaacaatttaacaaacc

SEQ ID NO: 15157 - DNA, 50 bp, synthetic construct
  source 1..50: mol_type = other DNA
taaaaaatttctaattctaaacacttactcaattttcacaatccttaaac

SEQ ID NO: 15158 - DNA, 50 bp, synthetic construct
  source 1..50: mol_type = other DNA
aaaacaaaccttccacaaatttaaaaatcaaaaaaaacactattaaactc

SEQ ID NO: 15159 - DNA, 50 bp, synthetic construct
  source 1..50: mol_type = other DNA
cttccctataattaaattcacaaaaatttatcaaaatcttatcaaatccc

SEQ ID NO: 15160 - DNA, 50 bp, synthetic construct
  source 1..50: mol_type = other DNA
cccctcactacatcattacttttaaacttaacctaaaaaaaatcaaatac

SEQ ID NO: 15161 - DNA, 50 bp, synthetic construct
  source 1..50: mol_type = other DNA
tatttaaatcaatttataactcctacattccracccracaaaaaaaactc

SEQ ID NO: 15162 - DNA, 50 bp, synthetic construct
  source 1..50: mol_type = other DNA
cccctcttctcactacctcaaaaaaaattcctaataataatacccacctc

SEQ ID NO: 15163 - DNA, 50 bp, synthetic construct
  source 1..50: mol_type = other DNA
ttataaacaactacaaaccataccccacraccaaaaaacactttataccc

SEQ ID NO: 15164 - DNA, 50 bp, synthetic construct
  source 1..50: mol_type = other DNA
tacacratatattactctttaaaatccatatttccttcattctaaactac

SEQ ID NO: 15165 - DNA, 50 bp, synthetic construct
  source 1..50: mol_type = other DNA
aacctaatacacactaaaaaacaacacctatacttatcattatatacrtc

SEQ ID NO: 15166 - DNA, 50 bp, synthetic construct
  source 1..50: mol_type = other DNA
tccataaaataactaacactcttacctataaaaattaacttatcctcrac

SEQ ID NO: 15167 - DNA, 50 bp, synthetic construct
  source 1..50: mol_type = other DNA
taattaaccaaaacatccaaccatacataaataatctacraatcatcccc

SEQ ID NO: 15168 - DNA, 50 bp, synthetic construct
  source 1..50: mol_type = other DNA
actaattaaaacactattaaaccaaaccaatatctccctataataaattc

SEQ ID NO: 15169 - DNA, 50 bp, synthetic construct
  source 1..50: mol_type = other DNA
ttttaatcctctcataaaaaatcttaaaccattaaaaaaaactaattcac

SEQ ID NO: 15170 - DNA, 50 bp, synthetic construct
  source 1..50: mol_type = other DNA
caatatattaaaatttattttataacatttccatatacaaaaacacctac

SEQ ID NO: 15171 - DNA, 50 bp, synthetic construct
  source 1..50: mol_type = other DNA
tttcaaatacaataatcrccttaatcacacttttactttctacaatttcc

SEQ ID NO: 15172 - DNA, 50 bp, synthetic construct
  source 1..50: mol_type = other DNA
ccttttaatcactcatataaccaatttcctctatttcaaatacaataatc

SEQ ID NO: 15173 - DNA, 50 bp, synthetic construct
  source 1..50: mol_type = other DNA
ctcaaaaacaaaaacraacraataaatacctaaacaaaaaccaaaccaac

SEQ ID NO: 15174 - DNA, 50 bp, synthetic construct
  source 1..50: mol_type = other DNA
rctaaactacrtaaaattaataaacttattttcctttttccacttcatac

SEQ ID NO: 15175 - DNA, 50 bp, synthetic construct
  source 1..50: mol_type = other DNA
aaactacrtaaaattaataaacttattttcctttttccacttcatacrac

SEQ ID NO: 15176 - DNA, 50 bp, synthetic construct
  source 1..50: mol_type = other DNA
caaataacrattaaaataaaactccttctccaactccaatatctaataac

SEQ ID NO: 15177 - DNA, 50 bp, synthetic construct
  source 1..50: mol_type = other DNA
aataacrattaaaataaaactccttctccaactccaatatctaataacrc

SEQ ID NO: 15178 - DNA, 50 bp, synthetic construct
  source 1..50: mol_type = other DNA
tataaaaaacactaaactaactaaatcaaccctccaaaccctaacttacc

SEQ ID NO: 15179 - DNA, 50 bp, synthetic construct
  source 1..50: mol_type = other DNA
ataccaaacraaatattttccacctataacracttaaaataaacattatc

SEQ ID NO: 15180 - DNA, 50 bp, synthetic construct
  source 1..50: mol_type = other DNA
ttacaaacaaaataacaaaataaacattcttaatttaaaatacccaaatc

SEQ ID NO: 15181 - DNA, 50 bp, synthetic construct
  source 1..50: mol_type = other DNA
tctaaattcataataatctctctaaaaatactactataaccaaccatatc

SEQ ID NO: 15182 - DNA, 50 bp, synthetic construct
  source 1..50: mol_type = other DNA
caaaactttattcctttacaaacccccaaaatatttacctacataaccac

SEQ ID NO: 15183 - DNA, 50 bp, synthetic construct
  source 1..50: mol_type = other DNA
tattcctttacaaacccccaaaatatttacctacataaccacrttaaacc

SEQ ID NO: 15184 - DNA, 50 bp, synthetic construct
  source 1..50: mol_type = other DNA
rttaaaccrataaaactcctatttccctcttcaaaacctacttaaaaaac

SEQ ID NO: 15185 - DNA, 50 bp, synthetic construct
  source 1..50: mol_type = other DNA
caactttttctcrccrccaaacaactaacctatttaaaaaaacttaactc

SEQ ID NO: 15186 - DNA, 50 bp, synthetic construct
  source 1..50: mol_type = other DNA
aattttacctctaactaactttcaaaaacraaacctaccacaaccaatcc

SEQ ID NO: 15187 - DNA, 50 bp, synthetic construct
  source 1..50: mol_type = other DNA
ctaacctatttaaaaaaacttaactcracraactaattataacaaatccc

SEQ ID NO: 15188 - DNA, 50 bp, synthetic construct
  source 1..50: mol_type = other DNA
accttcttctctaaatcaaaaaaacctatataaaatctctaaataaaaac

SEQ ID NO: 15189 - DNA, 50 bp, synthetic construct
  source 1..50: mol_type = other DNA
ctcaaaaaccactaactccccatctcccaaaaaataaatacctcaaaaac

SEQ ID NO: 15190 - DNA, 50 bp, synthetic construct
  source 1..50: mol_type = other DNA
aaaaataaatacctcaaaaacrcaaactaacctacrtaaatacccaccac

SEQ ID NO: 15191 - DNA, 50 bp, synthetic construct
  source 1..50: mol_type = other DNA
caccttcccacttcctacaaatcattactcaaatatcttctccctaaaac

SEQ ID NO: 15192 - DNA, 50 bp, synthetic construct
  source 1..50: mol_type = other DNA
aaaactacaaaaccaaaaaataacaataaccaatactaaatacttatacc

SEQ ID NO: 15193 - DNA, 50 bp, synthetic construct
  source 1..50: mol_type = other DNA
ataaaaactaaaactcaaaacctctcactccaaaacctacaaaaaactac

SEQ ID NO: 15194 - DNA, 50 bp, synthetic construct
  source 1..50: mol_type = other DNA
tactataaattacttattccaaataaattccttccttattttaaaatacc

SEQ ID NO: 15195 - DNA, 50 bp, synthetic construct
  source 1..50: mol_type = other DNA
tctatatcccaaaaatacrtaaaaaaattatacacaattcatccaaaaac

SEQ ID NO: 15196 - DNA, 50 bp, synthetic construct
  source 1..50: mol_type = other DNA
tctacctccacaaaatacrctcttaaataaactatacataattcctctac

SEQ ID NO: 15197 - DNA, 50 bp, synthetic construct
  source 1..50: mol_type = other DNA
aattaattcacttaacaatcacctcattttcttcccattatcttccctac

SEQ ID NO: 15198 - DNA, 50 bp, synthetic construct
  source 1..50: mol_type = other DNA
aaatcccttctaacaaaaacctcaacaataaccactaaaacaaacacaac

SEQ ID NO: 15199 - DNA, 50 bp, synthetic construct
  source 1..50: mol_type = other DNA
cttctaacaaaaacctcaacaataaccactaaaacaaacacaacrcccac

SEQ ID NO: 15200 - DNA, 50 bp, synthetic construct
  source 1..50: mol_type = other DNA
aacaacatacttaaacaccaaatcatctaaatcatttaaataaaaccatc

SEQ ID NO: 15201 - DNA, 50 bp, synthetic construct
  source 1..50: mol_type = other DNA
aacttataaaaaattctcttaactctatttactttaaacaaacatcaaac

SEQ ID NO: 15202 - DNA, 50 bp, synthetic construct
  source 1..50: mol_type = other DNA
acacttactatcaatcctaaaaataaatcatactccacaatctaccaacc

SEQ ID NO: 15203 - DNA, 50 bp, synthetic construct
  source 1..50: mol_type = other DNA
caaaaaatccaaataaataccataaattcaaccatataaatacaactcac

SEQ ID NO: 15204 - DNA, 50 bp, synthetic construct
  source 1..50: mol_type = other DNA
raatacatctaacttaaacratccaaccacctacraaaaatataaccrac

SEQ ID NO: 15205 - DNA, 50 bp, synthetic construct
  source 1..50: mol_type = other DNA
aataacttctacaaatcaaaaaacttattaaaaaatccaaaaatccaaac

SEQ ID NO: 15206 - DNA, 50 bp, synthetic construct
  source 1..50: mol_type = other DNA
ctctacratttacctttctaataatactaaacccraaatacrctaactac

SEQ ID NO: 15207 - DNA, 50 bp, synthetic construct
  source 1..50: mol_type = other DNA
taacaccattaaaaaaacaaatcrcaaaaccraaatacatttaaataccc

SEQ ID NO: 15208 - DNA, 50 bp, synthetic construct
  source 1..50: mol_type = other DNA
craaatacatttaaatacccraccataaaccctaaaaatatctctccaac

SEQ ID NO: 15209 - DNA, 50 bp, synthetic construct
  source 1..50: mol_type = other DNA
atacatttaaatacccraccataaaccctaaaaatatctctccaacraac

SEQ ID NO: 15210 - DNA, 50 bp, synthetic construct
  source 1..50: mol_type = other DNA
ctaacraaataaaattaataacaaaactcrcaaataaaacctaaatccrc

SEQ ID NO: 15211 - DNA, 50 bp, synthetic construct
  source 1..50: mol_type = other DNA
tatttaaaaactattcctttaatccaaaatttctcaacctcaatactacc

SEQ ID NO: 15212 - DNA, 50 bp, synthetic construct
  source 1..50: mol_type = other DNA
ctactaaatatcctataacacacaaaaaaccccccaaaaaaataattatc

SEQ ID NO: 15213 - DNA, 50 bp, synthetic construct
  source 1..50: mol_type = other DNA
aaaaaaataatttacctaaaaaaccccatcatacttttaaattacctcac

SEQ ID NO: 15214 - DNA, 50 bp, synthetic construct
  source 1..50: mol_type = other DNA
ctaaaaacataataaaattttctaaacaaaccactctcccacttaacccc

SEQ ID NO: 15215 - DNA, 50 bp, synthetic construct
  source 1..50: mol_type = other DNA
aacattaccattcctcrcctctataacaaaataactcttcaaaaaccaac

SEQ ID NO: 15216 - DNA, 50 bp, synthetic construct
  source 1..50: mol_type = other DNA
tcrcctctataacaaaataactcttcaaaaaccaacractatcaaaaacc

SEQ ID NO: 15217 - DNA, 50 bp, synthetic construct
  source 1..50: mol_type = other DNA
actaatctaaacaacataaaaatctaaaaacactactaactcccaacacc

SEQ ID NO: 15218 - DNA, 50 bp, synthetic construct
  source 1..50: mol_type = other DNA
aatatcaaaaaccaaataaatcacccccaaaacttaaacaactaaaaaac

SEQ ID NO: 15219 - DNA, 50 bp, synthetic construct
  source 1..50: mol_type = other DNA
cttctacctactactaccccaatataaccacaactacctcaaaaaataac

SEQ ID NO: 15220 - DNA, 50 bp, synthetic construct
  source 1..50: mol_type = other DNA
aactaactcctaacccaaactactaacaaaaaatatcctaaaaactacrc

SEQ ID NO: 15221 - DNA, 50 bp, synthetic construct
  source 1..50: mol_type = other DNA
aaaaaaaaatcctcttccacacccttaatcataaaaattaaactacaaac

SEQ ID NO: 15222 - DNA, 50 bp, synthetic construct
  source 1..50: mol_type = other DNA
caacaaatcraaaaataacaaaccttccctaaaaacaaataacracaacc

SEQ ID NO: 15223 - DNA, 50 bp, synthetic construct
  source 1..50: mol_type = other DNA
aaaacaaaaatcccctaactataaaataataaacctaaaaaacractacc

SEQ ID NO: 15224 - DNA, 50 bp, synthetic construct
  source 1..50: mol_type = other DNA
acaaataacaaaaaaataactatccctaaaattcaaatcaacaacaaatc

SEQ ID NO: 15225 - DNA, 50 bp, synthetic construct
  source 1..50: mol_type = other DNA
acccatataataactttacattaaatatccccttaatcccaataacaatc

SEQ ID NO: 15226 - DNA, 50 bp, synthetic construct
  source 1..50: mol_type = other DNA
aaaacacrtaaactactccaaaatccactcctctaaattaaaacrcttcc

SEQ ID NO: 15227 - DNA, 50 bp, synthetic construct
  source 1..50: mol_type = other DNA
crtctactttcaaaacccctctaaaaccrcaaaaaacaacccaataaaac

SEQ ID NO: 15228 - DNA, 50 bp, synthetic construct
  source 1..50: mol_type = other DNA
caataccaccctacaaacataaaaaataaatctatcatattaacrccaac

SEQ ID NO: 15229 - DNA, 50 bp, synthetic construct
  source 1..50: mol_type = other DNA
ctcttttcctcaaacaaaactattctacattaatcttcctccctataatc

SEQ ID NO: 15230 - DNA, 50 bp, synthetic construct
  source 1..50: mol_type = other DNA
tcttatactaaaataactatcacctataaataaaacttcaaactcttaac

SEQ ID NO: 15231 - DNA, 50 bp, synthetic construct
  source 1..50: mol_type = other DNA
atctcrcaatatcrcccaaataacaaaaccataaactcactactcataac

SEQ ID NO: 15232 - DNA, 50 bp, synthetic construct
  source 1..50: mol_type = other DNA
atttacatacttatttatatacaacctacaaacataaaaaaatctaaaac

SEQ ID NO: 15233 - DNA, 50 bp, synthetic construct
  source 1..50: mol_type = other DNA
aaaaaataacrattaactaaaaaacaaaccaatccaactaaaactacrtc

SEQ ID NO: 15234 - DNA, 50 bp, synthetic construct
  source 1..50: mol_type = other DNA
acactacccatcacctaactattaacrataacccrtaaaaaaataatatc

SEQ ID NO: 15235 - DNA, 50 bp, synthetic construct
  source 1..50: mol_type = other DNA
tatactacccttaaaaataaatcaaactttttatacttcctccaaaactc

SEQ ID NO: 15236 - DNA, 50 bp, synthetic construct
  source 1..50: mol_type = other DNA
tttaaaccccrcctactatctttctaaactttaaaacaataatcatttcc

SEQ ID NO: 15237 - DNA, 50 bp, synthetic construct
  source 1..50: mol_type = other DNA
atttaactcaatacaataaacctaaataaaacaaactaaatttaaacccc

SEQ ID NO: 15238 - DNA, 50 bp, synthetic construct
  source 1..50: mol_type = other DNA
taaaccaaatcaccccaaaacataactcaaacctcatctaaaaaaaacac

SEQ ID NO: 15239 - DNA, 50 bp, synthetic construct
  source 1..50: mol_type = other DNA
caaaacataactcaaacctcatctaaaaaaaacacraaatccataatccc

SEQ ID NO: 15240 - DNA, 50 bp, synthetic construct
  source 1..50: mol_type = other DNA
aaaaacccaccctaaaacattactaaacacctactccatcccataaaaac

SEQ ID NO: 15241 - DNA, 50 bp, synthetic construct
  source 1..50: mol_type = other DNA
aaaaaatataacataaaaaactataactatacctcaactataccccaccc

SEQ ID NO: 15242 - DNA, 50 bp, synthetic construct
  source 1..50: mol_type = other DNA
ttacctactcatttcrattccttaaaaccacttcttactactactcccac

SEQ ID NO: 15243 - DNA, 50 bp, synthetic construct
  source 1..50: mol_type = other DNA
ccttcccaacaaaacrtaaaaacaacaacaaaaaataatttcaaaaaacc

SEQ ID NO: 15244 - DNA, 50 bp, synthetic construct
  source 1..50: mol_type = other DNA
accaaatatccrtatttaaaacraacaaacttaaaactaactaaatctcc

SEQ ID NO: 15245 - DNA, 50 bp, synthetic construct
  source 1..50: mol_type = other DNA
aaaaccaaacraaactcacctcattatcaaaatcttataaactaaatctc

SEQ ID NO: 15246 - DNA, 50 bp, synthetic construct
  source 1..50: mol_type = other DNA
acaactccaaatcaaacctactcaaaaaaataaataaacacccaaaaaac

SEQ ID NO: 15247 - DNA, 50 bp, synthetic construct
  source 1..50: mol_type = other DNA
aacattaacrctaacctacaccraaactaaccaattaatattcatctacc

SEQ ID NO: 15248 - DNA, 50 bp, synthetic construct
  source 1..50: mol_type = other DNA
caaataaacaccaactaaccaacctcratacaaatcaacrtcaataccac

SEQ ID NO: 15249 - DNA, 50 bp, synthetic construct
  source 1..50: mol_type = other DNA
acatacttcaaataaaataacttatacraaatcttattatcrccacrctc

SEQ ID NO: 15250 - DNA, 50 bp, synthetic construct
  source 1..50: mol_type = other DNA
acacacatacttcaaataaaataacttatacraaatcttattatcrccac

SEQ ID NO: 15251 - DNA, 50 bp, synthetic construct
  source 1..50: mol_type = other DNA
aactaacacacatacttcaaataaaataacttatacraaatcttattatc

SEQ ID NO: 15252 - DNA, 50 bp, synthetic construct
  source 1..50: mol_type = other DNA
taatattacracctaactaacacacatacttcaaataaaataacttatac

SEQ ID NO: 15253 - DNA, 50 bp, synthetic construct
  source 1..50: mol_type = other DNA
aaaaaacacacatactacaacaaacrataaacaacaaaacaacaaacrac

SEQ ID NO: 15254 - DNA, 50 bp, synthetic construct
  source 1..50: mol_type = other DNA
acaaaaaaacacacatactacaacaaacrataaacaacaaaacaacaaac

SEQ ID NO: 15255 - DNA, 50 bp, synthetic construct
  source 1..50: mol_type = other DNA
ccaccrcctactataacatatatacccccttacaaaataaaaaacaaaac

SEQ ID NO: 15256 - DNA, 50 bp, synthetic construct
  source 1..50: mol_type = other DNA
actaccttatatttctattttaatctatcatccttaccctttaaaaaaac

SEQ ID NO: 15257 - DNA, 50 bp, synthetic construct
  source 1..50: mol_type = other DNA
tctccactattaaaccaaaaccacaaaaaaaattaactctaccataaaac

SEQ ID NO: 15258 - DNA, 50 bp, synthetic construct
  source 1..50: mol_type = other DNA
aaaaaaattaactctaccataaaacracctttcttcccaactattatatc

SEQ ID NO: 15259 - DNA, 50 bp, synthetic construct
  source 1..50: mol_type = other DNA
actaataaacrtactaaccrcacactaccaaaaataaatacaaactaaac

SEQ ID NO: 15260 - DNA, 50 bp, synthetic construct
  source 1..50: mol_type = other DNA
taacraaactaaacrtaaccaacraaaaaaaccaactaataatactacac

SEQ ID NO: 15261 - DNA, 50 bp, synthetic construct
  source 1..50: mol_type = other DNA
tttaataccaaacctctctaaccctacatcctaaataaaatataaaaacc

SEQ ID NO: 15262 - DNA, 50 bp, synthetic construct
  source 1..50: mol_type = other DNA
aaacacataattctaaccttaaacccctcatctatactaaacttaaaaac

SEQ ID NO: 15263 - DNA, 50 bp, synthetic construct
  source 1..50: mol_type = other DNA
taaccaataactaccatattaaaccrcacaaattaaaaaacatttctatc

SEQ ID NO: 15264 - DNA, 50 bp, synthetic construct
  source 1..50: mol_type = other DNA
tacrataaccctatacattccttcaatacttactaaaacaattttaaaac

SEQ ID NO: 15265 - DNA, 50 bp, synthetic construct
  source 1..50: mol_type = other DNA
attctaacaaacactaaaaaaatacataaaatcaccrcaaacccaaacac

SEQ ID NO: 15266 - DNA, 50 bp, synthetic construct
  source 1..50: mol_type = other DNA
ctacttcatatacctaatctacttactccttcaaaaataatttctaaacc

SEQ ID NO: 15267 - DNA, 50 bp, synthetic construct
  source 1..50: mol_type = other DNA
ttattcatctcacaacatcacraaatcatttctattactatacttatttc

SEQ ID NO: 15268 - DNA, 50 bp, synthetic construct
  source 1..50: mol_type = other DNA
cctaattatttatatattacaaaacaacaactcctacaaataatactatc

SEQ ID NO: 15269 - DNA, 50 bp, synthetic construct
  source 1..50: mol_type = other DNA
aatattaacrcccataacaacacaaactacrtaaactatcaactaacatc

SEQ ID NO: 15270 - DNA, 50 bp, synthetic construct
  source 1..50: mol_type = other DNA
tttcctaactcctataaacaaatattaacrcccataacaacacaaactac

SEQ ID NO: 15271 - DNA, 50 bp, synthetic construct
  source 1..50: mol_type = other DNA
ccacaactacctcctaaaaaatttcctaactcctataaacaaatattaac

SEQ ID NO: 15272 - DNA, 50 bp, synthetic construct
  source 1..50: mol_type = other DNA
ataaactccaatacraaccacataaaaaacacaataaaatatccccaacc

SEQ ID NO: 15273 - DNA, 50 bp, synthetic construct
  source 1..50: mol_type = other DNA
aaaaaaacratctatcccactaacaaaaaacaactactacctaaaatcac

SEQ ID NO: 15274 - DNA, 50 bp, synthetic construct
  source 1..50: mol_type = other DNA
ttctctatatattttaatactaactttatttactaacttaaaatcctaac

SEQ ID NO: 15275 - DNA, 50 bp, synthetic construct
  source 1..50: mol_type = other DNA
ataccctcaatctaaatattttctaaaactatctatatacttttaaaaac

SEQ ID NO: 15276 - DNA, 50 bp, synthetic construct
  source 1..50: mol_type = other DNA
aaaccatctacaatcttcaaaatataaatctatacacatactttctactc

SEQ ID NO: 15277 - DNA, 50 bp, synthetic construct
  source 1..50: mol_type = other DNA
tcaaaaacaaatatttccaatttatctcctctaaaaaaacctacaaaacc

SEQ ID NO: 15278 - DNA, 50 bp, synthetic construct
  source 1..50: mol_type = other DNA
aactaaaaacacctatccttaatctttaaaaaaaaactcatctctatcac

SEQ ID NO: 15279 - DNA, 50 bp, synthetic construct
  source 1..50: mol_type = other DNA
tccacaaatttactcctccactaattccraaactcaaaaataaaaaccac

SEQ ID NO: 15280 - DNA, 50 bp, synthetic construct
  source 1..50: mol_type = other DNA
tacaacctaaaattatcrttcctccacaaatttactcctccactaattcc

SEQ ID NO: 15281 - DNA, 50 bp, synthetic construct
  source 1..50: mol_type = other DNA
aaattattataactatatttatcatttatcacctacaacctaaaattatc

SEQ ID NO: 15282 - DNA, 50 bp, synthetic construct
  source 1..50: mol_type = other DNA
aaataaaaaaaaataccaaaaccaaacccctttatttacaaaaccaaccc

SEQ ID NO: 15283 - DNA, 50 bp, synthetic construct
  source 1..50: mol_type = other DNA
cattaacaaaaacatctacrtcctaacctatacacattcctccctaaaac

SEQ ID NO: 15284 - DNA, 50 bp, synthetic construct
  source 1..50: mol_type = other DNA
acaaaaaaataaaccctaaaacacactaaaccattaacaaaaacatctac

SEQ ID NO: 15285 - DNA, 50 bp, synthetic construct
  source 1..50: mol_type = other DNA
aaaccacacaataaaaaacacaaacccacatctaactatacaaaacaaac

SEQ ID NO: 15286 - DNA, 50 bp, synthetic construct
  source 1..50: mol_type = other DNA
tctaaattcttaactcttaaaccttatcttctcactttccctaataacac

SEQ ID NO: 15287 - DNA, 50 bp, synthetic construct
  source 1..50: mol_type = other DNA
ttttttttacccaaaatacccattctacttaattaaaactcttacttccc

SEQ ID NO: 15288 - DNA, 50 bp, synthetic construct
  source 1..50: mol_type = other DNA
ttccttatatttctaattacttcctatactatcaactatattttatatac

SEQ ID NO: 15289 - DNA, 50 bp, synthetic construct
  source 1..50: mol_type = other DNA
aaatcttctaattaaaaaaaccattaattccattcattaactataaccrc

SEQ ID NO: 15290 - DNA, 50 bp, synthetic construct
  source 1..50: mol_type = other DNA
tttctacaaacrctactaaaccattcccaaaacaaacctttatctctccc

SEQ ID NO: 15291 - DNA, 50 bp, synthetic construct
  source 1..50: mol_type = other DNA
aaaatcctaaacctaacttaaaatttaactccccaaaaaaaaatcttttc

SEQ ID NO: 15292 - DNA, 50 bp, synthetic construct
  source 1..50: mol_type = other DNA
tcaatttctcaacaaatcttctctcacctctctaaaaaaccatactcttc

SEQ ID NO: 15293 - DNA, 50 bp, synthetic construct
  source 1..50: mol_type = other DNA
ttttaaaaaacctttctcctaacattataccacaatattctccaacttcc

SEQ ID NO: 15294 - DNA, 50 bp, synthetic construct
  source 1..50: mol_type = other DNA
aaatcttttccactaaaacactacaaacatctacaactttctctacctac

SEQ ID NO: 15295 - DNA, 50 bp, synthetic construct
  source 1..50: mol_type = other DNA
aaaaccacatcaacaaaaaaatcaattcccttatccaatcactactttcc

SEQ ID NO: 15296 - DNA, 50 bp, synthetic construct
  source 1..50: mol_type = other DNA
ctccactacttcaaaaaaatattatctccctaaacaacctataaaatacc

SEQ ID NO: 15297 - DNA, 50 bp, synthetic construct
  source 1..50: mol_type = other DNA
tccraaaacaccaacttaaccttaaaaaacaacaacaaattctccacrac

SEQ ID NO: 15298 - DNA, 50 bp, synthetic construct
  source 1..50: mol_type = other DNA
crctccraaaacaccaacttaaccttaaaaaacaacaacaaattctccac

SEQ ID NO: 15299 - DNA, 50 bp, synthetic construct
  source 1..50: mol_type = other DNA
crttattactctcratatccrtaaaatcttaacaactattactcraaaac

SEQ ID NO: 15300 - DNA, 50 bp, synthetic construct
  source 1..50: mol_type = other DNA
atataaataatatacataacrtaatccaaaaaaaacacccracaatattc

SEQ ID NO: 15301 - DNA, 50 bp, synthetic construct
  source 1..50: mol_type = other DNA
aaaactccaacctaaaactcccaaatataacaaccctttaaaaaacaaac

SEQ ID NO: 15302 - DNA, 50 bp, synthetic construct
  source 1..50: mol_type = other DNA
aactccaacctaaaactcccaaatataacaaccctttaaaaaacaaacrc

SEQ ID NO: 15303 - DNA, 50 bp, synthetic construct
  source 1..50: mol_type = other DNA
ataaaacraactttatccaaaacctctaaaaaacatcactataaaccrcc

SEQ ID NO: 15304 - DNA, 50 bp, synthetic construct
  source 1..50: mol_type = other DNA
taaataaaacraactttatccaaaacctctaaaaaacatcactataaacc

SEQ ID NO: 15305 - DNA, 50 bp, synthetic construct
  source 1..50: mol_type = other DNA
cccaaatataaaaaacacaacrctcttaccrataatttaaaactaacctc

SEQ ID NO: 15306 - DNA, 50 bp, synthetic construct
  source 1..50: mol_type = other DNA
ctcatatctactacratttattactccataataaaaacccctaaaaaatc

SEQ ID NO: 15307 - DNA, 50 bp, synthetic construct
  source 1..50: mol_type = other DNA
ttactccataataaaaacccctaaaaaatcrccttacctctaaaaaaaac

SEQ ID NO: 15308 - DNA, 50 bp, synthetic construct
  source 1..50: mol_type = other DNA
aatcrccttacctctaaaaaaaacrctttacttcccaaaaaatctaattc

SEQ ID NO: 15309 - DNA, 50 bp, synthetic construct
  source 1..50: mol_type = other DNA
aaaaactaaaaaacaaacratacaaaaactccaaactctcataaaaaaac

SEQ ID NO: 15310 - DNA, 50 bp, synthetic construct
  source 1..50: mol_type = other DNA
tataataatttctactccttaaaaaaaatatcttatttccrttttcttcc

SEQ ID NO: 15311 - DNA, 50 bp, synthetic construct
  source 1..50: mol_type = other DNA
accaaatacrtataataatttctactccttaaaaaaaatatcttatttcc

SEQ ID NO: 15312 - DNA, 50 bp, synthetic construct
  source 1..50: mol_type = other DNA
atatattataaaaaaaacacaaacaaccaaatctttacatttatataatc

SEQ ID NO: 15313 - DNA, 50 bp, synthetic construct
  source 1..50: mol_type = other DNA
crcccraccctacaatcttttttaatcracacttaataaaattatttaac

SEQ ID NO: 15314 - DNA, 50 bp, synthetic construct
  source 1..50: mol_type = other DNA
ataacccaaacttaaatactataacrcratcttaactcactacaatctcc

SEQ ID NO: 15315 - DNA, 50 bp, synthetic construct
  source 1..50: mol_type = other DNA
taattttaaaataaaatctcrttctataacccaaacttaaatactataac

SEQ ID NO: 15316 - DNA, 50 bp, synthetic construct
  source 1..50: mol_type = other DNA
tattatcctatctatctaattccaacctcraaaatttaataatacraccc

SEQ ID NO: 15317 - DNA, 50 bp, synthetic construct
  source 1..50: mol_type = other DNA
caataataataataataaaccatattactaaaacctccctaacccataac

SEQ ID NO: 15318 - DNA, 50 bp, synthetic construct
  source 1..50: mol_type = other DNA
attctaccccctctcccaaatcaaactcatctttttaaaaaaatcaaacc

SEQ ID NO: 15319 - DNA, 50 bp, synthetic construct
  source 1..50: mol_type = other DNA
ttaaacrccttattcactaatatctctcaacaatcaacaatacctaacac

SEQ ID NO: 15320 - DNA, 50 bp, synthetic construct
  source 1..50: mol_type = other DNA
taccacrtaccaaacactattaactattaaaaaacatcaataaataaaac

SEQ ID NO: 15321 - DNA, 50 bp, synthetic construct
  source 1..50: mol_type = other DNA
cactattaactattaaaaaacatcaataaataaaacrtccaaaaccatcc

SEQ ID NO: 15322 - DNA, 50 bp, synthetic construct
  source 1..50: mol_type = other DNA
ataacccaaacacctcctttaaaaaatcatactaccaactatctatttac

SEQ ID NO: 15323 - DNA, 50 bp, synthetic construct
  source 1..50: mol_type = other DNA
aaaaaaaaacccaaaccatctctattctacaaataattaattaaacaccc

SEQ ID NO: 15324 - DNA, 50 bp, synthetic construct
  source 1..50: mol_type = other DNA
aacataaacatcaaactcacaaactttaacttttcctaccaactaaaacc

SEQ ID NO: 15325 - DNA, 50 bp, synthetic construct
  source 1..50: mol_type = other DNA
ccaaaatctataaacttaatattcatattatcatccaaaaaaatattctc

SEQ ID NO: 15326 - DNA, 50 bp, synthetic construct
  source 1..50: mol_type = other DNA
cttaatattcatattatcatccaaaaaaatattctcraacttcaaatccc

SEQ ID NO: 15327 - DNA, 50 bp, synthetic construct
  source 1..50: mol_type = other DNA
tcatacraactctactaaaaataatctacaccttacacaaactcaacatc

SEQ ID NO: 15328 - DNA, 50 bp, synthetic construct
  source 1..50: mol_type = other DNA
atacacratattaaatttatacaaaatacaaatcacctccaacaaaactc

SEQ ID NO: 15329 - DNA, 50 bp, synthetic construct
  source 1..50: mol_type = other DNA
tactactactaaaacaacccttcracatcaataaatataaaaacraatac

SEQ ID NO: 15330 - DNA, 50 bp, synthetic construct
  source 1..50: mol_type = other DNA
caaccaaaaattaaataacctccaatcaaccctaaaaaacccaatccctc

SEQ ID NO: 15331 - DNA, 50 bp, synthetic construct
  source 1..50: mol_type = other DNA
ctaaatcttaaaaaaaataaccctcctcaacccccaaaaactcaccctac

SEQ ID NO: 15332 - DNA, 50 bp, synthetic construct
  source 1..50: mol_type = other DNA
tccaaataaactttaaaaaaaaccccractaaacccctacactaaacccc

SEQ ID NO: 15333 - DNA, 50 bp, synthetic construct
  source 1..50: mol_type = other DNA
ractaaatacttcctcttatacataacctttctaaaatacataacaaatc

SEQ ID NO: 15334 - DNA, 50 bp, synthetic construct
  source 1..50: mol_type = other DNA
catatcctatcctctatataaaccttaaaaaccaaaaaacttcctacctc

SEQ ID NO: 15335 - DNA, 50 bp, synthetic construct
  source 1..50: mol_type = other DNA
aattacttaaatccaaaaaataaaactacaataaaccataattacacccc

SEQ ID NO: 15336 - DNA, 50 bp, synthetic construct
  source 1..50: mol_type = other DNA
ctcaaacaatcctacttcaacctcttcaataactaaaactacaaacccac

SEQ ID NO: 15337 - DNA, 50 bp, synthetic construct
  source 1..50: mol_type = other DNA
taaactataataaaaccctacatctacaaaactttttttaaaaaattaac

SEQ ID NO: 15338 - DNA, 50 bp, synthetic construct
  source 1..50: mol_type = other DNA
actcaaataatcctcctactttatactcccaaaatcctaaaattacaaac

SEQ ID NO: 15339 - DNA, 50 bp, synthetic construct
  source 1..50: mol_type = other DNA
accatatttaccaaactaatcttaaactcctaatctcaaataatctaccc

SEQ ID NO: 15340 - DNA, 50 bp, synthetic construct
  source 1..50: mol_type = other DNA
caaaatataattacaaatataaaatcccratatattctccctatatcttc

SEQ ID NO: 15341 - DNA, 50 bp, synthetic construct
  source 1..50: mol_type = other DNA
caaaaaaaacacaccraaactccacacctataaccacattctatttattc

SEQ ID NO: 15342 - DNA, 50 bp, synthetic construct
  source 1..50: mol_type = other DNA
caaaaaaaaaattcctaaaattaactatcccctaccaaacttaataaaac

SEQ ID NO: 15343 - DNA, 50 bp, synthetic construct
  source 1..50: mol_type = other DNA
aaattaactatcccctaccaaacttaataaaacrtctacaccttaactac

SEQ ID NO: 15344 - DNA, 50 bp, synthetic construct
  source 1..50: mol_type = other DNA
aaaaactctttactcaaaaaacaaatccctcacraaacccaaaactatac

SEQ ID NO: 15345 - DNA, 50 bp, synthetic construct
  source 1..50: mol_type = other DNA
tacataaaatcraaatcaaaaactctttactcaaaaaacaaatccctcac

SEQ ID NO: 15346 - DNA, 50 bp, synthetic construct
  source 1..50: mol_type = other DNA
taattaaaatatttaatattattcacatcaatacacttaaacaaacacac

SEQ ID NO: 15347 - DNA, 50 bp, synthetic construct
  source 1..50: mol_type = other DNA
taataaacraacttaataaaaccccttttatcctcctcctaatacccrac

SEQ ID NO: 15348 - DNA, 50 bp, synthetic construct
  source 1..50: mol_type = other DNA
tttttctactacrttccaacaataaataaacractcccaaaaccttattc

SEQ ID NO: 15349 - DNA, 50 bp, synthetic construct
  source 1..50: mol_type = other DNA
aaaaaataacacraaccccraaaacaaaactaacaataaaccraaatcac

SEQ ID NO: 15350 - DNA, 50 bp, synthetic construct
  source 1..50: mol_type = other DNA
cacatcaacaaacrtacctctaaaaaaaatactctcrcactaaacttaac

SEQ ID NO: 15351 - DNA, 50 bp, synthetic construct
  source 1..50: mol_type = other DNA
rccaaaaaactttccttaactcctcccatccctttacctcctttaaaatc

SEQ ID NO: 15352 - DNA, 50 bp, synthetic construct
  source 1..50: mol_type = other DNA
taaaaccccrtctctacaaaaaataaaaattcaaataaatattacctccc

SEQ ID NO: 15353 - DNA, 50 bp, synthetic construct
  source 1..50: mol_type = other DNA
aaaaataatttatataactactaaattataaccaaataaaaataactcac

SEQ ID NO: 15354 - DNA, 50 bp, synthetic construct
  source 1..50: mol_type = other DNA
aaataatttatataactactaaattataaccaaataaaaataactcacrc

SEQ ID NO: 15355 - DNA, 50 bp, synthetic construct
  source 1..50: mol_type = other DNA
actaaattataaccaaataaaaataactcacrcrtataatctcaacaatc

SEQ ID NO: 15356 - DNA, 50 bp, synthetic construct
  source 1..50: mol_type = other DNA
acctaataaaactaaaaaacttaacaaacacaaattaaactaaaaaatcc

SEQ ID NO: 15357 - DNA, 50 bp, synthetic construct
  source 1..50: mol_type = other DNA
aaactacaactaaacttaatactaacatccctaaacttaaaattaatatc

SEQ ID NO: 15358 - DNA, 50 bp, synthetic construct
  source 1..50: mol_type = other DNA
ctacaactaaacttaatactaacatccctaaacttaaaattaatatcrac

SEQ ID NO: 15359 - DNA, 50 bp, synthetic construct
  source 1..50: mol_type = other DNA
caactctctaacccraacaaaaaaactaatattcctcatctaaacacccc

SEQ ID NO: 15360 - DNA, 50 bp, synthetic construct
  source 1..50: mol_type = other DNA
aaacrccaaatacaaaaactataaaactaccacrtcctctaaactaactc

SEQ ID NO: 15361 - DNA, 50 bp, synthetic construct
  source 1..50: mol_type = other DNA
accaaacaaaactaccaaaacrccaaatacaaaaactataaaactaccac

SEQ ID NO: 15362 - DNA, 50 bp, synthetic construct
  source 1..50: mol_type = other DNA
attcaaaaactacaaacaacrtaaatctaaccaaacaaaactaccaaaac

SEQ ID NO: 15363 - DNA, 50 bp, synthetic construct
  source 1..50: mol_type = other DNA
cccaccaacrctactcacaaaaaaccaaaaattcaaaaactacaaacaac

SEQ ID NO: 15364 - DNA, 50 bp, synthetic construct
  source 1..50: mol_type = other DNA
aaaaaaccaaaattttccraaataaaaactaaccccaaataaacctaccc

SEQ ID NO: 15365 - DNA, 50 bp, synthetic construct
  source 1..50: mol_type = other DNA
aaatccacttaaaaccaatttctacctcraaaaatcctaacttcctcaac

SEQ ID NO: 15366 - DNA, 50 bp, synthetic construct
  source 1..50: mol_type = other DNA
ctatcctaaactaaaaaaatccttaaaccctaactacaatacaatactac

SEQ ID NO: 15367 - DNA, 50 bp, synthetic construct
  source 1..50: mol_type = other DNA
accactacttcctttctcctcatttaccttaccaaatccaatactataac

SEQ ID NO: 15368 - DNA, 50 bp, synthetic construct
  source 1..50: mol_type = other DNA
aatctttttataaattaacttataaacaactaatcraaaatctctttccc

SEQ ID NO: 15369 - DNA, 50 bp, synthetic construct
  source 1..50: mol_type = other DNA
aatcccaaaaaaatcccraattaataacttcatatctaactcccaaactc

SEQ ID NO: 15370 - DNA, 50 bp, synthetic construct
  source 1..50: mol_type = other DNA
acctcctcttacaaaacraatttaaaaatcaaatataaaaccactaatcc

SEQ ID NO: 15371 - DNA, 50 bp, synthetic construct
  source 1..50: mol_type = other DNA
caaaccaaatacaataactcatatctataatcctaacactttatttttac

SEQ ID NO: 15372 - DNA, 50 bp, synthetic construct
  source 1..50: mol_type = other DNA
accaaatacaataactcatatctataatcctaacactttatttttacrac

SEQ ID NO: 15373 - DNA, 50 bp, synthetic construct
  source 1..50: mol_type = other DNA
taataaatttactaaacacctactatatacctaaaaaacatacttccttc

SEQ ID NO: 15374 - DNA, 50 bp, synthetic construct
  source 1..50: mol_type = other DNA
acaataaaaaaatacaaccaactaaaaacraaccctaaaaactaaataac

SEQ ID NO: 15375 - DNA, 50 bp, synthetic construct
  source 1..50: mol_type = other DNA
ccctactcctcaaaccatacccactcctcacaatttattaaaaaaaccac

SEQ ID NO: 15376 - DNA, 50 bp, synthetic construct
  source 1..50: mol_type = other DNA
aaaacaaattcctattccttacaacaaaataatcccaaaaatataaaatc

SEQ ID NO: 15377 - DNA, 50 bp, synthetic construct
  source 1..50: mol_type = other DNA
taaccttacaacccaataaaaaaaaccaaaataaaaaactctaactaaac

SEQ ID NO: 15378 - DNA, 50 bp, synthetic construct
  source 1..50: mol_type = other DNA
accaaaacctcctatcctaactcttctcactaaactacaaaactaaaacc

SEQ ID NO: 15379 - DNA, 50 bp, synthetic construct
  source 1..50: mol_type = other DNA
atatcacccaataaacaaaaactaaataccaaaccttaaacrcctaccac

SEQ ID NO: 15380 - DNA, 50 bp, synthetic construct
  source 1..50: mol_type = other DNA
aataaatatatatcacccaataaacaaaaactaaataccaaaccttaaac

SEQ ID NO: 15381 - DNA, 50 bp, synthetic construct
  source 1..50: mol_type = other DNA
ttactttataaaaatttaaaatatcactaatttttcccttaacattaaac

SEQ ID NO: 15382 - DNA, 50 bp, synthetic construct
  source 1..50: mol_type = other DNA
aacactaaacrtaataactcatacctataatcacaacactctaaaaaacc

SEQ ID NO: 15383 - DNA, 50 bp, synthetic construct
  source 1..50: mol_type = other DNA
aaaaataacaaataacrctaaaaacaaactctaaaaaaactcatataccc

SEQ ID NO: 15384 - DNA, 50 bp, synthetic construct
  source 1..50: mol_type = other DNA
acrctaaaaacaaactctaaaaaaactcatatacccraatcccataaatc

SEQ ID NO: 15385 - DNA, 50 bp, synthetic construct
  source 1..50: mol_type = other DNA
aaaaaactcatatacccraatcccataaatcrtaaaaactattaaaaaac

SEQ ID NO: 15386 - DNA, 50 bp, synthetic construct
  source 1..50: mol_type = other DNA
taatattaaattaaaaaccaactactaacttaacccctaaaaaataacac

SEQ ID NO: 15387 - DNA, 50 bp, synthetic construct
  source 1..50: mol_type = other DNA
atacaataaacrtaaaaaacaaatatcataaaacacaaatatcacraaac

SEQ ID NO: 15388 - DNA, 50 bp, synthetic construct
  source 1..50: mol_type = other DNA
ctactctctctaacaaaaaaaatcctacaaaacaaaaatatacaataaac

SEQ ID NO: 15389 - DNA, 50 bp, synthetic construct
  source 1..50: mol_type = other DNA
aaaaaaaacrataaatttcctacatatctttactcttctcaaaaaacctc

SEQ ID NO: 15390 - DNA, 50 bp, synthetic construct
  source 1..50: mol_type = other DNA
cttctcaaaaaacctcraccccrataaacatataatcaaatctaacaaac

SEQ ID NO: 15391 - DNA, 50 bp, synthetic construct
  source 1..50: mol_type = other DNA
aaaaacctcraccccrataaacatataatcaaatctaacaaacractaac

SEQ ID NO: 15392 - DNA, 50 bp, synthetic construct
  source 1..50: mol_type = other DNA
caaaactacttcaaaactttaattaaacaaaaataactcccaaacraacc

SEQ ID NO: 15393 - DNA, 50 bp, synthetic construct
  source 1..50: mol_type = other DNA
aaaatttacctctactcctaaacaaaccaaaaccaaacraaaaaaacttc

SEQ ID NO: 15394 - DNA, 50 bp, synthetic construct
  source 1..50: mol_type = other DNA
ccrcaactctataaaatttacctctactcctaaacaaaccaaaaccaaac

SEQ ID NO: 15395 - DNA, 50 bp, synthetic construct
  source 1..50: mol_type = other DNA
ccrtctaaccctaacctatccaaaaacaaaaataaatctcacaaaactac

SEQ ID NO: 15396 - DNA, 50 bp, synthetic construct
  source 1..50: mol_type = other DNA
ctaaccctaacctatccaaaaacaaaaataaatctcacaaaactacratc

SEQ ID NO: 15397 - DNA, 50 bp, synthetic construct
  source 1..50: mol_type = other DNA
caaccccaaatcaaaacattaaaacrtaatcaattccaatatactccatc

SEQ ID NO: 15398 - DNA, 50 bp, synthetic construct
  source 1..50: mol_type = other DNA
aaacacaacaaaacctcaaaaattcrataaaacacattaaaactaaccac

SEQ ID NO: 15399 - DNA, 50 bp, synthetic construct
  source 1..50: mol_type = other DNA
cattaaaactaaccacrctttaatattctaacttaaaactacatactctc

SEQ ID NO: 15400 - DNA, 50 bp, synthetic construct
  source 1..50: mol_type = other DNA
aacraatctaaaaaacaactctttaacaaaaaaatcataatctaacctcc

SEQ ID NO: 15401 - DNA, 50 bp, synthetic construct
  source 1..50: mol_type = other DNA
tatctctatctttatctaacaaaaaattaatctctaccaaaaaataaacc

SEQ ID NO: 15402 - DNA, 50 bp, synthetic construct
  source 1..50: mol_type = other DNA
aatctcaaaaactcccaaatcccaactctacattcccaattctattaaac

SEQ ID NO: 15403 - DNA, 50 bp, synthetic construct
  source 1..50: mol_type = other DNA
ctaactacctaaaaacttaaacctatcaaacccrctcaaaacctaaaatc

SEQ ID NO: 15404 - DNA, 50 bp, synthetic construct
  source 1..50: mol_type = other DNA
actttaaaaataaacccctaactacctaaaaacttaaacctatcaaaccc

SEQ ID NO: 15405 - DNA, 50 bp, synthetic construct
  source 1..50: mol_type = other DNA
taataacaaactttaattatcaaaaaccaaaacccaacaaaccaaaatcc

SEQ ID NO: 15406 - DNA, 50 bp, synthetic construct
  source 1..50: mol_type = other DNA
caataatactatcaaaccccaaataaccacacacrataccraaaattccc

SEQ ID NO: 15407 - DNA, 50 bp, synthetic construct
  source 1..50: mol_type = other DNA
tacccaaaaaacttatttctaatctaaactcacaaataaaaaacacaacc

SEQ ID NO: 15408 - DNA, 50 bp, synthetic construct
  source 1..50: mol_type = other DNA
aaccacctactaaactaataaaacccactcaaaactaaactcctaaaaac

SEQ ID NO: 15409 - DNA, 50 bp, synthetic construct
  source 1..50: mol_type = other DNA
ctaaaacccraaataacaaatctaactcaccaaaaaaattaaaatctttc

SEQ ID NO: 15410 - DNA, 50 bp, synthetic construct
  source 1..50: mol_type = other DNA
tctcaaaacttaccaaatccactataatatccttaaaatatactaaaacc

SEQ ID NO: 15411 - DNA, 50 bp, synthetic construct
  source 1..50: mol_type = other DNA
aattcccttataactaccaacaaaaataccctaacctcaaaaaatataac

SEQ ID NO: 15412 - DNA, 50 bp, synthetic construct
  source 1..50: mol_type = other DNA
caaacaacaaaaactactaacccaaccaacaacacaaatctaaacccrtc

SEQ ID NO: 15413 - DNA, 50 bp, synthetic construct
  source 1..50: mol_type = other DNA
ctaattctcatctaataaaatataaaatactcrattccacctaacttatc

SEQ ID NO: 15414 - DNA, 50 bp, synthetic construct
  source 1..50: mol_type = other DNA
tccatatttcttttccatatttctaattccacaaaaaaacraataacctc

SEQ ID NO: 15415 - DNA, 50 bp, synthetic construct
  source 1..50: mol_type = other DNA
ttataatttttccatatttcttttccatatttctaattccacaaaaaaac

SEQ ID NO: 15416 - DNA, 50 bp, synthetic construct
  source 1..50: mol_type = other DNA
atataaattacacttctaataaatatcaatattaaaaatatcttcaattc

SEQ ID NO: 15417 - DNA, 50 bp, synthetic construct
  source 1..50: mol_type = other DNA
aattttcaaattcatctccattataaaataaatactaaaatataccttac

SEQ ID NO: 15418 - DNA, 50 bp, synthetic construct
  source 1..50: mol_type = other DNA
taaaattaactttcrattcattcaaccaaatttcccraaaatcccaaccc

SEQ ID NO: 15419 - DNA, 50 bp, synthetic construct
  source 1..50: mol_type = other DNA
caaacactacraaatttacaactataaaaattacaaaaacttcttcaaac

SEQ ID NO: 15420 - DNA, 50 bp, synthetic construct
  source 1..50: mol_type = other DNA
aaaaaatccaaatcaattatctcctacaaaaatataaaatccatattttc

SEQ ID NO: 15421 - DNA, 50 bp, synthetic construct
  source 1..50: mol_type = other DNA
aaaccacatattaattaaatataatataaaaatatcaccctaaaaataac

SEQ ID NO: 15422 - DNA, 50 bp, synthetic construct
  source 1..50: mol_type = other DNA
caaaaaatctacaaattacaccaccccaaaatcaaaaaatacacatctcc

SEQ ID NO: 15423 - DNA, 50 bp, synthetic construct
  source 1..50: mol_type = other DNA
tataaccacaaaatctacatatctattcacatatattccaaaaaaaaaac

SEQ ID NO: 15424 - DNA, 50 bp, synthetic construct
  source 1..50: mol_type = other DNA
tacacaataacaatactttcctaaaaaccttttctttatcttttactatc

SEQ ID NO: 15425 - DNA, 50 bp, synthetic construct
  source 1..50: mol_type = other DNA
aaatcaacaatcttaaacacattcaccccaaataactttttctccctatc

SEQ ID NO: 15426 - DNA, 50 bp, synthetic construct
  source 1..50: mol_type = other DNA
aaaatataatttaataaaataataacaacattataatacaaccaaaacac

SEQ ID NO: 15427 - DNA, 50 bp, synthetic construct
  source 1..50: mol_type = other DNA
aaaataacttaataccatatctacccaaataacattatatcatttcatac

SEQ ID NO: 15428 - DNA, 50 bp, synthetic construct
  source 1..50: mol_type = other DNA
tactttactataacataacctattcttacacaaacrttaaattaaaaaac

SEQ ID NO: 15429 - DNA, 50 bp, synthetic construct
  source 1..50: mol_type = other DNA
actaccctcaaacctaataattttatttttctttttttcctatatcccac

SEQ ID NO: 15430 - DNA, 50 bp, synthetic construct
  source 1..50: mol_type = other DNA
tccctcaaaaaacaatacaataatactcacaaaaattaactaatatatcc

SEQ ID NO: 15431 - DNA, 50 bp, synthetic construct
  source 1..50: mol_type = other DNA
atacacacttacacttctactcctaccaataaactatttaattcaaaacc

SEQ ID NO: 15432 - DNA, 50 bp, synthetic construct
  source 1..50: mol_type = other DNA
tcaacttttactaacccaataacactctctacatccacattttacttatc

SEQ ID NO: 15433 - DNA, 50 bp, synthetic construct
  source 1..50: mol_type = other DNA
acaaaaacaccctaaatataaaacctaataaaaatccataaaaaaacaac

SEQ ID NO: 15434 - DNA, 50 bp, synthetic construct
  source 1..50: mol_type = other DNA
aaaaataactcctaaccattttcaaccacaaaataaatatattcaatatc

SEQ ID NO: 15435 - DNA, 50 bp, synthetic construct
  source 1..50: mol_type = other DNA
ataataacaaaactaaaactaaaactaatatctctaaaatcttaattcac

SEQ ID NO: 15436 - DNA, 50 bp, synthetic construct
  source 1..50: mol_type = other DNA
acaacataactaatcccctctctactaataacacaaaaaattaaccaaac

SEQ ID NO: 15437 - DNA, 50 bp, synthetic construct
  source 1..50: mol_type = other DNA
cttataatcaaataacttataaaaccatttaataaacaaacaaaataaac

SEQ ID NO: 15438 - DNA, 50 bp, synthetic construct
  source 1..50: mol_type = other DNA
acccacatacccttctacctattctaaccaaaaaccttaaaataaatcac

SEQ ID NO: 15439 - DNA, 50 bp, synthetic construct
  source 1..50: mol_type = other DNA
aaataaatcacrcttaacttatctctttttcttatattcccataaaatcc

SEQ ID NO: 15440 - DNA, 50 bp, synthetic construct
  source 1..50: mol_type = other DNA
taaatcacrcttaacttatctctttttcttatattcccataaaatccrac

SEQ ID NO: 15441 - DNA, 50 bp, synthetic construct
  source 1..50: mol_type = other DNA
atataaaataaatctaacaactccatatacatatcaatatactaacaaac

SEQ ID NO: 15442 - DNA, 50 bp, synthetic construct
  source 1..50: mol_type = other DNA
actcaatccattattctatttacctttttctaaatttaaattcaatctac

SEQ ID NO: 15443 - DNA, 50 bp, synthetic construct
  source 1..50: mol_type = other DNA
actcaactaatctctttaactttcctatttatattcctacttataattac

SEQ ID NO: 15444 - DNA, 50 bp, synthetic construct
  source 1..50: mol_type = other DNA
aaaaccaacttaccttttaactacccrtataatacttaaacactattacc

SEQ ID NO: 15445 - DNA, 50 bp, synthetic construct
  source 1..50: mol_type = other DNA
actaaccatttccacatatcaaataaaaccaacttaccttttaactaccc

SEQ ID NO: 15446 - DNA, 50 bp, synthetic construct
  source 1..50: mol_type = other DNA
actttacacaatctaactctcacccattttaaaaaaccctctccttttac

SEQ ID NO: 15447 - DNA, 50 bp, synthetic construct
  source 1..50: mol_type = other DNA
caatctaactctcacccattttaaaaaaccctctccttttacracacttc

SEQ ID NO: 15448 - DNA, 50 bp, synthetic construct
  source 1..50: mol_type = other DNA
atcccrtcacataaattcctaatacccttttcacaaacrataatctaatc

SEQ ID NO: 15449 - DNA, 50 bp, synthetic construct
  source 1..50: mol_type = other DNA
aaaaatttcacaaaaacaacatttcattattaaacctaataaaacatctc

SEQ ID NO: 15450 - DNA, 50 bp, synthetic construct
  source 1..50: mol_type = other DNA
taaactatatttaaaaacttaattttaaatcccaatttaaacaccaatcc

SEQ ID NO: 15451 - DNA, 50 bp, synthetic construct
  source 1..50: mol_type = other DNA
aaactatattttccctcctaaaataaataacacaatcactataaaaaaac

SEQ ID NO: 15452 - DNA, 50 bp, synthetic construct
  source 1..50: mol_type = other DNA
ccatcatatccrcaaacttaaccaacaaccttctcaaaaactaaatccac

SEQ ID NO: 15453 - DNA, 50 bp, synthetic construct
  source 1..50: mol_type = other DNA
rattccttacratcaaaatactacaaaacrtaactccccacaataaatac

SEQ ID NO: 15454 - DNA, 50 bp, synthetic construct
  source 1..50: mol_type = other DNA
cttttaattttaaacaacaatcatatcttccaaataatctcaatcaacac

SEQ ID NO: 15455 - DNA, 50 bp, synthetic construct
  source 1..50: mol_type = other DNA
aacttccctaattctcaactataaataacrtattacraaacttaatctcc

SEQ ID NO: 15456 - DNA, 50 bp, synthetic construct
  source 1..50: mol_type = other DNA
taaatcatactactaacttccctaattctcaactataaataacrtattac

SEQ ID NO: 15457 - DNA, 50 bp, synthetic construct
  source 1..50: mol_type = other DNA
aatcaaaatcccaaaatccaaaaaccaaacaatctaaaaatctaatatcc

SEQ ID NO: 15458 - DNA, 50 bp, synthetic construct
  source 1..50: mol_type = other DNA
tctcatacaaaaacaaccaattcttatctataccctaacatatccctatc

SEQ ID NO: 15459 - DNA, 50 bp, synthetic construct
  source 1..50: mol_type = other DNA
ctaacatatccctatcrtaacacaaatccaaccacatcacatttatctac

SEQ ID NO: 15460 - DNA, 50 bp, synthetic construct
  source 1..50: mol_type = other DNA
taaaattatacaaaaccacaaaataaacaaaatacatcttcctaaaaatc

SEQ ID NO: 15461 - DNA, 50 bp, synthetic construct
  source 1..50: mol_type = other DNA
actccacrtaaattttactttctcttctcaaaatattttaatataaaaac

SEQ ID NO: 15462 - DNA, 50 bp, synthetic construct
  source 1..50: mol_type = other DNA
tttaaaaactaaaaaactaccacaaaactactttattttttaaactccac

SEQ ID NO: 15463 - DNA, 50 bp, synthetic construct
  source 1..50: mol_type = other DNA
aatactttcaactctccaaaaataatacacrtataaaatccaaaacttcc

SEQ ID NO: 15464 - DNA, 50 bp, synthetic construct
  source 1..50: mol_type = other DNA
taatctttaacctctaataaaatactttcaactctccaaaaataatacac

SEQ ID NO: 15465 - DNA, 50 bp, synthetic construct
  source 1..50: mol_type = other DNA
aattaactaatcccaatacaataatattaacaactaattaatcataaccc

SEQ ID NO: 15466 - DNA, 50 bp, synthetic construct
  source 1..50: mol_type = other DNA
accrccaaaaaatataaactaaataaaacccatcacaacttaacaaaacc

SEQ ID NO: 15467 - DNA, 50 bp, synthetic construct
  source 1..50: mol_type = other DNA
tactcaaacttcaataataataaacrcttctcctaccacaaaactccaac

SEQ ID NO: 15468 - DNA, 50 bp, synthetic construct
  source 1..50: mol_type = other DNA
acccccataaaacccaacaaactaaaacccactaacttaaaattctcacc

SEQ ID NO: 15469 - DNA, 50 bp, synthetic construct
  source 1..50: mol_type = other DNA
cttaacacaaatcaattttttctaaataacctaatataaactcaaaaacc

SEQ ID NO: 15470 - DNA, 50 bp, synthetic construct
  source 1..50: mol_type = other DNA
tataaactcaaaaaccrtaataacctcataaactatttcaaactaaaaac

SEQ ID NO: 15471 - DNA, 50 bp, synthetic construct
  source 1..50: mol_type = other DNA
accccrctcataaaacctataaaataaatttaacaaaaaccaaaaaaacc

SEQ ID NO: 15472 - DNA, 50 bp, synthetic construct
  source 1..50: mol_type = other DNA
raaaaacraaaacrccttcaatacaaacctataaacaaaaacrtaaaaac

SEQ ID NO: 15473 - DNA, 50 bp, synthetic construct
  source 1..50: mol_type = other DNA
aaaataaaatttcatcatactaaccaaactaatctcraacccctaacctc

SEQ ID NO: 15474 - DNA, 50 bp, synthetic construct
  source 1..50: mol_type = other DNA
aacttctaaataaaattaattcttctaaataataatacattctccaactc

SEQ ID NO: 15475 - DNA, 50 bp, synthetic construct
  source 1..50: mol_type = other DNA
tataaaaatcrtcataatactaacttatcttcattaatattctctcctac

SEQ ID NO: 15476 - DNA, 50 bp, synthetic construct
  source 1..50: mol_type = other DNA
caacaaatatttcaaacrtaaatcaaaacrccattatctttataaaaatc

SEQ ID NO: 15477 - DNA, 50 bp, synthetic construct
  source 1..50: mol_type = other DNA
accatttatttacaccatcaacaacaaatatttcaaacrtaaatcaaaac

SEQ ID NO: 15478 - DNA, 50 bp, synthetic construct
  source 1..50: mol_type = other DNA
ttcaaaaatcttaccatttatttacaccatcaacaacaaatatttcaaac

SEQ ID NO: 15479 - DNA, 50 bp, synthetic construct
  source 1..50: mol_type = other DNA
tacataacaaataatctaaataaaaactcaaaaatcacttcraaacattc

SEQ ID NO: 15480 - DNA, 50 bp, synthetic construct
  source 1..50: mol_type = other DNA
aatcatttcacttctctactaaaaaccttccaataacttccccttttacc

SEQ ID NO: 15481 - DNA, 50 bp, synthetic construct
  source 1..50: mol_type = other DNA
tcttccttactctctatactacaataacactaacctcctttttattcctc

SEQ ID NO: 15482 - DNA, 50 bp, synthetic construct
  source 1..50: mol_type = other DNA
taaaattacaaataaaccaccraccaaacccaaaataacrtttcatcaac

SEQ ID NO: 15483 - DNA, 50 bp, synthetic construct
  source 1..50: mol_type = other DNA
actcaaataattctcctactttaacctcctcctaaacaactaaaactacc

SEQ ID NO: 15484 - DNA, 50 bp, synthetic construct
  source 1..50: mol_type = other DNA
tatcactaaccttcattttaatccraaataaataaacctactaaacaaac

SEQ ID NO: 15485 - DNA, 50 bp, synthetic construct
  source 1..50: mol_type = other DNA
aaaatccattaaaaatccacttactctttcaaaccatatcatcaaaaacc

SEQ ID NO: 15486 - DNA, 50 bp, synthetic construct
  source 1..50: mol_type = other DNA
caaataataactaaacracaaaaaccaaccctacrtaaaaatcctaaacc

SEQ ID NO: 15487 - DNA, 50 bp, synthetic construct
  source 1..50: mol_type = other DNA
ctatattatctaaaaaactactaaacccattcatctacttttcacraccc

SEQ ID NO: 15488 - DNA, 50 bp, synthetic construct
  source 1..50: mol_type = other DNA
aacaaacaataatacttccttataaatcraaataaaaacccttcaaaacc

SEQ ID NO: 15489 - DNA, 50 bp, synthetic construct
  source 1..50: mol_type = other DNA
caaacaataatacttccttataaatcraaataaaaacccttcaaaaccrc

SEQ ID NO: 15490 - DNA, 50 bp, synthetic construct
  source 1..50: mol_type = other DNA
tataactaaaaccacaataaccataaaactcaaaaccrcataaacaaaac

SEQ ID NO: 15491 - DNA, 50 bp, synthetic construct
  source 1..50: mol_type = other DNA
taacaacacttactataactaaaaccacaataaccataaaactcaaaacc

SEQ ID NO: 15492 - DNA, 50 bp, synthetic construct
  source 1..50: mol_type = other DNA
tctcataattactataatctcaatcacaacaaatactaccaaactcaaac

SEQ ID NO: 15493 - DNA, 50 bp, synthetic construct
  source 1..50: mol_type = other DNA
cataattactataatctcaatcacaacaaatactaccaaactcaaacrac

SEQ ID NO: 15494 - DNA, 50 bp, synthetic construct
  source 1..50: mol_type = other DNA
attaaaaaacaaatccaaaaataaaactaccaataacaccaaccccrccc

SEQ ID NO: 15495 - DNA, 50 bp, synthetic construct
  source 1..50: mol_type = other DNA
aaaacaaactaactatatatttacatttcctaacaaaaacaaccattaac

SEQ ID NO: 15496 - DNA, 50 bp, synthetic construct
  source 1..50: mol_type = other DNA
ccctctattattaaaaaataacacctatatatttttctttaactttacac

SEQ ID NO: 15497 - DNA, 50 bp, synthetic construct
  source 1..50: mol_type = other DNA
aaataaacaattacrcctacaaaaaatccttaactctcattataaaactc

SEQ ID NO: 15498 - DNA, 50 bp, synthetic construct
  source 1..50: mol_type = other DNA
aattacttactttcraattttataataaaaaccaaaaaccttctacaaac

SEQ ID NO: 15499 - DNA, 50 bp, synthetic construct
  source 1..50: mol_type = other DNA
aaaactaaaacaatcatcctaccatccaaaaaatacctaaactcracatc

SEQ ID NO: 15500 - DNA, 50 bp, synthetic construct
  source 1..50: mol_type = other DNA
taaataaatctacaacctaaaaactaaccctaaaaactctaaaaaccccc

SEQ ID NO: 15501 - DNA, 50 bp, synthetic construct
  source 1..50: mol_type = other DNA
acctatctatccctcccataaaaaactctaatcaaaatccaaatcaaacc

SEQ ID NO: 15502 - DNA, 50 bp, synthetic construct
  source 1..50: mol_type = other DNA
aacattacaccccaaataattaaaatataaaaataataacaacraaactc

SEQ ID NO: 15503 - DNA, 50 bp, synthetic construct
  source 1..50: mol_type = other DNA
tcccactaaaatctatcctactaatacacttacttccaaataccccttcc

SEQ ID NO: 15504 - DNA, 50 bp, synthetic construct
  source 1..50: mol_type = other DNA
taaaaaaacrtttcaaaccaactttaaataaaacaactcttacraccrtc

SEQ ID NO: 15505 - DNA, 50 bp, synthetic construct
  source 1..50: mol_type = other DNA
tcrtaaaaaaacrtttcaaaccaactttaaataaaacaactcttacracc

SEQ ID NO: 15506 - DNA, 50 bp, synthetic construct
  source 1..50: mol_type = other DNA
tacctcaaaaaaacacraaatttccatcctaatccaactcrtaaaaaaac

SEQ ID NO: 15507 - DNA, 50 bp, synthetic construct
  source 1..50: mol_type = other DNA
ctaaactctcacccttcccrctaaaaatttaacctacattcctaataaac

SEQ ID NO: 15508 - DNA, 50 bp, synthetic construct
  source 1..50: mol_type = other DNA
tcctaaaaacttaaacttttaccctaaatacctaaactctcacccttccc

SEQ ID NO: 15509 - DNA, 50 bp, synthetic construct
  source 1..50: mol_type = other DNA
acatactataattctacttcaccrcratctataaaaattaatacttaatc

SEQ ID NO: 15510 - DNA, 50 bp, synthetic construct
  source 1..50: mol_type = other DNA
tccctttatacataaaccccacttatcatcctataaaccccaaaaaaaac

SEQ ID NO: 15511 - DNA, 50 bp, synthetic construct
  source 1..50: mol_type = other DNA
aatcrataaaattaccactaaatcccccrtatcaactaaactaaataaac

SEQ ID NO: 15512 - DNA, 50 bp, synthetic construct
  source 1..50: mol_type = other DNA
cctactacrataaaataaccaaaatcrataaaattaccactaaatccccc

SEQ ID NO: 15513 - DNA, 50 bp, synthetic construct
  source 1..50: mol_type = other DNA
taactataatcctaacaaaaaaaacctactacrataaaataaccaaaatc

SEQ ID NO: 15514 - DNA, 50 bp, synthetic construct
  source 1..50: mol_type = other DNA
tatatcaccttttatatctaactataatcctaacaaaaaaaacctactac

SEQ ID NO: 15515 - DNA, 50 bp, synthetic construct
  source 1..50: mol_type = other DNA
aaaaacraaaatctcataaaactatcccttaactaaaaaacctccacccc

SEQ ID NO: 15516 - DNA, 50 bp, synthetic construct
  source 1..50: mol_type = other DNA
ctaaactttcaacacctactactaaaaattccccraaactaatcaaaaac

SEQ ID NO: 15517 - DNA, 50 bp, synthetic construct
  source 1..50: mol_type = other DNA
taacacacaacttctataacaaaactaaaaattcctaatacttcaacccc

SEQ ID NO: 15518 - DNA, 50 bp, synthetic construct
  source 1..50: mol_type = other DNA
tctacctacrtaacaaaaacattcactatacaataactatccctatactc

SEQ ID NO: 15519 - DNA, 50 bp, synthetic construct
  source 1..50: mol_type = other DNA
aaataactataacaaaatcatatccttttatcaaatcttactaaaaaatc

SEQ ID NO: 15520 - DNA, 50 bp, synthetic construct
  source 1..50: mol_type = other DNA
aaatcatatccttttatcaaatcttactaaaaaatcrtaaactaacttac

SEQ ID NO: 15521 - DNA, 50 bp, synthetic construct
  source 1..50: mol_type = other DNA
cttactaaaaaatcrtaaactaacttacrtctattctaaatataaacaac

SEQ ID NO: 15522 - DNA, 50 bp, synthetic construct
  source 1..50: mol_type = other DNA
rtaaactaacttacrtctattctaaatataaacaacrctactacataaac

SEQ ID NO: 15523 - DNA, 50 bp, synthetic construct
  source 1..50: mol_type = other DNA
ctaacttacrtctattctaaatataaacaacrctactacataaacratac

SEQ ID NO: 15524 - DNA, 50 bp, synthetic construct
  source 1..50: mol_type = other DNA
aaaaaactataccctaatacattccatatcttaatacattctaaaacaac

SEQ ID NO: 15525 - DNA, 50 bp, synthetic construct
  source 1..50: mol_type = other DNA
aaaacacactcattcctaccaaaaaacaccaaaccattcataaaaaatcc

SEQ ID NO: 15526 - DNA, 50 bp, synthetic construct
  source 1..50: mol_type = other DNA
ctctaacaaaacttaactatatatcccttccaaatctcacrctaaaatac

SEQ ID NO: 15527 - DNA, 50 bp, synthetic construct
  source 1..50: mol_type = other DNA
aacratatacctctaacaaaacttaactatatatcccttccaaatctcac

SEQ ID NO: 15528 - DNA, 50 bp, synthetic construct
  source 1..50: mol_type = other DNA
actactcaataaaaataaacttctctattactcacatacaaaacraaaac

SEQ ID NO: 15529 - DNA, 50 bp, synthetic construct
  source 1..50: mol_type = other DNA
aacttaactactcaataaaaataaacttctctattactcacatacaaaac

SEQ ID NO: 15530 - DNA, 50 bp, synthetic construct
  source 1..50: mol_type = other DNA
aaccaaaactataccactacactacaaccttaacaacaaaaccaaactcc

SEQ ID NO: 15531 - DNA, 50 bp, synthetic construct
  source 1..50: mol_type = other DNA
ataatcaaaataaacaacaaacrcacrtttatactatcaacrcctaacac

SEQ ID NO: 15532 - DNA, 50 bp, synthetic construct
  source 1..50: mol_type = other DNA
aaaaacactataatcaaaataaacaacaaacrcacrtttatactatcaac

SEQ ID NO: 15533 - DNA, 50 bp, synthetic construct
  source 1..50: mol_type = other DNA
tacaatactacaaaacacctaacaacrtatcaaacrctaacaatataaac

SEQ ID NO: 15534 - DNA, 50 bp, synthetic construct
  source 1..50: mol_type = other DNA
atactacaaaacacctaacaacrtatcaaacrctaacaatataaacrtac

SEQ ID NO: 15535 - DNA, 50 bp, synthetic construct
  source 1..50: mol_type = other DNA
caaacaaaaacaacratttattcaaaatcactcracttctactaaataac

SEQ ID NO: 15536 - DNA, 50 bp, synthetic construct
  source 1..50: mol_type = other DNA
cctccaaaatttaaaatcaaaatcccaaactacrtcatttaataaaaacc

SEQ ID NO: 15537 - DNA, 50 bp, synthetic construct
  source 1..50: mol_type = other DNA
cactaacaaaaacttaaaaattaacattctaaccaaatataataactcac

SEQ ID NO: 15538 - DNA, 50 bp, synthetic construct
  source 1..50: mol_type = other DNA
aaaatcaaaaaacacacataaaaacaatcrtaaaataccattaaaacacc

SEQ ID NO: 15539 - DNA, 50 bp, synthetic construct
  source 1..50: mol_type = other DNA
taataataccttacrattattttcatatatatttcttaacttcactctac

SEQ ID NO: 15540 - DNA, 50 bp, synthetic construct
  source 1..50: mol_type = other DNA
aacaattcttaaataaaacaaccaacaaactaatttacaccrtactaaac

SEQ ID NO: 15541 - DNA, 50 bp, synthetic construct
  source 1..50: mol_type = other DNA
cctcccatcttaatccaaataaaactaaaactaaactaaacacaaactac

SEQ ID NO: 15542 - DNA, 50 bp, synthetic construct
  source 1..50: mol_type = other DNA
attaaccaaacataataataccaaacaaaaaaaacctcaaactacccaac

SEQ ID NO: 15543 - DNA, 50 bp, synthetic construct
  source 1..50: mol_type = other DNA
accatcactaaaaccttatactatcaacactaataaataaaacaaccctc

SEQ ID NO: 15544 - DNA, 50 bp, synthetic construct
  source 1..50: mol_type = other DNA
aaccctcrtatttttctcctaaaacatccaaaacaaaataattaacaaac

SEQ ID NO: 15545 - DNA, 50 bp, synthetic construct
  source 1..50: mol_type = other DNA
tctcctaaaacatccaaaacaaaataattaacaaacraaaataaacacac

SEQ ID NO: 15546 - DNA, 50 bp, synthetic construct
  source 1..50: mol_type = other DNA
catccaaaacaaaataattaacaaacraaaataaacacacrctaactcac

SEQ ID NO: 15547 - DNA, 50 bp, synthetic construct
  source 1..50: mol_type = other DNA
ccctttttccataacttctacaaaacaactaaaacccaaaacrcctctac

SEQ ID NO: 15548 - DNA, 50 bp, synthetic construct
  source 1..50: mol_type = other DNA
actcatttccctttttccataacttctacaaaacaactaaaacccaaaac

SEQ ID NO: 15549 - DNA, 50 bp, synthetic construct
  source 1..50: mol_type = other DNA
aaatatatctaaatcctaaaaacaataatcaaaactcttcaaatcctctc

SEQ ID NO: 15550 - DNA, 50 bp, synthetic construct
  source 1..50: mol_type = other DNA
ctaactatcaaaacraaataactaactctactaaaaacaacaacccccac

SEQ ID NO: 15551 - DNA, 50 bp, synthetic construct
  source 1..50: mol_type = other DNA
acccactaacacacrtaaaaattactatcttcaacaaaaccaaccactcc

SEQ ID NO: 15552 - DNA, 50 bp, synthetic construct
  source 1..50: mol_type = other DNA
aaaaaaaaactcaaaacctataactaattcacratactcatctacacccc

SEQ ID NO: 15553 - DNA, 50 bp, synthetic construct
  source 1..50: mol_type = other DNA
cctactaataaccttaaaccataaaaattatcraaatataaataaacacc

SEQ ID NO: 15554 - DNA, 50 bp, synthetic construct
  source 1..50: mol_type = other DNA
tctcaacrccctcaaccatatcaacaaatctaataaaaatttccctaaac

SEQ ID NO: 15555 - DNA, 50 bp, synthetic construct
  source 1..50: mol_type = other DNA
ctacaacctctctctccttataaaacctctttatataaaataaaaacccc

SEQ ID NO: 15556 - DNA, 50 bp, synthetic construct
  source 1..50: mol_type = other DNA
aacaaccccaataaataccraatacttattctaaataaaactacccacac

SEQ ID NO: 15557 - DNA, 50 bp, synthetic construct
  source 1..50: mol_type = other DNA
ttctaaataaaactacccacacrtacaaaatatacttataaacacaatac

SEQ ID NO: 15558 - DNA, 50 bp, synthetic construct
  source 1..50: mol_type = other DNA
ataaaactacccacacrtacaaaatatacttataaacacaatacrcttac

SEQ ID NO: 15559 - DNA, 50 bp, synthetic construct
  source 1..50: mol_type = other DNA
aacatacatatatacaaacctacaatatacctatatataaaactcaacac

SEQ ID NO: 15560 - DNA, 50 bp, synthetic construct
  source 1..50: mol_type = other DNA
acaaaaatctcccctaaaacaaatataactaactaaacaaaacaaaaaac

SEQ ID NO: 15561 - DNA, 50 bp, synthetic construct
  source 1..50: mol_type = other DNA
taactaactaaacaaaacaaaaaacrcctaaactcccaaaaaatcccaac

SEQ ID NO: 15562 - DNA, 50 bp, synthetic construct
  source 1..50: mol_type = other DNA
aaaacaaataccaactcaaaaatacaaacraaccacaacraaaaaaaccc

SEQ ID NO: 15563 - DNA, 50 bp, synthetic construct
  source 1..50: mol_type = other DNA
ctataccattcccaaacttaaactaaaaaccttcaaataccttctataac

SEQ ID NO: 15564 - DNA, 50 bp, synthetic construct
  source 1..50: mol_type = other DNA
cataataactcaaaaataataataaaccaacccttcacaaaccacacacc

SEQ ID NO: 15565 - DNA, 50 bp, synthetic construct
  source 1..50: mol_type = other DNA
aaaaacttctacaaaaaaaatacrcaaaaaaattccraaaacacaattcc

SEQ ID NO: 15566 - DNA, 50 bp, synthetic construct
  source 1..50: mol_type = other DNA
taaacccaacacraaaaaacttctacaaaaaaaatacrcaaaaaaattcc

SEQ ID NO: 15567 - DNA, 50 bp, synthetic construct
  source 1..50: mol_type = other DNA
aaataaaaacrcctaaacccaacacraaaaaacttctacaaaaaaaatac

SEQ ID NO: 15568 - DNA, 50 bp, synthetic construct
  source 1..50: mol_type = other DNA
aatacctactatccctatacaacactaacactcttcttaaatcttatacc

SEQ ID NO: 15569 - DNA, 50 bp, synthetic construct
  source 1..50: mol_type = other DNA
ataatcctctcactaaaaccaattacctaaatcaactaaaacttaaacrc

SEQ ID NO: 15570 - DNA, 50 bp, synthetic construct
  source 1..50: mol_type = other DNA
actcaaaaaaaactccaaacctttaactctcctaaaatattaaaataacc

SEQ ID NO: 15571 - DNA, 50 bp, synthetic construct
  source 1..50: mol_type = other DNA
aaaacacaatctctctaatctacaatacccrtcacaataaaatcaaaatc

SEQ ID NO: 15572 - DNA, 50 bp, synthetic construct
  source 1..50: mol_type = other DNA
atccaacctaaattcatactaaaacacaatctctctaatctacaataccc

SEQ ID NO: 15573 - DNA, 50 bp, synthetic construct
  source 1..50: mol_type = other DNA
ttactactttatttaaacaaatcaaatactattctttaatattactaaac

SEQ ID NO: 15574 - DNA, 50 bp, synthetic construct
  source 1..50: mol_type = other DNA
tcaaacaaactctaaatatataaaccaaaaccaacataatataaaaatac

SEQ ID NO: 15575 - DNA, 50 bp, synthetic construct
  source 1..50: mol_type = other DNA
rtattaatccaaaaacccaacaaaactactaaaatcctaaacratccaac

SEQ ID NO: 15576 - DNA, 50 bp, synthetic construct
  source 1..50: mol_type = other DNA
caccracattattttcaataatcrttttattactttcttcttcacaccrc

SEQ ID NO: 15577 - DNA, 50 bp, synthetic construct
  source 1..50: mol_type = other DNA
ctcaccracattattttcaataatcrttttattactttcttcttcacacc

SEQ ID NO: 15578 - DNA, 50 bp, synthetic construct
  source 1..50: mol_type = other DNA
aaaattcaaaaacaaaactaactaactcaccracattattttcaataatc

SEQ ID NO: 15579 - DNA, 50 bp, synthetic construct
  source 1..50: mol_type = other DNA
actaaactacttccctaacaaaattcaaaaacaaaactaactaactcacc

SEQ ID NO: 15580 - DNA, 50 bp, synthetic construct
  source 1..50: mol_type = other DNA
atcaaccaattttatttttaaatcttatcaaaaaaacaacccaactattc

SEQ ID NO: 15581 - DNA, 50 bp, synthetic construct
  source 1..50: mol_type = other DNA
ctaaacctcttaaattttctcttttttttaaaactaaatctcrctctatc

SEQ ID NO: 15582 - DNA, 50 bp, synthetic construct
  source 1..50: mol_type = other DNA
actccaataccactaaaaaatacaaacattaactaaatataaaaatacac

SEQ ID NO: 15583 - DNA, 50 bp, synthetic construct
  source 1..50: mol_type = other DNA
aaccctcaacccrtacratcacaaaaaacaaccaatttactataataacc

SEQ ID NO: 15584 - DNA, 50 bp, synthetic construct
  source 1..50: mol_type = other DNA
acaatatattaaccacractactacaacaaattaactacttcctataatc

SEQ ID NO: 15585 - DNA, 50 bp, synthetic construct
  source 1..50: mol_type = other DNA
cractaacatctaatactaaaacaaccttataaaactaaaccctcaaccc

SEQ ID NO: 15586 - DNA, 50 bp, synthetic construct
  source 1..50: mol_type = other DNA
craattaaaaactcaattccacaaaactaccccaacatcaaataccaatc

SEQ ID NO: 15587 - DNA, 50 bp, synthetic construct
  source 1..50: mol_type = other DNA
tcataaaaacctcaatttttataaccctatatcaaaaacacaaacaccac

SEQ ID NO: 15588 - DNA, 50 bp, synthetic construct
  source 1..50: mol_type = other DNA
aaccctttacttacatatatccccttataaaaaatattataaaacctaac

SEQ ID NO: 15589 - DNA, 50 bp, synthetic construct
  source 1..50: mol_type = other DNA
cataactatcctttataatatcctatatctttattttaaaacraaatctc

SEQ ID NO: 15590 - DNA, 50 bp, synthetic construct
  source 1..50: mol_type = other DNA
taactattcataactatcctttataatatcctatatctttattttaaaac

SEQ ID NO: 15591 - DNA, 50 bp, synthetic construct
  source 1..50: mol_type = other DNA
taactaaactcataaaacttcctaaaaaatacaatacctaaaaaaaacac

SEQ ID NO: 15592 - DNA, 50 bp, synthetic construct
  source 1..50: mol_type = other DNA
acccaatacaatatacctatcacccaaaacaattaatactaaccaaatac

SEQ ID NO: 15593 - DNA, 50 bp, synthetic construct
  source 1..50: mol_type = other DNA
taacccaaaaacrtccactataacatcaaatctaaacttaaaacctatac

SEQ ID NO: 15594 - DNA, 50 bp, synthetic construct
  source 1..50: mol_type = other DNA
ttttcatatattctctcrcaattctataaatcaaaaattcaaaacataac

SEQ ID NO: 15595 - DNA, 50 bp, synthetic construct
  source 1..50: mol_type = other DNA
aaattaacttaactctactccacracrtataaaacctcaactaaaaaacc

SEQ ID NO: 15596 - DNA, 50 bp, synthetic construct
  source 1..50: mol_type = other DNA
aaaccatctaaaaaaccaaacctccaacctccataaaacctacaaataac

SEQ ID NO: 15597 - DNA, 50 bp, synthetic construct
  source 1..50: mol_type = other DNA
caaacttcataaaaactaaaaacttaatttcccaaataactcactcacac

SEQ ID NO: 15598 - DNA, 50 bp, synthetic construct
  source 1..50: mol_type = other DNA
tcaattcctcctaaacaactctataaattacrtaaatatcctcrtaatac

SEQ ID NO: 15599 - DNA, 50 bp, synthetic construct
  source 1..50: mol_type = other DNA
aaacctttaccttccctataccattctaatcacrcctaaaatatactccc

SEQ ID NO: 15600 - DNA, 50 bp, synthetic construct
  source 1..50: mol_type = other DNA
ccattaacattccccaacccccaaatctaaaacttctctaacccaataac

SEQ ID NO: 15601 - DNA, 50 bp, synthetic construct
  source 1..50: mol_type = other DNA
aaaataaacactccctataatttaccccaaaaatttcccatcttccctcc

SEQ ID NO: 15602 - DNA, 50 bp, synthetic construct
  source 1..50: mol_type = other DNA
aaaaataaaaaacccctaaaacaaaccacaaaaaatacccatccctcctc

SEQ ID NO: 15603 - DNA, 50 bp, synthetic construct
  source 1..50: mol_type = other DNA
acraaaaaaaccacaaatcactctatcttaattctaaaaataaaatcccc

SEQ ID NO: 15604 - DNA, 50 bp, synthetic construct
  source 1..50: mol_type = other DNA
attctttaaacctaacttactaatccttaaaactaacraaaaactcrtcc

SEQ ID NO: 15605 - DNA, 50 bp, synthetic construct
  source 1..50: mol_type = other DNA
actctatcttaattctaaaaataaaatccccracaccraacraatttttc

SEQ ID NO: 15606 - DNA, 50 bp, synthetic construct
  source 1..50: mol_type = other DNA
taacacaaacttcaaaaaatcaacaactatataaacatctcaaacacrac

SEQ ID NO: 15607 - DNA, 50 bp, synthetic construct
  source 1..50: mol_type = other DNA
ccaaaactaccaacctccrcataacaaaacaatactccaaataaaaaaac

SEQ ID NO: 15608 - DNA, 50 bp, synthetic construct
  source 1..50: mol_type = other DNA
aaaccrttaataaatccrtactacaaaaaatcccaaaactaccaacctcc

SEQ ID NO: 15609 - DNA, 50 bp, synthetic construct
  source 1..50: mol_type = other DNA
acactaccttactatacraaaactaacaaccttaaaattccctataacac

SEQ ID NO: 15610 - DNA, 50 bp, synthetic construct
  source 1..50: mol_type = other DNA
tatacraaaactaacaaccttaaaattccctataacacraacccactaac

SEQ ID NO: 15611 - DNA, 50 bp, synthetic construct
  source 1..50: mol_type = other DNA
aattcaatatccccctccctataccaccctaaaaactataaaaaaaaccc

SEQ ID NO: 15612 - DNA, 50 bp, synthetic construct
  source 1..50: mol_type = other DNA
aaataccctaaacaaattaaataaaatataacattcccaaaaaatctctc

SEQ ID NO: 15613 - DNA, 50 bp, synthetic construct
  source 1..50: mol_type = other DNA
attcaaacaattcttaaacctcaaccccccraataacraaaattacaaac

SEQ ID NO: 15614 - DNA, 50 bp, synthetic construct
  source 1..50: mol_type = other DNA
aataaaatttacaacaaactaaaatcrcrccattacactctaacctaaac

SEQ ID NO: 15615 - DNA, 50 bp, synthetic construct
  source 1..50: mol_type = other DNA
acctaaaacaactttatcaaccctaacaaaacctacrcataaaaacttcc

SEQ ID NO: 15616 - DNA, 50 bp, synthetic construct
  source 1..50: mol_type = other DNA
aaaaattaaccaaattaaataaaatataacttccccraaaaccttcatac

SEQ ID NO: 15617 - DNA, 50 bp, synthetic construct
  source 1..50: mol_type = other DNA
ccctattactaatattcaaatatctccattcctctctccaaaaatcacac

SEQ ID NO: 15618 - DNA, 50 bp, synthetic construct
  source 1..50: mol_type = other DNA
atatcaacaacaaaaaacaaaatacaaatcctccctactcaaaaaaacac

SEQ ID NO: 15619 - DNA, 50 bp, synthetic construct
  source 1..50: mol_type = other DNA
atcaacaacaaaaaacaaaatacaaatcctccctactcaaaaaaacacrc

SEQ ID NO: 15620 - DNA, 50 bp, synthetic construct
  source 1..50: mol_type = other DNA
ctaaacaacaaaacaaaaccctatctcraaaaataaacataaacataaac

SEQ ID NO: 15621 - DNA, 50 bp, synthetic construct
  source 1..50: mol_type = other DNA
craaccaaaaaaacracaacaactttaacaaatacracaaaaacrcctac

SEQ ID NO: 15622 - DNA, 50 bp, synthetic construct
  source 1..50: mol_type = other DNA
taaataaattatattaattcacraccttaaacttcaaattacaaaaccac

SEQ ID NO: 15623 - DNA, 50 bp, synthetic construct
  source 1..50: mol_type = other DNA
aatccaaaaccrtaaatcaacataatctacttatcaaaaccaaaaactac

SEQ ID NO: 15624 - DNA, 50 bp, synthetic construct
  source 1..50: mol_type = other DNA
caaaaccrtaaatcaacataatctacttatcaaaaccaaaaactacratc

SEQ ID NO: 15625 - DNA, 50 bp, synthetic construct
  source 1..50: mol_type = other DNA
aaccrtaaatcaacataatctacttatcaaaaccaaaaactacratcrcc

SEQ ID NO: 15626 - DNA, 50 bp, synthetic construct
  source 1..50: mol_type = other DNA
aaaaaaatcacttaaaccaaaaattaaaaactacattaaaccataataac

SEQ ID NO: 15627 - DNA, 50 bp, synthetic construct
  source 1..50: mol_type = other DNA
atttttcatccrtccccatcataccaaaaacaaactatataaataaaaac

SEQ ID NO: 15628 - DNA, 50 bp, synthetic construct
  source 1..50: mol_type = other DNA
cttcacctaactcaaaacrtacrctactttaattcaaaacaactaacttc

SEQ ID NO: 15629 - DNA, 50 bp, synthetic construct
  source 1..50: mol_type = other DNA
aaaataaaaactataaacctccraaatcaactattttaaattaaaacaac

SEQ ID NO: 15630 - DNA, 50 bp, synthetic construct
  source 1..50: mol_type = other DNA
taaaaactataaacctccraaatcaactattttaaattaaaacaacrcac

SEQ ID NO: 15631 - DNA, 50 bp, synthetic construct
  source 1..50: mol_type = other DNA
ctaaaaaaaacaattccaatttaaaataacccaacaaattcatcctcaac

SEQ ID NO: 15632 - DNA, 50 bp, synthetic construct
  source 1..50: mol_type = other DNA
ctaaactaactcaacctaaaaaaataacracctaacaaaaaaaatcatcc

SEQ ID NO: 15633 - DNA, 50 bp, synthetic construct
  source 1..50: mol_type = other DNA
aaaaaaacraaacttatctaactaaatcraataaccccctttaccaaacc

SEQ ID NO: 15634 - DNA, 50 bp, synthetic construct
  source 1..50: mol_type = other DNA
aataacttaactatactataactttacataattacaaaaaactttatttc

SEQ ID NO: 15635 - DNA, 50 bp, synthetic construct
  source 1..50: mol_type = other DNA
tcaacttcatcataatcatttaacaataaaaactaaaaataataactcac

SEQ ID NO: 15636 - DNA, 50 bp, synthetic construct
  source 1..50: mol_type = other DNA
acrtacraaccacaacaaataaacraaaactcacaaactacaaaaaaaac

SEQ ID NO: 15637 - DNA, 50 bp, synthetic construct
  source 1..50: mol_type = other DNA
aaaaccraaatttacattcctaaaaaataccaaaacctaacctcccctac

SEQ ID NO: 15638 - DNA, 50 bp, synthetic construct
  source 1..50: mol_type = other DNA
aaaaacrcaaaaaaaaccaaactctaacatttcccaaaaatataaacccc

SEQ ID NO: 15639 - DNA, 50 bp, synthetic construct
  source 1..50: mol_type = other DNA
tcaatcctcaataaatttcacttctaactctactaaacataaaaaacacc

SEQ ID NO: 15640 - DNA, 50 bp, synthetic construct
  source 1..50: mol_type = other DNA
tacataacaactcctaataccaaaaacraaaatacrattttaaaaaaacc

SEQ ID NO: 15641 - DNA, 50 bp, synthetic construct
  source 1..50: mol_type = other DNA
caaaactaaaaataaaactcactaaaaattaacrcracccctttaaaatc

SEQ ID NO: 15642 - DNA, 50 bp, synthetic construct
  source 1..50: mol_type = other DNA
aaaataaaactcactaaaaattaacrcracccctttaaaatcrcatctcc

SEQ ID NO: 15643 - DNA, 50 bp, synthetic construct
  source 1..50: mol_type = other DNA
taatataacctattaatacccaaaacccaaatttcctaataacaaccaac

SEQ ID NO: 15644 - DNA, 50 bp, synthetic construct
  source 1..50: mol_type = other DNA
aacctattaatacccaaaacccaaatttcctaataacaaccaacratacc

SEQ ID NO: 15645 - DNA, 50 bp, synthetic construct
  source 1..50: mol_type = other DNA
catcctaccattaactaaaaactactaccaaccaaataaccccrcaaaac

SEQ ID NO: 15646 - DNA, 50 bp, synthetic construct
  source 1..50: mol_type = other DNA
tttacaacatcctaccattaactaaaaactactaccaaccaaataacccc

SEQ ID NO: 15647 - DNA, 50 bp, synthetic construct
  source 1..50: mol_type = other DNA
aacaactctcaaccaataacaaaatattataaacctcactcrctaaatac

SEQ ID NO: 15648 - DNA, 50 bp, synthetic construct
  source 1..50: mol_type = other DNA
acraaaaaaccrataaaaataacaaaactaacrcctaaacaatttcctcc

SEQ ID NO: 15649 - DNA, 50 bp, synthetic construct
  source 1..50: mol_type = other DNA
attataattctaaaaactaaaaaccctaattacataatctccacctaacc

SEQ ID NO: 15650 - DNA, 50 bp, synthetic construct
  source 1..50: mol_type = other DNA
ccaactctcaaaaccataataattaaacaaacaacttcrtttccaaacac

SEQ ID NO: 15651 - DNA, 50 bp, synthetic construct
  source 1..50: mol_type = other DNA
cataataattaaacaaacaacttcrtttccaaacacrcaaaaactccccc

SEQ ID NO: 15652 - DNA, 50 bp, synthetic construct
  source 1..50: mol_type = other DNA
aaaaatactatccctaaaccccaccctaaacttaataaaacacaatcacc

SEQ ID NO: 15653 - DNA, 50 bp, synthetic construct
  source 1..50: mol_type = other DNA
acaaacataaaccactacatctaaccracttttaaaataataatcaaaac

SEQ ID NO: 15654 - DNA, 50 bp, synthetic construct
  source 1..50: mol_type = other DNA
aaaccactacatctaaccracttttaaaataataatcaaaacrtttcctc

SEQ ID NO: 15655 - DNA, 50 bp, synthetic construct
  source 1..50: mol_type = other DNA
ttacaaaacaaacctattccataccaaaaattataataacaaccaaactc

SEQ ID NO: 15656 - DNA, 50 bp, synthetic construct
  source 1..50: mol_type = other DNA
aaaataaacctaccctacaactacaaaatataatatcrtcattatcattc

SEQ ID NO: 15657 - DNA, 50 bp, synthetic construct
  source 1..50: mol_type = other DNA
ttttccatctcctaatcaattatactttaattactaaacaactactaaac

SEQ ID NO: 15658 - DNA, 50 bp, synthetic construct
  source 1..50: mol_type = other DNA
aacacataactttaaattttcatcaaaacaccraatatccraaaaaccac

SEQ ID NO: 15659 - DNA, 50 bp, synthetic construct
  source 1..50: mol_type = other DNA
cttctcaaataacacataactttaaattttcatcaaaacaccraatatcc

SEQ ID NO: 15660 - DNA, 50 bp, synthetic construct
  source 1..50: mol_type = other DNA
cccaactttacacaaaaaccracttaacaaaactaaaatccatataaatc

SEQ ID NO: 15661 - DNA, 50 bp, synthetic construct
  source 1..50: mol_type = other DNA
actttactcttctctatacctaaacctttaaccactaacaacaccaaatc

SEQ ID NO: 15662 - DNA, 50 bp, synthetic construct
  source 1..50: mol_type = other DNA
aacaaaaaaacaccrtctccctaaatacaactccctaatcttaaaaatac

SEQ ID NO: 15663 - DNA, 50 bp, synthetic construct
  source 1..50: mol_type = other DNA
aacttacttaaccttaactcttccraaaacaacaacaacaaaaaaacacc

SEQ ID NO: 15664 - DNA, 50 bp, synthetic construct
  source 1..50: mol_type = other DNA
caaccaaaaaaaccctctaaccaaataacttacttaaccttaactcttcc

SEQ ID NO: 15665 - DNA, 50 bp, synthetic construct
  source 1..50: mol_type = other DNA
tacctaaccaaaaaattttcctaattaccaaacaacaaaaaaaaatcatc

SEQ ID NO: 15666 - DNA, 50 bp, synthetic construct
  source 1..50: mol_type = other DNA
caaaacatctcaaaaataaaaaccatccccttcccttccttcctatattc

SEQ ID NO: 15667 - DNA, 50 bp, synthetic construct
  source 1..50: mol_type = other DNA
ctctttaaaataatcttctcacaaatacacaccatattttaactttaatc

SEQ ID NO: 15668 - DNA, 50 bp, synthetic construct
  source 1..50: mol_type = other DNA
aaaaattacctaaatcacttactatacatattaaaaacccaaaatcttcc

SEQ ID NO: 15669 - DNA, 50 bp, synthetic construct
  source 1..50: mol_type = other DNA
tacacaataaataactcaaacaaccttctctaaataacccttcatttaac

SEQ ID NO: 15670 - DNA, 50 bp, synthetic construct
  source 1..50: mol_type = other DNA
aataactcttcattccaacttccacatttctaaaacrcaacaacttcrac

SEQ ID NO: 15671 - DNA, 50 bp, synthetic construct
  source 1..50: mol_type = other DNA
aataataactcttcattccaacttccacatttctaaaacrcaacaacttc

SEQ ID NO: 15672 - DNA, 50 bp, synthetic construct
  source 1..50: mol_type = other DNA
ttaataacaacaataataactcttcattccaacttccacatttctaaaac

SEQ ID NO: 15673 - DNA, 50 bp, synthetic construct
  source 1..50: mol_type = other DNA
ctacatttcccaaactcccttcaaattataaatatacaactcaccattac

SEQ ID NO: 15674 - DNA, 50 bp, synthetic construct
  source 1..50: mol_type = other DNA
ttcttttttcatatattacccaattctaaaaaaaatcccttacactcccc

SEQ ID NO: 15675 - DNA, 50 bp, synthetic construct
  source 1..50: mol_type = other DNA
taacaaaaatactacaaatttacrcctcaattaatttattccaaaataac

SEQ ID NO: 15676 - DNA, 50 bp, synthetic construct
  source 1..50: mol_type = other DNA
atattaaaaacctttaattaaaattacaaaacaacaaacttctaactacc

SEQ ID NO: 15677 - DNA, 50 bp, synthetic construct
  source 1..50: mol_type = other DNA
ttaaaattacaaaacaacaaacttctaactaccrtactataaaatacctc

SEQ ID NO: 15678 - DNA, 50 bp, synthetic construct
  source 1..50: mol_type = other DNA
acrcctttccttttaaatataaacttacttcatttttcaaccataactac

SEQ ID NO: 15679 - DNA, 50 bp, synthetic construct
  source 1..50: mol_type = other DNA
cccctttaaaattcracttaaataatactttcctcttaacacrcaattac

SEQ ID NO: 15680 - DNA, 50 bp, synthetic construct
  source 1..50: mol_type = other DNA
cctcaccaattttcatactatacatctatactcaccaaacctatcaatcc

SEQ ID NO: 15681 - DNA, 50 bp, synthetic construct
  source 1..50: mol_type = other DNA
taaaaacatcaaattaattcccattatatcttctttactaatacrttcrc

SEQ ID NO: 15682 - DNA, 50 bp, synthetic construct
  source 1..50: mol_type = other DNA
tacaataaatatatatccaaaaaaccaattttatccaattccaaaactac

SEQ ID NO: 15683 - DNA, 50 bp, synthetic construct
  source 1..50: mol_type = other DNA
atattcacaccraatttcaaaaactacatactatactaaatctataacac

SEQ ID NO: 15684 - DNA, 50 bp, synthetic construct
  source 1..50: mol_type = other DNA
acaccraatttcaaaaactacatactatactaaatctataacacracctc

SEQ ID NO: 15685 - DNA, 50 bp, synthetic construct
  source 1..50: mol_type = other DNA
aaatattctaactctaaaccaaaaacaaaaaccaacattctctttaactc

SEQ ID NO: 15686 - DNA, 50 bp, synthetic construct
  source 1..50: mol_type = other DNA
ataactataaccttaaaaaaaccttaaacaacaaataaataaaactctac

SEQ ID NO: 15687 - DNA, 50 bp, synthetic construct
  source 1..50: mol_type = other DNA
ctccatttacctattatttaaaactcccccaaaatcacaatcacataatc

SEQ ID NO: 15688 - DNA, 50 bp, synthetic construct
  source 1..50: mol_type = other DNA
attactaaatctattacataattacaaaaacctaccrttacatatttcac

SEQ ID NO: 15689 - DNA, 50 bp, synthetic construct
  source 1..50: mol_type = other DNA
actttaacttacttattactaaatctattacataattacaaaaacctacc

SEQ ID NO: 15690 - DNA, 50 bp, synthetic construct
  source 1..50: mol_type = other DNA
ttctataattatacaacaaactcaacaacaaacaaattaaaacttatttc

SEQ ID NO: 15691 - DNA, 50 bp, synthetic construct
  source 1..50: mol_type = other DNA
acctaaactataaacactaacrtaaaaaaaccrttcacaatcacaaaatc

SEQ ID NO: 15692 - DNA, 50 bp, synthetic construct
  source 1..50: mol_type = other DNA
aactttaaaaaacaaacacaaatataaatatcatataattatcatctatc

SEQ ID NO: 15693 - DNA, 50 bp, synthetic construct
  source 1..50: mol_type = other DNA
ctttacattcctatacatactattaattaaaacttttatactacaataac

SEQ ID NO: 15694 - DNA, 50 bp, synthetic construct
  source 1..50: mol_type = other DNA
cacattattactaacaaacttcaaatatacctaatcacaaaaaacactac

SEQ ID NO: 15695 - DNA, 50 bp, synthetic construct
  source 1..50: mol_type = other DNA
cactacrcttaaaacrtaactaccctcaacattccttctaaaaaacaatc

SEQ ID NO: 15696 - DNA, 50 bp, synthetic construct
  source 1..50: mol_type = other DNA
tcatataacctccaataatatactaaattaatcataaccctcactctttc

SEQ ID NO: 15697 - DNA, 50 bp, synthetic construct
  source 1..50: mol_type = other DNA
cacrtttccrttcacctcacaaattcctaataaattataaccaactaaac

SEQ ID NO: 15698 - DNA, 50 bp, synthetic construct
  source 1..50: mol_type = other DNA
ctacaaactttattcrcctcractactactaaaactaaccraaatttaac

SEQ ID NO: 15699 - DNA, 50 bp, synthetic construct
  source 1..50: mol_type = other DNA
aatcataaaatatatttatttacaattccttaaactcrtccaccactccc

SEQ ID NO: 15700 - DNA, 50 bp, synthetic construct
  source 1..50: mol_type = other DNA
tattttcccaactccctaaacaacttccctacraaataaattaataaccc

SEQ ID NO: 15701 - DNA, 50 bp, synthetic construct
  source 1..50: mol_type = other DNA
aaacaacttccctacraaataaattaataacccraaacataacaacaaac

SEQ ID NO: 15702 - DNA, 50 bp, synthetic construct
  source 1..50: mol_type = other DNA
taaaatatcctttcrcacctcttaactatctatactctccaaaaaaaaac

SEQ ID NO: 15703 - DNA, 50 bp, synthetic construct
  source 1..50: mol_type = other DNA
taattaacctttcacttttctatacacaaaaaaacrttttaataaaattc

SEQ ID NO: 15704 - DNA, 50 bp, synthetic construct
  source 1..50: mol_type = other DNA
rtcrtttactcttcttttttccaaaataatttcaaatttattcaaaatcc

SEQ ID NO: 15705 - DNA, 50 bp, synthetic construct
  source 1..50: mol_type = other DNA
aaaaacaatcattatcattaaaaaacrccaaccccaaataaccctacctc

SEQ ID NO: 15706 - DNA, 50 bp, synthetic construct
  source 1..50: mol_type = other DNA
aaattatccccacctttcaaaaaaacraaataaaaccatttaaaactaac

SEQ ID NO: 15707 - DNA, 50 bp, synthetic construct
  source 1..50: mol_type = other DNA
tctaaaatctcttaaataaatctcttaaaacacctaacrcataaaataac

SEQ ID NO: 15708 - DNA, 50 bp, synthetic construct
  source 1..50: mol_type = other DNA
aatctcttaaaacacctaacrcataaaataacrctttaattaaaaaaaac

SEQ ID NO: 15709 - DNA, 50 bp, synthetic construct
  source 1..50: mol_type = other DNA
acataaatctaaatctttaaaaattccraattctacraaacrtcccaaac

SEQ ID NO: 15710 - DNA, 50 bp, synthetic construct
  source 1..50: mol_type = other DNA
aaaaactaaataaacaaatacacacataaatctaaatctttaaaaattcc

SEQ ID NO: 15711 - DNA, 50 bp, synthetic construct
  source 1..50: mol_type = other DNA
ataacrtatattatacccaacaaatatacttcaaaccactctaaattttc

SEQ ID NO: 15712 - DNA, 50 bp, synthetic construct
  source 1..50: mol_type = other DNA
ctattcaaattccatacccctttcactaaaaatttaaattatccaaaaac

SEQ ID NO: 15713 - DNA, 50 bp, synthetic construct
  source 1..50: mol_type = other DNA
aaaataaacataaaaactctactaaaaccatataccctaaaaacaatacc

SEQ ID NO: 15714 - DNA, 50 bp, synthetic construct
  source 1..50: mol_type = other DNA
aaaacaaaataatttctccaatcacacaactaaactaaataacctaatac

SEQ ID NO: 15715 - DNA, 50 bp, synthetic construct
  source 1..50: mol_type = other DNA
actccttatttcactaccctaattaactaaaacaacaattaactaaaacc

SEQ ID NO: 15716 - DNA, 50 bp, synthetic construct
  source 1..50: mol_type = other DNA
tcctcaataaaataaacrtaataattattcctcaccacttacctccctac

SEQ ID NO: 15717 - DNA, 50 bp, synthetic construct
  source 1..50: mol_type = other DNA
catataatacataaaaaatttcaaccaatttcctcctcaataaaataaac

SEQ ID NO: 15718 - DNA, 50 bp, synthetic construct
  source 1..50: mol_type = other DNA
aaaaacctctaatctcaatacaaacaataacaaaaatatttaaatttatc

SEQ ID NO: 15719 - DNA, 50 bp, synthetic construct
  source 1..50: mol_type = other DNA
raacacttataatcttctaaacatttacttaatcaatacaataaccctac

SEQ ID NO: 15720 - DNA, 50 bp, synthetic construct
  source 1..50: mol_type = other DNA
aatcacttaatttccctaatcctcaaatttctctcctataaaataaaacc

SEQ ID NO: 15721 - DNA, 50 bp, synthetic construct
  source 1..50: mol_type = other DNA
tccttaaatcactaaatcacaaaaattttaaaccaatcatttccttcacc

SEQ ID NO: 15722 - DNA, 50 bp, synthetic construct
  source 1..50: mol_type = other DNA
atttccttcaccrtttctaaatactataccctattttacacacaaacaac

SEQ ID NO: 15723 - DNA, 50 bp, synthetic construct
  source 1..50: mol_type = other DNA
tccractcccttcaactaaactttacaaacctctttatattattttacac

SEQ ID NO: 15724 - DNA, 50 bp, synthetic construct
  source 1..50: mol_type = other DNA
tttcaaaaaacaccaatcccaaaatacaatacaaacaataaataccaatc

SEQ ID NO: 15725 - DNA, 50 bp, synthetic construct
  source 1..50: mol_type = other DNA
atttaacaaaattactcacaaatatttccaaaattaaaaaataatcttac

SEQ ID NO: 15726 - DNA, 50 bp, synthetic construct
  source 1..50: mol_type = other DNA
rcaaataaaaatttactctttaaaatccttaaaaaactaatttccatacc

SEQ ID NO: 15727 - DNA, 50 bp, synthetic construct
  source 1..50: mol_type = other DNA
racataaaaattaacttctcaaaaattttaaaaaacaaactcttacttac

SEQ ID NO: 15728 - DNA, 50 bp, synthetic construct
  source 1..50: mol_type = other DNA
attcacattcatttattctaaaaatcacaacaaacattattttcttaaac

SEQ ID NO: 15729 - DNA, 50 bp, synthetic construct
  source 1..50: mol_type = other DNA
accttaatacaaaacattatttacatctcaataattctctaaaattattc

SEQ ID NO: 15730 - DNA, 50 bp, synthetic construct
  source 1..50: mol_type = other DNA
crttcataacttaaattctaaaattaaactatataaaatcatatccaacc

SEQ ID NO: 15731 - DNA, 50 bp, synthetic construct
  source 1..50: mol_type = other DNA
ctcrccttaaacctattttaacaaataaacctctcataataaaaaccccc

SEQ ID NO: 15732 - DNA, 50 bp, synthetic construct
  source 1..50: mol_type = other DNA
atttccrcrataaaattaaaaaactaatacttcatattcacattcatctc

SEQ ID NO: 15733 - DNA, 50 bp, synthetic construct
  source 1..50: mol_type = other DNA
aaatccraaataaatataaatataaaatatcaacttcccaacttcaccrc

SEQ ID NO: 15734 - DNA, 50 bp, synthetic construct
  source 1..50: mol_type = other DNA
cctctattaacrctaccacaactaataaattaatcatcataataaatatc

SEQ ID NO: 15735 - DNA, 50 bp, synthetic construct
  source 1..50: mol_type = other DNA
taataatcaactcattaactataacaacrtcaacaaaaaaacctaccaac

SEQ ID NO: 15736 - DNA, 50 bp, synthetic construct
  source 1..50: mol_type = other DNA
attaataaaacttttcctttatttctttttaaccaacataataaaacctc

SEQ ID NO: 15737 - DNA, 50 bp, synthetic construct
  source 1..50: mol_type = other DNA
tcaacataataaaaatacctcctctatttaaaccctataaaaaaaataac

SEQ ID NO: 15738 - DNA, 50 bp, synthetic construct
  source 1..50: mol_type = other DNA
ccaaaaacaaaaccattaaaaaattcrtcattcraaacataataaaaacc

SEQ ID NO: 15739 - DNA, 50 bp, synthetic construct
  source 1..50: mol_type = other DNA
crcttaaacctaaaaatatcaaaactacaataaaccrtaatcrtaccccc

SEQ ID NO: 15740 - DNA, 50 bp, synthetic construct
  source 1..50: mol_type = other DNA
aataacataacacatacaaaatccttaattccacataataaacactcaac

SEQ ID NO: 15741 - DNA, 50 bp, synthetic construct
  source 1..50: mol_type = other DNA
taaacaatcacttaaatatttataaaccttaactttcccrttccttcccc

SEQ ID NO: 15742 - DNA, 50 bp, synthetic construct
  source 1..50: mol_type = other DNA
aaactattataaataaataatttaacccaaatactaacaacaaaactaac

SEQ ID NO: 15743 - DNA, 50 bp, synthetic construct
  source 1..50: mol_type = other DNA
ctaaaccaaaacraataaaaaatatcattaacaaaaaacctatccatctc

SEQ ID NO: 15744 - DNA, 50 bp, synthetic construct
  source 1..50: mol_type = other DNA
tccatctcractaaatcttttttctataaaattaaatcaaaaccatcaac

SEQ ID NO: 15745 - DNA, 50 bp, synthetic construct
  source 1..50: mol_type = other DNA
ctcacttaacattcataaacacaaacaacaataaaacrtacaacaacatc

SEQ ID NO: 15746 - DNA, 50 bp, synthetic construct
  source 1..50: mol_type = other DNA
atataaaacaaacatataccaaacaaaactactaaacratattactacac

SEQ ID NO: 15747 - DNA, 50 bp, synthetic construct
  source 1..50: mol_type = other DNA
taattcattctacactttttattctcctaattcacaccaaaactcatcac

SEQ ID NO: 15748 - DNA, 50 bp, synthetic construct
  source 1..50: mol_type = other DNA
tattttatttcacaaaaaacttatccttttatttttctatatacacrtac

SEQ ID NO: 15749 - DNA, 50 bp, synthetic construct
  source 1..50: mol_type = other DNA
ttcacaaaaaacttatccttttatttttctatatacacrtacrcactaac

SEQ ID NO: 15750 - DNA, 50 bp, synthetic construct
  source 1..50: mol_type = other DNA
aaacttatccttttatttttctatatacacrtacrcactaacrcttatac

SEQ ID NO: 15751 - DNA, 50 bp, synthetic construct
  source 1..50: mol_type = other DNA
aacaaaaaccaaaactaaaacattcacctaataacaaataacacatacac

SEQ ID NO: 15752 - DNA, 50 bp, synthetic construct
  source 1..50: mol_type = other DNA
tatttttccttttaaaaaattcaccaaaaaaccaactcccctcccaccac

SEQ ID NO: 15753 - DNA, 50 bp, synthetic construct
  source 1..50: mol_type = other DNA
aaaaactcctcaaaataacctcaaaaaactaaaatctctccctatctaac

SEQ ID NO: 15754 - DNA, 50 bp, synthetic construct
  source 1..50: mol_type = other DNA
aactatatcccacaatcaaaaacctccrttataacaaaaaaaccttcacc

SEQ ID NO: 15755 - DNA, 50 bp, synthetic construct
  source 1..50: mol_type = other DNA
aaacratatctcattaaaacaataactcccttaaacccacaaattaaaac

SEQ ID NO: 15756 - DNA, 50 bp, synthetic construct
  source 1..50: mol_type = other DNA
aataacacatctaaaataccaattttaaaaaaaccaatacacaaatctcc

SEQ ID NO: 15757 - DNA, 50 bp, synthetic construct
  source 1..50: mol_type = other DNA
accctaaaatccaaaactacattactatcctaaattcctcaaaataacac

SEQ ID NO: 15758 - DNA, 50 bp, synthetic construct
  source 1..50: mol_type = other DNA
ctaaacctcaaaattaacctataatataaaaaacccaaaaaacctttcac

SEQ ID NO: 15759 - DNA, 50 bp, synthetic construct
  source 1..50: mol_type = other DNA
tcctctctcactaacaaatttatcaatctacattatttacttctcaaacc

SEQ ID NO: 15760 - DNA, 50 bp, synthetic construct
  source 1..50: mol_type = other DNA
caaatttatcaatctacattatttacttctcaaaccrcataataaaatac

SEQ ID NO: 15761 - DNA, 50 bp, synthetic construct
  source 1..50: mol_type = other DNA
ataaatcataaattaataaactacttttcttaccaaaaatcattatcaac

SEQ ID NO: 15762 - DNA, 50 bp, synthetic construct
  source 1..50: mol_type = other DNA
tttcrccatattaaccaatctaatctcratttcctaacctcaaaaaatcc

SEQ ID NO: 15763 - DNA, 50 bp, synthetic construct
  source 1..50: mol_type = other DNA
ctacaccctattaaacaaattaaaaatttaaaccraacrcrataaaccac

SEQ ID NO: 15764 - DNA, 50 bp, synthetic construct
  source 1..50: mol_type = other DNA
cttattattactacaccctattaaacaaattaaaaatttaaaccraacrc

SEQ ID NO: 15765 - DNA, 50 bp, synthetic construct
  source 1..50: mol_type = other DNA
tacttattattactacaccctattaaacaaattaaaaatttaaaccraac

SEQ ID NO: 15766 - DNA, 50 bp, synthetic construct
  source 1..50: mol_type = other DNA
aaaactcaaccttttcctcaaaataaacaactcttccaaaaaatacatac

SEQ ID NO: 15767 - DNA, 50 bp, synthetic construct
  source 1..50: mol_type = other DNA
caaaccccaaaatataactattaaacacctaaaaaaacctcacttaaccc

SEQ ID NO: 15768 - DNA, 50 bp, synthetic construct
  source 1..50: mol_type = other DNA
tctatcattatctatttttatattttaaacttcaataaaatttacctctc

SEQ ID NO: 15769 - DNA, 50 bp, synthetic construct
  source 1..50: mol_type = other DNA
tattaaaaaataacctatatctctacaacattactactaattaatccctc

SEQ ID NO: 15770 - DNA, 50 bp, synthetic construct
  source 1..50: mol_type = other DNA
caaattatataaaactattttcacaaaatcaacaaaattaccactacttc

SEQ ID NO: 15771 - DNA, 50 bp, synthetic construct
  source 1..50: mol_type = other DNA
aacaatttcacataacttacaaattacttaattacacaatatataatacc

SEQ ID NO: 15772 - DNA, 50 bp, synthetic construct
  source 1..50: mol_type = other DNA
taaatacatctaaaactccacattttaatctaccaaacatccacccattc

SEQ ID NO: 15773 - DNA, 50 bp, synthetic construct
  source 1..50: mol_type = other DNA
aaaaatcattaataatctatctatctcaaaataaataataacataaacac

SEQ ID NO: 15774 - DNA, 50 bp, synthetic construct
  source 1..50: mol_type = other DNA
crcccttctttcaaactattcttaatttttcacttacaaactaaatttcc

SEQ ID NO: 15775 - DNA, 50 bp, synthetic construct
  source 1..50: mol_type = other DNA
ctaaatttccrtaaatttaataataaaacaattacaactctaactacaac

SEQ ID NO: 15776 - DNA, 50 bp, synthetic construct
  source 1..50: mol_type = other DNA
acatcattaaataattaatattctcrcaactcttttccatttcctaatac

SEQ ID NO: 15777 - DNA, 50 bp, synthetic construct
  source 1..50: mol_type = other DNA
atttccatttaaaaacaaacacaataaatttccccaaaaccratattaac

SEQ ID NO: 15778 - DNA, 50 bp, synthetic construct
  source 1..50: mol_type = other DNA
rccrccctaatttccatttaaaaacaaacacaataaatttccccaaaacc

SEQ ID NO: 15779 - DNA, 50 bp, synthetic construct
  source 1..50: mol_type = other DNA
tttacataatataaccaaaaacacctctaacaaaacaaccccaattcrcc

SEQ ID NO: 15780 - DNA, 50 bp, synthetic construct
  source 1..50: mol_type = other DNA
crttttacataatataaccaaaaacacctctaacaaaacaaccccaattc

SEQ ID NO: 15781 - DNA, 50 bp, synthetic construct
  source 1..50: mol_type = other DNA
craactaaaactattttactaaaaatactcctaatcataccatacaaaac

SEQ ID NO: 15782 - DNA, 50 bp, synthetic construct
  source 1..50: mol_type = other DNA
ttctccttaataataaatttcaatctcttcctatctctaaacaacaaacc

SEQ ID NO: 15783 - DNA, 50 bp, synthetic construct
  source 1..50: mol_type = other DNA
atctctcctacrtattttttcttactaatattattaaacactcaatatcc

SEQ ID NO: 15784 - DNA, 50 bp, synthetic construct
  source 1..50: mol_type = other DNA
tactaaaaaacaaaataaattctatttatttctttattaatctctcctac

SEQ ID NO: 15785 - DNA, 50 bp, synthetic construct
  source 1..50: mol_type = other DNA
acaaaaaaacaaacaaaacttactttatttcccaacacaataaacaaatc

SEQ ID NO: 15786 - DNA, 50 bp, synthetic construct
  source 1..50: mol_type = other DNA
aaaacttactttatttcccaacacaataaacaaatcracaataaaataac

SEQ ID NO: 15787 - DNA, 50 bp, synthetic construct
  source 1..50: mol_type = other DNA
acttactttatttcccaacacaataaacaaatcracaataaaataacrac

SEQ ID NO: 15788 - DNA, 50 bp, synthetic construct
  source 1..50: mol_type = other DNA
tccctactttcactttaaaaactatataaatacttacatccaaatttacc

SEQ ID NO: 15789 - DNA, 50 bp, synthetic construct
  source 1..50: mol_type = other DNA
ccccaaattcccaattcatatcaaacactaaaaacacacttataaaaatc

SEQ ID NO: 15790 - DNA, 50 bp, synthetic construct
  source 1..50: mol_type = other DNA
ccaattcatatcaaacactaaaaacacacttataaaaatcraaaaacccc

SEQ ID NO: 15791 - DNA, 50 bp, synthetic construct
  source 1..50: mol_type = other DNA
cttatatatataatcacaacaataaaaataccacrtaacacccaaaaatc

SEQ ID NO: 15792 - DNA, 50 bp, synthetic construct
  source 1..50: mol_type = other DNA
aacaaatatctactaaccrcctaattcctaaactaacaaataaatatccc

SEQ ID NO: 15793 - DNA, 50 bp, synthetic construct
  source 1..50: mol_type = other DNA
acttattaactcaaaaaccaaacraccaacaaatatctactcaaataaac

SEQ ID NO: 15794 - DNA, 50 bp, synthetic construct
  source 1..50: mol_type = other DNA
acrtccaaaaactcaatcctctaacattctcaaattcaaaattaaaaaac

SEQ ID NO: 15795 - DNA, 50 bp, synthetic construct
  source 1..50: mol_type = other DNA
aaaattaaaaaacrcattaaaacraaaaccacacaatcaacaaaatctac

SEQ ID NO: 15796 - DNA, 50 bp, synthetic construct
  source 1..50: mol_type = other DNA
aaaaattaccctataatacacataactttcaattatcctattaaacattc

SEQ ID NO: 15797 - DNA, 50 bp, synthetic construct
  source 1..50: mol_type = other DNA
tacaaaacaattctttatctcttttctactataaaacattaaattctctc

SEQ ID NO: 15798 - DNA, 50 bp, synthetic construct
  source 1..50: mol_type = other DNA
cattaaattctctcrctctcactcataaaatatccttcattaaactaaac

SEQ ID NO: 15799 - DNA, 50 bp, synthetic construct
  source 1..50: mol_type = other DNA
aaaaaaaactacaacaacaaacactactctctcaaatcattatcctcttc

SEQ ID NO: 15800 - DNA, 50 bp, synthetic construct
  source 1..50: mol_type = other DNA
tatccaaatctccctcacaaatattaaacctattaatcaacaaaaactcc

SEQ ID NO: 15801 - DNA, 50 bp, synthetic construct
  source 1..50: mol_type = other DNA
taattaataaaaaactatttcttaaatatcacttccttatctcctaccac

SEQ ID NO: 15802 - DNA, 50 bp, synthetic construct
  source 1..50: mol_type = other DNA
atttaacaaactataataatacaatacataaataaaacacctcctcacac

SEQ ID NO: 15803 - DNA, 50 bp, synthetic construct
  source 1..50: mol_type = other DNA
ataatacccaaatcccctaaaaacaaattcacaaactatctaatcacctc

SEQ ID NO: 15804 - DNA, 50 bp, synthetic construct
  source 1..50: mol_type = other DNA
taaaaattataacaacaacaaccaacaataacaaaaacacatacaaattc

SEQ ID NO: 15805 - DNA, 50 bp, synthetic construct
  source 1..50: mol_type = other DNA
cccaaaacctaccaaaaaacccctataattaattatttaaaaaaaaactc

SEQ ID NO: 15806 - DNA, 50 bp, synthetic construct
  source 1..50: mol_type = other DNA
aaaaatacaaaatatatacctaaccccaaaaaaaaccacaaaacaaaccc

SEQ ID NO: 15807 - DNA, 50 bp, synthetic construct
  source 1..50: mol_type = other DNA
racaacaaaaacataaaccaaattcctaacaaactactactataaaacac

SEQ ID NO: 15808 - DNA, 50 bp, synthetic construct
  source 1..50: mol_type = other DNA
ccttactaccratatctaatactaaaaaatccacctaaaaaataaaactc

SEQ ID NO: 15809 - DNA, 50 bp, synthetic construct
  source 1..50: mol_type = other DNA
tatctaatactaaaaaatccacctaaaaaataaaactcraaactactacc

SEQ ID NO: 15810 - DNA, 50 bp, synthetic construct
  source 1..50: mol_type = other DNA
actaaaaaatccacctaaaaaataaaactcraaactactaccraacaaac

SEQ ID NO: 15811 - DNA, 50 bp, synthetic construct
  source 1..50: mol_type = other DNA
cccaaacccatatatattacaaaatcctatctcttacrtacaaccccaac

SEQ ID NO: 15812 - DNA, 50 bp, synthetic construct
  source 1..50: mol_type = other DNA
acaaaaaatctaacccaaacccatatatattacaaaatcctatctcttac

SEQ ID NO: 15813 - DNA, 50 bp, synthetic construct
  source 1..50: mol_type = other DNA
taaatcctacacaaaaaataaaacattaaacttaaaaaaaaaccaacccc

SEQ ID NO: 15814 - DNA, 50 bp, synthetic construct
  source 1..50: mol_type = other DNA
tacraccttaataataaaaaataaattccaattcacctaaacatattatc

SEQ ID NO: 15815 - DNA, 50 bp, synthetic construct
  source 1..50: mol_type = other DNA
ttccaactcttactaaacaataatataaaaacaatacrtctctataacac

SEQ ID NO: 15816 - DNA, 50 bp, synthetic construct
  source 1..50: mol_type = other DNA
ccacaaatactttttataattttacttaaaaattcaaaatcaactctcac

SEQ ID NO: 15817 - DNA, 50 bp, synthetic construct
  source 1..50: mol_type = other DNA
aaaacctcattcaccaaccaaaacatttccatatatatccaaaataacrc

SEQ ID NO: 15818 - DNA, 50 bp, synthetic construct
  source 1..50: mol_type = other DNA
ctttttaaatacaaaatcttactccatcatccaaactaaaataaaataac

SEQ ID NO: 15819 - DNA, 50 bp, synthetic construct
  source 1..50: mol_type = other DNA
ctccatcatccaaactaaaataaaataacrcaatcataactctctacatc

SEQ ID NO: 15820 - DNA, 50 bp, synthetic construct
  source 1..50: mol_type = other DNA
ataatcaatactcaataaatactcactaactaccraacacrataatacac

SEQ ID NO: 15821 - DNA, 50 bp, synthetic construct
  source 1..50: mol_type = other DNA
tttttttttaactttcccctaaatcactaaaattataaacrtacaccacc

SEQ ID NO: 15822 - DNA, 50 bp, synthetic construct
  source 1..50: mol_type = other DNA
aatcaacaaataatacaaaatccctccaaccatcatcaaatatcttccrc

SEQ ID NO: 15823 - DNA, 50 bp, synthetic construct
  source 1..50: mol_type = other DNA
taaatcaacaaataatacaaaatccctccaaccatcatcaaatatcttcc

SEQ ID NO: 15824 - DNA, 50 bp, synthetic construct
  source 1..50: mol_type = other DNA
atttattaactcaacrctaacttaaaccattaatctaacacrtcacatcc

SEQ ID NO: 15825 - DNA, 50 bp, synthetic construct
  source 1..50: mol_type = other DNA
aaaatctacaacaacattctaaaaacaacttctccraaccatatccttcc

SEQ ID NO: 15826 - DNA, 50 bp, synthetic construct
  source 1..50: mol_type = other DNA
aaaactcttaacaaaaaaatctacaacaacattctaaaaacaacttctcc

SEQ ID NO: 15827 - DNA, 50 bp, synthetic construct
  source 1..50: mol_type = other DNA
atataatctcaaacaaatctcttaacctctctaaactttaattcactaac

SEQ ID NO: 15828 - DNA, 50 bp, synthetic construct
  source 1..50: mol_type = other DNA
aactcatcttcctaaccaacaaataacrtccaaacattcaatttaatacc

SEQ ID NO: 15829 - DNA, 50 bp, synthetic construct
  source 1..50: mol_type = other DNA
caatttaataccrtaaaataaaacaaaccaaactatctaatacaatttac

SEQ ID NO: 15830 - DNA, 50 bp, synthetic construct
  source 1..50: mol_type = other DNA
tcaccctcttacaacacccacaaaaaactactaaataaacaccaaaatcc

SEQ ID NO: 15831 - DNA, 50 bp, synthetic construct
  source 1..50: mol_type = other DNA
caaacaacctaattatccaaaacaacctcaatttatacctattatcccac

SEQ ID NO: 15832 - DNA, 50 bp, synthetic construct
  source 1..50: mol_type = other DNA
acacacaccrttaatatctacttaatacaacaataccaataaaatacaac

SEQ ID NO: 15833 - DNA, 50 bp, synthetic construct
  source 1..50: mol_type = other DNA
ttttaaatcrttacatcccactaacattattacatcaaacaaatattaac

SEQ ID NO: 15834 - DNA, 50 bp, synthetic construct
  source 1..50: mol_type = other DNA
actaaataaccrcraaaatccctctaccaatataataattcaccttttcc

SEQ ID NO: 15835 - DNA, 50 bp, synthetic construct
  source 1..50: mol_type = other DNA
aaaaaaaatcttaataaaacttcccttatctaactaaaacaaaacctccc

SEQ ID NO: 15836 - DNA, 50 bp, synthetic construct
  source 1..50: mol_type = other DNA
taatactaataataataaaacaatctatcttcctaacaactaaatactcc

SEQ ID NO: 15837 - DNA, 50 bp, synthetic construct
  source 1..50: mol_type = other DNA
accaaaaaacccaataaactaaatactataactcaacccrtaatcccaac

SEQ ID NO: 15838 - DNA, 50 bp, synthetic construct
  source 1..50: mol_type = other DNA
aaataacrtacccataaactcacaaccaacttacatccaaaactataacc

SEQ ID NO: 15839 - DNA, 50 bp, synthetic construct
  source 1..50: mol_type = other DNA
ctcctcctctttcrtaaccacrtaaatctaaaactaataactcattcatc

SEQ ID NO: 15840 - DNA, 50 bp, synthetic construct
  source 1..50: mol_type = other DNA
taaatcatccctctaatttattatctacaccttccctacaaattcctatc

SEQ ID NO: 15841 - DNA, 50 bp, synthetic construct
  source 1..50: mol_type = other DNA
aaccttcccttcattctcctatcacctaatcctataacttccacattatc

SEQ ID NO: 15842 - DNA, 50 bp, synthetic construct
  source 1..50: mol_type = other DNA
ctctatctaccaaatcataccttcctctaccacttaaaatcaacaaaaac

SEQ ID NO: 15843 - DNA, 50 bp, synthetic construct
  source 1..50: mol_type = other DNA
ctaaaaaaacattcaccaaaacactacaactctatttccaaaaaaaactc

SEQ ID NO: 15844 - DNA, 50 bp, synthetic construct
  source 1..50: mol_type = other DNA
aatatcaaaataaccaaaatacttccctaaaaaaactcccacaacaaaac

SEQ ID NO: 15845 - DNA, 50 bp, synthetic construct
  source 1..50: mol_type = other DNA
tatcaaaataaccaaaatacttccctaaaaaaactcccacaacaaaacrc

SEQ ID NO: 15846 - DNA, 50 bp, synthetic construct
  source 1..50: mol_type = other DNA
cttttctttctttttcttttttatttttcttctaacaaaatttcactttc

SEQ ID NO: 15847 - DNA, 50 bp, synthetic construct
  source 1..50: mol_type = other DNA
aaaaaaccractattaacraaatcaaccacaaaaacctataaaataaaac

SEQ ID NO: 15848 - DNA, 50 bp, synthetic construct
  source 1..50: mol_type = other DNA
ataaactcataaccttcttccttcttaacatacaaaaaaacaactaaaac

SEQ ID NO: 15849 - DNA, 50 bp, synthetic construct
  source 1..50: mol_type = other DNA
actaaaacraaactaaaaataaaccatttataatttcctaacattaccac

SEQ ID NO: 15850 - DNA, 50 bp, synthetic construct
  source 1..50: mol_type = other DNA
aaaaaacaaaactaaaaaaaatccttcctaaactacatactttcaacacc

SEQ ID NO: 15851 - DNA, 50 bp, synthetic construct
  source 1..50: mol_type = other DNA
cctaaaaaacaacrtaaaaaactctacctcaaccaatataaaaaccaaac

SEQ ID NO: 15852 - DNA, 50 bp, synthetic construct
  source 1..50: mol_type = other DNA
aactaaactcaccrcctaactttcacactaactaaaacaaaacttctcac

SEQ ID NO: 15853 - DNA, 50 bp, synthetic construct
  source 1..50: mol_type = other DNA
acttctcacrctaccttttaaaatataaactactaaaataaacaaaaaac

SEQ ID NO: 15854 - DNA, 50 bp, synthetic construct
  source 1..50: mol_type = other DNA
racatacaaatatacacttccactattttcaaaacrctaaaacacatccc

SEQ ID NO: 15855 - DNA, 50 bp, synthetic construct
  source 1..50: mol_type = other DNA
atacatacacatatcracatacaaatatacacttccactattttcaaaac

SEQ ID NO: 15856 - DNA, 50 bp, synthetic construct
  source 1..50: mol_type = other DNA
aaaaaactctctcccaaaacaatttacacacacacatacatacacatatc

SEQ ID NO: 15857 - DNA, 50 bp, synthetic construct
  source 1..50: mol_type = other DNA
aaaaaacaaaaacraaattccaaccaacttttttattctacaactaatac

SEQ ID NO: 15858 - DNA, 50 bp, synthetic construct
  source 1..50: mol_type = other DNA
acaaaataaaaaaactaattaaaatctcrcctctaccttttaataaccac

SEQ ID NO: 15859 - DNA, 50 bp, synthetic construct
  source 1..50: mol_type = other DNA
aaataaaaaaactaattaaaatctcrcctctaccttttaataaccacrtc

SEQ ID NO: 15860 - DNA, 50 bp, synthetic construct
  source 1..50: mol_type = other DNA
aaaaattccaaatcaaaaatacatatcactcacacaaacactcrccaacc

SEQ ID NO: 15861 - DNA, 50 bp, synthetic construct
  source 1..50: mol_type = other DNA
caaactttaaaataaacatccaaaaaataactataaatcacaacccctac

SEQ ID NO: 15862 - DNA, 50 bp, synthetic construct
  source 1..50: mol_type = other DNA
caataaacaaacctttatacccaaacrtaaaatactaccaaaaaacaatc

SEQ ID NO: 15863 - DNA, 50 bp, synthetic construct
  source 1..50: mol_type = other DNA
acattcaacctccactctctacaatatttactcctaccaataacttaatc

SEQ ID NO: 15864 - DNA, 50 bp, synthetic construct
  source 1..50: mol_type = other DNA
taacttcctctaaatacacaaaaaataaaaacaactaatactccactaac

SEQ ID NO: 15865 - DNA, 50 bp, synthetic construct
  source 1..50: mol_type = other DNA
aatctcttttcctatctacccttctcaactcccttaattactaactcctc

SEQ ID NO: 15866 - DNA, 50 bp, synthetic construct
  source 1..50: mol_type = other DNA
tctatcctcactactaaataacataaccaaaaataatcctttcaaaaccc

SEQ ID NO: 15867 - DNA, 50 bp, synthetic construct
  source 1..50: mol_type = other DNA
caccaataaccactccattcaattccaaatccaataccaaacctacaacc

SEQ ID NO: 15868 - DNA, 50 bp, synthetic construct
  source 1..50: mol_type = other DNA
acttaaactaaaactaaaactaaacataaaactatatctaactctaaacc

SEQ ID NO: 15869 - DNA, 50 bp, synthetic construct
  source 1..50: mol_type = other DNA
aaaccccaaataaatctaaatcacaaccaaatcaaaaattaaaacacccc

SEQ ID NO: 15870 - DNA, 50 bp, synthetic construct
  source 1..50: mol_type = other DNA
attttaattctaaaccrataaaaacacraaatactacttctcctacactc

SEQ ID NO: 15871 - DNA, 50 bp, synthetic construct
  source 1..50: mol_type = other DNA
taaataaaaaaacatctactatcctaccraaataataaaaaaactcaccc

SEQ ID NO: 15872 - DNA, 50 bp, synthetic construct
  source 1..50: mol_type = other DNA
attaaattataaaacacttcttaaaacaaaaccaaaatacracaaccrac

SEQ ID NO: 15873 - DNA, 50 bp, synthetic construct
  source 1..50: mol_type = other DNA
aatattaaattataaaacacttcttaaaacaaaaccaaaatacracaacc

SEQ ID NO: 15874 - DNA, 50 bp, synthetic construct
  source 1..50: mol_type = other DNA
aaataccaattaaattaatctcccctatataaaacacccataaactaccc

SEQ ID NO: 15875 - DNA, 50 bp, synthetic construct
  source 1..50: mol_type = other DNA
atattatctccctaaacaacctataaaataccrctaaacrttatactctc

SEQ ID NO: 15876 - DNA, 50 bp, synthetic construct
  source 1..50: mol_type = other DNA
raaaaaaatctccttattaccttcatatctttataccccraaaacataac

SEQ ID NO: 15877 - DNA, 50 bp, synthetic construct
  source 1..50: mol_type = other DNA
caaaaaacttataaaccaataaattaaataaaacccraaaactctaaacc

SEQ ID NO: 15878 - DNA, 50 bp, synthetic construct
  source 1..50: mol_type = other DNA
aataaattaaataaaacccraaaactctaaaccrtaaacaaacctccaac

SEQ ID NO: 15879 - DNA, 50 bp, synthetic construct
  source 1..50: mol_type = other DNA
ccacctttaaaacrcttattctatctctttctaactcctttatctctacc

SEQ ID NO: 15880 - DNA, 50 bp, synthetic construct
  source 1..50: mol_type = other DNA
ttaaaacrcttattctatctctttctaactcctttatctctaccraactc

SEQ ID NO: 15881 - DNA, 50 bp, synthetic construct
  source 1..50: mol_type = other DNA
aaatttctacttaattaaatattaaaaaaaccaaccccacactacccaac

SEQ ID NO: 15882 - DNA, 50 bp, synthetic construct
  source 1..50: mol_type = other DNA
ctaaaacrcttatcctaccrtaaccrataataacactaatctctaatctc

SEQ ID NO: 15883 - DNA, 50 bp, synthetic construct
  source 1..50: mol_type = other DNA
aactctttacctctataaaactattcaatacrtaacaactaactttcccc

SEQ ID NO: 15884 - DNA, 50 bp, synthetic construct
  source 1..50: mol_type = other DNA
ttacrcccraccttatttattaatttatttaaaaacaatctccctctatc

SEQ ID NO: 15885 - DNA, 50 bp, synthetic construct
  source 1..50: mol_type = other DNA
aaaactatctctaaataaatcaataaataaaaccraacrcaataactcac

SEQ ID NO: 15886 - DNA, 50 bp, synthetic construct
  source 1..50: mol_type = other DNA
ttatatttctaaaaattaactcrccataataacatatcacttcctaactc

SEQ ID NO: 15887 - DNA, 50 bp, synthetic construct
  source 1..50: mol_type = other DNA
aaatacctaacatacaaacatacaaaataacaaaataaatacataaaatc

SEQ ID NO: 15888 - DNA, 50 bp, synthetic construct
  source 1..50: mol_type = other DNA
atacttcaaatataaaaatctaccccataaaactaaatactattactacc

SEQ ID NO: 15889 - DNA, 50 bp, synthetic construct
  source 1..50: mol_type = other DNA
tcaactccrcaccaactcaataaataaatcatttaacctctctaaattcc

SEQ ID NO: 15890 - DNA, 50 bp, synthetic construct
  source 1..50: mol_type = other DNA
aataaaccraaacccaaaaaaactaaataactcatccactaaattaatac

SEQ ID NO: 15891 - DNA, 50 bp, synthetic construct
  source 1..50: mol_type = other DNA
tctacacaaaaacccaacatacaacaaacaaaaccttttcttctaataac

SEQ ID NO: 15892 - DNA, 50 bp, synthetic construct
  source 1..50: mol_type = other DNA
ttatcttttatacacaataaatcctcacttaatatcattaataaaatctc

SEQ ID NO: 15893 - DNA, 50 bp, synthetic construct
  source 1..50: mol_type = other DNA
aattatacctttttacccatccccrcttctcacaaatcatatatatacac

SEQ ID NO: 15894 - DNA, 50 bp, synthetic construct
  source 1..50: mol_type = other DNA
aaaaaacaaaaattataacrccrctacaaactctaaacaaaaccaactcc

SEQ ID NO: 15895 - DNA, 50 bp, synthetic construct
  source 1..50: mol_type = other DNA
acttaaaaacacacaaaaacccraaactaactttactcaaaacttataac

SEQ ID NO: 15896 - DNA, 50 bp, synthetic construct
  source 1..50: mol_type = other DNA
aatttctactatattataaccccacraaacrctcaacacccaaaaaaaac

SEQ ID NO: 15897 - DNA, 50 bp, synthetic construct
  source 1..50: mol_type = other DNA
crtaaaaccccataaaacacraccrcaatacatatataacatatacactc

SEQ ID NO: 15898 - DNA, 50 bp, synthetic construct
  source 1..50: mol_type = other DNA
ataaaaaactccaactcaccrtcctctaaataattattcatttatccttc

SEQ ID NO: 15899 - DNA, 50 bp, synthetic construct
  source 1..50: mol_type = other DNA
cccaatttccaatttccaaataacctctaaataaaaaactccaactcacc

SEQ ID NO: 15900 - DNA, 50 bp, synthetic construct
  source 1..50: mol_type = other DNA
caacctaaaaaataaaatcaatttccaaacratatacaactacttcctac

SEQ ID NO: 15901 - DNA, 50 bp, synthetic construct
  source 1..50: mol_type = other DNA
aatcaatttccaaacratatacaactacttcctacrtctctacaacttcc

SEQ ID NO: 15902 - DNA, 50 bp, synthetic construct
  source 1..50: mol_type = other DNA
ctttttacaaaaaccactaaacctaattattttaacaaatcrtccrtctc

SEQ ID NO: 15903 - DNA, 50 bp, synthetic construct
  source 1..50: mol_type = other DNA
aataactttttacaaaaaccactaaacctaattattttaacaaatcrtcc

SEQ ID NO: 15904 - DNA, 50 bp, synthetic construct
  source 1..50: mol_type = other DNA
aaaaaataactttttacaaaaaccactaaacctaattattttaacaaatc

SEQ ID NO: 15905 - DNA, 50 bp, synthetic construct
  source 1..50: mol_type = other DNA
cctaatcctaatcctcrtaaaaaacacccctacacaaaactaaaaaacrc

SEQ ID NO: 15906 - DNA, 50 bp, synthetic construct
  source 1..50: mol_type = other DNA
taaccctaattctaataaaaaacaaaacaaaaatcctaatcctaatcctc

SEQ ID NO: 15907 - DNA, 50 bp, synthetic construct
  source 1..50: mol_type = other DNA
aaatattcacaacccataaaaactccttactaattctttaaatacaaaac

SEQ ID NO: 15908 - DNA, 50 bp, synthetic construct
  source 1..50: mol_type = other DNA
aataacaactaataacatcaaaaaaatataaaattccccaataaaactcc

SEQ ID NO: 15909 - DNA, 50 bp, synthetic construct
  source 1..50: mol_type = other DNA
caccaaaacaaatactttaccacatccaccacaaaatcctataacrttac

SEQ ID NO: 15910 - DNA, 50 bp, synthetic construct
  source 1..50: mol_type = other DNA
aaataataacrtcaaaactaaaacrccracaaacctaaacctacaaaaac

SEQ ID NO: 15911 - DNA, 50 bp, synthetic construct
  source 1..50: mol_type = other DNA
aaataaacaaaacctaaacctacaaataacaacrcctaatcctaaaaaac

SEQ ID NO: 15912 - DNA, 50 bp, synthetic construct
  source 1..50: mol_type = other DNA
ctcraaaaatctacracaaataaacaaaacctaaacctacaaataacaac

SEQ ID NO: 15913 - DNA, 50 bp, synthetic construct
  source 1..50: mol_type = other DNA
crctctaaaaacaaaatccactttttctacctaactctcraaaaatctac

SEQ ID NO: 15914 - DNA, 50 bp, synthetic construct
  source 1..50: mol_type = other DNA
tttaaactacttattaaaattactctcraatatacaaattcctaaaaacc

SEQ ID NO: 15915 - DNA, 50 bp, synthetic construct
  source 1..50: mol_type = other DNA
tactaactctaaacataaaaacacaaatccaatattaataacctaccacc

SEQ ID NO: 15916 - DNA, 50 bp, synthetic construct
  source 1..50: mol_type = other DNA
aatattaataacctaccaccractaaatttaacaccatcacccaaaaacc

SEQ ID NO: 15917 - DNA, 50 bp, synthetic construct
  source 1..50: mol_type = other DNA
aaaaaatatacaaatcccatatcaaaatataactacccraaaacaataac

SEQ ID NO: 15918 - DNA, 50 bp, synthetic construct
  source 1..50: mol_type = other DNA
acaataacracaaaatatcaaataccaccaaaaactccaaaccttcctcc

SEQ ID NO: 15919 - DNA, 50 bp, synthetic construct
  source 1..50: mol_type = other DNA
craaaactaaataccaaaaaaacacrtaaaaataaaaaccacactaaacc

SEQ ID NO: 15920 - DNA, 50 bp, synthetic construct
  source 1..50: mol_type = other DNA
tcctcaaaactctcaaaaaatcraacraaaactaaataccaaaaaaacac

SEQ ID NO: 15921 - DNA, 50 bp, synthetic construct
  source 1..50: mol_type = other DNA
aaaaaatataaacaataaaacraactcaaactcactcacccraaaaaaac

SEQ ID NO: 15922 - DNA, 50 bp, synthetic construct
  source 1..50: mol_type = other DNA
caaaacaaaacccctacaaaactatccctataattaccattaacaatctc

SEQ ID NO: 15923 - DNA, 50 bp, synthetic construct
  source 1..50: mol_type = other DNA
taatataacaaaacaaatctactcttattaaccctaataaactaacaccc

SEQ ID NO: 15924 - DNA, 50 bp, synthetic construct
  source 1..50: mol_type = other DNA
ctaattatacctaaatacctcctaaacctacaacccaaaaactaatatcc

SEQ ID NO: 15925 - DNA, 50 bp, synthetic construct
  source 1..50: mol_type = other DNA
ctataaccacaaaaataacracaaataaacatatcaaaacccacaaaacc

SEQ ID NO: 15926 - DNA, 50 bp, synthetic construct
  source 1..50: mol_type = other DNA
acaaataaacatatcaaaacccacaaaaccratatcaaccccaaataacc

SEQ ID NO: 15927 - DNA, 50 bp, synthetic construct
  source 1..50: mol_type = other DNA
aaacccraactatcacctaaacacaaactaccactctaaacttttaaaac

SEQ ID NO: 15928 - DNA, 50 bp, synthetic construct
  source 1..50: mol_type = other DNA
caaaacrccccaaaaactcaaaataacaacctatactcaaataacaaccc

SEQ ID NO: 15929 - DNA, 50 bp, synthetic construct
  source 1..50: mol_type = other DNA
ctcaaataacaacccraattcaaacrtcctcaccaaaaaatcttcaaaac

SEQ ID NO: 15930 - DNA, 50 bp, synthetic construct
  source 1..50: mol_type = other DNA
acaacaactaaaacrtcaacccractatccttaaataacaaaaaactacc

SEQ ID NO: 15931 - DNA, 50 bp, synthetic construct
  source 1..50: mol_type = other DNA
ataacataacatcacacaactattttaattcataaattccaaaaccccac

SEQ ID NO: 15932 - DNA, 50 bp, synthetic construct
  source 1..50: mol_type = other DNA
caactattttaattcataaattccaaaaccccacraaatcaaaaaactcc

SEQ ID NO: 15933 - DNA, 50 bp, synthetic construct
  source 1..50: mol_type = other DNA
aaataaattcaacaatttccaacccaaaaacttatataacttctccaccc

SEQ ID NO: 15934 - DNA, 50 bp, synthetic construct
  source 1..50: mol_type = other DNA
actatatcccctccttaaaaacracattactactttcattaaataaaacc

SEQ ID NO: 15935 - DNA, 50 bp, synthetic construct
  source 1..50: mol_type = other DNA
aattctcaacaaatccaaaactcaaattacrcatttaccraaaaccttcc

SEQ ID NO: 15936 - DNA, 50 bp, synthetic construct
  source 1..50: mol_type = other DNA
tatcatactacaattctcaacaaatccaaaactcaaattacrcatttacc

SEQ ID NO: 15937 - DNA, 50 bp, synthetic construct
  source 1..50: mol_type = other DNA
aataaaaaaacaaactcaaaacaaaaaaataacttccccaaaatcctatc

SEQ ID NO: 15938 - DNA, 50 bp, synthetic construct
  source 1..50: mol_type = other DNA
aaaaaataaccaaatatcctcctttaactatcaaaaaacattcacaatac

SEQ ID NO: 15939 - DNA, 50 bp, synthetic construct
  source 1..50: mol_type = other DNA
taaaaaacaatcacaaatttaaaaaaacaccacratcacctcctaacctc

SEQ ID NO: 15940 - DNA, 50 bp, synthetic construct
  source 1..50: mol_type = other DNA
aacaaaataacaaaataccataacaaacacttacacractattacccaac

SEQ ID NO: 15941 - DNA, 50 bp, synthetic construct
  source 1..50: mol_type = other DNA
tcactaaaaacctatctcctaccacacccaattaaaactcracaaaaacc

SEQ ID NO: 15942 - DNA, 50 bp, synthetic construct
  source 1..50: mol_type = other DNA
aaatatcattcccttatcccraaatcttaatatttactaacccccraacc

SEQ ID NO: 15943 - DNA, 50 bp, synthetic construct
  source 1..50: mol_type = other DNA
catcaaaatatcattcccttatcccraaatcttaatatttactaaccccc

SEQ ID NO: 15944 - DNA, 50 bp, synthetic construct
  source 1..50: mol_type = other DNA
ctccrtacaaaaactaaaaataacrcatcaaaatatcattcccttatccc

SEQ ID NO: 15945 - DNA, 50 bp, synthetic construct
  source 1..50: mol_type = other DNA
aaaaccaataaacaccaaaacctcraaataaaaaaataacatcctaatac

SEQ ID NO: 15946 - DNA, 50 bp, synthetic construct
  source 1..50: mol_type = other DNA
cataatatcaaaactaaaaacaatcctaaaaataaaaaactattccctcc

SEQ ID NO: 15947 - DNA, 50 bp, synthetic construct
  source 1..50: mol_type = other DNA
aaaaacatctaatctactcttttattttatcratataccrtcccataatc

SEQ ID NO: 15948 - DNA, 50 bp, synthetic construct
  source 1..50: mol_type = other DNA
cttaacaaaaaacaaaattcttcccttttctctctctccataccctaacc

SEQ ID NO: 15949 - DNA, 50 bp, synthetic construct
  source 1..50: mol_type = other DNA
raacaatccaaatttcaatacacaaaaaactacatctcccaaaaaacacc

SEQ ID NO: 15950 - DNA, 50 bp, synthetic construct
  source 1..50: mol_type = other DNA
acaaataaccractaaaaaccactaactaaaaaccacaaaatcaactcac

SEQ ID NO: 15951 - DNA, 50 bp, synthetic construct
  source 1..50: mol_type = other DNA
accatcttccrtaaactaactctataattttcaatcaataatttccaatc

SEQ ID NO: 15952 - DNA, 50 bp, synthetic construct
  source 1..50: mol_type = other DNA
acatttaaaatacctattaattcattaaaacactcataatcctattatac

SEQ ID NO: 15953 - DNA, 50 bp, synthetic construct
  source 1..50: mol_type = other DNA
taaaacctctatataaatatatcaatatatatatctctatatatatcaac

SEQ ID NO: 15954 - DNA, 50 bp, synthetic construct
  source 1..50: mol_type = other DNA
cacctatataccccraatataataaatcatataatacctacaccaaaacc

SEQ ID NO: 15955 - DNA, 50 bp, synthetic construct
  source 1..50: mol_type = other DNA
aacccrtataaaaacaaacataaacataaataaaaatcacctaaaaaaac

SEQ ID NO: 15956 - DNA, 50 bp, synthetic construct
  source 1..50: mol_type = other DNA
tatccttttaaaacttatctctaaactatatctacaccaaaaaccractc

SEQ ID NO: 15957 - DNA, 50 bp, synthetic construct
  source 1..50: mol_type = other DNA
aaaactatccttttaaaacttatctctaaactatatctacaccaaaaacc

SEQ ID NO: 15958 - DNA, 50 bp, synthetic construct
  source 1..50: mol_type = other DNA
atataaaacaaatctacrcatatctatatacataataaatatttacrtcc

SEQ ID NO: 15959 - DNA, 50 bp, synthetic construct
  source 1..50: mol_type = other DNA
caaatctacrcatatctatatacataataaatatttacrtccrtctatac

SEQ ID NO: 15960 - DNA, 50 bp, synthetic construct
  source 1..50: mol_type = other DNA
ataataataaatctaaaccaaaactataataaccctacaaaaaaaacccc

SEQ ID NO: 15961 - DNA, 50 bp, synthetic construct
  source 1..50: mol_type = other DNA
cctaattcaccaaaaacaaataccaaaaaaaaccttcaaaataaacaacc

SEQ ID NO: 15962 - DNA, 50 bp, synthetic construct
  source 1..50: mol_type = other DNA
crattcrcaaaactacaaactaaaaacractaaacctaaaatcttcctcc

SEQ ID NO: 15963 - DNA, 50 bp, synthetic construct
  source 1..50: mol_type = other DNA
ccaccctaaataaattaccacatcaacrcatcctaacaaattccaaaacc

SEQ ID NO: 15964 - DNA, 50 bp, synthetic construct
  source 1..50: mol_type = other DNA
actaaaaccttacraaacccctaaaataacaacaaaaactcrtaaaaacc

SEQ ID NO: 15965 - DNA, 50 bp, synthetic construct
  source 1..50: mol_type = other DNA
aactcaaataatcracttctacraatctctactaccattttaaaaacccc

SEQ ID NO: 15966 - DNA, 50 bp, synthetic construct
  source 1..50: mol_type = other DNA
ttccaactattttttattttactttatttactatttaattaaacracaac

SEQ ID NO: 15967 - DNA, 50 bp, synthetic construct
  source 1..50: mol_type = other DNA
atataacaataacttatataaacacattaatataatctaaacccttcccc

SEQ ID NO: 15968 - DNA, 50 bp, synthetic construct
  source 1..50: mol_type = other DNA
crccaaaaacaaaatccttaaatcactaacaaaccraccttaataaacac

SEQ ID NO: 15969 - DNA, 50 bp, synthetic construct
  source 1..50: mol_type = other DNA
ataaacacrtactacaaaacactacctccaaatcctcccacatataaaac

SEQ ID NO: 15970 - DNA, 50 bp, synthetic construct
  source 1..50: mol_type = other DNA
ataacaaaaaacccccaaaacattctctcraacatcctactaaaactcac

SEQ ID NO: 15971 - DNA, 50 bp, synthetic construct
  source 1..50: mol_type = other DNA
ttactataaaaaatatactaaattatatattcctcraccctctatataac

SEQ ID NO: 15972 - DNA, 50 bp, synthetic construct
  source 1..50: mol_type = other DNA
aaattatatattcctcraccctctatataacrcctacttccaaactatac

SEQ ID NO: 15973 - DNA, 50 bp, synthetic construct
  source 1..50: mol_type = other DNA
atcttataaaacatattctcaacatcaacaaccccaactccttcctcctc

SEQ ID NO: 15974 - DNA, 50 bp, synthetic construct
  source 1..50: mol_type = other DNA
cacaaaaaacaaaacaaatattcttaaaaacccaacaccctaacccattc

SEQ ID NO: 15975 - DNA, 50 bp, synthetic construct
  source 1..50: mol_type = other DNA
aactccraaaaattaatctcactaacaaaaaaaatccctaaaaaaaaacc

SEQ ID NO: 15976 - DNA, 50 bp, synthetic construct
  source 1..50: mol_type = other DNA
caaacacaaaaccaacaattccratctcttccrataattctaacaaaaac

SEQ ID NO: 15977 - DNA, 50 bp, synthetic construct
  source 1..50: mol_type = other DNA
taaccattcaatcatctatttcaacaccctaacataacataaaaacaaac

SEQ ID NO: 15978 - DNA, 50 bp, synthetic construct
  source 1..50: mol_type = other DNA
aacataaaacctaaccaaaacaaaattaaaaatcaaatcccaattaacac

SEQ ID NO: 15979 - DNA, 50 bp, synthetic construct
  source 1..50: mol_type = other DNA
cacaatcataaaaaaccactcaactctcaaaacacaaaattacctttaac

SEQ ID NO: 15980 - DNA, 50 bp, synthetic construct
  source 1..50: mol_type = other DNA
aattaacattaatctacattaaatatctactaactcatccaaaaaaccrc

SEQ ID NO: 15981 - DNA, 50 bp, synthetic construct
  source 1..50: mol_type = other DNA
taaattaacattaatctacattaaatatctactaactcatccaaaaaacc

SEQ ID NO: 15982 - DNA, 50 bp, synthetic construct
  source 1..50: mol_type = other DNA
aatcaacaaatactcaatataaaccaataccaattcaaatttaactaaac

SEQ ID NO: 15983 - DNA, 50 bp, synthetic construct
  source 1..50: mol_type = other DNA
ccccaaaaacaaaaacaatccaacaaaatacaataactcttatccacaac

SEQ ID NO: 15984 - DNA, 50 bp, synthetic construct
  source 1..50: mol_type = other DNA
ttttccrtctaacattttcaactataatataatttccacrctaaaaaacc

SEQ ID NO: 15985 - DNA, 50 bp, synthetic construct
  source 1..50: mol_type = other DNA
actcaatccrattttccrtctaacattttcaactataatataatttccac

SEQ ID NO: 15986 - DNA, 50 bp, synthetic construct
  source 1..50: mol_type = other DNA
cttttaacaaaattaaaaaatctccrttaaaatactcaatccrattttcc

SEQ ID NO: 15987 - DNA, 50 bp, synthetic construct
  source 1..50: mol_type = other DNA
cttctcaacrtaaaaatcacaccacaactaaaaatatcaaacraaaaatc

SEQ ID NO: 15988 - DNA, 50 bp, synthetic construct
  source 1..50: mol_type = other DNA
cacaccacaactaaaaatatcaaacraaaaatcraactaaatatttcaac

SEQ ID NO: 15989 - DNA, 50 bp, synthetic construct
  source 1..50: mol_type = other DNA
attaccaccaacratccccatctacaaacttaaaacaataaaaatttttc

SEQ ID NO: 15990 - DNA, 50 bp, synthetic construct
  source 1..50: mol_type = other DNA
atcraaaatataccctaaaacaaaccccaccaacataaataaaaaccaac

SEQ ID NO: 15991 - DNA, 50 bp, synthetic construct
  source 1..50: mol_type = other DNA
taaccaataaataaataaccctctcacttaaatatactccraaaaacrac

SEQ ID NO: 15992 - DNA, 50 bp, synthetic construct
  source 1..50: mol_type = other DNA
aaataaccaataaataaataaccctctcacttaaatatactccraaaaac

SEQ ID NO: 15993 - DNA, 50 bp, synthetic construct
  source 1..50: mol_type = other DNA
tattttcaaataaccaataaataaataaccctctcacttaaatatactcc

SEQ ID NO: 15994 - DNA, 50 bp, synthetic construct
  source 1..50: mol_type = other DNA
actaaccatctaaaaacaccaacrttcctacaccacttaactaattctac

SEQ ID NO: 15995 - DNA, 50 bp, synthetic construct
  source 1..50: mol_type = other DNA
acaaaaacataaaacrcctcttctttatcaattacatcacaataaaaatc

SEQ ID NO: 15996 - DNA, 50 bp, synthetic construct
  source 1..50: mol_type = other DNA
cttaaaaacactcaacatactacaaatttacttaaacaaatataacctac

SEQ ID NO: 15997 - DNA, 50 bp, synthetic construct
  source 1..50: mol_type = other DNA
acaaatataacctacrttcaaataattcaatctaaaaaaatactaaaaac

SEQ ID NO: 15998 - DNA, 50 bp, synthetic construct
  source 1..50: mol_type = other DNA
aaaattttctaaacaattttaactttctacaaatctttctaaccatttac

SEQ ID NO: 15999 - DNA, 50 bp, synthetic construct
  source 1..50: mol_type = other DNA
ctaaaatctaaaaaaccctacaatcaccccaatacaaatcaaatataccc

SEQ ID NO: 16000 - DNA, 50 bp, synthetic construct
  source 1..50: mol_type = other DNA
catctaatctaatcatttttacaaccccaaaaaaattacatatcatttcc

SEQ ID NO: 16001 - DNA, 50 bp, synthetic construct
  source 1..50: mol_type = other DNA
ctctcttctaactctttacataaaaatcatttaaacctcacaactaaccc

SEQ ID NO: 16002 - DNA, 50 bp, synthetic construct
  source 1..50: mol_type = other DNA
ttcacaaaaaaactacctctctacactcraaaaaatataacaaaaaaccc

SEQ ID NO: 16003 - DNA, 50 bp, synthetic construct
  source 1..50: mol_type = other DNA
aacraaaaaccrtataaataacttcacaaaaaaactacctctctacactc

SEQ ID NO: 16004 - DNA, 50 bp, synthetic construct
  source 1..50: mol_type = other DNA
caatactaccctctacaaataaaatctaaaacaaaaataattcaaaaaac

SEQ ID NO: 16005 - DNA, 50 bp, synthetic construct
  source 1..50: mol_type = other DNA
aaaaccratataattcaaaaaaataaaacaacctctcaaaaaaacttacc

SEQ ID NO: 16006 - DNA, 50 bp, synthetic construct
  source 1..50: mol_type = other DNA
acccttaacaaattacatactaaaaaaaacctcaaatctacataaaaaac

SEQ ID NO: 16007 - DNA, 50 bp, synthetic construct
  source 1..50: mol_type = other DNA
aacaaacaacaaactaaccattctactaacaactaccratacccaaaacc

SEQ ID NO: 16008 - DNA, 50 bp, synthetic construct
  source 1..50: mol_type = other DNA
aatttactatataaacaaacaacaaactaaccattctactaacaactacc

SEQ ID NO: 16009 - DNA, 50 bp, synthetic construct
  source 1..50: mol_type = other DNA
ctccatactaaaatcaactacrttccaaattcraactaaaacctaaaaac

SEQ ID NO: 16010 - DNA, 50 bp, synthetic construct
  source 1..50: mol_type = other DNA
aactcttaaatataacraccrcaaaacaactccatactaaaatcaactac

SEQ ID NO: 16011 - DNA, 50 bp, synthetic construct
  source 1..50: mol_type = other DNA
aaaaaaaaataactcrcctcaataaactccaactcttaaatataacracc

SEQ ID NO: 16012 - DNA, 50 bp, synthetic construct
  source 1..50: mol_type = other DNA
acacccaaaaactaaaactcactaaaacraattactttctcctaaaaaac

SEQ ID NO: 16013 - DNA, 50 bp, synthetic construct
  source 1..50: mol_type = other DNA
atcraatctcactatattatccraactaattctccaataatcctcctaac

SEQ ID NO: 16014 - DNA, 50 bp, synthetic construct
  source 1..50: mol_type = other DNA
tctttcttctccttttttatttataaaaatcraatctcactatattatcc

SEQ ID NO: 16015 - DNA, 50 bp, synthetic construct
  source 1..50: mol_type = other DNA
rcaaactttacccaaaatttctccttataattttttaaccaacatttatc

SEQ ID NO: 16016 - DNA, 50 bp, synthetic construct
  source 1..50: mol_type = other DNA
ttacccaaaatttctccttataattttttaaccaacatttatcrtatcac

SEQ ID NO: 16017 - DNA, 50 bp, synthetic construct
  source 1..50: mol_type = other DNA
caaaatttctccttataattttttaaccaacatttatcrtatcacraaac

SEQ ID NO: 16018 - DNA, 50 bp, synthetic construct
  source 1..50: mol_type = other DNA
tcccrctaaatatatttaccaatacttaataaaaactattacaaccrccc

SEQ ID NO: 16019 - DNA, 50 bp, synthetic construct
  source 1..50: mol_type = other DNA
tcacraacractacaataattttcattaaacactaataaacacacccaac

SEQ ID NO: 16020 - DNA, 50 bp, synthetic construct
  source 1..50: mol_type = other DNA
cractacaataattttcattaaacactaataaacacacccaacraaatac

SEQ ID NO: 16021 - DNA, 50 bp, synthetic construct
  source 1..50: mol_type = other DNA
ctcaattctcraaatcaatttctcaccaaaacaaaactaaactaaaacac

SEQ ID NO: 16022 - DNA, 50 bp, synthetic construct
  source 1..50: mol_type = other DNA
caccaaaacaaaactaaactaaaacacrctaaaaaatcattaaaaaaacc

SEQ ID NO: 16023 - DNA, 50 bp, synthetic construct
  source 1..50: mol_type = other DNA
ttcctaccttctattttctaaataacaacrataaaaaaacaactacccrc

SEQ ID NO: 16024 - DNA, 50 bp, synthetic construct
  source 1..50: mol_type = other DNA
ccrcraaatatacttaaatacraaaactcaaaaactctactcaacactac

SEQ ID NO: 16025 - DNA, 50 bp, synthetic construct
  source 1..50: mol_type = other DNA
atatacttaaatacraaaactcaaaaactctactcaacactacractacc

SEQ ID NO: 16026 - DNA, 50 bp, synthetic construct
  source 1..50: mol_type = other DNA
accctaaacactaaatcttaaaaaactctcrtctaaaaaacctaacaaac

SEQ ID NO: 16027 - DNA, 50 bp, synthetic construct
  source 1..50: mol_type = other DNA
aaacrtctcrtctaaaaaaaaccctaaacactaaatcttaaaaaactctc

SEQ ID NO: 16028 - DNA, 50 bp, synthetic construct
  source 1..50: mol_type = other DNA
aaacraaaaccctctaaaactcaatattcaaaatttttcttaaacraaac

SEQ ID NO: 16029 - DNA, 50 bp, synthetic construct
  source 1..50: mol_type = other DNA
acaaaataacaatttcrctcataattaaaccrtccttaaaaaacacccac

SEQ ID NO: 16030 - DNA, 50 bp, synthetic construct
  source 1..50: mol_type = other DNA
aaaaaacacccacrttcctcctattatttcttctaaaatacraaaacttc

SEQ ID NO: 16031 - DNA, 50 bp, synthetic construct
  source 1..50: mol_type = other DNA
tataaccctatacccraaatattaaactttacattcctttccacttaaac

SEQ ID NO: 16032 - DNA, 50 bp, synthetic construct
  source 1..50: mol_type = other DNA
raaaactacctccaaactacaaccctctaacractaacaaaaaacacttc

SEQ ID NO: 16033 - DNA, 50 bp, synthetic construct
  source 1..50: mol_type = other DNA
aaaaaattaaattctccaatatacaaactccraaatactctctaccaacc

SEQ ID NO: 16034 - DNA, 50 bp, synthetic construct
  source 1..50: mol_type = other DNA
raaatactctctaccaaccrtcaaaaaactacaatttaaaaacaactccc

SEQ ID NO: 16035 - DNA, 50 bp, synthetic construct
  source 1..50: mol_type = other DNA
aaactacaatttaaaaacaactcccrcttactctaaaaaaccacttcccc

SEQ ID NO: 16036 - DNA, 50 bp, synthetic construct
  source 1..50: mol_type = other DNA
cctcttatcaccaaaaatccttaccctctaaaaccrtctacaaacaaaac

SEQ ID NO: 16037 - DNA, 50 bp, synthetic construct
  source 1..50: mol_type = other DNA
ccttcrtctaatactcctcttatcaccaaaaatccttaccctctaaaacc

SEQ ID NO: 16038 - DNA, 50 bp, synthetic construct
  source 1..50: mol_type = other DNA
aactcacatcacaatactaaaaataattactaaatattcataaatcccac

SEQ ID NO: 16039 - DNA, 50 bp, synthetic construct
  source 1..50: mol_type = other DNA
caatactaaaaataattactaaatattcataaatcccacrcactatttcc

SEQ ID NO: 16040 - DNA, 50 bp, synthetic construct
  source 1..50: mol_type = other DNA
ctattaactcaactcttaacaaaatcccaaaaacaaatattattctatac

SEQ ID NO: 16041 - DNA, 50 bp, synthetic construct
  source 1..50: mol_type = other DNA
aaatcccaaaaacaaatattattctatacrtaactttacaaacaaaaacc

SEQ ID NO: 16042 - DNA, 50 bp, synthetic construct
  source 1..50: mol_type = other DNA
ataaatacctacaattacttccctataataccraaacaaattattaaaac

SEQ ID NO: 16043 - DNA, 50 bp, synthetic construct
  source 1..50: mol_type = other DNA
aataataaaaattacaaaataaatacctacaattacttccctataatacc

SEQ ID NO: 16044 - DNA, 50 bp, synthetic construct
  source 1..50: mol_type = other DNA
tcattcctacttccttaactttaaatataaccttataactcrttataacc

SEQ ID NO: 16045 - DNA, 50 bp, synthetic construct
  source 1..50: mol_type = other DNA
ttcctacttccttaactttaaatataaccttataactcrttataaccrac

SEQ ID NO: 16046 - DNA, 50 bp, synthetic construct
  source 1..50: mol_type = other DNA
ccttataactcrttataaccracraactataaataaaaaccataaaaaac

SEQ ID NO: 16047 - DNA, 50 bp, synthetic construct
  source 1..50: mol_type = other DNA
ataaaacttctcacttacctttccccacaataaataatcrttattacccc

SEQ ID NO: 16048 - DNA, 50 bp, synthetic construct
  source 1..50: mol_type = other DNA
acrtaaactacataaaacttctcacttacctttccccacaataaataatc

SEQ ID NO: 16049 - DNA, 50 bp, synthetic construct
  source 1..50: mol_type = other DNA
aaacatctacaaattaactacaaaaatacctcttaaccctcacaatctac

SEQ ID NO: 16050 - DNA, 50 bp, synthetic construct
  source 1..50: mol_type = other DNA
aacaaacctctcaaataacaaccttaattatttaaaataatctccttaac

SEQ ID NO: 16051 - DNA, 50 bp, synthetic construct
  source 1..50: mol_type = other DNA
aaaaaaaatctaaaaaacttcataccccaaaaactacctaaaatctacac

SEQ ID NO: 16052 - DNA, 50 bp, synthetic construct
  source 1..50: mol_type = other DNA
aataatccctaaaatataaaattttccaaacctcccttttctcaaaaatc

SEQ ID NO: 16053 - DNA, 50 bp, synthetic construct
  source 1..50: mol_type = other DNA
tatttacaaaacaactaaattctcaatcaaaatatacaaataaaaactcc

SEQ ID NO: 16054 - DNA, 50 bp, synthetic construct
  source 1..50: mol_type = other DNA
ttatctcctatttaaacactatactaaaacataaatctctatcctcaacc

SEQ ID NO: 16055 - DNA, 50 bp, synthetic construct
  source 1..50: mol_type = other DNA
tatacttttaccacaaacatttaaaaaatcacactaaaaatttacttccc

SEQ ID NO: 16056 - DNA, 50 bp, synthetic construct
  source 1..50: mol_type = other DNA
tacaaaaacttaaatcattttcccataattaatttcaattctaaaaatcc

SEQ ID NO: 16057 - DNA, 50 bp, synthetic construct
  source 1..50: mol_type = other DNA
ctttcactccactaccataaattataaaaaacataccattcaaaactaac

SEQ ID NO: 16058 - DNA, 50 bp, synthetic construct
  source 1..50: mol_type = other DNA
caaataaatcaaccattctacrataatccaaaatactactataactctac

SEQ ID NO: 16059 - DNA, 50 bp, synthetic construct
  source 1..50: mol_type = other DNA
tattactacaactctaaaaaataatactactatactatatatcacacacc

SEQ ID NO: 16060 - DNA, 50 bp, synthetic construct
  source 1..50: mol_type = other DNA
acactaattcacacaaatcactaaaaattcccatctccactaactcactc

SEQ ID NO: 16061 - DNA, 50 bp, synthetic construct
  source 1..50: mol_type = other DNA
tccactaactcactcrataaaaacaaaaactcccataccrataaaaatac

SEQ ID NO: 16062 - DNA, 50 bp, synthetic construct
  source 1..50: mol_type = other DNA
taactcctacraaccaatttaattttatcaataacaataaattcttaaac

SEQ ID NO: 16063 - DNA, 50 bp, synthetic construct
  source 1..50: mol_type = other DNA
aaaaccttcacrtaaattctaactttaaccttctaaaatcaaaacrtacc

SEQ ID NO: 16064 - DNA, 50 bp, synthetic construct
  source 1..50: mol_type = other DNA
taaacaaaaccttcacrtaaattctaactttaaccttctaaaatcaaaac

SEQ ID NO: 16065 - DNA, 50 bp, synthetic construct
  source 1..50: mol_type = other DNA
ttaattccactaaaatcttaaccttctcctaaaataacttaaaacracac

SEQ ID NO: 16066 - DNA, 50 bp, synthetic construct
  source 1..50: mol_type = other DNA
acaccctaacattttcaaataatatatataaacctaacaaaactctactc

SEQ ID NO: 16067 - DNA, 50 bp, synthetic construct
  source 1..50: mol_type = other DNA
cctaacattttcaaataatatatataaacctaacaaaactctactcrtac

SEQ ID NO: 16068 - DNA, 50 bp, synthetic construct
  source 1..50: mol_type = other DNA
aaaaccaacrtctccccaattcctaaaatcctaaatattacctaccaatc

SEQ ID NO: 16069 - DNA, 50 bp, synthetic construct
  source 1..50: mol_type = other DNA
aactaaaacrtcactatatttataaaactaataaattacacaacctcrtc

SEQ ID NO: 16070 - DNA, 50 bp, synthetic construct
  source 1..50: mol_type = other DNA
aattaacrattaaaaattcacccttaactataacacctcccttcaattcc

SEQ ID NO: 16071 - DNA, 50 bp, synthetic construct
  source 1..50: mol_type = other DNA
acactaaattatcaacaaatcatctctacaccataatataccttaattcc

SEQ ID NO: 16072 - DNA, 50 bp, synthetic construct
  source 1..50: mol_type = other DNA
aatctatcataaatttactctaatctaaaataattaataacaaaacacac

SEQ ID NO: 16073 - DNA, 50 bp, synthetic construct
  source 1..50: mol_type = other DNA
acacacratacacaaattcctttccttttactcatttaacaaacaatcac

SEQ ID NO: 16074 - DNA, 50 bp, synthetic construct
  source 1..50: mol_type = other DNA
ctttccttttactcatttaacaaacaatcacraaacctatcctctatacc

SEQ ID NO: 16075 - DNA, 50 bp, synthetic construct
  source 1..50: mol_type = other DNA
ataaaacaaaaataactttcacttaacctccaccaacttttatctcatcc

SEQ ID NO: 16076 - DNA, 50 bp, synthetic construct
  source 1..50: mol_type = other DNA
actaataacaaaacccatatatctcattacrctaactactaaaaaattac

SEQ ID NO: 16077 - DNA, 50 bp, synthetic construct
  source 1..50: mol_type = other DNA
acaaaacccatatatctcattacrctaactactaaaaaattacrcaaacc

SEQ ID NO: 16078 - DNA, 50 bp, synthetic construct
  source 1..50: mol_type = other DNA
aatctcaatcaatttaaaaaatttattttaccaaaattaaaaacttaccc

SEQ ID NO: 16079 - DNA, 50 bp, synthetic construct
  source 1..50: mol_type = other DNA
atcaatttaaaaaatttattttaccaaaattaaaaacttacccrtaacac

SEQ ID NO: 16080 - DNA, 50 bp, synthetic construct
  source 1..50: mol_type = other DNA
acacracctcaaaaaatcctaataacatatacccaaaataatcaaaaaac

SEQ ID NO: 16081 - DNA, 50 bp, synthetic construct
  source 1..50: mol_type = other DNA
caaaaaatactcrtaaactaataaaacattctcaaaaaaacttcccccac

SEQ ID NO: 16082 - DNA, 50 bp, synthetic construct
  source 1..50: mol_type = other DNA
ttcaataacttccctttaaaaatctttacrtccatccrtccctaacaatc

SEQ ID NO: 16083 - DNA, 50 bp, synthetic construct
  source 1..50: mol_type = other DNA
tattcttttcttattcaataacttccctttaaaaatctttacrtccatcc

SEQ ID NO: 16084 - DNA, 50 bp, synthetic construct
  source 1..50: mol_type = other DNA
acttcatttattcttttcttattcaataacttccctttaaaaatctttac

SEQ ID NO: 16085 - DNA, 50 bp, synthetic construct
  source 1..50: mol_type = other DNA
caaacataaaccaccrtaaccaacctaacaatcaaatttttatctatttc

SEQ ID NO: 16086 - DNA, 50 bp, synthetic construct
  source 1..50: mol_type = other DNA
ratcatcaaaactaaaacctaaaaaactaccaaaaacrcraacaccactc

SEQ ID NO: 16087 - DNA, 50 bp, synthetic construct
  source 1..50: mol_type = other DNA
aaaaaccactccctattattaaaaaacaacttacaaacacaaatctatcc

SEQ ID NO: 16088 - DNA, 50 bp, synthetic construct
  source 1..50: mol_type = other DNA
attattaaaaaacaacttacaaacacaaatctatccrcccracaaccaac

SEQ ID NO: 16089 - DNA, 50 bp, synthetic construct
  source 1..50: mol_type = other DNA
cctaaaacttaatccctccactttctaaatcaccaaaaacttctcaaccc

SEQ ID NO: 16090 - DNA, 50 bp, synthetic construct
  source 1..50: mol_type = other DNA
tttctaaatcaccaaaaacttctcaacccraaacccaaaaaatataatcc

SEQ ID NO: 16091 - DNA, 50 bp, synthetic construct
  source 1..50: mol_type = other DNA
cccaaacactcttaactaattctaaatttcaacaaaacttattaaaaacc

SEQ ID NO: 16092 - DNA, 50 bp, synthetic construct
  source 1..50: mol_type = other DNA
tccaacaaactttactaaaacccaaaaccaaccaaaaatatctaaaaacc

SEQ ID NO: 16093 - DNA, 50 bp, synthetic construct
  source 1..50: mol_type = other DNA
tatataacctcttaaaaacaaatcacaacccataaccacaataaaacatc

SEQ ID NO: 16094 - DNA, 50 bp, synthetic construct
  source 1..50: mol_type = other DNA
acaaatcacaacccataaccacaataaaacatcraccaaaataataaacc

SEQ ID NO: 16095 - DNA, 50 bp, synthetic construct
  source 1..50: mol_type = other DNA
acactactaaacctaacaaacttctcttttcaaatctaaattttatatac

SEQ ID NO: 16096 - DNA, 50 bp, synthetic construct
  source 1..50: mol_type = other DNA
aaaatcacctacatcctacaactataaataactatatctacctcattaac

SEQ ID NO: 16097 - DNA, 50 bp, synthetic construct
  source 1..50: mol_type = other DNA
aaaaccatcatttttaatcaacaaactaaactctaaacctatatatatac

SEQ ID NO: 16098 - DNA, 50 bp, synthetic construct
  source 1..50: mol_type = other DNA
tccaaaaatcatcraaaatcaattatattaaaaattaacatctcaccctc

SEQ ID NO: 16099 - DNA, 50 bp, synthetic construct
  source 1..50: mol_type = other DNA
ctcataaataacaacrtaaatcctctattaatcataaaacccaaaaaacc

SEQ ID NO: 16100 - DNA, 50 bp, synthetic construct
  source 1..50: mol_type = other DNA
aataaattcatttcctcaatttaaccaataaaacaatcaataaaaaccac

SEQ ID NO: 16101 - DNA, 50 bp, synthetic construct
  source 1..50: mol_type = other DNA
accaatatataaataatttatatttacacaaaacrcaaacttaactttac

SEQ ID NO: 16102 - DNA, 50 bp, synthetic construct
  source 1..50: mol_type = other DNA
cttatataaatataaatcacttacacactaacctaactaccaaaaacatc

SEQ ID NO: 16103 - DNA, 50 bp, synthetic construct
  source 1..50: mol_type = other DNA
aataaataaacttcraaaatattcaaaaccaactaacccctataacrccc

SEQ ID NO: 16104 - DNA, 50 bp, synthetic construct
  source 1..50: mol_type = other DNA
aaaaaaaatcaaaaacraaactaataaactaccactataccacracraac

SEQ ID NO: 16105 - DNA, 50 bp, synthetic construct
  source 1..50: mol_type = other DNA
aaaacattatcctaaactattaaaaaataaccctaaccctaaatcatatc

SEQ ID NO: 16106 - DNA, 50 bp, synthetic construct
  source 1..50: mol_type = other DNA
rtaacaaataaactataaaactacrtcctatatatatcccctcccaaatc

SEQ ID NO: 16107 - DNA, 50 bp, synthetic construct
  source 1..50: mol_type = other DNA
aactatatcaacaaacraaataccacrtaacaaataaactataaaactac

SEQ ID NO: 16108 - DNA, 50 bp, synthetic construct
  source 1..50: mol_type = other DNA
catcccctatcraataaactaatcaactatatcaacaaacraaataccac

SEQ ID NO: 16109 - DNA, 50 bp, synthetic construct
  source 1..50: mol_type = other DNA
accctctttccatcccctatcraataaactaatcaactatatcaacaaac

SEQ ID NO: 16110 - DNA, 50 bp, synthetic construct
  source 1..50: mol_type = other DNA
ctacctaccacrtaatattccrtttattaacataattaaccaactcatcc

SEQ ID NO: 16111 - DNA, 50 bp, synthetic construct
  source 1..50: mol_type = other DNA
caaaaaaatatcctaataccctctatcctctccaaataaatctaaaatcc

SEQ ID NO: 16112 - DNA, 50 bp, synthetic construct
  source 1..50: mol_type = other DNA
acccttcccaactattattacaaaatttcaccaacttcccacatattccc

SEQ ID NO: 16113 - DNA, 50 bp, synthetic construct
  source 1..50: mol_type = other DNA
aactcaaattaactacctttccactaaaaatatccttcaaaactaaaacc

SEQ ID NO: 16114 - DNA, 50 bp, synthetic construct
  source 1..50: mol_type = other DNA
aaattaactacctttccactaaaaatatccttcaaaactaaaaccraacc

SEQ ID NO: 16115 - DNA, 50 bp, synthetic construct
  source 1..50: mol_type = other DNA
caaatttacatctaacccaataataccacaaccactctaataacaaaccc

SEQ ID NO: 16116 - DNA, 50 bp, synthetic construct
  source 1..50: mol_type = other DNA
ctaaactttacccaaaccttcataataaatcaacrcattaactcaaaacc

SEQ ID NO: 16117 - DNA, 50 bp, synthetic construct
  source 1..50: mol_type = other DNA
aaactattatactctattcatttatcccttttattcttttttcttttcac

SEQ ID NO: 16118 - DNA, 50 bp, synthetic construct
  source 1..50: mol_type = other DNA
ctaaacactttacaaaataactcatttaatccttaaaaccatttcataac

SEQ ID NO: 16119 - DNA, 50 bp, synthetic construct
  source 1..50: mol_type = other DNA
ttaatctaaatacatattcacattacaatatctcacraaacttccctaac

SEQ ID NO: 16120 - DNA, 50 bp, synthetic construct
  source 1..50: mol_type = other DNA
caacttcaaaacctatcaccaaaaaaaataaacctaaacctaaaaataac

SEQ ID NO: 16121 - DNA, 50 bp, synthetic construct
  source 1..50: mol_type = other DNA
cacctaatctcrtaactacacaatcaatataaacccrcrtaaaactaaac

SEQ ID NO: 16122 - DNA, 50 bp, synthetic construct
  source 1..50: mol_type = other DNA
tatcaactcataaaaaacrcctctatacaaacaactatctcattcaaaac

SEQ ID NO: 16123 - DNA, 50 bp, synthetic construct
  source 1..50: mol_type = other DNA
aaaaactactatccraacaaaaacatttaatacaaacaaaataacttaac

SEQ ID NO: 16124 - DNA, 50 bp, synthetic construct
  source 1..50: mol_type = other DNA
raatcttataaaacttattcactatcacraaaacaacrcaaaaaaaaccc

SEQ ID NO: 16125 - DNA, 50 bp, synthetic construct
  source 1..50: mol_type = other DNA
atttaacccaccraaatctcatcttaaaatataactcctataatcctcac

SEQ ID NO: 16126 - DNA, 50 bp, synthetic construct
  source 1..50: mol_type = other DNA
ataaaaaacaaaaccctttctaaaataactataatttaatttaacccacc

SEQ ID NO: 16127 - DNA, 50 bp, synthetic construct
  source 1..50: mol_type = other DNA
aaccatctaaaaatataaccaaacaaaaaaaacataatctaaacctaacc

SEQ ID NO: 16128 - DNA, 50 bp, synthetic construct
  source 1..50: mol_type = other DNA
aaaaaaccrcccctttacaaataaaacaacctacacaaaaaataacaatc

SEQ ID NO: 16129 - DNA, 50 bp, synthetic construct
  source 1..50: mol_type = other DNA
taacctttacctatctccaatttcacaactcaaatacaaaaacatacatc

SEQ ID NO: 16130 - DNA, 50 bp, synthetic construct
  source 1..50: mol_type = other DNA
aaaataacttcrtttatatcrttaacacccracctaaaataaatatcacc

SEQ ID NO: 16131 - DNA, 50 bp, synthetic construct
  source 1..50: mol_type = other DNA
caactcaaatacaaaaacatacatcrcaacrataacacttactttaaacc

SEQ ID NO: 16132 - DNA, 50 bp, synthetic construct
  source 1..50: mol_type = other DNA
tactccaaaccattaaaaaaaccaatccaaaaaataacttcrtttatatc

SEQ ID NO: 16133 - DNA, 50 bp, synthetic construct
  source 1..50: mol_type = other DNA
racratttcctatcctttcttactattataaaaataaccacrtaaatctc

SEQ ID NO: 16134 - DNA, 50 bp, synthetic construct
  source 1..50: mol_type = other DNA
raaataaacracratttcctatcctttcttactattataaaaataaccac

SEQ ID NO: 16135 - DNA, 50 bp, synthetic construct
  source 1..50: mol_type = other DNA
aaacactaaaaataacttacrttccttcaaaataattacataaaatcaac

SEQ ID NO: 16136 - DNA, 50 bp, synthetic construct
  source 1..50: mol_type = other DNA
ctaaacttcaaaacttaaaatacraactatttaaacaaataacaaaatac

SEQ ID NO: 16137 - DNA, 50 bp, synthetic construct
  source 1..50: mol_type = other DNA
acttaaaatacraactatttaaacaaataacaaaatacrcacatccaaac

SEQ ID NO: 16138 - DNA, 50 bp, synthetic construct
  source 1..50: mol_type = other DNA
atcatattaaccaaactaatcttaaattcctaatctcaaataattcactc

SEQ ID NO: 16139 - DNA, 50 bp, synthetic construct
  source 1..50: mol_type = other DNA
taattttcttaaatattatatttattacccatttctcaccraaaacatac

SEQ ID NO: 16140 - DNA, 50 bp, synthetic construct
  source 1..50: mol_type = other DNA
aaccaccctctccttccttacatcatactttctcttaaaattcttactac

SEQ ID NO: 16141 - DNA, 50 bp, synthetic construct
  source 1..50: mol_type = other DNA
atccaaaataataactttcaaccataaaaataccatactcaaaatcctac

SEQ ID NO: 16142 - DNA, 50 bp, synthetic construct
  source 1..50: mol_type = other DNA
caaaataataactttcaaccataaaaataccatactcaaaatcctacrac

SEQ ID NO: 16143 - DNA, 50 bp, synthetic construct
  source 1..50: mol_type = other DNA
cattcatcttaattacactcctattacaactatatcattattattctcac

SEQ ID NO: 16144 - DNA, 50 bp, synthetic construct
  source 1..50: mol_type = other DNA
cctaatactcaaaataaatctaccataatattcataaaataacaaaaaac

SEQ ID NO: 16145 - DNA, 50 bp, synthetic construct
  source 1..50: mol_type = other DNA
attccataaatatcataacaaacctactttaaacaccaaaccacctacac

SEQ ID NO: 16146 - DNA, 50 bp, synthetic construct
  source 1..50: mol_type = other DNA
taaaaaacaaccraccataatacaaatcacaacaaattactaaacaaatc

SEQ ID NO: 16147 - DNA, 50 bp, synthetic construct
  source 1..50: mol_type = other DNA
ctttcctataacratttactcaacaacctattataacctacaccataatc

SEQ ID NO: 16148 - DNA, 50 bp, synthetic construct
  source 1..50: mol_type = other DNA
ccctaattctacctaataaatataattactaactaaatacaataactcac

SEQ ID NO: 16149 - DNA, 50 bp, synthetic construct
  source 1..50: mol_type = other DNA
taataaaataacatcctatttaaaaaaacaacaataaccaacaaaaacac

SEQ ID NO: 16150 - DNA, 50 bp, synthetic construct
  source 1..50: mol_type = other DNA
ctaaataaaataccatctcaccaaacaaaattccctaaactcacracccc

SEQ ID NO: 16151 - DNA, 50 bp, synthetic construct
  source 1..50: mol_type = other DNA
aacaaaaaaaacatttatccacctaccctaatctaaaatatcrcccttac

SEQ ID NO: 16152 - DNA, 50 bp, synthetic construct
  source 1..50: mol_type = other DNA
cacctaacatacccattccctaaaacccaatctaatataatcaacatacc

SEQ ID NO: 16153 - DNA, 50 bp, synthetic construct
  source 1..50: mol_type = other DNA
caaactataccaaccataacaaaactaactataaaaaaactcacctcacc

SEQ ID NO: 16154 - DNA, 50 bp, synthetic construct
  source 1..50: mol_type = other DNA
atcaactaaccctattcacactacctccaaataaaccatacctataaaac

SEQ ID NO: 16155 - DNA, 50 bp, synthetic construct
  source 1..50: mol_type = other DNA
actaaccctattcacactacctccaaataaaccatacctataaaacraac

SEQ ID NO: 16156 - DNA, 50 bp, synthetic construct
  source 1..50: mol_type = other DNA
attcacactacctccaaataaaccatacctataaaacraacraaaaacac

SEQ ID NO: 16157 - DNA, 50 bp, synthetic construct
  source 1..50: mol_type = other DNA
aaccccaaaataaaaatcaccatatatctatctatcttaaattaatttac

SEQ ID NO: 16158 - DNA, 50 bp, synthetic construct
  source 1..50: mol_type = other DNA
ctatctatcttaaattaatttacrtctatacctaccactatatatctctc

SEQ ID NO: 16159 - DNA, 50 bp, synthetic construct
  source 1..50: mol_type = other DNA
ttaaattaatttacrtctatacctaccactatatatctctcrcctccaac

SEQ ID NO: 16160 - DNA, 50 bp, synthetic construct
  source 1..50: mol_type = other DNA
taatttacaaactataataaatcctcacactaaaatctaacttaaaacac

SEQ ID NO: 16161 - DNA, 50 bp, synthetic construct
  source 1..50: mol_type = other DNA
ataataacaactaaacraaaccaaaaccataaaacraaattatacaaaac

SEQ ID NO: 16162 - DNA, 50 bp, synthetic construct
  source 1..50: mol_type = other DNA
cctataataaacratataataacaactaaacraaaccaaaaccataaaac

SEQ ID NO: 16163 - DNA, 50 bp, synthetic construct
  source 1..50: mol_type = other DNA
acaaataacctcttctaaactaaatataactaaccrtaaacaatcactac

SEQ ID NO: 16164 - DNA, 50 bp, synthetic construct
  source 1..50: mol_type = other DNA
ctacccacaaatacacacatatataaatacacacacaaatactaaaacac

SEQ ID NO: 16165 - DNA, 50 bp, synthetic construct
  source 1..50: mol_type = other DNA
atatatatacctataaacaaaaaaaatacacaccatactaacctctacac

SEQ ID NO: 16166 - DNA, 50 bp, synthetic construct
  source 1..50: mol_type = other DNA
atacctataaacaaaaaaaatacacaccatactaacctctacacrtctcc

SEQ ID NO: 16167 - DNA, 50 bp, synthetic construct
  source 1..50: mol_type = other DNA
ttcctaacttaataaaaccaaaacataccctactaacaataacaacctcc

SEQ ID NO: 16168 - DNA, 50 bp, synthetic construct
  source 1..50: mol_type = other DNA
cattactaataaaacatatcctaacctcaccaaactaaaaatctactcac

SEQ ID NO: 16169 - DNA, 50 bp, synthetic construct
  source 1..50: mol_type = other DNA
ctatacaaaaatctataaaaaattcaaaacaaaaacccctctattcccac

SEQ ID NO: 16170 - DNA, 50 bp, synthetic construct
  source 1..50: mol_type = other DNA
taatcacttcctactataaaatatatcctaaaacttaatactaatatatc

SEQ ID NO: 16171 - DNA, 50 bp, synthetic construct
  source 1..50: mol_type = other DNA
attccaaaacacactccacaacaaaaaataaccactacctaaacaaaaac

SEQ ID NO: 16172 - DNA, 50 bp, synthetic construct
  source 1..50: mol_type = other DNA
ccaccaacaaaaaactaaaaccaaaaaacaaaacttccacaaaacatttc

SEQ ID NO: 16173 - DNA, 50 bp, synthetic construct
  source 1..50: mol_type = other DNA
ataatacccccrataatacacaatacaacrtataaaaacacaaaaataac

SEQ ID NO: 16174 - DNA, 50 bp, synthetic construct
  source 1..50: mol_type = other DNA
aaaataaacattacaataaaaataatacccccrataatacacaatacaac

SEQ ID NO: 16175 - DNA, 50 bp, synthetic construct
  source 1..50: mol_type = other DNA
aaaacattattttcattataatattcatttcccacccctactccaacctc

SEQ ID NO: 16176 - DNA, 50 bp, synthetic construct
  source 1..50: mol_type = other DNA
ctaaaacacaaatatctatacatatcccccaaaaaccaccrtaaaaaacc

SEQ ID NO: 16177 - DNA, 50 bp, synthetic construct
  source 1..50: mol_type = other DNA
aactataacactttcratttattaactacrataccctaatataactaacc

SEQ ID NO: 16178 - DNA, 50 bp, synthetic construct
  source 1..50: mol_type = other DNA
caacatctaacacaaaatattaactataacactttcratttattaactac

SEQ ID NO: 16179 - DNA, 50 bp, synthetic construct
  source 1..50: mol_type = other DNA
ccccataacccaaacaacatctaacacaaaatattaactataacactttc

SEQ ID NO: 16180 - DNA, 50 bp, synthetic construct
  source 1..50: mol_type = other DNA
aaatattacaaccaatatcctataccaaatactatctaaaccataaaaac

SEQ ID NO: 16181 - DNA, 50 bp, synthetic construct
  source 1..50: mol_type = other DNA
aacraaaccatcatattccaaatatataaacttactataaaaactaacac

SEQ ID NO: 16182 - DNA, 50 bp, synthetic construct
  source 1..50: mol_type = other DNA
atataaacttactataaaaactaacacrtaaccaaaacacctaacatcac

SEQ ID NO: 16183 - DNA, 50 bp, synthetic construct
  source 1..50: mol_type = other DNA
ttacctaacaactatccaataaaattttctaaatatccaataaaataacc

SEQ ID NO: 16184 - DNA, 50 bp, synthetic construct
  source 1..50: mol_type = other DNA
ccrcrtataactcttaaacacttaaaatataactaatcccctaaaaaaac

SEQ ID NO: 16185 - DNA, 50 bp, synthetic construct
  source 1..50: mol_type = other DNA
acatatacaaattacaaacaaaaccaatcttaacaattaccrcaataacc

SEQ ID NO: 16186 - DNA, 50 bp, synthetic construct
  source 1..50: mol_type = other DNA
tataaaaccccataaacaaatccrtaaaaacttaacaatctattcatctc

SEQ ID NO: 16187 - DNA, 50 bp, synthetic construct
  source 1..50: mol_type = other DNA
tattaaatttctacraacttacccataaaattccacaataaacctaaacc

SEQ ID NO: 16188 - DNA, 50 bp, synthetic construct
  source 1..50: mol_type = other DNA
acaaaaataaaccacttaacctctcataaccaattacttaaacttctacc

SEQ ID NO: 16189 - DNA, 50 bp, synthetic construct
  source 1..50: mol_type = other DNA
aactaaattccaatctacttctacctctactcttaaaatcttttaaaatc

SEQ ID NO: 16190 - DNA, 50 bp, synthetic construct
  source 1..50: mol_type = other DNA
tacatattttccttccrattcaacttttataacaccaaattaaaacattc

SEQ ID NO: 16191 - DNA, 50 bp, synthetic construct
  source 1..50: mol_type = other DNA
ttaacttatatacaactcctaattatacaaaataaaaaactatcctaaac

SEQ ID NO: 16192 - DNA, 50 bp, synthetic construct
  source 1..50: mol_type = other DNA
aaacaacactaaaataattaaacaaattaaacccaaaataattacttttc

SEQ ID NO: 16193 - DNA, 50 bp, synthetic construct
  source 1..50: mol_type = other DNA
ctacaaccaaaactaattcaatcaaacattacccataactttcactaaac

SEQ ID NO: 16194 - DNA, 50 bp, synthetic construct
  source 1..50: mol_type = other DNA
aaactctctccacctacttcctatttttctataaccatcaaaaaattctc

SEQ ID NO: 16195 - DNA, 50 bp, synthetic construct
  source 1..50: mol_type = other DNA
ttcctatttttctataaccatcaaaaaattctcrcttcaacacaaaatcc

SEQ ID NO: 16196 - DNA, 50 bp, synthetic construct
  source 1..50: mol_type = other DNA
accatcaaaaaattctcrcttcaacacaaaatccraaattttaaaaaaac

SEQ ID NO: 16197 - DNA, 50 bp, synthetic construct
  source 1..50: mol_type = other DNA
tatactatcctttcraaataacattcrctcattaattcratccaaacctc

SEQ ID NO: 16198 - DNA, 50 bp, synthetic construct
  source 1..50: mol_type = other DNA
aaatttcattaacccaccaacrtatatactatcctttcraaataacattc

SEQ ID NO: 16199 - DNA, 50 bp, synthetic construct
  source 1..50: mol_type = other DNA
atctaaaccraattaataaacraataccaccccraaaaaataacatacac

SEQ ID NO: 16200 - DNA, 50 bp, synthetic construct
  source 1..50: mol_type = other DNA
ctaaaccacracaaaactctaaatcataaataaactttcttcccttaatc

SEQ ID NO: 16201 - DNA, 50 bp, synthetic construct
  source 1..50: mol_type = other DNA
craaccaaattacaactcaacaactaccrcctaaaccatcaactaacaac

SEQ ID NO: 16202 - DNA, 50 bp, synthetic construct
  source 1..50: mol_type = other DNA
taaaactaaaataactcaacccctaaacccaactcctacccaaaactaac

SEQ ID NO: 16203 - DNA, 50 bp, synthetic construct
  source 1..50: mol_type = other DNA
ctctcctaacctttataaacttaccctcaccactcaaactaaaaaaactc

SEQ ID NO: 16204 - DNA, 50 bp, synthetic construct
  source 1..50: mol_type = other DNA
ttaaaatacctctaacaaacttaaaacctaaacraaccaaacraacaacc

SEQ ID NO: 16205 - DNA, 50 bp, synthetic construct
  source 1..50: mol_type = other DNA
taaaaaacttaaaatacctctaacaaacttaaaacctaaacraaccaaac

SEQ ID NO: 16206 - DNA, 50 bp, synthetic construct
  source 1..50: mol_type = other DNA
acaactctctaaaaaacttaaaatacctctaacaaacttaaaacctaaac

SEQ ID NO: 16207 - DNA, 50 bp, synthetic construct
  source 1..50: mol_type = other DNA
ttcaaaccctaactcaaccctcaaccccctactctaaaaatattaaaaac

SEQ ID NO: 16208 - DNA, 50 bp, synthetic construct
  source 1..50: mol_type = other DNA
ctcaaattaaactaaaccaactaaaaaaccccaaaaccaaacraaactac

SEQ ID NO: 16209 - DNA, 50 bp, synthetic construct
  source 1..50: mol_type = other DNA
aaaaacctctcaaattaaactaaaccaactaaaaaaccccaaaaccaaac

SEQ ID NO: 16210 - DNA, 50 bp, synthetic construct
  source 1..50: mol_type = other DNA
ccaaaaaattcaaactaaaaaaacatcrtaacataaaatcttaaccatac

SEQ ID NO: 16211 - DNA, 50 bp, synthetic construct
  source 1..50: mol_type = other DNA
ttcccctaaacccacratatcctccaaaaaattcaaactaaaaaaacatc

SEQ ID NO: 16212 - DNA, 50 bp, synthetic construct
  source 1..50: mol_type = other DNA
aaaaccctataccacratatcctttcaacttaaatcccttaaaaaacacc

SEQ ID NO: 16213 - DNA, 50 bp, synthetic construct
  source 1..50: mol_type = other DNA
aaactaattccaaaactcttccrtccaaacattatctactttttcccrac

SEQ ID NO: 16214 - DNA, 50 bp, synthetic construct
  source 1..50: mol_type = other DNA
caaaaactaattccaaaactcttccrtccaaacattatctactttttccc

SEQ ID NO: 16215 - DNA, 50 bp, synthetic construct
  source 1..50: mol_type = other DNA
ccctctacccaatctctaattcctacaaaaactaattccaaaactcttcc

SEQ ID NO: 16216 - DNA, 50 bp, synthetic construct
  source 1..50: mol_type = other DNA
aaataaactcactttccaaaatatatcaactaaaaatacrtacacacccc

SEQ ID NO: 16217 - DNA, 50 bp, synthetic construct
  source 1..50: mol_type = other DNA
ttattcaaaaaaaattttaactaactatacttaaccactcccaacttccc

SEQ ID NO: 16218 - DNA, 50 bp, synthetic construct
  source 1..50: mol_type = other DNA
caaactccaaaactataaaaccttattcaaaattaaacrcrataactcac

SEQ ID NO: 16219 - DNA, 50 bp, synthetic construct
  source 1..50: mol_type = other DNA
caaaaacctacaaactccaaaactataaaaccttattcaaaattaaacrc

SEQ ID NO: 16220 - DNA, 50 bp, synthetic construct
  source 1..50: mol_type = other DNA
cacaaaaacctacaaactccaaaactataaaaccttattcaaaattaaac

SEQ ID NO: 16221 - DNA, 50 bp, synthetic construct
  source 1..50: mol_type = other DNA
taaaataaaatcataacctaccatcrtaaaactcatattaaataacacac

SEQ ID NO: 16222 - DNA, 50 bp, synthetic construct
  source 1..50: mol_type = other DNA
ctcaaaaactaaatctctccccctataaaataaaatcataacctaccatc

SEQ ID NO: 16223 - DNA, 50 bp, synthetic construct
  source 1..50: mol_type = other DNA
aaaaaaatccctaacctcacacataaccttccttctccaaaaacctaaac

SEQ ID NO: 16224 - DNA, 50 bp, synthetic construct
  source 1..50: mol_type = other DNA
ccttaaaacccraatttaactaattcccaaaaatatacaaaacacaaaac

SEQ ID NO: 16225 - DNA, 50 bp, synthetic construct
  source 1..50: mol_type = other DNA
aaacaaaaaccataccctattaaaaacaaaaatcctaaaaatacaacctc

SEQ ID NO: 16226 - DNA, 50 bp, synthetic construct
  source 1..50: mol_type = other DNA
aaaaaaacaaataactccctaaaataaaacattacaataaatcacaaatc

SEQ ID NO: 16227 - DNA, 50 bp, synthetic construct
  source 1..50: mol_type = other DNA
aaaaatatctaactcaaattctaaacccrtacaaaaaactctcctaactc

SEQ ID NO: 16228 - DNA, 50 bp, synthetic construct
  source 1..50: mol_type = other DNA
atataaaaataaccaaaatacaaaaaatatctaactcaaattctaaaccc

SEQ ID NO: 16229 - DNA, 50 bp, synthetic construct
  source 1..50: mol_type = other DNA
aaacctcraactatctcttcctctaaaattctctaaaaaaaccaaaactc

SEQ ID NO: 16230 - DNA, 50 bp, synthetic construct
  source 1..50: mol_type = other DNA
attacttaaatcrcatttttcttaatcratccccactacctttccaattc

SEQ ID NO: 16231 - DNA, 50 bp, synthetic construct
  source 1..50: mol_type = other DNA
aaaaaacaataactcacaacaactcccraactaaaaaaacaataaaaacc

SEQ ID NO: 16232 - DNA, 50 bp, synthetic construct
  source 1..50: mol_type = other DNA
acaaactcccaaatccaatccttaacttataacacacataatttaacaac

SEQ ID NO: 16233 - DNA, 50 bp, synthetic construct
  source 1..50: mol_type = other DNA
acracccaaaaattaacactaacataaaaattcataacacaaaccaaaac

SEQ ID NO: 16234 - DNA, 50 bp, synthetic construct
  source 1..50: mol_type = other DNA
aattcataacacaaaccaaaacraccacaatccctacacaaacaatcaac

SEQ ID NO: 16235 - DNA, 50 bp, synthetic construct
  source 1..50: mol_type = other DNA
taatatataaacacacctttcctacaaaacactaatcacaaaaaaaaaac

SEQ ID NO: 16236 - DNA, 50 bp, synthetic construct
  source 1..50: mol_type = other DNA
rcccttctccrccttcttctccttttacttaaaataaatcttaacrtaac

SEQ ID NO: 16237 - DNA, 50 bp, synthetic construct
  source 1..50: mol_type = other DNA
tatcctcactcactatcaaaatttcatctcaaaccacctaataacaaaac

SEQ ID NO: 16238 - DNA, 50 bp, synthetic construct
  source 1..50: mol_type = other DNA
ctttattttcaaacccaaaataccctataataaccrccraaaatataacc

SEQ ID NO: 16239 - DNA, 50 bp, synthetic construct
  source 1..50: mol_type = other DNA
ataaatctaacrctttattttcaaacccaaaataccctataataaccrcc

SEQ ID NO: 16240 - DNA, 50 bp, synthetic construct
  source 1..50: mol_type = other DNA
caaataaatctaacrctttattttcaaacccaaaataccctataataacc

SEQ ID NO: 16241 - DNA, 50 bp, synthetic construct
  source 1..50: mol_type = other DNA
cccctaaacttctactccaataaaacaaaaattactcaaataaatctaac

SEQ ID NO: 16242 - DNA, 50 bp, synthetic construct
  source 1..50: mol_type = other DNA
aaactaattctattaaaaactttaaccctacctatatcaaattatatcac

SEQ ID NO: 16243 - DNA, 50 bp, synthetic construct
  source 1..50: mol_type = other DNA
ctattaaaaactttaaccctacctatatcaaattatatcacraaacatac

SEQ ID NO: 16244 - DNA, 50 bp, synthetic construct
  source 1..50: mol_type = other DNA
aacrtctactaccaccaaaaaaaccccaaaaataacaacaaaaactcaac

SEQ ID NO: 16245 - DNA, 50 bp, synthetic construct
  source 1..50: mol_type = other DNA
ataaaacaaaataaacacaaatcatatacttcttcaactaattaataacc

SEQ ID NO: 16246 - DNA, 50 bp, synthetic construct
  source 1..50: mol_type = other DNA
tcttcaactaattaataaccrtatatattacaaaacaatacacaataacc

SEQ ID NO: 16247 - DNA, 50 bp, synthetic construct
  source 1..50: mol_type = other DNA
ataaccrtatatattacaaaacaatacacaataaccraactaataaaaac

SEQ ID NO: 16248 - DNA, 50 bp, synthetic construct
  source 1..50: mol_type = other DNA
taaacaactacttctctattctctatcctacacttaacctctaaaaactc

SEQ ID NO: 16249 - DNA, 50 bp, synthetic construct
  source 1..50: mol_type = other DNA
acttcctaaataaatcattctccccrcaaacccataaaataaatacaatc

SEQ ID NO: 16250 - DNA, 50 bp, synthetic construct
  source 1..50: mol_type = other DNA
tcccaaaataaaaaactcactatctacttcctaaataaatcattctcccc

SEQ ID NO: 16251 - DNA, 50 bp, synthetic construct
  source 1..50: mol_type = other DNA
atactaacctaacttacccacaacctctcaaaaaaattctctaaacaacc

SEQ ID NO: 16252 - DNA, 50 bp, synthetic construct
  source 1..50: mol_type = other DNA
aaaaaattctctaaacaaccraattcctacatccaactctaataactatc

SEQ ID NO: 16253 - DNA, 50 bp, synthetic construct
  source 1..50: mol_type = other DNA
caactctaataactatcraacaaaaatcaataaatccctaaaaaataacc

SEQ ID NO: 16254 - DNA, 50 bp, synthetic construct
  source 1..50: mol_type = other DNA
tctaataactatcraacaaaaatcaataaatccctaaaaaataaccracc

SEQ ID NO: 16255 - DNA, 50 bp, synthetic construct
  source 1..50: mol_type = other DNA
aactatcraacaaaaatcaataaatccctaaaaaataaccraccrtaatc

SEQ ID NO: 16256 - DNA, 50 bp, synthetic construct
  source 1..50: mol_type = other DNA
atattattcaaactcaaacctctccaaaactataactacctcccctccac

SEQ ID NO: 16257 - DNA, 50 bp, synthetic construct
  source 1..50: mol_type = other DNA
cctaaaaaaacctaaacctaaacaacataacttcccccaacrtaaaactc

SEQ ID NO: 16258 - DNA, 50 bp, synthetic construct
  source 1..50: mol_type = other DNA
aacraaaaaacctaaaaaaccccctacrtaaaccaacttactattccatc

SEQ ID NO: 16259 - DNA, 50 bp, synthetic construct
  source 1..50: mol_type = other DNA
ccttaaataccaaaaaaaccaaacaatataaaaaaactctctataaacrc

SEQ ID NO: 16260 - DNA, 50 bp, synthetic construct
  source 1..50: mol_type = other DNA
crccttaaataccaaaaaaaccaaacaatataaaaaaactctctataaac

SEQ ID NO: 16261 - DNA, 50 bp, synthetic construct
  source 1..50: mol_type = other DNA
aaaaatcccctaccccaaaccctatactttccacaaatacaaaaataacc

SEQ ID NO: 16262 - DNA, 50 bp, synthetic construct
  source 1..50: mol_type = other DNA
aacattccataaaaccaaattacataactaacttaccctttccatcaccc

SEQ ID NO: 16263 - DNA, 50 bp, synthetic construct
  source 1..50: mol_type = other DNA
atctaaacaaaccctaatcctactaatatcttaaaataaatattctattc

SEQ ID NO: 16264 - DNA, 50 bp, synthetic construct
  source 1..50: mol_type = other DNA
aaaaataattaattataccttctaaacaccctttaacactctcaaaaaac

SEQ ID NO: 16265 - DNA, 50 bp, synthetic construct
  source 1..50: mol_type = other DNA
attataccttctaaacaccctttaacactctcaaaaaacrtttctcacac

SEQ ID NO: 16266 - DNA, 50 bp, synthetic construct
  source 1..50: mol_type = other DNA
attaactaacccacrccttattttacaaacttatctaaaaaaaccaaacc

SEQ ID NO: 16267 - DNA, 50 bp, synthetic construct
  source 1..50: mol_type = other DNA
atcaattataatcccaaaacctaaaaaacttcactaattaactaacccac

SEQ ID NO: 16268 - DNA, 50 bp, synthetic construct
  source 1..50: mol_type = other DNA
rtcctcaaactaacaaccctaaatacacctccctaaaaataaactcatcc

SEQ ID NO: 16269 - DNA, 50 bp, synthetic construct
  source 1..50: mol_type = other DNA
raataaacccaccttcaaaaaaatatacccaaaactattaatttaaaaac

SEQ ID NO: 16270 - DNA, 50 bp, synthetic construct
  source 1..50: mol_type = other DNA
tttccaaaaaaatctatccctttaaacaccaaacaaataaatctaaaaac

SEQ ID NO: 16271 - DNA, 50 bp, synthetic construct
  source 1..50: mol_type = other DNA
actatatatatttacaaacrcctaaactcttccccaatttaacctttccc

SEQ ID NO: 16272 - DNA, 50 bp, synthetic construct
  source 1..50: mol_type = other DNA
aaaaaaaacactacrtatcaaaaacrtaccrtaaatcaaaaacactaccc

SEQ ID NO: 16273 - DNA, 50 bp, synthetic construct
  source 1..50: mol_type = other DNA
aaaaaaatatccccacctctaatctaactccctaaatctaatcatcaacc

SEQ ID NO: 16274 - DNA, 50 bp, synthetic construct
  source 1..50: mol_type = other DNA
ttaaaaacacaccctaaatttaccccttccaccctcatatatatatacac

SEQ ID NO: 16275 - DNA, 50 bp, synthetic construct
  source 1..50: mol_type = other DNA
aaaaccacattactataaatcaaactaacrcaaaccaacrtttaacaaac

SEQ ID NO: 16276 - DNA, 50 bp, synthetic construct
  source 1..50: mol_type = other DNA
aatcttccttaaaaaccacattactataaatcaaactaacrcaaaccaac

SEQ ID NO: 16277 - DNA, 50 bp, synthetic construct
  source 1..50: mol_type = other DNA
ataccatataaatcttccttaaaaaccacattactataaatcaaactaac

SEQ ID NO: 16278 - DNA, 50 bp, synthetic construct
  source 1..50: mol_type = other DNA
aaaaacaaatatctaaatctatttcttaacccttattatattacataaac

SEQ ID NO: 16279 - DNA, 50 bp, synthetic construct
  source 1..50: mol_type = other DNA
actttaataaatactatactcatttcctatctacacrtttccttttcccc

SEQ ID NO: 16280 - DNA, 50 bp, synthetic construct
  source 1..50: mol_type = other DNA
aaaaccaactaaatattcaataactaaaaacacctatatctttctaaatc

SEQ ID NO: 16281 - DNA, 50 bp, synthetic construct
  source 1..50: mol_type = other DNA
atctcactccaaaaaccacaatttaaaaaatacataaccctctctccaac

SEQ ID NO: 16282 - DNA, 50 bp, synthetic construct
  source 1..50: mol_type = other DNA
caaaaaccacaatttaaaaaatacataaccctctctccaacrtcaaatac

SEQ ID NO: 16283 - DNA, 50 bp, synthetic construct
  source 1..50: mol_type = other DNA
aatacrtccaccactaattacattcattcaatacacaaacaattcctaac

SEQ ID NO: 16284 - DNA, 50 bp, synthetic construct
  source 1..50: mol_type = other DNA
ccatccaccaattaaaatatctataccacttactttatctcccttacctc

SEQ ID NO: 16285 - DNA, 50 bp, synthetic construct
  source 1..50: mol_type = other DNA
ttaattatcaaaaattaactaaattaatctttccatattattattcacac

SEQ ID NO: 16286 - DNA, 50 bp, synthetic construct
  source 1..50: mol_type = other DNA
aactttttctaaacctattctatacttaactactacctattatctaaaac

SEQ ID NO: 16287 - DNA, 50 bp, synthetic construct
  source 1..50: mol_type = other DNA
aaattcraattcttaaattatcataaatactaccccraaaatatattcac

SEQ ID NO: 16288 - DNA, 50 bp, synthetic construct
  source 1..50: mol_type = other DNA
atcaaaattcrtataaattcraattcttaaattatcataaatactacccc

SEQ ID NO: 16289 - DNA, 50 bp, synthetic construct
  source 1..50: mol_type = other DNA
aacttcrtaaacatattttcraaataacattcataataactcaaaaactc

SEQ ID NO: 16290 - DNA, 50 bp, synthetic construct
  source 1..50: mol_type = other DNA
ctaaaaccaaaaaaacataaaattataaccaacaaaccacactctaattc

SEQ ID NO: 16291 - DNA, 50 bp, synthetic construct
  source 1..50: mol_type = other DNA
aaaaaaacataaaattataaccaacaaaccacactctaattcraattttc

SEQ ID NO: 16292 - DNA, 50 bp, synthetic construct
  source 1..50: mol_type = other DNA
cacactctaattcraattttcraaacatatttactctacactaaataatc

SEQ ID NO: 16293 - DNA, 50 bp, synthetic construct
  source 1..50: mol_type = other DNA
ataacctaaaacctaataattaactaatctaaacttcaatctcttcaccc

SEQ ID NO: 16294 - DNA, 50 bp, synthetic construct
  source 1..50: mol_type = other DNA
aatttcaccatattaatcaaaataatcttaatcttctaacctcrtaatcc

SEQ ID NO: 16295 - DNA, 50 bp, synthetic construct
  source 1..50: mol_type = other DNA
tcaccatattaatcaaaataatcttaatcttctaacctcrtaatccrccc

SEQ ID NO: 16296 - DNA, 50 bp, synthetic construct
  source 1..50: mol_type = other DNA
ctatacaccctctattatatcactcrtatatctaccattatttacaaatc

SEQ ID NO: 16297 - DNA, 50 bp, synthetic construct
  source 1..50: mol_type = other DNA
tttcaaaaataaataacacaaaatctcaaataaaataacccattttcccc

SEQ ID NO: 16298 - DNA, 50 bp, synthetic construct
  source 1..50: mol_type = other DNA
caataaaaaaaccaaacrtaataacaaatcctaccccaaacaccaaactc

SEQ ID NO: 16299 - DNA, 50 bp, synthetic construct
  source 1..50: mol_type = other DNA
ataacaaatcctaccccaaacaccaaactcrcttaaatcctacctaaaac

SEQ ID NO: 16300 - DNA, 50 bp, synthetic construct
  source 1..50: mol_type = other DNA
ccctccctacaacctaactaacttttcttcttcttctaataaaatcatcc

SEQ ID NO: 16301 - DNA, 50 bp, synthetic construct
  source 1..50: mol_type = other DNA
aacaataaaactcataaaactcatcataaaatttccaaaacactctacrc

SEQ ID NO: 16302 - DNA, 50 bp, synthetic construct
  source 1..50: mol_type = other DNA
aaaacaataaaactcataaaactcatcataaaatttccaaaacactctac

SEQ ID NO: 16303 - DNA, 50 bp, synthetic construct
  source 1..50: mol_type = other DNA
atatcctaaaaatcttataataaaccttataaatctcactaccttttccc

SEQ ID NO: 16304 - DNA, 50 bp, synthetic construct
  source 1..50: mol_type = other DNA
ctaccttttcccrctcactctacraaaaatttaatattcaaaaacaacac

SEQ ID NO: 16305 - DNA, 50 bp, synthetic construct
  source 1..50: mol_type = other DNA
aaacaactaaatttaaacaaaaatcrtaacatttcattatattctcttac

SEQ ID NO: 16306 - DNA, 50 bp, synthetic construct
  source 1..50: mol_type = other DNA
ctcctaaaataaacataatactaatattacatatataaaccactacrccc

SEQ ID NO: 16307 - DNA, 50 bp, synthetic construct
  source 1..50: mol_type = other DNA
tacrcccraccctaaacttaacttttttctttaacaaaatttaaaatccc

SEQ ID NO: 16308 - DNA, 50 bp, synthetic construct
  source 1..50: mol_type = other DNA
aaataatcaccttaatcttaaataaataacacatataatcrataaccatc

SEQ ID NO: 16309 - DNA, 50 bp, synthetic construct
  source 1..50: mol_type = other DNA
atattattttccttccacaaaaaacatccacaactttcacrataattacc

SEQ ID NO: 16310 - DNA, 50 bp, synthetic construct
  source 1..50: mol_type = other DNA
accattcatctaaaaccaaaataaccacctaatcccaaaacctacacctc

SEQ ID NO: 16311 - DNA, 50 bp, synthetic construct
  source 1..50: mol_type = other DNA
aaaccctcccatattataaaaactaactaaaaacctaaaaaaaaccaaac

SEQ ID NO: 16312 - DNA, 50 bp, synthetic construct
  source 1..50: mol_type = other DNA
aatacttcaaaaacacttacactaatacaataaaccaaatctcctccctc

SEQ ID NO: 16313 - DNA, 50 bp, synthetic construct
  source 1..50: mol_type = other DNA
attacctcataaactcactaaaccrcttctaattaaccaacttcctaacc

SEQ ID NO: 16314 - DNA, 50 bp, synthetic construct
  source 1..50: mol_type = other DNA
taaatttataaaacaatacttaatcctaaacatacaatccaaccaacrcc

SEQ ID NO: 16315 - DNA, 50 bp, synthetic construct
  source 1..50: mol_type = other DNA
aatacccaactcactcataaattacaataaccratacaactaaaaaaaac

SEQ ID NO: 16316 - DNA, 50 bp, synthetic construct
  source 1..50: mol_type = other DNA
caccaaaataataatatataaccraaaaaaacrctcctcccaactatacc

SEQ ID NO: 16317 - DNA, 50 bp, synthetic construct
  source 1..50: mol_type = other DNA
accaaaactattcaacaataaaccaataaccaaaaaattaattaccctcc

SEQ ID NO: 16318 - DNA, 50 bp, synthetic construct
  source 1..50: mol_type = other DNA
aactctattaactaaaatataacacttaaaacaattttctcccattatac

SEQ ID NO: 16319 - DNA, 50 bp, synthetic construct
  source 1..50: mol_type = other DNA
aaaaaaaattactttaaatattacaccttaaccaacaaaacccaaactcc

SEQ ID NO: 16320 - DNA, 50 bp, synthetic construct
  source 1..50: mol_type = other DNA
ttactttaaatattacaccttaaccaacaaaacccaaactccrtatttcc

SEQ ID NO: 16321 - DNA, 50 bp, synthetic construct
  source 1..50: mol_type = other DNA
cracaaccactaacaaaaaaccaatatatcaccaaccctcaacaaaaacc

SEQ ID NO: 16322 - DNA, 50 bp, synthetic construct
  source 1..50: mol_type = other DNA
cratttctactaaaaactaataacacactaacctcttatcaataactacc

SEQ ID NO: 16323 - DNA, 50 bp, synthetic construct
  source 1..50: mol_type = other DNA
acaaaaccaaaaacaaaataaaacctacaacacaactcaatccaaaaaac

SEQ ID NO: 16324 - DNA, 50 bp, synthetic construct
  source 1..50: mol_type = other DNA
aactatttaatcctcaaaacctctaacccctaatcctaataacttttacc

SEQ ID NO: 16325 - DNA, 50 bp, synthetic construct
  source 1..50: mol_type = other DNA
caaaaaccaaaaactctaaaaaccaaacaatcatcccatctaatacatcc

SEQ ID NO: 16326 - DNA, 50 bp, synthetic construct
  source 1..50: mol_type = other DNA
tctctaaaaactaaccctaataacttcatctaaataaaatcraaatccac

SEQ ID NO: 16327 - DNA, 50 bp, synthetic construct
  source 1..50: mol_type = other DNA
aactaaaccttcttcaacctaaaaatcttacttaatccaattcttaaccc

SEQ ID NO: 16328 - DNA, 50 bp, synthetic construct
  source 1..50: mol_type = other DNA
aaatcttacttaatccaattcttaacccrcaaaaaatattcaaaacatac

SEQ ID NO: 16329 - DNA, 50 bp, synthetic construct
  source 1..50: mol_type = other DNA
aaaaaatataaccatctactacraaaaaactaacccrcaactcttaaaac

SEQ ID NO: 16330 - DNA, 50 bp, synthetic construct
  source 1..50: mol_type = other DNA
aataaaaccrtacaatacttactattaaccttctatccaaacaaactccc

SEQ ID NO: 16331 - DNA, 50 bp, synthetic construct
  source 1..50: mol_type = other DNA
aatacttccraaaacctatttaaacaaaaaattaacaacaaacactacac

SEQ ID NO: 16332 - DNA, 50 bp, synthetic construct
  source 1..50: mol_type = other DNA
atttaaacaaaaaattaacaacaaacactacacraccctaccctcaaatc

SEQ ID NO: 16333 - DNA, 50 bp, synthetic construct
  source 1..50: mol_type = other DNA
taacatacaactaatattacrcaaaaaaatctatatcaatattcacracc

SEQ ID NO: 16334 - DNA, 50 bp, synthetic construct
  source 1..50: mol_type = other DNA
crcaactataattaaaatcrtttcttccactaaaaactaacctaacracc

SEQ ID NO: 16335 - DNA, 50 bp, synthetic construct
  source 1..50: mol_type = other DNA
ccactaaaaactaacctaacraccrtaaacattaacacaaattctcttac

SEQ ID NO: 16336 - DNA, 50 bp, synthetic construct
  source 1..50: mol_type = other DNA
acrtaacaccaattacatatcaacaaaataactaaactaaaccrtcacrc

SEQ ID NO: 16337 - DNA, 50 bp, synthetic construct
  source 1..50: mol_type = other DNA
tttcctctctatcttctctccaaataaaaacaaaaacctcctaaaactcc

SEQ ID NO: 16338 - DNA, 50 bp, synthetic construct
  source 1..50: mol_type = other DNA
tataaccaaaacrcttaacctattcaataattacccctccttaatcactc

SEQ ID NO: 16339 - DNA, 50 bp, synthetic construct
  source 1..50: mol_type = other DNA
ttcattctcatccaatattaccacaacaaaaacctatatataaccaaaac

SEQ ID NO: 16340 - DNA, 50 bp, synthetic construct
  source 1..50: mol_type = other DNA
caacattttaaactacaatttccctcttcaatacratcccrtatattttc

SEQ ID NO: 16341 - DNA, 50 bp, synthetic construct
  source 1..50: mol_type = other DNA
crcttactaacaacattttaaactacaatttccctcttcaatacratccc

SEQ ID NO: 16342 - DNA, 50 bp, synthetic construct
  source 1..50: mol_type = other DNA
aaaaaaatactaccataaaaattaaaacccctaccaaaaaacctatcatc

SEQ ID NO: 16343 - DNA, 50 bp, synthetic construct
  source 1..50: mol_type = other DNA
tccaaacttaatattcttatcctcrctactacaaaaaacatattctctcc

SEQ ID NO: 16344 - DNA, 50 bp, synthetic construct
  source 1..50: mol_type = other DNA
taaacaaaaaacccrataactactcttccaaacttaatattcttatcctc

SEQ ID NO: 16345 - DNA, 50 bp, synthetic construct
  source 1..50: mol_type = other DNA
attttcccaacattacraataaaaacratatactactaaacaaaaaaccc

SEQ ID NO: 16346 - DNA, 50 bp, synthetic construct
  source 1..50: mol_type = other DNA
tctcactaaacraaaaaacacaatattttcccaacattacraataaaaac

SEQ ID NO: 16347 - DNA, 50 bp, synthetic construct
  source 1..50: mol_type = other DNA
tacttaaaaatctcactaaacraaaaaacacaatattttcccaacattac

SEQ ID NO: 16348 - DNA, 50 bp, synthetic construct
  source 1..50: mol_type = other DNA
aacaacacatcrttttcatccrtaatactaaaaaaacactatacctctcc

SEQ ID NO: 16349 - DNA, 50 bp, synthetic construct
  source 1..50: mol_type = other DNA
actaacattattattaaaaaaacttctatttttccaaaaccttaaaaaac

SEQ ID NO: 16350 - DNA, 50 bp, synthetic construct
  source 1..50: mol_type = other DNA
ttacaattcttcttaacraaaaaacctacaattccctccaaactacctac

SEQ ID NO: 16351 - DNA, 50 bp, synthetic construct
  source 1..50: mol_type = other DNA
ttaaaaaaaaccttaacrcaaacaatctaaaaaaaactataaatttcccc

SEQ ID NO: 16352 - DNA, 50 bp, synthetic construct
  source 1..50: mol_type = other DNA
caaaaaacaatacccccctaaccaaatctaaacractcatccaaattccc

SEQ ID NO: 16353 - DNA, 50 bp, synthetic construct
  source 1..50: mol_type = other DNA
ctcaaacttaaccaaaaaaacactaccctctactaaaaactaaacrcaac

SEQ ID NO: 16354 - DNA, 50 bp, synthetic construct
  source 1..50: mol_type = other DNA
atctcaaactaaaacactatatacttaccaaataaaaaactcttctcacc

SEQ ID NO: 16355 - DNA, 50 bp, synthetic construct
  source 1..50: mol_type = other DNA
atatcctaacctaaaacacaaaaacaataaattcaaaaatctatatatcc

SEQ ID NO: 16356 - DNA, 50 bp, synthetic construct
  source 1..50: mol_type = other DNA
aacctaaaacacaaaaacaataaattcaaaaatctatatatccrccaccc

SEQ ID NO: 16357 - DNA, 50 bp, synthetic construct
  source 1..50: mol_type = other DNA
aaaaactacacaataaataacataattctactttcratacaaataactac

SEQ ID NO: 16358 - DNA, 50 bp, synthetic construct
  source 1..50: mol_type = other DNA
taaaaccrtacaatttacaacaaactaaatacttacaatatttaaccctc

SEQ ID NO: 16359 - DNA, 50 bp, synthetic construct
  source 1..50: mol_type = other DNA
tatttataaaaacraaaccttactatatttctcaaaccratctctaactc

SEQ ID NO: 16360 - DNA, 50 bp, synthetic construct
  source 1..50: mol_type = other DNA
tacttaaacccacraattaaaaaccracctaaaaaacataataaaacctc

SEQ ID NO: 16361 - DNA, 50 bp, synthetic construct
  source 1..50: mol_type = other DNA
tacaataatacaatataactcataacaacctcaaactcctaaactcaaac

SEQ ID NO: 16362 - DNA, 50 bp, synthetic construct
  source 1..50: mol_type = other DNA
taatattattattatcttaaccaccaaaaccaaataataataccaaaatc

SEQ ID NO: 16363 - DNA, 50 bp, synthetic construct
  source 1..50: mol_type = other DNA
actttttattctattaactaatatatataacccccaatcacrtttcccac

SEQ ID NO: 16364 - DNA, 50 bp, synthetic construct
  source 1..50: mol_type = other DNA
aataaaacaaattcccataaaaacccrcaaaaccracctaccctaaaatc

SEQ ID NO: 16365 - DNA, 50 bp, synthetic construct
  source 1..50: mol_type = other DNA
aaaaataactcacrtcaaccatctcattttacaaataaaaaaactaaatc

SEQ ID NO: 16366 - DNA, 50 bp, synthetic construct
  source 1..50: mol_type = other DNA
accctcaaacttaatataataatatactaaattcctaaaactaccatcac

SEQ ID NO: 16367 - DNA, 50 bp, synthetic construct
  source 1..50: mol_type = other DNA
acatcaaacactaacaaataacattaactctcaacaaacaaaacattatc

SEQ ID NO: 16368 - DNA, 50 bp, synthetic construct
  source 1..50: mol_type = other DNA
raacaaataaaacrtctactacaaacctaatctcrcaaaaaaaacccaac

SEQ ID NO: 16369 - DNA, 50 bp, synthetic construct
  source 1..50: mol_type = other DNA
taaaacttaaactttcaaacttcctccctcacaccrcraacaaataaaac

SEQ ID NO: 16370 - DNA, 50 bp, synthetic construct
  source 1..50: mol_type = other DNA
aaactttaacctccataaaacttaaactttcaaacttcctccctcacacc

SEQ ID NO: 16371 - DNA, 50 bp, synthetic construct
  source 1..50: mol_type = other DNA
aatccaaacctcataaaaattaaaatctaatataaaccaaatccaaattc

SEQ ID NO: 16372 - DNA, 50 bp, synthetic construct
  source 1..50: mol_type = other DNA
attcrataaaaaaccttaaactcctcctttaaacctcttaaccccttaac

SEQ ID NO: 16373 - DNA, 50 bp, synthetic construct
  source 1..50: mol_type = other DNA
aaacccaactctaaaatttaaaattacctcttcrtatatatataattcac

SEQ ID NO: 16374 - DNA, 50 bp, synthetic construct
  source 1..50: mol_type = other DNA
aaacaaataaaccaaaaaccrcraaaccaaactaaaaaatattacctcac

SEQ ID NO: 16375 - DNA, 50 bp, synthetic construct
  source 1..50: mol_type = other DNA
aacaaataactcaaacctaactaaaaaacatctccaacacttctctcccc

SEQ ID NO: 16376 - DNA, 50 bp, synthetic construct
  source 1..50: mol_type = other DNA
aatccacaaccacaatttataacaacttaaaaaaatcaaaacttcaaaac

SEQ ID NO: 16377 - DNA, 50 bp, synthetic construct
  source 1..50: mol_type = other DNA
ttataacaacttaaaaaaatcaaaacttcaaaacraaaacataaaactac

SEQ ID NO: 16378 - DNA, 50 bp, synthetic construct
  source 1..50: mol_type = other DNA
aaacttattaaatccacaaacttttattctttatatactcccrttctaac

SEQ ID NO: 16379 - DNA, 50 bp, synthetic construct
  source 1..50: mol_type = other DNA
tttctaaaaaacttattaaatccacaaacttttattctttatatactccc

SEQ ID NO: 16380 - DNA, 50 bp, synthetic construct
  source 1..50: mol_type = other DNA
caaaacaaaaatatatctctaaacctaaataactcrccctctactacctc

SEQ ID NO: 16381 - DNA, 50 bp, synthetic construct
  source 1..50: mol_type = other DNA
ttttaacaataacaacaaaacaaaaatatatctctaaacctaaataactc

SEQ ID NO: 16382 - DNA, 50 bp, synthetic construct
  source 1..50: mol_type = other DNA
caaattcaaaaacacatttctattttactaccactaccaaaaactaaccc

SEQ ID NO: 16383 - DNA, 50 bp, synthetic construct
  source 1..50: mol_type = other DNA
catacacacrtattcattaccttacaattactcaattaaaatataacatc

SEQ ID NO: 16384 - DNA, 50 bp, synthetic construct
  source 1..50: mol_type = other DNA
ttctaaaaatatataaaacctcaaaacttaatcacttacttcatacacac

SEQ ID NO: 16385 - DNA, 50 bp, synthetic construct
  source 1..50: mol_type = other DNA
aacttatttccttaactcaaaccctcaaattcaacttcaaatctaaccac

SEQ ID NO: 16386 - DNA, 50 bp, synthetic construct
  source 1..50: mol_type = other DNA
ttcatcactaatactttcraaatatataaaacraactatccttctccctc

SEQ ID NO: 16387 - DNA, 50 bp, synthetic construct
  source 1..50: mol_type = other DNA
tatcctaaaaaacctcaacrtcttcttatacctacctctttcaaaacctc

SEQ ID NO: 16388 - DNA, 50 bp, synthetic construct
  source 1..50: mol_type = other DNA
tcaaaacctcrtaaaatttacacctaattaacaacrtttacattaaaatc

SEQ ID NO: 16389 - DNA, 50 bp, synthetic construct
  source 1..50: mol_type = other DNA
rtaaaatttacacctaattaacaacrtttacattaaaatcrccaaacacc

SEQ ID NO: 16390 - DNA, 50 bp, synthetic construct
  source 1..50: mol_type = other DNA
aaatttacacctaattaacaacrtttacattaaaatcrccaaacaccrac

SEQ ID NO: 16391 - DNA, 50 bp, synthetic construct
  source 1..50: mol_type = other DNA
taccctaaatacccaattaataaacracaaatctatcaaattctaactcc

SEQ ID NO: 16392 - DNA, 50 bp, synthetic construct
  source 1..50: mol_type = other DNA
craaactcaaacttataaaataatttaccctaaatacccaattaataaac

SEQ ID NO: 16393 - DNA, 50 bp, synthetic construct
  source 1..50: mol_type = other DNA
aaatacccaaaacaaattacttcacaaatctaaatctcratttcctcacc

SEQ ID NO: 16394 - DNA, 50 bp, synthetic construct
  source 1..50: mol_type = other DNA
rtaaaccraactaatacccataaattacracrtaaatcaaataaaataac

SEQ ID NO: 16395 - DNA, 50 bp, synthetic construct
  source 1..50: mol_type = other DNA
aaaaaaatcrctaaacccaaaaaatcraaactacaataaactataactac

SEQ ID NO: 16396 - DNA, 50 bp, synthetic construct
  source 1..50: mol_type = other DNA
aaaaattaaatatccccaaataaactttatttataaactttcaaaatatc

SEQ ID NO: 16397 - DNA, 50 bp, synthetic construct
  source 1..50: mol_type = other DNA
aaaactaaatcataaaataaataattcaattcaatactctcattaaacac

SEQ ID NO: 16398 - DNA, 50 bp, synthetic construct
  source 1..50: mol_type = other DNA
acatatactactcaaatttatatcccatatacataaactcccraaaaaac

SEQ ID NO: 16399 - DNA, 50 bp, synthetic construct
  source 1..50: mol_type = other DNA
atctctctttataaaaatatatatcatactaaattaaatctcacccatac

SEQ ID NO: 16400 - DNA, 50 bp, synthetic construct
  source 1..50: mol_type = other DNA
ataaaatataattcaacaccaacrtaataccaaaattaatttcttctacc

SEQ ID NO: 16401 - DNA, 50 bp, synthetic construct
  source 1..50: mol_type = other DNA
acaacatcaactcatattctcacaattataaaatataattcaacaccaac

SEQ ID NO: 16402 - DNA, 50 bp, synthetic construct
  source 1..50: mol_type = other DNA
aaataaatcacrtcccatcctaaaaattaatttcactcttccatacaccc

SEQ ID NO: 16403 - DNA, 50 bp, synthetic construct
  source 1..50: mol_type = other DNA
cttaaaataaaacrctaccctcattaaccaccaaactcccctaaataaac

SEQ ID NO: 16404 - DNA, 50 bp, synthetic construct
  source 1..50: mol_type = other DNA
cracacatcraccttataactaaaaacaacaaataaactctaccctactc

SEQ ID NO: 16405 - DNA, 50 bp, synthetic construct
  source 1..50: mol_type = other DNA
aacttcaacraataaaacaaaatccacctactaccttcaactacaaaatc

SEQ ID NO: 16406 - DNA, 50 bp, synthetic construct
  source 1..50: mol_type = other DNA
craataaaacaaaatccacctactaccttcaactacaaaatcratatacc

SEQ ID NO: 16407 - DNA, 50 bp, synthetic construct
  source 1..50: mol_type = other DNA
aattccctacaaatcraccactaaacaacataaaaccctaataaaaacac

SEQ ID NO: 16408 - DNA, 50 bp, synthetic construct
  source 1..50: mol_type = other DNA
acaaaaaatctaaacacaatcttaataacaccaaaaccaaaaataacaac

SEQ ID NO: 16409 - DNA, 50 bp, synthetic construct
  source 1..50: mol_type = other DNA
aacaccaaaaccaaaaataacaacrttcctaaaaaccraaataaatcacc

SEQ ID NO: 16410 - DNA, 50 bp, synthetic construct
  source 1..50: mol_type = other DNA
taaaataatccaacctaactaataaacaaccccraccttctaacaactac

SEQ ID NO: 16411 - DNA, 50 bp, synthetic construct
  source 1..50: mol_type = other DNA
cacaccaactcttaccacttctcaaaaacatcrtctcaaaatttctctcc

SEQ ID NO: 16412 - DNA, 50 bp, synthetic construct
  source 1..50: mol_type = other DNA
caacccattaacaactaacacaccaactcttaccacttctcaaaaacatc

SEQ ID NO: 16413 - DNA, 50 bp, synthetic construct
  source 1..50: mol_type = other DNA
taatttataaaatcaaccctataacctatataaacaaaaacacatcctcc

SEQ ID NO: 16414 - DNA, 50 bp, synthetic construct
  source 1..50: mol_type = other DNA
tctaaacaaaccctaaaatctaaaataaatcraaataaatatcatcttcc

SEQ ID NO: 16415 - DNA, 50 bp, synthetic construct
  source 1..50: mol_type = other DNA
atattccttccactccctaaaacaaacatcaccacaaaataattaaatac

SEQ ID NO: 16416 - DNA, 50 bp, synthetic construct
  source 1..50: mol_type = other DNA
aaaaacaacacataacaaaacactaaacaacaatatcctcccccaacccc

SEQ ID NO: 16417 - DNA, 50 bp, synthetic construct
  source 1..50: mol_type = other DNA
tatattatttcctttattccctctaaaaaattcaaatctataatacaccc

SEQ ID NO: 16418 - DNA, 50 bp, synthetic construct
  source 1..50: mol_type = other DNA
attctattaataacaacttaaccaattactaatcaaaacatatttaaatc

SEQ ID NO: 16419 - DNA, 50 bp, synthetic construct
  source 1..50: mol_type = other DNA
ctactaacracctaaaaaaccaaaacctaaaaatatcatttacatactac

SEQ ID NO: 16420 - DNA, 50 bp, synthetic construct
  source 1..50: mol_type = other DNA
rctcacacaatatacacacacaaacaattttatacctccaacatattcac

SEQ ID NO: 16421 - DNA, 50 bp, synthetic construct
  source 1..50: mol_type = other DNA
aaaatataaaactacctatatatacacactatataaacraaaccaaaacc

SEQ ID NO: 16422 - DNA, 50 bp, synthetic construct
  source 1..50: mol_type = other DNA
aaaataactattccttataacacaaaaaaaatttaaccaaaaaactactc

SEQ ID NO: 16423 - DNA, 50 bp, synthetic construct
  source 1..50: mol_type = other DNA
ttacaaacacraaaaacaaataccaaaaacaacractccttaactaaccc

SEQ ID NO: 16424 - DNA, 50 bp, synthetic construct
  source 1..50: mol_type = other DNA
ctcccaattaattacaaacaatatattaaaaaaaacatactaaaactacc

SEQ ID NO: 16425 - DNA, 50 bp, synthetic construct
  source 1..50: mol_type = other DNA
caaacaatatattaaaaaaaacatactaaaactaccraacaaaattttcc

SEQ ID NO: 16426 - DNA, 50 bp, synthetic construct
  source 1..50: mol_type = other DNA
aaaaataaaaacccraaaaccrttctcaatcctaactacrtctacataac

SEQ ID NO: 16427 - DNA, 50 bp, synthetic construct
  source 1..50: mol_type = other DNA
atcatcttacaaccaaacaataaacataaaactactattcaaaaaaacrc

SEQ ID NO: 16428 - DNA, 50 bp, synthetic construct
  source 1..50: mol_type = other DNA
ctcaaaacatatcctaacracacctacaaattttcttttcctaaaaccac

SEQ ID NO: 16429 - DNA, 50 bp, synthetic construct
  source 1..50: mol_type = other DNA
acaaattttcttttcctaaaaccacraacactaacratactacacctacc

SEQ ID NO: 16430 - DNA, 50 bp, synthetic construct
  source 1..50: mol_type = other DNA
caaaacaaaatataaaacaaaccaaaacctacaccaacrcccaaatatac

SEQ ID NO: 16431 - DNA, 50 bp, synthetic construct
  source 1..50: mol_type = other DNA
acaaaatcrcaacaaaacaaaatataaaacaaaccaaaacctacaccaac

SEQ ID NO: 16432 - DNA, 50 bp, synthetic construct
  source 1..50: mol_type = other DNA
ccttactccacaaaatctactaaaaaataatacaataaaaaaacaaaatc

SEQ ID NO: 16433 - DNA, 50 bp, synthetic construct
  source 1..50: mol_type = other DNA
ccraaacctatcacaaaattaaacaaaactaaactccaacatcaaacctc

SEQ ID NO: 16434 - DNA, 50 bp, synthetic construct
  source 1..50: mol_type = other DNA
aaaaccaaaaacaattttctaaacttactactctatataaaaatttattc

SEQ ID NO: 16435 - DNA, 50 bp, synthetic construct
  source 1..50: mol_type = other DNA
aaaacacacatttttattacaaatataacacaattaaaaaaacacatatc

SEQ ID NO: 16436 - DNA, 50 bp, synthetic construct
  source 1..50: mol_type = other DNA
ataacacaaaatcatctactaaaatatatattcaaaaatccatttacaac

SEQ ID NO: 16437 - DNA, 50 bp, synthetic construct
  source 1..50: mol_type = other DNA
catttaaatcacaaaaacataatccaacccaaccccatcaacaaatatcc

SEQ ID NO: 16438 - DNA, 50 bp, synthetic construct
  source 1..50: mol_type = other DNA
aaaaaaataaaactcraatctatacataaaacatatcattacacaaatcc

SEQ ID NO: 16439 - DNA, 50 bp, synthetic construct
  source 1..50: mol_type = other DNA
aaaaataaaactcraatctatacataaaacatatcattacacaaatccrc

SEQ ID NO: 16440 - DNA, 50 bp, synthetic construct
  source 1..50: mol_type = other DNA
ctatacataaaacatatcattacacaaatccrcrtactaacraataacac

SEQ ID NO: 16441 - DNA, 50 bp, synthetic construct
  source 1..50: mol_type = other DNA
craataacacrtatacccrtataaaatctaaaccrctatcaaaacaaaac

SEQ ID NO: 16442 - DNA, 50 bp, synthetic construct
  source 1..50: mol_type = other DNA
aaatcaaacraaacaaatactctactcaaacacaacraaaaacatataac

SEQ ID NO: 16443 - DNA, 50 bp, synthetic construct
  source 1..50: mol_type = other DNA
cctttccttctaccaaccaaaaaactcatctaaaaaaattaactttaatc

SEQ ID NO: 16444 - DNA, 50 bp, synthetic construct
  source 1..50: mol_type = other DNA
taaatttaaaaactaaatactccctactaaactccctacrtttaaaaacc

SEQ ID NO: 16445 - DNA, 50 bp, synthetic construct
  source 1..50: mol_type = other DNA
atcactaactacacracaccatctaaaataatccctaaatattactttac

SEQ ID NO: 16446 - DNA, 50 bp, synthetic construct
  source 1..50: mol_type = other DNA
ccaaaaacccattcaattatactataaactaactcactccaaacaacrtc

SEQ ID NO: 16447 - DNA, 50 bp, synthetic construct
  source 1..50: mol_type = other DNA
aataatccctaaatattactttacrcaactaactcaaaaattaaaacrac

SEQ ID NO: 16448 - DNA, 50 bp, synthetic construct
  source 1..50: mol_type = other DNA
ttacratacattcrtaactttccaacaacctacctatcatataaattaac

SEQ ID NO: 16449 - DNA, 50 bp, synthetic construct
  source 1..50: mol_type = other DNA
atatttttatatatccraatatattaattatcccaaattcrcccttcttc

SEQ ID NO: 16450 - DNA, 50 bp, synthetic construct
  source 1..50: mol_type = other DNA
caactcaaaatctaaaccttacacttttctaactatatatttaaaaaacc

SEQ ID NO: 16451 - DNA, 50 bp, synthetic construct
  source 1..50: mol_type = other DNA
aaaacatatatacctcaaaaactatttaatacacacaaaacccctaatac

SEQ ID NO: 16452 - DNA, 50 bp, synthetic construct
  source 1..50: mol_type = other DNA
actatttaatacacacaaaacccctaatacrtaccaaacatttcataaac

SEQ ID NO: 16453 - DNA, 50 bp, synthetic construct
  source 1..50: mol_type = other DNA
tctctcctcrataaactataaaccccttaaaaacaaaccctatctatccc

SEQ ID NO: 16454 - DNA, 50 bp, synthetic construct
  source 1..50: mol_type = other DNA
atataactctaaaaatatctatcaattaatacrtatataactctctcctc

SEQ ID NO: 16455 - DNA, 50 bp, synthetic construct
  source 1..50: mol_type = other DNA
tacaactttatatctattatataactctaaaaatatctatcaattaatac

SEQ ID NO: 16456 - DNA, 50 bp, synthetic construct
  source 1..50: mol_type = other DNA
acatccttctcccctcaaatttcttctctccacaatcaatttaaaatttc

SEQ ID NO: 16457 - DNA, 50 bp, synthetic construct
  source 1..50: mol_type = other DNA
taactcatacactcctacccatttatacaaatctcacctatcttccaaac

SEQ ID NO: 16458 - DNA, 50 bp, synthetic construct
  source 1..50: mol_type = other DNA
tacctcaccatcacctatattactccaaatattaaactcctaattaacac

SEQ ID NO: 16459 - DNA, 50 bp, synthetic construct
  source 1..50: mol_type = other DNA
tcctatcaattttacacacccttatattatcaatacaaaaaacattattc

SEQ ID NO: 16460 - DNA, 50 bp, synthetic construct
  source 1..50: mol_type = other DNA
ttccctacaacacccacraaaaaatatacctattttatcatctatccatc

SEQ ID NO: 16461 - DNA, 50 bp, synthetic construct
  source 1..50: mol_type = other DNA
aacctcaaccaaaccctaaaattacatataataattaatattaacctatc

SEQ ID NO: 16462 - DNA, 50 bp, synthetic construct
  source 1..50: mol_type = other DNA
ataaaaaaataaacttcaaattcccttcttccaattcttcttatcaaatc

SEQ ID NO: 16463 - DNA, 50 bp, synthetic construct
  source 1..50: mol_type = other DNA
tcraattccccaaacaaaataaaacatatccaacctttaccaacatcatc

SEQ ID NO: 16464 - DNA, 50 bp, synthetic construct
  source 1..50: mol_type = other DNA
acaaatccaattactatttatatcatactaaatattaatcctcccaccac

SEQ ID NO: 16465 - DNA, 50 bp, synthetic construct
  source 1..50: mol_type = other DNA
aatacttctactaaactaaaaaaccaaaaactaaaatatcacaacaaaac

SEQ ID NO: 16466 - DNA, 50 bp, synthetic construct
  source 1..50: mol_type = other DNA
aaacacrtttataaactttttaatttccatataccatattatccactacc

SEQ ID NO: 16467 - DNA, 50 bp, synthetic construct
  source 1..50: mol_type = other DNA
taaaattatctacttcaaccacctttcttattctcrtattaaaaaaacac

SEQ ID NO: 16468 - DNA, 50 bp, synthetic construct
  source 1..50: mol_type = other DNA
aaacrcccccaaataactttaaaatactttctacttttaacaataattac

SEQ ID NO: 16469 - DNA, 50 bp, synthetic construct
  source 1..50: mol_type = other DNA
acacaaacaaacatataaactatatttacctccttacttttaacacaaac

SEQ ID NO: 16470 - DNA, 50 bp, synthetic construct
  source 1..50: mol_type = other DNA
raaactctaattattataaaaacaacttcctaaacaaacacaaatttcac

SEQ ID NO: 16471 - DNA, 50 bp, synthetic construct
  source 1..50: mol_type = other DNA
ttccaaaacaatatttctcaatctaactaatcatcaaaaccaaattaccc

SEQ ID NO: 16472 - DNA, 50 bp, synthetic construct
  source 1..50: mol_type = other DNA
caaacctcttcttactctaatctttacaaacctatattataaaaacaacc

SEQ ID NO: 16473 - DNA, 50 bp, synthetic construct
  source 1..50: mol_type = other DNA
cccaaccatctacaaaaactactaactctaaaattcraaactcttcccac

SEQ ID NO: 16474 - DNA, 50 bp, synthetic construct
  source 1..50: mol_type = other DNA
aaaccacaaaataacccaaccatctacaaaaactactaactctaaaattc

SEQ ID NO: 16475 - DNA, 50 bp, synthetic construct
  source 1..50: mol_type = other DNA
actaaccacaaaaattcacaatctccatctatcataaactctcctatatc

SEQ ID NO: 16476 - DNA, 50 bp, synthetic construct
  source 1..50: mol_type = other DNA
aaaaaaaataacttcctataataataaacraaaccaaccaaatacaaatc

SEQ ID NO: 16477 - DNA, 50 bp, synthetic construct
  source 1..50: mol_type = other DNA
caaaaaaaaactacactacaacctaaataataataacaacctcacctttc

SEQ ID NO: 16478 - DNA, 50 bp, synthetic construct
  source 1..50: mol_type = other DNA
ataaaaccaaaataaccraataaaaacaactctaatctacaactcccaac

SEQ ID NO: 16479 - DNA, 50 bp, synthetic construct
  source 1..50: mol_type = other DNA
tatataacatataataactcaactctcccacctcttttctcaaaataatc

SEQ ID NO: 16480 - DNA, 50 bp, synthetic construct
  source 1..50: mol_type = other DNA
tcccaaaaaaacttaaattaaataccatataattcaaatttaaaataatc

SEQ ID NO: 16481 - DNA, 50 bp, synthetic construct
  source 1..50: mol_type = other DNA
cttcacrttaatttttatacatctaacctaactcataactcatccttatc

SEQ ID NO: 16482 - DNA, 50 bp, synthetic construct
  source 1..50: mol_type = other DNA
aataattatttttacaaactccaaccttatatatcttcataaatcatttc

SEQ ID NO: 16483 - DNA, 50 bp, synthetic construct
  source 1..50: mol_type = other DNA
actacatacataatcctatctttacaaaacttaaaaaataaaccraacac

SEQ ID NO: 16484 - DNA, 50 bp, synthetic construct
  source 1..50: mol_type = other DNA
taatcctatctttacaaaacttaaaaaataaaccraacacratatctccc

SEQ ID NO: 16485 - DNA, 50 bp, synthetic construct
  source 1..50: mol_type = other DNA
tacaataattaactaaacataataataaatacctataatcctaactactc

SEQ ID NO: 16486 - DNA, 50 bp, synthetic construct
  source 1..50: mol_type = other DNA
tcttttatttcctaaaaaaataacataacaaaccaaacrcrataactcac

SEQ ID NO: 16487 - DNA, 50 bp, synthetic construct
  source 1..50: mol_type = other DNA
atttcttaacataaccaaccatttctcatactcactactctataaaattc

SEQ ID NO: 16488 - DNA, 50 bp, synthetic construct
  source 1..50: mol_type = other DNA
cratcttaaaaactacaactaccractacrtatactaaaaaacraaatcc

SEQ ID NO: 16489 - DNA, 50 bp, synthetic construct
  source 1..50: mol_type = other DNA
acaacaaaaactctaaaaaacttaaaattaacaaaccraaaataaaaccc

SEQ ID NO: 16490 - DNA, 50 bp, synthetic construct
  source 1..50: mol_type = other DNA
ccacctccracctatcaattccaaacccctcaaaatctttattatacatc

SEQ ID NO: 16491 - DNA, 50 bp, synthetic construct
  source 1..50: mol_type = other DNA
ataccctcttcrtcccttactcttactacaataaactttaacaaacttcc

SEQ ID NO: 16492 - DNA, 50 bp, synthetic construct
  source 1..50: mol_type = other DNA
ctataatttaaattctaaatcaaacacttcccractactcraactaactc

SEQ ID NO: 16493 - DNA, 50 bp, synthetic construct
  source 1..50: mol_type = other DNA
ttttcaacctctataatttaaattctaaatcaaacacttcccractactc

SEQ ID NO: 16494 - DNA, 50 bp, synthetic construct
  source 1..50: mol_type = other DNA
taacctccattcctaacccttcttaaaatttataattacaacaaatccac

SEQ ID NO: 16495 - DNA, 50 bp, synthetic construct
  source 1..50: mol_type = other DNA
ttcctaacccttcttaaaatttataattacaacaaatccacraaaaactc

SEQ ID NO: 16496 - DNA, 50 bp, synthetic construct
  source 1..50: mol_type = other DNA
aaatattaatacraaaacatatttcactatctacaaaccctactcrcttc

SEQ ID NO: 16497 - DNA, 50 bp, synthetic construct
  source 1..50: mol_type = other DNA
aaaaaaaatattaatacraaaacatatttcactatctacaaaccctactc

SEQ ID NO: 16498 - DNA, 50 bp, synthetic construct
  source 1..50: mol_type = other DNA
cacacaaacctcraaacraacaaaacttacaaacaataaaacatattctc

SEQ ID NO: 16499 - DNA, 50 bp, synthetic construct
  source 1..50: mol_type = other DNA
aaccacttttaactcctctaactatattaacaatataaaaaacaatactc

SEQ ID NO: 16500 - DNA, 50 bp, synthetic construct
  source 1..50: mol_type = other DNA
ctaccccctacactactaacacaatcaaaaaaatcaaaaataacttcccc

SEQ ID NO: 16501 - DNA, 50 bp, synthetic construct
  source 1..50: mol_type = other DNA
tctaaaaataaactatatcaaacaactcaaaaattaaatccttcaaatac

SEQ ID NO: 16502 - DNA, 50 bp, synthetic construct
  source 1..50: mol_type = other DNA
aaaaaaacaataaactccraaaacaaacccaactaatcaattctcacrac

SEQ ID NO: 16503 - DNA, 50 bp, synthetic construct
  source 1..50: mol_type = other DNA
ataaactatatcaaacaactcaaaaattaaatccttcaaatacrtacrtc

SEQ ID NO: 16504 - DNA, 50 bp, synthetic construct
  source 1..50: mol_type = other DNA
aaaacacactaatatttcrtatattccaaccacaacaatatacrattctc

SEQ ID NO: 16505 - DNA, 50 bp, synthetic construct
  source 1..50: mol_type = other DNA
ttttcctactaacaacrtccrccacaacaactaaaacacactaatatttc

SEQ ID NO: 16506 - DNA, 50 bp, synthetic construct
  source 1..50: mol_type = other DNA
cattctcataaaacaactaccaactattacttttcctactaacaacrtcc

SEQ ID NO: 16507 - DNA, 50 bp, synthetic construct
  source 1..50: mol_type = other DNA
aaaaatcaaacacaacacaatttaaaaactcacaaactctataaataatc

SEQ ID NO: 16508 - DNA, 50 bp, synthetic construct
  source 1..50: mol_type = other DNA
aaatctctaaactatattatacttaacctccaaatacttctattccctac

SEQ ID NO: 16509 - DNA, 50 bp, synthetic construct
  source 1..50: mol_type = other DNA
cttactccctacacatttaaaaatcatcaccaataaataaacttaaatac

SEQ ID NO: 16510 - DNA, 50 bp, synthetic construct
  source 1..50: mol_type = other DNA
aaaaatcatcaccaataaataaacttaaatacrtacattctaacactaac

SEQ ID NO: 16511 - DNA, 50 bp, synthetic construct
  source 1..50: mol_type = other DNA
cttaatatatccccaactataccccaaaatatttaaattctcaaaaacac

SEQ ID NO: 16512 - DNA, 50 bp, synthetic construct
  source 1..50: mol_type = other DNA
ccaccatccaaaaatatcctaaaattaaatcctaacaaactcatctaacc

SEQ ID NO: 16513 - DNA, 50 bp, synthetic construct
  source 1..50: mol_type = other DNA
taaacctccacttaaaactacctaaatatcttcataacacactctctctc

SEQ ID NO: 16514 - DNA, 50 bp, synthetic construct
  source 1..50: mol_type = other DNA
tccacacaataaaaactaaaacctcctaccaacaactaaatacaaaaacc

SEQ ID NO: 16515 - DNA, 50 bp, synthetic construct
  source 1..50: mol_type = other DNA
aaaacctcctaccaacaactaaatacaaaaaccrtattaaaaataaatcc

SEQ ID NO: 16516 - DNA, 50 bp, synthetic construct
  source 1..50: mol_type = other DNA
acctaaaaaacrtaatcatcctacccraaataataaacaacataataaac

SEQ ID NO: 16517 - DNA, 50 bp, synthetic construct
  source 1..50: mol_type = other DNA
atcttccccaaatttcrtaaaatacraaaaaccataaacaaattaatatc

SEQ ID NO: 16518 - DNA, 50 bp, synthetic construct
  source 1..50: mol_type = other DNA
cctaaaaaacttttaaaaaaattcaaatacrtaaatcttccccaaatttc

SEQ ID NO: 16519 - DNA, 50 bp, synthetic construct
  source 1..50: mol_type = other DNA
ttaatctactcataactcctcrtatctcacraaatttaaaaaaaacccac

SEQ ID NO: 16520 - DNA, 50 bp, synthetic construct
  source 1..50: mol_type = other DNA
ctttaaaaaacaatactctattcctacctatacctcctatacccatcaac

SEQ ID NO: 16521 - DNA, 50 bp, synthetic construct
  source 1..50: mol_type = other DNA
tactaaaaccctcaaacttactaactcatacaaaaaacacatacaaaacc

SEQ ID NO: 16522 - DNA, 50 bp, synthetic construct
  source 1..50: mol_type = other DNA
taccaacaaaactacacctaattaaatacccaacaaactacctttactcc

SEQ ID NO: 16523 - DNA, 50 bp, synthetic construct
  source 1..50: mol_type = other DNA
aacatctttacttacctcaaaattataaaaattttctcccataacataac

SEQ ID NO: 16524 - DNA, 50 bp, synthetic construct
  source 1..50: mol_type = other DNA
aactttcccaatcaaaaacrctatacataaactacaaatttcaaccccac

SEQ ID NO: 16525 - DNA, 50 bp, synthetic construct
  source 1..50: mol_type = other DNA
acatacaaaacaaacaaacrtaaaactaaaatctacaacctatacataac

SEQ ID NO: 16526 - DNA, 50 bp, synthetic construct
  source 1..50: mol_type = other DNA
actattttataaatactattcaccatatccaacttaacactaataacttc

SEQ ID NO: 16527 - DNA, 50 bp, synthetic construct
  source 1..50: mol_type = other DNA
aaaatatttataatttattataaccatatatcaacaaatttcttccaaac

SEQ ID NO: 16528 - DNA, 50 bp, synthetic construct
  source 1..50: mol_type = other DNA
tatcctaaaacataacacataactaataaataactatcataatcaaaaac

SEQ ID NO: 16529 - DNA, 50 bp, synthetic construct
  source 1..50: mol_type = other DNA
taaccataataaccacttatcaatcatatactatatcttaaaacaaaatc

SEQ ID NO: 16530 - DNA, 50 bp, synthetic construct
  source 1..50: mol_type = other DNA
acttatcaatcatatactatatcttaaaacaaaatcraaatttacctacc

SEQ ID NO: 16531 - DNA, 50 bp, synthetic construct
  source 1..50: mol_type = other DNA
caccacaaaatacatcataaaacttttatacatacaacttaacaattatc

SEQ ID NO: 16532 - DNA, 50 bp, synthetic construct
  source 1..50: mol_type = other DNA
aactcattctccaataaaacatcctaaaaacataaaataactcacccttc

SEQ ID NO: 16533 - DNA, 50 bp, synthetic construct
  source 1..50: mol_type = other DNA
aataaaatttaacaaatatttatttacttccttacccctaaattatatac

SEQ ID NO: 16534 - DNA, 50 bp, synthetic construct
  source 1..50: mol_type = other DNA
aaatttaacaaatatttatttacttccttacccctaaattatatacrctc

SEQ ID NO: 16535 - DNA, 50 bp, synthetic construct
  source 1..50: mol_type = other DNA
acrttaacaccaataaacattctatacaattaaaaatatattcaaaaaac

SEQ ID NO: 16536 - DNA, 50 bp, synthetic construct
  source 1..50: mol_type = other DNA
ctctacttcttttaaaatttacaaaaaactattcctaaaaacactaaacc

SEQ ID NO: 16537 - DNA, 50 bp, synthetic construct
  source 1..50: mol_type = other DNA
aaatataacacatatttaaaccaaaaaaaatttcctctaccccactaatc

SEQ ID NO: 16538 - DNA, 50 bp, synthetic construct
  source 1..50: mol_type = other DNA
aaaaattacttaaaaccaaaaacaacctaaacaacacaacaaaaccccac

SEQ ID NO: 16539 - DNA, 50 bp, synthetic construct
  source 1..50: mol_type = other DNA
aaatcacttaaactcaaaaattaaaaaccaacctaaccaaaaaaaatccc

SEQ ID NO: 16540 - DNA, 50 bp, synthetic construct
  source 1..50: mol_type = other DNA
tttaaccaaactaatctctaactcctaaactcaaataatctacccatctc

SEQ ID NO: 16541 - DNA, 50 bp, synthetic construct
  source 1..50: mol_type = other DNA
caaactaatctctaactcctaaactcaaataatctacccatctcracctc

SEQ ID NO: 16542 - DNA, 50 bp, synthetic construct
  source 1..50: mol_type = other DNA
ctctacattccacttccataatcacaaaaaacctaaaaaaaaccaaatac

SEQ ID NO: 16543 - DNA, 50 bp, synthetic construct
  source 1..50: mol_type = other DNA
taatactaatatactataaaaactaaaaaccactactttaaactatctac

SEQ ID NO: 16544 - DNA, 50 bp, synthetic construct
  source 1..50: mol_type = other DNA
caaaaaaaatcctaaaaaccaaaaaatttccaaaataataactaacccac

SEQ ID NO: 16545 - DNA, 50 bp, synthetic construct
  source 1..50: mol_type = other DNA
ctctccctactctctttactaactacaaaataccttcctaaaaaaaatac

SEQ ID NO: 16546 - DNA, 50 bp, synthetic construct
  source 1..50: mol_type = other DNA
aaaatcatattacraccataccaacttatctaaaatctaatttaaaaaac

SEQ ID NO: 16547 - DNA, 50 bp, synthetic construct
  source 1..50: mol_type = other DNA
tttacaattaaccrtttctcaaattaaatttcaaacaaattaatataatc

SEQ ID NO: 16548 - DNA, 50 bp, synthetic construct
  source 1..50: mol_type = other DNA
aataaacaacaatataaataatctcctaactacttaatccacaccaatac

SEQ ID NO: 16549 - DNA, 50 bp, synthetic construct
  source 1..50: mol_type = other DNA
cataaaaactttctcaaatacctaccctaaaacaatcatcacactatctc

SEQ ID NO: 16550 - DNA, 50 bp, synthetic construct
  source 1..50: mol_type = other DNA
cctctaatttctctaactacaacataatctttctttaccrcaaacatacc

SEQ ID NO: 16551 - DNA, 50 bp, synthetic construct
  source 1..50: mol_type = other DNA
tcctcaaataaaaaattaattatcaaacccaaaaaactcattttccacac

SEQ ID NO: 16552 - DNA, 50 bp, synthetic construct
  source 1..50: mol_type = other DNA
aacaacaaattacaaaataacatcatctactacataaaaaaacaatcaac

SEQ ID NO: 16553 - DNA, 50 bp, synthetic construct
  source 1..50: mol_type = other DNA
aattacaaaataacatcatctactacataaaaaaacaatcaacrcaatac

SEQ ID NO: 16554 - DNA, 50 bp, synthetic construct
  source 1..50: mol_type = other DNA
ctacataaaaaaacaatcaacrcaatacrcaacatcaacaaaaacaaccc

SEQ ID NO: 16555 - DNA, 50 bp, synthetic construct
  source 1..50: mol_type = other DNA
acccraccaaatctcatacataaataaatataactaatctacccttaaac

SEQ ID NO: 16556 - DNA, 50 bp, synthetic construct
  source 1..50: mol_type = other DNA
taaacrctcaactataacctatacttacaaacccaactattatttatacc

SEQ ID NO: 16557 - DNA, 50 bp, synthetic construct
  source 1..50: mol_type = other DNA
atatattattcatttttacttccatttattactataacactttaattacc

SEQ ID NO: 16558 - DNA, 50 bp, synthetic construct
  source 1..50: mol_type = other DNA
ctacrccaaacaaaaaccactacataataaattatttaaaacccraaaac

SEQ ID NO: 16559 - DNA, 50 bp, synthetic construct
  source 1..50: mol_type = other DNA
acctacctacrccaaacaaaaaccactacataataaattatttaaaaccc

SEQ ID NO: 16560 - DNA, 50 bp, synthetic construct
  source 1..50: mol_type = other DNA
tatttttctttttccttataaacctacatcaaaataactctaaaaaaaac

SEQ ID NO: 16561 - DNA, 50 bp, synthetic construct
  source 1..50: mol_type = other DNA
atcatataaaaacatctataacctatctaaaaaaaattacttttctcttc

SEQ ID NO: 16562 - DNA, 50 bp, synthetic construct
  source 1..50: mol_type = other DNA
tactaattcaaataacacraacacatacctctacctacaacatactttcc

SEQ ID NO: 16563 - DNA, 50 bp, synthetic construct
  source 1..50: mol_type = other DNA
aatctcccaaacaatcacraaaaacatattacaaacaaaaacatatattc

SEQ ID NO: 16564 - DNA, 50 bp, synthetic construct
  source 1..50: mol_type = other DNA
aaaaacctaaaaaccccccactaaataaccrtaaaactactaacctaaac

SEQ ID NO: 16565 - DNA, 50 bp, synthetic construct
  source 1..50: mol_type = other DNA
taaattatatctacrtccacacccaaacttactaattttccttctatctc

SEQ ID NO: 16566 - DNA, 50 bp, synthetic construct
  source 1..50: mol_type = other DNA
tctacaacttttacccaaccacctaaccaacccccataaattatatctac

SEQ ID NO: 16567 - DNA, 50 bp, synthetic construct
  source 1..50: mol_type = other DNA
ccaatatacaaataaaaatcaataaaaccacattacttaccaaataaccc

SEQ ID NO: 16568 - DNA, 50 bp, synthetic construct
  source 1..50: mol_type = other DNA
ataataaaacaaatacttattaaccraatatacrtatccrcacaattaac

SEQ ID NO: 16569 - DNA, 50 bp, synthetic construct
  source 1..50: mol_type = other DNA
acatcaacccrataataaaacaaatacttattaaccraatatacrtatcc

SEQ ID NO: 16570 - DNA, 50 bp, synthetic construct
  source 1..50: mol_type = other DNA
tcactcacatcaacccrataataaaacaaatacttattaaccraatatac

SEQ ID NO: 16571 - DNA, 50 bp, synthetic construct
  source 1..50: mol_type = other DNA
cctaatcctcactcacatcaacccrataataaaacaaatacttattaacc

SEQ ID NO: 16572 - DNA, 50 bp, synthetic construct
  source 1..50: mol_type = other DNA
ttaattatacraacacrtatactcratcaataaatatctactttatcacc

SEQ ID NO: 16573 - DNA, 50 bp, synthetic construct
  source 1..50: mol_type = other DNA
accattaatcatacccraaaactttcaatccattttttattaatcaaaac

SEQ ID NO: 16574 - DNA, 50 bp, synthetic construct
  source 1..50: mol_type = other DNA
atcacccaactaaatcaaaaaatatttataaacaacctacttttaccccc

SEQ ID NO: 16575 - DNA, 50 bp, synthetic construct
  source 1..50: mol_type = other DNA
aacaaaccrattaccatacctataaccaaataaatcaacacctatacctc

SEQ ID NO: 16576 - DNA, 50 bp, synthetic construct
  source 1..50: mol_type = other DNA
ttatcaatcctccatctacctccaaataaaaactctaccataaaaaaacc

SEQ ID NO: 16577 - DNA, 50 bp, synthetic construct
  source 1..50: mol_type = other DNA
aaactctaatacaaaaaacacatactaattaatatttttaactaatacac

SEQ ID NO: 16578 - DNA, 50 bp, synthetic construct
  source 1..50: mol_type = other DNA
aaaactataacttaaatttaattccttaacttctaaacaacaactacccc

SEQ ID NO: 16579 - DNA, 50 bp, synthetic construct
  source 1..50: mol_type = other DNA
tctaaacataaacaaatcatttctctaccaaaatatctaaatttaaaacc

SEQ ID NO: 16580 - DNA, 50 bp, synthetic construct
  source 1..50: mol_type = other DNA
aaaatctcttaaacctaacaattaaaaactaactacaataaactataatc

SEQ ID NO: 16581 - DNA, 50 bp, synthetic construct
  source 1..50: mol_type = other DNA
aaatctaaaaataataactcaaacctataatctcaacactttcraaaacc

SEQ ID NO: 16582 - DNA, 50 bp, synthetic construct
  source 1..50: mol_type = other DNA
attcaaacrattcttctacctcaatctcccaaataactaaaattataaac

SEQ ID NO: 16583 - DNA, 50 bp, synthetic construct
  source 1..50: mol_type = other DNA
aattcctaatatcccctaatcttaacraaaaaaccttttaaataaacccc

SEQ ID NO: 16584 - DNA, 50 bp, synthetic construct
  source 1..50: mol_type = other DNA
attaactcaaccacactaattaaaactctcttacacatactcaaaaaaac

SEQ ID NO: 16585 - DNA, 50 bp, synthetic construct
  source 1..50: mol_type = other DNA
aaaaaacctcractaaatcaaaattatacttctaacttcctaatacaatc

SEQ ID NO: 16586 - DNA, 50 bp, synthetic construct
  source 1..50: mol_type = other DNA
tcaaaaaattaaaaacataactttaactcaatcraaacttttctaaccac

SEQ ID NO: 16587 - DNA, 50 bp, synthetic construct
  source 1..50: mol_type = other DNA
aacataactttaactcaatcraaacttttctaaccacrtatttcacatac

SEQ ID NO: 16588 - DNA, 50 bp, synthetic construct
  source 1..50: mol_type = other DNA
atttaaaacaactaaaaaaataccttaaaactacrtaaaaaccctcatcc

SEQ ID NO: 16589 - DNA, 50 bp, synthetic construct
  source 1..50: mol_type = other DNA
tctaccaaacaatcatatttaaaacaactaaaaaaataccttaaaactac

SEQ ID NO: 16590 - DNA, 50 bp, synthetic construct
  source 1..50: mol_type = other DNA
ataaaaactactcacttattcaaacaaataccctaaaataacacatatcc

SEQ ID NO: 16591 - DNA, 50 bp, synthetic construct
  source 1..50: mol_type = other DNA
aaaactactcacttattcaaacaaataccctaaaataacacatatccrcc

SEQ ID NO: 16592 - DNA, 50 bp, synthetic construct
  source 1..50: mol_type = other DNA
ctactcacttattcaaacaaataccctaaaataacacatatccrccraac

SEQ ID NO: 16593 - DNA, 50 bp, synthetic construct
  source 1..50: mol_type = other DNA
accatattaatcaaactattctctaactactaacctcaaaaaatccaccc

SEQ ID NO: 16594 - DNA, 50 bp, synthetic construct
  source 1..50: mol_type = other DNA
cccctaaaatcaacaattaaaaaacaacctaaccaacataataaaaaccc

SEQ ID NO: 16595 - DNA, 50 bp, synthetic construct
  source 1..50: mol_type = other DNA
ctaaccaacataataaaaacccrtctctaccaaaaacacacaaattaacc

SEQ ID NO: 16596 - DNA, 50 bp, synthetic construct
  source 1..50: mol_type = other DNA
aaaaacccrtctctaccaaaaacacacaaattaaccraaaataataacac

SEQ ID NO: 16597 - DNA, 50 bp, synthetic construct
  source 1..50: mol_type = other DNA
aaacattccttaaatattaacttataaacatctatcacttttatttattc

SEQ ID NO: 16598 - DNA, 50 bp, synthetic construct
  source 1..50: mol_type = other DNA
ttaaccaaatataataatacrctcctataatcctaactactcaaaaaacc

SEQ ID NO: 16599 - DNA, 50 bp, synthetic construct
  source 1..50: mol_type = other DNA
aaccttctctccacaaaattcaaacaaaaattaaccaaatataataatac

SEQ ID NO: 16600 - DNA, 50 bp, synthetic construct
  source 1..50: mol_type = other DNA
aactcttatccaaaatcaaactataaaaatcaaaatataaaactaactcc

SEQ ID NO: 16601 - DNA, 50 bp, synthetic construct
  source 1..50: mol_type = other DNA
aaacaaaaaccaaattctttaataaatcatctaacatactacttattttc

SEQ ID NO: 16602 - DNA, 50 bp, synthetic construct
  source 1..50: mol_type = other DNA
aaattttataaactctctcatttttatcaaaacacaaaaaactacttccc

SEQ ID NO: 16603 - DNA, 50 bp, synthetic construct
  source 1..50: mol_type = other DNA
acataataaaaccctatctctatcaaaaaactcacaaaaatttaccaaac

SEQ ID NO: 16604 - DNA, 50 bp, synthetic construct
  source 1..50: mol_type = other DNA
tatactaatattccatctatatttacactacacaataaaaacccacacac

SEQ ID NO: 16605 - DNA, 50 bp, synthetic construct
  source 1..50: mol_type = other DNA
tactatacaatataaatacaaataaaacatcaacatattaactaaacttc

SEQ ID NO: 16606 - DNA, 50 bp, synthetic construct
  source 1..50: mol_type = other DNA
actcaaaaaattttcctatatcaacctcccacrtaactaaaaccataaac

SEQ ID NO: 16607 - DNA, 50 bp, synthetic construct
  source 1..50: mol_type = other DNA
aatactaaaattactatcattcttaatcaattaacttacaacttcctttc

SEQ ID NO: 16608 - DNA, 50 bp, synthetic construct
  source 1..50: mol_type = other DNA
attcttaatcaattaacttacaacttcctttcractcaactcccacccac

SEQ ID NO: 16609 - DNA, 50 bp, synthetic construct
  source 1..50: mol_type = other DNA
acatttctattactaatactactaatcctaaaaccatacttaaaatatcc

SEQ ID NO: 16610 - DNA, 50 bp, synthetic construct
  source 1..50: mol_type = other DNA
acaaaaatctcatctctaaaaaacaacaaataaaatccaaaaaaaatacc

SEQ ID NO: 16611 - DNA, 50 bp, synthetic construct
  source 1..50: mol_type = other DNA
acaaaactaaatttaaaaatactaattttaataaatcccttaacaacctc

SEQ ID NO: 16612 - DNA, 50 bp, synthetic construct
  source 1..50: mol_type = other DNA
atttaaccaatttaaatcccaaaaaaaaccataaaaaccaaaaaaaaccc

SEQ ID NO: 16613 - DNA, 50 bp, synthetic construct
  source 1..50: mol_type = other DNA
aattctcttcaaaatattcaccaacccrcraactttatctacacttaatc

SEQ ID NO: 16614 - DNA, 50 bp, synthetic construct
  source 1..50: mol_type = other DNA
ctttccctatatctactcacaaactcacccaaaaaaaaacctataccttc

SEQ ID NO: 16615 - DNA, 50 bp, synthetic construct
  source 1..50: mol_type = other DNA
aaaataaataatttaaaaccaactaaaccactcctatccaaatataattc

SEQ ID NO: 16616 - DNA, 50 bp, synthetic construct
  source 1..50: mol_type = other DNA
cttccaaaaaatctaccctacactcaaatacaaaaaacaaacaactaacc

SEQ ID NO: 16617 - DNA, 50 bp, synthetic construct
  source 1..50: mol_type = other DNA
cctaaaataaaattttacatccaccaaacrattctctactcaatcacccc

SEQ ID NO: 16618 - DNA, 50 bp, synthetic construct
  source 1..50: mol_type = other DNA
ataacaatttatacaatttaaaaacaataaccctttcatctaaaataacc

SEQ ID NO: 16619 - DNA, 50 bp, synthetic construct
  source 1..50: mol_type = other DNA
taacaaatccttcaaaaaactaaaataaacacaactttcttacctaaacc

SEQ ID NO: 16620 - DNA, 50 bp, synthetic construct
  source 1..50: mol_type = other DNA
taaacaaacrcaacaaaaaaacccaaaaaaaatccaaacaaaaaactaac

SEQ ID NO: 16621 - DNA, 50 bp, synthetic construct
  source 1..50: mol_type = other DNA
catcataacacatcaaaacaaatcraataatcaaaacttcctaccatccc

SEQ ID NO: 16622 - DNA, 50 bp, synthetic construct
  source 1..50: mol_type = other DNA
ataaaaaatacacatacacaaaaaaacatcataacacatcaaaacaaatc

SEQ ID NO: 16623 - DNA, 50 bp, synthetic construct
  source 1..50: mol_type = other DNA
accctaatatatcataatatttccttatacatatacatttttcataaaac

SEQ ID NO: 16624 - DNA, 50 bp, synthetic construct
  source 1..50: mol_type = other DNA
ttaactttaaaaaatttaaccaaaattaaaaaacacctccaaacccctac

SEQ ID NO: 16625 - DNA, 50 bp, synthetic construct
  source 1..50: mol_type = other DNA
aatttaaccaaaattaaaaaacacctccaaacccctacraaataaacaac

SEQ ID NO: 16626 - DNA, 50 bp, synthetic construct
  source 1..50: mol_type = other DNA
aaaacttcccacrtttttaatacttactcatccaaaactctctacaaccc

SEQ ID NO: 16627 - DNA, 50 bp, synthetic construct
  source 1..50: mol_type = other DNA
tatcaaaaaaattacccaaataaatcatctacactacacracaacractc

SEQ ID NO: 16628 - DNA, 50 bp, synthetic construct
  source 1..50: mol_type = other DNA
taaaaaaaatttctcaaccaacaatactttcaccccttactaaacraatc

SEQ ID NO: 16629 - DNA, 50 bp, synthetic construct
  source 1..50: mol_type = other DNA
ctaactccttctatcaaaaaaattacccaaataaatcatctacactacac

SEQ ID NO: 16630 - DNA, 50 bp, synthetic construct
  source 1..50: mol_type = other DNA
ctaaataactcccttaacaaaaaaaaccaaccaaactacaacaaatatac

SEQ ID NO: 16631 - DNA, 50 bp, synthetic construct
  source 1..50: mol_type = other DNA
ctaaacactatatatatcatcttattaaataatcccaaataccctataac

SEQ ID NO: 16632 - DNA, 50 bp, synthetic construct
  source 1..50: mol_type = other DNA
ttttctaacaatatccaaaacttcatataaaataaataaaccctaaaaac

SEQ ID NO: 16633 - DNA, 50 bp, synthetic construct
  source 1..50: mol_type = other DNA
tctcatttaaattaaatctaacctttataataatttaatacaaaccaaac

SEQ ID NO: 16634 - DNA, 50 bp, synthetic construct
  source 1..50: mol_type = other DNA
ttacaaaaatttactaacaaaaaaatatttctctcctaccccaacaaaac

SEQ ID NO: 16635 - DNA, 50 bp, synthetic construct
  source 1..50: mol_type = other DNA
ttaaaaactataaaaattcctaatacccaaaccaataaactcaaaaccac

SEQ ID NO: 16636 - DNA, 50 bp, synthetic construct
  source 1..50: mol_type = other DNA
actaaacaataaaatcacctaaaaaacttcacaaaatacaaataataccc

SEQ ID NO: 16637 - DNA, 50 bp, synthetic construct
  source 1..50: mol_type = other DNA
aatttcaaacccatcaaaatttaaaaaacctaaatctaaatccrtaattc

SEQ ID NO: 16638 - DNA, 50 bp, synthetic construct
  source 1..50: mol_type = other DNA
ataaaaataccaaaaaacrctactactacraaaacaaaaaaccaacctcc

SEQ ID NO: 16639 - DNA, 50 bp, synthetic construct
  source 1..50: mol_type = other DNA
tcractctaaaaaacaccaactaaaaataacaaaaacaaacctaaaactc

SEQ ID NO: 16640 - DNA, 50 bp, synthetic construct
  source 1..50: mol_type = other DNA
aaaaaacaccaactaaaaataacaaaaacaaacctaaaactcracataac

SEQ ID NO: 16641 - DNA, 50 bp, synthetic construct
  source 1..50: mol_type = other DNA
cccttaaatttaacttacctattactcttaaaatctaacttctaacctcc

SEQ ID NO: 16642 - DNA, 50 bp, synthetic construct
  source 1..50: mol_type = other DNA
aaacrtaaaaccctccraaccaaatataaaatataatctcrtaatactcc

SEQ ID NO: 16643 - DNA, 50 bp, synthetic construct
  source 1..50: mol_type = other DNA
raaattccrtaaacrtaaaaccctccraaccaaatataaaatataatctc

SEQ ID NO: 16644 - DNA, 50 bp, synthetic construct
  source 1..50: mol_type = other DNA
caaactactataataaaaatcaacraaattccrtaaacrtaaaaccctcc

SEQ ID NO: 16645 - DNA, 50 bp, synthetic construct
  source 1..50: mol_type = other DNA
acaatttaatctcaaactactataataaaaatcaacraaattccrtaaac

SEQ ID NO: 16646 - DNA, 50 bp, synthetic construct
  source 1..50: mol_type = other DNA
crccttacaatttaatctcaaactactataataaaaatcaacraaattcc

SEQ ID NO: 16647 - DNA, 50 bp, synthetic construct
  source 1..50: mol_type = other DNA
ctcrctaccrccttacaatttaatctcaaactactataataaaaatcaac

SEQ ID NO: 16648 - DNA, 50 bp, synthetic construct
  source 1..50: mol_type = other DNA
ctcrctaattcctaccacaacaatctaaaatcaaactacaaaacracaac

SEQ ID NO: 16649 - DNA, 50 bp, synthetic construct
  source 1..50: mol_type = other DNA
raacttcctaactactttatttacttaaacaaacctaaacaattacraac

SEQ ID NO: 16650 - DNA, 50 bp, synthetic construct
  source 1..50: mol_type = other DNA
attcraacttcctaactactttatttacttaaacaaacctaaacaattac

SEQ ID NO: 16651 - DNA, 50 bp, synthetic construct
  source 1..50: mol_type = other DNA
rcccrcaattacccaaacttacttaaataaacaaaacaaccaaaaaactc

SEQ ID NO: 16652 - DNA, 50 bp, synthetic construct
  source 1..50: mol_type = other DNA
ttaattcctaatatacttctactataatatactcctacatataaatacac

SEQ ID NO: 16653 - DNA, 50 bp, synthetic construct
  source 1..50: mol_type = other DNA
aaaaaaacrcraaatctccctaatcactcctaatctaatacctatcaatc

SEQ ID NO: 16654 - DNA, 50 bp, synthetic construct
  source 1..50: mol_type = other DNA
tacrctatactatatacrctatactatatactctatactatactccrtac

SEQ ID NO: 16655 - DNA, 50 bp, synthetic construct
  source 1..50: mol_type = other DNA
tatacrctatactatatactctatactatactccrtacrctatatactac

SEQ ID NO: 16656 - DNA, 50 bp, synthetic construct
  source 1..50: mol_type = other DNA
cacctcctaacattacaaacaaaaccccttaataactataacaaacatcc

SEQ ID NO: 16657 - DNA, 50 bp, synthetic construct
  source 1..50: mol_type = other DNA
atataaaataacttcctaatattaccataacatttataaactatcataac

SEQ ID NO: 16658 - DNA, 50 bp, synthetic construct
  source 1..50: mol_type = other DNA
ctatttaacttcttattaatcaataacataccccaacaaacaataaatac

SEQ ID NO: 16659 - DNA, 50 bp, synthetic construct
  source 1..50: mol_type = other DNA
cttattaatcaataacataccccaacaaacaataaatacrccctaacctc

SEQ ID NO: 16660 - DNA, 50 bp, synthetic construct
  source 1..50: mol_type = other DNA
actttattcaaattaacttatttcccaaaaacccacaaaatcaataatac

SEQ ID NO: 16661 - DNA, 50 bp, synthetic construct
  source 1..50: mol_type = other DNA
cccaataaaaaaacttcattaaataactcaaataaccraaaaacaatccc

SEQ ID NO: 16662 - DNA, 50 bp, synthetic construct
  source 1..50: mol_type = other DNA
taactaaaatctcaaaactcraacaaactaaacaattacctaaaacaacc

SEQ ID NO: 16663 - DNA, 50 bp, synthetic construct
  source 1..50: mol_type = other DNA
aaacaaaaaaatcatcccrtaccaaaatctaaatacaaacaaaactcatc

SEQ ID NO: 16664 - DNA, 50 bp, synthetic construct
  source 1..50: mol_type = other DNA
aaaaaatatacaaaaaatttcacccacaccctattttataatttttaccc

SEQ ID NO: 16665 - DNA, 50 bp, synthetic construct
  source 1..50: mol_type = other DNA
ataaacaaatctaccaaatctacatacatcaacacacacaaataaaccac

SEQ ID NO: 16666 - DNA, 50 bp, synthetic construct
  source 1..50: mol_type = other DNA
aactataatttacaaaataatccctccracattccaactatccaaactac

SEQ ID NO: 16667 - DNA, 50 bp, synthetic construct
  source 1..50: mol_type = other DNA
ccaactaaaaatcccrataaaaaaactataatttacaaaataatccctcc

SEQ ID NO: 16668 - DNA, 50 bp, synthetic construct
  source 1..50: mol_type = other DNA
aacaattaaaatatcraaaaaactaccctacaaatcacaacccttctatc

SEQ ID NO: 16669 - DNA, 50 bp, synthetic construct
  source 1..50: mol_type = other DNA
aaataaataaaaatattaactcttctaaaaaacccacccaacaaataaac

SEQ ID NO: 16670 - DNA, 50 bp, synthetic construct
  source 1..50: mol_type = other DNA
aaataaaaatattaactcttctaaaaaacccacccaacaaataaacrcrc

SEQ ID NO: 16671 - DNA, 50 bp, synthetic construct
  source 1..50: mol_type = other DNA
tataaacaatttcrtataattatacctcataacctactaattccccaccc

SEQ ID NO: 16672 - DNA, 50 bp, synthetic construct
  source 1..50: mol_type = other DNA
ccaaaatctctacraataaaaaatcaacaaattataaaatacaaccacac

SEQ ID NO: 16673 - DNA, 50 bp, synthetic construct
  source 1..50: mol_type = other DNA
ttctaaattttaacttacataacattttaaataacrtaataaaatctcac

SEQ ID NO: 16674 - DNA, 50 bp, synthetic construct
  source 1..50: mol_type = other DNA
tcacctaaaacaaataatacttcctataaaatactatcaaaaaatcaatc

SEQ ID NO: 16675 - DNA, 50 bp, synthetic construct
  source 1..50: mol_type = other DNA
acctaaaactataaatcaacaataacctaacactacatcacaatacctac

SEQ ID NO: 16676 - DNA, 50 bp, synthetic construct
  source 1..50: mol_type = other DNA
tcactttctctctattaaattaccaaatctccaaatctcaaacaaacccc

SEQ ID NO: 16677 - DNA, 50 bp, synthetic construct
  source 1..50: mol_type = other DNA
atccaaacrctttttaacattactaccctaaaaataaactacttaaactc

SEQ ID NO: 16678 - DNA, 50 bp, synthetic construct
  source 1..50: mol_type = other DNA
atttttactattaaacataccattttacaaaatatttattccacttaatc

SEQ ID NO: 16679 - DNA, 50 bp, synthetic construct
  source 1..50: mol_type = other DNA
taccctacttttaatactaaatttctatcccctataaatctaaatatacc

SEQ ID NO: 16680 - DNA, 50 bp, synthetic construct
  source 1..50: mol_type = other DNA
taaaataaaaaaattcccaaaatataaacaacacraaaccrataaatacc

SEQ ID NO: 16681 - DNA, 50 bp, synthetic construct
  source 1..50: mol_type = other DNA
aataaaaaaattcccaaaatataaacaacacraaaccrataaataccrtc

SEQ ID NO: 16682 - DNA, 50 bp, synthetic construct
  source 1..50: mol_type = other DNA
actccaaataaacacattaacattttctaaacataaatattaaaacccac

SEQ ID NO: 16683 - DNA, 50 bp, synthetic construct
  source 1..50: mol_type = other DNA
acaaaatttaaatcacctacctacaaaatttatatttatattaccccatc

SEQ ID NO: 16684 - DNA, 50 bp, synthetic construct
  source 1..50: mol_type = other DNA
atccaattcaaaactctataatataaacattatcttcccattttacactc

SEQ ID NO: 16685 - DNA, 50 bp, synthetic construct
  source 1..50: mol_type = other DNA
ctttatttacttaaaccttcactacataaaacctcaacctcttacaattc

SEQ ID NO: 16686 - DNA, 50 bp, synthetic construct
  source 1..50: mol_type = other DNA
aacrctaactcaaaaaaccacaaataatcaatatatcaataactatttac

SEQ ID NO: 16687 - DNA, 50 bp, synthetic construct
  source 1..50: mol_type = other DNA
aaatttaaactaaactaaaatcaaataatttcctacacaacccccctccc

SEQ ID NO: 16688 - DNA, 50 bp, synthetic construct
  source 1..50: mol_type = other DNA
acttatactcaaaaattcaaaactacaacraatcataactataccactac

SEQ ID NO: 16689 - DNA, 50 bp, synthetic construct
  source 1..50: mol_type = other DNA
aaatctcrctctataacccaaactaaaacrcaataacacaatcataactc

SEQ ID NO: 16690 - DNA, 50 bp, synthetic construct
  source 1..50: mol_type = other DNA
ccaatcrataaaaaacataatctatcaataacaattaatcttactttccc

SEQ ID NO: 16691 - DNA, 50 bp, synthetic construct
  source 1..50: mol_type = other DNA
atcaataacaattaatcttactttcccrtaaataaattacttaattttac

SEQ ID NO: 16692 - DNA, 50 bp, synthetic construct
  source 1..50: mol_type = other DNA
tctatccraaaaaacttaaacrtattaaccaccaacatataaccatttac

SEQ ID NO: 16693 - DNA, 50 bp, synthetic construct
  source 1..50: mol_type = other DNA
caacctccaaataactccaacrtaaataattatatactaataattaatac

SEQ ID NO: 16694 - DNA, 50 bp, synthetic construct
  source 1..50: mol_type = other DNA
ctccaacrtaaataattatatactaataattaatacrctcaaatctctcc

SEQ ID NO: 16695 - DNA, 50 bp, synthetic construct
  source 1..50: mol_type = other DNA
tttaaaaaaactatcaaaaaaatataattattttaacaacttaaactccc

SEQ ID NO: 16696 - DNA, 50 bp, synthetic construct
  source 1..50: mol_type = other DNA
aaaaaattctatttctaaaccaaattcccrcttactaaaatttaccaatc

SEQ ID NO: 16697 - DNA, 50 bp, synthetic construct
  source 1..50: mol_type = other DNA
cacccttaaattaacttcaataaaaaattctatttctaaaccaaattccc

SEQ ID NO: 16698 - DNA, 50 bp, synthetic construct
  source 1..50: mol_type = other DNA
tcccaaaaataactctaactacaccaatccattctaaaatcactttcatc

SEQ ID NO: 16699 - DNA, 50 bp, synthetic construct
  source 1..50: mol_type = other DNA
attttactacttatacacttttctatttctaccratataccaactctaac

SEQ ID NO: 16700 - DNA, 50 bp, synthetic construct
  source 1..50: mol_type = other DNA
cttctatactatacaactaataatctaaaacctctacattacrataaaac

SEQ ID NO: 16701 - DNA, 50 bp, synthetic construct
  source 1..50: mol_type = other DNA
tctaatctcttctatactatacaactaataatctaaaacctctacattac

SEQ ID NO: 16702 - DNA, 50 bp, synthetic construct
  source 1..50: mol_type = other DNA
tcataaccacaaaattattccccaaacatacaatttaaaaaaattaaccc

SEQ ID NO: 16703 - DNA, 50 bp, synthetic construct
  source 1..50: mol_type = other DNA
actcaaaatccttctataactttccccrattattaaaatatccttattac

SEQ ID NO: 16704 - DNA, 50 bp, synthetic construct
  source 1..50: mol_type = other DNA
ctattataactatcatcatcctaactcaaaatccttctataactttcccc

SEQ ID NO: 16705 - DNA, 50 bp, synthetic construct
  source 1..50: mol_type = other DNA
ttcacccacaaccaattcttcaactaaattatatccattctattttcacc

SEQ ID NO: 16706 - DNA, 50 bp, synthetic construct
  source 1..50: mol_type = other DNA
actaccttattcaattaataatcaacaactaatatatccaaaaataatac

SEQ ID NO: 16707 - DNA, 50 bp, synthetic construct
  source 1..50: mol_type = other DNA
ttatctcaaacttaacctaatccaaataaacctaaatacctctcttcacc

SEQ ID NO: 16708 - DNA, 50 bp, synthetic construct
  source 1..50: mol_type = other DNA
tttaaatacttttccaaaccctaaatcatctttattcactctctactacc

SEQ ID NO: 16709 - DNA, 50 bp, synthetic construct
  source 1..50: mol_type = other DNA
ctttctcrctttctaatatcctactcaaactcccatccattctaatctac

SEQ ID NO: 16710 - DNA, 50 bp, synthetic construct
  source 1..50: mol_type = other DNA
cttctcattttaccttataactttaaacttaacaaaaaccraaacrtaac

SEQ ID NO: 16711 - DNA, 50 bp, synthetic construct
  source 1..50: mol_type = other DNA
tacrccttctcattttaccttataactttaaacttaacaaaaaccraaac

SEQ ID NO: 16712 - DNA, 50 bp, synthetic construct
  source 1..50: mol_type = other DNA
ctcctaactctcctctctaaaaaaattcaaaaaactcctaaaaaaaatac

SEQ ID NO: 16713 - DNA, 50 bp, synthetic construct
  source 1..50: mol_type = other DNA
cttttcctttcttaaaacccaatataatctaaattatattttcaacraac

SEQ ID NO: 16714 - DNA, 50 bp, synthetic construct
  source 1..50: mol_type = other DNA
aaaccttttcctttcttaaaacccaatataatctaaattatattttcaac

SEQ ID NO: 16715 - DNA, 50 bp, synthetic construct
  source 1..50: mol_type = other DNA
taaaaaaaatcctctttacacrcttataaacaaactaactttctcttccc

SEQ ID NO: 16716 - DNA, 50 bp, synthetic construct
  source 1..50: mol_type = other DNA
cctacatcactataacattaactaacctacttttctctttcattaataac

SEQ ID NO: 16717 - DNA, 50 bp, synthetic construct
  source 1..50: mol_type = other DNA
ttatctaaaatccaatccaaaatatcacattacatttaatcatcatcttc

SEQ ID NO: 16718 - DNA, 50 bp, synthetic construct
  source 1..50: mol_type = other DNA
aaaatccaatccaaaatatcacattacatttaatcatcatcttcrtaaac

SEQ ID NO: 16719 - DNA, 50 bp, synthetic construct
  source 1..50: mol_type = other DNA
atcacattacatttaatcatcatcttcrtaaacrcttcttaattaatttc

SEQ ID NO: 16720 - DNA, 50 bp, synthetic construct
  source 1..50: mol_type = other DNA
aataaaaaaaacccttaacctctatactcttcttcccaaaaacctataac

SEQ ID NO: 16721 - DNA, 50 bp, synthetic construct
  source 1..50: mol_type = other DNA
aaattaacattactaatcatattaataacttacactaactttaatataac

SEQ ID NO: 16722 - DNA, 50 bp, synthetic construct
  source 1..50: mol_type = other DNA
ttttttctttcttttccctctacatactattttttaaaaacaaataactc

SEQ ID NO: 16723 - DNA, 50 bp, synthetic construct
  source 1..50: mol_type = other DNA
aaaaataaatcaccaatatctaactaattattttattatatttaaaacac

SEQ ID NO: 16724 - DNA, 50 bp, synthetic construct
  source 1..50: mol_type = other DNA
tacttctaaaaaatatactaaaaacacaaaaaaccccttcaaaccttcac

SEQ ID NO: 16725 - DNA, 50 bp, synthetic construct
  source 1..50: mol_type = other DNA
aaatatactaaaaacacaaaaaaccccttcaaaccttcacraaattaaac

SEQ ID NO: 16726 - DNA, 50 bp, synthetic construct
  source 1..50: mol_type = other DNA
ttaaacrtaacctcccaaaaaaccaaaaccaaaaaactctacaatcttcc

SEQ ID NO: 16727 - DNA, 50 bp, synthetic construct
  source 1..50: mol_type = other DNA
aaaaacctacaaatcctaccttaacccaaattcctaaaaactaaaaatac

SEQ ID NO: 16728 - DNA, 50 bp, synthetic construct
  source 1..50: mol_type = other DNA
aaaatctcraaaaaaatctcctatacrtattactatataacttccrtacc

SEQ ID NO: 16729 - DNA, 50 bp, synthetic construct
  source 1..50: mol_type = other DNA
caatataaacataatattctctactatccaaaatctaatccttttccatc

SEQ ID NO: 16730 - DNA, 50 bp, synthetic construct
  source 1..50: mol_type = other DNA
ctaaaacctttacaccacattaaaaacaataaccctaaaattaaaaaacc

SEQ ID NO: 16731 - DNA, 50 bp, synthetic construct
  source 1..50: mol_type = other DNA
cattcaaaaatattaacaccttttcttcctaacttcacrttataaaactc

SEQ ID NO: 16732 - DNA, 50 bp, synthetic construct
  source 1..50: mol_type = other DNA
aaatattattatcattaaaaaacaaactcttaatattcccacacttaaac

SEQ ID NO: 16733 - DNA, 50 bp, synthetic construct
  source 1..50: mol_type = other DNA
aaaaaacraaaaataaactctaccctaaactaaaaatcctcrctacaaac

SEQ ID NO: 16734 - DNA, 50 bp, synthetic construct
  source 1..50: mol_type = other DNA
aaaaacacraccaaatctaccctccaataaattccaattttatcccctac

SEQ ID NO: 16735 - DNA, 50 bp, synthetic construct
  source 1..50: mol_type = other DNA
atcccctacrtttctaaaaactctcraaacttaaccctaaataaaaatac

SEQ ID NO: 16736 - DNA, 50 bp, synthetic construct
  source 1..50: mol_type = other DNA
tcctaaaaatctacacccaaaaccacaaacactaacataaataaaaacac

SEQ ID NO: 16737 - DNA, 50 bp, synthetic construct
  source 1..50: mol_type = other DNA
tataattctaaatataaactttcaaaaaacacaaccataaaactacatac

SEQ ID NO: 16738 - DNA, 50 bp, synthetic construct
  source 1..50: mol_type = other DNA
ccaaaaaaaaaacaccaaaacctcatcctcttatccctaaatccttacac

SEQ ID NO: 16739 - DNA, 50 bp, synthetic construct
  source 1..50: mol_type = other DNA
acraaatttctcccaaacacraattctatatttatccttctacaacttcc

SEQ ID NO: 16740 - DNA, 50 bp, synthetic construct
  source 1..50: mol_type = other DNA
rtcctcacctccaaaatataactcatctcaaataataaaaaccaaaccac

SEQ ID NO: 16741 - DNA, 50 bp, synthetic construct
  source 1..50: mol_type = other DNA
acccrtaaataaaattccaattaaacccttataccraaactttaaaccac

SEQ ID NO: 16742 - DNA, 50 bp, synthetic construct
  source 1..50: mol_type = other DNA
aatccctctaaaaattcaataaatacaacatataccccacaatcataccc

SEQ ID NO: 16743 - DNA, 50 bp, synthetic construct
  source 1..50: mol_type = other DNA
acttattcttattacctcatctatcttaaatacaaaatttttacataaac

SEQ ID NO: 16744 - DNA, 50 bp, synthetic construct
  source 1..50: mol_type = other DNA
ttttttttctaattaactttccttttcctctatcttaaacaccttccccc

SEQ ID NO: 16745 - DNA, 50 bp, synthetic construct
  source 1..50: mol_type = other DNA
caaacataacaaacacaaactccaaaatccaaccaaaatacctacctacc

SEQ ID NO: 16746 - DNA, 50 bp, synthetic construct
  source 1..50: mol_type = other DNA
aaaacctatatttaccatacctaaaccttctacctacccaaaataaacac

SEQ ID NO: 16747 - DNA, 50 bp, synthetic construct
  source 1..50: mol_type = other DNA
cttataaacccaaatcctctaccaaacacattctattcatcatctctttc

SEQ ID NO: 16748 - DNA, 50 bp, synthetic construct
  source 1..50: mol_type = other DNA
aaataaaaacacaataacctaaaataacttacaaaaacaatctaacatcc

SEQ ID NO: 16749 - DNA, 50 bp, synthetic construct
  source 1..50: mol_type = other DNA
aaaataataaatacattcatttcctaaacaattactatatacctaacacc

SEQ ID NO: 16750 - DNA, 50 bp, synthetic construct
  source 1..50: mol_type = other DNA
ttcatttcctaaacaattactatatacctaacaccrttttaactactaac

SEQ ID NO: 16751 - DNA, 50 bp, synthetic construct
  source 1..50: mol_type = other DNA
aaataaaaattaacrtcaactcctccataaaacctaccctaactctaacc

SEQ ID NO: 16752 - DNA, 50 bp, synthetic construct
  source 1..50: mol_type = other DNA
taattaaattatccratcaaaatcaaaacaaactccataaaaaaactaac

SEQ ID NO: 16753 - DNA, 50 bp, synthetic construct
  source 1..50: mol_type = other DNA
tttaaaataccctacaaactctctataaaactacacactacatactactc

SEQ ID NO: 16754 - DNA, 50 bp, synthetic construct
  source 1..50: mol_type = other DNA
aactcctaaccctaatttaatttcttctcaacacaacaaccaaactaacc

SEQ ID NO: 16755 - DNA, 50 bp, synthetic construct
  source 1..50: mol_type = other DNA
aactaaatcaaaatcaaaaactaaaacaccaaaacaaacatacacaaaac

SEQ ID NO: 16756 - DNA, 50 bp, synthetic construct
  source 1..50: mol_type = other DNA
ataaaataaacacccaaatacattattcctaatctttcttcacctacctc

SEQ ID NO: 16757 - DNA, 50 bp, synthetic construct
  source 1..50: mol_type = other DNA
taaaaaaactacttcatctacctactattcctcaataaaaaatcataacc

SEQ ID NO: 16758 - DNA, 50 bp, synthetic construct
  source 1..50: mol_type = other DNA
acaaactccaaaaacaaaaaccaaaattcaaatttaaaatcaaccacrac

SEQ ID NO: 16759 - DNA, 50 bp, synthetic construct
  source 1..50: mol_type = other DNA
cttctattaaaaaacaacaaataaataaaacaactttctcatattacrcc

SEQ ID NO: 16760 - DNA, 50 bp, synthetic construct
  source 1..50: mol_type = other DNA
ctccaaacttaaactctaatctctatttttaaaacttacttccttcctac

SEQ ID NO: 16761 - DNA, 50 bp, synthetic construct
  source 1..50: mol_type = other DNA
accaaaacaaccaaaactctaacraaaaatcaaacctatataaataattc

SEQ ID NO: 16762 - DNA, 50 bp, synthetic construct
  source 1..50: mol_type = other DNA
acaaaaaccataacraaattccacaaaaccaaaacaaccaaaactctaac

SEQ ID NO: 16763 - DNA, 50 bp, synthetic construct
  source 1..50: mol_type = other DNA
ccaaattcaacataaccctaaacctactccrtttaaacaaaaaccataac

SEQ ID NO: 16764 - DNA, 50 bp, synthetic construct
  source 1..50: mol_type = other DNA
atcctaactaccctaatcctataaaatcccrtcataacttctatctaaac

SEQ ID NO: 16765 - DNA, 50 bp, synthetic construct
  source 1..50: mol_type = other DNA
tctatacaaaaatcaaatttaaactttaaaatcacctaaaattaaatctc

SEQ ID NO: 16766 - DNA, 50 bp, synthetic construct
  source 1..50: mol_type = other DNA
ccattcaaaataatacrtttttaccrtaaaatctaaataactccacaacc

SEQ ID NO: 16767 - DNA, 50 bp, synthetic construct
  source 1..50: mol_type = other DNA
cttaaaccratacctaacctaacccccattcaaaataatacrtttttacc

SEQ ID NO: 16768 - DNA, 50 bp, synthetic construct
  source 1..50: mol_type = other DNA
aacctataactaaaacacaacraatcaaaatccaaccrctaaacaaaacc

SEQ ID NO: 16769 - DNA, 50 bp, synthetic construct
  source 1..50: mol_type = other DNA
actaaacactttacataaatcttctcatttaatccttttaataaacttcc

SEQ ID NO: 16770 - DNA, 50 bp, synthetic construct
  source 1..50: mol_type = other DNA
taacctaaaaaactaactcatcaataataatatttcaaaaaacrccaacc

SEQ ID NO: 16771 - DNA, 50 bp, synthetic construct
  source 1..50: mol_type = other DNA
actataaacaaaactaatcttctacaaaaatacaattaacaacractaac

SEQ ID NO: 16772 - DNA, 50 bp, synthetic construct
  source 1..50: mol_type = other DNA
tctaccrcacactacaaaaataaacaaataaatatttaaaaaacacatcc

SEQ ID NO: 16773 - DNA, 50 bp, synthetic construct
  source 1..50: mol_type = other DNA
cttcaaaactatactaaaaaccactacttaaataaaacrtaataactcac

SEQ ID NO: 16774 - DNA, 50 bp, synthetic construct
  source 1..50: mol_type = other DNA
taatatatcaaacttcaaaactatactaaaaaccactacttaaataaaac

SEQ ID NO: 16775 - DNA, 50 bp, synthetic construct
  source 1..50: mol_type = other DNA
ctactacctattaatacttactaccaaccrctataatacccatcccatcc

SEQ ID NO: 16776 - DNA, 50 bp, synthetic construct
  source 1..50: mol_type = other DNA
craccttctaaataataacacctactacctattaatacttactaccaacc

SEQ ID NO: 16777 - DNA, 50 bp, synthetic construct
  source 1..50: mol_type = other DNA
aaaaacccaaaattctatctttacaaattcccccaaataattctaatatc

SEQ ID NO: 16778 - DNA, 50 bp, synthetic construct
  source 1..50: mol_type = other DNA
cctaaaaaaatctacaaaaacaaaatcctaaacctctaccaactccaccc

SEQ ID NO: 16779 - DNA, 50 bp, synthetic construct
  source 1..50: mol_type = other DNA
acaaaaactcaaaaatttaacaaaaaccaataaatctacttaacaaaaac

SEQ ID NO: 16780 - DNA, 50 bp, synthetic construct
  source 1..50: mol_type = other DNA
aattcacccttaaaccttttaccaaacccactattctaaaacctaacacc

SEQ ID NO: 16781 - DNA, 50 bp, synthetic construct
  source 1..50: mol_type = other DNA
aaatactacctaaacaaatataccraaaacctttaaacctaatctattcc

SEQ ID NO: 16782 - DNA, 50 bp, synthetic construct
  source 1..50: mol_type = other DNA
catctaccacatcccaacctaataaaaaatactacctaaacaaatatacc

SEQ ID NO: 16783 - DNA, 50 bp, synthetic construct
  source 1..50: mol_type = other DNA
aaaacaaccttttaaccctaataaaaaatttcaatctcccccacaacatc

SEQ ID NO: 16784 - DNA, 50 bp, synthetic construct
  source 1..50: mol_type = other DNA
aaaatcaaatctcctaaatttaaatcccaactatatcattcaacaatttc

SEQ ID NO: 16785 - DNA, 50 bp, synthetic construct
  source 1..50: mol_type = other DNA
atcaaaaaatcaattaatattaacatctttcctttctacacctcctacac

SEQ ID NO: 16786 - DNA, 50 bp, synthetic construct
  source 1..50: mol_type = other DNA
atcaattaatattaacatctttcctttctacacctcctacacraataacc

SEQ ID NO: 16787 - DNA, 50 bp, synthetic construct
  source 1..50: mol_type = other DNA
aaaataaccacaacraaaaacaaaatcccratttatataaaccttactac

SEQ ID NO: 16788 - DNA, 50 bp, synthetic construct
  source 1..50: mol_type = other DNA
aatcacaactacactaaatctcaacacaacaacaaaaaatcccttacatc

SEQ ID NO: 16789 - DNA, 50 bp, synthetic construct
  source 1..50: mol_type = other DNA
aacaaacracaaaatctcctaactttacaaacaaaaatatttcaacaaac

SEQ ID NO: 16790 - DNA, 50 bp, synthetic construct
  source 1..50: mol_type = other DNA
aaaaaaacctctcaaccraaatacacccctacaaaaacaaataaccaaac

SEQ ID NO: 16791 - DNA, 50 bp, synthetic construct
  source 1..50: mol_type = other DNA
tccraaaatacaacccaaaaataaaaacctttcaaaaaaacctctcaacc

SEQ ID NO: 16792 - DNA, 50 bp, synthetic construct
  source 1..50: mol_type = other DNA
ataactaattacacaatacaaaccactaactatttataacracctcrtcc

SEQ ID NO: 16793 - DNA, 50 bp, synthetic construct
  source 1..50: mol_type = other DNA
aattataactaattacacaatacaaaccactaactatttataacracctc

SEQ ID NO: 16794 - DNA, 50 bp, synthetic construct
  source 1..50: mol_type = other DNA
tttaccaattataactaattacacaatacaaaccactaactatttataac

SEQ ID NO: 16795 - DNA, 50 bp, synthetic construct
  source 1..50: mol_type = other DNA
taataaaccaactcactcrcaactaaatttaaatatctataacaacctcc

SEQ ID NO: 16796 - DNA, 50 bp, synthetic construct
  source 1..50: mol_type = other DNA
actcaccatatactcaaataaacttactaaacaaaatcctaaccttcccc

SEQ ID NO: 16797 - DNA, 50 bp, synthetic construct
  source 1..50: mol_type = other DNA
tcaaataaacttactaaacaaaatcctaaccttccccractataaaacac

SEQ ID NO: 16798 - DNA, 50 bp, synthetic construct
  source 1..50: mol_type = other DNA
taccattactaaattttctaaacaacctcctcraacctctatttaacttc

SEQ ID NO: 16799 - DNA, 50 bp, synthetic construct
  source 1..50: mol_type = other DNA
ctcctcraacctctatttaacttcractataaaacacaaccttaactttc

SEQ ID NO: 16800 - DNA, 50 bp, synthetic construct
  source 1..50: mol_type = other DNA
aatccataaaaaacrtacttctaacctaaattatctatctaaaacaaaac

SEQ ID NO: 16801 - DNA, 50 bp, synthetic construct
  source 1..50: mol_type = other DNA
actcacctaaaaccacacaactaaaaataacaaaaacaaaataaaaaccc

SEQ ID NO: 16802 - DNA, 50 bp, synthetic construct
  source 1..50: mol_type = other DNA
aactctatatccacacccaaatctcatcttataactcccataattcccac

SEQ ID NO: 16803 - DNA, 50 bp, synthetic construct
  source 1..50: mol_type = other DNA
aataatacaaattcttaaacatcttttaactactaaccttttacatccac

SEQ ID NO: 16804 - DNA, 50 bp, synthetic construct
  source 1..50: mol_type = other DNA
tcccctaaacttatttctttaacttcattaaaacaactactttaaacccc

SEQ ID NO: 16805 - DNA, 50 bp, synthetic construct
  source 1..50: mol_type = other DNA
ctaccaacaatataaacacaaaataacctcaaaaaaacaaataaccactc

SEQ ID NO: 16806 - DNA, 50 bp, synthetic construct
  source 1..50: mol_type = other DNA
acaattccaacaaaaactaactacraaccaacataaccctcaaaactaac

SEQ ID NO: 16807 - DNA, 50 bp, synthetic construct
  source 1..50: mol_type = other DNA
caaataaccactcrccaacaaaacrtcaactctaaaaaccatactaattc

SEQ ID NO: 16808 - DNA, 50 bp, synthetic construct
  source 1..50: mol_type = other DNA
taacttataacaaacaaccacacacacccaaaattcaaaaaaatacaacc

SEQ ID NO: 16809 - DNA, 50 bp, synthetic construct
  source 1..50: mol_type = other DNA
acaaaaccrtcaataaacraaataatcataccraatactaaataaaactc

SEQ ID NO: 16810 - DNA, 50 bp, synthetic construct
  source 1..50: mol_type = other DNA
atatacaaaataaactaaacctaaccccrcctccaaaaacctacaaaacc

SEQ ID NO: 16811 - DNA, 50 bp, synthetic construct
  source 1..50: mol_type = other DNA
ataaaatatacctataattaaaaaaaacctcaactactcctaaaaaaaac

SEQ ID NO: 16812 - DNA, 50 bp, synthetic construct
  source 1..50: mol_type = other DNA
aaaaaataaatataaccttaaatacaaaaaacccrccaaccctaaacccc

SEQ ID NO: 16813 - DNA, 50 bp, synthetic construct
  source 1..50: mol_type = other DNA
tccraactcrctctctaaaaaataaatataaccttaaatacaaaaaaccc

SEQ ID NO: 16814 - DNA, 50 bp, synthetic construct
  source 1..50: mol_type = other DNA
tatactaaataataccrattcaataaacacracacractatatacataac

SEQ ID NO: 16815 - DNA, 50 bp, synthetic construct
  source 1..50: mol_type = other DNA
aaaatcttaaacaaatatactaaataataccrattcaataaacacracac

SEQ ID NO: 16816 - DNA, 50 bp, synthetic construct
  source 1..50: mol_type = other DNA
ctaaatcracatcactcaacacatttatttaaaattccatttttaaaacc

SEQ ID NO: 16817 - DNA, 50 bp, synthetic construct
  source 1..50: mol_type = other DNA
tatactaaaattttttattccctataacccaattactcacacaaaaaacc

SEQ ID NO: 16818 - DNA, 50 bp, synthetic construct
  source 1..50: mol_type = other DNA
aaaaaaatttcttcaaaaaaccrcctactcctacaaaaaactcrcctacc

SEQ ID NO: 16819 - DNA, 50 bp, synthetic construct
  source 1..50: mol_type = other DNA
aactccraaaaaaatttcttcaaaaaaccrcctactcctacaaaaaactc

SEQ ID NO: 16820 - DNA, 50 bp, synthetic construct
  source 1..50: mol_type = other DNA
aaaaaaaattaatacataaaaaataaaatacaaacctaccaaaattcccc

SEQ ID NO: 16821 - DNA, 50 bp, synthetic construct
  source 1..50: mol_type = other DNA
caactacaaaaattcaaaatcattaaataaataaataacccaactcttcc

SEQ ID NO: 16822 - DNA, 50 bp, synthetic construct
  source 1..50: mol_type = other DNA
aataacaactacrcaacctataaatactaacccraacctataattcaccc

SEQ ID NO: 16823 - DNA, 50 bp, synthetic construct
  source 1..50: mol_type = other DNA
aatatttaaccrtttacatcccctaattcataaatactaaacactaaacc

SEQ ID NO: 16824 - DNA, 50 bp, synthetic construct
  source 1..50: mol_type = other DNA
cctaaaaaaccracccaatactcaacacccataaatcaaaaaatataaac

SEQ ID NO: 16825 - DNA, 50 bp, synthetic construct
  source 1..50: mol_type = other DNA
aaccraataacccattactaaaatcaaaactcttcaacaattcttttccc

SEQ ID NO: 16826 - DNA, 50 bp, synthetic construct
  source 1..50: mol_type = other DNA
rttccccatatttataaatatcaatacttacaactacratcccaaaaaac

SEQ ID NO: 16827 - DNA, 50 bp, synthetic construct
  source 1..50: mol_type = other DNA
tcrccaactataaattctcacccaaaactatcrataaaaaaacaacatac

SEQ ID NO: 16828 - DNA, 50 bp, synthetic construct
  source 1..50: mol_type = other DNA
taaaacaaaataactaaatcrccaactataaattctcacccaaaactatc

SEQ ID NO: 16829 - DNA, 50 bp, synthetic construct
  source 1..50: mol_type = other DNA
aaataacttcaattataacttccatcaccctaaaacaaaataactaaatc

SEQ ID NO: 16830 - DNA, 50 bp, synthetic construct
  source 1..50: mol_type = other DNA
taaaaactacaactaaaatcacctaactttcaaaaaattcttttataacc

SEQ ID NO: 16831 - DNA, 50 bp, synthetic construct
  source 1..50: mol_type = other DNA
aactacaactaaaatcacctaactttcaaaaaattcttttataaccraac

SEQ ID NO: 16832 - DNA, 50 bp, synthetic construct
  source 1..50: mol_type = other DNA
ctacaactaaaatcacctaactttcaaaaaattcttttataaccraacrc

SEQ ID NO: 16833 - DNA, 50 bp, synthetic construct
  source 1..50: mol_type = other DNA
aatcacctaactttcaaaaaattcttttataaccraacrcrataactcac

SEQ ID NO: 16834 - DNA, 50 bp, synthetic construct
  source 1..50: mol_type = other DNA
ttttactatattaaccaaacttatctcraactcctaacctcaactaatcc

SEQ ID NO: 16835 - DNA, 50 bp, synthetic construct
  source 1..50: mol_type = other DNA
tcctcttctaaatacatataaaataaataaactaaaaaaatctactctac

SEQ ID NO: 16836 - DNA, 50 bp, synthetic construct
  source 1..50: mol_type = other DNA
tacracaaaaaatacatccttctctcttaaaaacactccaaaactaaacc

SEQ ID NO: 16837 - DNA, 50 bp, synthetic construct
  source 1..50: mol_type = other DNA
ctaactaatctaaacaaaccaccacraccctaaaactacaaaaaaatatc

SEQ ID NO: 16838 - DNA, 50 bp, synthetic construct
  source 1..50: mol_type = other DNA
tactaaattaaccccaacctaactcctaactaatctaaacaaaccaccac

SEQ ID NO: 16839 - DNA, 50 bp, synthetic construct
  source 1..50: mol_type = other DNA
aaacttacccaatcacccaacaaaaacataaaaacrctaaaatctaaacc

SEQ ID NO: 16840 - DNA, 50 bp, synthetic construct
  source 1..50: mol_type = other DNA
aataataaactaaactcaaacctcaaaaaatacccractcaaaccccaac

SEQ ID NO: 16841 - DNA, 50 bp, synthetic construct
  source 1..50: mol_type = other DNA
cacataacttaaaatttccaattctaaaaacattaatcaactcccrctcc

SEQ ID NO: 16842 - DNA, 50 bp, synthetic construct
  source 1..50: mol_type = other DNA
ctccrtacccratactacacrtaactctaaaactaaatataatataaatc

SEQ ID NO: 16843 - DNA, 50 bp, synthetic construct
  source 1..50: mol_type = other DNA
aaaattaacataaaactaaaacctctaaccctaaatattaacacctaatc

SEQ ID NO: 16844 - DNA, 50 bp, synthetic construct
  source 1..50: mol_type = other DNA
taaaacctctaaccctaaatattaacacctaatcraataaccccaattcc

SEQ ID NO: 16845 - DNA, 50 bp, synthetic construct
  source 1..50: mol_type = other DNA
ctaaatattaacacctaatcraataaccccaattccrtctatctctaaac

SEQ ID NO: 16846 - DNA, 50 bp, synthetic construct
  source 1..50: mol_type = other DNA
acaaaaacctatctattaaacacaaaacccacaaccatttcctacataac

SEQ ID NO: 16847 - DNA, 50 bp, synthetic construct
  source 1..50: mol_type = other DNA
aaaaacatacrctctaccactctaaatatatatacctaaaaaactacctc

SEQ ID NO: 16848 - DNA, 50 bp, synthetic construct
  source 1..50: mol_type = other DNA
actttccattcttcattatcrtttcrtataaatcraaattcctaaaatac

SEQ ID NO: 16849 - DNA, 50 bp, synthetic construct
  source 1..50: mol_type = other DNA
ttatttaaaacaccaaactttccattcttcattatcrtttcrtataaatc

SEQ ID NO: 16850 - DNA, 50 bp, synthetic construct
  source 1..50: mol_type = other DNA
tctatccatttatttaaaacaccaaactttccattcttcattatcrtttc

SEQ ID NO: 16851 - DNA, 50 bp, synthetic construct
  source 1..50: mol_type = other DNA
ataaaaaaaatcaaatttattcttatccrtctcaattcaaaaaactaaac

SEQ ID NO: 16852 - DNA, 50 bp, synthetic construct
  source 1..50: mol_type = other DNA
taaaacraacaaaaataaacctaacttcccccacaaataaatctacaaac

SEQ ID NO: 16853 - DNA, 50 bp, synthetic construct
  source 1..50: mol_type = other DNA
taaaactaaattaacrtaaaaacctaacttctctccactcracraaaatc

SEQ ID NO: 16854 - DNA, 50 bp, synthetic construct
  source 1..50: mol_type = other DNA
ctacaaacrtcacttattcattctcraatattctattactcacratcttc

SEQ ID NO: 16855 - DNA, 50 bp, synthetic construct
  source 1..50: mol_type = other DNA
actcataaattaaaactaaattaacrtaaaaacctaacttctctccactc

SEQ ID NO: 16856 - DNA, 50 bp, synthetic construct
  source 1..50: mol_type = other DNA
rttcttttattacaatctcaatttaactcataaattaaaactaaattaac

SEQ ID NO: 16857 - DNA, 50 bp, synthetic construct
  source 1..50: mol_type = other DNA
rttaatccaattctaactcataaatcaaactaaaactacaacaaaaaaac

SEQ ID NO: 16858 - DNA, 50 bp, synthetic construct
  source 1..50: mol_type = other DNA
ttttaaaaacrtattataaaaccaaactactctaaaactctttaaaaacc

SEQ ID NO: 16859 - DNA, 50 bp, synthetic construct
  source 1..50: mol_type = other DNA
taaaaaaatcractcccaaaaaattccaaaacaacctaattccacaacac

SEQ ID NO: 16860 - DNA, 50 bp, synthetic construct
  source 1..50: mol_type = other DNA
acacacctcaaacttaaataaaactttcaaatctacaacacaatcccaac

SEQ ID NO: 16861 - DNA, 50 bp, synthetic construct
  source 1..50: mol_type = other DNA
aacttaaataaaactttcaaatctacaacacaatcccaacrttcaacaac

SEQ ID NO: 16862 - DNA, 50 bp, synthetic construct
  source 1..50: mol_type = other DNA
tttcaaatctacaacacaatcccaacrttcaacaacracaaaaaaattcc

SEQ ID NO: 16863 - DNA, 50 bp, synthetic construct
  source 1..50: mol_type = other DNA
aaacratatctacaacccataatatcaaacccatacrtacrtatacatac

SEQ ID NO: 16864 - DNA, 50 bp, synthetic construct
  source 1..50: mol_type = other DNA
acccctactcatacctatttctaaataataaatacaaaaaacacacaacc

SEQ ID NO: 16865 - DNA, 50 bp, synthetic construct
  source 1..50: mol_type = other DNA
aaataaccttaaacrcaaaattaccaatactactattaatattcctctcc

SEQ ID NO: 16866 - DNA, 50 bp, synthetic construct
  source 1..50: mol_type = other DNA
actatacaaaaacrtaaacracactaaaacaaaatccraataaaatcccc

SEQ ID NO: 16867 - DNA, 50 bp, synthetic construct
  source 1..50: mol_type = other DNA
ctataaatacaatactatacaaaaacrtaaacracactaaaacaaaatcc

SEQ ID NO: 16868 - DNA, 50 bp, synthetic construct
  source 1..50: mol_type = other DNA
aaactaactcataaatacctataaatacaatactatacaaaaacrtaaac

SEQ ID NO: 16869 - DNA, 50 bp, synthetic construct
  source 1..50: mol_type = other DNA
taattaaaactaactcataaatacctataaatacaatactatacaaaaac

SEQ ID NO: 16870 - DNA, 50 bp, synthetic construct
  source 1..50: mol_type = other DNA
ttcttatctaaataatttacaacatcctccctacctaaaacccaaacaac

SEQ ID NO: 16871 - DNA, 50 bp, synthetic construct
  source 1..50: mol_type = other DNA
aattaataaattaaaaaaatacccrtaatatcttcaactaaaaaacccrc

SEQ ID NO: 16872 - DNA, 50 bp, synthetic construct
  source 1..50: mol_type = other DNA
aaaattaataaattaaaaaaatacccrtaatatcttcaactaaaaaaccc

SEQ ID NO: 16873 - DNA, 50 bp, synthetic construct
  source 1..50: mol_type = other DNA
taaaaacttactaaaaacracatcctatactaactcacaaacraccatcc

SEQ ID NO: 16874 - DNA, 50 bp, synthetic construct
  source 1..50: mol_type = other DNA
atccaaaaactctacctaccttcccttactactaaaaacttactaaaaac

SEQ ID NO: 16875 - DNA, 50 bp, synthetic construct
  source 1..50: mol_type = other DNA
aaacaaacaaaacccttaaacacctacraaccaaactctaaaaaataccc

SEQ ID NO: 16876 - DNA, 50 bp, synthetic construct
  source 1..50: mol_type = other DNA
aaaaacaaaaaaaatccaacaacctcaaaactataaacrataccaacccc

SEQ ID NO: 16877 - DNA, 50 bp, synthetic construct
  source 1..50: mol_type = other DNA
acaacctcaaaactataaacrataccaaccccrtaattaacatatcaacc

SEQ ID NO: 16878 - DNA, 50 bp, synthetic construct
  source 1..50: mol_type = other DNA
aatataactaaaaacacaaccttatttccaaacaaaacaataaacaaacc

SEQ ID NO: 16879 - DNA, 50 bp, synthetic construct
  source 1..50: mol_type = other DNA
atctcaactatatacattcttatcattaaattaccccatcttataaccac

SEQ ID NO: 16880 - DNA, 50 bp, synthetic construct
  source 1..50: mol_type = other DNA
tccctaaacatccrcaaaaaatcaaaaaatattaataaaacaatatcccc

SEQ ID NO: 16881 - DNA, 50 bp, synthetic construct
  source 1..50: mol_type = other DNA
taacttcatacttacccccaaaatacctaaacccacaaaaattcttaaac

SEQ ID NO: 16882 - DNA, 50 bp, synthetic construct
  source 1..50: mol_type = other DNA
tcataaaacaaacaataaacaaaactatactaaaaaaaaccaaacctccc

SEQ ID NO: 16883 - DNA, 50 bp, synthetic construct
  source 1..50: mol_type = other DNA
caaaactatactaaaaaaaaccaaacctcccrtctaacatataacttcac

SEQ ID NO: 16884 - DNA, 50 bp, synthetic construct
  source 1..50: mol_type = other DNA
atatatatctttaattcctctaacaccrctaaattaaaatctccaaaacc

SEQ ID NO: 16885 - DNA, 50 bp, synthetic construct
  source 1..50: mol_type = other DNA
taattcctctaacaccrctaaattaaaatctccaaaaccraactaatctc

SEQ ID NO: 16886 - DNA, 50 bp, synthetic construct
  source 1..50: mol_type = other DNA
tttccctaaattccctaaaccactcttacaaatcaattaaacrcaaaacc

SEQ ID NO: 16887 - DNA, 50 bp, synthetic construct
  source 1..50: mol_type = other DNA
acaaaaacactaacaaaaaacaaaccctcctcctcctactttctaaacac

SEQ ID NO: 16888 - DNA, 50 bp, synthetic construct
  source 1..50: mol_type = other DNA
cataacctactataaaaataacctccrtaacaaaacraccacaatacrac

SEQ ID NO: 16889 - DNA, 50 bp, synthetic construct
  source 1..50: mol_type = other DNA
aaacataacctactataaaaataacctccrtaacaaaacraccacaatac

SEQ ID NO: 16890 - DNA, 50 bp, synthetic construct
  source 1..50: mol_type = other DNA
attaaaaaactaaacataacctactataaaaataacctccrtaacaaaac

SEQ ID NO: 16891 - DNA, 50 bp, synthetic construct
  source 1..50: mol_type = other DNA
taactcraaaattaaaaaactaaacataacctactataaaaataacctcc

SEQ ID NO: 16892 - DNA, 50 bp, synthetic construct
  source 1..50: mol_type = other DNA
tattacraaaactattttcacaacaaatcatatccaacttctcaatcttc

SEQ ID NO: 16893 - DNA, 50 bp, synthetic construct
  source 1..50: mol_type = other DNA
cctctataatcactaacactatcrataataaatcctaaataaaacccaac

SEQ ID NO: 16894 - DNA, 50 bp, synthetic construct
  source 1..50: mol_type = other DNA
atcccatacaaactcaaaactacccctcctctataatcactaacactatc

SEQ ID NO: 16895 - DNA, 50 bp, synthetic construct
  source 1..50: mol_type = other DNA
ttaaatacttccaatactacratatcctaaaccccaacctatatcacccc

SEQ ID NO: 16896 - DNA, 50 bp, synthetic construct
  source 1..50: mol_type = other DNA
acctacataaaataaaaaacraaataacacaaactaaaatccaaaacacc

SEQ ID NO: 16897 - DNA, 50 bp, synthetic construct
  source 1..50: mol_type = other DNA
aatcaaaatcrcaaactaaaaaataaattccaatccctctcaccaacacc

SEQ ID NO: 16898 - DNA, 50 bp, synthetic construct
  source 1..50: mol_type = other DNA
tcctataattcttcttttatattctcctctaccctcttccctttttacac

SEQ ID NO: 16899 - DNA, 50 bp, synthetic construct
  source 1..50: mol_type = other DNA
taatacttcaaaaacaacraattatacttaaaactcttaccrcaaacctc

SEQ ID NO: 16900 - DNA, 50 bp, synthetic construct
  source 1..50: mol_type = other DNA
taaatacrctaatacttcaaaaacaacraattatacttaaaactcttacc

SEQ ID NO: 16901 - DNA, 50 bp, synthetic construct
  source 1..50: mol_type = other DNA
accaaaccrcacaaatacraaacctacracaaaaatttcaaatataactc

SEQ ID NO: 16902 - DNA, 50 bp, synthetic construct
  source 1..50: mol_type = other DNA
aacctacracaaaaatttcaaatataactcrctactcctaaaacaccaac

SEQ ID NO: 16903 - DNA, 50 bp, synthetic construct
  source 1..50: mol_type = other DNA
ttctaaaatcataaaaaattaaaactatactcccaaccaaaaactaaacc

SEQ ID NO: 16904 - DNA, 50 bp, synthetic construct
  source 1..50: mol_type = other DNA
ccaccrattctataataattttcataacaactcaaactaaataaaactcc

SEQ ID NO: 16905 - DNA, 50 bp, synthetic construct
  source 1..50: mol_type = other DNA
aatccctataataccatctaaattcactaataaacaaaaaacaatcaatc

SEQ ID NO: 16906 - DNA, 50 bp, synthetic construct
  source 1..50: mol_type = other DNA
accaactcccataactatcaacaaatcaataaatataattttaaaccacc

SEQ ID NO: 16907 - DNA, 50 bp, synthetic construct
  source 1..50: mol_type = other DNA
aatataaacactatcaaaatcaacttactacaactaatctccrcaattac

SEQ ID NO: 16908 - DNA, 50 bp, synthetic construct
  source 1..50: mol_type = other DNA
aatcaacttactacaactaatctccrcaattacrctaaaaactctaacac

SEQ ID NO: 16909 - DNA, 50 bp, synthetic construct
  source 1..50: mol_type = other DNA
aaactctaacacrtataaaactaacaaacrtaaaaacaacccaccttaac

SEQ ID NO: 16910 - DNA, 50 bp, synthetic construct
  source 1..50: mol_type = other DNA
aacaaacrtaaaaacaacccaccttaacraaaaacaaaatcacctaaacc

SEQ ID NO: 16911 - DNA, 50 bp, synthetic construct
  source 1..50: mol_type = other DNA
attcttcctctccttccrtaaactactaaatcaaaaactatatccctaac

SEQ ID NO: 16912 - DNA, 50 bp, synthetic construct
  source 1..50: mol_type = other DNA
aataacaaaaaacacctaaacactcccttttaacttaaaaaatttaaaac

SEQ ID NO: 16913 - DNA, 50 bp, synthetic construct
  source 1..50: mol_type = other DNA
ttaaaacrtcttcactaaccctaaacctaaaaaacaatacctaaacaaac

SEQ ID NO: 16914 - DNA, 50 bp, synthetic construct
  source 1..50: mol_type = other DNA
ccctaaacctaaaaaacaatacctaaacaaacrtaaaaacccaaaaccac

SEQ ID NO: 16915 - DNA, 50 bp, synthetic construct
  source 1..50: mol_type = other DNA
crccracaaaacctatactttcactaaaatacaaatcttcctactacctc

SEQ ID NO: 16916 - DNA, 50 bp, synthetic construct
  source 1..50: mol_type = other DNA
atactttcactaaaatacaaatcttcctactacctcraactcaaattccc

SEQ ID NO: 16917 - DNA, 50 bp, synthetic construct
  source 1..50: mol_type = other DNA
aacttatcctatattatttatatcrtttattcacccaacccacraactac

SEQ ID NO: 16918 - DNA, 50 bp, synthetic construct
  source 1..50: mol_type = other DNA
tccccacaacttatcctatattatttatatcrtttattcacccaacccac

SEQ ID NO: 16919 - DNA, 50 bp, synthetic construct
  source 1..50: mol_type = other DNA
aacacraatcactcacttttccccacaacttatcctatattatttatatc

SEQ ID NO: 16920 - DNA, 50 bp, synthetic construct
  source 1..50: mol_type = other DNA
ctacaaaccctaataaacaatctatatacraaacaatccccctaaaactc

SEQ ID NO: 16921 - DNA, 50 bp, synthetic construct
  source 1..50: mol_type = other DNA
tacacaataccaaattaaaaaaaaacccaccctatcattctaccctatac

SEQ ID NO: 16922 - DNA, 50 bp, synthetic construct
  source 1..50: mol_type = other DNA
aaaaaaaccaaaaactaccttaattaaaacttaaacaaccaaactaaaac

SEQ ID NO: 16923 - DNA, 50 bp, synthetic construct
  source 1..50: mol_type = other DNA
cttaattaaaacttaaacaaccaaactaaaacraaacaacccaaataaac

SEQ ID NO: 16924 - DNA, 50 bp, synthetic construct
  source 1..50: mol_type = other DNA
ctaaaaaacactaaaccttcataaccacaaaaaatcttttaataccaacc

SEQ ID NO: 16925 - DNA, 50 bp, synthetic construct
  source 1..50: mol_type = other DNA
tcaaaaaccactacccaaaaaaaatccattcccctataacttaaaacccc

SEQ ID NO: 16926 - DNA, 50 bp, synthetic construct
  source 1..50: mol_type = other DNA
actaaaaccaccctcacttacccaaaaatccaaattatatttaatattcc

SEQ ID NO: 16927 - DNA, 50 bp, synthetic construct
  source 1..50: mol_type = other DNA
tatttaatattccraaacaaaccccccaccattacaacaaaataaataac

SEQ ID NO: 16928 - DNA, 50 bp, synthetic construct
  source 1..50: mol_type = other DNA
attacaacaaaataaataacrtatataaattaaaccttctcaaacaaaac

SEQ ID NO: 16929 - DNA, 50 bp, synthetic construct
  source 1..50: mol_type = other DNA
tacaacaaaataaataacrtatataaattaaaccttctcaaacaaaacrc

SEQ ID NO: 16930 - DNA, 50 bp, synthetic construct
  source 1..50: mol_type = other DNA
catatcaattacacctataatatcaaacaataaaaaactaaaatcatcac

SEQ ID NO: 16931 - DNA, 50 bp, synthetic construct
  source 1..50: mol_type = other DNA
cctcaaaataaaacataatccactaacaaccaaaaaaacccaactaaacc

SEQ ID NO: 16932 - DNA, 50 bp, synthetic construct
  source 1..50: mol_type = other DNA
rtaaattaaaaccaactactctaaactaaataataactcaaaacccctac

SEQ ID NO: 16933 - DNA, 50 bp, synthetic construct
  source 1..50: mol_type = other DNA
ctttaaatctccaaactaaaaataaaaatacaaaactaaccccaaatacc

SEQ ID NO: 16934 - DNA, 50 bp, synthetic construct
  source 1..50: mol_type = other DNA
tcttaaaaaactacaaatatcrttccacrttaaaacaaaaaactcaaacc

SEQ ID NO: 16935 - DNA, 50 bp, synthetic construct
  source 1..50: mol_type = other DNA
raatcctacctacatataatccaataaaaaaaacaaactaatctaccccc

SEQ ID NO: 16936 - DNA, 50 bp, synthetic construct
  source 1..50: mol_type = other DNA
ccaccrtactaaactatcctaaaaaaccctaaaaaacaaatacratactc

SEQ ID NO: 16937 - DNA, 50 bp, synthetic construct
  source 1..50: mol_type = other DNA
caactaacccccaaaattaaatctaaacttaacaaacaacaccctaaatc

SEQ ID NO: 16938 - DNA, 50 bp, synthetic construct
  source 1..50: mol_type = other DNA
ctatcatccaaccaataaactcrtcctatctcraaaccttaaaatctacc

SEQ ID NO: 16939 - DNA, 50 bp, synthetic construct
  source 1..50: mol_type = other DNA
tccaaaccctataaacaccaaaataccrctatcatccaaccaataaactc

SEQ ID NO: 16940 - DNA, 50 bp, synthetic construct
  source 1..50: mol_type = other DNA
ctacaaaaactaaaaactacrcttccaaaccctataaacaccaaaatacc

SEQ ID NO: 16941 - DNA, 50 bp, synthetic construct
  source 1..50: mol_type = other DNA
cccactaactaaataacaacracatcctaatacccacaaaacctaaaaac

SEQ ID NO: 16942 - DNA, 50 bp, synthetic construct
  source 1..50: mol_type = other DNA
caaatccacccrctatctactcctcacaaaaccaacacaataataaaacc

SEQ ID NO: 16943 - DNA, 50 bp, synthetic construct
  source 1..50: mol_type = other DNA
aataaataatatcctaaaacrccccaaacctaaaaaattcttccraaacc

SEQ ID NO: 16944 - DNA, 50 bp, synthetic construct
  source 1..50: mol_type = other DNA
taaaaaaataaataatatcctaaaacrccccaaacctaaaaaattcttcc

SEQ ID NO: 16945 - DNA, 50 bp, synthetic construct
  source 1..50: mol_type = other DNA
cccaaaaacaaaaccaaatcractccraaaaaacctttcaaacctaaaac

SEQ ID NO: 16946 - DNA, 50 bp, synthetic construct
  source 1..50: mol_type = other DNA
atcccactcacctccaaaaattaataaatacccttaaacctattcttatc

SEQ ID NO: 16947 - DNA, 50 bp, synthetic construct
  source 1..50: mol_type = other DNA
actatccccacaaacccaaaaacacatcaataacctatataaaaacctcc

SEQ ID NO: 16948 - DNA, 50 bp, synthetic construct
  source 1..50: mol_type = other DNA
aatcttcatacaaatcactaatatacctctaaacctataaaaacaacaac

SEQ ID NO: 16949 - DNA, 50 bp, synthetic construct
  source 1..50: mol_type = other DNA
aaactaaaaccraatacaactcccaactaaaccraatctacctaatatac

SEQ ID NO: 16950 - DNA, 50 bp, synthetic construct
  source 1..50: mol_type = other DNA
aaaataaactcttcccaaaactaaaaccraatacaactcccaactaaacc

SEQ ID NO: 16951 - DNA, 50 bp, synthetic construct
  source 1..50: mol_type = other DNA
tctaaaaaatttaaacaccccccattataaaaattctaataccccctcac

SEQ ID NO: 16952 - DNA, 50 bp, synthetic construct
  source 1..50: mol_type = other DNA
aatctcataccaaactcaaaaaccatacataaaaaccaaaaaatatcttc

SEQ ID NO: 16953 - DNA, 50 bp, synthetic construct
  source 1..50: mol_type = other DNA
crcraaacttaacctcaaaataactactaacccaaaacttctaaaaaaac

SEQ ID NO: 16954 - DNA, 50 bp, synthetic construct
  source 1..50: mol_type = other DNA
ccctaactattccraaatctcacactatacctcaacaaaataacaacccc

SEQ ID NO: 16955 - DNA, 50 bp, synthetic construct
  source 1..50: mol_type = other DNA
tacctacaaaaacraaactaccactctactaaaacacaatataaaatccc

SEQ ID NO: 16956 - DNA, 50 bp, synthetic construct
  source 1..50: mol_type = other DNA
acaaaaacctaactaaaataaactccacrtaaatcctaaaccttaacccc

SEQ ID NO: 16957 - DNA, 50 bp, synthetic construct
  source 1..50: mol_type = other DNA
aatccacracaactaaaaactaaaaaccraaaccaaaatccaaaacccac

SEQ ID NO: 16958 - DNA, 50 bp, synthetic construct
  source 1..50: mol_type = other DNA
aatataattacctcaacccacaacaaaacacaataaaccaacctaacccc

SEQ ID NO: 16959 - DNA, 50 bp, synthetic construct
  source 1..50: mol_type = other DNA
ctctccacccaaatacttactaaccaataaaatacaaatcaaatcccatc

SEQ ID NO: 16960 - DNA, 50 bp, synthetic construct
  source 1..50: mol_type = other DNA
caataaaatacaaatcaaatcccatcrtaactaccccttaaaaacctacc

SEQ ID NO: 16961 - DNA, 50 bp, synthetic construct
  source 1..50: mol_type = other DNA
aaaaatcactaacttaaccraatcacccrtttacraaatttctataaatc

SEQ ID NO: 16962 - DNA, 50 bp, synthetic construct
  source 1..50: mol_type = other DNA
aaaacaaaaattaaataaccaccataacttcccctctacacraaaaacac

SEQ ID NO: 16963 - DNA, 50 bp, synthetic construct
  source 1..50: mol_type = other DNA
actacccaacccctaccctttactataaaaaacaactctaaatactatac

SEQ ID NO: 16964 - DNA, 50 bp, synthetic construct
  source 1..50: mol_type = other DNA
cccctaccctttactataaaaaacaactctaaatactatacrtatacaac

SEQ ID NO: 16965 - DNA, 50 bp, synthetic construct
  source 1..50: mol_type = other DNA
cctttactataaaaaacaactctaaatactatacrtatacaacrctcacc

SEQ ID NO: 16966 - DNA, 50 bp, synthetic construct
  source 1..50: mol_type = other DNA
ataaaaaacaactctaaatactatacrtatacaacrctcaccrtaataac

SEQ ID NO: 16967 - DNA, 50 bp, synthetic construct
  source 1..50: mol_type = other DNA
aaaattatataaaaaaaacrccaactaaacrctatccatacaccaacaac

SEQ ID NO: 16968 - DNA, 50 bp, synthetic construct
  source 1..50: mol_type = other DNA
ataccttcattaataaaataccaataaaaataacaccaaacaaaaatctc

SEQ ID NO: 16969 - DNA, 50 bp, synthetic construct
  source 1..50: mol_type = other DNA
accttcattaataaaataccaataaaaataacaccaaacaaaaatctcrc

SEQ ID NO: 16970 - DNA, 50 bp, synthetic construct
  source 1..50: mol_type = other DNA
aaaataccaataaaaataacaccaaacaaaaatctcrcraaccaaacccc

SEQ ID NO: 16971 - DNA, 50 bp, synthetic construct
  source 1..50: mol_type = other DNA
aacctacaaattaataacrccraacacataaaaatacaaactacraaacc

SEQ ID NO: 16972 - DNA, 50 bp, synthetic construct
  source 1..50: mol_type = other DNA
cactacctctaaacctaatatataaaaataaaaactctatccrtttaccc

SEQ ID NO: 16973 - DNA, 50 bp, synthetic construct
  source 1..50: mol_type = other DNA
taaataaccactacctctaaacctaatatataaaaataaaaactctatcc

SEQ ID NO: 16974 - DNA, 50 bp, synthetic construct
  source 1..50: mol_type = other DNA
aaaccaataactccaaaaaaaatctcaatctaaactccctataaaaaaac

SEQ ID NO: 16975 - DNA, 50 bp, synthetic construct
  source 1..50: mol_type = other DNA
aaaattaacaactacacaactccraatctactaaaaccactaaattaaac

SEQ ID NO: 16976 - DNA, 50 bp, synthetic construct
  source 1..50: mol_type = other DNA
cacaccattcacccattcaaaacrtccaattcaataatttcaataaattc

SEQ ID NO: 16977 - DNA, 50 bp, synthetic construct
  source 1..50: mol_type = other DNA
atataactatcaattccaaaatattttctcacccaacccctaacaacacc

SEQ ID NO: 16978 - DNA, 50 bp, synthetic construct
  source 1..50: mol_type = other DNA
ccttaaaaaaacctaaaacraacaacctattactcatactctacataacc

SEQ ID NO: 16979 - DNA, 50 bp, synthetic construct
  source 1..50: mol_type = other DNA
ctccctctaaaacaaaaccraccatataaaacataaacaacaaactaccc

SEQ ID NO: 16980 - DNA, 50 bp, synthetic construct
  source 1..50: mol_type = other DNA
tctttaacaatactatacccaaccrctttacctatataactaattcattc

SEQ ID NO: 16981 - DNA, 50 bp, synthetic construct
  source 1..50: mol_type = other DNA
acaaaataaatatactactataactctctttaacaatactatacccaacc

SEQ ID NO: 16982 - DNA, 50 bp, synthetic construct
  source 1..50: mol_type = other DNA
caacactatcaaaaaaaaccacaacaatacatccaccctaccccaaaacc

SEQ ID NO: 16983 - DNA, 50 bp, synthetic construct
  source 1..50: mol_type = other DNA
ttacccaactaaataaatttcataataccccraactcatctccttcaaac

SEQ ID NO: 16984 - DNA, 50 bp, synthetic construct
  source 1..50: mol_type = other DNA
aaaacaaaaccaacaaaaccaaccacrtaaaactaaaatctactctaatc

SEQ ID NO: 16985 - DNA, 50 bp, synthetic construct
  source 1..50: mol_type = other DNA
aaaaccraacracccaaactaaaccaaacaactaaactacaaaaataacc

SEQ ID NO: 16986 - DNA, 50 bp, synthetic construct
  source 1..50: mol_type = other DNA
aaattttacraaatatataactctataaatactttattaaaacccaaacc

SEQ ID NO: 16987 - DNA, 50 bp, synthetic construct
  source 1..50: mol_type = other DNA
ccccttcccracttaaaccccaacaaaatatttacaaaatcatatatttc

SEQ ID NO: 16988 - DNA, 50 bp, synthetic construct
  source 1..50: mol_type = other DNA
taacataactatatcraaaaataactattcccrctaaacccaaacaaaac

SEQ ID NO: 16989 - DNA, 50 bp, synthetic construct
  source 1..50: mol_type = other DNA
caccaaaataactaacrataacataactatatcraaaaataactattccc

SEQ ID NO: 16990 - DNA, 50 bp, synthetic construct
  source 1..50: mol_type = other DNA
tttacttaaacttaacraaaacaatcacttcccratacaattatactatc

SEQ ID NO: 16991 - DNA, 50 bp, synthetic construct
  source 1..50: mol_type = other DNA
cccratacaattatactatcrctaatcattctaatataaaaataacttcc

SEQ ID NO: 16992 - DNA, 50 bp, synthetic construct
  source 1..50: mol_type = other DNA
aattaacacttaaccaatttcatcaacttattatatcataacatacaacc

SEQ ID NO: 16993 - DNA, 50 bp, synthetic construct
  source 1..50: mol_type = other DNA
tacraaaataaacaacaacctaacrctctaacaattccrttcaaataatc

SEQ ID NO: 16994 - DNA, 50 bp, synthetic construct
  source 1..50: mol_type = other DNA
raaaataaacaacaacctaacrctctaacaattccrttcaaataatcrcc

SEQ ID NO: 16995 - DNA, 50 bp, synthetic construct
  source 1..50: mol_type = other DNA
craaaatccaaacatacaaatcraaaataaacacraccraaccataaacc

SEQ ID NO: 16996 - DNA, 50 bp, synthetic construct
  source 1..50: mol_type = other DNA
rcaaataaacraaataacrctaaacttctaaaaccaaaacaaactatccc

SEQ ID NO: 16997 - DNA, 50 bp, synthetic construct
  source 1..50: mol_type = other DNA
aataaacraaataacrctaaacttctaaaaccaaaacaaactatcccrac

SEQ ID NO: 16998 - DNA, 50 bp, synthetic construct
  source 1..50: mol_type = other DNA
aaaaactactaacccraaaacacaatactattccaaataaatacrataac

SEQ ID NO: 16999 - DNA, 50 bp, synthetic construct
  source 1..50: mol_type = other DNA
taacaaaaaaactactaacccraaaacacaatactattccaaataaatac

SEQ ID NO: 17000 - DNA, 50 bp, synthetic construct
  source 1..50: mol_type = other DNA
aaaaaaaaactctataacracctaacctttaacaaaaaaactactaaccc

SEQ ID NO: 17001 - DNA, 50 bp, synthetic construct
  source 1..50: mol_type = other DNA
ataacaataactataattataccactactctccaacctaaacaactaaac

SEQ ID NO: 17002 - DNA, 50 bp, synthetic construct
  source 1..50: mol_type = other DNA
caattatccaaactaaaaaacaataatacaaccacaactactaccacctc

SEQ ID NO: 17003 - DNA, 50 bp, synthetic construct
  source 1..50: mol_type = other DNA
ataataattataaacactcctaacaccatcaaaaccaaaactttctcatc

SEQ ID NO: 17004 - DNA, 50 bp, synthetic construct
  source 1..50: mol_type = other DNA
cctctaataactacttttaactaaaacaaaaatatacaccttcaaaaccc

SEQ ID NO: 17005 - DNA, 50 bp, synthetic construct
  source 1..50: mol_type = other DNA
acaaacactaaaaaaaatacaccaactaaacaaaaatctaaaaacaaccc

SEQ ID NO: 17006 - DNA, 50 bp, synthetic construct
  source 1..50: mol_type = other DNA
cttctaaactcrtactctataactaaaaatactcraccaactcacctaac

SEQ ID NO: 17007 - DNA, 50 bp, synthetic construct
  source 1..50: mol_type = other DNA
aaacctcttctcacctcttctaaactcrtactctataactaaaaatactc

SEQ ID NO: 17008 - DNA, 50 bp, synthetic construct
  source 1..50: mol_type = other DNA
cctttaataataccrataaacctaaacctcttctcacctcttctaaactc

SEQ ID NO: 17009 - DNA, 50 bp, synthetic construct
  source 1..50: mol_type = other DNA
actccaaaaaacaaatctaacactaactataaaaatcaacaactcctaac

SEQ ID NO: 17010 - DNA, 50 bp, synthetic construct
  source 1..50: mol_type = other DNA
ataaaaaccctaaatactactaataaataacaaatatacaaaaaatcccc

SEQ ID NO: 17011 - DNA, 50 bp, synthetic construct
  source 1..50: mol_type = other DNA
aaaaaccctaaatactactaataaataacaaatatacaaaaaatccccrc

SEQ ID NO: 17012 - DNA, 50 bp, synthetic construct
  source 1..50: mol_type = other DNA
taaaaaaaccactacaatattacaatcccaaaatttctatacaatatatc

SEQ ID NO: 17013 - DNA, 50 bp, synthetic construct
  source 1..50: mol_type = other DNA
tacaatcccaaaatttctatacaatatatcrctcctacaaacaacctacc

SEQ ID NO: 17014 - DNA, 50 bp, synthetic construct
  source 1..50: mol_type = other DNA
cttactcaaatctaaataaataaaaccacaataacracaaaacttacaac

SEQ ID NO: 17015 - DNA, 50 bp, synthetic construct
  source 1..50: mol_type = other DNA
actaaaccctcccatctcactatatatatcaaaccrttacaaattttatc

SEQ ID NO: 17016 - DNA, 50 bp, synthetic construct
  source 1..50: mol_type = other DNA
tcccaaaaataccctaaaaaccctacctaacaaaaaatacaatcaacacc

SEQ ID NO: 17017 - DNA, 50 bp, synthetic construct
  source 1..50: mol_type = other DNA
tataaataactcaatccctaccctaatactactataaaaataaaacccac

SEQ ID NO: 17018 - DNA, 50 bp, synthetic construct
  source 1..50: mol_type = other DNA
tccaacacaaaaatcaaaaatttcaatattcaaaattaataaaatttccc

SEQ ID NO: 17019 - DNA, 50 bp, synthetic construct
  source 1..50: mol_type = other DNA
caccaaccctaaacactaaaatccctaatccttatactaaaactaaatac

SEQ ID NO: 17020 - DNA, 50 bp, synthetic construct
  source 1..50: mol_type = other DNA
ttcraaaacracctaaaaaacaataaaaactctataccctacaaaaatac

SEQ ID NO: 17021 - DNA, 50 bp, synthetic construct
  source 1..50: mol_type = other DNA
tttaccctaacctaaaaaaacccaaccttaaactaaataacaacacccac

SEQ ID NO: 17022 - DNA, 50 bp, synthetic construct
  source 1..50: mol_type = other DNA
ctaaaaactctttaaccaccacaaataactccacccaaatcccattaacc

SEQ ID NO: 17023 - DNA, 50 bp, synthetic construct
  source 1..50: mol_type = other DNA
taaatctactaataataaccctctaaaaaaaactaaccccaaaaaaaaac

SEQ ID NO: 17024 - DNA, 50 bp, synthetic construct
  source 1..50: mol_type = other DNA
cctacaactcccctaacttccaaaaccttccaatttaaacaaaataaaac

SEQ ID NO: 17025 - DNA, 50 bp, synthetic construct
  source 1..50: mol_type = other DNA
aaaaacttaaactaccraaactcrctaaataccaactacaaaaacacacc

SEQ ID NO: 17026 - DNA, 50 bp, synthetic construct
  source 1..50: mol_type = other DNA
ctaaaaacctaataaacactaaacacctaccctcacaaaacctaaaaaac

SEQ ID NO: 17027 - DNA, 50 bp, synthetic construct
  source 1..50: mol_type = other DNA
atctcctactacccaaaaacccraaaatcaaacttcttaaaaaaataccc

SEQ ID NO: 17028 - DNA, 50 bp, synthetic construct
  source 1..50: mol_type = other DNA
actatatcaaaaactccctaaaaaaattataaatccccaattcctaacac

SEQ ID NO: 17029 - DNA, 50 bp, synthetic construct
  source 1..50: mol_type = other DNA
aatcctaaaacctaactaccaacttccrcctaaactaacataaaaaacac

SEQ ID NO: 17030 - DNA, 50 bp, synthetic construct
  source 1..50: mol_type = other DNA
caaaataaaaaaaccccttaaaaacctcaaacaaaaaaactaaaaacacc

SEQ ID NO: 17031 - DNA, 50 bp, synthetic construct
  source 1..50: mol_type = other DNA
aaaaaccccttaaaaacctcaaacaaaaaaactaaaaacaccrctaattc

SEQ ID NO: 17032 - DNA, 50 bp, synthetic construct
  source 1..50: mol_type = other DNA
caaaacaaacaaactaaaataaaaataactcctttcccaacacatttccc

SEQ ID NO: 17033 - DNA, 50 bp, synthetic construct
  source 1..50: mol_type = other DNA
ctactatcactcataaataaccaaatatacacacaaaaccctaaacacac

SEQ ID NO: 17034 - DNA, 50 bp, synthetic construct
  source 1..50: mol_type = other DNA
ctacrccractataaaacaacrctaaaaactaataacacaaaaacttacc

SEQ ID NO: 17035 - DNA, 50 bp, synthetic construct
  source 1..50: mol_type = other DNA
aaaactaataacacaaaaacttaccracacctataaacaacaccaacaac

SEQ ID NO: 17036 - DNA, 50 bp, synthetic construct
  source 1..50: mol_type = other DNA
aaactaaaactaaactaaaaccaaactacaaaaccctactactaactccc

SEQ ID NO: 17037 - DNA, 50 bp, synthetic construct
  source 1..50: mol_type = other DNA
ctttcrccctaaacaaaaacrtacaatcatacraatcctatctaataaac

SEQ ID NO: 17038 - DNA, 50 bp, synthetic construct
  source 1..50: mol_type = other DNA
ccaaaccctaaaacaactaaaacaccaaacctttcrccctaaacaaaaac

SEQ ID NO: 17039 - DNA, 50 bp, synthetic construct
  source 1..50: mol_type = other DNA
ttaaaataactcaaatcataataatcaacatctatatctacaaaaacrcc

SEQ ID NO: 17040 - DNA, 50 bp, synthetic construct
  source 1..50: mol_type = other DNA
aacrtaataaaaaaaactcctaattaataaacaaattaccaatctcttcc

SEQ ID NO: 17041 - DNA, 50 bp, synthetic construct
  source 1..50: mol_type = other DNA
acctaataaaactaaaaccctacaaaactctcaataaaaaaaccccactc

SEQ ID NO: 17042 - DNA, 50 bp, synthetic construct
  source 1..50: mol_type = other DNA
atcactaaatctaaaaatcraaaccatcctaactaacccaataaaacccc

SEQ ID NO: 17043 - DNA, 50 bp, synthetic construct
  source 1..50: mol_type = other DNA
cactaaattaaccaaaataatctcratctccaaacctaataatccccccc

SEQ ID NO: 17044 - DNA, 50 bp, synthetic construct
  source 1..50: mol_type = other DNA
taaaaaattctaaaatcaacccaaaattaacccacaaacccaacctatcc

SEQ ID NO: 17045 - DNA, 50 bp, synthetic construct
  source 1..50: mol_type = other DNA
aaactatcaaataaatactaacaaaaccatatctcttccaaccttaaaac

SEQ ID NO: 17046 - DNA, 50 bp, synthetic construct
  source 1..50: mol_type = other DNA
cacctaacaatcctaaaaactatataactaaactcaatcttaaccttcac

SEQ ID NO: 17047 - DNA, 50 bp, synthetic construct
  source 1..50: mol_type = other DNA
cacctaaaatcaaaaatccraaatcaacccraacaacataattaaacccc

SEQ ID NO: 17048 - DNA, 50 bp, synthetic construct
  source 1..50: mol_type = other DNA
taaaaaaaaacataccaaacraattaccccaaaaaacatattcrtaatac

SEQ ID NO: 17049 - DNA, 50 bp, synthetic construct
  source 1..50: mol_type = other DNA
actttattcaactcaaaaacrcaccacraatatattttttaaaacaaccc

SEQ ID NO: 17050 - DNA, 50 bp, synthetic construct
  source 1..50: mol_type = other DNA
aaaatcaatatatcatcaaactaattcaccacttaaaaaaataaaacacc

SEQ ID NO: 17051 - DNA, 50 bp, synthetic construct
  source 1..50: mol_type = other DNA
acctcttcaaataataaatcaacctaataatacactaatttttaaaacac

SEQ ID NO: 17052 - DNA, 50 bp, synthetic construct
  source 1..50: mol_type = other DNA
taaactacattattaaaataatttaacatacaaaccatccctccctcccc

SEQ ID NO: 17053 - DNA, 50 bp, synthetic construct
  source 1..50: mol_type = other DNA
aactaatcraaaaaactatacctaaaaacttatactcrtattaaaaaaac

SEQ ID NO: 17054 - DNA, 50 bp, synthetic construct
  source 1..50: mol_type = other DNA
tactaaacacttctttcacataaaattcacttcccacacrtattaaaatc

SEQ ID NO: 17055 - DNA, 50 bp, synthetic construct
  source 1..50: mol_type = other DNA
acacccracaatataaatactataaaaaacacttctacttccatctaccc

SEQ ID NO: 17056 - DNA, 50 bp, synthetic construct
  source 1..50: mol_type = other DNA
tataaaatcaaatcatatattattttcccaaaaccacrctaataaactac

SEQ ID NO: 17057 - DNA, 50 bp, synthetic construct
  source 1..50: mol_type = other DNA
cattacttttaaattctttccataactctaaaaatacrcaacttattaac

SEQ ID NO: 17058 - DNA, 50 bp, synthetic construct
  source 1..50: mol_type = other DNA
caaactactactataattatctacttaacacccttcaataataccccatc

SEQ ID NO: 17059 - DNA, 50 bp, synthetic construct
  source 1..50: mol_type = other DNA
cattcaaaaaacaaaaccaacctcccatatatcaaaatccactaacctcc

SEQ ID NO: 17060 - DNA, 50 bp, synthetic construct
  source 1..50: mol_type = other DNA
atatcccctaatcttaacraaaaaaccttttaaataaaccccraaaaacc

SEQ ID NO: 17061 - DNA, 50 bp, synthetic construct
  source 1..50: mol_type = other DNA
actcaatatattaataatacaaaatacaatataacctttaattcaaaaac

SEQ ID NO: 17062 - DNA, 50 bp, synthetic construct
  source 1..50: mol_type = other DNA
actccaccatcaacaaaaaatataatttacactattttatcaataacaac

SEQ ID NO: 17063 - DNA, 50 bp, synthetic construct
  source 1..50: mol_type = other DNA
acaaaacaatacaaaccacatttcctattaataataaaatcacccataac

SEQ ID NO: 17064 - DNA, 50 bp, synthetic construct
  source 1..50: mol_type = other DNA
tactattaaaaatttttcaaaaacctatcttaaaaaatacttacatactc

SEQ ID NO: 17065 - DNA, 50 bp, synthetic construct
  source 1..50: mol_type = other DNA
atataaaaccaactaaccctattaactaaacataaaattaataatatcac

SEQ ID NO: 17066 - DNA, 50 bp, synthetic construct
  source 1..50: mol_type = other DNA
taacctaaacttacccctaaatatatactttctaatcctaatcaaattcc

SEQ ID NO: 17067 - DNA, 50 bp, synthetic construct
  source 1..50: mol_type = other DNA
taacraccraactttaatacaacattttaattacraaactaacttcaacc

SEQ ID NO: 17068 - DNA, 50 bp, synthetic construct
  source 1..50: mol_type = other DNA
aactaaataattccaacttataaaatcttcctatttaataacatttcaac

SEQ ID NO: 17069 - DNA, 50 bp, synthetic construct
  source 1..50: mol_type = other DNA
aattccaacttataaaatcttcctatttaataacatttcaacraaacctc

SEQ ID NO: 17070 - DNA, 50 bp, synthetic construct
  source 1..50: mol_type = other DNA
aaccaaaaatccaatacaatatcatctaaaaatacttaaaaatataaacc

SEQ ID NO: 17071 - DNA, 50 bp, synthetic construct
  source 1..50: mol_type = other DNA
aacatccattatcaattacatcrcaattaaatatcttctctttactattc

SEQ ID NO: 17072 - DNA, 50 bp, synthetic construct
  source 1..50: mol_type = other DNA
atacttcttaatcattatttattacaaaaacatccattatcaattacatc

SEQ ID NO: 17073 - DNA, 50 bp, synthetic construct
  source 1..50: mol_type = other DNA
taccttcttttaaaatacctccctaaaaaacctacctaaaattattttac

SEQ ID NO: 17074 - DNA, 50 bp, synthetic construct
  source 1..50: mol_type = other DNA
ataatctaaataaaaaatcaaacaaactacaacattcccttaaaccaaac

SEQ ID NO: 17075 - DNA, 50 bp, synthetic construct
  source 1..50: mol_type = other DNA
caaaaaaactaccaattaataaaacaatcaaaacacacataacatttatc

SEQ ID NO: 17076 - DNA, 50 bp, synthetic construct
  source 1..50: mol_type = other DNA
aataaccccacattaaaaaataacaacrtaaacraaatactaaaactcac

SEQ ID NO: 17077 - DNA, 50 bp, synthetic construct
  source 1..50: mol_type = other DNA
cccaaatatcaccttaactataactttcaacraattaacccaataataac

SEQ ID NO: 17078 - DNA, 50 bp, synthetic construct
  source 1..50: mol_type = other DNA
ccatatttaacttttaaaccccaaatatcaccttaactataactttcaac

SEQ ID NO: 17079 - DNA, 50 bp, synthetic construct
  source 1..50: mol_type = other DNA
cctacctttcaaaaattctaaatctatatctttaaaatccatttccattc

SEQ ID NO: 17080 - DNA, 50 bp, synthetic construct
  source 1..50: mol_type = other DNA
aactaataataaaactcctaccratataaaacttacatccctaaaaaaac

SEQ ID NO: 17081 - DNA, 50 bp, synthetic construct
  source 1..50: mol_type = other DNA
ctcctttaataccraaatctacaataaaaactaataataaaactcctacc

SEQ ID NO: 17082 - DNA, 50 bp, synthetic construct
  source 1..50: mol_type = other DNA
taactataataaacrataaaaacttttaccrtataaactcctttaatacc

SEQ ID NO: 17083 - DNA, 50 bp, synthetic construct
  source 1..50: mol_type = other DNA
ctttaaactaccraccrctataactataataaacrataaaaacttttacc

SEQ ID NO: 17084 - DNA, 50 bp, synthetic construct
  source 1..50: mol_type = other DNA
aaacaaataaaacraatctaaaaataacrcaacaacaaaactactaaacc

SEQ ID NO: 17085 - DNA, 50 bp, synthetic construct
  source 1..50: mol_type = other DNA
taaacaacracctaaaactccraaacaaataaaacraatctaaaaataac

SEQ ID NO: 17086 - DNA, 50 bp, synthetic construct
  source 1..50: mol_type = other DNA
acaatctccaaaattttaccraaaaaacctaaacaacracctaaaactcc

SEQ ID NO: 17087 - DNA, 50 bp, synthetic construct
  source 1..50: mol_type = other DNA
craccrcraacraaacttatacaaaacttcaaaaaacaactaaaaaaacc

SEQ ID NO: 17088 - DNA, 50 bp, synthetic construct
  source 1..50: mol_type = other DNA
tatacaaaacttcaaaaaacaactaaaaaaaccrcaaaaatctccaaaac

SEQ ID NO: 17089 - DNA, 50 bp, synthetic construct
  source 1..50: mol_type = other DNA
tacaaaacttcaaaaaacaactaaaaaaaccrcaaaaatctccaaaacrc

SEQ ID NO: 17090 - DNA, 50 bp, synthetic construct
  source 1..50: mol_type = other DNA
tattttctaaacractaacccaaaaaactactataccctctaaaaaaccc

SEQ ID NO: 17091 - DNA, 50 bp, synthetic construct
  source 1..50: mol_type = other DNA
cacaacraccraatttctaattataaaaaatttaaacaaatttatccctc

SEQ ID NO: 17092 - DNA, 50 bp, synthetic construct
  source 1..50: mol_type = other DNA
cccattccccraaaaacaaatttatttaaactttccacaattaaaaatcc

SEQ ID NO: 17093 - DNA, 50 bp, synthetic construct
  source 1..50: mol_type = other DNA
ttccccraaaaacaaatttatttaaactttccacaattaaaaatccracc

SEQ ID NO: 17094 - DNA, 50 bp, synthetic construct
  source 1..50: mol_type = other DNA
taaaatctaacrctaaataaaacccaaaaaactttccctaactccaaaac

SEQ ID NO: 17095 - DNA, 50 bp, synthetic construct
  source 1..50: mol_type = other DNA
tccccactttcraattaatctttttctttactactactcttaaactcttc

SEQ ID NO: 17096 - DNA, 50 bp, synthetic construct
  source 1..50: mol_type = other DNA
tccaaatattataactaaaaattccrcraacaaatttaaattctacttcc

SEQ ID NO: 17097 - DNA, 50 bp, synthetic construct
  source 1..50: mol_type = other DNA
tactcctcccaaaccttattatttccaaatattataactaaaaattccrc

SEQ ID NO: 17098 - DNA, 50 bp, synthetic construct
  source 1..50: mol_type = other DNA
catactcctcccaaaccttattatttccaaatattataactaaaaattcc

SEQ ID NO: 17099 - DNA, 50 bp, synthetic construct
  source 1..50: mol_type = other DNA
aaatactccctactctctacaaacactactataactttatctataaaaac

SEQ ID NO: 17100 - DNA, 50 bp, synthetic construct
  source 1..50: mol_type = other DNA
tctaatttacaacccaactataacaatcaaaaaaaacaccaaaattaccc

SEQ ID NO: 17101 - DNA, 50 bp, synthetic construct
  source 1..50: mol_type = other DNA
acattaaatcacataatacaccactaaccttaaactaaaacttaaaattc

SEQ ID NO: 17102 - DNA, 50 bp, synthetic construct
  source 1..50: mol_type = other DNA
aaacrtaaaaatttaacattatataaacactatatactaccctatacacc

SEQ ID NO: 17103 - DNA, 50 bp, synthetic construct
  source 1..50: mol_type = other DNA
attaaaatcatatactaacacaaacaatattctaaaccaaaaaaacctac

SEQ ID NO: 17104 - DNA, 50 bp, synthetic construct
  source 1..50: mol_type = other DNA
racaaactacaaccaacaaaacaaactatccactaactatttttatatac

SEQ ID NO: 17105 - DNA, 50 bp, synthetic construct
  source 1..50: mol_type = other DNA
cttatttacaataaaacattttttccatataactccaatcctactaatcc

SEQ ID NO: 17106 - DNA, 50 bp, synthetic construct
  source 1..50: mol_type = other DNA
aaacctaaaaactaactaaatttaccaatataacctttacaaaaataatc

SEQ ID NO: 17107 - DNA, 50 bp, synthetic construct
  source 1..50: mol_type = other DNA
aaattaaaattaccaaataaattaaacctactttccactatctacccttc

SEQ ID NO: 17108 - DNA, 50 bp, synthetic construct
  source 1..50: mol_type = other DNA
taaaatctaaattaccraaacttaaaacttacctatccccrattaaactc

SEQ ID NO: 17109 - DNA, 50 bp, synthetic construct
  source 1..50: mol_type = other DNA
atccttcttctaaaatctaaattaccraaacttaaaacttacctatcccc

SEQ ID NO: 17110 - DNA, 50 bp, synthetic construct
  source 1..50: mol_type = other DNA
acrtaaaataaaataaccttacttatccttcttctaaaatctaaattacc

SEQ ID NO: 17111 - DNA, 50 bp, synthetic construct
  source 1..50: mol_type = other DNA
ctaataaacraacraaaactacaaaaaaccaaacttcttctaattaaccc

SEQ ID NO: 17112 - DNA, 50 bp, synthetic construct
  source 1..50: mol_type = other DNA
accctacaactatatacacccraaaactaccaaaaaaactaaatcttaac

SEQ ID NO: 17113 - DNA, 50 bp, synthetic construct
  source 1..50: mol_type = other DNA
ttttcatctacctaatacactataaaaaccttatatattctttcaaaaac

SEQ ID NO: 17114 - DNA, 50 bp, synthetic construct
  source 1..50: mol_type = other DNA
accaaaaacccacttttttaaaacctaatattctaatattccttccttac

SEQ ID NO: 17115 - DNA, 50 bp, synthetic construct
  source 1..50: mol_type = other DNA
caaacaaaaccctaaatatataaccctcaaataaatccctaaaaacttcc

SEQ ID NO: 17116 - DNA, 50 bp, synthetic construct
  source 1..50: mol_type = other DNA
aaacattaataaaaatttacattaccaaaactcaacacatctaaatatac

SEQ ID NO: 17117 - DNA, 50 bp, synthetic construct
  source 1..50: mol_type = other DNA
taataaatttataatctcacttaacttcaaaaataaaaccacatatcttc

SEQ ID NO: 17118 - DNA, 50 bp, synthetic construct
  source 1..50: mol_type = other DNA
aaataaaaccacatatcttcrcaataaatattacaactcttaaaaataac

SEQ ID NO: 17119 - DNA, 50 bp, synthetic construct
  source 1..50: mol_type = other DNA
ttaaaaaacaccaccctatataaaactaatataatcacraaccctccctc

SEQ ID NO: 17120 - DNA, 50 bp, synthetic construct
  source 1..50: mol_type = other DNA
aactcttaccccttaaaaaacaccaccctatataaaactaatataatcac

SEQ ID NO: 17121 - DNA, 50 bp, synthetic construct
  source 1..50: mol_type = other DNA
tataaaatcaaaatctctccaaacttttaaaaaactacttcaaaccattc

SEQ ID NO: 17122 - DNA, 50 bp, synthetic construct
  source 1..50: mol_type = other DNA
accaccaaaccaatataaacratcatcaaaaatcaaattcctttaaaacc

SEQ ID NO: 17123 - DNA, 50 bp, synthetic construct
  source 1..50: mol_type = other DNA
acccaaacatatcttaaaaaaccaacrataaccaccaaaccaatataaac

SEQ ID NO: 17124 - DNA, 50 bp, synthetic construct
  source 1..50: mol_type = other DNA
taataaatttatccracctctaactataattctaaaaaatcccataactc

SEQ ID NO: 17125 - DNA, 50 bp, synthetic construct
  source 1..50: mol_type = other DNA
aataaacaacaaaaaatatccataaactacaataaccrtaattcaaatac

SEQ ID NO: 17126 - DNA, 50 bp, synthetic construct
  source 1..50: mol_type = other DNA
tataacacatacaaataaacaacaaaaaatatccataaactacaataacc

SEQ ID NO: 17127 - DNA, 50 bp, synthetic construct
  source 1..50: mol_type = other DNA
aaaactaaactaaaaaatattatactcaatactcaacctcatacaccctc

SEQ ID NO: 17128 - DNA, 50 bp, synthetic construct
  source 1..50: mol_type = other DNA
aactaaactaaaaaatattatactcaatactcaacctcatacaccctcrc

SEQ ID NO: 17129 - DNA, 50 bp, synthetic construct
  source 1..50: mol_type = other DNA
cacaaacaaacaaaaactataatacataacrtatatttcccaaaacaccc

SEQ ID NO: 17130 - DNA, 50 bp, synthetic construct
  source 1..50: mol_type = other DNA
ttattattaaatatcaatcccacaaacaaacaaaaactataatacataac

SEQ ID NO: 17131 - DNA, 50 bp, synthetic construct
  source 1..50: mol_type = other DNA
ttactaaataattaataattacttttacatactactaatcttttctctcc

SEQ ID NO: 17132 - DNA, 50 bp, synthetic construct
  source 1..50: mol_type = other DNA
taatatacaaaaataaccattaaccatttaataacactccataaatcttc

SEQ ID NO: 17133 - DNA, 50 bp, synthetic construct
  source 1..50: mol_type = other DNA
caaaaataaccattaaccatttaataacactccataaatcttcrataacc

SEQ ID NO: 17134 - DNA, 50 bp, synthetic construct
  source 1..50: mol_type = other DNA
aaattaaacctacaacttttaaacaattttaacataacatttaaaacaac

SEQ ID NO: 17135 - DNA, 50 bp, synthetic construct
  source 1..50: mol_type = other DNA
aaattacaaatccaacttccatcccacaaaaactattcctctacctacac

SEQ ID NO: 17136 - DNA, 50 bp, synthetic construct
  source 1..50: mol_type = other DNA
tacraaacccattccattttacatctacaaactatacccaactcttcaac

SEQ ID NO: 17137 - DNA, 50 bp, synthetic construct
  source 1..50: mol_type = other DNA
ttccattttacatctacaaactatacccaactcttcaacrctacaaactc

SEQ ID NO: 17138 - DNA, 50 bp, synthetic construct
  source 1..50: mol_type = other DNA
aaaataaactaaaccaaaaacctaaaaacracrctaataaatactaaatc

SEQ ID NO: 17139 - DNA, 50 bp, synthetic construct
  source 1..50: mol_type = other DNA
aacacrtataaatatatatttatatcaatctatcaatcccaccraaaacc

SEQ ID NO: 17140 - DNA, 50 bp, synthetic construct
  source 1..50: mol_type = other DNA
tataaatatatatttatatcaatctatcaatcccaccraaaaccraactc

SEQ ID NO: 17141 - DNA, 50 bp, synthetic construct
  source 1..50: mol_type = other DNA
aacatcatctccaacttctaaccctatttaaaaatccaataatccactcc

SEQ ID NO: 17142 - DNA, 50 bp, synthetic construct
  source 1..50: mol_type = other DNA
aaaaacaaaaactaacctacraactacaacaaaactaccrcatcctaaac

SEQ ID NO: 17143 - DNA, 50 bp, synthetic construct
  source 1..50: mol_type = other DNA
crattactacaaaaaacaaaaactaacctacraactacaacaaaactacc

SEQ ID NO: 17144 - DNA, 50 bp, synthetic construct
  source 1..50: mol_type = other DNA
acaaacctaaactaaacratataaaacaaccrctcraaatactaaaaaac

SEQ ID NO: 17145 - DNA, 50 bp, synthetic construct
  source 1..50: mol_type = other DNA
aacaaacttctaaacctataactaaaccraaactcttccttttacrtaac

SEQ ID NO: 17146 - DNA, 50 bp, synthetic construct
  source 1..50: mol_type = other DNA
accctaacaaacttctaaacctataactaaaccraaactcttccttttac

SEQ ID NO: 17147 - DNA, 50 bp, synthetic construct
  source 1..50: mol_type = other DNA
aacctactaaaattacrcraaccaataatataatcaatcrtaaaccaatc

SEQ ID NO: 17148 - DNA, 50 bp, synthetic construct
  source 1..50: mol_type = other DNA
aaaaccttttaaccaccttcccaaacrataacraattaaactacrcaaac

SEQ ID NO: 17149 - DNA, 50 bp, synthetic construct
  source 1..50: mol_type = other DNA
ttaaaaaaaaccttttaaccaccttcccaaacrataacraattaaactac

SEQ ID NO: 17150 - DNA, 50 bp, synthetic construct
  source 1..50: mol_type = other DNA
aaaacacttactttaaaaaaaaccttttaaccaccttcccaaacrataac

SEQ ID NO: 17151 - DNA, 50 bp, synthetic construct
  source 1..50: mol_type = other DNA
taaactttctttctaaacttctcaaaattctaattatatataaaaaaccc

SEQ ID NO: 17152 - DNA, 50 bp, synthetic construct
  source 1..50: mol_type = other DNA
attaaaaactaaaattctaaaaatcacttccttttcttctacatataaac

SEQ ID NO: 17153 - DNA, 50 bp, synthetic construct
  source 1..50: mol_type = other DNA
catattttaaaactaattccatattttcaattacaaatttccaccctccc

SEQ ID NO: 17154 - DNA, 50 bp, synthetic construct
  source 1..50: mol_type = other DNA
taaaccaatatattcaaaatcaaaaacatccaacaatcaaaacattatcc

SEQ ID NO: 17155 - DNA, 50 bp, synthetic construct
  source 1..50: mol_type = other DNA
tcaaattcttcaaaaactaataaaactcttacttttctaacacratcrcc

SEQ ID NO: 17156 - DNA, 50 bp, synthetic construct
  source 1..50: mol_type = other DNA
aaataacctaaaacaactaaacaataacccraaaccrcaaccaaaaaaac

SEQ ID NO: 17157 - DNA, 50 bp, synthetic construct
  source 1..50: mol_type = other DNA
ccctaatttaaatataactattaaaatcatctactattatttctctttcc

SEQ ID NO: 17158 - DNA, 50 bp, synthetic construct
  source 1..50: mol_type = other DNA
taaaaaatcaaatcactcrcacccraatactaacraacttaaaaaacaac

SEQ ID NO: 17159 - DNA, 50 bp, synthetic construct
  source 1..50: mol_type = other DNA
tccraaccaaatataaaacacaatctcctaatacrctattttttaaaccc

SEQ ID NO: 17160 - DNA, 50 bp, synthetic construct
  source 1..50: mol_type = other DNA
atataaaacacaatctcctaatacrctattttttaaacccrtcaatattc

SEQ ID NO: 17161 - DNA, 50 bp, synthetic construct
  source 1..50: mol_type = other DNA
aacacaatctcctaatacrctattttttaaacccrtcaatattcraatac

SEQ ID NO: 17162 - DNA, 50 bp, synthetic construct
  source 1..50: mol_type = other DNA
ttttaaacccrtcaatattcraatacraataacctaatcttccaaatacc

SEQ ID NO: 17163 - DNA, 50 bp, synthetic construct
  source 1..50: mol_type = other DNA
ctaaaaaataccaaacaataaacacaaatcaataaatacrcrcaccrtac

SEQ ID NO: 17164 - DNA, 50 bp, synthetic construct
  source 1..50: mol_type = other DNA
aattcatctcactaaaaaataccaaacaataaacacaaatcaataaatac

SEQ ID NO: 17165 - DNA, 50 bp, synthetic construct
  source 1..50: mol_type = other DNA
aattcatctcactaaaaaataccaaacaataaacrcaaatcaataaatac

SEQ ID NO: 17166 - DNA, 50 bp, synthetic construct
  source 1..50: mol_type = other DNA
crtaaacaacrcaaaaaacraataatttctacatttccatctaaaataac

SEQ ID NO: 17167 - DNA, 50 bp, synthetic construct
  source 1..50: mol_type = other DNA
tccctaataaaataaacccrctacctcaaataaaaatacaaaaatcaccc

SEQ ID NO: 17168 - DNA, 50 bp, synthetic construct
  source 1..50: mol_type = other DNA
actcctctcaaataaattttaatctaccattaaaacaaaataccaaaacc

SEQ ID NO: 17169 - DNA, 50 bp, synthetic construct
  source 1..50: mol_type = other DNA
aaataaattttaatctaccattaaaacaaaataccaaaaccraatatttc

SEQ ID NO: 17170 - DNA, 50 bp, synthetic construct
  source 1..50: mol_type = other DNA
aatcctctatttcccaaaatttaaaataattaaactaaatcacacaactc

SEQ ID NO: 17171 - DNA, 50 bp, synthetic construct
  source 1..50: mol_type = other DNA
tccctaataaaacttaacttttcacaattaaatttcatacctatttcccc

SEQ ID NO: 17172 - DNA, 50 bp, synthetic construct
  source 1..50: mol_type = other DNA
tcctcracaaaactactcttctaacaaaaaacaacctaaaaaatcaaacc

SEQ ID NO: 17173 - DNA, 50 bp, synthetic construct
  source 1..50: mol_type = other DNA
ataaatttctaacaacccccacrctatccttccaatatacatataaactc

SEQ ID NO: 17174 - DNA, 50 bp, synthetic construct
  source 1..50: mol_type = other DNA
ttccattccctatatcrtattccatactcttatcattaatcccataaaac

SEQ ID NO: 17175 - DNA, 50 bp, synthetic construct
  source 1..50: mol_type = other DNA
tttccctcccctattactttaaattcaaaaattattacatatttacaatc

SEQ ID NO: 17176 - DNA, 50 bp, synthetic construct
  source 1..50: mol_type = other DNA
ctttacataatatcacttatcctcttcaaataacctactccacrtaactc

SEQ ID NO: 17177 - DNA, 50 bp, synthetic construct
  source 1..50: mol_type = other DNA
ctcttacctttacataatatcacttatcctcttcaaataacctactccac

SEQ ID NO: 17178 - DNA, 50 bp, synthetic construct
  source 1..50: mol_type = other DNA
taatctcattctcttcrtatcatacaaatttttatctatactccctcccc

SEQ ID NO: 17179 - DNA, 50 bp, synthetic construct
  source 1..50: mol_type = other DNA
aaaaactccaaaaaccctactaaaattaaaccctcaaaaataaacccaac

SEQ ID NO: 17180 - DNA, 50 bp, synthetic construct
  source 1..50: mol_type = other DNA
crcrataaaacrcacacatttccttcaattctttctcraaaatttaaacc

SEQ ID NO: 17181 - DNA, 50 bp, synthetic construct
  source 1..50: mol_type = other DNA
tatatttttaaaaccaaaaaaccatatccrctaaacctaaaaaaacaccc

SEQ ID NO: 17182 - DNA, 50 bp, synthetic construct
  source 1..50: mol_type = other DNA
aaactaaaaaacrtacccaataaccaaatacaaacrataaaacaaataac

SEQ ID NO: 17183 - DNA, 50 bp, synthetic construct
  source 1..50: mol_type = other DNA
ttataaaactaaaactcccacataaaaatcacracrccaaaccraatctc

SEQ ID NO: 17184 - DNA, 50 bp, synthetic construct
  source 1..50: mol_type = other DNA
tatttacttataaaactaaaactcccacataaaaatcacracrccaaacc

SEQ ID NO: 17185 - DNA, 50 bp, synthetic construct
  source 1..50: mol_type = other DNA
rccrcrcaaaatatttacttataaaactaaaactcccacataaaaatcac

SEQ ID NO: 17186 - DNA, 50 bp, synthetic construct
  source 1..50: mol_type = other DNA
acrccrtaacctccatataaaaactccaactctataaataaacactctac

SEQ ID NO: 17187 - DNA, 50 bp, synthetic construct
  source 1..50: mol_type = other DNA
rtaacctccatataaaaactccaactctataaataaacactctacrcrac

SEQ ID NO: 17188 - DNA, 50 bp, synthetic construct
  source 1..50: mol_type = other DNA
atacacrtcttaaaaccatcaataatacraacctatatccacatcttaac

SEQ ID NO: 17189 - DNA, 50 bp, synthetic construct
  source 1..50: mol_type = other DNA
aacaaaaaaaaccrattcctctctaaacrccaaaatataaatacaaattc

SEQ ID NO: 17190 - DNA, 50 bp, synthetic construct
  source 1..50: mol_type = other DNA
ctaaacrccaaaatataaatacaaattcrcaccattaataactccaaaac

SEQ ID NO: 17191 - DNA, 50 bp, synthetic construct
  source 1..50: mol_type = other DNA
tttatatttaataaaacaacraccrtaaacactaaatacccaaatccctc

SEQ ID NO: 17192 - DNA, 50 bp, synthetic construct
  source 1..50: mol_type = other DNA
tattcttaaaaactcaatacccraatttcccctatttaaaaaccraaaac

SEQ ID NO: 17193 - DNA, 50 bp, synthetic construct
  source 1..50: mol_type = other DNA
actctcaaaaataaaaaccctaactctacttcctaactataataaaattc

SEQ ID NO: 17194 - DNA, 50 bp, synthetic construct
  source 1..50: mol_type = other DNA
crcaaactaaaaattcraaaaatttccaaaacttctaatccctctccctc

SEQ ID NO: 17195 - DNA, 50 bp, synthetic construct
  source 1..50: mol_type = other DNA
aaactaaaaattcraaaaatttccaaaacttctaatccctctccctcrcc

SEQ ID NO: 17196 - DNA, 50 bp, synthetic construct
  source 1..50: mol_type = other DNA
tttcacttcraaaataaaactcttaacttatataaaacattcrtaaaccc

SEQ ID NO: 17197 - DNA, 50 bp, synthetic construct
  source 1..50: mol_type = other DNA
acactccttttcacttcraaaataaaactcttaacttatataaaacattc

SEQ ID NO: 17198 - DNA, 50 bp, synthetic construct
  source 1..50: mol_type = other DNA
ccraaaaccraatttacraataccctatataaaccaaaaattttattccc

SEQ ID NO: 17199 - DNA, 50 bp, synthetic construct
  source 1..50: mol_type = other DNA
aatataaaactatttacttttcttacttctcrccttctaatactcatatc

SEQ ID NO: 17200 - DNA, 50 bp, synthetic construct
  source 1..50: mol_type = other DNA
caaccttcaaatatacaccrctaactatactacaatactatacttaaaac

SEQ ID NO: 17201 - DNA, 50 bp, synthetic construct
  source 1..50: mol_type = other DNA
aaaccataaaaataccaaaaatacccacaaacaaccttcaaatatacacc

SEQ ID NO: 17202 - DNA, 50 bp, synthetic construct
  source 1..50: mol_type = other DNA
tctccttcccaaaatataatttattactataaaatttctaaacaatcttc

SEQ ID NO: 17203 - DNA, 50 bp, synthetic construct
  source 1..50: mol_type = other DNA
ccaaacaactactaactaaaaataccaataaaaaacaaaacaactttcac

SEQ ID NO: 17204 - DNA, 50 bp, synthetic construct
  source 1..50: mol_type = other DNA
cttaaatccatcaatatctcaaaaacaaatatttaaaaactaccatactc

SEQ ID NO: 17205 - DNA, 50 bp, synthetic construct
  source 1..50: mol_type = other DNA
cctaaattacatacttctaactcacaaatatttataatttctaaataacc

SEQ ID NO: 17206 - DNA, 50 bp, synthetic construct
  source 1..50: mol_type = other DNA
tatcaaaaataactttcaatcttcactttcattaaatataaaaaaacttc

SEQ ID NO: 17207 - DNA, 50 bp, synthetic construct
  source 1..50: mol_type = other DNA
aacaaaatcttacactatcatacaaactaaaatataataacraaatccac

SEQ ID NO: 17208 - DNA, 50 bp, synthetic construct
  source 1..50: mol_type = other DNA
cttcctcatttccttcaataaaataaatattttctttacrccttactaac

SEQ ID NO: 17209 - DNA, 50 bp, synthetic construct
  source 1..50: mol_type = other DNA
aaactaactttcttcctcatttccttcaataaaataaatattttctttac

SEQ ID NO: 17210 - DNA, 50 bp, synthetic construct
  source 1..50: mol_type = other DNA
attcaaaaccttttaactccaacaaaactccttaataaacttctctcaac

SEQ ID NO: 17211 - DNA, 50 bp, synthetic construct
  source 1..50: mol_type = other DNA
ccaaaaccrttaaaataaaaataaccaacccctaacaaccatctacatcc

SEQ ID NO: 17212 - DNA, 50 bp, synthetic construct
  source 1..50: mol_type = other DNA
ctaaaaaatactaacttaaaaaaacaaccaaacrcaaacctaaaaactac

SEQ ID NO: 17213 - DNA, 50 bp, synthetic construct
  source 1..50: mol_type = other DNA
aaaaccrttttttcrtaactaacaataataatctaacrattaacactctc

SEQ ID NO: 17214 - DNA, 50 bp, synthetic construct
  source 1..50: mol_type = other DNA
tcccaatttcaatattataaaaaattttcacataaactttacaatatccc

SEQ ID NO: 17215 - DNA, 50 bp, synthetic construct
  source 1..50: mol_type = other DNA
ataaactttacaatatcccrcaaacttaataatacaatacaatttaaacc

SEQ ID NO: 17216 - DNA, 50 bp, synthetic construct
  source 1..50: mol_type = other DNA
ttattaacaaactttaatcaattacttttctaaaattaaaaatcaaaccc

SEQ ID NO: 17217 - DNA, 50 bp, synthetic construct
  source 1..50: mol_type = other DNA
ttaacaaactttaatcaattacttttctaaaattaaaaatcaaacccrac

SEQ ID NO: 17218 - DNA, 50 bp, synthetic construct
  source 1..50: mol_type = other DNA
acaaactttaatcaattacttttctaaaattaaaaatcaaacccracrcc

SEQ ID NO: 17219 - DNA, 50 bp, synthetic construct
  source 1..50: mol_type = other DNA
aaataaaatctcaatctatcacccacrctaaaatacaataataccatctc

SEQ ID NO: 17220 - DNA, 50 bp, synthetic construct
  source 1..50: mol_type = other DNA
caaattcaattctccaacrtatacttctactcctactccataaaacctcc

SEQ ID NO: 17221 - DNA, 50 bp, synthetic construct
  source 1..50: mol_type = other DNA
ttaaacaacaacataaacacacaataccatataaacctcaaaacaaatcc

SEQ ID NO: 17222 - DNA, 50 bp, synthetic construct
  source 1..50: mol_type = other DNA
tttcttaaacccctcttctttatcccttcttcctctttatcacccaaaac

SEQ ID NO: 17223 - DNA, 50 bp, synthetic construct
  source 1..50: mol_type = other DNA
caacctctccrataaaattataactaaacatcctatttttctaaacaacc

SEQ ID NO: 17224 - DNA, 50 bp, synthetic construct
  source 1..50: mol_type = other DNA
accattaaataaaaacatcaaacctcaaatataaaactaaaaaccacaac

SEQ ID NO: 17225 - DNA, 50 bp, synthetic construct
  source 1..50: mol_type = other DNA
tacaccctacttatttacacrtacattcttttctaaccacataaacatac

SEQ ID NO: 17226 - DNA, 50 bp, synthetic construct
  source 1..50: mol_type = other DNA
tctttattaattttaaaatatctaaacacttcataaatattaacaaatac

SEQ ID NO: 17227 - DNA, 50 bp, synthetic construct
  source 1..50: mol_type = other DNA
aaaataaaacaaacctccaaataacatcataacttaactcaacaattaac

SEQ ID NO: 17228 - DNA, 50 bp, synthetic construct
  source 1..50: mol_type = other DNA
taacaaattttattaattttccctatacaatctttcaccrctcaataatc

SEQ ID NO: 17229 - DNA, 50 bp, synthetic construct
  source 1..50: mol_type = other DNA
caacctaaatactctaaacctttccactaccccttcaaatatataaaaac

SEQ ID NO: 17230 - DNA, 50 bp, synthetic construct
  source 1..50: mol_type = other DNA
atacttaataacttctcaaccactaccaaataatattaacttattataac

SEQ ID NO: 17231 - DNA, 50 bp, synthetic construct
  source 1..50: mol_type = other DNA
cttacattctaataaacacatattatttctcaaaaaccacaaaatctttc

SEQ ID NO: 17232 - DNA, 50 bp, synthetic construct
  source 1..50: mol_type = other DNA
tccaacaaacattctcaaaaatcaaacrtataactaatattataaaaaac

SEQ ID NO: 17233 - DNA, 50 bp, synthetic construct
  source 1..50: mol_type = other DNA
taaaacrtacacaatcatatcaaacttattaatctcataatattttaatc

SEQ ID NO: 17234 - DNA, 50 bp, synthetic construct
  source 1..50: mol_type = other DNA
ttacaaaacatttctttcaattataatatcctacataaacaaactaaaac

SEQ ID NO: 17235 - DNA, 50 bp, synthetic construct
  source 1..50: mol_type = other DNA
tcctatacaccactttataatacatcatcraaatcraactttacaaatcc

SEQ ID NO: 17236 - DNA, 50 bp, synthetic construct
  source 1..50: mol_type = other DNA
ctcattaaaaaccaatcctatacaccactttataatacatcatcraaatc

SEQ ID NO: 17237 - DNA, 50 bp, synthetic construct
  source 1..50: mol_type = other DNA
aaaaatctcattaaaaaccaatcctatacaccactttataatacatcatc

SEQ ID NO: 17238 - DNA, 50 bp, synthetic construct
  source 1..50: mol_type = other DNA
ccctatcrttctactctttaaaaattctccctcactttcttcataatacc

SEQ ID NO: 17239 - DNA, 50 bp, synthetic construct
  source 1..50: mol_type = other DNA
ccaaaaaattcraaactaaacccaactccraaaacctaaaaatataaccc

SEQ ID NO: 17240 - DNA, 50 bp, synthetic construct
  source 1..50: mol_type = other DNA
tcttaaaccrttattaaccccaaaactaaaaatataaatttaaaaaattc

SEQ ID NO: 17241 - DNA, 50 bp, synthetic construct
  source 1..50: mol_type = other DNA
aacaactacacrcrtcataaaaaaaatattctttaacaacaaacactaac

SEQ ID NO: 17242 - DNA, 50 bp, synthetic construct
  source 1..50: mol_type = other DNA
aacaacaaacactaacrtttttctatctcttaaccctttataacttctac

SEQ ID NO: 17243 - DNA, 50 bp, synthetic construct
  source 1..50: mol_type = other DNA
caaaaaattctcaaaataaccaaaatttccaaaccactaaaacaaataac

SEQ ID NO: 17244 - DNA, 50 bp, synthetic construct
  source 1..50: mol_type = other DNA
aaaattaccctaattatttacatttaatcttaattattataactcctctc

SEQ ID NO: 17245 - DNA, 50 bp, synthetic construct
  source 1..50: mol_type = other DNA
aacacactaatactaaacactaattactaataataaaacattacaatctc

SEQ ID NO: 17246 - DNA, 50 bp, synthetic construct
  source 1..50: mol_type = other DNA
aacttcaaaaaatctattaaaataaaaataacaaccrcaataactacatc

SEQ ID NO: 17247 - DNA, 50 bp, synthetic construct
  source 1..50: mol_type = other DNA
acaaccaaaaacaaaacttcaaaaaatctattaaaataaaaataacaacc

SEQ ID NO: 17248 - DNA, 50 bp, synthetic construct
  source 1..50: mol_type = other DNA
raaactctcaaaatctcaaactccraaaaccrcrtctacaataaaaaaac

SEQ ID NO: 17249 - DNA, 50 bp, synthetic construct
  source 1..50: mol_type = other DNA
cctaaacttatatttcctataacattcracacrtaataacctttaccttc

SEQ ID NO: 17250 - DNA, 50 bp, synthetic construct
  source 1..50: mol_type = other DNA
aaaaacraaatttataatataacactaacaataacacactaaaaacaacc

SEQ ID NO: 17251 - DNA, 50 bp, synthetic construct
  source 1..50: mol_type = other DNA
ataaatactaaatcttctttcttaaactcttttatttcrtatataacatc

SEQ ID NO: 17252 - DNA, 50 bp, synthetic construct
  source 1..50: mol_type = other DNA
aaaaataaaaaaatataaccaaacacrccaaacatcataatattaaaacc

SEQ ID NO: 17253 - DNA, 50 bp, synthetic construct
  source 1..50: mol_type = other DNA
ttctaatcattatatataaaattcttataaaactaactcatatactttcc

SEQ ID NO: 17254 - DNA, 50 bp, synthetic construct
  source 1..50: mol_type = other DNA
actttctataaataaactaaatctaaacaaacctaacaatcattattatc

SEQ ID NO: 17255 - DNA, 50 bp, synthetic construct
  source 1..50: mol_type = other DNA
taacaataactatcaaatttattcaaacctaacttatctataaaaaactc

SEQ ID NO: 17256 - DNA, 50 bp, synthetic construct
  source 1..50: mol_type = other DNA
aacctccttataataaaactctaaccataaatataaccaccaacaaattc

SEQ ID NO: 17257 - DNA, 50 bp, synthetic construct
  source 1..50: mol_type = other DNA
aaacttcatttatcctttccctataaaatcaaaaaaatattactctctcc

SEQ ID NO: 17258 - DNA, 50 bp, synthetic construct
  source 1..50: mol_type = other DNA
caatcataattaactacccatataactaatctcaatctccaatctctccc

SEQ ID NO: 17259 - DNA, 50 bp, synthetic construct
  source 1..50: mol_type = other DNA
taactacccatataactaatctcaatctccaatctctcccraaatatacc

SEQ ID NO: 17260 - DNA, 50 bp, synthetic construct
  source 1..50: mol_type = other DNA
taaatatcattatttacctaaaatcttaaatcactaaataatccaattac

SEQ ID NO: 17261 - DNA, 50 bp, synthetic construct
  source 1..50: mol_type = other DNA
ttattttaaaacaaaatctcactccatcacccaaaataaaatacaaaaac

SEQ ID NO: 17262 - DNA, 50 bp, synthetic construct
  source 1..50: mol_type = other DNA
cataaaatctaataaaaactatccaaaataaactaaacacaataactcac

SEQ ID NO: 17263 - DNA, 50 bp, synthetic construct
  source 1..50: mol_type = other DNA
aaaaaacaaaataaatcaacactcaatatattccccaaactaaatcaccc

SEQ ID NO: 17264 - DNA, 50 bp, synthetic construct
  source 1..50: mol_type = other DNA
ttcrcaaatcaaatactaccaaaccctacattatatttaacaaaaccaac

SEQ ID NO: 17265 - DNA, 50 bp, synthetic construct
  source 1..50: mol_type = other DNA
tccaactctaaaccaatcaaaaaaaaccaaatatactcctcacaccaatc

SEQ ID NO: 17266 - DNA, 50 bp, synthetic construct
  source 1..50: mol_type = other DNA
caaaacctaacctaacccaatatctatctctacaattcctaaaaacaatc

SEQ ID NO: 17267 - DNA, 50 bp, synthetic construct
  source 1..50: mol_type = other DNA
aacctaaataaaacattctaccacaaaacactaactaaattaaacrtatc

SEQ ID NO: 17268 - DNA, 50 bp, synthetic construct
  source 1..50: mol_type = other DNA
aaatttaataaactaaatcctaaaatccttcaaaaaccttcccraattac

SEQ ID NO: 17269 - DNA, 50 bp, synthetic construct
  source 1..50: mol_type = other DNA
aacttaaatatccaccctaaaactaaaaaactttcraaataatcataacc

SEQ ID NO: 17270 - DNA, 50 bp, synthetic construct
  source 1..50: mol_type = other DNA
cctataaatacttataacttaaatatccaccctaaaactaaaaaactttc

SEQ ID NO: 17271 - DNA, 50 bp, synthetic construct
  source 1..50: mol_type = other DNA
aaaactataatccctatttcccctcaacatctattaaaaacccaaaactc

SEQ ID NO: 17272 - DNA, 50 bp, synthetic construct
  source 1..50: mol_type = other DNA
cccrcaataaacaacaattactttttaatttcccrcaaatctaaaaaatc

SEQ ID NO: 17273 - DNA, 50 bp, synthetic construct
  source 1..50: mol_type = other DNA
taatatataattctttctaattaatatcccaacctaaactaaaaatttcc

SEQ ID NO: 17274 - DNA, 50 bp, synthetic construct
  source 1..50: mol_type = other DNA
attctttctaattaatatcccaacctaaactaaaaatttccrtattaacc

SEQ ID NO: 17275 - DNA, 50 bp, synthetic construct
  source 1..50: mol_type = other DNA
tttctaattaatatcccaacctaaactaaaaatttccrtattaaccraac

SEQ ID NO: 17276 - DNA, 50 bp, synthetic construct
  source 1..50: mol_type = other DNA
atattaaaaccctttctctactaaaaaaccaaccraacrtaataacaaac

SEQ ID NO: 17277 - DNA, 50 bp, synthetic construct
  source 1..50: mol_type = other DNA
aatataattcttttaaaacttaacacatttcacattctttaccataatac

SEQ ID NO: 17278 - DNA, 50 bp, synthetic construct
  source 1..50: mol_type = other DNA
ctaacaatacctcatctaaccrccaaaaaacatccttattaatacttccc

SEQ ID NO: 17279 - DNA, 50 bp, synthetic construct
  source 1..50: mol_type = other DNA
acaacctaatccaatcaccctttatcaacctaacaatacctcatctaacc

SEQ ID NO: 17280 - DNA, 50 bp, synthetic construct
  source 1..50: mol_type = other DNA
accatttaaccctcttcttaaccttttaattaaaccctccttttaaaacc

SEQ ID NO: 17281 - DNA, 50 bp, synthetic construct
  source 1..50: mol_type = other DNA
aaccactctaaatcaaataaaaattcataaatcacraccttaacccraac

SEQ ID NO: 17282 - DNA, 50 bp, synthetic construct
  source 1..50: mol_type = other DNA
ttaaaaccactctaaatcaaataaaaattcataaatcacraccttaaccc

SEQ ID NO: 17283 - DNA, 50 bp, synthetic construct
  source 1..50: mol_type = other DNA
taccaattactttaaaaccactctaaatcaaataaaaattcataaatcac

SEQ ID NO: 17284 - DNA, 50 bp, synthetic construct
  source 1..50: mol_type = other DNA
aacaaacaaccctaaaaaacaaacccaaaattaacaactacatcataacc

SEQ ID NO: 17285 - DNA, 50 bp, synthetic construct
  source 1..50: mol_type = other DNA
tcaacrtaacaatatctcttaatataacctaacaaatacctataactaac

SEQ ID NO: 17286 - DNA, 50 bp, synthetic construct
  source 1..50: mol_type = other DNA
atctccraattcctaaactacctaaaaaaaatatctaacctttcctaccc

SEQ ID NO: 17287 - DNA, 50 bp, synthetic construct
  source 1..50: mol_type = other DNA
acatatcaccttacccacatccctaatactctaataatcaaaaaacctcc

SEQ ID NO: 17288 - DNA, 50 bp, synthetic construct
  source 1..50: mol_type = other DNA
ataaaaccaatattaaaatcctaatctacaattcaaaattcaacttctac

SEQ ID NO: 17289 - DNA, 50 bp, synthetic construct
  source 1..50: mol_type = other DNA
aatcttaaactaatccctactaattcctaaaacctaatttttctcctttc

SEQ ID NO: 17290 - DNA, 50 bp, synthetic construct
  source 1..50: mol_type = other DNA
aataaaataatacaaattacrattaatattctaccctttccaaccatccc

SEQ ID NO: 17291 - DNA, 50 bp, synthetic construct
  source 1..50: mol_type = other DNA
ccaacatactaaaaaaacaaaaccaacaaaaacaacaaatcccaaaatac

SEQ ID NO: 17292 - DNA, 50 bp, synthetic construct
  source 1..50: mol_type = other DNA
acaaactaaaaaaactattcccacraaccaccactataaataaaaaaatc

SEQ ID NO: 17293 - DNA, 50 bp, synthetic construct
  source 1..50: mol_type = other DNA
aatattatcattattcttttctctttttcttcccaaaaacccccccracc

SEQ ID NO: 17294 - DNA, 50 bp, synthetic construct
  source 1..50: mol_type = other DNA
caaactacaaaatcctaaaaacatacatatccatacacacacatacacac

SEQ ID NO: 17295 - DNA, 50 bp, synthetic construct
  source 1..50: mol_type = other DNA
atacatattcccaaaactttacaatctattaaaacatctataaaataaac

SEQ ID NO: 17296 - DNA, 50 bp, synthetic construct
  source 1..50: mol_type = other DNA
ttctataaatccatattcccttctcaaaaacttcccttaacraaaactcc

SEQ ID NO: 17297 - DNA, 50 bp, synthetic construct
  source 1..50: mol_type = other DNA
ttttactaaactcaccaaactccttatctttcctcaaaaccractcaaac

SEQ ID NO: 17298 - DNA, 50 bp, synthetic construct
  source 1..50: mol_type = other DNA
ccaaaaaaacraacaacaaaccacaaaaaacrataactaacrctaaaaac

SEQ ID NO: 17299 - DNA, 50 bp, synthetic construct
  source 1..50: mol_type = other DNA
tccaccctctaaaaaaatactccaaaaacaaaaaataacacrttctcaac

SEQ ID NO: 17300 - DNA, 50 bp, synthetic construct
  source 1..50: mol_type = other DNA
aaaaaaatactccaaaaacaaaaaataacacrttctcaacrccaatcacc

SEQ ID NO: 17301 - DNA, 50 bp, synthetic construct
  source 1..50: mol_type = other DNA
caaaaacaatacaatacaacataattacaaaaacccccacccaaaaaaac

SEQ ID NO: 17302 - DNA, 50 bp, synthetic construct
  source 1..50: mol_type = other DNA
aactaaaaaatatattcctaatacaataaacctaataatcaaaccttccc

SEQ ID NO: 17303 - DNA, 50 bp, synthetic construct
  source 1..50: mol_type = other DNA
aatacatacttcacttactatacccctatataataaacatcaactttacc

SEQ ID NO: 17304 - DNA, 50 bp, synthetic construct
  source 1..50: mol_type = other DNA
tacttaaacccaaaaattcraatccaaactaaacaaaataacraaacccc

SEQ ID NO: 17305 - DNA, 50 bp, synthetic construct
  source 1..50: mol_type = other DNA
acaaaataacraaaccccrtccctccaaaaaatacaaatattaactaaac

SEQ ID NO: 17306 - DNA, 50 bp, synthetic construct
  source 1..50: mol_type = other DNA
aaaactaacaaaaattataaacacaaaactactatcacaacaatccaccc

SEQ ID NO: 17307 - DNA, 50 bp, synthetic construct
  source 1..50: mol_type = other DNA
tatttcttaaaactcctcaatacactcrataaattacacaataaataacc

SEQ ID NO: 17308 - DNA, 50 bp, synthetic construct
  source 1..50: mol_type = other DNA
caaccattttatccaaacaacccctacractacttattatacaattcacc

SEQ ID NO: 17309 - DNA, 50 bp, synthetic construct
  source 1..50: mol_type = other DNA
ccraatacactaaaaaacttcaaaaaataactacctaaacctaaatttcc

SEQ ID NO: 17310 - DNA, 50 bp, synthetic construct
  source 1..50: mol_type = other DNA
tccacatctttataaaataaaactctaaaactacctaaacctaaacttcc

SEQ ID NO: 17311 - DNA, 50 bp, synthetic construct
  source 1..50: mol_type = other DNA
caaaaccaaaaaaataattcacccaaaattaaacaaatcataaaaaccrc

SEQ ID NO: 17312 - DNA, 50 bp, synthetic construct
  source 1..50: mol_type = other DNA
aaacctactaaactaaacaaaactcctctcaactctaaataatacactac

SEQ ID NO: 17313 - DNA, 50 bp, synthetic construct
  source 1..50: mol_type = other DNA
ataaacaaccatattactcacacaaaacctatttaataatctcttcacac

SEQ ID NO: 17314 - DNA, 50 bp, synthetic construct
  source 1..50: mol_type = other DNA
ctacttctctacatttatcctcactatccttttcactcraaacaccaaac

SEQ ID NO: 17315 - DNA, 50 bp, synthetic construct
  source 1..50: mol_type = other DNA
aaacaaactttcctacttctctacatttatcctcactatccttttcactc

SEQ ID NO: 17316 - DNA, 50 bp, synthetic construct
  source 1..50: mol_type = other DNA
ataataaaaacacctaaacaaatatatacctacccatccataaccacccc

SEQ ID NO: 17317 - DNA, 50 bp, synthetic construct
  source 1..50: mol_type = other DNA
aatcacctaatcccccacctaaactaatactattctaaaattcaaaaaac

SEQ ID NO: 17318 - DNA, 50 bp, synthetic construct
  source 1..50: mol_type = other DNA
aaatcctaactcatcacccraaaaatttacttaaaataaaatcccatttc

SEQ ID NO: 17319 - DNA, 50 bp, synthetic construct
  source 1..50: mol_type = other DNA
acccctcraataataaatcaaaacttctaactcatcttaaaaaattaatc

SEQ ID NO: 17320 - DNA, 50 bp, synthetic construct
  source 1..50: mol_type = other DNA
aactatacacttttaatcaacaaactataactcacaaatattcracrtac

SEQ ID NO: 17321 - DNA, 50 bp, synthetic construct
  source 1..50: mol_type = other DNA
ctaatcaaactatacacttttaatcaacaaactataactcacaaatattc

SEQ ID NO: 17322 - DNA, 50 bp, synthetic construct
  source 1..50: mol_type = other DNA
caaaacctatcaaacratctacataactataaaaaataattcacaacacc

SEQ ID NO: 17323 - DNA, 50 bp, synthetic construct
  source 1..50: mol_type = other DNA
cataccctcacaaaaaattctcactcrataaacaaaatacaaaattttcc

SEQ ID NO: 17324 - DNA, 50 bp, synthetic construct
  source 1..50: mol_type = other DNA
cctacatcctactcaccraataaaaatttcctataaaaatataccctacc

SEQ ID NO: 17325 - DNA, 50 bp, synthetic construct
  source 1..50: mol_type = other DNA
aaataaacacacataaaaccacaaaactcactaacaaccacacataattc

SEQ ID NO: 17326 - DNA, 50 bp, synthetic construct
  source 1..50: mol_type = other DNA
aataaaaacatcaaaacccaaaataatacaaaaccttaacaaaaactcac

SEQ ID NO: 17327 - DNA, 50 bp, synthetic construct
  source 1..50: mol_type = other DNA
ctcaaactaaaactaaaaattacaaaacccaccataaaacttaattaccc

SEQ ID NO: 17328 - DNA, 50 bp, synthetic construct
  source 1..50: mol_type = other DNA
tctttatatattttcctttccttacaaactcratacrtataaattttaac

SEQ ID NO: 17329 - DNA, 50 bp, synthetic construct
  source 1..50: mol_type = other DNA
ccctttcctccaaaatttaactataaattaatacacaccraaaaccacrc

SEQ ID NO: 17330 - DNA, 50 bp, synthetic construct
  source 1..50: mol_type = other DNA
aattcacaataccctttcctccaaaatttaactataaattaatacacacc

SEQ ID NO: 17331 - DNA, 50 bp, synthetic construct
  source 1..50: mol_type = other DNA
aaactacrttcctaatacaaaacttcraatctccctaacaaaccttatac

SEQ ID NO: 17332 - DNA, 50 bp, synthetic construct
  source 1..50: mol_type = other DNA
attatcttaaaaaactccaactactcataaatataaaatcaaaaaaaacc

SEQ ID NO: 17333 - DNA, 50 bp, synthetic construct
  source 1..50: mol_type = other DNA
acrctacctctttaatatcttacttacaaatacattttctaactaaccac

SEQ ID NO: 17334 - DNA, 50 bp, synthetic construct
  source 1..50: mol_type = other DNA
acaaaaaaattccaataacraaaaaataattcacrcaaaaccaactatac

SEQ ID NO: 17335 - DNA, 50 bp, synthetic construct
  source 1..50: mol_type = other DNA
tctacrtaaattactctttcrccattaaaattcccctatcttaacaaatc

SEQ ID NO: 17336 - DNA, 50 bp, synthetic construct
  source 1..50: mol_type = other DNA
ttactctttcrccattaaaattcccctatcttaacaaatcractatctac

SEQ ID NO: 17337 - DNA, 50 bp, synthetic construct
  source 1..50: mol_type = other DNA
caaacaaatcttctatccaaatttctaaacrcatttccacaaacrtaatc

SEQ ID NO: 17338 - DNA, 50 bp, synthetic construct
  source 1..50: mol_type = other DNA
taaattaaacccttaaccaatccacttaaaaaatactacctatcctcttc

SEQ ID NO: 17339 - DNA, 50 bp, synthetic construct
  source 1..50: mol_type = other DNA
ttcaaaaaatcracaaataatacacccrtaaccttaaaataacaaaacac

SEQ ID NO: 17340 - DNA, 50 bp, synthetic construct
  source 1..50: mol_type = other DNA
aaataaaacctaaaatcctacatttcaaaaaatcracaaataatacaccc

SEQ ID NO: 17341 - DNA, 50 bp, synthetic construct
  source 1..50: mol_type = other DNA
caaatattcacrtatcttaccactttaaaatcacraatacattacctatc

SEQ ID NO: 17342 - DNA, 50 bp, synthetic construct
  source 1..50: mol_type = other DNA
aaatcataactaaattctctccctctttctacctatcactaataattaac

SEQ ID NO: 17343 - DNA, 50 bp, synthetic construct
  source 1..50: mol_type = other DNA
aatacacacaaaaacacaaactccaattttaaaaataacaatcactcctc

SEQ ID NO: 17344 - DNA, 50 bp, synthetic construct
  source 1..50: mol_type = other DNA
acttaataactttaaacatacaatcatcttaacataacttaatataaacc

SEQ ID NO: 17345 - DNA, 50 bp, synthetic construct
  source 1..50: mol_type = other DNA
ctacccttcttaaatttctttcctataacaaacctcctaaccttcacaac

SEQ ID NO: 17346 - DNA, 50 bp, synthetic construct
  source 1..50: mol_type = other DNA
tcctctaaaaataaactatattctactcttcccactcacrtcacaaaatc

SEQ ID NO: 17347 - DNA, 50 bp, synthetic construct
  source 1..50: mol_type = other DNA
aactttaacctctttccraaacccaaaaaaaatattttacatcctcaaac

SEQ ID NO: 17348 - DNA, 50 bp, synthetic construct
  source 1..50: mol_type = other DNA
accccaaataataacaaaaaacaccttaaaacaaactttaacctctttcc

SEQ ID NO: 17349 - DNA, 50 bp, synthetic construct
  source 1..50: mol_type = other DNA
aacaaaaataacaacatcccaattttaacaacacaaatataaaaccaacc

SEQ ID NO: 17350 - DNA, 50 bp, synthetic construct
  source 1..50: mol_type = other DNA
ttatattatcaaaactaaaatactatcatttctatttctctatctctttc

SEQ ID NO: 17351 - DNA, 50 bp, synthetic construct
  source 1..50: mol_type = other DNA
ttaaaaacattttttacaattcactatttcccaacattccttttaattac

SEQ ID NO: 17352 - DNA, 50 bp, synthetic construct
  source 1..50: mol_type = other DNA
cctaaaaaaatattcaactaaaaatacaaaacctcttaacaattaatccc

SEQ ID NO: 17353 - DNA, 50 bp, synthetic construct
  source 1..50: mol_type = other DNA
aaaaaatattcaactaaaaatacaaaacctcttaacaattaatcccraac

SEQ ID NO: 17354 - DNA, 50 bp, synthetic construct
  source 1..50: mol_type = other DNA
aaaataaaaaaatccaaaaacattacracraaacraatccctatttaacc

SEQ ID NO: 17355 - DNA, 50 bp, synthetic construct
  source 1..50: mol_type = other DNA
aaattccaaaattaacrcaaaaactaccaaatacaatacaaaataaaatc

SEQ ID NO: 17356 - DNA, 50 bp, synthetic construct
  source 1..50: mol_type = other DNA
atctcactaatattcaaaataacactttaaaaccaaatataataacttac

SEQ ID NO: 17357 - DNA, 50 bp, synthetic construct
  source 1..50: mol_type = other DNA
atcctaaccaacaaaataaaactccatctctacttaaaaatacaccraac

SEQ ID NO: 17358 - DNA, 50 bp, synthetic construct
  source 1..50: mol_type = other DNA
tactaacaaacctcaaaatacataacraatcctcctacttctccatctac

SEQ ID NO: 17359 - DNA, 50 bp, synthetic construct
  source 1..50: mol_type = other DNA
cratcraaaaaaatctaacatcaatactaacaaacctcaaaatacataac

SEQ ID NO: 17360 - DNA, 50 bp, synthetic construct
  source 1..50: mol_type = other DNA
ttactattttaaaataactaccaaaatcaaacaatccaaaataacaacac

SEQ ID NO: 17361 - DNA, 50 bp, synthetic construct
  source 1..50: mol_type = other DNA
aatcaacccttatataaattatttccaaaaacacacatccaaaaaaattc

SEQ ID NO: 17362 - DNA, 50 bp, synthetic construct
  source 1..50: mol_type = other DNA
aacattataaaatattcaacaacatccctaacctctatccactaaatacc

SEQ ID NO: 17363 - DNA, 50 bp, synthetic construct
  source 1..50: mol_type = other DNA
aaaaaaactaaaaatcaccttcttttctaaacaattaaataactaaaacc

SEQ ID NO: 17364 - DNA, 50 bp, synthetic construct
  source 1..50: mol_type = other DNA
ctataataacaataaccatcccatttaatcctcrttattcttcttttatc

SEQ ID NO: 17365 - DNA, 50 bp, synthetic construct
  source 1..50: mol_type = other DNA
ctacaataaaccataactataccactacattacaaccttaataacacaac

SEQ ID NO: 17366 - DNA, 50 bp, synthetic construct
  source 1..50: mol_type = other DNA
aatttatacraaacttacatttacttcataaaacctaacaactcaattac

SEQ ID NO: 17367 - DNA, 50 bp, synthetic construct
  source 1..50: mol_type = other DNA
acaaactataaatcatataatatatccaaaaaatcatcatttcaaaacac

SEQ ID NO: 17368 - DNA, 50 bp, synthetic construct
  source 1..50: mol_type = other DNA
atttactcttaactatcctaatttattctcctactatacaaaaactctcc

SEQ ID NO: 17369 - DNA, 50 bp, synthetic construct
  source 1..50: mol_type = other DNA
aaacccaataaatcaataaatactaaaaactaaaatataaaacacaaaac

SEQ ID NO: 17370 - DNA, 50 bp, synthetic construct
  source 1..50: mol_type = other DNA
cacctattacaaaaatccccaataaaaccttcctaaccattttaaaaaac

SEQ ID NO: 17371 - DNA, 50 bp, synthetic construct
  source 1..50: mol_type = other DNA
ccctacccctaaaaactccctattaccaaaaaacttacaataacaatatc

SEQ ID NO: 17372 - DNA, 50 bp, synthetic construct
  source 1..50: mol_type = other DNA
raacactaaaaaactacaaataaatccractaaaacccaaaaccrtaacc

SEQ ID NO: 17373 - DNA, 50 bp, synthetic construct
  source 1..50: mol_type = other DNA
cctaccraacactaaaaaactacaaataaatccractaaaacccaaaacc

SEQ ID NO: 17374 - DNA, 50 bp, synthetic construct
  source 1..50: mol_type = other DNA
acctctttataaatttctaactcttccractacractctaaactttaatc

SEQ ID NO: 17375 - DNA, 50 bp, synthetic construct
  source 1..50: mol_type = other DNA
tttccrcactaacattaaaatcaaatacattttttcaaaaaaccraaaac

SEQ ID NO: 17376 - DNA, 50 bp, synthetic construct
  source 1..50: mol_type = other DNA
aatatctttccrcactaacattaaaatcaaatacattttttcaaaaaacc

SEQ ID NO: 17377 - DNA, 50 bp, synthetic construct
  source 1..50: mol_type = other DNA
acaatcttcatactaaaataacactaaataaatatattttccatatctcc

SEQ ID NO: 17378 - DNA, 50 bp, synthetic construct
  source 1..50: mol_type = other DNA
aatcaacattctcaatactaaaaaataacaataactaaaaaaatctttcc

SEQ ID NO: 17379 - DNA, 50 bp, synthetic construct
  source 1..50: mol_type = other DNA
aaaaaaaaatctttctccaaactccrcaaaataaatcacaaatcatcacc

SEQ ID NO: 17380 - DNA, 50 bp, synthetic construct
  source 1..50: mol_type = other DNA
ccctaccccctccctcaatttaatttacctattatcaatcaattactaac

SEQ ID NO: 17381 - DNA, 50 bp, synthetic construct
  source 1..50: mol_type = other DNA
aaaccttacattatcatatcrtttatccaaatcaccttttaccaacattc

SEQ ID NO: 17382 - DNA, 50 bp, synthetic construct
  source 1..50: mol_type = other DNA
aaatctatcccraatttaaactctaactaaacatacttaactcaaacccc

SEQ ID NO: 17383 - DNA, 50 bp, synthetic construct
  source 1..50: mol_type = other DNA
cttaaaccccacaaatactaaaaacactacctctcaatctccaaaaaccc

SEQ ID NO: 17384 - DNA, 50 bp, synthetic construct
  source 1..50: mol_type = other DNA
rtttctctaaacrctaatatcctcctatacaaaataaaaatcctaatacc

SEQ ID NO: 17385 - DNA, 50 bp, synthetic construct
  source 1..50: mol_type = other DNA
actaattcccatttctatactacttccttaacatataattaattatacac

SEQ ID NO: 17386 - DNA, 50 bp, synthetic construct
  source 1..50: mol_type = other DNA
ttaacatataattaattatacacrtctaaacaatcaacccataaaattac

SEQ ID NO: 17387 - DNA, 50 bp, synthetic construct
  source 1..50: mol_type = other DNA
ataaaaacctccaaaaaacctttataattaataccatcctcctccctttc

SEQ ID NO: 17388 - DNA, 50 bp, synthetic construct
  source 1..50: mol_type = other DNA
ttccaaaaaaataaacaatcactaactaacttaaatattataaaacaaac

SEQ ID NO: 17389 - DNA, 50 bp, synthetic construct
  source 1..50: mol_type = other DNA
tacctaattactataataatactaccatcrtctctcrctttcaaacctac

SEQ ID NO: 17390 - DNA, 50 bp, synthetic construct
  source 1..50: mol_type = other DNA
aaaccaaaactttatacctaattactataataatactaccatcrtctctc

SEQ ID NO: 17391 - DNA, 50 bp, synthetic construct
  source 1..50: mol_type = other DNA
caaaactaaaccaaaactttatacctaattactataataatactaccatc

SEQ ID NO: 17392 - DNA, 50 bp, synthetic construct
  source 1..50: mol_type = other DNA
aacraacacataaactcatatataatcaactcaaccctaacaacaaccac

SEQ ID NO: 17393 - DNA, 50 bp, synthetic construct
  source 1..50: mol_type = other DNA
aatctttaaaccaaaaaccaatcaaataaaaacaccaaaatcctataaac

SEQ ID NO: 17394 - DNA, 50 bp, synthetic construct
  source 1..50: mol_type = other DNA
ccaacactaaacaaaaaaaactaccrataaacataaaacactataaaaac

SEQ ID NO: 17395 - DNA, 50 bp, synthetic construct
  source 1..50: mol_type = other DNA
aaaaaacaattaaatttacttttcctcttcattaacttcatccctccccc

SEQ ID NO: 17396 - DNA, 50 bp, synthetic construct
  source 1..50: mol_type = other DNA
aaatatccaaaaccacacttcaaaaatatatcctatacttcaaacaatac

SEQ ID NO: 17397 - DNA, 50 bp, synthetic construct
  source 1..50: mol_type = other DNA
aaaatataattctaaacatctactatctttcaaaaacaaatatcccatcc

SEQ ID NO: 17398 - DNA, 50 bp, synthetic construct
  source 1..50: mol_type = other DNA
aaaaaaaatcccctcatatactatatatataataacrtactttataaacc

SEQ ID NO: 17399 - DNA, 50 bp, synthetic construct
  source 1..50: mol_type = other DNA
acatacaaacatacacaaaaacactcctaccatcacractcacaaaacac

SEQ ID NO: 17400 - DNA, 50 bp, synthetic construct
  source 1..50: mol_type = other DNA
cacaacacataaaaaaactcctcccaactatcaacacttactctacaacc

SEQ ID NO: 17401 - DNA, 50 bp, synthetic construct
  source 1..50: mol_type = other DNA
ttaaaatctcatataaactaaattccrtctaaaaatcctccatcccactc

SEQ ID NO: 17402 - DNA, 50 bp, synthetic construct
  source 1..50: mol_type = other DNA
attaaataacaactctataatctattaaaatctcatataaactaaattcc

SEQ ID NO: 17403 - DNA, 50 bp, synthetic construct
  source 1..50: mol_type = other DNA
acratccaaaaaacrtatatctcttccttataataaatcttacaaaatcc

SEQ ID NO: 17404 - DNA, 50 bp, synthetic construct
  source 1..50: mol_type = other DNA
tatcattcaatacataaatttcaaaaaacaacactcacratccaaaaaac

SEQ ID NO: 17405 - DNA, 50 bp, synthetic construct
  source 1..50: mol_type = other DNA
atactctaaaactatcattcaatacataaatttcaaaaaacaacactcac

SEQ ID NO: 17406 - DNA, 50 bp, synthetic construct
  source 1..50: mol_type = other DNA
aataaaaactactacctaaaaaccatacaaacaatataaacaatacttcc

SEQ ID NO: 17407 - DNA, 50 bp, synthetic construct
  source 1..50: mol_type = other DNA
ctaaaatcaatttcactaaccaaaatcaaaatatcaacaaaaccatactc

SEQ ID NO: 17408 - DNA, 50 bp, synthetic construct
  source 1..50: mol_type = other DNA
caaaactactcctaacaccaataatatatttctatttctttatttaactc

SEQ ID NO: 17409 - DNA, 50 bp, synthetic construct
  source 1..50: mol_type = other DNA
acaccaataatatatttctatttctttatttaactcrctaaatataccac

SEQ ID NO: 17410 - DNA, 50 bp, synthetic construct
  source 1..50: mol_type = other DNA
acctccctaataaatatactaaacccrcctactttcttcttctaactaac

SEQ ID NO: 17411 - DNA, 50 bp, synthetic construct
  source 1..50: mol_type = other DNA
aacccrcctactttcttcttctaactaacractaccaaaacataatatac

SEQ ID NO: 17412 - DNA, 50 bp, synthetic construct
  source 1..50: mol_type = other DNA
aaccaaaactacctatttctaaaacacaataaacattcccaaataacctc

SEQ ID NO: 17413 - DNA, 50 bp, synthetic construct
  source 1..50: mol_type = other DNA
acaaaccccaaacctaaaacacatataaaataacaaaccactaatatcac

SEQ ID NO: 17414 - DNA, 50 bp, synthetic construct
  source 1..50: mol_type = other DNA
aaaccaaacatctcaccctactattctaaatcttttcaaatccaccaaac

SEQ ID NO: 17415 - DNA, 50 bp, synthetic construct
  source 1..50: mol_type = other DNA
tttaaaaaaactcaaaacaacaaaataaaatacttaaccccaaaccccac

SEQ ID NO: 17416 - DNA, 50 bp, synthetic construct
  source 1..50: mol_type = other DNA
tttacttttattttaaaaacctcactctatattaaacacatcccaaactc

SEQ ID NO: 17417 - DNA, 50 bp, synthetic construct
  source 1..50: mol_type = other DNA
acaatttacrtcaaataaaacctaatatcraaaactaaatcctactttcc

SEQ ID NO: 17418 - DNA, 50 bp, synthetic construct
  source 1..50: mol_type = other DNA
acaaaacaacttcatataaaaaaccttccraaaaacaaaacccaaccctc

SEQ ID NO: 17419 - DNA, 50 bp, synthetic construct
  source 1..50: mol_type = other DNA
aaaatctcaatcaaaaataaactacaaataaaaacracctacacctctac

SEQ ID NO: 17420 - DNA, 50 bp, synthetic construct
  source 1..50: mol_type = other DNA
aacctaaccacaaaataaatataacaatacaaaaaacatattaacaactc

SEQ ID NO: 17421 - DNA, 50 bp, synthetic construct
  source 1..50: mol_type = other DNA
caaaaacaccaccccataacttactcacaaaattataaattataaatcac

SEQ ID NO: 17422 - DNA, 50 bp, synthetic construct
  source 1..50: mol_type = other DNA
aacaaaaaacaactcaaataccaacaacttccratatactcaaaaatacc

SEQ ID NO: 17423 - DNA, 50 bp, synthetic construct
  source 1..50: mol_type = other DNA
atctacaaaaacccaaaaaactctaaaccaaatatcatatatctacaaac

SEQ ID NO: 17424 - DNA, 50 bp, synthetic construct
  source 1..50: mol_type = other DNA
aaaaatacraataaaacaaatatcctcctatctcataataatctcaaacc

SEQ ID NO: 17425 - DNA, 50 bp, synthetic construct
  source 1..50: mol_type = other DNA
aaaatctaaaaaataacaaaaacttaccrtactacrttccctaaaaatac

SEQ ID NO: 17426 - DNA, 50 bp, synthetic construct
  source 1..50: mol_type = other DNA
aaacatccttttctcaaaatctaaaaaataacaaaaacttaccrtactac

SEQ ID NO: 17427 - DNA, 50 bp, synthetic construct
  source 1..50: mol_type = other DNA
aacaaataaacatccttttctcaaaatctaaaaaataacaaaaacttacc

SEQ ID NO: 17428 - DNA, 50 bp, synthetic construct
  source 1..50: mol_type = other DNA
catcaaaaaaaccraaccccacatccctctaccttttctaatctatttac

SEQ ID NO: 17429 - DNA, 50 bp, synthetic construct
  source 1..50: mol_type = other DNA
atcaactcttttattttcattcaaatttcataactaatttctacactatc

SEQ ID NO: 17430 - DNA, 50 bp, synthetic construct
  source 1..50: mol_type = other DNA
catctacctatattcaaaactattttcattaactatctctataataccac

SEQ ID NO: 17431 - DNA, 50 bp, synthetic construct
  source 1..50: mol_type = other DNA
aaaaattaacraaacctactaaaaatcatttaaataaatatcataatcac

SEQ ID NO: 17432 - DNA, 50 bp, synthetic construct
  source 1..50: mol_type = other DNA
aaccaattatctactaaacattcctccctaatacatctcacaaataaccc

SEQ ID NO: 17433 - DNA, 50 bp, synthetic construct
  source 1..50: mol_type = other DNA
aaacttaaaacaaaaaacactcaaacaaactacactctaaatcccrctac

SEQ ID NO: 17434 - DNA, 50 bp, synthetic construct
  source 1..50: mol_type = other DNA
taaaacctctaaactaccttcctcaatccttccctctacaaaacttaaac

SEQ ID NO: 17435 - DNA, 50 bp, synthetic construct
  source 1..50: mol_type = other DNA
atatataaaatttaaaacttatcaacaactacaacaacacaaaccacrtc

SEQ ID NO: 17436 - DNA, 50 bp, synthetic construct
  source 1..50: mol_type = other DNA
ataatatataaaatttaaaacttatcaacaactacaacaacacaaaccac

SEQ ID NO: 17437 - DNA, 50 bp, synthetic construct
  source 1..50: mol_type = other DNA
aaaattaaatacccctctcactcccaattttatatatttaaaaaatcctc

SEQ ID NO: 17438 - DNA, 50 bp, synthetic construct
  source 1..50: mol_type = other DNA
accaacactaaattacttcaaaaccaataaacctcatactctaaaataac

SEQ ID NO: 17439 - DNA, 50 bp, synthetic construct
  source 1..50: mol_type = other DNA
taaacacataaatacrtctactacatttccaactctatacaccaacaaac

SEQ ID NO: 17440 - DNA, 50 bp, synthetic construct
  source 1..50: mol_type = other DNA
acaatcctaatcctcccccaaatcaaactcacaaaactctaaataaaacc

SEQ ID NO: 17441 - DNA, 50 bp, synthetic construct
  source 1..50: mol_type = other DNA
caattctctaaataaatatttacctttctcttaattttcctttcaatatc

SEQ ID NO: 17442 - DNA, 50 bp, synthetic construct
  source 1..50: mol_type = other DNA
tatataaatcrtttctcttaaattcatactctaatctactatcactaatc

SEQ ID NO: 17443 - DNA, 50 bp, synthetic construct
  source 1..50: mol_type = other DNA
aacatactaaataccactttctcttaaactaaacaaaaaataattatatc

SEQ ID NO: 17444 - DNA, 50 bp, synthetic construct
  source 1..50: mol_type = other DNA
aatccaaaacaacaacacacrccaaccaaaaactctaatactctaacttc

SEQ ID NO: 17445 - DNA, 50 bp, synthetic construct
  source 1..50: mol_type = other DNA
aacacacrccaaccaaaaactctaatactctaacttcraaaaaacaacac

SEQ ID NO: 17446 - DNA, 50 bp, synthetic construct
  source 1..50: mol_type = other DNA
cactaaaaacaaaacctatatataaacctatactcatctaaatataccac

SEQ ID NO: 17447 - DNA, 50 bp, synthetic construct
  source 1..50: mol_type = other DNA
acccacatataaaatataaaacaaacaacctaacattaatctccaaacac

SEQ ID NO: 17448 - DNA, 50 bp, synthetic construct
  source 1..50: mol_type = other DNA
atataaaacaaacaacctaacattaatctccaaacacraccaacactacc

SEQ ID NO: 17449 - DNA, 50 bp, synthetic construct
  source 1..50: mol_type = other DNA
aaatcaacttaaataacccraacctcraaaaatccatctataaaaacacc

SEQ ID NO: 17450 - DNA, 50 bp, synthetic construct
  source 1..50: mol_type = other DNA
ccacttaattatacacttcaaaataacaaattttataatatataaattac

SEQ ID NO: 17451 - DNA, 50 bp, synthetic construct
  source 1..50: mol_type = other DNA
tttatacaatacctatttacattcaatactaaattaacacaaaaataaac

SEQ ID NO: 17452 - DNA, 50 bp, synthetic construct
  source 1..50: mol_type = other DNA
aaatcaaaataaccaaaataattaccratcrccatcttaaaatcttcacc

SEQ ID NO: 17453 - DNA, 50 bp, synthetic construct
  source 1..50: mol_type = other DNA
ccrataaatccraaaatactaaatcaaaataaccaaaataattaccratc

SEQ ID NO: 17454 - DNA, 50 bp, synthetic construct
  source 1..50: mol_type = other DNA
raaaataccaaatcaaaataaccaaaataactaccraaataacraaaacc

SEQ ID NO: 17455 - DNA, 50 bp, synthetic construct
  source 1..50: mol_type = other DNA
aataaacraaaataccaaatcaaaataaccaaaataactaccraaataac

SEQ ID NO: 17456 - DNA, 50 bp, synthetic construct
  source 1..50: mol_type = other DNA
taaacccraaaatactaaatcaaaatacccratataactatcaaaataac

SEQ ID NO: 17457 - DNA, 50 bp, synthetic construct
  source 1..50: mol_type = other DNA
taaattaaatttcrtacttctaaatataacacrccctaataaacatacrc

SEQ ID NO: 17458 - DNA, 50 bp, synthetic construct
  source 1..50: mol_type = other DNA
aataaattaaatttcrtacttctaaatataacacrccctaataaacatac

SEQ ID NO: 17459 - DNA, 50 bp, synthetic construct
  source 1..50: mol_type = other DNA
caataaacctcrcccraaaactcaataaaaatttttaccctctttatctc

SEQ ID NO: 17460 - DNA, 50 bp, synthetic construct
  source 1..50: mol_type = other DNA
atcrtcctaaaaaaacatccaaacaattttatttacttaaaaaaattacc

SEQ ID NO: 17461 - DNA, 50 bp, synthetic construct
  source 1..50: mol_type = other DNA
attacatccraaaccrcattaaaaaaatacrcctaaaaaacaatccaatc

SEQ ID NO: 17462 - DNA, 50 bp, synthetic construct
  source 1..50: mol_type = other DNA
aataaaactatttaaatactttcccaaaacrattaaattaccctccaaac

SEQ ID NO: 17463 - DNA, 50 bp, synthetic construct
  source 1..50: mol_type = other DNA
ttcaattacaaataacacattctacaaaactaataacaccaattacatcc

SEQ ID NO: 17464 - DNA, 50 bp, synthetic construct
  source 1..50: mol_type = other DNA
tatataacatataaaaaattaatttcaaatttctaaacaatattttcctc

SEQ ID NO: 17465 - DNA, 50 bp, synthetic construct
  source 1..50: mol_type = other DNA
aaaaacctcacttattcacatacaaattttaattaaatcactataataac

SEQ ID NO: 17466 - DNA, 50 bp, synthetic construct
  source 1..50: mol_type = other DNA
ttaaaatcatataatccttatacaaacttctaaaacttacctttatcacc

SEQ ID NO: 17467 - DNA, 50 bp, synthetic construct
  source 1..50: mol_type = other DNA
actacaatacaatttcactactcatcctcccraaaaaaatcatacacaac

SEQ ID NO: 17468 - DNA, 50 bp, synthetic construct
  source 1..50: mol_type = other DNA
aatttcactactcatcctcccraaaaaaatcatacacaacrtcttactac

SEQ ID NO: 17469 - DNA, 50 bp, synthetic construct
  source 1..50: mol_type = other DNA
cacrtaaccctatataaccctacaaatacaacraccctaaaaaatacatc

SEQ ID NO: 17470 - DNA, 50 bp, synthetic construct
  source 1..50: mol_type = other DNA
aaaaatacatcrtcaacctaaaataaactctacacctactttcccactac

SEQ ID NO: 17471 - DNA, 50 bp, synthetic construct
  source 1..50: mol_type = other DNA
taaaacaaaacttacttaccctacaaataaacrtatcccaataaaacrcc

SEQ ID NO: 17472 - DNA, 50 bp, synthetic construct
  source 1..50: mol_type = other DNA
aaataaaacaaaacttacttaccctacaaataaacrtatcccaataaaac

SEQ ID NO: 17473 - DNA, 50 bp, synthetic construct
  source 1..50: mol_type = other DNA
cttaaaataccracaaaataaaacaaaacttacttaccctacaaataaac

SEQ ID NO: 17474 - DNA, 50 bp, synthetic construct
  source 1..50: mol_type = other DNA
tactaaaacacrctcacctacaaaacaaacaaactctacttcactttatc

SEQ ID NO: 17475 - DNA, 50 bp, synthetic construct
  source 1..50: mol_type = other DNA
ataataaacccacaacaaacaaaactcaacccacaaaaccrcctataaac

SEQ ID NO: 17476 - DNA, 50 bp, synthetic construct
  source 1..50: mol_type = other DNA
aaaaatcacaataataaacccacaacaaacaaaactcaacccacaaaacc

SEQ ID NO: 17477 - DNA, 50 bp, synthetic construct
  source 1..50: mol_type = other DNA
crctttcacatttacaaaaaatactataactaaccctcatcccctactac

SEQ ID NO: 17478 - DNA, 50 bp, synthetic construct
  source 1..50: mol_type = other DNA
aaaaaatactataactaaccctcatcccctactacrcataccaacacaac

SEQ ID NO: 17479 - DNA, 50 bp, synthetic construct
  source 1..50: mol_type = other DNA
tttaaaaaccaaataaaccttctaaaacaaactaaacaaactatataaac

SEQ ID NO: 17480 - DNA, 50 bp, synthetic construct
  source 1..50: mol_type = other DNA
tataaaataccratttactaaaaaccaaataaatacataattaactattc

SEQ ID NO: 17481 - DNA, 50 bp, synthetic construct
  source 1..50: mol_type = other DNA
tatctccacaaataactaccctatatttacctcatcttatataaaatacc

SEQ ID NO: 17482 - DNA, 50 bp, synthetic construct
  source 1..50: mol_type = other DNA
tatatactaaaacaacatttaataaaattcaacatccctttattataaac

SEQ ID NO: 17483 - DNA, 50 bp, synthetic construct
  source 1..50: mol_type = other DNA
ttaatttatatatataaaacaatccttacatcctaaaataaatcccactc

SEQ ID NO: 17484 - DNA, 50 bp, synthetic construct
  source 1..50: mol_type = other DNA
aaccaatatccctaataaacataaataaaaaaatcctcaacaaaataccc

SEQ ID NO: 17485 - DNA, 50 bp, synthetic construct
  source 1..50: mol_type = other DNA
tataaaaaacaattaataccaattatcaaactattccaaaaaattaaatc

SEQ ID NO: 17486 - DNA, 50 bp, synthetic construct
  source 1..50: mol_type = other DNA
taattaaaactataccttttcctaaaataaaactatactcttctccctac

SEQ ID NO: 17487 - DNA, 50 bp, synthetic construct
  source 1..50: mol_type = other DNA
cctttatcaaataaatatccccaaaaataaaatacaaaaactacrtcacc

SEQ ID NO: 17488 - DNA, 50 bp, synthetic construct
  source 1..50: mol_type = other DNA
acacrccctttatcaaataaatatccccaaaaataaaatacaaaaactac

SEQ ID NO: 17489 - DNA, 50 bp, synthetic construct
  source 1..50: mol_type = other DNA
taacrcaatctctacatcccattcctaaaaatattcacttaataaaaaac

SEQ ID NO: 17490 - DNA, 50 bp, synthetic construct
  source 1..50: mol_type = other DNA
aaaactcttcaaataaaattaaattttttcccctattaaatttcttaacc

SEQ ID NO: 17491 - DNA, 50 bp, synthetic construct
  source 1..50: mol_type = other DNA
aattaaattttttcccctattaaatttcttaaccrcttataataactcac

SEQ ID NO: 17492 - DNA, 50 bp, synthetic construct
  source 1..50: mol_type = other DNA
cctacaattactatctaaaaacaaaaaccctcactataacaaaacctaac

SEQ ID NO: 17493 - DNA, 50 bp, synthetic construct
  source 1..50: mol_type = other DNA
accatatctaaaattaaccaatcractctcacctaactatatctaaaatc

SEQ ID NO: 17494 - DNA, 50 bp, synthetic construct
  source 1..50: mol_type = other DNA
taaaccaaaacaaaaccttaatcracctcaaacataactaaataaaaacc

SEQ ID NO: 17495 - DNA, 50 bp, synthetic construct
  source 1..50: mol_type = other DNA
cctcaaacataactaatcataaactccccacaaaactcaacacaacacac

SEQ ID NO: 17496 - DNA, 50 bp, synthetic construct
  source 1..50: mol_type = other DNA
aaacataactaatcataaactccccacaaaactcaacacaacacacraac

SEQ ID NO: 17497 - DNA, 50 bp, synthetic construct
  source 1..50: mol_type = other DNA
caactataaaaataaccttactaaaataatcatcatttcatccaatcctc

SEQ ID NO: 17498 - DNA, 50 bp, synthetic construct
  source 1..50: mol_type = other DNA
caaccaaaaccaactctaaaaccaaaaaacctaaatttaaaaataaaccc

SEQ ID NO: 17499 - DNA, 50 bp, synthetic construct
  source 1..50: mol_type = other DNA
tacccaaaaaatcaattacatatcaacaataaaaatactcaaaatcttcc

SEQ ID NO: 17500 - DNA, 50 bp, synthetic construct
  source 1..50: mol_type = other DNA
aatcaaactaatacrtatccaaacataaaattctttcaactctactacac

SEQ ID NO: 17501 - DNA, 50 bp, synthetic construct
  source 1..50: mol_type = other DNA
aattaaaaaaattttatacctaaacacrcaccaacttaattccacccttc

SEQ ID NO: 17502 - DNA, 50 bp, synthetic construct
  source 1..50: mol_type = other DNA
aaaattttatacctaaacacrcaccaacttaattccacccttcrcatttc

SEQ ID NO: 17503 - DNA, 50 bp, synthetic construct
  source 1..50: mol_type = other DNA
aacaaacactcaaccaaacrctattataaatactaaacacactcaccctc

SEQ ID NO: 17504 - DNA, 50 bp, synthetic construct
  source 1..50: mol_type = other DNA
aatttaaaactacracttctacattcctctataacttcccaacccactac

SEQ ID NO: 17505 - DNA, 50 bp, synthetic construct
  source 1..50: mol_type = other DNA
aaaattctaaaaccctaacaaacacaacaaaacaaccacraactaaccac

SEQ ID NO: 17506 - DNA, 50 bp, synthetic construct
  source 1..50: mol_type = other DNA
aaaataactataaaattctaaaaccctaacaaacacaacaaaacaaccac

SEQ ID NO: 17507 - DNA, 50 bp, synthetic construct
  source 1..50: mol_type = other DNA
ctaaaacaaactaaatctaataacaacctaacctcctaaaaaacataaac

SEQ ID NO: 17508 - DNA, 50 bp, synthetic construct
  source 1..50: mol_type = other DNA
caactcaatatccccttctcraacaacacaataatccctacaatccatac

SEQ ID NO: 17509 - DNA, 50 bp, synthetic construct
  source 1..50: mol_type = other DNA
aaaaaaactactactactaactaaaaaaatactactattccttccttcac

SEQ ID NO: 17510 - DNA, 50 bp, synthetic construct
  source 1..50: mol_type = other DNA
actaaaacccaatacattcacatcatataaaactaaaaacttcttataac

SEQ ID NO: 17511 - DNA, 50 bp, synthetic construct
  source 1..50: mol_type = other DNA
cccaatacattcacatcatataaaactaaaaacttcttataacraactcc

SEQ ID NO: 17512 - DNA, 50 bp, synthetic construct
  source 1..50: mol_type = other DNA
aactaaaaacttcttataacraactccraaactaaaaataccaaacctac

SEQ ID NO: 17513 - DNA, 50 bp, synthetic construct
  source 1..50: mol_type = other DNA
tttcctaaactataaaataaataaccttaaaccaactccacttccctccc

SEQ ID NO: 17514 - DNA, 50 bp, synthetic construct
  source 1..50: mol_type = other DNA
tcctctaaacttaaaatacacccatctcaaaaaacacaacctatcctacc

SEQ ID NO: 17515 - DNA, 50 bp, synthetic construct
  source 1..50: mol_type = other DNA
ctaaacttaaaatacacccatctcaaaaaacacaacctatcctaccrccc

SEQ ID NO: 17516 - DNA, 50 bp, synthetic construct
  source 1..50: mol_type = other DNA
atatctaaaaaacccaacraaatataacaacttcccaaaaacacacaacc

SEQ ID NO: 17517 - DNA, 50 bp, synthetic construct
  source 1..50: mol_type = other DNA
ccccctacctattactccaaaatactcacacactaaaacaaaaccaaatc

SEQ ID NO: 17518 - DNA, 50 bp, synthetic construct
  source 1..50: mol_type = other DNA
ttactccaaaatactcacacactaaaacaaaaccaaatcrctaaaatccc

SEQ ID NO: 17519 - DNA, 50 bp, synthetic construct
  source 1..50: mol_type = other DNA
atattttcaattcaacaactaaacaaaaaaacaccacttaaattttactc

SEQ ID NO: 17520 - DNA, 50 bp, synthetic construct
  source 1..50: mol_type = other DNA
ccaacaaattctcttacatctaactttacctataaaatatatttaaaccc

SEQ ID NO: 17521 - DNA, 50 bp, synthetic construct
  source 1..50: mol_type = other DNA
craaactaaccaaaactatataccctctaaaactccaatcccaaaccacc

SEQ ID NO: 17522 - DNA, 50 bp, synthetic construct
  source 1..50: mol_type = other DNA
aaaaaacttccacaaccctaaacatacccaaaaaaacaacccaaatttcc

SEQ ID NO: 17523 - DNA, 50 bp, synthetic construct
  source 1..50: mol_type = other DNA
aaaaccttaaaaactctcactcactttaacccraccataaacttctcaac

SEQ ID NO: 17524 - DNA, 50 bp, synthetic construct
  source 1..50: mol_type = other DNA
caacatccctaaatataaaaaaccttaaaaactctcactcactttaaccc

SEQ ID NO: 17525 - DNA, 50 bp, synthetic construct
  source 1..50: mol_type = other DNA
taaaaccctctaacctttatataataaccraaaactctatatcaacracc

SEQ ID NO: 17526 - DNA, 50 bp, synthetic construct
  source 1..50: mol_type = other DNA
aaaaaatcaaaatacraacrataaaaccctctaacctttatataataacc

SEQ ID NO: 17527 - DNA, 50 bp, synthetic construct
  source 1..50: mol_type = other DNA
taaatcaacacatcaattacaacattataactaccaaaaaatcaaaatac

SEQ ID NO: 17528 - DNA, 50 bp, synthetic construct
  source 1..50: mol_type = other DNA
taaacaatcctcctacctcaacctccataataactaaaccacaaatacac

SEQ ID NO: 17529 - DNA, 50 bp, synthetic construct
  source 1..50: mol_type = other DNA
ccttcccaaatcrtcaaataattctcctcrataaataatctactaaaacc

SEQ ID NO: 17530 - DNA, 50 bp, synthetic construct
  source 1..50: mol_type = other DNA
aataataaaaaaaacaactctacactcacctcccraaaaactaaataatc

SEQ ID NO: 17531 - DNA, 50 bp, synthetic construct
  source 1..50: mol_type = other DNA
atcttcactacaaaacttcrtaattttatttaaaatcaattcccaaaatc

SEQ ID NO: 17532 - DNA, 50 bp, synthetic construct
  source 1..50: mol_type = other DNA
aaacaccctttaaatcaaacctatccrcctaaaaataacctaaacttacc

SEQ ID NO: 17533 - DNA, 50 bp, synthetic construct
  source 1..50: mol_type = other DNA
atcttcttattactaacaacaaactcrataaatccaaattacttctaaac

SEQ ID NO: 17534 - DNA, 50 bp, synthetic construct
  source 1..50: mol_type = other DNA
ttacttctaaacraacaaatctaacccaaaaaatactcatcaatacctcc

SEQ ID NO: 17535 - DNA, 50 bp, synthetic construct
  source 1..50: mol_type = other DNA
aacaatcctatattaaacccrcctcatctataaactcatcraaattatcc

SEQ ID NO: 17536 - DNA, 50 bp, synthetic construct
  source 1..50: mol_type = other DNA
ctacttccaaaacttcttcctaaaacaaaaccrattattaaaatttaacc

SEQ ID NO: 17537 - DNA, 50 bp, synthetic construct
  source 1..50: mol_type = other DNA
atacaaaaaataaatctactacttccaaaacttcttcctaaaacaaaacc

SEQ ID NO: 17538 - DNA, 50 bp, synthetic construct
  source 1..50: mol_type = other DNA
attcaaatacccacrtataaataaacrtaacactctacacaactactatc

SEQ ID NO: 17539 - DNA, 50 bp, synthetic construct
  source 1..50: mol_type = other DNA
tttaaaaaaactttccctacacaaacracaacaactatacaaaatactac

SEQ ID NO: 17540 - DNA, 50 bp, synthetic construct
  source 1..50: mol_type = other DNA
taaatattctaaatttaaataccccactccacacaaattcaaatacccac

SEQ ID NO: 17541 - DNA, 50 bp, synthetic construct
  source 1..50: mol_type = other DNA
taactatttattaataattaatctattaaattttactcaacccctaattc

SEQ ID NO: 17542 - DNA, 50 bp, synthetic construct
  source 1..50: mol_type = other DNA
tcataaacacaaaaatactatctacctattatcacacaattcatatactc

SEQ ID NO: 17543 - DNA, 50 bp, synthetic construct
  source 1..50: mol_type = other DNA
rttttataaacacacaaaccraacctataatcctaacracttaaaaaacc

SEQ ID NO: 17544 - DNA, 50 bp, synthetic construct
  source 1..50: mol_type = other DNA
aataaaaaaacccaaactaaaacccaaccctttccraatctttaataaac

SEQ ID NO: 17545 - DNA, 50 bp, synthetic construct
  source 1..50: mol_type = other DNA
taaaattaacttcttcaaattttaaatcrttattctttatccrttccaac

SEQ ID NO: 17546 - DNA, 50 bp, synthetic construct
  source 1..50: mol_type = other DNA
ataaaccttacccraatattattaaaattaacttcttcaaattttaaatc

SEQ ID NO: 17547 - DNA, 50 bp, synthetic construct
  source 1..50: mol_type = other DNA
aataaaaaacaacracccaaaacttaaaaaaattaacctcaataatatcc

SEQ ID NO: 17548 - DNA, 50 bp, synthetic construct
  source 1..50: mol_type = other DNA
acaatcctaatttctttctaaaaataatatcaaacccaaatatttaacac

SEQ ID NO: 17549 - DNA, 50 bp, synthetic construct
  source 1..50: mol_type = other DNA
cccaaatatttaacacraaccaacccaactttaatctaaaaacctaccac

SEQ ID NO: 17550 - DNA, 50 bp, synthetic construct
  source 1..50: mol_type = other DNA
actttaatctaaaaacctaccacrttattcaaaacactaaaaaattctcc

SEQ ID NO: 17551 - DNA, 50 bp, synthetic construct
  source 1..50: mol_type = other DNA
rctactacataaaatctcaaaactaaaaaaatccratacccactaaactc

SEQ ID NO: 17552 - DNA, 50 bp, synthetic construct
  source 1..50: mol_type = other DNA
tttaaccaacaactcccttctataactataaaacaaaactaaatataaac

SEQ ID NO: 17553 - DNA, 50 bp, synthetic construct
  source 1..50: mol_type = other DNA
accttattttacaaccacaaaaaaaaactattaaccaaaatatccaaaac

SEQ ID NO: 17554 - DNA, 50 bp, synthetic construct
  source 1..50: mol_type = other DNA
craaatttattccttctaatattcraatatattaaaaatttcttccttcc

SEQ ID NO: 17555 - DNA, 50 bp, synthetic construct
  source 1..50: mol_type = other DNA
aaaactaattctaccaaactcaaactaaacaaacaaccatctaccccacc

SEQ ID NO: 17556 - DNA, 50 bp, synthetic construct
  source 1..50: mol_type = other DNA
tattttacctatcaaatcatccrctttatttatctacraacaaataaacc

SEQ ID NO: 17557 - DNA, 50 bp, synthetic construct
  source 1..50: mol_type = other DNA
aaaaaactaactctattttacctatcaaatcatccrctttatttatctac

SEQ ID NO: 17558 - DNA, 50 bp, synthetic construct
  source 1..50: mol_type = other DNA
aactacctaaaaaacaaaaaactaactctattttacctatcaaatcatcc

SEQ ID NO: 17559 - DNA, 50 bp, synthetic construct
  source 1..50: mol_type = other DNA
tctctataatactatccacatttcaaatactcaaacrtaacaaataactc

SEQ ID NO: 17560 - DNA, 50 bp, synthetic construct
  source 1..50: mol_type = other DNA
ctatccacatttcaaatactcaaacrtaacaaataactcrtaaatactac

SEQ ID NO: 17561 - DNA, 50 bp, synthetic construct
  source 1..50: mol_type = other DNA
acaacattttttcctaaaaaacccttcacttttaaatcaaaattttattc

SEQ ID NO: 17562 - DNA, 50 bp, synthetic construct
  source 1..50: mol_type = other DNA
aaaaataatctccaaacttttcatttaccttaaaaataacrcctctatac

SEQ ID NO: 17563 - DNA, 50 bp, synthetic construct
  source 1..50: mol_type = other DNA
ataattttaaaaaaataatctccaaacttttcatttaccttaaaaataac

SEQ ID NO: 17564 - DNA, 50 bp, synthetic construct
  source 1..50: mol_type = other DNA
rttttacctttaaaaacctctactttcctttacctccctaaatactccrc

SEQ ID NO: 17565 - DNA, 50 bp, synthetic construct
  source 1..50: mol_type = other DNA
aacaaaatcactatattacccaaactaatctaaaactcctaaccctaaac

SEQ ID NO: 17566 - DNA, 50 bp, synthetic construct
  source 1..50: mol_type = other DNA
acaacacaataattctatctctacaaaaaacaaacaaacaaacaaactcc

SEQ ID NO: 17567 - DNA, 50 bp, synthetic construct
  source 1..50: mol_type = other DNA
acaaacaaacaaactccrattattaaaccccaccctaaaatttctaattc

SEQ ID NO: 17568 - DNA, 50 bp, synthetic construct
  source 1..50: mol_type = other DNA
cctaatcaccraaaacttaataaaaatacaaactctcaactctcacccac

SEQ ID NO: 17569 - DNA, 50 bp, synthetic construct
  source 1..50: mol_type = other DNA
attcccrataactaaaaaaccrctaacccaaaaaccactctttaaaaatc

SEQ ID NO: 17570 - DNA, 50 bp, synthetic construct
  source 1..50: mol_type = other DNA
ctctttaaaaatcrctactctacaacccaactctataattcacaactatc

SEQ ID NO: 17571 - DNA, 50 bp, synthetic construct
  source 1..50: mol_type = other DNA
ctataattcacaactatcrctcaatttacccctcacaaccatctaaaaac

SEQ ID NO: 17572 - DNA, 50 bp, synthetic construct
  source 1..50: mol_type = other DNA
caatttacccctcacaaccatctaaaaacrcraaaaattatctccacttc

SEQ ID NO: 17573 - DNA, 50 bp, synthetic construct
  source 1..50: mol_type = other DNA
taaacaaaaattcctactacttattaatcrtataacctcaaaaaactaac

SEQ ID NO: 17574 - DNA, 50 bp, synthetic construct
  source 1..50: mol_type = other DNA
aacctaattttccacattcttacaaaaacaactataaaataatccatacc

SEQ ID NO: 17575 - DNA, 50 bp, synthetic construct
  source 1..50: mol_type = other DNA
acacccaaaactctaataattaaacctttaccctcctactaaaaataaac

SEQ ID NO: 17576 - DNA, 50 bp, synthetic construct
  source 1..50: mol_type = other DNA
caaaaccctaaatatacaaacaaaaaaataacccattaaatacctaactc

SEQ ID NO: 17577 - DNA, 50 bp, synthetic construct
  source 1..50: mol_type = other DNA
tatacaaacaaaaaaataacccattaaatacctaactcraaatacaaaac

SEQ ID NO: 17578 - DNA, 50 bp, synthetic construct
  source 1..50: mol_type = other DNA
cattaaatacctaactcraaatacaaaacraacccattcccaaccaaaac

SEQ ID NO: 17579 - DNA, 50 bp, synthetic construct
  source 1..50: mol_type = other DNA
tactaactacaacaactacaaataaaacrctaaaaattccacaacaaccc

SEQ ID NO: 17580 - DNA, 50 bp, synthetic construct
  source 1..50: mol_type = other DNA
crccaccaaacaaacratactatactaactacaacaactacaaataaaac

SEQ ID NO: 17581 - DNA, 50 bp, synthetic construct
  source 1..50: mol_type = other DNA
tataaaattcccaacrcttcatctacaactactacaaccaatacaacatc

SEQ ID NO: 17582 - DNA, 50 bp, synthetic construct
  source 1..50: mol_type = other DNA
tattttcttattaatccaaaaccrcttccaacttaaaaatacacaactcc

SEQ ID NO: 17583 - DNA, 50 bp, synthetic construct
  source 1..50: mol_type = other DNA
cccaaaaaactacctcacaaatacaaacataacaataactttataatctc

SEQ ID NO: 17584 - DNA, 50 bp, synthetic construct
  source 1..50: mol_type = other DNA
acaaaaccactatcatatctacatctataaaacaactttctaaatttctc

SEQ ID NO: 17585 - DNA, 50 bp, synthetic construct
  source 1..50: mol_type = other DNA
acatctataaaacaactttctaaatttctcratactcaaccctccttccc

SEQ ID NO: 17586 - DNA, 50 bp, synthetic construct
  source 1..50: mol_type = other DNA
caaaaaatattcaaccraaacctcaaacaaaattcaaccctaacctaacc

SEQ ID NO: 17587 - DNA, 50 bp, synthetic construct
  source 1..50: mol_type = other DNA
actaaataaccccatactattcaaattcacatcccaaaaaatattcaacc

SEQ ID NO: 17588 - DNA, 50 bp, synthetic construct
  source 1..50: mol_type = other DNA
taaataccttctaaaatataaacctaaacaacataaaactactcaaccac

SEQ ID NO: 17589 - DNA, 50 bp, synthetic construct
  source 1..50: mol_type = other DNA
aacaaattaaaaccaactcaatacaaaaaactacaccccaatatctcccc

SEQ ID NO: 17590 - DNA, 50 bp, synthetic construct
  source 1..50: mol_type = other DNA
atctaaaaactactcaaaataaataaaatataactcctaaaacaaaacac

SEQ ID NO: 17591 - DNA, 50 bp, synthetic construct
  source 1..50: mol_type = other DNA
aaccaaactaaatcaatacccctcttctaaacacctaattccacraactc

SEQ ID NO: 17592 - DNA, 50 bp, synthetic construct
  source 1..50: mol_type = other DNA
tatctctcctattcaataacaaactctccaaaaacaaaacaaaattccac

SEQ ID NO: 17593 - DNA, 50 bp, synthetic construct
  source 1..50: mol_type = other DNA
rtaataaaactaaattaaactcaaacaaataaactccaaaattatattcc

SEQ ID NO: 17594 - DNA, 50 bp, synthetic construct
  source 1..50: mol_type = other DNA
aaatcctaaactataaatcaaaaaacccaaatacaaatcctccctctacc

SEQ ID NO: 17595 - DNA, 50 bp, synthetic construct
  source 1..50: mol_type = other DNA
aaaaaatttaaaaaacacaaatctaatccaattatctcattaataaatac

SEQ ID NO: 17596 - DNA, 50 bp, synthetic construct
  source 1..50: mol_type = other DNA
tcctcaataccaccctatatataaccatcaaaaaactatcaaaaacaaac

SEQ ID NO: 17597 - DNA, 50 bp, synthetic construct
  source 1..50: mol_type = other DNA
cctaaaaactaaaccaatactaatcctaaaaaacraatacaacractcac

SEQ ID NO: 17598 - DNA, 50 bp, synthetic construct
  source 1..50: mol_type = other DNA
tactaatcctaaaaactaaaccaatactaatcctaaaaaacraatacaac

SEQ ID NO: 17599 - DNA, 50 bp, synthetic construct
  source 1..50: mol_type = other DNA
atctaccaatactaatcctaaaaactaaaccaatactaatcctaaaaaac

SEQ ID NO: 17600 - DNA, 50 bp, synthetic construct
  source 1..50: mol_type = other DNA
tcttcccactaatcatttaacaaataaatactaaaaacttattatctacc

SEQ ID NO: 17601 - DNA, 50 bp, synthetic construct
  source 1..50: mol_type = other DNA
ctttatatacccacccaaatctcttcttaaattataattccacaaccccc

SEQ ID NO: 17602 - DNA, 50 bp, synthetic construct
  source 1..50: mol_type = other DNA
tctatctttacttttctttccctaaaaataatacaaactaaatactttac

SEQ ID NO: 17603 - DNA, 50 bp, synthetic construct
  source 1..50: mol_type = other DNA
aatatttctaaattataatttacaaactcctaaaaacaaaaaccacatcc

SEQ ID NO: 17604 - DNA, 50 bp, synthetic construct
  source 1..50: mol_type = other DNA
taaaaactataacccaaaccttaacatcacctccaacaaaaatcaattac

SEQ ID NO: 17605 - DNA, 50 bp, synthetic construct
  source 1..50: mol_type = other DNA
tcaacrtttaaacttaaccaaatatctaaacaaatacrcraccaaactac

SEQ ID NO: 17606 - DNA, 50 bp, synthetic construct
  source 1..50: mol_type = other DNA
acttaaatacctcaacrtttaaacttaaccaaatatctaaacaaatacrc

SEQ ID NO: 17607 - DNA, 50 bp, synthetic construct
  source 1..50: mol_type = other DNA
aaacttaaatacctcaacrtttaaacttaaccaaatatctaaacaaatac

SEQ ID NO: 17608 - DNA, 50 bp, synthetic construct
  source 1..50: mol_type = other DNA
taaaaatacaaaacttcaaaccccaccctaaacctactaaatcaaaaccc

SEQ ID NO: 17609 - DNA, 50 bp, synthetic construct
  source 1..50: mol_type = other DNA
aaaaaaccacaaaactaaatatcatcaaaaaaaccaccacctcrtaaacc

SEQ ID NO: 17610 - DNA, 50 bp, synthetic construct
  source 1..50: mol_type = other DNA
aataacaaaaaaaccacaaaactaaatatcatcaaaaaaaccaccacctc

SEQ ID NO: 17611 - DNA, 50 bp, synthetic construct
  source 1..50: mol_type = other DNA
cttataatacaataactaaccctaactacctaatcccattaaaaacttcc

SEQ ID NO: 17612 - DNA, 50 bp, synthetic construct
  source 1..50: mol_type = other DNA
ttttatatacaaaattccaatcactactaatcattaaaacaaattctcac

SEQ ID NO: 17613 - DNA, 50 bp, synthetic construct
  source 1..50: mol_type = other DNA
ctccttcacacccaatacatttcccctttacttaaactactttaaattac

SEQ ID NO: 17614 - DNA, 50 bp, synthetic construct
  source 1..50: mol_type = other DNA
aaaaccaaaaactcaacccctacaaaaattctctaaccatctcttatctc

SEQ ID NO: 17615 - DNA, 50 bp, synthetic construct
  source 1..50: mol_type = other DNA
aatttctaactaacaataaaaactataaattatcaataaccatatttccc

SEQ ID NO: 17616 - DNA, 50 bp, synthetic construct
  source 1..50: mol_type = other DNA
acttaaataaaatacccaatcttaaacaaatcacctataaccaaaaaatc

SEQ ID NO: 17617 - DNA, 50 bp, synthetic construct
  source 1..50: mol_type = other DNA
ratctttacraaccrcaaacaaaaaaaatcttctctcaaaaatcataccc

SEQ ID NO: 17618 - DNA, 50 bp, synthetic construct
  source 1..50: mol_type = other DNA
aaaaacccccatcaaaatacraaatacaattacractccaaaaccataac

SEQ ID NO: 17619 - DNA, 50 bp, synthetic construct
  source 1..50: mol_type = other DNA
ataactacctaaaaaaatatcttatctaaccccrattatatttttccttc

SEQ ID NO: 17620 - DNA, 50 bp, synthetic construct
  source 1..50: mol_type = other DNA
caacctcraatataaatatctaaaccraaattctaaaacaaacctaccrc

SEQ ID NO: 17621 - DNA, 50 bp, synthetic construct
  source 1..50: mol_type = other DNA
ctttactaaaaaaacrccctaaaaatcccacrttaataccactaaaaatc

SEQ ID NO: 17622 - DNA, 50 bp, synthetic construct
  source 1..50: mol_type = other DNA
catactaaaatctccaccccaaaatcaacraaattctaaatcctatctcc

SEQ ID NO: 17623 - DNA, 50 bp, synthetic construct
  source 1..50: mol_type = other DNA
ttttacctttatcaatcttcacatactaaaatctccaccccaaaatcaac

SEQ ID NO: 17624 - DNA, 50 bp, synthetic construct
  source 1..50: mol_type = other DNA
ttaaactaatatctctaaacctaaaatttacactcacatttccatctaac

SEQ ID NO: 17625 - DNA, 50 bp, synthetic construct
  source 1..50: mol_type = other DNA
tcacatttccatctaacraccccataaacaatctatcctacaaataactc

SEQ ID NO: 17626 - DNA, 50 bp, synthetic construct
  source 1..50: mol_type = other DNA
acatttactacttaacccttttcttcaaactatttactttccaatccatc

SEQ ID NO: 17627 - DNA, 50 bp, synthetic construct
  source 1..50: mol_type = other DNA
caaactatttactttccaatccatcrttcrctctactattactcttctac

SEQ ID NO: 17628 - DNA, 50 bp, synthetic construct
  source 1..50: mol_type = other DNA
rtccaaaaccataaacatcataaactccttcrtcaataacatcttcraac

SEQ ID NO: 17629 - DNA, 50 bp, synthetic construct
  source 1..50: mol_type = other DNA
atttcctaataacaaatcctcactccttaaataactctaaaaaaacaccc

SEQ ID NO: 17630 - DNA, 50 bp, synthetic construct
  source 1..50: mol_type = other DNA
attaacaaaattaacttatttctttatttaaaacrtaatcttactctatc

SEQ ID NO: 17631 - DNA, 50 bp, synthetic construct
  source 1..50: mol_type = other DNA
aatcctctaaaaaaataataaaacrttaatacctcttactaacaaactcc

SEQ ID NO: 17632 - DNA, 50 bp, synthetic construct
  source 1..50: mol_type = other DNA
acctaatttcctattctttcaaataaaaaaactctactacatcatttctc

SEQ ID NO: 17633 - DNA, 50 bp, synthetic construct
  source 1..50: mol_type = other DNA
aaaactccatttctaccaacaaaaaacratattttaaaaataaatttctc

SEQ ID NO: 17634 - DNA, 50 bp, synthetic construct
  source 1..50: mol_type = other DNA
ataatcaacatacttttatataaaaaactccatttctaccaacaaaaaac

SEQ ID NO: 17635 - DNA, 50 bp, synthetic construct
  source 1..50: mol_type = other DNA
atataaacttatatcacctatataaacctatcacctatataaacctatac

SEQ ID NO: 17636 - DNA, 50 bp, synthetic construct
  source 1..50: mol_type = other DNA
tttccaccttatctaacattctatttacacatatccaaaaaaaccctatc

SEQ ID NO: 17637 - DNA, 50 bp, synthetic construct
  source 1..50: mol_type = other DNA
ttcaatataaaaactttcaaaaaacacraaaaaaatcaactctacctatc

SEQ ID NO: 17638 - DNA, 50 bp, synthetic construct
  source 1..50: mol_type = other DNA
caaccaaacttccttcaaaccaaaacctaaacacataaaccctaatcrac

SEQ ID NO: 17639 - DNA, 50 bp, synthetic construct
  source 1..50: mol_type = other DNA
acccaaccaaacttccttcaaaccaaaacctaaacacataaaccctaatc

SEQ ID NO: 17640 - DNA, 50 bp, synthetic construct
  source 1..50: mol_type = other DNA
aaaccrctaatctaactaaaactccaaatacaaaaaaaattctcataatc

SEQ ID NO: 17641 - DNA, 50 bp, synthetic construct
  source 1..50: mol_type = other DNA
tacacaaacaattatcaacaacractacaaattacaaacttataaaaaac

SEQ ID NO: 17642 - DNA, 50 bp, synthetic construct
  source 1..50: mol_type = other DNA
aaactcttaacatttttcaaacrttcctcataaacctataatttacaacc

SEQ ID NO: 17643 - DNA, 50 bp, synthetic construct
  source 1..50: mol_type = other DNA
cataaacctataatttacaaccrctattaacaactatttatacaaatttc

SEQ ID NO: 17644 - DNA, 50 bp, synthetic construct
  source 1..50: mol_type = other DNA
ataatttacaaccrctattaacaactatttatacaaatttcrctataaac

SEQ ID NO: 17645 - DNA, 50 bp, synthetic construct
  source 1..50: mol_type = other DNA
ctatttatacaaatttcrctataaacrcaatctaaactcttaaaaaaatc

SEQ ID NO: 17646 - DNA, 50 bp, synthetic construct
  source 1..50: mol_type = other DNA
tcttaatcatccacaaatctaaaaattcctaaccacacttattatcaacc

SEQ ID NO: 17647 - DNA, 50 bp, synthetic construct
  source 1..50: mol_type = other DNA
aataaaacaatataaacattctcttcccaaacctaattccatcrtaaatc

SEQ ID NO: 17648 - DNA, 50 bp, synthetic construct
  source 1..50: mol_type = other DNA
tctaccaatcctaacaaattattttcattcttcaccaaaacacaaaaaac

SEQ ID NO: 17649 - DNA, 50 bp, synthetic construct
  source 1..50: mol_type = other DNA
acaattaaaatatacaataattcccccttatccataaattcactatactc

SEQ ID NO: 17650 - DNA, 50 bp, synthetic construct
  source 1..50: mol_type = other DNA
acactattacraacaatataataaaatttcataccatcctacaccatctc

SEQ ID NO: 17651 - DNA, 50 bp, synthetic construct
  source 1..50: mol_type = other DNA
ttataccraaaaaataaattccaaaaccttaaataaatacctaaaactac

SEQ ID NO: 17652 - DNA, 50 bp, synthetic construct
  source 1..50: mol_type = other DNA
raaatcctcraaaataaacaaaaccctcataacactaaacraaatataac

SEQ ID NO: 17653 - DNA, 50 bp, synthetic construct
  source 1..50: mol_type = other DNA
aactaaaaaaacaatcataaataactccaaaaattaaaacctaaacaatc

SEQ ID NO: 17654 - DNA, 50 bp, synthetic construct
  source 1..50: mol_type = other DNA
tcaatatactatattcaaaaaacccatctcacrtacaaaaacacacatac

SEQ ID NO: 17655 - DNA, 50 bp, synthetic construct
  source 1..50: mol_type = other DNA
atatatccaaaaccaacattttaaattctattttctcttttaaatccttc

SEQ ID NO: 17656 - DNA, 50 bp, synthetic construct
  source 1..50: mol_type = other DNA
taactatattaatatcaatattttaccatcactcccatttctcatatacc

SEQ ID NO: 17657 - DNA, 50 bp, synthetic construct
  source 1..50: mol_type = other DNA
aaaaaactcaaataaaacccctcactaccttatcacttaacacacacttc

SEQ ID NO: 17658 - DNA, 50 bp, synthetic construct
  source 1..50: mol_type = other DNA
aatatttctactaaaccccatccatataaatacatttctaaaaaaacccc

SEQ ID NO: 17659 - DNA, 50 bp, synthetic construct
  source 1..50: mol_type = other DNA
rtaccctctccaaccraaaacatacatacaataaataaaactataaatcc

SEQ ID NO: 17660 - DNA, 50 bp, synthetic construct
  source 1..50: mol_type = other DNA
aaaaatattcattccraacccacaacctcacccactatatatatactctc

SEQ ID NO: 17661 - DNA, 50 bp, synthetic construct
  source 1..50: mol_type = other DNA
aaaaaccatatcacaataattaataacattttccaatacactaaaataac

SEQ ID NO: 17662 - DNA, 50 bp, synthetic construct
  source 1..50: mol_type = other DNA
cccacaaaaaacttcctctcactaaacctcaattcctttaactccaaaac

SEQ ID NO: 17663 - DNA, 50 bp, synthetic construct
  source 1..50: mol_type = other DNA
acraaccatatactatattctcattccacataaatatttattcaattctc

SEQ ID NO: 17664 - DNA, 50 bp, synthetic construct
  source 1..50: mol_type = other DNA
ttcatttctatcraactacactaaacaatctcaaaatctccaactcctcc

SEQ ID NO: 17665 - DNA, 50 bp, synthetic construct
  source 1..50: mol_type = other DNA
actaacttttaaacctcacaaaaacaaaaaccatatctatacaaaactac

SEQ ID NO: 17666 - DNA, 50 bp, synthetic construct
  source 1..50: mol_type = other DNA
tccttctcaactaaaaaacctaattccaccaaaaacacrtaaatacccac

SEQ ID NO: 17667 - DNA, 50 bp, synthetic construct
  source 1..50: mol_type = other DNA
aataaatttacracrtaccaaaacccacraaaacttaaacttcaacatcc

SEQ ID NO: 17668 - DNA, 50 bp, synthetic construct
  source 1..50: mol_type = other DNA
tctataactcccaaacccratctacaaattatcaacrcttttaaaaatcc

SEQ ID NO: 17669 - DNA, 50 bp, synthetic construct
  source 1..50: mol_type = other DNA
atacaaataattcattaccaatcctttccctaaaaatatttactaataac

SEQ ID NO: 17670 - DNA, 50 bp, synthetic construct
  source 1..50: mol_type = other DNA
taacaataaatcatctatactaatccctatattttcatcaatcttacttc

SEQ ID NO: 17671 - DNA, 50 bp, synthetic construct
  source 1..50: mol_type = other DNA
tttaatttctctcaaaatatttactcaaaaaaaacccaaaatttaacctc

SEQ ID NO: 17672 - DNA, 50 bp, synthetic construct
  source 1..50: mol_type = other DNA
aaacccaaaatttaacctcrattcactttaaacttccaaaaaaatttccc

SEQ ID NO: 17673 - DNA, 50 bp, synthetic construct
  source 1..50: mol_type = other DNA
aaaactatttaaacattcrctccttactcaacaatacaaataacaaaacc

SEQ ID NO: 17674 - DNA, 50 bp, synthetic construct
  source 1..50: mol_type = other DNA
aaaaaacctaaatacaaccaaatcacacaaaaaaatacaaccttacaaac

SEQ ID NO: 17675 - DNA, 50 bp, synthetic construct
  source 1..50: mol_type = other DNA
taaaaccctttctctacaaaaattctcaatatatattccrtaacaaactc

SEQ ID NO: 17676 - DNA, 50 bp, synthetic construct
  source 1..50: mol_type = other DNA
caaaaattacacrcacratatccraaaacacaataaaatatactctaacc

SEQ ID NO: 17677 - DNA, 50 bp, synthetic construct
  source 1..50: mol_type = other DNA
cactatctaaaccataaataaacttaacaaaccacatacacacctccttc

SEQ ID NO: 17678 - DNA, 50 bp, synthetic construct
  source 1..50: mol_type = other DNA
aatcatttcaaaaatcaaacctacttttccrcaaaatcactaaaaatttc

SEQ ID NO: 17679 - DNA, 50 bp, synthetic construct
  source 1..50: mol_type = other DNA
actttcaataaccctacraaaaaacaaatctaatttctaaaataactcac

SEQ ID NO: 17680 - DNA, 50 bp, synthetic construct
  source 1..50: mol_type = other DNA
aaatttttttcccacataatactaactaaaatcrctttaccactaaaacc

SEQ ID NO: 17681 - DNA, 50 bp, synthetic construct
  source 1..50: mol_type = other DNA
tacatcaaaacaaattaaacataaacaacaaacttaaaaatatcccctcc

SEQ ID NO: 17682 - DNA, 50 bp, synthetic construct
  source 1..50: mol_type = other DNA
ctaatactatctcaattttaacaccaaaaattccacacctaaaaaatccc

SEQ ID NO: 17683 - DNA, 50 bp, synthetic construct
  source 1..50: mol_type = other DNA
atcaaaaataaacraaaatcacattccaatctaaaaaaccattctcccac

SEQ ID NO: 17684 - DNA, 50 bp, synthetic construct
  source 1..50: mol_type = other DNA
cttccaaaaaatcrtaaaaaaataatttcccaaattaaaatataaccccc

SEQ ID NO: 17685 - DNA, 50 bp, synthetic construct
  source 1..50: mol_type = other DNA
ttctcacaaaactaaataatcacaaaaactttaaatacaaacaaactaac

SEQ ID NO: 17686 - DNA, 50 bp, synthetic construct
  source 1..50: mol_type = other DNA
ctatttatttacaatacctattattactataacactaactatctaaaatc

SEQ ID NO: 17687 - DNA, 50 bp, synthetic construct
  source 1..50: mol_type = other DNA
ctaactatctaaaatcrccttcctttacttattccataaaattcaatttc

SEQ ID NO: 17688 - DNA, 50 bp, synthetic construct
  source 1..50: mol_type = other DNA
ccatttattcctcttcctaatccccttctatataatctatctaccraatc

SEQ ID NO: 17689 - DNA, 50 bp, synthetic construct
  source 1..50: mol_type = other DNA
ataaaccatttattcctcttcctaatccccttctatataatctatctacc

SEQ ID NO: 17690 - DNA, 50 bp, synthetic construct
  source 1..50: mol_type = other DNA
ctaaaaatataaattcctaaaaatccaacaacttcccaaaatccaccacc

SEQ ID NO: 17691 - DNA, 50 bp, synthetic construct
  source 1..50: mol_type = other DNA
aaaaaactatcaaaaacattctccrataccatccaaaaaactataaaccc

SEQ ID NO: 17692 - DNA, 50 bp, synthetic construct
  source 1..50: mol_type = other DNA
aaataaaaataactcaaattaacaacactaactctatcaaaataacacac

SEQ ID NO: 17693 - DNA, 50 bp, synthetic construct
  source 1..50: mol_type = other DNA
taaccctaaaatacctaaaatttacaaccraaactactctaaaaacaccc

SEQ ID NO: 17694 - DNA, 50 bp, synthetic construct
  source 1..50: mol_type = other DNA
ttataatttactcrtcactctacccctattacaaaacttcaatatttccc

SEQ ID NO: 17695 - DNA, 50 bp, synthetic construct
  source 1..50: mol_type = other DNA
aataacaaactcccaaccccaaacccaaaaaaatacattataatttactc

SEQ ID NO: 17696 - DNA, 50 bp, synthetic construct
  source 1..50: mol_type = other DNA
acttcaacacaacccctctctctattaaaatcttaacaaatattctaaac

SEQ ID NO: 17697 - DNA, 50 bp, synthetic construct
  source 1..50: mol_type = other DNA
tcattcaaatacaaaaaactaacacaataaaaacaacccaaaacctcacc

SEQ ID NO: 17698 - DNA, 50 bp, synthetic construct
  source 1..50: mol_type = other DNA
ctaattcccaaaattaataacataattaaacaacatttataaaataccac

SEQ ID NO: 17699 - DNA, 50 bp, synthetic construct
  source 1..50: mol_type = other DNA
ccaataatattcataacccatacaaccaacaaaaaacrctcccacaccac

SEQ ID NO: 17700 - DNA, 50 bp, synthetic construct
  source 1..50: mol_type = other DNA
aatatctcaatacacttattcacaccctctttcattctccaaaacatctc

SEQ ID NO: 17701 - DNA, 50 bp, synthetic construct
  source 1..50: mol_type = other DNA
aaaacccaaataaacratcaaaaaaaccttcctcaccatctacttaaaac

SEQ ID NO: 17702 - DNA, 50 bp, synthetic construct
  source 1..50: mol_type = other DNA
taacacacattttattaacttatacccataaaactaaaacccaaataaac

SEQ ID NO: 17703 - DNA, 50 bp, synthetic construct
  source 1..50: mol_type = other DNA
crtaactaactcaaaaaacraataatttctacatttccatctaaaatacc

SEQ ID NO: 17704 - DNA, 50 bp, synthetic construct
  source 1..50: mol_type = other DNA
aatacaaaaatcacccrtcttctaaatcaatcacrctaaaaactaaaacc

SEQ ID NO: 17705 - DNA, 50 bp, synthetic construct
  source 1..50: mol_type = other DNA
rtcttctaaatcaatcacrctaaaaactaaaaccraaactattcctattc

SEQ ID NO: 17706 - DNA, 50 bp, synthetic construct
  source 1..50: mol_type = other DNA
cccttccaaaacttcatactccaaaattctctctacatacaaaattcccc

SEQ ID NO: 17707 - DNA, 50 bp, synthetic construct
  source 1..50: mol_type = other DNA
attatttacttcaaactaaatctacaaattactatttaccttaaaattcc

SEQ ID NO: 17708 - DNA, 50 bp, synthetic construct
  source 1..50: mol_type = other DNA
ttaaaactcaataacccacaataccaatacactaattaataaccacatcc

SEQ ID NO: 17709 - DNA, 50 bp, synthetic construct
  source 1..50: mol_type = other DNA
aaataaaataacccacaaaaaccatccaatttaattcccccaataatacc

SEQ ID NO: 17710 - DNA, 50 bp, synthetic construct
  source 1..50: mol_type = other DNA
ccaaaaatacccaccttcaacattttaatacataaacacattcaaaaacc

SEQ ID NO: 17711 - DNA, 50 bp, synthetic construct
  source 1..50: mol_type = other DNA
catcttataactcacctaacacttataaaacaatatctaccatcctccac

SEQ ID NO: 17712 - DNA, 50 bp, synthetic construct
  source 1..50: mol_type = other DNA
ctataaaaatataaactttatctactaaaacatacctaaacacactcacc

SEQ ID NO: 17713 - DNA, 50 bp, synthetic construct
  source 1..50: mol_type = other DNA
aaatctacaaaaccrctcaccaaaatatccaattcatcattataatccac

SEQ ID NO: 17714 - DNA, 50 bp, synthetic construct
  source 1..50: mol_type = other DNA
aaaccattaactcaaaaatatctaaatttcttcacaactatatccccaac

SEQ ID NO: 17715 - DNA, 50 bp, synthetic construct
  source 1..50: mol_type = other DNA
ccttaaaaaattaccctatataatctaaaaacraaaaaccctcaattccc

SEQ ID NO: 17716 - DNA, 50 bp, synthetic construct
  source 1..50: mol_type = other DNA
actaaatcctataaaaaaacatacaacataataaattttcctaacatttc

SEQ ID NO: 17717 - DNA, 50 bp, synthetic construct
  source 1..50: mol_type = other DNA
tcaccatactatatatccttccataaaacccaatatttaaaattatcttc

SEQ ID NO: 17718 - DNA, 50 bp, synthetic construct
  source 1..50: mol_type = other DNA
tatatatccttccataaaacccaatatttaaaattatcttcraaaatcac

SEQ ID NO: 17719 - DNA, 50 bp, synthetic construct
  source 1..50: mol_type = other DNA
taaaaaaaaaccaacctaaaacataatcttcctcccccatttttatctcc

SEQ ID NO: 17720 - DNA, 50 bp, synthetic construct
  source 1..50: mol_type = other DNA
tcctaaacaaaatatactcctaatcacctaaaatcrtacaaccaaaaacc

SEQ ID NO: 17721 - DNA, 50 bp, synthetic construct
  source 1..50: mol_type = other DNA
aatttcctaaaccttatacttacctccactaaacacctaaaataaaaaac

SEQ ID NO: 17722 - DNA, 50 bp, synthetic construct
  source 1..50: mol_type = other DNA
aacacctaaaataaaaaacratactaccaacacccaatactaaacaaacc

SEQ ID NO: 17723 - DNA, 50 bp, synthetic construct
  source 1..50: mol_type = other DNA
ttccaaaaactttctaaaactccccactaccctcactaatactcaaaacc

SEQ ID NO: 17724 - DNA, 50 bp, synthetic construct
  source 1..50: mol_type = other DNA
cactaaactctctccctataaacaaataatcacaacaccaaatacccaac

SEQ ID NO: 17725 - DNA, 50 bp, synthetic construct
  source 1..50: mol_type = other DNA
acacaataccrtaaacatcatcctacccaatctcacaaaaatacacacac

SEQ ID NO: 17726 - DNA, 50 bp, synthetic construct
  source 1..50: mol_type = other DNA
aactaaatatatacraaaccctaaaacraaccaaacactacaaaaatctc

SEQ ID NO: 17727 - DNA, 50 bp, synthetic construct
  source 1..50: mol_type = other DNA
ccctaaaacraaccaaacactacaaaaatctcractccccaaataataac

SEQ ID NO: 17728 - DNA, 50 bp, synthetic construct
  source 1..50: mol_type = other DNA
atttctttacaaataaatttaaatcaaccaatcacaacccrcraaaaccc

SEQ ID NO: 17729 - DNA, 50 bp, synthetic construct
  source 1..50: mol_type = other DNA
aaacaaacatttctttacaaataaatttaaatcaaccaatcacaacccrc

SEQ ID NO: 17730 - DNA, 50 bp, synthetic construct
  source 1..50: mol_type = other DNA
raactataattaactaattcaaacccatttacaaaaaaatacctatttac

SEQ ID NO: 17731 - DNA, 50 bp, synthetic construct
  source 1..50: mol_type = other DNA
attaactaattcaaacccatttacaaaaaaatacctatttacraattccc

SEQ ID NO: 17732 - DNA, 50 bp, synthetic construct
  source 1..50: mol_type = other DNA
taattcaaacccatttacaaaaaaatacctatttacraattcccrtctac

SEQ ID NO: 17733 - DNA, 50 bp, synthetic construct
  source 1..50: mol_type = other DNA
tacaaaaaaatacctatttacraattcccrtctacrtccaattcaaatcc

SEQ ID NO: 17734 - DNA, 50 bp, synthetic construct
  source 1..50: mol_type = other DNA
tacaaactttttcccccctcctaaacatcctttttaaaaaaccaacracc

SEQ ID NO: 17735 - DNA, 50 bp, synthetic construct
  source 1..50: mol_type = other DNA
cttctacaaactttttcccccctcctaaacatcctttttaaaaaaccaac

SEQ ID NO: 17736 - DNA, 50 bp, synthetic construct
  source 1..50: mol_type = other DNA
tatataacctatttaaacrtcctaaatctatatctacrccaaaaatccrc

SEQ ID NO: 17737 - DNA, 50 bp, synthetic construct
  source 1..50: mol_type = other DNA
aactaaaaccctaaataccaaccttaaaacctctctttacctctatctac

SEQ ID NO: 17738 - DNA, 50 bp, synthetic construct
  source 1..50: mol_type = other DNA
taaaaccctaaataccaaccttaaaacctctctttacctctatctacrac

SEQ ID NO: 17739 - DNA, 50 bp, synthetic construct
  source 1..50: mol_type = other DNA
racraaaactcacatatttccattacttttctataatacaacaaaacaac

SEQ ID NO: 17740 - DNA, 50 bp, synthetic construct
  source 1..50: mol_type = other DNA
crccttctaccaataaatcrtatatttaacattcattcatcaaaacctcc

SEQ ID NO: 17741 - DNA, 50 bp, synthetic construct
  source 1..50: mol_type = other DNA
tactaaattatttaaaaaatcractctctaacrccttctaccaataaatc

SEQ ID NO: 17742 - DNA, 50 bp, synthetic construct
  source 1..50: mol_type = other DNA
craaactaacraactatatactaaattatttaaaaaatcractctctaac

SEQ ID NO: 17743 - DNA, 50 bp, synthetic construct
  source 1..50: mol_type = other DNA
atacctcaatttctccatctaaaaacaattataatcatttcaaccctaac

SEQ ID NO: 17744 - DNA, 50 bp, synthetic construct
  source 1..50: mol_type = other DNA
ctaaaaacaattataatcatttcaaccctaacrttaatatcaaaaaaccc

SEQ ID NO: 17745 - DNA, 50 bp, synthetic construct
  source 1..50: mol_type = other DNA
ataaacatccactaaccacrttaatttcactctaaaacctctaaaaaaac

SEQ ID NO: 17746 - DNA, 50 bp, synthetic construct
  source 1..50: mol_type = other DNA
rttaatttcactctaaaacctctaaaaaaacrctaaacttaaatcaaacc

SEQ ID NO: 17747 - DNA, 50 bp, synthetic construct
  source 1..50: mol_type = other DNA
tcactctaaaacctctaaaaaaacrctaaacttaaatcaaaccraaaaac

SEQ ID NO: 17748 - DNA, 50 bp, synthetic construct
  source 1..50: mol_type = other DNA
aacctctaaaaaaacrctaaacttaaatcaaaccraaaaacrtcaataac

SEQ ID NO: 17749 - DNA, 50 bp, synthetic construct
  source 1..50: mol_type = other DNA
caataaatataaaacacaactctaaacccaaacctaaacctccaaactac

SEQ ID NO: 17750 - DNA, 50 bp, synthetic construct
  source 1..50: mol_type = other DNA
atctacatccctccttaaccatctatccttaactaaaatatatccactcc

SEQ ID NO: 17751 - DNA, 50 bp, synthetic construct
  source 1..50: mol_type = other DNA
aataataatatacrtaaaaaaaaccctataactatactacctcccaactc

SEQ ID NO: 17752 - DNA, 50 bp, synthetic construct
  source 1..50: mol_type = other DNA
ttttttcccatctctcctaaactaactcctattaaaaaataataatatac

SEQ ID NO: 17753 - DNA, 50 bp, synthetic construct
  source 1..50: mol_type = other DNA
atcataaaatatatttacacaaacctaaataatataccctactacacacc

SEQ ID NO: 17754 - DNA, 50 bp, synthetic construct
  source 1..50: mol_type = other DNA
cacacrtacttacaatattaacaattacctacaatattcaatataatcac

SEQ ID NO: 17755 - DNA, 50 bp, synthetic construct
  source 1..50: mol_type = other DNA
aacacrtaaccatactaaatactataaacaattattaacactataaatac

SEQ ID NO: 17756 - DNA, 50 bp, synthetic construct
  source 1..50: mol_type = other DNA
aaatacaatcatataccatataacaatcaacaccaaaccacatatacaac

SEQ ID NO: 17757 - DNA, 50 bp, synthetic construct
  source 1..50: mol_type = other DNA
caaaacaactttatcccrtacaaaaacatttaccatttaactataataac

SEQ ID NO: 17758 - DNA, 50 bp, synthetic construct
  source 1..50: mol_type = other DNA
aactttttatatttactcaatccraaaaacctctatcctctcctactttc

SEQ ID NO: 17759 - DNA, 50 bp, synthetic construct
  source 1..50: mol_type = other DNA
actacatatttaaaaaaatttcatcaccacaaacttcccraaaccaacac

SEQ ID NO: 17760 - DNA, 50 bp, synthetic construct
  source 1..50: mol_type = other DNA
acatatcaaaaactacatatttaaaaaaatttcatcaccacaaacttccc

SEQ ID NO: 17761 - DNA, 50 bp, synthetic construct
  source 1..50: mol_type = other DNA
tactccrtaaaataactccctaaacctcactatttaactcttaataaatc

SEQ ID NO: 17762 - DNA, 50 bp, synthetic construct
  source 1..50: mol_type = other DNA
aaaactttacactctacaacrtaataaaaattaatataatatactactcc

SEQ ID NO: 17763 - DNA, 50 bp, synthetic construct
  source 1..50: mol_type = other DNA
aactcaaaaaattactccacraaacaacatatcatattaactcttaccac

SEQ ID NO: 17764 - DNA, 50 bp, synthetic construct
  source 1..50: mol_type = other DNA
attccaaaaacatacatttaatccttactcttactctctaaaaacctacc

SEQ ID NO: 17765 - DNA, 50 bp, synthetic construct
  source 1..50: mol_type = other DNA
aacaatactaacaaaacaactatccccctaccrctaaaccaaaaacaaac

SEQ ID NO: 17766 - DNA, 50 bp, synthetic construct
  source 1..50: mol_type = other DNA
taatatccaaaccrtaataacaatactaacaaaacaactatccccctacc

SEQ ID NO: 17767 - DNA, 50 bp, synthetic construct
  source 1..50: mol_type = other DNA
tcaaatcctcttatttacacacraaaccctaaaacctacaaaaaaatctc

SEQ ID NO: 17768 - DNA, 50 bp, synthetic construct
  source 1..50: mol_type = other DNA
ccaaacaaacaaaaatcactactcaaaatcaaatcctcttatttacacac

SEQ ID NO: 17769 - DNA, 50 bp, synthetic construct
  source 1..50: mol_type = other DNA
ataaacaaaaaaatttaattttaaacaataactcctacctatttaaattc

SEQ ID NO: 17770 - DNA, 50 bp, synthetic construct
  source 1..50: mol_type = other DNA
catctttttaattttacttaacaaaaactttaccaaaaactatcatctac

SEQ ID NO: 17771 - DNA, 50 bp, synthetic construct
  source 1..50: mol_type = other DNA
taaactaaattctttccatttataaaaccaaacttttactctaaaattac

SEQ ID NO: 17772 - DNA, 50 bp, synthetic construct
  source 1..50: mol_type = other DNA
ctctctaacctatcacacttccaaatatatctcttattcctaaaaacacc

SEQ ID NO: 17773 - DNA, 50 bp, synthetic construct
  source 1..50: mol_type = other DNA
tttcatcatattacccaaactaatatcaaactcctaaactcaaactctcc

SEQ ID NO: 17774 - DNA, 50 bp, synthetic construct
  source 1..50: mol_type = other DNA
acattaacaatacaacaaaccacacaataaaaaaataacctcacaacctc

SEQ ID NO: 17775 - DNA, 50 bp, synthetic construct
  source 1..50: mol_type = other DNA
cactcttaactcrttacttaaataataaaccaaaatataacccataaacc

SEQ ID NO: 17776 - DNA, 50 bp, synthetic construct
  source 1..50: mol_type = other DNA
taaaataaacaactatctacttaacttcaacctaaaaaaatcaaaacaac

SEQ ID NO: 17777 - DNA, 50 bp, synthetic construct
  source 1..50: mol_type = other DNA
acctaaaaaaatcaaaacaacraacaaatacctttctataatataccaac

SEQ ID NO: 17778 - DNA, 50 bp, synthetic construct
  source 1..50: mol_type = other DNA
aacraacaaatacctttctataatataccaacrtaccttctcctaaattc

SEQ ID NO: 17779 - DNA, 50 bp, synthetic construct
  source 1..50: mol_type = other DNA
caaatacctttctataatataccaacrtaccttctcctaaattcraaaac

SEQ ID NO: 17780 - DNA, 50 bp, synthetic construct
  source 1..50: mol_type = other DNA
cttataaactaaaaatcttcccctctacatttaaaacaaatctaatcctc

SEQ ID NO: 17781 - DNA, 50 bp, synthetic construct
  source 1..50: mol_type = other DNA
tcctaacaactccaaaaacctcaactatcaacaaaataataatcatatac

SEQ ID NO: 17782 - DNA, 50 bp, synthetic construct
  source 1..50: mol_type = other DNA
aaaataataatcatatacrtccacaatcccaaaaccacaattcctaaatc

SEQ ID NO: 17783 - DNA, 50 bp, synthetic construct
  source 1..50: mol_type = other DNA
ttaacaacccaaaaaactcactacaaactaccaaaaaatataaaatactc

SEQ ID NO: 17784 - DNA, 50 bp, synthetic construct
  source 1..50: mol_type = other DNA
ccacattttttaataatttacaataaacttcctaaactaccaaacctacc

SEQ ID NO: 17785 - DNA, 50 bp, synthetic construct
  source 1..50: mol_type = other DNA
tacatatttcattacaaaaacattaatatacttaattacaaaacactacc

SEQ ID NO: 17786 - DNA, 50 bp, synthetic construct
  source 1..50: mol_type = other DNA
tcttaatcaaaaataaatatcaaattctaataaataacacctaaataccc

SEQ ID NO: 17787 - DNA, 50 bp, synthetic construct
  source 1..50: mol_type = other DNA
acaaatcaaaaacaccaaaaactttataaaaacacaattactaaccaaac

SEQ ID NO: 17788 - DNA, 50 bp, synthetic construct
  source 1..50: mol_type = other DNA
aaccaacaactatatttttacaaaactcctaatatctctaacctactacc

SEQ ID NO: 17789 - DNA, 50 bp, synthetic construct
  source 1..50: mol_type = other DNA
caactatatttttacaaaactcctaatatctctaacctactaccrctacc

SEQ ID NO: 17790 - DNA, 50 bp, synthetic construct
  source 1..50: mol_type = other DNA
tccttataataacaaatataaacctcttaataaataacaaactattaaac

SEQ ID NO: 17791 - DNA, 50 bp, synthetic construct
  source 1..50: mol_type = other DNA
aaaccactatctcactatataatctaatactctactaatatccctaaacc

SEQ ID NO: 17792 - DNA, 50 bp, synthetic construct
  source 1..50: mol_type = other DNA
acattaacaaaacaccaaaccacacaataaaacaataacctcacaacctc

SEQ ID NO: 17793 - DNA, 50 bp, synthetic construct
  source 1..50: mol_type = other DNA
aaaaaaccacaaaaaaacatcaactcccacaaaaaaaaaccatccacacc

SEQ ID NO: 17794 - DNA, 50 bp, synthetic construct
  source 1..50: mol_type = other DNA
ccaaaaaaacccaaaactctctactatacaaactatctctctaaaaaccc

SEQ ID NO: 17795 - DNA, 50 bp, synthetic construct
  source 1..50: mol_type = other DNA
aaacaacctacacaacaaaaaaccctaaactcctttaaatcctaacaaac

SEQ ID NO: 17796 - DNA, 50 bp, synthetic construct
  source 1..50: mol_type = other DNA
ctaaccaacctaaaaccctaaaataacctccaactcaaacaacaatcctc

SEQ ID NO: 17797 - DNA, 50 bp, synthetic construct
  source 1..50: mol_type = other DNA
taaaaactctaataactttatcttcttctctctaacttatataattcaac

SEQ ID NO: 17798 - DNA, 50 bp, synthetic construct
  source 1..50: mol_type = other DNA
ataactaaacactcctaaaaccttcaatcaccatccaaaaaatttttatc

SEQ ID NO: 17799 - DNA, 50 bp, synthetic construct
  source 1..50: mol_type = other DNA
rattctcaaccaaaaaaactctcactatactttctaaaaatctataacac

SEQ ID NO: 17800 - DNA, 50 bp, synthetic construct
  source 1..50: mol_type = other DNA
rtatcacaaactctcaaaaaacacaataaaaattcccctaattaaaaatc

SEQ ID NO: 17801 - DNA, 50 bp, synthetic construct
  source 1..50: mol_type = other DNA
ttatttaacrctttattctccttaaaacaataaaataataacacctaacc

SEQ ID NO: 17802 - DNA, 50 bp, synthetic construct
  source 1..50: mol_type = other DNA
caaaccaaataacctaccctacccacctattaaaactccaataaataaac

SEQ ID NO: 17803 - DNA, 50 bp, synthetic construct
  source 1..50: mol_type = other DNA
taccctaatataacaccaaaactaccacaaactaataacaaaaacaacac

SEQ ID NO: 17804 - DNA, 50 bp, synthetic construct
  source 1..50: mol_type = other DNA
aacaccaaaactaccacaaactaataacaaaaacaacacracatcttacc

SEQ ID NO: 17805 - DNA, 50 bp, synthetic construct
  source 1..50: mol_type = other DNA
actatttttcccttttcttattaaaacaaattacrcacrttttaatatcc

SEQ ID NO: 17806 - DNA, 50 bp, synthetic construct
  source 1..50: mol_type = other DNA
cccaaaaataatactatttttcccttttcttattaaaacaaattacrcac

SEQ ID NO: 17807 - DNA, 50 bp, synthetic construct
  source 1..50: mol_type = other DNA
ratacccaaaaataatactatttttcccttttcttattaaaacaaattac

SEQ ID NO: 17808 - DNA, 50 bp, synthetic construct
  source 1..50: mol_type = other DNA
cacaactaataaataaaaacccctaaacccaaaaccaatcctataaccac

SEQ ID NO: 17809 - DNA, 50 bp, synthetic construct
  source 1..50: mol_type = other DNA
actaataaataaaaacccctaaacccaaaaccaatcctataaccacrcac

SEQ ID NO: 17810 - DNA, 50 bp, synthetic construct
  source 1..50: mol_type = other DNA
ccaaaaccaatcctataaccacrcacrcttttaaaacactctttattctc

SEQ ID NO: 17811 - DNA, 50 bp, synthetic construct
  source 1..50: mol_type = other DNA
crcttttaaaacactctttattctcrtctccaatttctacatctactctc

SEQ ID NO: 17812 - DNA, 50 bp, synthetic construct
  source 1..50: mol_type = other DNA
craaaacttcccrtaaaaataaaatctaatacaaaaacrccccaaaaaac

SEQ ID NO: 17813 - DNA, 50 bp, synthetic construct
  source 1..50: mol_type = other DNA
taaaacracccacraaaacttcccrtaaaaataaaatctaatacaaaaac

SEQ ID NO: 17814 - DNA, 50 bp, synthetic construct
  source 1..50: mol_type = other DNA
cctaactaaaaactcaacctacaaaaccraacracraaaactatactaac

SEQ ID NO: 17815 - DNA, 50 bp, synthetic construct
  source 1..50: mol_type = other DNA
crcrtatttaatactcaataaaataccccctaaaaaaacaaacacaaacc

SEQ ID NO: 17816 - DNA, 50 bp, synthetic construct
  source 1..50: mol_type = other DNA
taaataattcaaaacactatacttttacaaactaaatattttaaaaaacc

SEQ ID NO: 17817 - DNA, 50 bp, synthetic construct
  source 1..50: mol_type = other DNA
aacactatacttttacaaactaaatattttaaaaaaccrtttctattttc

SEQ ID NO: 17818 - DNA, 50 bp, synthetic construct
  source 1..50: mol_type = other DNA
rctttcaatttctattaccttactactccctaaacrttcaaaaatcctcc

SEQ ID NO: 17819 - DNA, 50 bp, synthetic construct
  source 1..50: mol_type = other DNA
aacctcactaaactcrctttcaatttctattaccttactactccctaaac

SEQ ID NO: 17820 - DNA, 50 bp, synthetic construct
  source 1..50: mol_type = other DNA
tccaaaaaattttatttcctttctaaatcaaattcaacctcactaaactc

SEQ ID NO: 17821 - DNA, 50 bp, synthetic construct
  source 1..50: mol_type = other DNA
atatacrtatatatacctacctaccacaatctctacttcctaataaatac

SEQ ID NO: 17822 - DNA, 50 bp, synthetic construct
  source 1..50: mol_type = other DNA
ccaacttcttttaaaatcttaaataaaccaaccatcctacraacatatac

SEQ ID NO: 17823 - DNA, 50 bp, synthetic construct
  source 1..50: mol_type = other DNA
atccaaatttccaacttcttttaaaatcttaaataaaccaaccatcctac

SEQ ID NO: 17824 - DNA, 50 bp, synthetic construct
  source 1..50: mol_type = other DNA
tctaataaaacctaacactccataaacacaacaaaaacaaatatataaac

SEQ ID NO: 17825 - DNA, 50 bp, synthetic construct
  source 1..50: mol_type = other DNA
aaaatactcaatacrtactaataaaattatacccacaaactcatacaaac

SEQ ID NO: 17826 - DNA, 50 bp, synthetic construct
  source 1..50: mol_type = other DNA
taacctattaccttcccccaaaaccttaactaaaaaattacactcraaac

SEQ ID NO: 17827 - DNA, 50 bp, synthetic construct
  source 1..50: mol_type = other DNA
taaaacaaatcccatctacaactacccacaaaattaaaaaaacaataccc

SEQ ID NO: 17828 - DNA, 50 bp, synthetic construct
  source 1..50: mol_type = other DNA
aatatttttcctaatcattataacccattaaaactaataatattacttcc

SEQ ID NO: 17829 - DNA, 50 bp, synthetic construct
  source 1..50: mol_type = other DNA
atcaatcacacacacacaacataaccaaatcaataaaccattttaatttc

SEQ ID NO: 17830 - DNA, 50 bp, synthetic construct
  source 1..50: mol_type = other DNA
aaaacaaaaaaatttcctaaatctattaaaaccttaaaacaaaactaatc

SEQ ID NO: 17831 - DNA, 50 bp, synthetic construct
  source 1..50: mol_type = other DNA
aacaactacaaacacatacrtactaataaacacattatttaactaccatc

SEQ ID NO: 17832 - DNA, 50 bp, synthetic construct
  source 1..50: mol_type = other DNA
ttacctataatttacataaaccaatcccaccaaatataacttcttccacc

SEQ ID NO: 17833 - DNA, 50 bp, synthetic construct
  source 1..50: mol_type = other DNA
cacacctaataaaattaacccatacaaactacaaataaacattctcaacc

SEQ ID NO: 17834 - DNA, 50 bp, synthetic construct
  source 1..50: mol_type = other DNA
cctaaaaaaatattaatcataatctaaatcaaactaaataacrccraccc

SEQ ID NO: 17835 - DNA, 50 bp, synthetic construct
  source 1..50: mol_type = other DNA
attaccctaaaaaaatattaatcataatctaaatcaaactaaataacrcc

SEQ ID NO: 17836 - DNA, 50 bp, synthetic construct
  source 1..50: mol_type = other DNA
attcccatccaactactctcacaccaacataaacrtaaaaaaatatatac

SEQ ID NO: 17837 - DNA, 50 bp, synthetic construct
  source 1..50: mol_type = other DNA
aaaaacaattaaataaaaatacacacacacctatatctatacacacactc

SEQ ID NO: 17838 - DNA, 50 bp, synthetic construct
  source 1..50: mol_type = other DNA
aaaatacacacacacctatatctatacacacactcrcaacttcactaaac

SEQ ID NO: 17839 - DNA, 50 bp, synthetic construct
  source 1..50: mol_type = other DNA
ccraacacttaaaaaatacccaactccrcrtatatataaaaactacactc

SEQ ID NO: 17840 - DNA, 50 bp, synthetic construct
  source 1..50: mol_type = other DNA
aaataacaaaactcacaataaccraacacttaaaaaatacccaactccrc

SEQ ID NO: 17841 - DNA, 50 bp, synthetic construct
  source 1..50: mol_type = other DNA
aaaaataacaaaactcacaataaccraacacttaaaaaatacccaactcc

SEQ ID NO: 17842 - DNA, 50 bp, synthetic construct
  source 1..50: mol_type = other DNA
acaaactacactaatatcacctaataacctaaacacaactcaacaaaccc

SEQ ID NO: 17843 - DNA, 50 bp, synthetic construct
  source 1..50: mol_type = other DNA
aataatacataccacaaacacaattaaacaaaataatataacaaaaactc

SEQ ID NO: 17844 - DNA, 50 bp, synthetic construct
  source 1..50: mol_type = other DNA
cccaaacccrcataacctacactcttaccaataaaacataataccttttc

SEQ ID NO: 17845 - DNA, 50 bp, synthetic construct
  source 1..50: mol_type = other DNA
actaaaaatacaattactaaatacaaaaatcaaaatttaaacccaaaccc

SEQ ID NO: 17846 - DNA, 50 bp, synthetic construct
  source 1..50: mol_type = other DNA
aactcctaacrcctaacaaaaaactccatctctaaccttacacaaaaaac

SEQ ID NO: 17847 - DNA, 50 bp, synthetic construct
  source 1..50: mol_type = other DNA
aaaacccracrttttctatataaaatcaaaaataaaacctcctaccaaac

SEQ ID NO: 17848 - DNA, 50 bp, synthetic construct
  source 1..50: mol_type = other DNA
aaaataaaactaaaaaatctcctaaaaaaatacataaaactctaacatcc

SEQ ID NO: 17849 - DNA, 50 bp, synthetic construct
  source 1..50: mol_type = other DNA
ataaaaaacttaacacctaatctaacaactactatactcracttctcrcc

SEQ ID NO: 17850 - DNA, 50 bp, synthetic construct
  source 1..50: mol_type = other DNA
acaataaaaaacttaacacctaatctaacaactactatactcracttctc

SEQ ID NO: 17851 - DNA, 50 bp, synthetic construct
  source 1..50: mol_type = other DNA
accccccracaataaaaaacttaacacctaatctaacaactactatactc

SEQ ID NO: 17852 - DNA, 50 bp, synthetic construct
  source 1..50: mol_type = other DNA
aaaaatcraacacaacaactactaaaccaaatactaaacccctcactacc

SEQ ID NO: 17853 - DNA, 50 bp, synthetic construct
  source 1..50: mol_type = other DNA
actactaaaccaaatactaaacccctcactaccraaaaaccaataaaacc

SEQ ID NO: 17854 - DNA, 50 bp, synthetic construct
  source 1..50: mol_type = other DNA
ctataatcrtaataaaaaataacaacrtactaacaattctcrcaactctc

SEQ ID NO: 17855 - DNA, 50 bp, synthetic construct
  source 1..50: mol_type = other DNA
aacttacacctataatcrtaataaaaaataacaacrtactaacaattctc

SEQ ID NO: 17856 - DNA, 50 bp, synthetic construct
  source 1..50: mol_type = other DNA
tatacccaaaccacattaatcaattaaacctactcatccaaaactacttc

SEQ ID NO: 17857 - DNA, 50 bp, synthetic construct
  source 1..50: mol_type = other DNA
aatataaaaaccaaaataccatctataataaactaaaaactccttcccac

SEQ ID NO: 17858 - DNA, 50 bp, synthetic construct
  source 1..50: mol_type = other DNA
tatcctaaatttattaacctataataaaaacaatttaaaaccacactcac

SEQ ID NO: 17859 - DNA, 50 bp, synthetic construct
  source 1..50: mol_type = other DNA
aaacaaatcacactaaaaacrtatatatattcaatatattccctaaaaac

SEQ ID NO: 17860 - DNA, 50 bp, synthetic construct
  source 1..50: mol_type = other DNA
aaaactacccaacacacttacccacratacacactacaaaaactaaaaac

SEQ ID NO: 17861 - DNA, 50 bp, synthetic construct
  source 1..50: mol_type = other DNA
aatatttctttacttttcccaacacrttctcaacccctacaatatacatc

SEQ ID NO: 17862 - DNA, 50 bp, synthetic construct
  source 1..50: mol_type = other DNA
aaacccaaaatttaaaataatccctataatttatcaacctctactatccc

SEQ ID NO: 17863 - DNA, 50 bp, synthetic construct
  source 1..50: mol_type = other DNA
atttaaaataatccctataatttatcaacctctactatcccrtctacttc

SEQ ID NO: 17864 - DNA, 50 bp, synthetic construct
  source 1..50: mol_type = other DNA
cctctacccttattcaaacccaccaaaaataccaccaattaaaaccaaac

SEQ ID NO: 17865 - DNA, 50 bp, synthetic construct
  source 1..50: mol_type = other DNA
aaacattttctatcacaaaaaaccaacraaaaattcacaccccctaaaac

SEQ ID NO: 17866 - DNA, 50 bp, synthetic construct
  source 1..50: mol_type = other DNA
aatttccttatacacaaaaccaaaaacattttctatcacaaaaaaccaac

SEQ ID NO: 17867 - DNA, 50 bp, synthetic construct
  source 1..50: mol_type = other DNA
aaacctaatactaaatactttaacacacatccrttcattttctactcatc

SEQ ID NO: 17868 - DNA, 50 bp, synthetic construct
  source 1..50: mol_type = other DNA
aactaaaattcaaaaacataacttacataatttcattaaaataacaccac

SEQ ID NO: 17869 - DNA, 50 bp, synthetic construct
  source 1..50: mol_type = other DNA
ctacctcaacctcctcctaaataactaaaattataaacaaataccaccac

SEQ ID NO: 17870 - DNA, 50 bp, synthetic construct
  source 1..50: mol_type = other DNA
caacaccaaacctaacacacaatatatcctcaataaataaaaacataacc

SEQ ID NO: 17871 - DNA, 50 bp, synthetic construct
  source 1..50: mol_type = other DNA
cattctctcatctctctataccccaatttcctcatctataaataaacatc

SEQ ID NO: 17872 - DNA, 50 bp, synthetic construct
  source 1..50: mol_type = other DNA
aaccataaactctactcaaacaaacctaaattcaaatccaactctactac

SEQ ID NO: 17873 - DNA, 50 bp, synthetic construct
  source 1..50: mol_type = other DNA
ataacaaacactataaactaaatacctaacctatactaaaattcaatatc

SEQ ID NO: 17874 - DNA, 50 bp, synthetic construct
  source 1..50: mol_type = other DNA
aaaaaattaaataacttaaacaaaatcataaacccacaaataacaaaatc

SEQ ID NO: 17875 - DNA, 50 bp, synthetic construct
  source 1..50: mol_type = other DNA
taaataacttaaacaaaatcataaacccacaaataacaaaatcraaattc

SEQ ID NO: 17876 - DNA, 50 bp, synthetic construct
  source 1..50: mol_type = other DNA
aacctatcttaacctacttaactttacaacatacaacaaaaacaaaacac

SEQ ID NO: 17877 - DNA, 50 bp, synthetic construct
  source 1..50: mol_type = other DNA
aaaaccaaataaattaaaacaaactaaattcctacaaaactaaattaccc

SEQ ID NO: 17878 - DNA, 50 bp, synthetic construct
  source 1..50: mol_type = other DNA
acraacaaacactaccaaacttatataaaaataaaactaaaacactattc

SEQ ID NO: 17879 - DNA, 50 bp, synthetic construct
  source 1..50: mol_type = other DNA
taaaactataaatcaaacccrtaaaaataacatcaaaaaaccaaaacacc

SEQ ID NO: 17880 - DNA, 50 bp, synthetic construct
  source 1..50: mol_type = other DNA
tacctacaaacratctcrctatcaaatatttaaaactataaatcaaaccc

SEQ ID NO: 17881 - DNA, 50 bp, synthetic construct
  source 1..50: mol_type = other DNA
acaaaaaacttaaataacaaataacaaaaaacctacctacaaacratctc

SEQ ID NO: 17882 - DNA, 50 bp, synthetic construct
  source 1..50: mol_type = other DNA
atcaccttcacraacctaactcacaatcctaaatatctaacaacraaatc

SEQ ID NO: 17883 - DNA, 50 bp, synthetic construct
  source 1..50: mol_type = other DNA
atcctcacacacaacattcatttcaaacacatataataaaaaccrtaatc

SEQ ID NO: 17884 - DNA, 50 bp, synthetic construct
  source 1..50: mol_type = other DNA
acacaaatcctcacacacaacattcatttcaaacacatataataaaaacc

SEQ ID NO: 17885 - DNA, 50 bp, synthetic construct
  source 1..50: mol_type = other DNA
aaaaacctatataatttaaaccatattatacccccctaccaatatccttc

SEQ ID NO: 17886 - DNA, 50 bp, synthetic construct
  source 1..50: mol_type = other DNA
attatttcacaccttaaattaacrcatctcaaaacaatttacaaatattc

SEQ ID NO: 17887 - DNA, 50 bp, synthetic construct
  source 1..50: mol_type = other DNA
tactcatttcaaaaccatttcacraacaaccaaaaaatacctaaaccacc

SEQ ID NO: 17888 - DNA, 50 bp, synthetic construct
  source 1..50: mol_type = other DNA
atcccttcctttaaccaaaactaaactaaaccaataaccttctcaaactc

SEQ ID NO: 17889 - DNA, 50 bp, synthetic construct
  source 1..50: mol_type = other DNA
aaaattaacatcacaaaaaattacaccaccaactaatttaccccaatatc

SEQ ID NO: 17890 - DNA, 50 bp, synthetic construct
  source 1..50: mol_type = other DNA
ataactacrccattatctccaattctaaatttttccacaaataacttctc

SEQ ID NO: 17891 - DNA, 50 bp, synthetic construct
  source 1..50: mol_type = other DNA
aaataaccraaatctaaaatacattcaattacaataacctaaatctacac

SEQ ID NO: 17892 - DNA, 50 bp, synthetic construct
  source 1..50: mol_type = other DNA
tttccccraattatttaaccctcatacttcaaaattaaactaaaacttac

SEQ ID NO: 17893 - DNA, 50 bp, synthetic construct
  source 1..50: mol_type = other DNA
aaaaaacctataaactaattcccatactaccactcacctacaataaaaac

SEQ ID NO: 17894 - DNA, 50 bp, synthetic construct
  source 1..50: mol_type = other DNA
acatccatccttttacaaatatcttcccaacaaacccaaatttcaaaaac

SEQ ID NO: 17895 - DNA, 50 bp, synthetic construct
  source 1..50: mol_type = other DNA
ataaccctataacrcctcaaaaaaatatttacctatcaatatctactctc

SEQ ID NO: 17896 - DNA, 50 bp, synthetic construct
  source 1..50: mol_type = other DNA
racrctatataaataattaacaaaacatctaccttacttcataacacacc

SEQ ID NO: 17897 - DNA, 50 bp, synthetic construct
  source 1..50: mol_type = other DNA
acaaatattttattaattatttacacaacrtcraccccrcaaaaaactac

SEQ ID NO: 17898 - DNA, 50 bp, synthetic construct
  source 1..50: mol_type = other DNA
taacaaaaacractatcacaaacctaaccrtaaaacaaaaataaacaacc

SEQ ID NO: 17899 - DNA, 50 bp, synthetic construct
  source 1..50: mol_type = other DNA
aatacctaaaaatcacraaactaatacctaatattactaacccrttttcc

SEQ ID NO: 17900 - DNA, 50 bp, synthetic construct
  source 1..50: mol_type = other DNA
ccccaaaaatacctaaaaatcacraaactaatacctaatattactaaccc

SEQ ID NO: 17901 - DNA, 50 bp, synthetic construct
  source 1..50: mol_type = other DNA
taaaattaaatttctaaaacaaatcacccccaaaaatacctaaaaatcac

SEQ ID NO: 17902 - DNA, 50 bp, synthetic construct
  source 1..50: mol_type = other DNA
taacacctaacatcaaaactttccctaaaaaaccactaaaaataaaaaac

SEQ ID NO: 17903 - DNA, 50 bp, synthetic construct
  source 1..50: mol_type = other DNA
aaaacctccttatataaaacaaacaacaaacaaataactttacccccttc

SEQ ID NO: 17904 - DNA, 50 bp, synthetic construct
  source 1..50: mol_type = other DNA
tattacaatcacaatattatacaaccaccaccttcatccrattccaaaac

SEQ ID NO: 17905 - DNA, 50 bp, synthetic construct
  source 1..50: mol_type = other DNA
tacatataaaacctaaaactaatcataatatctctctaaacctcaatatc

SEQ ID NO: 17906 - DNA, 50 bp, synthetic construct
  source 1..50: mol_type = other DNA
acccataaaacaataaacratctatatttttacatcaaaacttttcaccc

SEQ ID NO: 17907 - DNA, 50 bp, synthetic construct
  source 1..50: mol_type = other DNA
cacctaaacctaaactacraataaaaaattttaatacaaaaacacaaacc

SEQ ID NO: 17908 - DNA, 50 bp, synthetic construct
  source 1..50: mol_type = other DNA
aaactcccttctactaaccaaaaatacttatactaactaatatataacac

SEQ ID NO: 17909 - DNA, 50 bp, synthetic construct
  source 1..50: mol_type = other DNA
aaatacttatactaactaatatataacacrttatctcattctttcataac

SEQ ID NO: 17910 - DNA, 50 bp, synthetic construct
  source 1..50: mol_type = other DNA
atactaactaatatataacacrttatctcattctttcataacrtatatcc

SEQ ID NO: 17911 - DNA, 50 bp, synthetic construct
  source 1..50: mol_type = other DNA
rtatatccraataaaaatcctaaatcaaacattatactaaaaacccacac

SEQ ID NO: 17912 - DNA, 50 bp, synthetic construct
  source 1..50: mol_type = other DNA
aattaaattaaaacataacccacaataaatacctaataaaaccatctacc

SEQ ID NO: 17913 - DNA, 50 bp, synthetic construct
  source 1..50: mol_type = other DNA
taatctaacccttaacctaaaaaaactcacttcatcctcccaataatacc

SEQ ID NO: 17914 - DNA, 50 bp, synthetic construct
  source 1..50: mol_type = other DNA
cctaaactaaacaactaatcacttcctaaaaacacatcctaatcacttcc

SEQ ID NO: 17915 - DNA, 50 bp, synthetic construct
  source 1..50: mol_type = other DNA
taaaaaaaacaatatacacccaaataccataccaaaacccctaaacatcc

SEQ ID NO: 17916 - DNA, 50 bp, synthetic construct
  source 1..50: mol_type = other DNA
atccccttctaaaatacatattcaatctataaaacaaattacaactatac

SEQ ID NO: 17917 - DNA, 50 bp, synthetic construct
  source 1..50: mol_type = other DNA
ttactaacaaattcrttcactccatataaacattctccaaaaatccracc

SEQ ID NO: 17918 - DNA, 50 bp, synthetic construct
  source 1..50: mol_type = other DNA
acrtttactaacaaattcrttcactccatataaacattctccaaaaatcc

SEQ ID NO: 17919 - DNA, 50 bp, synthetic construct
  source 1..50: mol_type = other DNA
tcttctatataccatataatacccaataatcctaccatctaaacacccac

SEQ ID NO: 17920 - DNA, 50 bp, synthetic construct
  source 1..50: mol_type = other DNA
ataaacacracrtaccraactaaatcaatatatatacatttcctttattc

SEQ ID NO: 17921 - DNA, 50 bp, synthetic construct
  source 1..50: mol_type = other DNA
aaacaaatataaaaaccrcctactcttaaaaccaacctaataataacaac

SEQ ID NO: 17922 - DNA, 50 bp, synthetic construct
  source 1..50: mol_type = other DNA
taattcctatatatttccccaaaaaccaaaaaaacatataatactcaacc

SEQ ID NO: 17923 - DNA, 50 bp, synthetic construct
  source 1..50: mol_type = other DNA
cttcttaacccctaaaaaaacacacaaaaatcaaataaaatccctacccc

SEQ ID NO: 17924 - DNA, 50 bp, synthetic construct
  source 1..50: mol_type = other DNA
aaaaaacatacaaaaaaaatacttatactctaaactaacacctttcactc

SEQ ID NO: 17925 - DNA, 50 bp, synthetic construct
  source 1..50: mol_type = other DNA
catctctcctatccctaaataacactaaatacttctacaaatcacaaccc

SEQ ID NO: 17926 - DNA, 50 bp, synthetic construct
  source 1..50: mol_type = other DNA
ataatttcaaaaataccaccccataaaccatttaaacatccaaaaacttc

SEQ ID NO: 17927 - DNA, 50 bp, synthetic construct
  source 1..50: mol_type = other DNA
ataacraataacaaaaattactaaatacraaaacaaacaactaaataccc

SEQ ID NO: 17928 - DNA, 50 bp, synthetic construct
  source 1..50: mol_type = other DNA
aaataacataaaacatttcaaaacaataaaaacacaacataaaaccctac

SEQ ID NO: 17929 - DNA, 50 bp, synthetic construct
  source 1..50: mol_type = other DNA
aaattctatattaaacactatctacaaactactaacccaacaaattaatc

SEQ ID NO: 17930 - DNA, 50 bp, synthetic construct
  source 1..50: mol_type = other DNA
caccattaccaaaaattattacaataacaaacccaacccctctaacttcc

SEQ ID NO: 17931 - DNA, 50 bp, synthetic construct
  source 1..50: mol_type = other DNA
acccctctaacttccrctccttaaataacaaaaatcaaaaatcraataac

SEQ ID NO: 17932 - DNA, 50 bp, synthetic construct
  source 1..50: mol_type = other DNA
aaatcaaaaatcraataacrcrattaccaaccttctcactcaaaaacaac

SEQ ID NO: 17933 - DNA, 50 bp, synthetic construct
  source 1..50: mol_type = other DNA
crtcactccctataaatactaaacctccccattttaaaactaaaaacaac

SEQ ID NO: 17934 - DNA, 50 bp, synthetic construct
  source 1..50: mol_type = other DNA
aaatacccctcacctaaacctccttatccatattttcaaaataaccaaac

SEQ ID NO: 17935 - DNA, 50 bp, synthetic construct
  source 1..50: mol_type = other DNA
aaacaaaaaaactcaaataaaaaatacttacttaatacccactatacacc

SEQ ID NO: 17936 - DNA, 50 bp, synthetic construct
  source 1..50: mol_type = other DNA
aaactcaaataaaaaatacttacttaatacccactatacaccraaaaccc

SEQ ID NO: 17937 - DNA, 50 bp, synthetic construct
  source 1..50: mol_type = other DNA
aaaacaaaatcaactcaaaattatcacraaaattaacraaaacaacacac

SEQ ID NO: 17938 - DNA, 50 bp, synthetic construct
  source 1..50: mol_type = other DNA
taacttcatctaaaaaacaaaatcaactcaaaattatcacraaaattaac

SEQ ID NO: 17939 - DNA, 50 bp, synthetic construct
  source 1..50: mol_type = other DNA
aaacctcaattaacttcatctaaaaaacaaaatcaactcaaaattatcac

SEQ ID NO: 17940 - DNA, 50 bp, synthetic construct
  source 1..50: mol_type = other DNA
ccaatatacctaaaattcrtatacaaaaaacactaactctaaaaccaacc

SEQ ID NO: 17941 - DNA, 50 bp, synthetic construct
  source 1..50: mol_type = other DNA
caacaacrctaaaatctaacccctatcctacaaatacaaatacaacaaac

SEQ ID NO: 17942 - DNA, 50 bp, synthetic construct
  source 1..50: mol_type = other DNA
cttatacccaaaaaaacaaataacaacracaaaattaaacacacctaacc

SEQ ID NO: 17943 - DNA, 50 bp, synthetic construct
  source 1..50: mol_type = other DNA
atatcrtttaccatcaacacaaaatatcaaaaacctcttctaaacctaac

SEQ ID NO: 17944 - DNA, 50 bp, synthetic construct
  source 1..50: mol_type = other DNA
ttcacactaaaacaaaataattccrataatataatctaaaaaccacraac

SEQ ID NO: 17945 - DNA, 50 bp, synthetic construct
  source 1..50: mol_type = other DNA
tccattcacactaaaacaaaataattccrataatataatctaaaaaccac

SEQ ID NO: 17946 - DNA, 50 bp, synthetic construct
  source 1..50: mol_type = other DNA
aaaaacaaactattaatactaaaattaacctaaaaaataaccatttccrc

SEQ ID NO: 17947 - DNA, 50 bp, synthetic construct
  source 1..50: mol_type = other DNA
taaaaactcaaaaaaactatataacttaccaaaatcacacaaccccraac

SEQ ID NO: 17948 - DNA, 50 bp, synthetic construct
  source 1..50: mol_type = other DNA
aatttcrctataaaataaatatccatttccacaaacatacaaaaaattcc

SEQ ID NO: 17949 - DNA, 50 bp, synthetic construct
  source 1..50: mol_type = other DNA
aaccaaaatatccttatataataatacatcccrtattaaaactcaaaaac

SEQ ID NO: 17950 - DNA, 50 bp, synthetic construct
  source 1..50: mol_type = other DNA
catacrcaatctactattaaccaaaatatccttatataataatacatccc

SEQ ID NO: 17951 - DNA, 50 bp, synthetic construct
  source 1..50: mol_type = other DNA
aatacraaatacaccatcatataaaaacactttaatcaacaacaaactac

SEQ ID NO: 17952 - DNA, 50 bp, synthetic construct
  source 1..50: mol_type = other DNA
tacaccatcatataaaaacactttaatcaacaacaaactacrtatataac

SEQ ID NO: 17953 - DNA, 50 bp, synthetic construct
  source 1..50: mol_type = other DNA
ataccttttccacrtataaacacacaaatactaaccatttcattactatc

SEQ ID NO: 17954 - DNA, 50 bp, synthetic construct
  source 1..50: mol_type = other DNA
rtataaacacacaaatactaaccatttcattactatcractacaatactc

SEQ ID NO: 17955 - DNA, 50 bp, synthetic construct
  source 1..50: mol_type = other DNA
tactaaccatttcattactatcractacaatactcratacaaaaccatac

SEQ ID NO: 17956 - DNA, 50 bp, synthetic construct
  source 1..50: mol_type = other DNA
actcratacaaaaccatacratacaaatatataacccaaaaataacaaac

SEQ ID NO: 17957 - DNA, 50 bp, synthetic construct
  source 1..50: mol_type = other DNA
aaccatacratacaaatatataacccaaaaataacaaacracaccctatc

SEQ ID NO: 17958 - DNA, 50 bp, synthetic construct
  source 1..50: mol_type = other DNA
atcactatataaacrtcttaaaattaacttacacaaacccaaacratctc

SEQ ID NO: 17959 - DNA, 50 bp, synthetic construct
  source 1..50: mol_type = other DNA
rattttatcactatataaacrtcttaaaattaacttacacaaacccaaac

SEQ ID NO: 17960 - DNA, 50 bp, synthetic construct
  source 1..50: mol_type = other DNA
aaacacactctaaaaaatacataacraaacrattttatcactatataaac

SEQ ID NO: 17961 - DNA, 50 bp, synthetic construct
  source 1..50: mol_type = other DNA
rtctaaatttatataaatcaactccaaaacrttcacacaataacaaaatc

SEQ ID NO: 17962 - DNA, 50 bp, synthetic construct
  source 1..50: mol_type = other DNA
cacaataacaaaatcrcctcrtcatacatttctcaaaatatatccctatc

SEQ ID NO: 17963 - DNA, 50 bp, synthetic construct
  source 1..50: mol_type = other DNA
ataatatcccaaacattaaaaaaaactatttccaaatctatccraatatc

SEQ ID NO: 17964 - DNA, 50 bp, synthetic construct
  source 1..50: mol_type = other DNA
cccaaacattaaaaaaaactatttccaaatctatccraatatcrttttcc

SEQ ID NO: 17965 - DNA, 50 bp, synthetic construct
  source 1..50: mol_type = other DNA
atatatcaaccaacatacataaaatcatccaaccratatctaacrcatac

SEQ ID NO: 17966 - DNA, 50 bp, synthetic construct
  source 1..50: mol_type = other DNA
tatataatatatcaaccaacatacataaaatcatccaaccratatctaac

SEQ ID NO: 17967 - DNA, 50 bp, synthetic construct
  source 1..50: mol_type = other DNA
aaatttactacataatctaatctaataaccccaataactctttaaaaccc

SEQ ID NO: 17968 - DNA, 50 bp, synthetic construct
  source 1..50: mol_type = other DNA
aataaacaaacataatcatttcaaacaacratacrtaccttaaaaaaaac

SEQ ID NO: 17969 - DNA, 50 bp, synthetic construct
  source 1..50: mol_type = other DNA
taaacctaaaattccaaatatacctaactatatccttacaaattcacacc

SEQ ID NO: 17970 - DNA, 50 bp, synthetic construct
  source 1..50: mol_type = other DNA
caaaaaaccaaaaaacacactcttttctaaactaaatacccaaattcctc

SEQ ID NO: 17971 - DNA, 50 bp, synthetic construct
  source 1..50: mol_type = other DNA
caatctcaacrtaaacracaaacctcactcaaataataaaatctaacrcc

SEQ ID NO: 17972 - DNA, 50 bp, synthetic construct
  source 1..50: mol_type = other DNA
aaacaatctcaacrtaaacracaaacctcactcaaataataaaatctaac

SEQ ID NO: 17973 - DNA, 50 bp, synthetic construct
  source 1..50: mol_type = other DNA
ccatctctaaaaacrctccaataataaaaataccctctcctaaaatactc

SEQ ID NO: 17974 - DNA, 50 bp, synthetic construct
  source 1..50: mol_type = other DNA
aaaatatttcttctccaacaactccaaacrctactaccatctctaaaaac

SEQ ID NO: 17975 - DNA, 50 bp, synthetic construct
  source 1..50: mol_type = other DNA
aaaacattcrcataaacrtaaaaaatatttcttctccaacaactccaaac

SEQ ID NO: 17976 - DNA, 50 bp, synthetic construct
  source 1..50: mol_type = other DNA
caaacatataaccctaaaaacctaataacccaataaacactaatcacctc

SEQ ID NO: 17977 - DNA, 50 bp, synthetic construct
  source 1..50: mol_type = other DNA
aaccacatatttaaaaaactattcctaaaacaccaaacatctaacacctc

SEQ ID NO: 17978 - DNA, 50 bp, synthetic construct
  source 1..50: mol_type = other DNA
cccraactccacttctatatctaaaatacaaaaatacatcaataacttcc

SEQ ID NO: 17979 - DNA, 50 bp, synthetic construct
  source 1..50: mol_type = other DNA
ctcacrtataaccataactcaaaaattcttaaaacatcaaaatctacccc

SEQ ID NO: 17980 - DNA, 50 bp, synthetic construct
  source 1..50: mol_type = other DNA
aacccraaacaaactttaatacctcaaaaacctctaaatcataaccacac

SEQ ID NO: 17981 - DNA, 50 bp, synthetic construct
  source 1..50: mol_type = other DNA
atcctaaaaacrtaatacctaaaatcaaactaataataaactcaattccc

SEQ ID NO: 17982 - DNA, 50 bp, synthetic construct
  source 1..50: mol_type = other DNA
aaactaataataaactcaattcccrtaaaaactctaacaaaacacctacc

SEQ ID NO: 17983 - DNA, 50 bp, synthetic construct
  source 1..50: mol_type = other DNA
aaaaactctaacaaaacacctaccrtacctttttctaacttctaacaaac

SEQ ID NO: 17984 - DNA, 50 bp, synthetic construct
  source 1..50: mol_type = other DNA
ctttttctaacttctaacaaacrctaaccaccctccttattccttattcc

SEQ ID NO: 17985 - DNA, 50 bp, synthetic construct
  source 1..50: mol_type = other DNA
ttcttccttatacrtctatctctatatccatccctcataaaaaaacaccc

SEQ ID NO: 17986 - DNA, 50 bp, synthetic construct
  source 1..50: mol_type = other DNA
tatcaccacaacaaaaaccaaactaaaaccacaaaaaataaatcaaacac

SEQ ID NO: 17987 - DNA, 50 bp, synthetic construct
  source 1..50: mol_type = other DNA
taaaaccacaaaaaataaatcaaacacrcccactaaatactcaaaaacac

SEQ ID NO: 17988 - DNA, 50 bp, synthetic construct
  source 1..50: mol_type = other DNA
aaaaaataaatcaaacacrcccactaaatactcaaaaacacraaaaaacc

SEQ ID NO: 17989 - DNA, 50 bp, synthetic construct
  source 1..50: mol_type = other DNA
ctaataccaccaaaaaaccaaacrctacaaacctatttttaaaaaacatc

SEQ ID NO: 17990 - DNA, 50 bp, synthetic construct
  source 1..50: mol_type = other DNA
aacrttctcaaccctcaataatcctaactaataccaccaaaaaaccaaac

SEQ ID NO: 17991 - DNA, 50 bp, synthetic construct
  source 1..50: mol_type = other DNA
aacrtttaatcctttaataacaccaaccaaaaccactaaaaactaaaaac

SEQ ID NO: 17992 - DNA, 50 bp, synthetic construct
  source 1..50: mol_type = other DNA
atcctttaataacaccaaccaaaaccactaaaaactaaaaacrtctcaac

SEQ ID NO: 17993 - DNA, 50 bp, synthetic construct
  source 1..50: mol_type = other DNA
ctaataaacrctaccraaaataacraaccctatcattactaaaaaaaacc

SEQ ID NO: 17994 - DNA, 50 bp, synthetic construct
  source 1..50: mol_type = other DNA
ctctactcttttaaattaaaaaacracccctcccaataataacaaaaccc

SEQ ID NO: 17995 - DNA, 50 bp, synthetic construct
  source 1..50: mol_type = other DNA
cccaaaaacctttatctattttaacaaaaaccctataatcaaacrtttcc

SEQ ID NO: 17996 - DNA, 50 bp, synthetic construct
  source 1..50: mol_type = other DNA
attcaatattaactaaacacctactatataccaaaccctaaactaaacac

SEQ ID NO: 17997 - DNA, 50 bp, synthetic construct
  source 1..50: mol_type = other DNA
tcccaaaaaaccccactaaaactccrtcrcaaaaataacataaaatttac

SEQ ID NO: 17998 - DNA, 50 bp, synthetic construct
  source 1..50: mol_type = other DNA
aaaaatacctataaattctccttcccaaaaaaccccactaaaactccrtc

SEQ ID NO: 17999 - DNA, 50 bp, synthetic construct
  source 1..50: mol_type = other DNA
aaaaaaaatacctataaattctccttcccaaaaaaccccactaaaactcc

SEQ ID NO: 18000 - DNA, 50 bp, synthetic construct
  source 1..50: mol_type = other DNA
aatctataaacatttccttccccacrtcctaaaacacaattaactaaaac

SEQ ID NO: 18001 - DNA, 50 bp, synthetic construct
  source 1..50: mol_type = other DNA
cctcaataccaatcaatacctaaaatacaacttaacaacctctatcctcc

SEQ ID NO: 18002 - DNA, 50 bp, synthetic construct
  source 1..50: mol_type = other DNA
catctcaaacattaattaacattaaaaaaaacccacctaaacttaatatc

SEQ ID NO: 18003 - DNA, 50 bp, synthetic construct
  source 1..50: mol_type = other DNA
tctcaaacattaattaacattaaaaaaaacccacctaaacttaatatcrc

SEQ ID NO: 18004 - DNA, 50 bp, synthetic construct
  source 1..50: mol_type = other DNA
aacacaaaaaaatatacrtacaatctacctaaaacataaaatttttcctc

SEQ ID NO: 18005 - DNA, 50 bp, synthetic construct
  source 1..50: mol_type = other DNA
actatataacttaatttccccatctttaaaataccaaatataaaccaaac

SEQ ID NO: 18006 - DNA, 50 bp, synthetic construct
  source 1..50: mol_type = other DNA
aatttccccatctttaaaataccaaatataaaccaaacrcaataactctc

SEQ ID NO: 18007 - DNA, 50 bp, synthetic construct
  source 1..50: mol_type = other DNA
aaatcaacattaaataatcattaaacaaacrtatacrtaatcrctaccac

SEQ ID NO: 18008 - DNA, 50 bp, synthetic construct
  source 1..50: mol_type = other DNA
aatataaaaaaacaaaacccaactacaatcaaaacaactccataaaaacc

SEQ ID NO: 18009 - DNA, 50 bp, synthetic construct
  source 1..50: mol_type = other DNA
ctactcttacatatctaataaaaacttcccttaataacacaaaatctacc

SEQ ID NO: 18010 - DNA, 50 bp, synthetic construct
  source 1..50: mol_type = other DNA
ataaaaacaaaaatacccacctcataaaataaaccaataaacccaaatac

SEQ ID NO: 18011 - DNA, 50 bp, synthetic construct
  source 1..50: mol_type = other DNA
cctcataaaataaaccaataaacccaaatacrtaatacaataaataccac

SEQ ID NO: 18012 - DNA, 50 bp, synthetic construct
  source 1..50: mol_type = other DNA
acctaaaaaaatacrattctaacccaaaacctaaacttaccttccaaaac

SEQ ID NO: 18013 - DNA, 50 bp, synthetic construct
  source 1..50: mol_type = other DNA
aaaaacttaaacratcaccaaacctataaaatatacctcracrttcaacc

SEQ ID NO: 18014 - DNA, 50 bp, synthetic construct
  source 1..50: mol_type = other DNA
aaaaactcaaaaacttaaacratcaccaaacctataaaatatacctcrac

SEQ ID NO: 18015 - DNA, 50 bp, synthetic construct
  source 1..50: mol_type = other DNA
acaaaccaactatataaaaacttcccraaaaatctaacctcaaaacaccc

SEQ ID NO: 18016 - DNA, 50 bp, synthetic construct
  source 1..50: mol_type = other DNA
ctctaaaatcaaacttttcraaaaaccctcacacaactaatctacttatc

SEQ ID NO: 18017 - DNA, 50 bp, synthetic construct
  source 1..50: mol_type = other DNA
ctaaaatcaaacttttcraaaaaccctcacacaactaatctacttatcrc

SEQ ID NO: 18018 - DNA, 50 bp, synthetic construct
  source 1..50: mol_type = other DNA
ttttcraaaaaccctcacacaactaatctacttatcrcrttaataacacc

SEQ ID NO: 18019 - DNA, 50 bp, synthetic construct
  source 1..50: mol_type = other DNA
actaaaaacctcaaatccaaacaaaaacaaacraacccactctaatatcc

SEQ ID NO: 18020 - DNA, 50 bp, synthetic construct
  source 1..50: mol_type = other DNA
tcaaaaaccracctacatataaaactccaaacraacatcaaaataaattc

SEQ ID NO: 18021 - DNA, 50 bp, synthetic construct
  source 1..50: mol_type = other DNA
actataacctaaaaaactctcraaaaactccctaaatcataataaccatc

SEQ ID NO: 18022 - DNA, 50 bp, synthetic construct
  source 1..50: mol_type = other DNA
ttcttcaattcactcaataaccttcaaaaactataacctaaaaaactctc

SEQ ID NO: 18023 - DNA, 50 bp, synthetic construct
  source 1..50: mol_type = other DNA
ttctatcctaacaaactttacatctacracttaaacacaataaaaccaac

SEQ ID NO: 18024 - DNA, 50 bp, synthetic construct
  source 1..50: mol_type = other DNA
ttactttaatcctcataacaaccttataaaacaaataaattattatctcc

SEQ ID NO: 18025 - DNA, 50 bp, synthetic construct
  source 1..50: mol_type = other DNA
tcataaatttcaaccttaactaccccaataacttactaaataaccacaac

SEQ ID NO: 18026 - DNA, 50 bp, synthetic construct
  source 1..50: mol_type = other DNA
aatcattaaaacaaccaaaactaaaactcataactcctaatctcrtaaac

SEQ ID NO: 18027 - DNA, 50 bp, synthetic construct
  source 1..50: mol_type = other DNA
aaatcacrcratttcctctacaaaaaacaatatttaaaaaatctaactac

SEQ ID NO: 18028 - DNA, 50 bp, synthetic construct
  source 1..50: mol_type = other DNA
ccctcccccrcaatcaaactttttaaacactaccttttacaaaaaaaatc

SEQ ID NO: 18029 - DNA, 50 bp, synthetic construct
  source 1..50: mol_type = other DNA
ctcccccrcaatcaaactttttaaacactaccttttacaaaaaaaatcrc

SEQ ID NO: 18030 - DNA, 50 bp, synthetic construct
  source 1..50: mol_type = other DNA
caacaaaacccccaaccaacccraaaaaatttcaaacattctatacaatc

SEQ ID NO: 18031 - DNA, 50 bp, synthetic construct
  source 1..50: mol_type = other DNA
aaaaaaaactaacaactaaataaaattacaacaaaacccccaaccaaccc

SEQ ID NO: 18032 - DNA, 50 bp, synthetic construct
  source 1..50: mol_type = other DNA
taaaaaaatacrtcaccaaattttatttaatcaacactcacccraccttc

SEQ ID NO: 18033 - DNA, 50 bp, synthetic construct
  source 1..50: mol_type = other DNA
crcttcttaaaaaaatacrtcaccaaattttatttaatcaacactcaccc

SEQ ID NO: 18034 - DNA, 50 bp, synthetic construct
  source 1..50: mol_type = other DNA
aaaacacrcaacatctctaataaatttcrcctcrcttcttaaaaaaatac

SEQ ID NO: 18035 - DNA, 50 bp, synthetic construct
  source 1..50: mol_type = other DNA
taataacrcatccttctaaaaaacraaacraaacccaccaaaaatactac

SEQ ID NO: 18036 - DNA, 50 bp, synthetic construct
  source 1..50: mol_type = other DNA
tcctcrtatcaaaaataatttaaatcatcaacctaacctacacttttctc

SEQ ID NO: 18037 - DNA, 50 bp, synthetic construct
  source 1..50: mol_type = other DNA
ccaaaacattaaacctaaaaaacctaatcaccttctaatttctactaaac

SEQ ID NO: 18038 - DNA, 50 bp, synthetic construct
  source 1..50: mol_type = other DNA
cccaaccataaactccaaaaactaccaacctaaaatataaatctatctcc

SEQ ID NO: 18039 - DNA, 50 bp, synthetic construct
  source 1..50: mol_type = other DNA
accacaccraaaaacctaaaaacaaaccctaaaacatcaaaatcaaaaac

SEQ ID NO: 18040 - DNA, 50 bp, synthetic construct
  source 1..50: mol_type = other DNA
ttaaacctaaaaattcaaaaataaataccaaaataaacctaaaacacrac

SEQ ID NO: 18041 - DNA, 50 bp, synthetic construct
  source 1..50: mol_type = other DNA
ataaacaaaaatcactctataaaccatcaaaaactaaccaaaccaaatac

SEQ ID NO: 18042 - DNA, 50 bp, synthetic construct
  source 1..50: mol_type = other DNA
acaattccaaaccraaaaaatctaattttctaatacccaaaaataaacac

SEQ ID NO: 18043 - DNA, 50 bp, synthetic construct
  source 1..50: mol_type = other DNA
cccaatttaattccaaaacaacccaataaatcacaaatcctttatcaacc

SEQ ID NO: 18044 - DNA, 50 bp, synthetic construct
  source 1..50: mol_type = other DNA
caatttccccacctacaacataaataaattaaactccacaatctaaaaac

SEQ ID NO: 18045 - DNA, 50 bp, synthetic construct
  source 1..50: mol_type = other DNA
cactaaaccctaaaattaaacttaaaaaatatataaccatttttaactcc

SEQ ID NO: 18046 - DNA, 50 bp, synthetic construct
  source 1..50: mol_type = other DNA
acttcctaaacccaactccaaaattcaataaaaatcctaataaaaaaaac

SEQ ID NO: 18047 - DNA, 50 bp, synthetic construct
  source 1..50: mol_type = other DNA
acaaaaaaatacaaaaattaccataatataaccccaaatactataattac

SEQ ID NO: 18048 - DNA, 50 bp, synthetic construct
  source 1..50: mol_type = other DNA
aaaaaaatacaaaaattaccataatataaccccaaatactataattacrc

SEQ ID NO: 18049 - DNA, 50 bp, synthetic construct
  source 1..50: mol_type = other DNA
caaaaattaccataatataaccccaaatactataattacrcrccaacccc

SEQ ID NO: 18050 - DNA, 50 bp, synthetic construct
  source 1..50: mol_type = other DNA
taaacaaaaaaaacrccrccacctaaatacactaaaatatacacaaccac

SEQ ID NO: 18051 - DNA, 50 bp, synthetic construct
  source 1..50: mol_type = other DNA
tcacaaaaaaaactccaaataaaccaaaccaaaacctcctaaaaatcacc

SEQ ID NO: 18052 - DNA, 50 bp, synthetic construct
  source 1..50: mol_type = other DNA
accctaacctaacctatctaaaaccttctctataaaataaaactaataac

SEQ ID NO: 18053 - DNA, 50 bp, synthetic construct
  source 1..50: mol_type = other DNA
aaattataaaaaacataaatctataaccacctcctcaaaaaataccacac

SEQ ID NO: 18054 - DNA, 50 bp, synthetic construct
  source 1..50: mol_type = other DNA
aaaaatatatatcaaataacraaacctcrataccaaaatctcactcacrc

SEQ ID NO: 18055 - DNA, 50 bp, synthetic construct
  source 1..50: mol_type = other DNA
caataaaaaacaccrtaaaatcaaaaacacaaaaaccaaacaaacccccc

SEQ ID NO: 18056 - DNA, 50 bp, synthetic construct
  source 1..50: mol_type = other DNA
acaaactaaataacraaaaatctatctaacctctatacccttaatcccac

SEQ ID NO: 18057 - DNA, 50 bp, synthetic construct
  source 1..50: mol_type = other DNA
attattattacatctttattcraaccctacattctccaaaacraaaatac

SEQ ID NO: 18058 - DNA, 50 bp, synthetic construct
  source 1..50: mol_type = other DNA
attatttaattattattacatctttattcraaccctacattctccaaaac

SEQ ID NO: 18059 - DNA, 50 bp, synthetic construct
  source 1..50: mol_type = other DNA
aaataccccatcaataaaattattatttaattattattacatctttattc

SEQ ID NO: 18060 - DNA, 50 bp, synthetic construct
  source 1..50: mol_type = other DNA
taataaaatatctaccttataccccrcctaaccctaaactctttcaactc

SEQ ID NO: 18061 - DNA, 50 bp, synthetic construct
  source 1..50: mol_type = other DNA
ttcaaattctaacttaaccacrtcccaattatatacacctacattctcac

SEQ ID NO: 18062 - DNA, 50 bp, synthetic construct
  source 1..50: mol_type = other DNA
ataaaaaccctaacaaacracaatcctaattcaaattctaacttaaccac

SEQ ID NO: 18063 - DNA, 50 bp, synthetic construct
  source 1..50: mol_type = other DNA
ataatactaccatcaaattccaatccctaataaacaaaaaactccrtaac

SEQ ID NO: 18064 - DNA, 50 bp, synthetic construct
  source 1..50: mol_type = other DNA
aaactccrtaacractataacaaattccattcactttaaaaataacaacc

SEQ ID NO: 18065 - DNA, 50 bp, synthetic construct
  source 1..50: mol_type = other DNA
tctaaattaaaaacaaacataaaatacctaaacctccaaaaaactaaatc

SEQ ID NO: 18066 - DNA, 50 bp, synthetic construct
  source 1..50: mol_type = other DNA
aaccacttcaaaaaataccctaactttctctacctcctactataaaaacc

SEQ ID NO: 18067 - DNA, 50 bp, synthetic construct
  source 1..50: mol_type = other DNA
catctaaaatcccatccaataacctccatacaaaaaaaactttcaaaccc

SEQ ID NO: 18068 - DNA, 50 bp, synthetic construct
  source 1..50: mol_type = other DNA
aaaattctaaatactcrcctaaaacccaaaataaattttttacaaacacc

SEQ ID NO: 18069 - DNA, 50 bp, synthetic construct
  source 1..50: mol_type = other DNA
ctattccacttaatccttcttccactatcaatcaacaaaataataactac

SEQ ID NO: 18070 - DNA, 50 bp, synthetic construct
  source 1..50: mol_type = other DNA
cacaatacaactaaaaaaaactacratctcactctaaaaatcccaaaccc

SEQ ID NO: 18071 - DNA, 50 bp, synthetic construct
  source 1..50: mol_type = other DNA
ctctaaaataataaacctactaacraacctaaaactcctaaaataaaacc

SEQ ID NO: 18072 - DNA, 50 bp, synthetic construct
  source 1..50: mol_type = other DNA
acttctacccaaaaaattcttaactctaaaacctaatcaaaactaaatcc

SEQ ID NO: 18073 - DNA, 50 bp, synthetic construct
  source 1..50: mol_type = other DNA
aaaccaactaaaccrcacactacaaaattcccaaaacctttttaaaaatc

SEQ ID NO: 18074 - DNA, 50 bp, synthetic construct
  source 1..50: mol_type = other DNA
ataatcacaaatcaaacaaaaatcactaaaaattcaaaaccaactaaacc

SEQ ID NO: 18075 - DNA, 50 bp, synthetic construct
  source 1..50: mol_type = other DNA
aaataaaaaaaaccccctccacctactaatcaaaaattcattctaccaac

SEQ ID NO: 18076 - DNA, 50 bp, synthetic construct
  source 1..50: mol_type = other DNA
accctcttttcaccraacctaaataaaacactaaaaatttacaaataacc

SEQ ID NO: 18077 - DNA, 50 bp, synthetic construct
  source 1..50: mol_type = other DNA
cctcttttcaccraacctaaataaaacactaaaaatttacaaataaccrc

SEQ ID NO: 18078 - DNA, 50 bp, synthetic construct
  source 1..50: mol_type = other DNA
cctcrcaacctccctacaaacttaaactattcctttttataaataaaaac

SEQ ID NO: 18079 - DNA, 50 bp, synthetic construct
  source 1..50: mol_type = other DNA
catacccaaccataatcttaacacttcttataaaaccttaaaaaaatccc

SEQ ID NO: 18080 - DNA, 50 bp, synthetic construct
  source 1..50: mol_type = other DNA
ttattcacaccctcttccaaaacaatttaaaccaaaacaaacttaatttc

SEQ ID NO: 18081 - DNA, 50 bp, synthetic construct
  source 1..50: mol_type = other DNA
aacaatttaaaccaaaacaaacttaatttcraatatcaattctacctacc

SEQ ID NO: 18082 - DNA, 50 bp, synthetic construct
  source 1..50: mol_type = other DNA
taatttcraatatcaattctacctaccrcctactatataacctaacaccc

SEQ ID NO: 18083 - DNA, 50 bp, synthetic construct
  source 1..50: mol_type = other DNA
acctactccaaacaaaatccttaaacaaaaccctcctaatatctaaaatc

SEQ ID NO: 18084 - DNA, 50 bp, synthetic construct
  source 1..50: mol_type = other DNA
aaatccttaaacaaaaccctcctaatatctaaaatcrtacttcactaacc

SEQ ID NO: 18085 - DNA, 50 bp, synthetic construct
  source 1..50: mol_type = other DNA
tcctatacctcctatcaaataccacacttcataaaaactaataactcatc

SEQ ID NO: 18086 - DNA, 50 bp, synthetic construct
  source 1..50: mol_type = other DNA
ccattacaacaaccratcccttccaacaaatacctaaattaaaaccaaac

SEQ ID NO: 18087 - DNA, 50 bp, synthetic construct
  source 1..50: mol_type = other DNA
aaatcacaacccacattaataaaaacctcatccataaccraacaaaatac

SEQ ID NO: 18088 - DNA, 50 bp, synthetic construct
  source 1..50: mol_type = other DNA
acctctttaaaactactctaaaacaaacrtcttcatcatctacrtaaacc

SEQ ID NO: 18089 - DNA, 50 bp, synthetic construct
  source 1..50: mol_type = other DNA
caacataacctctttaaaactactctaaaacaaacrtcttcatcatctac

SEQ ID NO: 18090 - DNA, 50 bp, synthetic construct
  source 1..50: mol_type = other DNA
caacaactaactttacaaaaacaaccacractcacrtaaataataaaaac

SEQ ID NO: 18091 - DNA, 50 bp, synthetic construct
  source 1..50: mol_type = other DNA
aataacacaactaaaactattaaacccaaaattactactctatatcctac

SEQ ID NO: 18092 - DNA, 50 bp, synthetic construct
  source 1..50: mol_type = other DNA
taaacaaatccctacctcaaaccccatatctatcacataaaaataatcac

SEQ ID NO: 18093 - DNA, 50 bp, synthetic construct
  source 1..50: mol_type = other DNA
ccaatcattacraactactctattcaaaacctaataaaacctacracacc

SEQ ID NO: 18094 - DNA, 50 bp, synthetic construct
  source 1..50: mol_type = other DNA
caaaccccaatcattacraactactctattcaaaacctaataaaacctac

SEQ ID NO: 18095 - DNA, 50 bp, synthetic construct
  source 1..50: mol_type = other DNA
taaaaactaacrataccrcaaattccattaaattctaaacaaaacaactc

SEQ ID NO: 18096 - DNA, 50 bp, synthetic construct
  source 1..50: mol_type = other DNA
taaacaataatactacatcaacttactataatcaataaaacaaaatctcc

SEQ ID NO: 18097 - DNA, 50 bp, synthetic construct
  source 1..50: mol_type = other DNA
caattattaattcaaatcctaactccttttatctataatccttaaaaccc

SEQ ID NO: 18098 - DNA, 50 bp, synthetic construct
  source 1..50: mol_type = other DNA
ctccttttatctataatccttaaaacccraacaaatctcttaacctcttc

SEQ ID NO: 18099 - DNA, 50 bp, synthetic construct
  source 1..50: mol_type = other DNA
aataaaaactaataattacaaaaccctaatcatactaaaccctaccctac

SEQ ID NO: 18100 - DNA, 50 bp, synthetic construct
  source 1..50: mol_type = other DNA
aaacaaaacccaacataatcaaaaccctacaattattaactcttattccc

SEQ ID NO: 18101 - DNA, 50 bp, synthetic construct
  source 1..50: mol_type = other DNA
aaataatataaactacaaaacacrcccaactcaaaatcaaaaaaaccctc

SEQ ID NO: 18102 - DNA, 50 bp, synthetic construct
  source 1..50: mol_type = other DNA
aaaaacctcaaaatacctttaaaaacacaacttaaaaaaccaaactcaac

SEQ ID NO: 18103 - DNA, 50 bp, synthetic construct
  source 1..50: mol_type = other DNA
aaataatataaaaccaactccracractcacaaacaaaaacataaaaaac

SEQ ID NO: 18104 - DNA, 50 bp, synthetic construct
  source 1..50: mol_type = other DNA
acaactaaaactctttataatttcrccctttatatctctacttataaatc

SEQ ID NO: 18105 - DNA, 50 bp, synthetic construct
  source 1..50: mol_type = other DNA
actaaaactctttataatttcrccctttatatctctacttataaatcrtc

SEQ ID NO: 18106 - DNA, 50 bp, synthetic construct
  source 1..50: mol_type = other DNA
ctttatatctctacttataaatcrtcraaactaattccatatcatctttc

SEQ ID NO: 18107 - DNA, 50 bp, synthetic construct
  source 1..50: mol_type = other DNA
cttccatacrataaacattaactcactaatcccataaaccaataacccac

SEQ ID NO: 18108 - DNA, 50 bp, synthetic construct
  source 1..50: mol_type = other DNA
actattaatacaaacaccaccattactaactcaactaaaacrtctacacc

SEQ ID NO: 18109 - DNA, 50 bp, synthetic construct
  source 1..50: mol_type = other DNA
caaaaaacaaaattaaaattaaatccaaacccataaaaccccacaatacc

SEQ ID NO: 18110 - DNA, 50 bp, synthetic construct
  source 1..50: mol_type = other DNA
tctccaaactcctaataacttcataaaacaaaaattataaatcccatctc

SEQ ID NO: 18111 - DNA, 50 bp, synthetic construct
  source 1..50: mol_type = other DNA
tttaaaaacataaaactatctaaacaactaaaaactaacacataataaac

SEQ ID NO: 18112 - DNA, 50 bp, synthetic construct
  source 1..50: mol_type = other DNA
acataaaactatctaaacaactaaaaactaacacataataaacrtctaac

SEQ ID NO: 18113 - DNA, 50 bp, synthetic construct
  source 1..50: mol_type = other DNA
acataataaacrtctaacrtacaacacctcataattatttttataaatac

SEQ ID NO: 18114 - DNA, 50 bp, synthetic construct
  source 1..50: mol_type = other DNA
acataccctcataaacaaccaaaacractttctaaacacttaaaaaaatc

SEQ ID NO: 18115 - DNA, 50 bp, synthetic construct
  source 1..50: mol_type = other DNA
cacctctaaaaatacaaccaaaatcacataccctcataaacaaccaaaac

SEQ ID NO: 18116 - DNA, 50 bp, synthetic construct
  source 1..50: mol_type = other DNA
taaaacatatttataaaataacacataaaatatacctaacacracctaac

SEQ ID NO: 18117 - DNA, 50 bp, synthetic construct
  source 1..50: mol_type = other DNA
tcctaaaaataacracrtctaaatcacaaaatcccactatacrccaaatc

SEQ ID NO: 18118 - DNA, 50 bp, synthetic construct
  source 1..50: mol_type = other DNA
aaacatactccaaacaattactctaaaatcaaaacctcaatacaaaaaac

SEQ ID NO: 18119 - DNA, 50 bp, synthetic construct
  source 1..50: mol_type = other DNA
aaactaaacaaaaacccccttttaaaaaaaccrataacraatcctaaaac

SEQ ID NO: 18120 - DNA, 50 bp, synthetic construct
  source 1..50: mol_type = other DNA
taaaaaaacctcccaaaattatacctcaaaacaacctcraaaaaatttac

SEQ ID NO: 18121 - DNA, 50 bp, synthetic construct
  source 1..50: mol_type = other DNA
aaaaacctcccaaaattatacctcaaaacaacctcraaaaaatttacrac

SEQ ID NO: 18122 - DNA, 50 bp, synthetic construct
  source 1..50: mol_type = other DNA
caacacccaactaaaacccaaatctaaatacttcccacrataaaacaatc

SEQ ID NO: 18123 - DNA, 50 bp, synthetic construct
  source 1..50: mol_type = other DNA
tcaaaaataaaacrctcaaaaccctaaatattcctcrcacctaaaatctc

SEQ ID NO: 18124 - DNA, 50 bp, synthetic construct
  source 1..50: mol_type = other DNA
aacctaaacacaaacrcaacacaacataatataatccccracaaaacaac

SEQ ID NO: 18125 - DNA, 50 bp, synthetic construct
  source 1..50: mol_type = other DNA
acaacttataaattcccraatccataaactcacacctaaaacttaacacc

SEQ ID NO: 18126 - DNA, 50 bp, synthetic construct
  source 1..50: mol_type = other DNA
aacttactctcttatatctatttcaaaaaactccaatctctaaaactatc

SEQ ID NO: 18127 - DNA, 50 bp, synthetic construct
  source 1..50: mol_type = other DNA
cttaaaaacaatattcraacactataattatcacaatctctaaccaccac

SEQ ID NO: 18128 - DNA, 50 bp, synthetic construct
  source 1..50: mol_type = other DNA
acaactttaactttaatttctcaacaaattttacaaaaatccttaatatc

SEQ ID NO: 18129 - DNA, 50 bp, synthetic construct
  source 1..50: mol_type = other DNA
aaaaacccctaaaaaaaactaatctactatctacttttataacaacaatc

SEQ ID NO: 18130 - DNA, 50 bp, synthetic construct
  source 1..50: mol_type = other DNA
accacaaaaacaaacaacaaaccaactcctcttaaaaacctttatctctc

SEQ ID NO: 18131 - DNA, 50 bp, synthetic construct
  source 1..50: mol_type = other DNA
aataaaatttcccaaccctattaaaacraaataaaatccaaccaactatc

SEQ ID NO: 18132 - DNA, 50 bp, synthetic construct
  source 1..50: mol_type = other DNA
tcaatataatctcattatacatttctcracaactaactaaatctcatctc

SEQ ID NO: 18133 - DNA, 50 bp, synthetic construct
  source 1..50: mol_type = other DNA
attccaaaaacacaatttaaatttttaattattcactcaatcattctccc

SEQ ID NO: 18134 - DNA, 50 bp, synthetic construct
  source 1..50: mol_type = other DNA
aaccccaaacacacccaaattatcatactaaaataaatccccaaaaatcc

SEQ ID NO: 18135 - DNA, 50 bp, synthetic construct
  source 1..50: mol_type = other DNA
atcctcattcatcccttacttttatccctaataataattaatcacattcc

SEQ ID NO: 18136 - DNA, 50 bp, synthetic construct
  source 1..50: mol_type = other DNA
ctcattcatcccttacttttatccctaataataattaatcacattccrcc

SEQ ID NO: 18137 - DNA, 50 bp, synthetic construct
  source 1..50: mol_type = other DNA
aaccctctttacttcacatctaaattattacaacaacttctaaactaatc

SEQ ID NO: 18138 - DNA, 50 bp, synthetic construct
  source 1..50: mol_type = other DNA
tcttttcctatctaaatactactcatcctttaacacccractcaaatccc

SEQ ID NO: 18139 - DNA, 50 bp, synthetic construct
  source 1..50: mol_type = other DNA
aaacctaattcctcttttcctatctaaatactactcatcctttaacaccc

SEQ ID NO: 18140 - DNA, 50 bp, synthetic construct
  source 1..50: mol_type = other DNA
cttcaataatttcaactttaacctaatatttaaattaaaaaactaaccrc

SEQ ID NO: 18141 - DNA, 50 bp, synthetic construct
  source 1..50: mol_type = other DNA
accttcaataatttcaactttaacctaatatttaaattaaaaaactaacc

SEQ ID NO: 18142 - DNA, 50 bp, synthetic construct
  source 1..50: mol_type = other DNA
cracaattataccactattcaaaactaaataataacctcttacctaccac

SEQ ID NO: 18143 - DNA, 50 bp, synthetic construct
  source 1..50: mol_type = other DNA
attcaaaactaaataataacctcttacctaccacratatatccaaccacc

SEQ ID NO: 18144 - DNA, 50 bp, synthetic construct
  source 1..50: mol_type = other DNA
aatacctattataaaaatccaaccccaatattaaatactataaaatctcc

SEQ ID NO: 18145 - DNA, 50 bp, synthetic construct
  source 1..50: mol_type = other DNA
tctacctaaacttacattatccttcccttaccrataaaaccctaaaatac

SEQ ID NO: 18146 - DNA, 50 bp, synthetic construct
  source 1..50: mol_type = other DNA
atctaaataaaccrattcttacaactctcaatcaacatctactacataac

SEQ ID NO: 18147 - DNA, 50 bp, synthetic construct
  source 1..50: mol_type = other DNA
aaactaaaataacccaaaacraaaaatttaatacccaactctcatcccac

SEQ ID NO: 18148 - DNA, 50 bp, synthetic construct
  source 1..50: mol_type = other DNA
aaccatcacttacccctaacaacaaaacaaaaactaaaataacccaaaac

SEQ ID NO: 18149 - DNA, 50 bp, synthetic construct
  source 1..50: mol_type = other DNA
aaaaataactattaccactttaacacaacccaacactaaatcataaatcc

SEQ ID NO: 18150 - DNA, 50 bp, synthetic construct
  source 1..50: mol_type = other DNA
taataacaatcattcccatttcttatacacttcctatataacaaacactc

SEQ ID NO: 18151 - DNA, 50 bp, synthetic construct
  source 1..50: mol_type = other DNA
ctaataacaatacaatccctcctaaaatcaatcaacraatataattcatc

SEQ ID NO: 18152 - DNA, 50 bp, synthetic construct
  source 1..50: mol_type = other DNA
ttatacacttcctatataacaaacactcractaaacrataaaccacattc

SEQ ID NO: 18153 - DNA, 50 bp, synthetic construct
  source 1..50: mol_type = other DNA
ctaacttacttccttaaatacrttatacaatttctcaaaacctaaattac

SEQ ID NO: 18154 - DNA, 50 bp, synthetic construct
  source 1..50: mol_type = other DNA
aattctaaaaaactatataacrcacccaaaaaaacaaaccaacaaataac

SEQ ID NO: 18155 - DNA, 50 bp, synthetic construct
  source 1..50: mol_type = other DNA
aaaatatactcttaactataatacactcatcaatatctaaaaacccccac

SEQ ID NO: 18156 - DNA, 50 bp, synthetic construct
  source 1..50: mol_type = other DNA
acctataaaacctccaacaaacccacaatacccaataaacacaaaaaacc

SEQ ID NO: 18157 - DNA, 50 bp, synthetic construct
  source 1..50: mol_type = other DNA
aaccttaaatacccaccccctaaaatataaatcctactctaaataataac

SEQ ID NO: 18158 - DNA, 50 bp, synthetic construct
  source 1..50: mol_type = other DNA
cactatcataaatcaacctcctccttaaacrtaaccttaaccaaaaaacc

SEQ ID NO: 18159 - DNA, 50 bp, synthetic construct
  source 1..50: mol_type = other DNA
aaaaatcrtatctacacaatcactatcataaatcaacctcctccttaaac

SEQ ID NO: 18160 - DNA, 50 bp, synthetic construct
  source 1..50: mol_type = other DNA
crtccaaaaccraaactaaactaaaaacccaaaatactctactataactc

SEQ ID NO: 18161 - DNA, 50 bp, synthetic construct
  source 1..50: mol_type = other DNA
aaaaaaacattaataataaattctcaaacccaaaacaaatatccaaaccc

SEQ ID NO: 18162 - DNA, 50 bp, synthetic construct
  source 1..50: mol_type = other DNA
ttaaccacaaactcttcctacatatctcaaaatccaacaccaaactaaac

SEQ ID NO: 18163 - DNA, 50 bp, synthetic construct
  source 1..50: mol_type = other DNA
ttaaaatatacaaaaaaaacctataatcaaacccttcccccaaaatatcc

SEQ ID NO: 18164 - DNA, 50 bp, synthetic construct
  source 1..50: mol_type = other DNA
aaatcctatcctcaaccctaccccaataattataacctatctaataaaac

SEQ ID NO: 18165 - DNA, 50 bp, synthetic construct
  source 1..50: mol_type = other DNA
tcttaaccatcrtaataaaacctcaaaacctcrcctaaacttaataactc

SEQ ID NO: 18166 - DNA, 50 bp, synthetic construct
  source 1..50: mol_type = other DNA
aaaacaacataaaccctttcttaaccatcrtaataaaacctcaaaacctc

SEQ ID NO: 18167 - DNA, 50 bp, synthetic construct
  source 1..50: mol_type = other DNA
aaatatcaaacraatcaccaaattcaaacraaactctaaaacttcatcac

SEQ ID NO: 18168 - DNA, 50 bp, synthetic construct
  source 1..50: mol_type = other DNA
taacaaaaactctttatatctcaactactacctccctctaaaaaacttcc

SEQ ID NO: 18169 - DNA, 50 bp, synthetic construct
  source 1..50: mol_type = other DNA
ttataaaataaattaactctttcatacctatccraatcttaacctttctc

SEQ ID NO: 18170 - DNA, 50 bp, synthetic construct
  source 1..50: mol_type = other DNA
raaccctaaacctcctaaacaacattccctaataaaaaacracaactcac

SEQ ID NO: 18171 - DNA, 50 bp, synthetic construct
  source 1..50: mol_type = other DNA
cacctaaaacctcaaaatctcrtcacccatcttaaaaatatactattcac

SEQ ID NO: 18172 - DNA, 50 bp, synthetic construct
  source 1..50: mol_type = other DNA
aaactcaactctaaaacaaatcctatacccacctaaaacctcaaaatctc

SEQ ID NO: 18173 - DNA, 50 bp, synthetic construct
  source 1..50: mol_type = other DNA
craaaaacraattactataaaaaaataaccactcttccctaaaaactcac

SEQ ID NO: 18174 - DNA, 50 bp, synthetic construct
  source 1..50: mol_type = other DNA
acacaaaacaactaccactcaatcattaattaaaatcattaccraaaaac

SEQ ID NO: 18175 - DNA, 50 bp, synthetic construct
  source 1..50: mol_type = other DNA
aaaaaacacacaaaacaactaccactcaatcattaattaaaatcattacc

SEQ ID NO: 18176 - DNA, 50 bp, synthetic construct
  source 1..50: mol_type = other DNA
cccaacataatacctaacaccaaaatccatcatctctcaataaacaaaac

SEQ ID NO: 18177 - DNA, 50 bp, synthetic construct
  source 1..50: mol_type = other DNA
ataacttcaactccacctaataataactctttaacrcataaatacatccc

SEQ ID NO: 18178 - DNA, 50 bp, synthetic construct
  source 1..50: mol_type = other DNA
tacccaattaacataacccattatacaaaaaaaaccctaacacccaaccc

SEQ ID NO: 18179 - DNA, 50 bp, synthetic construct
  source 1..50: mol_type = other DNA
aaatttaacaacctaaaaccaaataacaaacraaacaaactataaactac

SEQ ID NO: 18180 - DNA, 50 bp, synthetic construct
  source 1..50: mol_type = other DNA
ctttattaactattaaataataaaaaaatccrtaacttacaacctattcc

SEQ ID NO: 18181 - DNA, 50 bp, synthetic construct
  source 1..50: mol_type = other DNA
tactctacaactaactactatctataatattacattaccctaacctctac

SEQ ID NO: 18182 - DNA, 50 bp, synthetic construct
  source 1..50: mol_type = other DNA
taaacctaaaatacttaaatttaaaacatccttacactcaaaaataaacc

SEQ ID NO: 18183 - DNA, 50 bp, synthetic construct
  source 1..50: mol_type = other DNA
caaaaacaattacttttcattcttaccaataaatctaacaacaaataaac

SEQ ID NO: 18184 - DNA, 50 bp, synthetic construct
  source 1..50: mol_type = other DNA
taaacrcctcaatcatataacaaaaattaatcacttcaaacraccacrac

SEQ ID NO: 18185 - DNA, 50 bp, synthetic construct
  source 1..50: mol_type = other DNA
tctcatctaataaaatctttcaaacaaccctaaaaaaacctactattccc

SEQ ID NO: 18186 - DNA, 50 bp, synthetic construct
  source 1..50: mol_type = other DNA
taacaaaccctttcaaaattacctaaaaaattccaccaaataaaacaacc

SEQ ID NO: 18187 - DNA, 50 bp, synthetic construct
  source 1..50: mol_type = other DNA
craaaaacccaaaccattaactaatactaataaaaaattcctaaactacc

SEQ ID NO: 18188 - DNA, 50 bp, synthetic construct
  source 1..50: mol_type = other DNA
taatactaataaaaaattcctaaactaccraaatcctaaatattaaaaac

SEQ ID NO: 18189 - DNA, 50 bp, synthetic construct
  source 1..50: mol_type = other DNA
actaataaaaaattcctaaactaccraaatcctaaatattaaaaacraac

SEQ ID NO: 18190 - DNA, 50 bp, synthetic construct
  source 1..50: mol_type = other DNA
racraccctactaaaactactacaaataaaaaaccaacttaaaaataaac

SEQ ID NO: 18191 - DNA, 50 bp, synthetic construct
  source 1..50: mol_type = other DNA
aaaccaacttaaaaataaacracaaacaatcctaaaaccctaaatctaac

SEQ ID NO: 18192 - DNA, 50 bp, synthetic construct
  source 1..50: mol_type = other DNA
attaaatataacaaaatacctatactaattctaccaaatactacaaaacc

SEQ ID NO: 18193 - DNA, 50 bp, synthetic construct
  source 1..50: mol_type = other DNA
atactacaaaaccrtaaaaaaaccaatcataaatcattactcatattccc

SEQ ID NO: 18194 - DNA, 50 bp, synthetic construct
  source 1..50: mol_type = other DNA
actacaaaaccrtaaaaaaaccaatcataaatcattactcatattcccrc

SEQ ID NO: 18195 - DNA, 50 bp, synthetic construct
  source 1..50: mol_type = other DNA
tctaactataaaacctcaatctccctatcaaaacaataaacatctaaccc

SEQ ID NO: 18196 - DNA, 50 bp, synthetic construct
  source 1..50: mol_type = other DNA
aaaatataaccractcacacccaaaacttttctaaaaactaacaataccc

SEQ ID NO: 18197 - DNA, 50 bp, synthetic construct
  source 1..50: mol_type = other DNA
aaatccacaacraacactaccaatctccaaaaaaactttaaatataaacc

SEQ ID NO: 18198 - DNA, 50 bp, synthetic construct
  source 1..50: mol_type = other DNA
aacaactaatcttcttaactctaaacaccaaaaaacrccaaaacttcacc

SEQ ID NO: 18199 - DNA, 50 bp, synthetic construct
  source 1..50: mol_type = other DNA
ctaaaaaccacaacaaaaataaaaccaaaactaaacctacraccctcaac

SEQ ID NO: 18200 - DNA, 50 bp, synthetic construct
  source 1..50: mol_type = other DNA
attaaccacactaatatcaaacttctaaccccaaataatctacccacctc

SEQ ID NO: 18201 - DNA, 50 bp, synthetic construct
  source 1..50: mol_type = other DNA
atcacrttactcaaactaatctcaaattcctaatctcaaacaacactccc

SEQ ID NO: 18202 - DNA, 50 bp, synthetic construct
  source 1..50: mol_type = other DNA
aacccaaataaaaacctcaaaaattccaatcaacaacttctaaaacaacc

SEQ ID NO: 18203 - DNA, 50 bp, synthetic construct
  source 1..50: mol_type = other DNA
caaataaaaacctcaaaaattccaatcaacaacttctaaaacaaccraac

SEQ ID NO: 18204 - DNA, 50 bp, synthetic construct
  source 1..50: mol_type = other DNA
aataaaaacctcaaaaattccaatcaacaacttctaaaacaaccraacrc

SEQ ID NO: 18205 - DNA, 50 bp, synthetic construct
  source 1..50: mol_type = other DNA
taaccaaaaaacrttaatactataatcacatccctcaaaaataaacaatc

SEQ ID NO: 18206 - DNA, 50 bp, synthetic construct
  source 1..50: mol_type = other DNA
aaatactataacatttcctaactaactttttccccaaaactaaataccac

SEQ ID NO: 18207 - DNA, 50 bp, synthetic construct
  source 1..50: mol_type = other DNA
accatctaatctctccaaacaaaaactaaaatacctctaacttcacratc

SEQ ID NO: 18208 - DNA, 50 bp, synthetic construct
  source 1..50: mol_type = other DNA
ttcaaacctccctacccctaacacctttaacaactaaaaaatcacaaaac

SEQ ID NO: 18209 - DNA, 50 bp, synthetic construct
  source 1..50: mol_type = other DNA
taaaaataaataacccactaactaactcrcrtcctcaaaaaatcaccacc

SEQ ID NO: 18210 - DNA, 50 bp, synthetic construct
  source 1..50: mol_type = other DNA
actaacaaccaactaaaatttaaaaataaataacccactaactaactcrc

SEQ ID NO: 18211 - DNA, 50 bp, synthetic construct
  source 1..50: mol_type = other DNA
caactaacaaccaactaaaatttaaaaataaataacccactaactaactc

SEQ ID NO: 18212 - DNA, 50 bp, synthetic construct
  source 1..50: mol_type = other DNA
atttccaaaccccaactaactatcaattaatttctcccaataaaaaatcc

SEQ ID NO: 18213 - DNA, 50 bp, synthetic construct
  source 1..50: mol_type = other DNA
aaaatccraaaaacacaaaaaaactataccatcttccttaaaaaattctc

SEQ ID NO: 18214 - DNA, 50 bp, synthetic construct
  source 1..50: mol_type = other DNA
aaaactataccatcttccttaaaaaattctcratcccaattttaaattcc

SEQ ID NO: 18215 - DNA, 50 bp, synthetic construct
  source 1..50: mol_type = other DNA
atcttccttaaaaaattctcratcccaattttaaattccraattcaaaac

SEQ ID NO: 18216 - DNA, 50 bp, synthetic construct
  source 1..50: mol_type = other DNA
aataactcactttcatcccccatattctaaaaattaaccttaaaaataac

SEQ ID NO: 18217 - DNA, 50 bp, synthetic construct
  source 1..50: mol_type = other DNA
ctaaaaaaataataaacraaatacaaattaaaccrtaatcctcccaaacc

SEQ ID NO: 18218 - DNA, 50 bp, synthetic construct
  source 1..50: mol_type = other DNA
crcccaccacttccctaactatctaaccttatataaatatttaaactctc

SEQ ID NO: 18219 - DNA, 50 bp, synthetic construct
  source 1..50: mol_type = other DNA
caaataacttttcctataaacctcaatatcctcatctaaataaaaaaaac

SEQ ID NO: 18220 - DNA, 50 bp, synthetic construct
  source 1..50: mol_type = other DNA
aataacttttcctataaacctcaatatcctcatctaaataaaaaaaacrc

SEQ ID NO: 18221 - DNA, 50 bp, synthetic construct
  source 1..50: mol_type = other DNA
ccrccccaccraaccctactaaaactataaactaatataacttttcaaac

SEQ ID NO: 18222 - DNA, 50 bp, synthetic construct
  source 1..50: mol_type = other DNA
tcrcaaaccaaaaaattcatcttctcraaactactaaccaacctatactc

SEQ ID NO: 18223 - DNA, 50 bp, synthetic construct
  source 1..50: mol_type = other DNA
ataccaataaaaactctaaataaaataatataacaacccatataccctac

SEQ ID NO: 18224 - DNA, 50 bp, synthetic construct
  source 1..50: mol_type = other DNA
tacctataatcctaactacccraaaaactaatacaaaataactaaaactc

SEQ ID NO: 18225 - DNA, 50 bp, synthetic construct
  source 1..50: mol_type = other DNA
aattccaattattctacatcaacctcccraataaccaaaactacaaacac

SEQ ID NO: 18226 - DNA, 50 bp, synthetic construct
  source 1..50: mol_type = other DNA
caaaccraaaacaataactcatacctatattcccaatactttaaaaaacc

SEQ ID NO: 18227 - DNA, 50 bp, synthetic construct
  source 1..50: mol_type = other DNA
tttcactatattaaccaaactaatctaaaactcctaacctaaaataatcc

SEQ ID NO: 18228 - DNA, 50 bp, synthetic construct
  source 1..50: mol_type = other DNA
taaatcaaacrattcttcctaccttaatctccaaaattactaaaattacc

SEQ ID NO: 18229 - DNA, 50 bp, synthetic construct
  source 1..50: mol_type = other DNA
aacttaaccatcttcccacctcaacttccaaaataactaaaactacaaac

SEQ ID NO: 18230 - DNA, 50 bp, synthetic construct
  source 1..50: mol_type = other DNA
atacctaccatcccaatactttaaaaaacaaaaattaacataatcccaac

SEQ ID NO: 18231 - DNA, 50 bp, synthetic construct
  source 1..50: mol_type = other DNA
ctctatatattcaaatctcaataccaaaaaacctcccrctcctaaacaac

SEQ ID NO: 18232 - DNA, 50 bp, synthetic construct
  source 1..50: mol_type = other DNA
ttccracaaactctaaaacttacccaaatcraaaataaatatcraaatcc

SEQ ID NO: 18233 - DNA, 50 bp, synthetic construct
  source 1..50: mol_type = other DNA
aaaaaccttccracaaactctaaaacttacccaaatcraaaataaatatc

SEQ ID NO: 18234 - DNA, 50 bp, synthetic construct
  source 1..50: mol_type = other DNA
atacacaaaaactaaaaactcacrttcacatccaaaaaacraaaatactc

SEQ ID NO: 18235 - DNA, 50 bp, synthetic construct
  source 1..50: mol_type = other DNA
taactaccaaatacacaaaaactaaaaactcacrttcacatccaaaaaac

SEQ ID NO: 18236 - DNA, 50 bp, synthetic construct
  source 1..50: mol_type = other DNA
tcctctatcctatctaataactaccaaatacacaaaaactaaaaactcac

SEQ ID NO: 18237 - DNA, 50 bp, synthetic construct
  source 1..50: mol_type = other DNA
aaacttataaaatccctatcraacrcccctcttaacaaccactaaaatac

SEQ ID NO: 18238 - DNA, 50 bp, synthetic construct
  source 1..50: mol_type = other DNA
aataatcttaaataaataccatcccttccctaaaccttaatctactcttc

SEQ ID NO: 18239 - DNA, 50 bp, synthetic construct
  source 1..50: mol_type = other DNA
ctcttcratcattataactaattaaatataaaataacctaacctaaaccc

SEQ ID NO: 18240 - DNA, 50 bp, synthetic construct
  source 1..50: mol_type = other DNA
aaactaactaaacccaccctaaccaacaaaataaaactaataataacttc

SEQ ID NO: 18241 - DNA, 50 bp, synthetic construct
  source 1..50: mol_type = other DNA
aaaaaaaaacataaaccataaaaaaactcccattaatactaaaacaaccc

SEQ ID NO: 18242 - DNA, 50 bp, synthetic construct
  source 1..50: mol_type = other DNA
aaccataaaaaaactcccattaatactaaaacaacccrcaacaactctac

SEQ ID NO: 18243 - DNA, 50 bp, synthetic construct
  source 1..50: mol_type = other DNA
ccaactacctaaatacaaacataacaaacaacractaaacccaaaaaccc

SEQ ID NO: 18244 - DNA, 50 bp, synthetic construct
  source 1..50: mol_type = other DNA
ttaaaatatcccttaactctatcctaaaattaaaatccaaaacctaacac

SEQ ID NO: 18245 - DNA, 50 bp, synthetic construct
  source 1..50: mol_type = other DNA
acccaaaacatttattaaaaaaacttacaaaataaactacaacaattctc

SEQ ID NO: 18246 - DNA, 50 bp, synthetic construct
  source 1..50: mol_type = other DNA
cccctcrctaaaaatatacctaaataaaacaccrcttctctctatctatc

SEQ ID NO: 18247 - DNA, 50 bp, synthetic construct
  source 1..50: mol_type = other DNA
taaacttcataccctaacccctcrctaaaaatatacctaaataaaacacc

SEQ ID NO: 18248 - DNA, 50 bp, synthetic construct
  source 1..50: mol_type = other DNA
aaaatttcaaatttaaaaatcctaacraaaaatctacracttccraaacc

SEQ ID NO: 18249 - DNA, 50 bp, synthetic construct
  source 1..50: mol_type = other DNA
craatcaaccrcraactaatttaaaaactatacaaaatccaaaaaccacc

SEQ ID NO: 18250 - DNA, 50 bp, synthetic construct
  source 1..50: mol_type = other DNA
atctccraattcrataattcctaaaccttacacaatctccaaatcaatcc

SEQ ID NO: 18251 - DNA, 50 bp, synthetic construct
  source 1..50: mol_type = other DNA
cccaccraaaaaaaccracttaaaaacactctaaaaaccaccctaataac

SEQ ID NO: 18252 - DNA, 50 bp, synthetic construct
  source 1..50: mol_type = other DNA
taaatccrcaatatacrccaccaaaataatccccaaaatatccttaaatc

SEQ ID NO: 18253 - DNA, 50 bp, synthetic construct
  source 1..50: mol_type = other DNA
cttaacaataacaaaaatccttcccraaacacaaaaaacacraaaaaaac

SEQ ID NO: 18254 - DNA, 50 bp, synthetic construct
  source 1..50: mol_type = other DNA
raaaaaaactaaatttcctaccaaaactaacaataaatacrcrtaaaccc

SEQ ID NO: 18255 - DNA, 50 bp, synthetic construct
  source 1..50: mol_type = other DNA
aaaaaaaaataatatatatatccatattaaaattccaacccaaaacaaac

SEQ ID NO: 18256 - DNA, 50 bp, synthetic construct
  source 1..50: mol_type = other DNA
ttaaaattccaacccaaaacaaacraaaccataaaaatattacraaatac

SEQ ID NO: 18257 - DNA, 50 bp, synthetic construct
  source 1..50: mol_type = other DNA
aacaaacraaaccataaaaatattacraaatacrtataaactccttaaac

SEQ ID NO: 18258 - DNA, 50 bp, synthetic construct
  source 1..50: mol_type = other DNA
ataaaaatattacraaatacrtataaactccttaaacrcccaaaccaatc

SEQ ID NO: 18259 - DNA, 50 bp, synthetic construct
  source 1..50: mol_type = other DNA
accaaaaccaaaaaccraaacaaacaaaaatcccataaaactaaaaaccc

SEQ ID NO: 18260 - DNA, 50 bp, synthetic construct
  source 1..50: mol_type = other DNA
taaaacctttatttactccratctttaactctaaccctataacctaaaac

SEQ ID NO: 18261 - DNA, 50 bp, synthetic construct
  source 1..50: mol_type = other DNA
tttaactctaaccctataacctaaaacratcaaaaaatttcctaaacctc

SEQ ID NO: 18262 - DNA, 50 bp, synthetic construct
  source 1..50: mol_type = other DNA
catcttacctctctatattccatcttctcctaaacccaataaaaaaaacc

SEQ ID NO: 18263 - DNA, 50 bp, synthetic construct
  source 1..50: mol_type = other DNA
ctcaaacatttcaaacctaaccaatctctcaccattacaaaaccaaaaac

SEQ ID NO: 18264 - DNA, 50 bp, synthetic construct
  source 1..50: mol_type = other DNA
acaataaaaaaaatacaactaacaaactcaaatactacaaaaaaacatac

SEQ ID NO: 18265 - DNA, 50 bp, synthetic construct
  source 1..50: mol_type = other DNA
aaaataaaactatcaccacaaaacaaccttaaacraaccttaaccctctc

SEQ ID NO: 18266 - DNA, 50 bp, synthetic construct
  source 1..50: mol_type = other DNA
atacccatttcaaaaatataataactaaaatctcraaaaaaccaaaactc

SEQ ID NO: 18267 - DNA, 50 bp, synthetic construct
  source 1..50: mol_type = other DNA
aactctaaactatccctaaaaatttcaaccattcctaacctccaaaaaac

SEQ ID NO: 18268 - DNA, 50 bp, synthetic construct
  source 1..50: mol_type = other DNA
ctaaactatccctaaaaatttcaaccattcctaacctccaaaaaacrccc

SEQ ID NO: 18269 - DNA, 50 bp, synthetic construct
  source 1..50: mol_type = other DNA
caaaaacacactactaatctcttaccraaccatttccttaatctcctacc

SEQ ID NO: 18270 - DNA, 50 bp, synthetic construct
  source 1..50: mol_type = other DNA
caacccraaacccaaaaacccaccctatctataaaaactatcctaatatc

SEQ ID NO: 18271 - DNA, 50 bp, synthetic construct
  source 1..50: mol_type = other DNA
ctaaaaataaaaacaaaacrtaaacccaaccccataaataaaaattctac

SEQ ID NO: 18272 - DNA, 50 bp, synthetic construct
  source 1..50: mol_type = other DNA
taacccaattaccctactcaacctatatcccaaacctaaaaatataatcc

SEQ ID NO: 18273 - DNA, 50 bp, synthetic construct
  source 1..50: mol_type = other DNA
caataataaaaaaattcctttctctatccctaccrccaaatctaaaaatc

SEQ ID NO: 18274 - DNA, 50 bp, synthetic construct
  source 1..50: mol_type = other DNA
taaaatccatctccrccaataataaaaaaattcctttctctatccctacc

SEQ ID NO: 18275 - DNA, 50 bp, synthetic construct
  source 1..50: mol_type = other DNA
cctcaaaaaataattacaacracratacttaaaccccrtaaacaaaaaac

SEQ ID NO: 18276 - DNA, 50 bp, synthetic construct
  source 1..50: mol_type = other DNA
aatcctactattcaacaatattaaactcaaataaaccrcaacrccaaaac

SEQ ID NO: 18277 - DNA, 50 bp, synthetic construct
  source 1..50: mol_type = other DNA
acctaataacrcataccctaaataaaaattaaaaacaccttttaaaaaac

SEQ ID NO: 18278 - DNA, 50 bp, synthetic construct
  source 1..50: mol_type = other DNA
tctaaaacatacrccaccaaacaaccraacttccaaataaaaaattaaac

SEQ ID NO: 18279 - DNA, 50 bp, synthetic construct
  source 1..50: mol_type = other DNA
craccaaaaaaaactaatttaacaaaatccttaaaacttaaaaactaaac

SEQ ID NO: 18280 - DNA, 50 bp, synthetic construct
  source 1..50: mol_type = other DNA
atatctctaaactattccttacrcttccctaaacctcaatatctacttac

SEQ ID NO: 18281 - DNA, 50 bp, synthetic construct
  source 1..50: mol_type = other DNA
ccaaaaaaacrcaaaaaataatccaaaaacacacaatctacrctatcacc

SEQ ID NO: 18282 - DNA, 50 bp, synthetic construct
  source 1..50: mol_type = other DNA
acractaaaaaatccraaaatcaacaccatatcaaatctacacaaaaacc

SEQ ID NO: 18283 - DNA, 50 bp, synthetic construct
  source 1..50: mol_type = other DNA
accatatcaaatctacacaaaaaccrataaaaaaccataaaacctaaccc

SEQ ID NO: 18284 - DNA, 50 bp, synthetic construct
  source 1..50: mol_type = other DNA
taaaaaataacctaaaaccaaatatacctaaaaccctatacctactctac

SEQ ID NO: 18285 - DNA, 50 bp, synthetic construct
  source 1..50: mol_type = other DNA
aacactatcraaaacttttactatcactacttaatctcaccctctacacc

SEQ ID NO: 18286 - DNA, 50 bp, synthetic construct
  source 1..50: mol_type = other DNA
ccttcraaaacttccracctaaaatcaacraaaaacaaacaacaaaaaac

SEQ ID NO: 18287 - DNA, 50 bp, synthetic construct
  source 1..50: mol_type = other DNA
rtacaaaacaacataataaaaacrtaaaaaccaataacrtaaaaaccttc

SEQ ID NO: 18288 - DNA, 50 bp, synthetic construct
  source 1..50: mol_type = other DNA
cracraaaccccrtacaaaacaacataataaaaacrtaaaaaccaataac

SEQ ID NO: 18289 - DNA, 50 bp, synthetic construct
  source 1..50: mol_type = other DNA
ccctaaacratattaactctccrattaaacaacttaataaaaatataacc

SEQ ID NO: 18290 - DNA, 50 bp, synthetic construct
  source 1..50: mol_type = other DNA
craaccctatctctcctaaactataactaaaatctaacaatctatatacc

SEQ ID NO: 18291 - DNA, 50 bp, synthetic construct
  source 1..50: mol_type = other DNA
caaaataacrctataacctaaaaacaactatccctcctatatacaaactc

SEQ ID NO: 18292 - DNA, 50 bp, synthetic construct
  source 1..50: mol_type = other DNA
caacaatccraacttacacacaaaaaaaacaactactttcaaaccacaac

SEQ ID NO: 18293 - DNA, 50 bp, synthetic construct
  source 1..50: mol_type = other DNA
tctataaataaaaactactactatcactattaccattatcctccctctcc

SEQ ID NO: 18294 - DNA, 50 bp, synthetic construct
  source 1..50: mol_type = other DNA
aacctattaaacccaaaaccatatcctaactctaaaaaaaacactaatcc

SEQ ID NO: 18295 - DNA, 50 bp, synthetic construct
  source 1..50: mol_type = other DNA
aatctaatataacaccrtaattataaaattcaataaaattccrcaaaccc

SEQ ID NO: 18296 - DNA, 50 bp, synthetic construct
  source 1..50: mol_type = other DNA
cttctataaatctaatataacaccrtaattataaaattcaataaaattcc

SEQ ID NO: 18297 - DNA, 50 bp, synthetic construct
  source 1..50: mol_type = other DNA
tacacctatacaacatataaccttaaacaaatcacttctctcaaaacccc

SEQ ID NO: 18298 - DNA, 50 bp, synthetic construct
  source 1..50: mol_type = other DNA
ataaacttacctttaataaacacacatatacaaaatcccacaaaatcctc

SEQ ID NO: 18299 - DNA, 50 bp, synthetic construct
  source 1..50: mol_type = other DNA
tactctatataactaaacaaaaactaaacaaacatttccaacataaacac

SEQ ID NO: 18300 - DNA, 50 bp, synthetic construct
  source 1..50: mol_type = other DNA
aactaaaaaccttctaactacaactcttaaactaaacaaaaattaaactc

SEQ ID NO: 18301 - DNA, 50 bp, synthetic construct
  source 1..50: mol_type = other DNA
accttctaactacaactcttaaactaaacaaaaattaaactcraatctac

SEQ ID NO: 18302 - DNA, 50 bp, synthetic construct
  source 1..50: mol_type = other DNA
ttaataaaaacrtaatttctccatattaatcaaattaatctccaactccc

SEQ ID NO: 18303 - DNA, 50 bp, synthetic construct
  source 1..50: mol_type = other DNA
tccatattaatcaaattaatctccaactcccracctcaaataatctaccc

SEQ ID NO: 18304 - DNA, 50 bp, synthetic construct
  source 1..50: mol_type = other DNA
taaatcaaactaacaaactactaaataaaatatattctattaccraatac

SEQ ID NO: 18305 - DNA, 50 bp, synthetic construct
  source 1..50: mol_type = other DNA
aaattataaatcaaactaacaaactactaaataaaatatattctattacc

SEQ ID NO: 18306 - DNA, 50 bp, synthetic construct
  source 1..50: mol_type = other DNA
acttctctctaaacaacaccaaaaatcaacctaaaacaaaaatacaaacc

SEQ ID NO: 18307 - DNA, 50 bp, synthetic construct
  source 1..50: mol_type = other DNA
caaaatcccctaaaaatcaacctactaattaaaaatcaacccaaaaaaac

SEQ ID NO: 18308 - DNA, 50 bp, synthetic construct
  source 1..50: mol_type = other DNA
tcaactttaaaaatcaacraaaaccccraaaataaacaaataacttaaac

SEQ ID NO: 18309 - DNA, 50 bp, synthetic construct
  source 1..50: mol_type = other DNA
aaaatcctaccttctccacatcccaactctataactttaaacctataacc

SEQ ID NO: 18310 - DNA, 50 bp, synthetic construct
  source 1..50: mol_type = other DNA
ctaatcaccttcaaaaatttctaaatccaaaaccactatactccctatac

SEQ ID NO: 18311 - DNA, 50 bp, synthetic construct
  source 1..50: mol_type = other DNA
ttctaataactcttacacaaaactaacttcttatctatacrcaccaaacc

SEQ ID NO: 18312 - DNA, 50 bp, synthetic construct
  source 1..50: mol_type = other DNA
cctatacaaaaactaccaaaaactaatctctaaaatctaacataaaaaac

SEQ ID NO: 18313 - DNA, 50 bp, synthetic construct
  source 1..50: mol_type = other DNA
cccrcaaacttactacaaacattacccraaacaaaataaaacaaatcctc

SEQ ID NO: 18314 - DNA, 50 bp, synthetic construct
  source 1..50: mol_type = other DNA
acaaaactaaatacaatttccaccccrcaaacttactacaaacattaccc

SEQ ID NO: 18315 - DNA, 50 bp, synthetic construct
  source 1..50: mol_type = other DNA
cacctcaatttccctatttataaaacaaaactaaatacaatttccacccc

SEQ ID NO: 18316 - DNA, 50 bp, synthetic construct
  source 1..50: mol_type = other DNA
aaaaccraatcaccatatctcttaacaaaaacatctaccaataactactc

SEQ ID NO: 18317 - DNA, 50 bp, synthetic construct
  source 1..50: mol_type = other DNA
cctaccraacaaccactaataaatatctttaccaaaaaacataataaccc

SEQ ID NO: 18318 - DNA, 50 bp, synthetic construct
  source 1..50: mol_type = other DNA
cccraatacctaatataaatattacaaacaaaacraatactacraaacac

SEQ ID NO: 18319 - DNA, 50 bp, synthetic construct
  source 1..50: mol_type = other DNA
tataaatattacaaacaaaacraatactacraaacacrtaaacaaatccc

SEQ ID NO: 18320 - DNA, 50 bp, synthetic construct
  source 1..50: mol_type = other DNA
atcccaaaaaaatatcaaaatttaacaactctaaaaacataaaattacac

SEQ ID NO: 18321 - DNA, 50 bp, synthetic construct
  source 1..50: mol_type = other DNA
acacrataactacaacataaaaaacctataaccrtaaaaatactaataac

SEQ ID NO: 18322 - DNA, 50 bp, synthetic construct
  source 1..50: mol_type = other DNA
ataaccrtaaaaatactaataacraaaaaaccctaataacaaaaaaaccc

SEQ ID NO: 18323 - DNA, 50 bp, synthetic construct
  source 1..50: mol_type = other DNA
aaccctaataacaaaaaaacccrtactatactcaacctaactccaaacac

SEQ ID NO: 18324 - DNA, 50 bp, synthetic construct
  source 1..50: mol_type = other DNA
craatctacttctaaccacataaactcacctctaaactactcaatcrctc

SEQ ID NO: 18325 - DNA, 50 bp, synthetic construct
  source 1..50: mol_type = other DNA
craacrattaaacaactcaaaaataaacttatataaccaaaaacaaatcc

SEQ ID NO: 18326 - DNA, 50 bp, synthetic construct
  source 1..50: mol_type = other DNA
aacrattaaacaactcaaaaataaacttatataaccaaaaacaaatccrc

SEQ ID NO: 18327 - DNA, 50 bp, synthetic construct
  source 1..50: mol_type = other DNA
ataaattaatccctcaaaactattaactaacccaacaaaacaaaaactcc

SEQ ID NO: 18328 - DNA, 50 bp, synthetic construct
  source 1..50: mol_type = other DNA
aactattaactaacccaacaaaacaaaaactccrctaaaaaaaatatctc

SEQ ID NO: 18329 - DNA, 50 bp, synthetic construct
  source 1..50: mol_type = other DNA
tcaaaatcaaaatccracctacaacraactctaaccaaactaatatatcc

SEQ ID NO: 18330 - DNA, 50 bp, synthetic construct
  source 1..50: mol_type = other DNA
acctaccctcctaaaaaaaacacaaaataactcatcaaaatccttatcac

SEQ ID NO: 18331 - DNA, 50 bp, synthetic construct
  source 1..50: mol_type = other DNA
ccccctaaactatataaaacrctaataaaataaaaattcaaactaatacc

SEQ ID NO: 18332 - DNA, 50 bp, synthetic construct
  source 1..50: mol_type = other DNA
taataaaataaaaattcaaactaataccraacaaaccrcaatcaacaccc

SEQ ID NO: 18333 - DNA, 50 bp, synthetic construct
  source 1..50: mol_type = other DNA
cacataacratctaataaccctaataaacaacctacttaaaaaaaacaac

SEQ ID NO: 18334 - DNA, 50 bp, synthetic construct
  source 1..50: mol_type = other DNA
aataaccctaataaacaacctacttaaaaaaaacaacraacaaaacaaac

SEQ ID NO: 18335 - DNA, 50 bp, synthetic construct
  source 1..50: mol_type = other DNA
tcrctaaataccaaccaaaactaatccaacactaaactaaaacacacaac

SEQ ID NO: 18336 - DNA, 50 bp, synthetic construct
  source 1..50: mol_type = other DNA
aactctttataactacacaacraatcratcaaataaactaaccatccatc

SEQ ID NO: 18337 - DNA, 50 bp, synthetic construct
  source 1..50: mol_type = other DNA
tttttccctattacattattacctaacattctaaataacttattcattac

SEQ ID NO: 18338 - DNA, 50 bp, synthetic construct
  source 1..50: mol_type = other DNA
aaattaaaaatcaaaaataaacacacacctaacctatcctaccataaatc

SEQ ID NO: 18339 - DNA, 50 bp, synthetic construct
  source 1..50: mol_type = other DNA
aaatcaaaaataaacacacacctaacctatcctaccataaatcrttcatc

SEQ ID NO: 18340 - DNA, 50 bp, synthetic construct
  source 1..50: mol_type = other DNA
aaaaataaatccaaaaaacaaatccttccaaaacrtcctaacccttcacc

SEQ ID NO: 18341 - DNA, 50 bp, synthetic construct
  source 1..50: mol_type = other DNA
crcctttcttcctactataaccattaaactcctcaaccaaattccctaac

SEQ ID NO: 18342 - DNA, 50 bp, synthetic construct
  source 1..50: mol_type = other DNA
aacaaaacctataactataaaactctcaaccaccraaaaaaaccccacac

SEQ ID NO: 18343 - DNA, 50 bp, synthetic construct
  source 1..50: mol_type = other DNA
aaacaaaaaaaaacccacaaacrccataaataacctcraaactaaaaaac

SEQ ID NO: 18344 - DNA, 50 bp, synthetic construct
  source 1..50: mol_type = other DNA
cacaaaaattaaccaacaataataacatacrtatataatctcaactactc

SEQ ID NO: 18345 - DNA, 50 bp, synthetic construct
  source 1..50: mol_type = other DNA
tataaaaaacaaaacaaaaccacaaaaattaaccaacaataataacatac

SEQ ID NO: 18346 - DNA, 50 bp, synthetic construct
  source 1..50: mol_type = other DNA
aaactcacctacctaaaacatccaaaatctaaaaaaaacaactacacaac

SEQ ID NO: 18347 - DNA, 50 bp, synthetic construct
  source 1..50: mol_type = other DNA
ccaaaccctaaatatctcaaacaaataaacctaacctaacccaaacaacc

SEQ ID NO: 18348 - DNA, 50 bp, synthetic construct
  source 1..50: mol_type = other DNA
cacttaaaatccactttactcacaactccctccttatacatttccctctc

SEQ ID NO: 18349 - DNA, 50 bp, synthetic construct
  source 1..50: mol_type = other DNA
ccctccttatacatttccctctcraaactattacccacaaattcaactac

SEQ ID NO: 18350 - DNA, 50 bp, synthetic construct
  source 1..50: mol_type = other DNA
ctaacttcaaaatcccatataaaaaactacrctacraaaaaatcrcaaac

SEQ ID NO: 18351 - DNA, 50 bp, synthetic construct
  source 1..50: mol_type = other DNA
tctcctctaacttcaaaatcccatataaaaaactacrctacraaaaaatc

SEQ ID NO: 18352 - DNA, 50 bp, synthetic construct
  source 1..50: mol_type = other DNA
actcaaataactttaaaacctactccttataactatcraccttaaattcc

SEQ ID NO: 18353 - DNA, 50 bp, synthetic construct
  source 1..50: mol_type = other DNA
caaattaccttctactcaaataactttaaaacctactccttataactatc

SEQ ID NO: 18354 - DNA, 50 bp, synthetic construct
  source 1..50: mol_type = other DNA
aaccacaaaaaacaaactccaaaaccatctaaacaaaaaataacctaaac

SEQ ID NO: 18355 - DNA, 50 bp, synthetic construct
  source 1..50: mol_type = other DNA
acctaaacrttccaatcacaataaccaaaacctaaataaaaaaaaccatc

SEQ ID NO: 18356 - DNA, 50 bp, synthetic construct
  source 1..50: mol_type = other DNA
ratttataaattaacaacaaaacctacctactaactaccctaaaacccac

SEQ ID NO: 18357 - DNA, 50 bp, synthetic construct
  source 1..50: mol_type = other DNA
taaattaactataatattaccaacaacaaccactttcttaaacaaccatc

SEQ ID NO: 18358 - DNA, 50 bp, synthetic construct
  source 1..50: mol_type = other DNA
aaccatcrcaaactacaaatctaactatcraataaatatccttctctacc

SEQ ID NO: 18359 - DNA, 50 bp, synthetic construct
  source 1..50: mol_type = other DNA
taattttctattaaaacataattctataaacaaactacatcctctcctcc

SEQ ID NO: 18360 - DNA, 50 bp, synthetic construct
  source 1..50: mol_type = other DNA
cacccaaaaataccacaaatccaaacatttctaataatcataactcacac

SEQ ID NO: 18361 - DNA, 50 bp, synthetic construct
  source 1..50: mol_type = other DNA
tatttctttcccaacaaataatctacccatatccacccacaaaacaaaac

SEQ ID NO: 18362 - DNA, 50 bp, synthetic construct
  source 1..50: mol_type = other DNA
atataaccrtctaccctaccaaaactatacaaaattaattccactaaaac

SEQ ID NO: 18363 - DNA, 50 bp, synthetic construct
  source 1..50: mol_type = other DNA
cccaactaaaaacacacaacttatatttccaattcctctctataaacttc

SEQ ID NO: 18364 - DNA, 50 bp, synthetic construct
  source 1..50: mol_type = other DNA
atattaatttttaccaaaaacaaaactatactaaaatcaaaaacaacccc

SEQ ID NO: 18365 - DNA, 50 bp, synthetic construct
  source 1..50: mol_type = other DNA
caactctacctctaacaaaaaccaacactaacatctcttaacaaaaaccc

SEQ ID NO: 18366 - DNA, 50 bp, synthetic construct
  source 1..50: mol_type = other DNA
atcttaaaaaaacaccacccatcccrttctatacaaaaattctctacccc

SEQ ID NO: 18367 - DNA, 50 bp, synthetic construct
  source 1..50: mol_type = other DNA
acaaaaaatcattcaccrcaataacraaacaaaaaattcctacacaaaac

SEQ ID NO: 18368 - DNA, 50 bp, synthetic construct
  source 1..50: mol_type = other DNA
aaacraataatctaccraatcataaaaaacataatatccctaaactcrtc

SEQ ID NO: 18369 - DNA, 50 bp, synthetic construct
  source 1..50: mol_type = other DNA
ttaaaacraataatctaccraatcataaaaaacataatatccctaaactc

SEQ ID NO: 18370 - DNA, 50 bp, synthetic construct
  source 1..50: mol_type = other DNA
tacacaactaaaaaacataaactaatataaaaacrtcaaataaaaacccc

SEQ ID NO: 18371 - DNA, 50 bp, synthetic construct
  source 1..50: mol_type = other DNA
aaacaaaacctacrcatacacaactaaaaaacataaactaatataaaaac

SEQ ID NO: 18372 - DNA, 50 bp, synthetic construct
  source 1..50: mol_type = other DNA
ccrcrtaactatcatacctactactataacaaacaaaaccaaaaattccc

SEQ ID NO: 18373 - DNA, 50 bp, synthetic construct
  source 1..50: mol_type = other DNA
ataacaaacaaaaccaaaaattcccrcttataccaaaccataaaccaacc

SEQ ID NO: 18374 - DNA, 50 bp, synthetic construct
  source 1..50: mol_type = other DNA
tacttatatctatcacctttctaactctatataataatttccaaaccccc

SEQ ID NO: 18375 - DNA, 50 bp, synthetic construct
  source 1..50: mol_type = other DNA
actaaaaacraaataaaaaccaaacctaaataaattctaaattcaacttc

SEQ ID NO: 18376 - DNA, 50 bp, synthetic construct
  source 1..50: mol_type = other DNA
ctctactctatttaatttaaaaaacaaaaaccaacacccataaataaaac

SEQ ID NO: 18377 - DNA, 50 bp, synthetic construct
  source 1..50: mol_type = other DNA
aacaatcraatatcaaaaattcaaatccaaactaactcctaaaacrcacc

SEQ ID NO: 18378 - DNA, 50 bp, synthetic construct
  source 1..50: mol_type = other DNA
ccaacaacaatcraatatcaaaaattcaaatccaaactaactcctaaaac

SEQ ID NO: 18379 - DNA, 50 bp, synthetic construct
  source 1..50: mol_type = other DNA
ctataaaaacctaacaactctaaaataaccccttacrcccaaaacaaacc

SEQ ID NO: 18380 - DNA, 50 bp, synthetic construct
  source 1..50: mol_type = other DNA
catttaatatattactataaaaacctaacaactctaaaataaccccttac

SEQ ID NO: 18381 - DNA, 50 bp, synthetic construct
  source 1..50: mol_type = other DNA
caaaaactaattttcaccraatcaaaaaaacaaaataactattcctaacc

SEQ ID NO: 18382 - DNA, 50 bp, synthetic construct
  source 1..50: mol_type = other DNA
ataacactactatacaacratcaaaaataaccatcctatcctcctaaccc

SEQ ID NO: 18383 - DNA, 50 bp, synthetic construct
  source 1..50: mol_type = other DNA
aaacaattctattacttaaacctaattcttcctaactccaaaaaccaaac

SEQ ID NO: 18384 - DNA, 50 bp, synthetic construct
  source 1..50: mol_type = other DNA
aaaaatttttccacttccaaacaaaataaaataaatacacctatccccac

SEQ ID NO: 18385 - DNA, 50 bp, synthetic construct
  source 1..50: mol_type = other DNA
tctttctacctcatatatctataactatatactaaaaaaaccaacaacac

SEQ ID NO: 18386 - DNA, 50 bp, synthetic construct
  source 1..50: mol_type = other DNA
ccaacatataattaaccttaaacactattccatatacacttaaaaaaaac

SEQ ID NO: 18387 - DNA, 50 bp, synthetic construct
  source 1..50: mol_type = other DNA
attttccaaaataactaccccattttacattcccatcaacaatatataac

SEQ ID NO: 18388 - DNA, 50 bp, synthetic construct
  source 1..50: mol_type = other DNA
aactaaaaccacrtacaaaaattttaaaaactaacaatacacccaatccc

SEQ ID NO: 18389 - DNA, 50 bp, synthetic construct
  source 1..50: mol_type = other DNA
actcacataaaaaaaacccractccacaaatcaatcaaacttattaaaac

SEQ ID NO: 18390 - DNA, 50 bp, synthetic construct
  source 1..50: mol_type = other DNA
tacctacaaccaaaaactaataaactaatatccttaaaaacaccaataac

SEQ ID NO: 18391 - DNA, 50 bp, synthetic construct
  source 1..50: mol_type = other DNA
taaaactcaaatctaactacaaacacctacctcctccctatactaccaac

SEQ ID NO: 18392 - DNA, 50 bp, synthetic construct
  source 1..50: mol_type = other DNA
atttcttcttaactcctatatcacctaaaaacccraaacacaattccccc

SEQ ID NO: 18393 - DNA, 50 bp, synthetic construct
  source 1..50: mol_type = other DNA
aaactaaaaaacraacaaaacaacccaaaaccttatcctaatccaaaatc

SEQ ID NO: 18394 - DNA, 50 bp, synthetic construct
  source 1..50: mol_type = other DNA
taaaaaacraacaaaacaacccaaaaccttatcctaatccaaaatcraac

SEQ ID NO: 18395 - DNA, 50 bp, synthetic construct
  source 1..50: mol_type = other DNA
raaaaacaaaatatcaaaaaacccccraaaacraaacttcaaaaacaccc

SEQ ID NO: 18396 - DNA, 50 bp, synthetic construct
  source 1..50: mol_type = other DNA
ttccttccctaaaccaataaaaatctattacaaaaaaacaacacacaaac

SEQ ID NO: 18397 - DNA, 50 bp, synthetic construct
  source 1..50: mol_type = other DNA
tcacacaaaccaaactaaacaattttaaataaacraacataaaccacaac

SEQ ID NO: 18398 - DNA, 50 bp, synthetic construct
  source 1..50: mol_type = other DNA
actaaacaattttaaataaacraacataaaccacaacracttatctacac

SEQ ID NO: 18399 - DNA, 50 bp, synthetic construct
  source 1..50: mol_type = other DNA
cracttatctacacrtatatcccaccctaaccaaaaacaaaaacrtaaac

SEQ ID NO: 18400 - DNA, 50 bp, synthetic construct
  source 1..50: mol_type = other DNA
cacraactaaataacaaaaactctaatctaaaacccaaaaaaaacaaccc

SEQ ID NO: 18401 - DNA, 50 bp, synthetic construct
  source 1..50: mol_type = other DNA
aataacaaaaactctaatctaaaacccaaaaaaaacaacccrcataacac

SEQ ID NO: 18402 - DNA, 50 bp, synthetic construct
  source 1..50: mol_type = other DNA
ataaaaaatcaactaaataaccraaaccttaacaatctccctaatataac

SEQ ID NO: 18403 - DNA, 50 bp, synthetic construct
  source 1..50: mol_type = other DNA
aactaaataaccraaaccttaacaatctccctaatataacraaacctcac

SEQ ID NO: 18404 - DNA, 50 bp, synthetic construct
  source 1..50: mol_type = other DNA
ataataactactcctaaacaaaccctaaaattactatccctatcacaacc

SEQ ID NO: 18405 - DNA, 50 bp, synthetic construct
  source 1..50: mol_type = other DNA
aatcttcccatatacraaaaaaactaataacraataacaaactttatccc

SEQ ID NO: 18406 - DNA, 50 bp, synthetic construct
  source 1..50: mol_type = other DNA
tcrcatttccttataacttcaaaaacccaccttttaatcttcccatatac

SEQ ID NO: 18407 - DNA, 50 bp, synthetic construct
  source 1..50: mol_type = other DNA
rtattaaatctaaacacracaaaacattaaaaactaaaaacaataacctc

SEQ ID NO: 18408 - DNA, 50 bp, synthetic construct
  source 1..50: mol_type = other DNA
aaaccataaaaaaatacraaatcactacttccaattcctaatactttatc

SEQ ID NO: 18409 - DNA, 50 bp, synthetic construct
  source 1..50: mol_type = other DNA
actctaacctatttccaccttttaactcctataactaacattactataac

SEQ ID NO: 18410 - DNA, 50 bp, synthetic construct
  source 1..50: mol_type = other DNA
aaaacattccaatatataactaaaccatattttacrtatccrtttatcac

SEQ ID NO: 18411 - DNA, 50 bp, synthetic construct
  source 1..50: mol_type = other DNA
tataaccrtaaaacattccaatatataactaaaccatattttacrtatcc

SEQ ID NO: 18412 - DNA, 50 bp, synthetic construct
  source 1..50: mol_type = other DNA
aataaacraatacrcaaaatataacctaaccacacactaaaatattccac

SEQ ID NO: 18413 - DNA, 50 bp, synthetic construct
  source 1..50: mol_type = other DNA
aaataacrcaataaccractacractaaataaaccttaaaaacaaaatac

SEQ ID NO: 18414 - DNA, 50 bp, synthetic construct
  source 1..50: mol_type = other DNA
attctaaatatttcatatccataaaatcatacratacrtacctttcrcac

SEQ ID NO: 18415 - DNA, 50 bp, synthetic construct
  source 1..50: mol_type = other DNA
acctattctaaatatttcatatccataaaatcatacratacrtacctttc

SEQ ID NO: 18416 - DNA, 50 bp, synthetic construct
  source 1..50: mol_type = other DNA
cctactttctatttacctattctaaatatttcatatccataaaatcatac

SEQ ID NO: 18417 - DNA, 50 bp, synthetic construct
  source 1..50: mol_type = other DNA
acctccaacttcacaacaactaatttcaaaacttctcaacccccaaaatc

SEQ ID NO: 18418 - DNA, 50 bp, synthetic construct
  source 1..50: mol_type = other DNA
taaaccaatccctaatattaaatcttcctatctatccatatactatcaac

SEQ ID NO: 18419 - DNA, 50 bp, synthetic construct
  source 1..50: mol_type = other DNA
acaacrcctctactaacaacratcaataatactaaacrtaaaaacaaaac

SEQ ID NO: 18420 - DNA, 50 bp, synthetic construct
  source 1..50: mol_type = other DNA
caaaaaacctaccttccttaaaaaaataatctttactccacacccacccc

SEQ ID NO: 18421 - DNA, 50 bp, synthetic construct
  source 1..50: mol_type = other DNA
craaaccaaccccaaactcaaatacccratttttaatcccctaaaacttc

SEQ ID NO: 18422 - DNA, 50 bp, synthetic construct
  source 1..50: mol_type = other DNA
aacaaataaaaacttcctacaacaaaaacacaaaacccraaaccacracc

SEQ ID NO: 18423 - DNA, 50 bp, synthetic construct
  source 1..50: mol_type = other DNA
aaaaatcaataataaaactctaaaacataaccraaaacraaaccraaccc

SEQ ID NO: 18424 - DNA, 50 bp, synthetic construct
  source 1..50: mol_type = other DNA
aaaaaatcctcrtaaaccaaaaatcaataataaaactctaaaacataacc

SEQ ID NO: 18425 - DNA, 50 bp, synthetic construct
  source 1..50: mol_type = other DNA
aaaaactcraaaccctaacaaaatcaacaaactaacaacaaaaaatcctc

SEQ ID NO: 18426 - DNA, 50 bp, synthetic construct
  source 1..50: mol_type = other DNA
ctacrtcaataaaaatcaaataaaccccatcttccataaataaaaaaaac

SEQ ID NO: 18427 - DNA, 50 bp, synthetic construct
  source 1..50: mol_type = other DNA
aaatatccaactttattcaaactaactctaaccttctctacctaaacrac

SEQ ID NO: 18428 - DNA, 50 bp, synthetic construct
  source 1..50: mol_type = other DNA
cataaatatccaactttattcaaactaactctaaccttctctacctaaac

SEQ ID NO: 18429 - DNA, 50 bp, synthetic construct
  source 1..50: mol_type = other DNA
aaaaaccaaaaccaacttaaacaaaactaaacatccataccaaactcacc

SEQ ID NO: 18430 - DNA, 50 bp, synthetic construct
  source 1..50: mol_type = other DNA
ccccacaaccccaaaattctcraaataatactaaaaacaatactataatc

SEQ ID NO: 18431 - DNA, 50 bp, synthetic construct
  source 1..50: mol_type = other DNA
ataactttaaatcaatacctatacaaacctaaacaaataactaaccccrc

SEQ ID NO: 18432 - DNA, 50 bp, synthetic construct
  source 1..50: mol_type = other DNA
aaacctaaaccccractaaaatctcaataaaatatactaactttaaaaac

SEQ ID NO: 18433 - DNA, 50 bp, synthetic construct
  source 1..50: mol_type = other DNA
acttactcatataaataataaaaactataaacaaaaaaccaaaaatcccc

SEQ ID NO: 18434 - DNA, 50 bp, synthetic construct
  source 1..50: mol_type = other DNA
acraaactctaaaaccaacaaccccacrtaacaaaaaattttcattaaac

SEQ ID NO: 18435 - DNA, 50 bp, synthetic construct
  source 1..50: mol_type = other DNA
actctaaaaccaacaaccccacrtaacaaaaaattttcattaaacrttac

SEQ ID NO: 18436 - DNA, 50 bp, synthetic construct
  source 1..50: mol_type = other DNA
caaaaaacattcataaaacaactactaaaaactaccrtataaaaaaaacc

SEQ ID NO: 18437 - DNA, 50 bp, synthetic construct
  source 1..50: mol_type = other DNA
caaaatccctaaacaaaacctaaaaactaccacctatcctcaataacctc

SEQ ID NO: 18438 - DNA, 50 bp, synthetic construct
  source 1..50: mol_type = other DNA
caaataaaaaaatttcaaacccaaaaaacaacatattcaaaactaaaaac

SEQ ID NO: 18439 - DNA, 50 bp, synthetic construct
  source 1..50: mol_type = other DNA
aaaaaaatttctaaaactcaacctataaaacctataacrcctataaccac

SEQ ID NO: 18440 - DNA, 50 bp, synthetic construct
  source 1..50: mol_type = other DNA
actcaacctataaaacctataacrcctataaccacraaataatttatctc

SEQ ID NO: 18441 - DNA, 50 bp, synthetic construct
  source 1..50: mol_type = other DNA
tataaccacraaataatttatctcrctcaaaataataataaacctaaccc

SEQ ID NO: 18442 - DNA, 50 bp, synthetic construct
  source 1..50: mol_type = other DNA
ctcrctcaaaataataataaacctaacccraaccctcaacaaatttctac

SEQ ID NO: 18443 - DNA, 50 bp, synthetic construct
  source 1..50: mol_type = other DNA
aaactcraaaaaaacaactctaaatacaattaaacctctaaactaatatc

SEQ ID NO: 18444 - DNA, 50 bp, synthetic construct
  source 1..50: mol_type = other DNA
acaactctaaatacaattaaacctctaaactaatatcrttaaactccrcc

SEQ ID NO: 18445 - DNA, 50 bp, synthetic construct
  source 1..50: mol_type = other DNA
raaaaacaaaacctcacccataaaacaaaccaaaaacraaacrtcaaccc

SEQ ID NO: 18446 - DNA, 50 bp, synthetic construct
  source 1..50: mol_type = other DNA
accraatacctatcatatacaaaaacctaactaacraaacatctacaaac

SEQ ID NO: 18447 - DNA, 50 bp, synthetic construct
  source 1..50: mol_type = other DNA
tcttaatctatctcataaataaaaccctatcccccrtctacaaatacccc

SEQ ID NO: 18448 - DNA, 50 bp, synthetic construct
  source 1..50: mol_type = other DNA
tccractcaaatacrtaaataataaacctcttctataaaaaaaatactac

SEQ ID NO: 18449 - DNA, 50 bp, synthetic construct
  source 1..50: mol_type = other DNA
crcataaaaataaaaacccatctaccccaaaaccaaaataaacctttacc

SEQ ID NO: 18450 - DNA, 50 bp, synthetic construct
  source 1..50: mol_type = other DNA
acaaaccccattacccaacctaaaatactatcaacctataatatcctacc

SEQ ID NO: 18451 - DNA, 50 bp, synthetic construct
  source 1..50: mol_type = other DNA
acccaccctccaactctaaaaaactaaatataaaaacaacaaaatctaac

SEQ ID NO: 18452 - DNA, 50 bp, synthetic construct
  source 1..50: mol_type = other DNA
actaaatataaaaacaacaaaatctaacrtatatacacctatatatacac

SEQ ID NO: 18453 - DNA, 50 bp, synthetic construct
  source 1..50: mol_type = other DNA
tataaccctcttaccttctaacctataaactaaacaaataaccttacctc

SEQ ID NO: 18454 - DNA, 50 bp, synthetic construct
  source 1..50: mol_type = other DNA
cctcaaattcctcatctataataaactaaaaacatcaaaaaaacccctac

SEQ ID NO: 18455 - DNA, 50 bp, synthetic construct
  source 1..50: mol_type = other DNA
tatctcactaaattcraaaaaaataaactctataccctctatacaactac

SEQ ID NO: 18456 - DNA, 50 bp, synthetic construct
  source 1..50: mol_type = other DNA
aaactctataccctctatacaactacractcacctcaatttaactatcac

SEQ ID NO: 18457 - DNA, 50 bp, synthetic construct
  source 1..50: mol_type = other DNA
tccctctcraaatatctaaaaatccttaccttaacttaacccatctcaac

SEQ ID NO: 18458 - DNA, 50 bp, synthetic construct
  source 1..50: mol_type = other DNA
craaatatctaaaaatccttaccttaacttaacccatctcaacraccctc

SEQ ID NO: 18459 - DNA, 50 bp, synthetic construct
  source 1..50: mol_type = other DNA
aactctccaaaaaccttaaatatctaaaatataaccctaataaaaactac

SEQ ID NO: 18460 - DNA, 50 bp, synthetic construct
  source 1..50: mol_type = other DNA
atctaccctcctcctctacaaaatactaacraaacttatatccaaaatac

SEQ ID NO: 18461 - DNA, 50 bp, synthetic construct
  source 1..50: mol_type = other DNA
atactaacraaacttatatccaaaatacraaacatacaaataaacaaaac

SEQ ID NO: 18462 - DNA, 50 bp, synthetic construct
  source 1..50: mol_type = other DNA
atccaaaatacraaacatacaaataaacaaaacraaactaaactacctac

SEQ ID NO: 18463 - DNA, 50 bp, synthetic construct
  source 1..50: mol_type = other DNA
ccaaaatacraaacatacaaataaacaaaacraaactaaactacctacrc

SEQ ID NO: 18464 - DNA, 50 bp, synthetic construct
  source 1..50: mol_type = other DNA
crtcctctttaaccctaatataaccttcctaccttaaaacttctaacccc

SEQ ID NO: 18465 - DNA, 50 bp, synthetic construct
  source 1..50: mol_type = other DNA
caaaaccaaatctaacaaaaaacaaaatcaaaaaatcaaaaccaaaaacc

SEQ ID NO: 18466 - DNA, 50 bp, synthetic construct
  source 1..50: mol_type = other DNA
aaccctaaccttctaaccttaccctttatcaaacctaactctaaaaaacc

SEQ ID NO: 18467 - DNA, 50 bp, synthetic construct
  source 1..50: mol_type = other DNA
taaccttctaaccttaccctttatcaaacctaactctaaaaaaccraacc

SEQ ID NO: 18468 - DNA, 50 bp, synthetic construct
  source 1..50: mol_type = other DNA
ataaaaaaaacttatttccaaaatcattttatcacccaaactatacatcc

SEQ ID NO: 18469 - DNA, 50 bp, synthetic construct
  source 1..50: mol_type = other DNA
cctatataatctaattactaaaactaaaacaccaacaaaacctaaacacc

SEQ ID NO: 18470 - DNA, 50 bp, synthetic construct
  source 1..50: mol_type = other DNA
taaaattatctaacacaaacaaaatccaaacacaaacttacaaaaaaaac

SEQ ID NO: 18471 - DNA, 50 bp, synthetic construct
  source 1..50: mol_type = other DNA
aaatatcaataatacatctaactacaacaaccatcacaacaaaaaactac

SEQ ID NO: 18472 - DNA, 50 bp, synthetic construct
  source 1..50: mol_type = other DNA
tcttactataataactactacaaccaaatacattactaatactcacaccc

SEQ ID NO: 18473 - DNA, 50 bp, synthetic construct
  source 1..50: mol_type = other DNA
ctatcataacccacaatttttcattttttaaaaaacaatctaactatatc

SEQ ID NO: 18474 - DNA, 50 bp, synthetic construct
  source 1..50: mol_type = other DNA
ctaaacacaaatacataaaaaaactccraacacraaaaccaaaccaaacc

SEQ ID NO: 18475 - DNA, 50 bp, synthetic construct
  source 1..50: mol_type = other DNA
tacctctcraaaaaaatacctaactaaacacaaatacataaaaaaactcc

SEQ ID NO: 18476 - DNA, 50 bp, synthetic construct
  source 1..50: mol_type = other DNA
ctaaaccttcaaaaccccactccccatcttcaatatatctaatacctctc

SEQ ID NO: 18477 - DNA, 50 bp, synthetic construct
  source 1..50: mol_type = other DNA
aaaaatccctacctttcaaataacaaaccrttccattttaaatctcaccc

SEQ ID NO: 18478 - DNA, 50 bp, synthetic construct
  source 1..50: mol_type = other DNA
aaatcacttacctaaaatcactcaacaacataacaacaaattaaaacctc

SEQ ID NO: 18479 - DNA, 50 bp, synthetic construct
  source 1..50: mol_type = other DNA
aaaaaatactaaaacaaaaactaaacraatccaaatcacctatcacacac

SEQ ID NO: 18480 - DNA, 50 bp, synthetic construct
  source 1..50: mol_type = other DNA
acaaaaaacccaaaaatatccctcccrtatataacaaataacctaaaccc

SEQ ID NO: 18481 - DNA, 50 bp, synthetic construct
  source 1..50: mol_type = other DNA
tcaaaacccataaataaaataaaactctaaaaaaatacataaaaccctcc

SEQ ID NO: 18482 - DNA, 50 bp, synthetic construct
  source 1..50: mol_type = other DNA
ttaaaaccttcaacaacttaaaaacacatttaactcctaacccaaaactc

SEQ ID NO: 18483 - DNA, 50 bp, synthetic construct
  source 1..50: mol_type = other DNA
actccaactctccctacaaaacccctaaatactaacraaaaaataataac

SEQ ID NO: 18484 - DNA, 50 bp, synthetic construct
  source 1..50: mol_type = other DNA
tctaacratcctccatctatctaccttcatttcaacctttaaaaaacacc

SEQ ID NO: 18485 - DNA, 50 bp, synthetic construct
  source 1..50: mol_type = other DNA
aaatacctcrtaaactaccaacataatctacctaccaaaatctctattcc

SEQ ID NO: 18486 - DNA, 50 bp, synthetic construct
  source 1..50: mol_type = other DNA
actctacttaatactccctaaataaacrcaattctaaaccccttacaaac

SEQ ID NO: 18487 - DNA, 50 bp, synthetic construct
  source 1..50: mol_type = other DNA
aatactccctaaataaacrcaattctaaaccccttacaaacrctctatac

SEQ ID NO: 18488 - DNA, 50 bp, synthetic construct
  source 1..50: mol_type = other DNA
aatcatttcctcaattccaaactaaaaataacaacacatctacacacaac

SEQ ID NO: 18489 - DNA, 50 bp, synthetic construct
  source 1..50: mol_type = other DNA
crtaccaaaataaaataattcaaaaaatccaatacctaaacctaactaac

SEQ ID NO: 18490 - DNA, 50 bp, synthetic construct
  source 1..50: mol_type = other DNA
cacaaaaactactaaaacctcctactcctacacccaaatccaaaaacacc

SEQ ID NO: 18491 - DNA, 50 bp, synthetic construct
  source 1..50: mol_type = other DNA
ccacacctaaattacctaaacratacctctaaacctaaatacataaaaac

SEQ ID NO: 18492 - DNA, 50 bp, synthetic construct
  source 1..50: mol_type = other DNA
ctaaaacrtaaccaaactaaaaacrtttcaacaccttaaaaaaaaacacc

SEQ ID NO: 18493 - DNA, 50 bp, synthetic construct
  source 1..50: mol_type = other DNA
cracctataactaaaaaaactccaacctaaaacrtaaccaaactaaaaac

SEQ ID NO: 18494 - DNA, 50 bp, synthetic construct
  source 1..50: mol_type = other DNA
aaaacaaaaattcataacracctataactaaaaaaactccaacctaaaac

SEQ ID NO: 18495 - DNA, 50 bp, synthetic construct
  source 1..50: mol_type = other DNA
aaatacaaaaacrcactctaactctaaaaaactatcccraaaacacaacc

SEQ ID NO: 18496 - DNA, 50 bp, synthetic construct
  source 1..50: mol_type = other DNA
ataaacaaaaaaaccctctaactatcctcctaccrcaaaaatacaaaaac

SEQ ID NO: 18497 - DNA, 50 bp, synthetic construct
  source 1..50: mol_type = other DNA
ccaaaaactattctacacctctcttctatattaacaaacraaacrcaaac

SEQ ID NO: 18498 - DNA, 50 bp, synthetic construct
  source 1..50: mol_type = other DNA
rtttcaccaaaaactattctacacctctcttctatattaacaaacraaac

SEQ ID NO: 18499 - DNA, 50 bp, synthetic construct
  source 1..50: mol_type = other DNA
taaccrtttcaccaaaaactattctacacctctcttctatattaacaaac

SEQ ID NO: 18500 - DNA, 50 bp, synthetic construct
  source 1..50: mol_type = other DNA
aaaaaatacaaaacaacctttaataaaacraccaataataccrctatctc

SEQ ID NO: 18501 - DNA, 50 bp, synthetic construct
  source 1..50: mol_type = other DNA
tcaaataatttctcttaccccccrtaaactactcttcaaacaataaaaac

SEQ ID NO: 18502 - DNA, 50 bp, synthetic construct
  source 1..50: mol_type = other DNA
aacctaaccacrtcttctctattaaaactaaaatatctataaaaaaccac

SEQ ID NO: 18503 - DNA, 50 bp, synthetic construct
  source 1..50: mol_type = other DNA
aacctttatcatctactacacataaactacaaaaccaaaaacctaaccac

SEQ ID NO: 18504 - DNA, 50 bp, synthetic construct
  source 1..50: mol_type = other DNA
ccctaaaaataacctaaaaacaactaatccaacacctcacctcactacac

SEQ ID NO: 18505 - DNA, 50 bp, synthetic construct
  source 1..50: mol_type = other DNA
actaacaaataaatcctatattcctaccraaaaaaaatctactttcaaac

SEQ ID NO: 18506 - DNA, 50 bp, synthetic construct
  source 1..50: mol_type = other DNA
aaaaacccctacctaaataaccactaacaaataaatcctatattcctacc

SEQ ID NO: 18507 - DNA, 50 bp, synthetic construct
  source 1..50: mol_type = other DNA
caaattaataataaaactccaacctataacaaataaaacattaaccraac

SEQ ID NO: 18508 - DNA, 50 bp, synthetic construct
  source 1..50: mol_type = other DNA
tcaaaaatcractaaaacataaaaaacrccttacaaaaacccaaaacacc

SEQ ID NO: 18509 - DNA, 50 bp, synthetic construct
  source 1..50: mol_type = other DNA
aaacrtatttcctatctcttaaaacttccaattcaacctcctcaaaaatc

SEQ ID NO: 18510 - DNA, 50 bp, synthetic construct
  source 1..50: mol_type = other DNA
aaaaaacaaaaaacacrtcctatcttctcactactatatccctacacctc

SEQ ID NO: 18511 - DNA, 50 bp, synthetic construct
  source 1..50: mol_type = other DNA
atatactaatttaaccacrattaactctacractcttaataactcaccac

SEQ ID NO: 18512 - DNA, 50 bp, synthetic construct
  source 1..50: mol_type = other DNA
aacacctacaaacttccaacatatactaatttaaccacrattaactctac

SEQ ID NO: 18513 - DNA, 50 bp, synthetic construct
  source 1..50: mol_type = other DNA
acctaaaattacaacacctacaaacttccaacatatactaatttaaccac

SEQ ID NO: 18514 - DNA, 50 bp, synthetic construct
  source 1..50: mol_type = other DNA
crttaacaaaaatatcrttatctaaaaacctaccrtcttccttacacttc

SEQ ID NO: 18515 - DNA, 50 bp, synthetic construct
  source 1..50: mol_type = other DNA
ttaacaaaaatatcrttatctaaaaacctaccrtcttccttacacttcrc

SEQ ID NO: 18516 - DNA, 50 bp, synthetic construct
  source 1..50: mol_type = other DNA
ttacacttcrcrtaacaatttacaaaaaccrttaaaactatacaataaac

SEQ ID NO: 18517 - DNA, 50 bp, synthetic construct
  source 1..50: mol_type = other DNA
cacrcaatttaaaaacatattaatcaaaataaccccttcccatatatcac

SEQ ID NO: 18518 - DNA, 50 bp, synthetic construct
  source 1..50: mol_type = other DNA
ttcrtaacacataaaaaaaaatcaccttaaccaatatatctttaaactac

SEQ ID NO: 18519 - DNA, 50 bp, synthetic construct
  source 1..50: mol_type = other DNA
aaatcaccttaaccaatatatctttaaactacrtatatccacttaaatac

SEQ ID NO: 18520 - DNA, 50 bp, synthetic construct
  source 1..50: mol_type = other DNA
ctctacattcataacataccttttcttaattttttatatatttctaaacc

SEQ ID NO: 18521 - DNA, 50 bp, synthetic construct
  source 1..50: mol_type = other DNA
acractaataacctcttccaaatctacaaatactaaactcacaactaaac

SEQ ID NO: 18522 - DNA, 50 bp, synthetic construct
  source 1..50: mol_type = other DNA
cctaatccraaccccaaaactaaaaaatatttataataattccaaacccc

SEQ ID NO: 18523 - DNA, 50 bp, synthetic construct
  source 1..50: mol_type = other DNA
cacctcraactttattataaaaacaataacccraaccccaaactaaaacc

SEQ ID NO: 18524 - DNA, 50 bp, synthetic construct
  source 1..50: mol_type = other DNA
aatcctaaaaacaaacaccacctcraactttattataaaaacaataaccc

SEQ ID NO: 18525 - DNA, 50 bp, synthetic construct
  source 1..50: mol_type = other DNA
aaataactcctatcacccratctaactctttccattaaatcacctacctc

SEQ ID NO: 18526 - DNA, 50 bp, synthetic construct
  source 1..50: mol_type = other DNA
aaacaaataactcaataaaaaaaaccaaaccraataacaaaaactacccc

SEQ ID NO: 18527 - DNA, 50 bp, synthetic construct
  source 1..50: mol_type = other DNA
aaaaataacraaacaactcaaactaactaaaactatatttaaaaacattc

SEQ ID NO: 18528 - DNA, 50 bp, synthetic construct
  source 1..50: mol_type = other DNA
caaaactaataaaaattctaccactactatataaccctaaaactaataac

SEQ ID NO: 18529 - DNA, 50 bp, synthetic construct
  source 1..50: mol_type = other DNA
taaccctaaaactaataacracttctctaaatctcttcttctcacttatc

SEQ ID NO: 18530 - DNA, 50 bp, synthetic construct
  source 1..50: mol_type = other DNA
ctctaaatctcttcttctcacttatcratacctaatccaaacaactttac

SEQ ID NO: 18531 - DNA, 50 bp, synthetic construct
  source 1..50: mol_type = other DNA
taaaacatattaaaaatataccracccrataataacctaacataactccc

SEQ ID NO: 18532 - DNA, 50 bp, synthetic construct
  source 1..50: mol_type = other DNA
aaaaaaaacacctaactcacatataaaacatattaaaaatataccraccc

SEQ ID NO: 18533 - DNA, 50 bp, synthetic construct
  source 1..50: mol_type = other DNA
aacrtaaaaaaaacacctaactcacatataaaacatattaaaaatatacc

SEQ ID NO: 18534 - DNA, 50 bp, synthetic construct
  source 1..50: mol_type = other DNA
acaaaacaaacataacccctactcctataaaattcacttcccaacaaaac

SEQ ID NO: 18535 - DNA, 50 bp, synthetic construct
  source 1..50: mol_type = other DNA
taaaaaataaactccacaaaaacaaaaaccatatctaccctatccccacc

SEQ ID NO: 18536 - DNA, 50 bp, synthetic construct
  source 1..50: mol_type = other DNA
aaaaaccatatctaccctatccccaccraaaacctaacctaaaacaaaac

SEQ ID NO: 18537 - DNA, 50 bp, synthetic construct
  source 1..50: mol_type = other DNA
crctcaaacrtatctataaactaaaaccaccctaaaaaataaacttcccc

SEQ ID NO: 18538 - DNA, 50 bp, synthetic construct
  source 1..50: mol_type = other DNA
aaacttccccraaactaaaaccatcctaaaaaataaacttccccaaaacc

SEQ ID NO: 18539 - DNA, 50 bp, synthetic construct
  source 1..50: mol_type = other DNA
ctacaaaactcaaaaacctaaaacataaaactaaacctaacrtcccrccc

SEQ ID NO: 18540 - DNA, 50 bp, synthetic construct
  source 1..50: mol_type = other DNA
aaaactacaaaactcaaaaacctaaaacataaaactaaacctaacrtccc

SEQ ID NO: 18541 - DNA, 50 bp, synthetic construct
  source 1..50: mol_type = other DNA
tcctaaaaactacaaaactcaaaaacctaaaacataaaactaaacctaac

SEQ ID NO: 18542 - DNA, 50 bp, synthetic construct
  source 1..50: mol_type = other DNA
aacacrtaaaaaacaacctaaatcttctcttctatacaaaaactttaccc

SEQ ID NO: 18543 - DNA, 50 bp, synthetic construct
  source 1..50: mol_type = other DNA
aaaaaacaacctaaatcttctcttctatacaaaaactttacccraacacc

SEQ ID NO: 18544 - DNA, 50 bp, synthetic construct
  source 1..50: mol_type = other DNA
aaaaacaccaactttacccaaaaactccraaaaaactcccraaaaaaaac

SEQ ID NO: 18545 - DNA, 50 bp, synthetic construct
  source 1..50: mol_type = other DNA
acaaaactaaaaaaacaccaactttacccaaaaactccraaaaaactccc

SEQ ID NO: 18546 - DNA, 50 bp, synthetic construct
  source 1..50: mol_type = other DNA
rccccccaaaacaaaacaaaaaactaatataaaaacatacaaaacaaaac

SEQ ID NO: 18547 - DNA, 50 bp, synthetic construct
  source 1..50: mol_type = other DNA
aaactaaaaaaaacacraactaataacaaccttacctctcaaactactcc

SEQ ID NO: 18548 - DNA, 50 bp, synthetic construct
  source 1..50: mol_type = other DNA
cttacctctcaaactactccraaccaaaataacttaaaaaaaccaaactc

SEQ ID NO: 18549 - DNA, 50 bp, synthetic construct
  source 1..50: mol_type = other DNA
actactccraaccaaaataacttaaaaaaaccaaactcraaaaataaaac

SEQ ID NO: 18550 - DNA, 50 bp, synthetic construct
  source 1..50: mol_type = other DNA
cctaaaatcacacractaacaaaaataaccaaaactaactacaaaaaccc

SEQ ID NO: 18551 - DNA, 50 bp, synthetic construct
  source 1..50: mol_type = other DNA
taaacaccccctcacrtccctaaataaacataacraattctaataaaaac

SEQ ID NO: 18552 - DNA, 50 bp, synthetic construct
  source 1..50: mol_type = other DNA
atctaacccttaaaataccctcaactaccaaaaacaaaaaatactaaacc

SEQ ID NO: 18553 - DNA, 50 bp, synthetic construct
  source 1..50: mol_type = other DNA
cccaacaaatacccaaaaaaactctcaactatccttaaataaatacaacc

SEQ ID NO: 18554 - DNA, 50 bp, synthetic construct
  source 1..50: mol_type = other DNA
atacccacccaaaaacaactaaaaatcctcctaaacatttactaaaaccc

SEQ ID NO: 18555 - DNA, 50 bp, synthetic construct
  source 1..50: mol_type = other DNA
aaaacaactaaaaatcctcctaaacatttactaaaacccraccaaacaac

SEQ ID NO: 18556 - DNA, 50 bp, synthetic construct
  source 1..50: mol_type = other DNA
craccaaacaacrcataacaccaaataacaataaaaactaaattaacacc

SEQ ID NO: 18557 - DNA, 50 bp, synthetic construct
  source 1..50: mol_type = other DNA
ataacaccaaataacaataaaaactaaattaacaccractactaaaaccc

SEQ ID NO: 18558 - DNA, 50 bp, synthetic construct
  source 1..50: mol_type = other DNA
ctaacttcatctctacttcctaaaattaaaaaaacttaactaatccttcc

SEQ ID NO: 18559 - DNA, 50 bp, synthetic construct
  source 1..50: mol_type = other DNA
ccatctaactttaaacctaaaccctaaattaaccaaaacaccaaaacctc

SEQ ID NO: 18560 - DNA, 50 bp, synthetic construct
  source 1..50: mol_type = other DNA
aattaaccaaaacaccaaaacctcratttcctcatctataaaataaaaac

SEQ ID NO: 18561 - DNA, 50 bp, synthetic construct
  source 1..50: mol_type = other DNA
accaaaacaccaaaacctcratttcctcatctataaaataaaaacrtaac

SEQ ID NO: 18562 - DNA, 50 bp, synthetic construct
  source 1..50: mol_type = other DNA
aaacaccaaaacctcratttcctcatctataaaataaaaacrtaacrctc

SEQ ID NO: 18563 - DNA, 50 bp, synthetic construct
  source 1..50: mol_type = other DNA
ctctccraaacaaatctttaaaaaaaaacctaatcaaacccatatacccc

SEQ ID NO: 18564 - DNA, 50 bp, synthetic construct
  source 1..50: mol_type = other DNA
taaaaaacaaattcaaaaatatctcacttactattccraacaaaaaaaac

SEQ ID NO: 18565 - DNA, 50 bp, synthetic construct
  source 1..50: mol_type = other DNA
aaactaaaattcacactaatccctaatatctacaccaccaactaccacac

SEQ ID NO: 18566 - DNA, 50 bp, synthetic construct
  source 1..50: mol_type = other DNA
atataaattctaattcaccraccaatacctaaataatccaaaactaaatc

SEQ ID NO: 18567 - DNA, 50 bp, synthetic construct
  source 1..50: mol_type = other DNA
tctaattcaccraccaatacctaaataatccaaaactaaatcractaaac

SEQ ID NO: 18568 - DNA, 50 bp, synthetic construct
  source 1..50: mol_type = other DNA
cataccattaataactacaaaataaaactatcractacaaaaacaacccc

SEQ ID NO: 18569 - DNA, 50 bp, synthetic construct
  source 1..50: mol_type = other DNA
aataccraaaccctaaatcataccattaataactacaaaataaaactatc

SEQ ID NO: 18570 - DNA, 50 bp, synthetic construct
  source 1..50: mol_type = other DNA
aaaaactaacaactttccaactacaacaaataaaaacccctaccaacttc

SEQ ID NO: 18571 - DNA, 50 bp, synthetic construct
  source 1..50: mol_type = other DNA
ctttccctcaccaaataaaaacaatcaataactaccctaacccractaac

SEQ ID NO: 18572 - DNA, 50 bp, synthetic construct
  source 1..50: mol_type = other DNA
craaattctttccctcaccaaataaaaacaatcaataactaccctaaccc

SEQ ID NO: 18573 - DNA, 50 bp, synthetic construct
  source 1..50: mol_type = other DNA
aactactttaaaaaactcacatatccctataacccacaaaaaacacaacc

SEQ ID NO: 18574 - DNA, 50 bp, synthetic construct
  source 1..50: mol_type = other DNA
aaaaacataaacaataaaaaaacactaccaaccacaactaacacaaaccc

SEQ ID NO: 18575 - DNA, 50 bp, synthetic construct
  source 1..50: mol_type = other DNA
caataccctcctattactcatactcctaatactactaaaacttaaaaaac

SEQ ID NO: 18576 - DNA, 50 bp, synthetic construct
  source 1..50: mol_type = other DNA
taccctcctattactcatactcctaatactactaaaacttaaaaaacrac

SEQ ID NO: 18577 - DNA, 50 bp, synthetic construct
  source 1..50: mol_type = other DNA
ccctaatcacataaccaatcraaacacaacaaaaactacctcataaaaac

SEQ ID NO: 18578 - DNA, 50 bp, synthetic construct
  source 1..50: mol_type = other DNA
acaaacattcaaaaactaaacaaaattttccccttttccaataaaattcc

SEQ ID NO: 18579 - DNA, 50 bp, synthetic construct
  source 1..50: mol_type = other DNA
acactcaacaaacactccatcaacatttacctaaaattttaaaattattc

SEQ ID NO: 18580 - DNA, 50 bp, synthetic construct
  source 1..50: mol_type = other DNA
ctaaataccaataacaaaactaaattccccaataaacccctaaactactc

SEQ ID NO: 18581 - DNA, 50 bp, synthetic construct
  source 1..50: mol_type = other DNA
actaaattccccaataaacccctaaactactcrttctaacaactaaatac

SEQ ID NO: 18582 - DNA, 50 bp, synthetic construct
  source 1..50: mol_type = other DNA
ccccaataaacccctaaactactcrttctaacaactaaatacraaaatac

SEQ ID NO: 18583 - DNA, 50 bp, synthetic construct
  source 1..50: mol_type = other DNA
atatccataaaaccraacatacttaacttttcctaacctttccrctactc

SEQ ID NO: 18584 - DNA, 50 bp, synthetic construct
  source 1..50: mol_type = other DNA
cactaaaatatccataaaaccraacatacttaacttttcctaacctttcc

SEQ ID NO: 18585 - DNA, 50 bp, synthetic construct
  source 1..50: mol_type = other DNA
aatatttattcaaccaaaattcaaactacacatttaacrcaaatacaatc

SEQ ID NO: 18586 - DNA, 50 bp, synthetic construct
  source 1..50: mol_type = other DNA
ccaaatccttaataaacccaataatcctataaaaataaatcacacaaccc

SEQ ID NO: 18587 - DNA, 50 bp, synthetic construct
  source 1..50: mol_type = other DNA
acratatacaacttaaacaaaaaactacaatcraccaacrtaaacctatc

SEQ ID NO: 18588 - DNA, 50 bp, synthetic construct
  source 1..50: mol_type = other DNA
atatacaacttaaacaaaaaactacaatcraccaacrtaaacctatcrcc

SEQ ID NO: 18589 - DNA, 50 bp, synthetic construct
  source 1..50: mol_type = other DNA
ctaatacaaaactaaaaaacaaacracrcrataaaaaccaaacccaaaac

SEQ ID NO: 18590 - DNA, 50 bp, synthetic construct
  source 1..50: mol_type = other DNA
taatacaaattaaactcccrataaattttctaaatcacctaccacccccc

SEQ ID NO: 18591 - DNA, 50 bp, synthetic construct
  source 1..50: mol_type = other DNA
tccaaaatatataaactaaaataccccaaccttacccccattactaattc

SEQ ID NO: 18592 - DNA, 50 bp, synthetic construct
  source 1..50: mol_type = other DNA
tccataatccaaataactctaaaaaacttaacctaaacacctaaacctac

SEQ ID NO: 18593 - DNA, 50 bp, synthetic construct
  source 1..50: mol_type = other DNA
taatccaaataactctaaaaaacttaacctaaacacctaaacctacracc

SEQ ID NO: 18594 - DNA, 50 bp, synthetic construct
  source 1..50: mol_type = other DNA
ttaatcccactaattcttaaaaaaacacaaaaaactcaacaacctaaacc

SEQ ID NO: 18595 - DNA, 50 bp, synthetic construct
  source 1..50: mol_type = other DNA
taaactactaaattttctatacttccccaaaaaccaataaaatcaatacc

SEQ ID NO: 18596 - DNA, 50 bp, synthetic construct
  source 1..50: mol_type = other DNA
actactaaattttctatacttccccaaaaaccaataaaatcaataccrac

SEQ ID NO: 18597 - DNA, 50 bp, synthetic construct
  source 1..50: mol_type = other DNA
aaccaataaaatcaataccracracctctataataattactaactaatcc

SEQ ID NO: 18598 - DNA, 50 bp, synthetic construct
  source 1..50: mol_type = other DNA
actacctactacttctaacraatcttaatactcaaactacctaactctcc

SEQ ID NO: 18599 - DNA, 50 bp, synthetic construct
  source 1..50: mol_type = other DNA
cataactaaaacaaaccaactaccccaaaattcttcccctaataattctc

SEQ ID NO: 18600 - DNA, 50 bp, synthetic construct
  source 1..50: mol_type = other DNA
caaaaatcacaaaatataaacctaaacctactacctacccaaatctaaac

SEQ ID NO: 18601 - DNA, 50 bp, synthetic construct
  source 1..50: mol_type = other DNA
ataccrtaattaactactactctaacaaatacaatttttaaacaatacac

SEQ ID NO: 18602 - DNA, 50 bp, synthetic construct
  source 1..50: mol_type = other DNA
aaattcacacataaaaaccaaaactacttaaaataccaaaaaatcccccc

SEQ ID NO: 18603 - DNA, 50 bp, synthetic construct
  source 1..50: mol_type = other DNA
attcacacataaaaaccaaaactacttaaaataccaaaaaatccccccrc

SEQ ID NO: 18604 - DNA, 50 bp, synthetic construct
  source 1..50: mol_type = other DNA
cttcaccaaaatctcaaaaaaacctaaaacaacctacratcaaaaacctc

SEQ ID NO: 18605 - DNA, 50 bp, synthetic construct
  source 1..50: mol_type = other DNA
raatctccaaactatcaaaactaaacatacaaaaacctaccctaaaaaac

SEQ ID NO: 18606 - DNA, 50 bp, synthetic construct
  source 1..50: mol_type = other DNA
rctctccaaaacaaacttctacatactcaactctaacaacctaaaaactc

SEQ ID NO: 18607 - DNA, 50 bp, synthetic construct
  source 1..50: mol_type = other DNA
rctctcctacacctacatccttaaaataccaaaatttccctactaaccac

SEQ ID NO: 18608 - DNA, 50 bp, synthetic construct
  source 1..50: mol_type = other DNA
ttatttctactcaatataaaaaaccaaatcttaaacaaaacacccaacac

SEQ ID NO: 18609 - DNA, 50 bp, synthetic construct
  source 1..50: mol_type = other DNA
taatctaaaactataaccttaatcaaattcccaacttccctcttaaaaac

SEQ ID NO: 18610 - DNA, 50 bp, synthetic construct
  source 1..50: mol_type = other DNA
aaactaaaaacctaaccaaaactacaaccccaaaccaaaaaaataacrac

SEQ ID NO: 18611 - DNA, 50 bp, synthetic construct
  source 1..50: mol_type = other DNA
acacacttactaaaactaaactaaaaaacacacraaaacaaaccctaccc

SEQ ID NO: 18612 - DNA, 50 bp, synthetic construct
  source 1..50: mol_type = other DNA
acaaaaatactctaaacacacacttactaaaactaaactaaaaaacacac

SEQ ID NO: 18613 - DNA, 50 bp, synthetic construct
  source 1..50: mol_type = other DNA
cctcaactcaaccccaacaaatatatactcaaaacatctttattcttcac

SEQ ID NO: 18614 - DNA, 50 bp, synthetic construct
  source 1..50: mol_type = other DNA
taccctaaacttatcactaataccaataaaaactaacacctacccctctc

SEQ ID NO: 18615 - DNA, 50 bp, synthetic construct
  source 1..50: mol_type = other DNA
caaaactaacctaaaacccaccatccccataacctatataaacataaaac

SEQ ID NO: 18616 - DNA, 50 bp, synthetic construct
  source 1..50: mol_type = other DNA
aataaaatttccaatcrccctaaatatataaaactaacccaaataacccc

SEQ ID NO: 18617 - DNA, 50 bp, synthetic construct
  source 1..50: mol_type = other DNA
caaaataaacaaaaaatataaccaaaatctaaaaccrcacrcacctaacc

SEQ ID NO: 18618 - DNA, 50 bp, synthetic construct
  source 1..50: mol_type = other DNA
aaaccctttaataaccaaaactaaatatacacaaacaaaataaataaaac

SEQ ID NO: 18619 - DNA, 50 bp, synthetic construct
  source 1..50: mol_type = other DNA
tcttacaaaactaaacttaaaacaaactactatatactacaaccacrccc

SEQ ID NO: 18620 - DNA, 50 bp, synthetic construct
  source 1..50: mol_type = other DNA
cccrtcttacaaaactaaacttaaaacaaactactatatactacaaccac

SEQ ID NO: 18621 - DNA, 50 bp, synthetic construct
  source 1..50: mol_type = other DNA
caaacacaaacccacttaaattatccattaacaaaaacracaaatacccc

SEQ ID NO: 18622 - DNA, 50 bp, synthetic construct
  source 1..50: mol_type = other DNA
aaacctacctaacaaacacaaacccacttaaattatccattaacaaaaac

SEQ ID NO: 18623 - DNA, 50 bp, synthetic construct
  source 1..50: mol_type = other DNA
aacctaccccaaaactaactatacctacacaaaatataatacccttaccc

SEQ ID NO: 18624 - DNA, 50 bp, synthetic construct
  source 1..50: mol_type = other DNA
caaatactccacataaaatccraaaccttcccaaaacctaaaccaaatac

SEQ ID NO: 18625 - DNA, 50 bp, synthetic construct
  source 1..50: mol_type = other DNA
ccctatatcaaaactaacacracrctattaacacccaataactaaaaaac

SEQ ID NO: 18626 - DNA, 50 bp, synthetic construct
  source 1..50: mol_type = other DNA
ctataaatccataaaccccaacatccccaaaacaacctaactaataaccc

SEQ ID NO: 18627 - DNA, 50 bp, synthetic construct
  source 1..50: mol_type = other DNA
ctctctataataaaaccaaacacaaaaacacaaataactaaattaacccc

SEQ ID NO: 18628 - DNA, 50 bp, synthetic construct
  source 1..50: mol_type = other DNA
catattcctaacatacatatactataaattaatcrtataactttcactac

SEQ ID NO: 18629 - DNA, 50 bp, synthetic construct
  source 1..50: mol_type = other DNA
aattcataaaaccratcacrtaaaaaacaacccaaaatacaaaaaatatc

SEQ ID NO: 18630 - DNA, 50 bp, synthetic construct
  source 1..50: mol_type = other DNA
aaaatacaaaaaatatcrctaaaactactatctcttattaaaaaccttac

SEQ ID NO: 18631 - DNA, 50 bp, synthetic construct
  source 1..50: mol_type = other DNA
accttacrtaacrtttaaaacaaacaaataaattctactaaccctaaacc

SEQ ID NO: 18632 - DNA, 50 bp, synthetic construct
  source 1..50: mol_type = other DNA
rttaaaccaaattcacacaaatataaaatataacractaaacacaaacac

SEQ ID NO: 18633 - DNA, 50 bp, synthetic construct
  source 1..50: mol_type = other DNA
aaaaaaatactacratctctttcacaaatctaactaaataaaaacttatc

SEQ ID NO: 18634 - DNA, 50 bp, synthetic construct
  source 1..50: mol_type = other DNA
aacttaattcaacracaaacccccactcaaccaaatttataaaaaaaacc

SEQ ID NO: 18635 - DNA, 50 bp, synthetic construct
  source 1..50: mol_type = other DNA
tcttccttaaaccaaactcaaaaaaacacaaaaaattctaaacaaaaacc

SEQ ID NO: 18636 - DNA, 50 bp, synthetic construct
  source 1..50: mol_type = other DNA
tatactcataataaacacattaattttaacaacacctcaataaactctac

SEQ ID NO: 18637 - DNA, 50 bp, synthetic construct
  source 1..50: mol_type = other DNA
aataaacacattaattttaacaacacctcaataaactctacrccttaaac

SEQ ID NO: 18638 - DNA, 50 bp, synthetic construct
  source 1..50: mol_type = other DNA
cctaaaatctttaaccaaaaaaacaaaacctataacctaaaaaactaaac

SEQ ID NO: 18639 - DNA, 50 bp, synthetic construct
  source 1..50: mol_type = other DNA
aaaacaaaacctataacctaaaaaactaaacrtaacctaataaactaaac

SEQ ID NO: 18640 - DNA, 50 bp, synthetic construct
  source 1..50: mol_type = other DNA
aaacctataacctaaaaaactaaacrtaacctaataaactaaacrtaaac

SEQ ID NO: 18641 - DNA, 50 bp, synthetic construct
  source 1..50: mol_type = other DNA
taacctaaaaaactaaacrtaacctaataaactaaacrtaaacrtaaccc

SEQ ID NO: 18642 - DNA, 50 bp, synthetic construct
  source 1..50: mol_type = other DNA
acaaaaaataaactaccaacacraacrcacratatttaacatctaaaacc

SEQ ID NO: 18643 - DNA, 50 bp, synthetic construct
  source 1..50: mol_type = other DNA
cctaacraaaccctaaaaatatacacaaaaaataaactaccaacacraac

SEQ ID NO: 18644 - DNA, 50 bp, synthetic construct
  source 1..50: mol_type = other DNA
ctcrttaaacttaccraaatccaaaatactataactatcrataaaaaaac

SEQ ID NO: 18645 - DNA, 50 bp, synthetic construct
  source 1..50: mol_type = other DNA
ttaccraaatccaaaatactataactatcrataaaaaaacrcaaatactc

SEQ ID NO: 18646 - DNA, 50 bp, synthetic construct
  source 1..50: mol_type = other DNA
aacracaacaaatattaaacataacaaaaattcaaacrcrcctaacctac

SEQ ID NO: 18647 - DNA, 50 bp, synthetic construct
  source 1..50: mol_type = other DNA
caaacractataacracaacaaatattaaacataacaaaaattcaaacrc

SEQ ID NO: 18648 - DNA, 50 bp, synthetic construct
  source 1..50: mol_type = other DNA
tctctcctaacctccctaaataaaaactaataaaatcaaaaaccaaaaac

SEQ ID NO: 18649 - DNA, 50 bp, synthetic construct
  source 1..50: mol_type = other DNA
aacraaaattactataaaccaaaatcacaccattacacaccaacctaaac

SEQ ID NO: 18650 - DNA, 50 bp, synthetic construct
  source 1..50: mol_type = other DNA
tctccctcttaacaatttttcttctaaaatctaaacctattttacctaac

SEQ ID NO: 18651 - DNA, 50 bp, synthetic construct
  source 1..50: mol_type = other DNA
ccctcttaacaatttttcttctaaaatctaaacctattttacctaacrcc

SEQ ID NO: 18652 - DNA, 50 bp, synthetic construct
  source 1..50: mol_type = other DNA
tatacaactacaccaaccaaaatccttacccraataaaaaccctattccc

SEQ ID NO: 18653 - DNA, 50 bp, synthetic construct
  source 1..50: mol_type = other DNA
aaactaaaaattccataacacctataaacattaaaacttaacratttctc

SEQ ID NO: 18654 - DNA, 50 bp, synthetic construct
  source 1..50: mol_type = other DNA
ccraataaaaaccctaactaatacaactacacaaataactccraaaaacc

SEQ ID NO: 18655 - DNA, 50 bp, synthetic construct
  source 1..50: mol_type = other DNA
aacctcaatacccacaaataccataaaatccccaacctcaaacrtaaaac

SEQ ID NO: 18656 - DNA, 50 bp, synthetic construct
  source 1..50: mol_type = other DNA
attctcaacaaaacttcaaactcrttttaacrctaccaaaaattaaccac

SEQ ID NO: 18657 - DNA, 50 bp, synthetic construct
  source 1..50: mol_type = other DNA
aactcttctatacctcccaattctcaacaaaacttcaaactcrttttaac

SEQ ID NO: 18658 - DNA, 50 bp, synthetic construct
  source 1..50: mol_type = other DNA
ctaatataaactcttctatacctcccaattctcaacaaaacttcaaactc

SEQ ID NO: 18659 - DNA, 50 bp, synthetic construct
  source 1..50: mol_type = other DNA
racaaaacaaaaccraaaataaccaaatacaccccaaaaccraaaaatac

SEQ ID NO: 18660 - DNA, 50 bp, synthetic construct
  source 1..50: mol_type = other DNA
aaataaacrcctaaacctcraaaactaaatatcraattactacaataacc

SEQ ID NO: 18661 - DNA, 50 bp, synthetic construct
  source 1..50: mol_type = other DNA
tatcraattactacaataaccrctaacaaaacrccctaaaaataaaaacc

SEQ ID NO: 18662 - DNA, 50 bp, synthetic construct
  source 1..50: mol_type = other DNA
aattactacaataaccrctaacaaaacrccctaaaaataaaaaccraccc

SEQ ID NO: 18663 - DNA, 50 bp, synthetic construct
  source 1..50: mol_type = other DNA
caaaaactataaattctcaacaaacacaaaatcratactattacccacrc

SEQ ID NO: 18664 - DNA, 50 bp, synthetic construct
  source 1..50: mol_type = other DNA
aacaaaaactataaattctcaacaaacacaaaatcratactattacccac

SEQ ID NO: 18665 - DNA, 50 bp, synthetic construct
  source 1..50: mol_type = other DNA
tcctctatcccaaccttaaatttaaaatctaaataaaaacaaatataacc

SEQ ID NO: 18666 - DNA, 50 bp, synthetic construct
  source 1..50: mol_type = other DNA
taacaatcccctaatcaaaatataacttcttccrccttctaaacttaaac

SEQ ID NO: 18667 - DNA, 50 bp, synthetic construct
  source 1..50: mol_type = other DNA
aaaactaaataactcaataacaatcccctaatcaaaatataacttcttcc

SEQ ID NO: 18668 - DNA, 50 bp, synthetic construct
  source 1..50: mol_type = other DNA
ttacaaactacttataataacaaaacacrctaaaaaaaaccraacctttc

SEQ ID NO: 18669 - DNA, 50 bp, synthetic construct
  source 1..50: mol_type = other DNA
ctttccaacttacaaactacttataataacaaaacacrctaaaaaaaacc

SEQ ID NO: 18670 - DNA, 50 bp, synthetic construct
  source 1..50: mol_type = other DNA
cataaaatccattataaaaaatctccctactactaacracatacracccc

SEQ ID NO: 18671 - DNA, 50 bp, synthetic construct
  source 1..50: mol_type = other DNA
acaatacataaaatccattataaaaaatctccctactactaacracatac

SEQ ID NO: 18672 - DNA, 50 bp, synthetic construct
  source 1..50: mol_type = other DNA
aaccaaaacaatacataaaatccattataaaaaatctccctactactaac

SEQ ID NO: 18673 - DNA, 50 bp, synthetic construct
  source 1..50: mol_type = other DNA
ctaaacctaacaactaccraaaaataaacaaaatacatataaaaaaccac

SEQ ID NO: 18674 - DNA, 50 bp, synthetic construct
  source 1..50: mol_type = other DNA
aaaacctactaaaaaaaccacaaataaaacaaatataactaaccctaaac

SEQ ID NO: 18675 - DNA, 50 bp, synthetic construct
  source 1..50: mol_type = other DNA
cctactaaaaaaaccacaaataaaacaaatataactaaccctaaacrctc

SEQ ID NO: 18676 - DNA, 50 bp, synthetic construct
  source 1..50: mol_type = other DNA
aatcaaaaccaaaaataaccacctccctacctaatcctaataaaaatcac

SEQ ID NO: 18677 - DNA, 50 bp, synthetic construct
  source 1..50: mol_type = other DNA
aaactaaaccrtctcctaatacaaaaaatcaaccccrctaaacaatactc

SEQ ID NO: 18678 - DNA, 50 bp, synthetic construct
  source 1..50: mol_type = other DNA
tccaaaaaactaactaccaaccatcatactacaaaaatataaccaaaccc

SEQ ID NO: 18679 - DNA, 50 bp, synthetic construct
  source 1..50: mol_type = other DNA
craatccttccctacctaactaacttatccacaaaacaacaaaaaaatac

SEQ ID NO: 18680 - DNA, 50 bp, synthetic construct
  source 1..50: mol_type = other DNA
atacrccccttaatatatcccraatatctcctataaacaactaaactttc

SEQ ID NO: 18681 - DNA, 50 bp, synthetic construct
  source 1..50: mol_type = other DNA
atcatctaaataaacrttaaaatctttctactctaaattacaaaacaaac

SEQ ID NO: 18682 - DNA, 50 bp, synthetic construct
  source 1..50: mol_type = other DNA
atctaaataaacrttaaaatctttctactctaaattacaaaacaaacrtc

SEQ ID NO: 18683 - DNA, 50 bp, synthetic construct
  source 1..50: mol_type = other DNA
tctactctaaattacaaaacaaacrtcrttttatactaatcaaacccctc

SEQ ID NO: 18684 - DNA, 50 bp, synthetic construct
  source 1..50: mol_type = other DNA
tatatcattaaccttattaaaaaccccrcaaaaacctatacaaatcaccc

SEQ ID NO: 18685 - DNA, 50 bp, synthetic construct
  source 1..50: mol_type = other DNA
ataacctacataaattcctacraaatctccaacaaaactaataacacaac

SEQ ID NO: 18686 - DNA, 50 bp, synthetic construct
  source 1..50: mol_type = other DNA
aacccaaaaaaccttcctttcaaccatatactacactacttccaaaaaac

SEQ ID NO: 18687 - DNA, 50 bp, synthetic construct
  source 1..50: mol_type = other DNA
aatacctacctctcaaaactaacctaaaatctacaatattaacatatcac

SEQ ID NO: 18688 - DNA, 50 bp, synthetic construct
  source 1..50: mol_type = other DNA
ttacatacattataattccatttatataaaatcaaaaataaaccraacac

SEQ ID NO: 18689 - DNA, 50 bp, synthetic construct
  source 1..50: mol_type = other DNA
aaaataacttttatcactcaacataattctcttaaaatcatccaaattac

SEQ ID NO: 18690 - DNA, 50 bp, synthetic construct
  source 1..50: mol_type = other DNA
tatcactcaacataattctcttaaaatcatccaaattacrtcattaaccc

SEQ ID NO: 18691 - DNA, 50 bp, synthetic construct
  source 1..50: mol_type = other DNA
ctcaacataattctcttaaaatcatccaaattacrtcattaacccrtccc

SEQ ID NO: 18692 - DNA, 50 bp, synthetic construct
  source 1..50: mol_type = other DNA
acaactctaaaataaaaatacccaatatccttcaacraataaataccrac

SEQ ID NO: 18693 - DNA, 50 bp, synthetic construct
  source 1..50: mol_type = other DNA
craacaactctaaaataaaaatacccaatatccttcaacraataaatacc

SEQ ID NO: 18694 - DNA, 50 bp, synthetic construct
  source 1..50: mol_type = other DNA
ttaacccacaaaaataaatcttacatccaaaacrtatacrtaaatacccc

SEQ ID NO: 18695 - DNA, 50 bp, synthetic construct
  source 1..50: mol_type = other DNA
crctaaaaaacactaaacatttttactttaaaactactcraaacatttac

SEQ ID NO: 18696 - DNA, 50 bp, synthetic construct
  source 1..50: mol_type = other DNA
attatactcctatatatttaacccacaaaaataaatcttacatccaaaac

SEQ ID NO: 18697 - DNA, 50 bp, synthetic construct
  source 1..50: mol_type = other DNA
aaacaattctcctaccttaaccccacaaataactaaaactatacacttac

SEQ ID NO: 18698 - DNA, 50 bp, synthetic construct
  source 1..50: mol_type = other DNA
cacacaacacrtataatcactcaaaaaaactaaatacctaaaaaataaac

SEQ ID NO: 18699 - DNA, 50 bp, synthetic construct
  source 1..50: mol_type = other DNA
ctctcatttcccrcattcactatataccaaaaaaacatctaaaaacaaac

SEQ ID NO: 18700 - DNA, 50 bp, synthetic construct
  source 1..50: mol_type = other DNA
aataaacctacaacrctaaacaaaacaccataaacacctaacraaaaaac

SEQ ID NO: 18701 - DNA, 50 bp, synthetic construct
  source 1..50: mol_type = other DNA
ccacactaaataaacctacaacrctaaacaaaacaccataaacacctaac

SEQ ID NO: 18702 - DNA, 50 bp, synthetic construct
  source 1..50: mol_type = other DNA
caaatatccataataccctacccaacrctacaaactcacccaatataaac

SEQ ID NO: 18703 - DNA, 50 bp, synthetic construct
  source 1..50: mol_type = other DNA
raaacractccaccatccaataacaactccttaatattcttactatcatc

SEQ ID NO: 18704 - DNA, 50 bp, synthetic construct
  source 1..50: mol_type = other DNA
aaaacrataacaataaaaacatcaaaaaactaccactaaataataaaacc

SEQ ID NO: 18705 - DNA, 50 bp, synthetic construct
  source 1..50: mol_type = other DNA
rataacaataaaaacatcaaaaaactaccactaaataataaaaccrcctc

SEQ ID NO: 18706 - DNA, 50 bp, synthetic construct
  source 1..50: mol_type = other DNA
catcaaaaaactaccactaaataataaaaccrcctcrtcaccaaaaaatc

SEQ ID NO: 18707 - DNA, 50 bp, synthetic construct
  source 1..50: mol_type = other DNA
ccrtataattataacttcaacaaacctaccaataaccaatactacctcac

SEQ ID NO: 18708 - DNA, 50 bp, synthetic construct
  source 1..50: mol_type = other DNA
tcrtaaaacaacactaaccactaacaaatctactaaaaccacaaccacac

SEQ ID NO: 18709 - DNA, 50 bp, synthetic construct
  source 1..50: mol_type = other DNA
aaaatacatattttaacctcatccttcctattaaaaactcaaacratccc

SEQ ID NO: 18710 - DNA, 50 bp, synthetic construct
  source 1..50: mol_type = other DNA
ctaaaaactaataacttcccataacctaaataaatattaataacatcccc

SEQ ID NO: 18711 - DNA, 50 bp, synthetic construct
  source 1..50: mol_type = other DNA
aaaactaataacttcccataacctaaataaatattaataacatccccrac

SEQ ID NO: 18712 - DNA, 50 bp, synthetic construct
  source 1..50: mol_type = other DNA
ctaataacttcccataacctaaataaatattaataacatccccracrtac

SEQ ID NO: 18713 - DNA, 50 bp, synthetic construct
  source 1..50: mol_type = other DNA
aaaataacaaaaaaacrtaaccrcaaccaaaattcaaaaactccaaccac

SEQ ID NO: 18714 - DNA, 50 bp, synthetic construct
  source 1..50: mol_type = other DNA
ttactaacataaaaattaaacatattaaaatattcacttaaaaaacacac

SEQ ID NO: 18715 - DNA, 50 bp, synthetic construct
  source 1..50: mol_type = other DNA
caaatctctttcatatctaacttcacacaaataaaaaaatctaacctccc

SEQ ID NO: 18716 - DNA, 50 bp, synthetic construct
  source 1..50: mol_type = other DNA
attaattttactatacrttatttcacttaaaaatcctaattcccaaaaac

SEQ ID NO: 18717 - DNA, 50 bp, synthetic construct
  source 1..50: mol_type = other DNA
tcactactatcaatacrttcttaaaaatcaaaacttttaaataaaacaac

SEQ ID NO: 18718 - DNA, 50 bp, synthetic construct
  source 1..50: mol_type = other DNA
actatcccaatctaaatataaatatataaataaccctataataaaataac

SEQ ID NO: 18719 - DNA, 50 bp, synthetic construct
  source 1..50: mol_type = other DNA
taaattttctctaaatactacaattcttaccacatcccaaaaatatacac

SEQ ID NO: 18720 - DNA, 50 bp, synthetic construct
  source 1..50: mol_type = other DNA
tcaaatcrtttacrctttcttttttcttactcaaattatcataaactaac

SEQ ID NO: 18721 - DNA, 50 bp, synthetic construct
  source 1..50: mol_type = other DNA
caaattatcataaactaacrtatcttattaatatatacatccaaaaatac

SEQ ID NO: 18722 - DNA, 50 bp, synthetic construct
  source 1..50: mol_type = other DNA
ttattaatatatacatccaaaaatacrttttaaaaaaatctctctttaac

SEQ ID NO: 18723 - DNA, 50 bp, synthetic construct
  source 1..50: mol_type = other DNA
aaaaaaatctctctttaacrctaattttattactatatcraaacraatcc

SEQ ID NO: 18724 - DNA, 50 bp, synthetic construct
  source 1..50: mol_type = other DNA
aactatacrcatacaaaataaaaacttaatcaacaaataaaaccrtaaac

SEQ ID NO: 18725 - DNA, 50 bp, synthetic construct
  source 1..50: mol_type = other DNA
aaacacaaactcttccttcctaacatcaaatcaactataaacctttaaac

SEQ ID NO: 18726 - DNA, 50 bp, synthetic construct
  source 1..50: mol_type = other DNA
ctctataaattttatttatcrtattaactcraacctacaaaacccatacc

SEQ ID NO: 18727 - DNA, 50 bp, synthetic construct
  source 1..50: mol_type = other DNA
atcttcttaataacacttacctttatctccracataaattttataaattc

SEQ ID NO: 18728 - DNA, 50 bp, synthetic construct
  source 1..50: mol_type = other DNA
acaactctacacatttataaaaatcacrcactctataaattttatttatc

SEQ ID NO: 18729 - DNA, 50 bp, synthetic construct
  source 1..50: mol_type = other DNA
ctaatatactataacrcraatacacaactctacacatttataaaaatcac

SEQ ID NO: 18730 - DNA, 50 bp, synthetic construct
  source 1..50: mol_type = other DNA
taaaacctacaaaatacrtaatccttacaaatatataaaactatacatcc

SEQ ID NO: 18731 - DNA, 50 bp, synthetic construct
  source 1..50: mol_type = other DNA
aaacctacaaaatacrtaatccttacaaatatataaaactatacatccrc

SEQ ID NO: 18732 - DNA, 50 bp, synthetic construct
  source 1..50: mol_type = other DNA
aacacaccaaaataaaaacctcrcaatacratttaaatcctaaaatatac

SEQ ID NO: 18733 - DNA, 50 bp, synthetic construct
  source 1..50: mol_type = other DNA
aaaactattatttaacraacrcctacctacccctccctaatataaaacac

SEQ ID NO: 18734 - DNA, 50 bp, synthetic construct
  source 1..50: mol_type = other DNA
tatatatacctatatataccrtacctactctaacrcatctccttacacac

SEQ ID NO: 18735 - DNA, 50 bp, synthetic construct
  source 1..50: mol_type = other DNA
caacctatatataccrtatatatacctatatataccrtacctactctaac

SEQ ID NO: 18736 - DNA, 50 bp, synthetic construct
  source 1..50: mol_type = other DNA
cracaaaaaaaccctcccacrtatacaaaaaaatacrttaaaacaaacac

SEQ ID NO: 18737 - DNA, 50 bp, synthetic construct
  source 1..50: mol_type = other DNA
ctataaccctaaaaattacaactatactcaaccaccaacctatatatacc

SEQ ID NO: 18738 - DNA, 50 bp, synthetic construct
  source 1..50: mol_type = other DNA
tattttcttcattttccctaaataaattctttactataactaattatatc

SEQ ID NO: 18739 - DNA, 50 bp, synthetic construct
  source 1..50: mol_type = other DNA
atcaactcctaaccttacaaaacctcaaacaccaaaaaaaactcaacctc

SEQ ID NO: 18740 - DNA, 50 bp, synthetic construct
  source 1..50: mol_type = other DNA
acatattattatttattttataaatcaaccccaaccattatccaactcac

SEQ ID NO: 18741 - DNA, 50 bp, synthetic construct
  source 1..50: mol_type = other DNA
aacacctccaacaaaaaataaaaacctacaaaaactcacaaataacccac

SEQ ID NO: 18742 - DNA, 50 bp, synthetic construct
  source 1..50: mol_type = other DNA
cacctaatcctaaaaaccccaacatctaacttcaatatcratatccttcc

SEQ ID NO: 18743 - DNA, 50 bp, synthetic construct
  source 1..50: mol_type = other DNA
aaaaatataaacacctaatcctaaaaaccccaacatctaacttcaatatc

SEQ ID NO: 18744 - DNA, 50 bp, synthetic construct
  source 1..50: mol_type = other DNA
cacccccactacacraataaaacaatcaacacaaaaaaataaactaactc

SEQ ID NO: 18745 - DNA, 50 bp, synthetic construct
  source 1..50: mol_type = other DNA
aaaacccrataaatacattccaacaactatccccacactctaataaactc

SEQ ID NO: 18746 - DNA, 50 bp, synthetic construct
  source 1..50: mol_type = other DNA
aaaaaccatacaatttcctttccctacataaattcacaaaatttaaatac

SEQ ID NO: 18747 - DNA, 50 bp, synthetic construct
  source 1..50: mol_type = other DNA
ctaaaaactaataccrttaaaaatacataattaactcctaaacctaaaac

SEQ ID NO: 18748 - DNA, 50 bp, synthetic construct
  source 1..50: mol_type = other DNA
ttccccccratctctttatttaccaaaaaactacatacacaaaaataacc

SEQ ID NO: 18749 - DNA, 50 bp, synthetic construct
  source 1..50: mol_type = other DNA
taaaaatataaaaactatctatttcaattttaccraaaccccaaatttac

SEQ ID NO: 18750 - DNA, 50 bp, synthetic construct
  source 1..50: mol_type = other DNA
aatataaaaactatctatttcaattttaccraaaccccaaatttacracc

SEQ ID NO: 18751 - DNA, 50 bp, synthetic construct
  source 1..50: mol_type = other DNA
aaaaacaaaataataacaaaactaaacccataccaaatcccaaccaatcc

SEQ ID NO: 18752 - DNA, 50 bp, synthetic construct
  source 1..50: mol_type = other DNA
cttttctcttttacacaaatactacactaaaaactcraaaaaattaaacc

SEQ ID NO: 18753 - DNA, 50 bp, synthetic construct
  source 1..50: mol_type = other DNA
cctaaaaaaatctttccaacctaaaaaataacaacctaacacrtttcacc

SEQ ID NO: 18754 - DNA, 50 bp, synthetic construct
  source 1..50: mol_type = other DNA
aaatcraacaaccraataaaaatatacactttcatcrtctattcataccc

SEQ ID NO: 18755 - DNA, 50 bp, synthetic construct
  source 1..50: mol_type = other DNA
aaaacctaacacctaaatcraacaaccraataaaaatatacactttcatc

SEQ ID NO: 18756 - DNA, 50 bp, synthetic construct
  source 1..50: mol_type = other DNA
attttcccaaaacraatataaataaacrataaaaatacacactcttaccc

SEQ ID NO: 18757 - DNA, 50 bp, synthetic construct
  source 1..50: mol_type = other DNA
aaaacraatataaataaacrataaaaatacacactcttacccractaccc

SEQ ID NO: 18758 - DNA, 50 bp, synthetic construct
  source 1..50: mol_type = other DNA
cctctacaaaaaaactaaacaaaactacaataactcacctccctacactc

SEQ ID NO: 18759 - DNA, 50 bp, synthetic construct
  source 1..50: mol_type = other DNA
aaataaaacraaaactaacrctattacaatccattcttcattccccatac

SEQ ID NO: 18760 - DNA, 50 bp, synthetic construct
  source 1..50: mol_type = other DNA
taaccaatttcaacataataactttttctctacctacrtatctaaaacac

SEQ ID NO: 18761 - DNA, 50 bp, synthetic construct
  source 1..50: mol_type = other DNA
ctattcaatcccttaaccaatttcaacataataactttttctctacctac

SEQ ID NO: 18762 - DNA, 50 bp, synthetic construct
  source 1..50: mol_type = other DNA
ttatcttccttaacctatattactctacttccctacaatatctacacctc

SEQ ID NO: 18763 - DNA, 50 bp, synthetic construct
  source 1..50: mol_type = other DNA
aaaacractataaaataattaacratatccctaacaacraattccaaaac

SEQ ID NO: 18764 - DNA, 50 bp, synthetic construct
  source 1..50: mol_type = other DNA
acaaccaaaaaatcacacctaaaataaaaacrtaaacracaataccaacc

SEQ ID NO: 18765 - DNA, 50 bp, synthetic construct
  source 1..50: mol_type = other DNA
taactaaaaacrcaaaaccaactaaaatcccaaataactaaaaacaccrc

SEQ ID NO: 18766 - DNA, 50 bp, synthetic construct
  source 1..50: mol_type = other DNA
attaactaaaaacrcaaaaccaactaaaatcccaaataactaaaaacacc

SEQ ID NO: 18767 - DNA, 50 bp, synthetic construct
  source 1..50: mol_type = other DNA
cactaactaactaattatattaaaaacraacaccccrattaactaaaaac

SEQ ID NO: 18768 - DNA, 50 bp, synthetic construct
  source 1..50: mol_type = other DNA
ctccatcctcccacrataaaaatcaaaacaaactctttactaataaactc

SEQ ID NO: 18769 - DNA, 50 bp, synthetic construct
  source 1..50: mol_type = other DNA
ccatcctcccacrataaaaatcaaaacaaactctttactaataaactcrc

SEQ ID NO: 18770 - DNA, 50 bp, synthetic construct
  source 1..50: mol_type = other DNA
cctcccacrataaaaatcaaaacaaactctttactaataaactcrcrttc

SEQ ID NO: 18771 - DNA, 50 bp, synthetic construct
  source 1..50: mol_type = other DNA
rcccaacctaataacacaactttaactttcttctattaacttctttatcc

SEQ ID NO: 18772 - DNA, 50 bp, synthetic construct
  source 1..50: mol_type = other DNA
aataaacrataccaattacctataaactcraaaaaatccaaataccaaac

SEQ ID NO: 18773 - DNA, 50 bp, synthetic construct
  source 1..50: mol_type = other DNA
aaacrataccaattacctataaactcraaaaaatccaaataccaaacrac

SEQ ID NO: 18774 - DNA, 50 bp, synthetic construct
  source 1..50: mol_type = other DNA
ttcaaaccaatcaaaataaacccttaaacttccctaaacctctaataccc

SEQ ID NO: 18775 - DNA, 50 bp, synthetic construct
  source 1..50: mol_type = other DNA
aaaaatccaatcatcctaaaaccatcttccttcraaacaaaacaaaaccc

SEQ ID NO: 18776 - DNA, 50 bp, synthetic construct
  source 1..50: mol_type = other DNA
ctacacraaaaaaattcaaaaatccaatcatcctaaaaccatcttccttc

SEQ ID NO: 18777 - DNA, 50 bp, synthetic construct
  source 1..50: mol_type = other DNA
actaaatttctaaatttcctccrtacaaattaaaaaaacttaaaaaaccc

SEQ ID NO: 18778 - DNA, 50 bp, synthetic construct
  source 1..50: mol_type = other DNA
aaataaaataaaacacctaaataaaacraacaaaaactcaaaatctacac

SEQ ID NO: 18779 - DNA, 50 bp, synthetic construct
  source 1..50: mol_type = other DNA
ttatattttcraaaaataaaatatacacccctataaactcatccatcctc

SEQ ID NO: 18780 - DNA, 50 bp, synthetic construct
  source 1..50: mol_type = other DNA
ttcttttctatactacctatatatacaaccrctaaactccttatattttc

SEQ ID NO: 18781 - DNA, 50 bp, synthetic construct
  source 1..50: mol_type = other DNA
rccctcraattaccccattattcttttctatactacctatatatacaacc

SEQ ID NO: 18782 - DNA, 50 bp, synthetic construct
  source 1..50: mol_type = other DNA
aataactaaaaccaaataatataaacaaaaaataccctcaaaacrccctc

SEQ ID NO: 18783 - DNA, 50 bp, synthetic construct
  source 1..50: mol_type = other DNA
rtaaaaaataactaaaaccaaataatataaacaaaaaataccctcaaaac

SEQ ID NO: 18784 - DNA, 50 bp, synthetic construct
  source 1..50: mol_type = other DNA
cttcaatttatatctttatcactaaaacaactctataactaatatacttc

SEQ ID NO: 18785 - DNA, 50 bp, synthetic construct
  source 1..50: mol_type = other DNA
ctcttataaatctaaacaacrtcacccttctattctcctaaaataaaaac

SEQ ID NO: 18786 - DNA, 50 bp, synthetic construct
  source 1..50: mol_type = other DNA
cctaactacaccccacaactaaaccccraactcttataaatctaaacaac

SEQ ID NO: 18787 - DNA, 50 bp, synthetic construct
  source 1..50: mol_type = other DNA
aaaaatcaaacataacattaaatcctaactacaccccacaactaaacccc

SEQ ID NO: 18788 - DNA, 50 bp, synthetic construct
  source 1..50: mol_type = other DNA
aacaacaataaacaaaaacaactcacctctttacaaaaaacraataaaac

SEQ ID NO: 18789 - DNA, 50 bp, synthetic construct
  source 1..50: mol_type = other DNA
craaacttctactttaattaaacttaataacacacactcaccataaaaac

SEQ ID NO: 18790 - DNA, 50 bp, synthetic construct
  source 1..50: mol_type = other DNA
aaccaaaaacattaattaccaattataacttaacctacctcccaaaacac

SEQ ID NO: 18791 - DNA, 50 bp, synthetic construct
  source 1..50: mol_type = other DNA
aaattaaaccacaattaacaatcaatacccttaatcacattaataaaaac

SEQ ID NO: 18792 - DNA, 50 bp, synthetic construct
  source 1..50: mol_type = other DNA
atcataactcctccctcttaaaaaatccctacaaaaaacaactactaaac

SEQ ID NO: 18793 - DNA, 50 bp, synthetic construct
  source 1..50: mol_type = other DNA
aatataaaaaaaactccrccrtataaaaaacttaacctccraaatcctac

SEQ ID NO: 18794 - DNA, 50 bp, synthetic construct
  source 1..50: mol_type = other DNA
ttttaaccttaaacaaatcatttttcrctaccctctacccctatatcatc

SEQ ID NO: 18795 - DNA, 50 bp, synthetic construct
  source 1..50: mol_type = other DNA
tatcatcrataacttctctacccctcctctaaacataaaaaacctaaaac

SEQ ID NO: 18796 - DNA, 50 bp, synthetic construct
  source 1..50: mol_type = other DNA
aaaaaaacaacccacacttcaaaaaaaatactacaactacacatttattc

SEQ ID NO: 18797 - DNA, 50 bp, synthetic construct
  source 1..50: mol_type = other DNA
ctctactccttcccactaaaacaaaaaacttttaatctaaaataaaaaac

SEQ ID NO: 18798 - DNA, 50 bp, synthetic construct
  source 1..50: mol_type = other DNA
aaaacacatattaaatacacacttacacaaaaaattattacaaatatctc

SEQ ID NO: 18799 - DNA, 50 bp, synthetic construct
  source 1..50: mol_type = other DNA
accataaaaatattcactcaaaccaaaaaacacttcrcaaaaataaaacc

SEQ ID NO: 18800 - DNA, 50 bp, synthetic construct
  source 1..50: mol_type = other DNA
ctctcaactccaacaccataaaaatattcactcaaaccaaaaaacacttc

SEQ ID NO: 18801 - DNA, 50 bp, synthetic construct
  source 1..50: mol_type = other DNA
attatcacataactcaaacacttaacaaatccaataacaacctataaaac

SEQ ID NO: 18802 - DNA, 50 bp, synthetic construct
  source 1..50: mol_type = other DNA
accattaaacctatcaaatacctaaatcatataataataaactacattac

SEQ ID NO: 18803 - DNA, 50 bp, synthetic construct
  source 1..50: mol_type = other DNA
catacctcttactttcaacrtactctataaaaaccaacaaataaacactc

SEQ ID NO: 18804 - DNA, 50 bp, synthetic construct
  source 1..50: mol_type = other DNA
acaaaaaataccaaaaaacraatacccacttactaatcttcacaaaacac

SEQ ID NO: 18805 - DNA, 50 bp, synthetic construct
  source 1..50: mol_type = other DNA
tccacaaaaaacaattttactaatctaaacaattttaaaatcaactaacc

SEQ ID NO: 18806 - DNA, 50 bp, synthetic construct
  source 1..50: mol_type = other DNA
attaaatataatattataacaatttctccaatcaaataccttatactaac

SEQ ID NO: 18807 - DNA, 50 bp, synthetic construct
  source 1..50: mol_type = other DNA
acctccaaacttatcaaaatatacaacttcaatatatacaatttattatc

SEQ ID NO: 18808 - DNA, 50 bp, synthetic construct
  source 1..50: mol_type = other DNA
aaactaatccaacataataatcactcctaaccttataatctacccrcctc

SEQ ID NO: 18809 - DNA, 50 bp, synthetic construct
  source 1..50: mol_type = other DNA
taatcaaactaatccaacataataatcactcctaaccttataatctaccc

SEQ ID NO: 18810 - DNA, 50 bp, synthetic construct
  source 1..50: mol_type = other DNA
tcaaaaataatcaccatattaaatcaacctaaccaacataataaaacccc

SEQ ID NO: 18811 - DNA, 50 bp, synthetic construct
  source 1..50: mol_type = other DNA
aaaccccrtctctattaaaaacacaaaaattactaaacrtaataacratc

SEQ ID NO: 18812 - DNA, 50 bp, synthetic construct
  source 1..50: mol_type = other DNA
accaactataaaatcctataacactactaaccaactaaaaaaaaccaacc

SEQ ID NO: 18813 - DNA, 50 bp, synthetic construct
  source 1..50: mol_type = other DNA
raaaccraaatcaaaaacaattctaaaaaacccrttttaaccacraaaac

SEQ ID NO: 18814 - DNA, 50 bp, synthetic construct
  source 1..50: mol_type = other DNA
acctaactaaaatctccraaaccraaatcaaaaacaattctaaaaaaccc

SEQ ID NO: 18815 - DNA, 50 bp, synthetic construct
  source 1..50: mol_type = other DNA
ttctcaaatctaacrataacattaaacaaaacraaacatctccaaacctc

SEQ ID NO: 18816 - DNA, 50 bp, synthetic construct
  source 1..50: mol_type = other DNA
atactacaaaaaactcacaataacttataaaaaccaacrattaaattttc

SEQ ID NO: 18817 - DNA, 50 bp, synthetic construct
  source 1..50: mol_type = other DNA
ataataactatacttaaaaaccaatttacaaaaatcccraaaatttaacc

SEQ ID NO: 18818 - DNA, 50 bp, synthetic construct
  source 1..50: mol_type = other DNA
tttaaccrctaactctcacaaaccactataaaccttctataacacatcac

SEQ ID NO: 18819 - DNA, 50 bp, synthetic construct
  source 1..50: mol_type = other DNA
aaaccactataaaccttctataacacatcacraactcctaatcattaccc

SEQ ID NO: 18820 - DNA, 50 bp, synthetic construct
  source 1..50: mol_type = other DNA
caacccataataccctcttataacaacaaaaatactacatttaaattacc

SEQ ID NO: 18821 - DNA, 50 bp, synthetic construct
  source 1..50: mol_type = other DNA
cataaacactaaaccattcctacttccaaataactttatcctctaaaccc

SEQ ID NO: 18822 - DNA, 50 bp, synthetic construct
  source 1..50: mol_type = other DNA
aataacaccttaaaaatcaactaaccccttaaaaaaactaataaactacc

SEQ ID NO: 18823 - DNA, 50 bp, synthetic construct
  source 1..50: mol_type = other DNA
acacaaacaaaaatataacaacratccctaccctcaaaaaaacrctctac

SEQ ID NO: 18824 - DNA, 50 bp, synthetic construct
  source 1..50: mol_type = other DNA
tctatataccaaaccctactaataaaaaacacaaacaaaaatataacaac

SEQ ID NO: 18825 - DNA, 50 bp, synthetic construct
  source 1..50: mol_type = other DNA
taataactaaccaaataaaattcaacccaaattcaactcaacttaaaaac

SEQ ID NO: 18826 - DNA, 50 bp, synthetic construct
  source 1..50: mol_type = other DNA
tttaaccaattaccaaaccaaaaaataaacccaaacctaaattaactacc

SEQ ID NO: 18827 - DNA, 50 bp, synthetic construct
  source 1..50: mol_type = other DNA
ctaattcaatacttttccaacacccaaaatcataatcttcaaaaaaaaac

SEQ ID NO: 18828 - DNA, 50 bp, synthetic construct
  source 1..50: mol_type = other DNA
taaataaattaactaaaccacacaactcaaaataataaaacaaaaatcac

SEQ ID NO: 18829 - DNA, 50 bp, synthetic construct
  source 1..50: mol_type = other DNA
aaaccratcctattaacacaaatcctaattatcaaactaaccaaacccac

SEQ ID NO: 18830 - DNA, 50 bp, synthetic construct
  source 1..50: mol_type = other DNA
aatccctatcaacaacacacaatatatacaatatatatcttatataaaac

SEQ ID NO: 18831 - DNA, 50 bp, synthetic construct
  source 1..50: mol_type = other DNA
ctttccctaaaaatctcccattaactatcatctttctctaaaaaacctcc

SEQ ID NO: 18832 - DNA, 50 bp, synthetic construct
  source 1..50: mol_type = other DNA
aataacaaaatacccctaaaacaataaaaataactaaaactcttacaacc

SEQ ID NO: 18833 - DNA, 50 bp, synthetic construct
  source 1..50: mol_type = other DNA
aatcaccctattattcatccccaaattaatctcccctaaaaacacctatc

SEQ ID NO: 18834 - DNA, 50 bp, synthetic construct
  source 1..50: mol_type = other DNA
atctcctataataaccataaaaaatctataaaatcacaaaaacaaaacac

SEQ ID NO: 18835 - DNA, 50 bp, synthetic construct
  source 1..50: mol_type = other DNA
aaatctataaaatcacaaaaacaaaacacrcaacaaaacctccctaaccc

SEQ ID NO: 18836 - DNA, 50 bp, synthetic construct
  source 1..50: mol_type = other DNA
aaaacctccctaacccraaaatactcaaaactaaaatcccaatacaaaac

SEQ ID NO: 18837 - DNA, 50 bp, synthetic construct
  source 1..50: mol_type = other DNA
aaaaaaatatttcaaaataaaaaaaccrtctctccaaacatctatctaac

SEQ ID NO: 18838 - DNA, 50 bp, synthetic construct
  source 1..50: mol_type = other DNA
ttctttttattctaaatcaaactataaacaaaaatactaccacaaaaacc

SEQ ID NO: 18839 - DNA, 50 bp, synthetic construct
  source 1..50: mol_type = other DNA
aaccacactaatactcaactaaattacaaactctacctaatttcattatc

SEQ ID NO: 18840 - DNA, 50 bp, synthetic construct
  source 1..50: mol_type = other DNA
aatttcccraaaattttaaaaataacacccractacatacrtaacatctc

SEQ ID NO: 18841 - DNA, 50 bp, synthetic construct
  source 1..50: mol_type = other DNA
acttcaaacraaacttttaaaaataattcctttaccctttacttaataac

SEQ ID NO: 18842 - DNA, 50 bp, synthetic construct
  source 1..50: mol_type = other DNA
ccctttacttaataacrtaataaactaatctttctctaaaaaaataaacc

SEQ ID NO: 18843 - DNA, 50 bp, synthetic construct
  source 1..50: mol_type = other DNA
taccaataaaaaaacctaccccataataaaaaatataaccraataaactc

SEQ ID NO: 18844 - DNA, 50 bp, synthetic construct
  source 1..50: mol_type = other DNA
taacatcctataccaataaaaaaacctaccccataataaaaaatataacc

SEQ ID NO: 18845 - DNA, 50 bp, synthetic construct
  source 1..50: mol_type = other DNA
aatacctaactaccaaacaaataaaaacctataaatacccccraaattcc

SEQ ID NO: 18846 - DNA, 50 bp, synthetic construct
  source 1..50: mol_type = other DNA
ttcatcataatacctaactaccaaacaaataaaaacctataaataccccc

SEQ ID NO: 18847 - DNA, 50 bp, synthetic construct
  source 1..50: mol_type = other DNA
ccaaaaatcaaaaaaataaattcatacctactaatataaaaactactcac

SEQ ID NO: 18848 - DNA, 50 bp, synthetic construct
  source 1..50: mol_type = other DNA
aaatataaatccatcttcctaacccttaaaaccaaccraaacaataaaac

SEQ ID NO: 18849 - DNA, 50 bp, synthetic construct
  source 1..50: mol_type = other DNA
caaccraaacaataaaacraaaatctttctctacaaaaaacccaattacc

SEQ ID NO: 18850 - DNA, 50 bp, synthetic construct
  source 1..50: mol_type = other DNA
aaatctttctctacaaaaaacccaattaccrtcaacctctttttaacatc

SEQ ID NO: 18851 - DNA, 50 bp, synthetic construct
  source 1..50: mol_type = other DNA
atctttctctacaaaaaacccaattaccrtcaacctctttttaacatcrc

SEQ ID NO: 18852 - DNA, 50 bp, synthetic construct
  source 1..50: mol_type = other DNA
tactcaacrcctaacaaaaaactaacaaacaacaaataataaaattcatc

SEQ ID NO: 18853 - DNA, 50 bp, synthetic construct
  source 1..50: mol_type = other DNA
aataactcctacrtaaacaaatcrtataatctactccaactatactcaac

SEQ ID NO: 18854 - DNA, 50 bp, synthetic construct
  source 1..50: mol_type = other DNA
cctcraaactacaaaacaaacatcrataataactcctacrtaaacaaatc

SEQ ID NO: 18855 - DNA, 50 bp, synthetic construct
  source 1..50: mol_type = other DNA
aaacacaactaaaacaaatcacacracttatttacrcaaaaatcactacc

SEQ ID NO: 18856 - DNA, 50 bp, synthetic construct
  source 1..50: mol_type = other DNA
tatttacrcaaaaatcactaccratatttactctacaaccccraaaaaac

SEQ ID NO: 18857 - DNA, 50 bp, synthetic construct
  source 1..50: mol_type = other DNA
taaaaaaacaaaacccaaaccatacaactatcaaaaaacrcacacaaaac

SEQ ID NO: 18858 - DNA, 50 bp, synthetic construct
  source 1..50: mol_type = other DNA
acctccatttcctatcaataataacaaatatcatctttattttatacacc

SEQ ID NO: 18859 - DNA, 50 bp, synthetic construct
  source 1..50: mol_type = other DNA
ttcctccaaattaaacctactatctacctatactccctaatctacttaac

SEQ ID NO: 18860 - DNA, 50 bp, synthetic construct
  source 1..50: mol_type = other DNA
aataaaaaatatctaaactaaatctctccccaccccrtaatcaaaacacc

SEQ ID NO: 18861 - DNA, 50 bp, synthetic construct
  source 1..50: mol_type = other DNA
ccaatctaaacaccttctatctttacccttcttcctttttctatttacac

SEQ ID NO: 18862 - DNA, 50 bp, synthetic construct
  source 1..50: mol_type = other DNA
tttttctatttacacrctattactttctacttcttttattaaccaaatac

SEQ ID NO: 18863 - DNA, 50 bp, synthetic construct
  source 1..50: mol_type = other DNA
tcctcctcctcctcctcatatctacctcraactatttaatactaaaaaac

SEQ ID NO: 18864 - DNA, 50 bp, synthetic construct
  source 1..50: mol_type = other DNA
catatctacctcraactatttaatactaaaaaacrtttcttctccrtctc

SEQ ID NO: 18865 - DNA, 50 bp, synthetic construct
  source 1..50: mol_type = other DNA
craaattaaaactacattcctatcccraacaactccraaatctaaaaaac

SEQ ID NO: 18866 - DNA, 50 bp, synthetic construct
  source 1..50: mol_type = other DNA
caaaaatctataaacaccaaaacrtacctaacttatcaattaaatacacc

SEQ ID NO: 18867 - DNA, 50 bp, synthetic construct
  source 1..50: mol_type = other DNA
caaaaacaaaacctcattccacctacattctccratcattacacattctc

SEQ ID NO: 18868 - DNA, 50 bp, synthetic construct
  source 1..50: mol_type = other DNA
cccaaacaatctttaaacttcrcctcttaccccraaaatatataataatc

SEQ ID NO: 18869 - DNA, 50 bp, synthetic construct
  source 1..50: mol_type = other DNA
aataaaattctacccctacttacaaaaatttaatttctaaaaaaacaaac

SEQ ID NO: 18870 - DNA, 50 bp, synthetic construct
  source 1..50: mol_type = other DNA
tacttacaaaaatttaatttctaaaaaaacaaacrtaaaaacccaaaccc

SEQ ID NO: 18871 - DNA, 50 bp, synthetic construct
  source 1..50: mol_type = other DNA
tttctaaaaaaacaaacrtaaaaacccaaacccraattaatttaaaaaac

SEQ ID NO: 18872 - DNA, 50 bp, synthetic construct
  source 1..50: mol_type = other DNA
acrcactaaaacrataacttcaaccctaattaaataaaaatcaataaaac

SEQ ID NO: 18873 - DNA, 50 bp, synthetic construct
  source 1..50: mol_type = other DNA
cctacaccctcttcctcaaaactacaactaaactacrataataacatcac

SEQ ID NO: 18874 - DNA, 50 bp, synthetic construct
  source 1..50: mol_type = other DNA
tcccaatatatttaaacctccataaatcaaattctcatttacatataacc

SEQ ID NO: 18875 - DNA, 50 bp, synthetic construct
  source 1..50: mol_type = other DNA
ttctcatttacatataaccraaaacatttctaaaaaatacaaacacactc

SEQ ID NO: 18876 - DNA, 50 bp, synthetic construct
  source 1..50: mol_type = other DNA
caaatatcraaaccacccacctaaaaaactaaacacactaattatttccc

SEQ ID NO: 18877 - DNA, 50 bp, synthetic construct
  source 1..50: mol_type = other DNA
aaaaactcraaaaacaatcaatatacccaaccctccaaataaataattcc

SEQ ID NO: 18878 - DNA, 50 bp, synthetic construct
  source 1..50: mol_type = other DNA
ataattccratatctattcaaatttaaaaacctttatactcaaaacctcc

SEQ ID NO: 18879 - DNA, 50 bp, synthetic construct
  source 1..50: mol_type = other DNA
caaatcttcctcatccttcttccttctaccatcttttaaaaataatcacc

SEQ ID NO: 18880 - DNA, 50 bp, synthetic construct
  source 1..50: mol_type = other DNA
tcaaaatataacccrattacaaaaattcataaaaaaaccaaaaattaccc

SEQ ID NO: 18881 - DNA, 50 bp, synthetic construct
  source 1..50: mol_type = other DNA
tactccaaaaaaattcttaacatatcccaataatattcaaaatataaccc

SEQ ID NO: 18882 - DNA, 50 bp, synthetic construct
  source 1..50: mol_type = other DNA
ttaaattaaaactatattcccaaacctatcaacactataatataaatcac

SEQ ID NO: 18883 - DNA, 50 bp, synthetic construct
  source 1..50: mol_type = other DNA
atttaaaattacttcraatcttttctccaaatctaaaaaccaaaaaaacc

SEQ ID NO: 18884 - DNA, 50 bp, synthetic construct
  source 1..50: mol_type = other DNA
aattaaatttactaaaccatccraaattaaacaacraactcrccacaacc

SEQ ID NO: 18885 - DNA, 50 bp, synthetic construct
  source 1..50: mol_type = other DNA
aaaatcratatcaatatcaaataactcaaaataattctatattatccttc

SEQ ID NO: 18886 - DNA, 50 bp, synthetic construct
  source 1..50: mol_type = other DNA
ttccrcraaaaacaacacaaaaccactctaaattatttaacactaacatc

SEQ ID NO: 18887 - DNA, 50 bp, synthetic construct
  source 1..50: mol_type = other DNA
aaacattaaaactcrttactatcttatttctattccatattcaaataacc

SEQ ID NO: 18888 - DNA, 50 bp, synthetic construct
  source 1..50: mol_type = other DNA
aaataaaaacaaatcaaattcatatattctaatctcrctactctaaattc

SEQ ID NO: 18889 - DNA, 50 bp, synthetic construct
  source 1..50: mol_type = other DNA
aaacaccttataactaccccaaccaaaaccttaaatactcctaaaaccac

SEQ ID NO: 18890 - DNA, 50 bp, synthetic construct
  source 1..50: mol_type = other DNA
aactacaactaaaaaaactacttacraaaataccaaaacraccaaacccc

SEQ ID NO: 18891 - DNA, 50 bp, synthetic construct
  source 1..50: mol_type = other DNA
acaccttccraaactacaactaaaaaaactacttacraaaataccaaaac

SEQ ID NO: 18892 - DNA, 50 bp, synthetic construct
  source 1..50: mol_type = other DNA
aatacaaaaaaccacaacctctaaaaaatctacttcttacttctctaacc

SEQ ID NO: 18893 - DNA, 50 bp, synthetic construct
  source 1..50: mol_type = other DNA
aacttccaaaatctaatcrccaaaaatcaatatctcaaacaaacaatcac

SEQ ID NO: 18894 - DNA, 50 bp, synthetic construct
  source 1..50: mol_type = other DNA
taaaattaatctactatcrtaactatctacttaaaatactaacccctaac

SEQ ID NO: 18895 - DNA, 50 bp, synthetic construct
  source 1..50: mol_type = other DNA
cccracaaccacaacactataacactaaaaaccaactttccctaaaatcc

SEQ ID NO: 18896 - DNA, 50 bp, synthetic construct
  source 1..50: mol_type = other DNA
aacraacttcaaaaaaaactaatcctcaataccacaatactataactatc

SEQ ID NO: 18897 - DNA, 50 bp, synthetic construct
  source 1..50: mol_type = other DNA
aacttcaaaaaaaactaatcctcaataccacaatactataactatcraac

SEQ ID NO: 18898 - DNA, 50 bp, synthetic construct
  source 1..50: mol_type = other DNA
tcaataccacaatactataactatcraacracaaacactaactcacaacc

SEQ ID NO: 18899 - DNA, 50 bp, synthetic construct
  source 1..50: mol_type = other DNA
atataaactaaatatcaactctttaatcctaaatacacctaaaacctaac

SEQ ID NO: 18900 - DNA, 50 bp, synthetic construct
  source 1..50: mol_type = other DNA
acctaaaacctaacrtcrtaaaaacaaaaacaaatccctatactaaaaac

SEQ ID NO: 18901 - DNA, 50 bp, synthetic construct
  source 1..50: mol_type = other DNA
ccctacrctctaaaaacctaaaattatatttccracaaaaaatattttcc

SEQ ID NO: 18902 - DNA, 50 bp, synthetic construct
  source 1..50: mol_type = other DNA
raaatcctcaaaaaatctatatcccacactaaaaactaaaaacratcccc

SEQ ID NO: 18903 - DNA, 50 bp, synthetic construct
  source 1..50: mol_type = other DNA
taaatacaattcctctactacaaccctaaactaaacaaacaaaacacttc

SEQ ID NO: 18904 - DNA, 50 bp, synthetic construct
  source 1..50: mol_type = other DNA
aaacaaacaaaacacttcrctaacctttcctaacctcatacttatcactc

SEQ ID NO: 18905 - DNA, 50 bp, synthetic construct
  source 1..50: mol_type = other DNA
aaactatctccrattccactttctaaaaaactaataacttaaataaaatc

SEQ ID NO: 18906 - DNA, 50 bp, synthetic construct
  source 1..50: mol_type = other DNA
ctacaatctaaacataaaatactacctaataaaactcacraataaattcc

SEQ ID NO: 18907 - DNA, 50 bp, synthetic construct
  source 1..50: mol_type = other DNA
aaatactacctaataaaactcacraataaattccraacaaaacaaaaaac

SEQ ID NO: 18908 - DNA, 50 bp, synthetic construct
  source 1..50: mol_type = other DNA
aaacractatcactaaactccaaaatataaataacaatacctaacttccc

SEQ ID NO: 18909 - DNA, 50 bp, synthetic construct
  source 1..50: mol_type = other DNA
ctaaaacacataaaataaacacactaaaaataaatacctaaaataaacac

SEQ ID NO: 18910 - DNA, 50 bp, synthetic construct
  source 1..50: mol_type = other DNA
aaacacrtaaaataaacacrtaaatataaataatcacctaaaatacacac

SEQ ID NO: 18911 - DNA, 50 bp, synthetic construct
  source 1..50: mol_type = other DNA
ataaaccctacacattaatccaacccaacctaaaaatttcctaacatctc

SEQ ID NO: 18912 - DNA, 50 bp, synthetic construct
  source 1..50: mol_type = other DNA
aatccaacccaacctaaaaatttcctaacatctcrtcaacaactaacatc

SEQ ID NO: 18913 - DNA, 50 bp, synthetic construct
  source 1..50: mol_type = other DNA
accaacctaaaattactccrtaacatatatttacactacaatcataaacc

SEQ ID NO: 18914 - DNA, 50 bp, synthetic construct
  source 1..50: mol_type = other DNA
aaaacccaaatcacrttctactaaatataaaaaacatacccraataaccc

SEQ ID NO: 18915 - DNA, 50 bp, synthetic construct
  source 1..50: mol_type = other DNA
acaaaaactaaaacccaaatcacrttctactaaatataaaaaacataccc

SEQ ID NO: 18916 - DNA, 50 bp, synthetic construct
  source 1..50: mol_type = other DNA
raaaattaaattaacttccttttacctactacaaaacaaatacaaaaaac

SEQ ID NO: 18917 - DNA, 50 bp, synthetic construct
  source 1..50: mol_type = other DNA
aatccaactaaactttcrcaaaccraacacttttcctatctatcaataac

SEQ ID NO: 18918 - DNA, 50 bp, synthetic construct
  source 1..50: mol_type = other DNA
aaaacacaaaaaattaatatcccraaaatccaactaaactttcrcaaacc

SEQ ID NO: 18919 - DNA, 50 bp, synthetic construct
  source 1..50: mol_type = other DNA
aatttacaccaactcrcracttataacaatcrtacaatcaaatcaaaaac

SEQ ID NO: 18920 - DNA, 50 bp, synthetic construct
  source 1..50: mol_type = other DNA
tcacraatattatcaaaaaacaacctaacccatatccttacctaaactac

SEQ ID NO: 18921 - DNA, 50 bp, synthetic construct
  source 1..50: mol_type = other DNA
acaactcctttaaaaccataaaaccccaatactctacattcctaacacrc

SEQ ID NO: 18922 - DNA, 50 bp, synthetic construct
  source 1..50: mol_type = other DNA
atacaactcctttaaaaccataaaaccccaatactctacattcctaacac

SEQ ID NO: 18923 - DNA, 50 bp, synthetic construct
  source 1..50: mol_type = other DNA
actacattaataaaatacactttaaacaacttcccaaaaaattcractac

SEQ ID NO: 18924 - DNA, 50 bp, synthetic construct
  source 1..50: mol_type = other DNA
ataaaatacactttaaacaacttcccaaaaaattcractacraaatccac

SEQ ID NO: 18925 - DNA, 50 bp, synthetic construct
  source 1..50: mol_type = other DNA
aaatacccrtaaaccacaaaccctcrttacccaaatataaatacaactac

SEQ ID NO: 18926 - DNA, 50 bp, synthetic construct
  source 1..50: mol_type = other DNA
raaaacaaaaatcrcraaaaatataaatcccctccctaacctacccaaac

SEQ ID NO: 18927 - DNA, 50 bp, synthetic construct
  source 1..50: mol_type = other DNA
ccataaactaaacaaaaaaccrcctaatacrattttacccaaatcaaatc

SEQ ID NO: 18928 - DNA, 50 bp, synthetic construct
  source 1..50: mol_type = other DNA
aacctaaataataaccrtaaaatccaaatacaaactctcraaataacttc

SEQ ID NO: 18929 - DNA, 50 bp, synthetic construct
  source 1..50: mol_type = other DNA
crtaaaatccaaatacaaactctcraaataacttcraatcatccraaaac

SEQ ID NO: 18930 - DNA, 50 bp, synthetic construct
  source 1..50: mol_type = other DNA
cctaaaaactaccccaaaaccctaaaatccaccaaaataaatctactaac

SEQ ID NO: 18931 - DNA, 50 bp, synthetic construct
  source 1..50: mol_type = other DNA
ataacccaaaactaaaaaatataaatatattacccaacccaatcaaatac

SEQ ID NO: 18932 - DNA, 50 bp, synthetic construct
  source 1..50: mol_type = other DNA
aaaactaatcccacatatataaatacatataattatatacraatacccac

SEQ ID NO: 18933 - DNA, 50 bp, synthetic construct
  source 1..50: mol_type = other DNA
aaaatcacaactaaactaataccaacaaatctcaaaaccctaaaaatcac

SEQ ID NO: 18934 - DNA, 50 bp, synthetic construct
  source 1..50: mol_type = other DNA
tttctctacctcctacaaaacctaactcaaaacaaaacaaacccaaaccc

SEQ ID NO: 18935 - DNA, 50 bp, synthetic construct
  source 1..50: mol_type = other DNA
atacaatataaaaacaaaattactactctcatctatcccctaaaaatctc

SEQ ID NO: 18936 - DNA, 50 bp, synthetic construct
  source 1..50: mol_type = other DNA
aacactcccrataaacaaaacttactaattctcaataaaaatacttctac

SEQ ID NO: 18937 - DNA, 50 bp, synthetic construct
  source 1..50: mol_type = other DNA
aacaaaaccrcaaaaacaccctcactaaaaattaacaaatcctattcatc

SEQ ID NO: 18938 - DNA, 50 bp, synthetic construct
  source 1..50: mol_type = other DNA
acatacaaccraaactaaacacccttacactaaaatttcacaatcaactc

SEQ ID NO: 18939 - DNA, 50 bp, synthetic construct
  source 1..50: mol_type = other DNA
tattaaatacraattaattataaaaccctaatacaaaaatattcaacccc

SEQ ID NO: 18940 - DNA, 50 bp, synthetic construct
  source 1..50: mol_type = other DNA
taaataactctaaacaaccatttcttaacaactccccaaaaataattccc

SEQ ID NO: 18941 - DNA, 50 bp, synthetic construct
  source 1..50: mol_type = other DNA
aataactctaaacaaccatttcttaacaactccccaaaaataattcccrc

SEQ ID NO: 18942 - DNA, 50 bp, synthetic construct
  source 1..50: mol_type = other DNA
cccaaattaaaaacctctaaacctaaaaaatactaaccaacctacccaac

SEQ ID NO: 18943 - DNA, 50 bp, synthetic construct
  source 1..50: mol_type = other DNA
tacccaacrctaaacaatataaaataaaaccaccaattactctacttatc

SEQ ID NO: 18944 - DNA, 50 bp, synthetic construct
  source 1..50: mol_type = other DNA
aacrctaaacaatataaaataaaaccaccaattactctacttatcraaac

SEQ ID NO: 18945 - DNA, 50 bp, synthetic construct
  source 1..50: mol_type = other DNA
taaacaatataaaataaaaccaccaattactctacttatcraaacrtatc

SEQ ID NO: 18946 - DNA, 50 bp, synthetic construct
  source 1..50: mol_type = other DNA
aaatataatttactactatactacacacttaaaaaataactaaaataacc

SEQ ID NO: 18947 - DNA, 50 bp, synthetic construct
  source 1..50: mol_type = other DNA
ttttaaatatacaatacaacaacaaattatattcccattattaaacaacc

SEQ ID NO: 18948 - DNA, 50 bp, synthetic construct
  source 1..50: mol_type = other DNA
aaaatcraatcaatcraaaactatacctatatcctaacacaatttcaacc

SEQ ID NO: 18949 - DNA, 50 bp, synthetic construct
  source 1..50: mol_type = other DNA
tttctcatcaaccactaccrtcactaaaaaacaaccactcttcaaaaatc

SEQ ID NO: 18950 - DNA, 50 bp, synthetic construct
  source 1..50: mol_type = other DNA
aaactcaacatttctaaatacctaaactctttttctcatcaaccactacc

SEQ ID NO: 18951 - DNA, 50 bp, synthetic construct
  source 1..50: mol_type = other DNA
aaccctacaaaaaaaccracacaaccctaattaaaaaaacaattaaccac

SEQ ID NO: 18952 - DNA, 50 bp, synthetic construct
  source 1..50: mol_type = other DNA
ataataaacacctctaaatactccaacaaatcaaaatctatcccrtaccc

SEQ ID NO: 18953 - DNA, 50 bp, synthetic construct
  source 1..50: mol_type = other DNA
aattccataataaacacctctaaatactccaacaaatcaaaatctatccc

SEQ ID NO: 18954 - DNA, 50 bp, synthetic construct
  source 1..50: mol_type = other DNA
caaaaatattcattataaaatccctataaatttcctatctctatccttcc

SEQ ID NO: 18955 - DNA, 50 bp, synthetic construct
  source 1..50: mol_type = other DNA
ctttctcttacacrctaaaccraataatctttatactaaaccttctatac

SEQ ID NO: 18956 - DNA, 50 bp, synthetic construct
  source 1..50: mol_type = other DNA
taaattaaaattaactaaacataataatacrcacctataatctcaactac

SEQ ID NO: 18957 - DNA, 50 bp, synthetic construct
  source 1..50: mol_type = other DNA
caacaccrtattcttaataattctaaacctaatcacaaacacataacrac

SEQ ID NO: 18958 - DNA, 50 bp, synthetic construct
  source 1..50: mol_type = other DNA
ctttcaatttccaaaattactatttcaaacaaaatcaacaaatcaacrcc

SEQ ID NO: 18959 - DNA, 50 bp, synthetic construct
  source 1..50: mol_type = other DNA
atatacttataattaaactcaaaaccaccaaaaacacratattaaaaaac

SEQ ID NO: 18960 - DNA, 50 bp, synthetic construct
  source 1..50: mol_type = other DNA
taaaccaaactacctctaactaaataaaataaacctctactcaaataaac

SEQ ID NO: 18961 - DNA, 50 bp, synthetic construct
  source 1..50: mol_type = other DNA
atacttttaacaacctatacacrataaattcaaactcactttcacaacac

SEQ ID NO: 18962 - DNA, 50 bp, synthetic construct
  source 1..50: mol_type = other DNA
aaaatctaactaatactaacacaatattatacttttaacaacctatacac

SEQ ID NO: 18963 - DNA, 50 bp, synthetic construct
  source 1..50: mol_type = other DNA
accaaaaatacaacactatactaatactaatcaaacctttctcttaaacc

SEQ ID NO: 18964 - DNA, 50 bp, synthetic construct
  source 1..50: mol_type = other DNA
aaaatacaacactatactaatactaatcaaacctttctcttaaaccraac

SEQ ID NO: 18965 - DNA, 50 bp, synthetic construct
  source 1..50: mol_type = other DNA
aatactaatcaaacctttctcttaaaccraacrtaactttctatcataac

SEQ ID NO: 18966 - DNA, 50 bp, synthetic construct
  source 1..50: mol_type = other DNA
taccaaaatccraaaaccaaacttcctaaaactaaacaatcacctatttc

SEQ ID NO: 18967 - DNA, 50 bp, synthetic construct
  source 1..50: mol_type = other DNA
ataacrttcccraaacaaataactatctaatcccaaaaaacttaaccttc

SEQ ID NO: 18968 - DNA, 50 bp, synthetic construct
  source 1..50: mol_type = other DNA
cattttcattataaaaataaacaacataccacataaacaacctctatatc

SEQ ID NO: 18969 - DNA, 50 bp, synthetic construct
  source 1..50: mol_type = other DNA
cccataaaactaatacctcttactctttacttaaaactcaataacccttc

SEQ ID NO: 18970 - DNA, 50 bp, synthetic construct
  source 1..50: mol_type = other DNA
tcaataacccttcracacttaaaaaccttataccaaaaacaaataatcac

SEQ ID NO: 18971 - DNA, 50 bp, synthetic construct
  source 1..50: mol_type = other DNA
tataacctctaaaaactactcccttctctatcctcttccaaaaccttacc

SEQ ID NO: 18972 - DNA, 50 bp, synthetic construct
  source 1..50: mol_type = other DNA
aaccttaccrtaactccrataaatttctctacataacttatctataactc

SEQ ID NO: 18973 - DNA, 50 bp, synthetic construct
  source 1..50: mol_type = other DNA
atatcaactacttcctatctaaatcaaacrcaaaccccraaaataactcc

SEQ ID NO: 18974 - DNA, 50 bp, synthetic construct
  source 1..50: mol_type = other DNA
tcctaacataaaatatcaactacttcctatctaaatcaaacrcaaacccc

SEQ ID NO: 18975 - DNA, 50 bp, synthetic construct
  source 1..50: mol_type = other DNA
tcaactacttcctaacataaaatatcaactacttcctatctaaatcaaac

SEQ ID NO: 18976 - DNA, 50 bp, synthetic construct
  source 1..50: mol_type = other DNA
acaaaaaataactaacactccataccaaaaaataactaacactacatacc

SEQ ID NO: 18977 - DNA, 50 bp, synthetic construct
  source 1..50: mol_type = other DNA
aataactaacactccataccaaaaaataactaacactacataccraaaac

SEQ ID NO: 18978 - DNA, 50 bp, synthetic construct
  source 1..50: mol_type = other DNA
taaaaaaattcccaacaaaaacaacrcctaaataataacrataaatcacc

SEQ ID NO: 18979 - DNA, 50 bp, synthetic construct
  source 1..50: mol_type = other DNA
aaataaactcataaaaaaattcccaacaaaaacaacrcctaaataataac

SEQ ID NO: 18980 - DNA, 50 bp, synthetic construct
  source 1..50: mol_type = other DNA
tctttacactacccaaataaactcataaaaaaattcccaacaaaaacaac

SEQ ID NO: 18981 - DNA, 50 bp, synthetic construct
  source 1..50: mol_type = other DNA
tcataaactcatctaaacaatacaaaaaaccacacaattattccccacac

SEQ ID NO: 18982 - DNA, 50 bp, synthetic construct
  source 1..50: mol_type = other DNA
aaaaaacccacaaaatccaaaccaaaatttcccttttacacaataaaaac

SEQ ID NO: 18983 - DNA, 50 bp, synthetic construct
  source 1..50: mol_type = other DNA
aaactacaaaaaaaacaccaccctccacataaaaaaaacataacccctac

SEQ ID NO: 18984 - DNA, 50 bp, synthetic construct
  source 1..50: mol_type = other DNA
tatactttctccatataaaaaataatactccctctacaacccacccattc

SEQ ID NO: 18985 - DNA, 50 bp, synthetic construct
  source 1..50: mol_type = other DNA
cccacccattcraaaacaaactttcttcatactaaaatatctcattcctc

SEQ ID NO: 18986 - DNA, 50 bp, synthetic construct
  source 1..50: mol_type = other DNA
tatttttaccaaaaatcctctcattccctaaaaacaaactctatctttac

SEQ ID NO: 18987 - DNA, 50 bp, synthetic construct
  source 1..50: mol_type = other DNA
aaataaaatccaaaaaccctctcttaatatctaaattaaaacccctttcc

SEQ ID NO: 18988 - DNA, 50 bp, synthetic construct
  source 1..50: mol_type = other DNA
catataatccaaaaatcacaataaatataaacaactaaacaacccacacc

SEQ ID NO: 18989 - DNA, 50 bp, synthetic construct
  source 1..50: mol_type = other DNA
tactaattataatacattaacatactaaaaaacactcccaccaacaccac

SEQ ID NO: 18990 - DNA, 50 bp, synthetic construct
  source 1..50: mol_type = other DNA
tactacatcctattttatcaacaaaatcttcataacctatatcttatacc

SEQ ID NO: 18991 - DNA, 50 bp, synthetic construct
  source 1..50: mol_type = other DNA
taaattacaactccttaataataaccctataaaaaatatatcaaataatc

SEQ ID NO: 18992 - DNA, 50 bp, synthetic construct
  source 1..50: mol_type = other DNA
catctctaatcttatataacaccttaacttacaaatattcctaaaaaccc

SEQ ID NO: 18993 - DNA, 50 bp, synthetic construct
  source 1..50: mol_type = other DNA
acaaacaccatttctaaaaattacatacaaaatacataatatcaactaac

SEQ ID NO: 18994 - DNA, 50 bp, synthetic construct
  source 1..50: mol_type = other DNA
accatactacctacaaaaaaacacrttaaaacaacrcaaaaacccaacac

SEQ ID NO: 18995 - DNA, 50 bp, synthetic construct
  source 1..50: mol_type = other DNA
cracacactaactcaaccatactacctacaaaaaaacacrttaaaacaac

SEQ ID NO: 18996 - DNA, 50 bp, synthetic construct
  source 1..50: mol_type = other DNA
crttatcctaacrtacctccttacaaataacataactaaatcaatatacc

SEQ ID NO: 18997 - DNA, 50 bp, synthetic construct
  source 1..50: mol_type = other DNA
ctccttacaaataacataactaaatcaatataccrtaaatcacaaactac

SEQ ID NO: 18998 - DNA, 50 bp, synthetic construct
  source 1..50: mol_type = other DNA
caatataccrtaaatcacaaactacraaaaataaacttaaacctcactcc

SEQ ID NO: 18999 - DNA, 50 bp, synthetic construct
  source 1..50: mol_type = other DNA
taaactaaaaacacrcaaaactccctctaacttaacaccracaaaaaatc

SEQ ID NO: 19000 - DNA, 50 bp, synthetic construct
  source 1..50: mol_type = other DNA
aacttcttatttacatacratataacctaacraaaataaactaaaaacac

SEQ ID NO: 19001 - DNA, 50 bp, synthetic construct
  source 1..50: mol_type = other DNA
aataaacacacactaaaacaacttcttatttacatacratataacctaac

SEQ ID NO: 19002 - DNA, 50 bp, synthetic construct
  source 1..50: mol_type = other DNA
tatcaacrtctcaaataaacacacactaaaacaacttcttatttacatac

SEQ ID NO: 19003 - DNA, 50 bp, synthetic construct
  source 1..50: mol_type = other DNA
ccacaccrcatacaaataaaaaactatttcaatatatacccatctaaaac

SEQ ID NO: 19004 - DNA, 50 bp, synthetic construct
  source 1..50: mol_type = other DNA
attatcctataaatattttaaattctttatcacccttcataactaatacc

SEQ ID NO: 19005 - DNA, 50 bp, synthetic construct
  source 1..50: mol_type = other DNA
aaaaaataacrataatcacttctacctcattaaattactatacaaaacac

SEQ ID NO: 19006 - DNA, 50 bp, synthetic construct
  source 1..50: mol_type = other DNA
aaataactaacrctcaaaaccccaaatattataatcaataaaaaaataac

SEQ ID NO: 19007 - DNA, 50 bp, synthetic construct
  source 1..50: mol_type = other DNA
aaataattaccrccacccttttactaattacaacacctaaaattctaaac

SEQ ID NO: 19008 - DNA, 50 bp, synthetic construct
  source 1..50: mol_type = other DNA
aattcctaaatcctcaactcaaatctaaaacaaccctacccaacaaaaac

SEQ ID NO: 19009 - DNA, 50 bp, synthetic construct
  source 1..50: mol_type = other DNA
taatttccaacttctttacaacrtctatattcttccaataattcccaacc

SEQ ID NO: 19010 - DNA, 50 bp, synthetic construct
  source 1..50: mol_type = other DNA
actatctacaaaattcttactacatacaaaaaacaaacataccccrtcac

SEQ ID NO: 19011 - DNA, 50 bp, synthetic construct
  source 1..50: mol_type = other DNA
rattaacaaatatatcacacrcatcatctattacataaataatatctcac

SEQ ID NO: 19012 - DNA, 50 bp, synthetic construct
  source 1..50: mol_type = other DNA
aactacrtatcctaaacaaatttcttaccttctctatacttcatttcctc

SEQ ID NO: 19013 - DNA, 50 bp, synthetic construct
  source 1..50: mol_type = other DNA
aactctaattctaactaccaaacttataaatatcccaactctaaaactac

SEQ ID NO: 19014 - DNA, 50 bp, synthetic construct
  source 1..50: mol_type = other DNA
atacattttatttaatccaatctattcaaatatcatttcaacaaaaaatc

SEQ ID NO: 19015 - DNA, 50 bp, synthetic construct
  source 1..50: mol_type = other DNA
tcccaaacttcttcctttacttaataccttcaacttttctaaaaaaaaac

SEQ ID NO: 19016 - DNA, 50 bp, synthetic construct
  source 1..50: mol_type = other DNA
tacatacctcaccaaaaacttaacaccacaattaaaaaaattaataaaac

SEQ ID NO: 19017 - DNA, 50 bp, synthetic construct
  source 1..50: mol_type = other DNA
catttccrtaatcccacaacatcctataaatacctctattctaacacatc

SEQ ID NO: 19018 - DNA, 50 bp, synthetic construct
  source 1..50: mol_type = other DNA
aaaaatcratatatcaaaacaaaaatattcacaaaatactataaaaccac

SEQ ID NO: 19019 - DNA, 50 bp, synthetic construct
  source 1..50: mol_type = other DNA
aaactctacaaaaaattaaaacttcattaatatctataaaattaataccc

SEQ ID NO: 19020 - DNA, 50 bp, synthetic construct
  source 1..50: mol_type = other DNA
aaacaaatttataaatcatctacctactaattcaacaacrtaacaaatac

SEQ ID NO: 19021 - DNA, 50 bp, synthetic construct
  source 1..50: mol_type = other DNA
aaaaaataattaaataaacatcataatttactaaattccrtatctatcac

SEQ ID NO: 19022 - DNA, 50 bp, synthetic construct
  source 1..50: mol_type = other DNA
ctattaaccccrctcctacctaaaaattctaaactcacaaaacaaaaaac

SEQ ID NO: 19023 - DNA, 50 bp, synthetic construct
  source 1..50: mol_type = other DNA
aaaaaattctcaaaaaaactctctccaaaaaactcacaactattaacccc

SEQ ID NO: 19024 - DNA, 50 bp, synthetic construct
  source 1..50: mol_type = other DNA
ttcatttctccacaaatcaaaaaaaatcactaaaaatcatcttcaattac

SEQ ID NO: 19025 - DNA, 50 bp, synthetic construct
  source 1..50: mol_type = other DNA
aaccaaatattcttttcataccacttaacttttatttccaaaccatcccc

SEQ ID NO: 19026 - DNA, 50 bp, synthetic construct
  source 1..50: mol_type = other DNA
taacttcrttactcttaataaaaacacaaaaactaaccacaattaaaacc

SEQ ID NO: 19027 - DNA, 50 bp, synthetic construct
  source 1..50: mol_type = other DNA
acaatttccccatatttactctatccttcattaaactttatattaacttc

SEQ ID NO: 19028 - DNA, 50 bp, synthetic construct
  source 1..50: mol_type = other DNA
atacctaataatccaactattaaactacacacaattctactattatcccc

SEQ ID NO: 19029 - DNA, 50 bp, synthetic construct
  source 1..50: mol_type = other DNA
atactcaccaattactaaacrcacaaaaatacaaaaactactaaactaac

SEQ ID NO: 19030 - DNA, 50 bp, synthetic construct
  source 1..50: mol_type = other DNA
tatcctttaaaatcrtattcrttaacccaacaattcctatatttctatac

SEQ ID NO: 19031 - DNA, 50 bp, synthetic construct
  source 1..50: mol_type = other DNA
atcacacaaataaaattcrcraaactaaaaacaaaatactcaaccctaac

SEQ ID NO: 19032 - DNA, 50 bp, synthetic construct
  source 1..50: mol_type = other DNA
tactcaaccctaacraaacaacacaaacttcccttaactttcaactaaac

SEQ ID NO: 19033 - DNA, 50 bp, synthetic construct
  source 1..50: mol_type = other DNA
tcattctaaaaccaacaacaacttctatcacccttatcaattaaaaaaac

SEQ ID NO: 19034 - DNA, 50 bp, synthetic construct
  source 1..50: mol_type = other DNA
atctactacatacctactataactaaactctactacatatctaaaaatac

SEQ ID NO: 19035 - DNA, 50 bp, synthetic construct
  source 1..50: mol_type = other DNA
actactattaaattcaccaaacctttattacaaacctcaaatcacacacc

SEQ ID NO: 19036 - DNA, 50 bp, synthetic construct
  source 1..50: mol_type = other DNA
cacaaaactaccttattccctaaactatcctacccctatacraactaaac

SEQ ID NO: 19037 - DNA, 50 bp, synthetic construct
  source 1..50: mol_type = other DNA
tccacraactaactaaattaaaaaactccratcatttctacaaaaaaaac

SEQ ID NO: 19038 - DNA, 50 bp, synthetic construct
  source 1..50: mol_type = other DNA
ttatcaataaaaaaataactattaaatactacaaacrtatacactccccc

SEQ ID NO: 19039 - DNA, 50 bp, synthetic construct
  source 1..50: mol_type = other DNA
aaaaaatacacacrcctataacattcaacaatcactctcccattaataac

SEQ ID NO: 19040 - DNA, 50 bp, synthetic construct
  source 1..50: mol_type = other DNA
cccttaaccaaaaacttaacttatttaaaaacctaaacaataacaccccc

SEQ ID NO: 19041 - DNA, 50 bp, synthetic construct
  source 1..50: mol_type = other DNA
taaccaaaaacttaacttatttaaaaacctaaacaataacacccccrtcc

SEQ ID NO: 19042 - DNA, 50 bp, synthetic construct
  source 1..50: mol_type = other DNA
tatactcccctataaacaaaataccatctccaaaaaacatatttcctcac

SEQ ID NO: 19043 - DNA, 50 bp, synthetic construct
  source 1..50: mol_type = other DNA
cctaaaataaatcattttaaaaaaaacaatatttacaaaccctttctaac

SEQ ID NO: 19044 - DNA, 50 bp, synthetic construct
  source 1..50: mol_type = other DNA
atttatttaaacacacttctatcctaaaatcatcrttcctaaataacttc

SEQ ID NO: 19045 - DNA, 50 bp, synthetic construct
  source 1..50: mol_type = other DNA
cattaatattacccrcaaaacataaaaaatcctaaaataacacrcacrac

SEQ ID NO: 19046 - DNA, 50 bp, synthetic construct
  source 1..50: mol_type = other DNA
taaccatcattaatattacccrcaaaacataaaaaatcctaaaataacac

SEQ ID NO: 19047 - DNA, 50 bp, synthetic construct
  source 1..50: mol_type = other DNA
aattaatctaatcttaatacactacaacaacaaaaatcttaatcaaatac

SEQ ID NO: 19048 - DNA, 50 bp, synthetic construct
  source 1..50: mol_type = other DNA
ttcaaattctaccctaatatttcctaaaataatactaaaaactacctttc

SEQ ID NO: 19049 - DNA, 50 bp, synthetic construct
  source 1..50: mol_type = other DNA
ctcaactctcaaaaaaaccrctaaatccaaaacaaaaatcaaatatttcc

SEQ ID NO: 19050 - DNA, 50 bp, synthetic construct
  source 1..50: mol_type = other DNA
ccraaaacaaacacataaaatttcctccttcctcaactctcaaaaaaacc

SEQ ID NO: 19051 - DNA, 50 bp, synthetic construct
  source 1..50: mol_type = other DNA
aaacaataaataacaactaaaattcataaaaactatctttaaatatcacc

SEQ ID NO: 19052 - DNA, 50 bp, synthetic construct
  source 1..50: mol_type = other DNA
caataactttacaattcctcccctataaaaaaaataaatttcctccctcc

SEQ ID NO: 19053 - DNA, 50 bp, synthetic construct
  source 1..50: mol_type = other DNA
aactacaaataaaaatatacraacccccratctaaccttataaccratac

SEQ ID NO: 19054 - DNA, 50 bp, synthetic construct
  source 1..50: mol_type = other DNA
ataacaactacaaataaaaatatacraacccccratctaaccttataacc

SEQ ID NO: 19055 - DNA, 50 bp, synthetic construct
  source 1..50: mol_type = other DNA
aaattcttctaataacaataacaactacaaataaaaatatacraaccccc

SEQ ID NO: 19056 - DNA, 50 bp, synthetic construct
  source 1..50: mol_type = other DNA
taacttctaaactaaacaataaactcrttcattcattcattcatccattc

SEQ ID NO: 19057 - DNA, 50 bp, synthetic construct
  source 1..50: mol_type = other DNA
acctctcccrtaaaaacctaccaaaaaccattactaaaatatatttaatc

SEQ ID NO: 19058 - DNA, 50 bp, synthetic construct
  source 1..50: mol_type = other DNA
aacraatttaaattacaatttccttataccraaaatcctatcccctactc

SEQ ID NO: 19059 - DNA, 50 bp, synthetic construct
  source 1..50: mol_type = other DNA
aaacraaacaaaaaacatttaccaacaactattaaatatcaaaaaacctc

SEQ ID NO: 19060 - DNA, 50 bp, synthetic construct
  source 1..50: mol_type = other DNA
ctaaaatttataattcratctttaacctaaattactccttccataaattc

SEQ ID NO: 19061 - DNA, 50 bp, synthetic construct
  source 1..50: mol_type = other DNA
ctttaacctaaattactccttccataaattcrtttcctttaatttcctac

SEQ ID NO: 19062 - DNA, 50 bp, synthetic construct
  source 1..50: mol_type = other DNA
tccaaaaacataaaaactaaaaccctaaatatccatacttaaaaaccaac

SEQ ID NO: 19063 - DNA, 50 bp, synthetic construct
  source 1..50: mol_type = other DNA
ttaaaacttcaattcctatactcctaaatctcctaactccaaaatttctc

SEQ ID NO: 19064 - DNA, 50 bp, synthetic construct
  source 1..50: mol_type = other DNA
caaaatttcaccatattatccaaactaatctaaaattcccraactccaac

SEQ ID NO: 19065 - DNA, 50 bp, synthetic construct
  source 1..50: mol_type = other DNA
taactcattataacttaatctctatcctaccaaaaaaattaatttcattc

SEQ ID NO: 19066 - DNA, 50 bp, synthetic construct
  source 1..50: mol_type = other DNA
ttcaaaaataaaaaacccaatcraccaatttatttcacctacatacaacc

SEQ ID NO: 19067 - DNA, 50 bp, synthetic construct
  source 1..50: mol_type = other DNA
aaattatcccttccaatactactttaaatcacataaaatctacctctacc

SEQ ID NO: 19068 - DNA, 50 bp, synthetic construct
  source 1..50: mol_type = other DNA
cccctttctatttcaaaaaatatctaacaaaaaaatttacrtaacctacc

SEQ ID NO: 19069 - DNA, 50 bp, synthetic construct
  source 1..50: mol_type = other DNA
caaaaaaataacttaaacccaaaaaattaaaaccacaataacctataatc

SEQ ID NO: 19070 - DNA, 50 bp, synthetic construct
  source 1..50: mol_type = other DNA
aattaaaaaatcctcccaccttaacctccccaaatactaaaattataaac

SEQ ID NO: 19071 - DNA, 50 bp, synthetic construct
  source 1..50: mol_type = other DNA
ccaattacataaatctactcrtctcctaaactcaaatatcccacaccacc

SEQ ID NO: 19072 - DNA, 50 bp, synthetic construct
  source 1..50: mol_type = other DNA
tatcctacrtaatctaaaaaataatataaacatatcaatatataccttcc

SEQ ID NO: 19073 - DNA, 50 bp, synthetic construct
  source 1..50: mol_type = other DNA
tctaaaaaataatataaacatatcaatatataccttccraaaccaaacac

SEQ ID NO: 19074 - DNA, 50 bp, synthetic construct
  source 1..50: mol_type = other DNA
tcctaccttaccctcccttaaattacttattctaaataaaaacaattacc

SEQ ID NO: 19075 - DNA, 50 bp, synthetic construct
  source 1..50: mol_type = other DNA
aaccaattcrtacaaattatttattaacaaaaaatctcratttctatcac

SEQ ID NO: 19076 - DNA, 50 bp, synthetic construct
  source 1..50: mol_type = other DNA
cctcacatacctaaccaattcrtacaaattatttattaacaaaaaatctc

SEQ ID NO: 19077 - DNA, 50 bp, synthetic construct
  source 1..50: mol_type = other DNA
ataaaaaaaccacctaaaaaataaataatacctacraaaatcaaataacc

SEQ ID NO: 19078 - DNA, 50 bp, synthetic construct
  source 1..50: mol_type = other DNA
aaaaaaccacctaaaaaataaataatacctacraaaatcaaataaccrcc

SEQ ID NO: 19079 - DNA, 50 bp, synthetic construct
  source 1..50: mol_type = other DNA
atcatacttttctcttactaacctatctttattacaaaaaaactaactac

SEQ ID NO: 19080 - DNA, 50 bp, synthetic construct
  source 1..50: mol_type = other DNA
aaaaaaatctaaacaaacaaaccctactaaatacccctcratctattacc

SEQ ID NO: 19081 - DNA, 50 bp, synthetic construct
  source 1..50: mol_type = other DNA
caaacaaactaaaaaaaatctaaacaaacaaaccctactaaatacccctc

SEQ ID NO: 19082 - DNA, 50 bp, synthetic construct
  source 1..50: mol_type = other DNA
ctatctatttaaattcttcccaacctatctatacaacattccttcctccc

SEQ ID NO: 19083 - DNA, 50 bp, synthetic construct
  source 1..50: mol_type = other DNA
atctaataataaatcataaacctttattccaacraattcctaccctatac

SEQ ID NO: 19084 - DNA, 50 bp, synthetic construct
  source 1..50: mol_type = other DNA
attctctaacatcctttatctaataataaatcataaacctttattccaac

SEQ ID NO: 19085 - DNA, 50 bp, synthetic construct
  source 1..50: mol_type = other DNA
actcaataaaatatattacataaaaattcraaaaatctttaaaaccaaac

SEQ ID NO: 19086 - DNA, 50 bp, synthetic construct
  source 1..50: mol_type = other DNA
atcctcraccttcaaataaatactcaataaaatatattacataaaaattc

SEQ ID NO: 19087 - DNA, 50 bp, synthetic construct
  source 1..50: mol_type = other DNA
aaccccratcaaatactatttaaacacacrttacttaaattataatcctc

SEQ ID NO: 19088 - DNA, 50 bp, synthetic construct
  source 1..50: mol_type = other DNA
aaattcaacacttacaaccaaaaccccratcaaatactatttaaacacac

SEQ ID NO: 19089 - DNA, 50 bp, synthetic construct
  source 1..50: mol_type = other DNA
aaacaacctaataaaatactattaaattcaacacttacaaccaaaacccc

SEQ ID NO: 19090 - DNA, 50 bp, synthetic construct
  source 1..50: mol_type = other DNA
cacttcctaaatattataaaaaacaaataactatccctaataaataatcc

SEQ ID NO: 19091 - DNA, 50 bp, synthetic construct
  source 1..50: mol_type = other DNA
ctaaactaacccaacaattcccataaaaaaatatatcaatacaatatacc

SEQ ID NO: 19092 - DNA, 50 bp, synthetic construct
  source 1..50: mol_type = other DNA
accaaaatcaatcaaactaaccatccatctactatcaaaatataaaatac

SEQ ID NO: 19093 - DNA, 50 bp, synthetic construct
  source 1..50: mol_type = other DNA
ataaccacaatctattaactccaataacttttaaacractcaactcracc

SEQ ID NO: 19094 - DNA, 50 bp, synthetic construct
  source 1..50: mol_type = other DNA
cctcataaccacaatctattaactccaataacttttaaacractcaactc

SEQ ID NO: 19095 - DNA, 50 bp, synthetic construct
  source 1..50: mol_type = other DNA
ctaccrctctcctcataaccacaatctattaactccaataacttttaaac

SEQ ID NO: 19096 - DNA, 50 bp, synthetic construct
  source 1..50: mol_type = other DNA
caaaaacatcatcaaaacaattacaaaaacatactaaactctacactccc

SEQ ID NO: 19097 - DNA, 50 bp, synthetic construct
  source 1..50: mol_type = other DNA
catcatcaaaacaattacaaaaacatactaaactctacactcccraaccc

SEQ ID NO: 19098 - DNA, 50 bp, synthetic construct
  source 1..50: mol_type = other DNA
caaacaactccrcraatacaacattttacacctcatttctcttactcatc

SEQ ID NO: 19099 - DNA, 50 bp, synthetic construct
  source 1..50: mol_type = other DNA
aaacraacraaaaacttcaaaaacaaatttacccttttacaaacaactcc

SEQ ID NO: 19100 - DNA, 50 bp, synthetic construct
  source 1..50: mol_type = other DNA
crtctttcccaactttataaaaatataactaaacctataaacacacraac

SEQ ID NO: 19101 - DNA, 50 bp, synthetic construct
  source 1..50: mol_type = other DNA
aatacattaataccaatacaatttcrtaaccacaaacaaaaaactacaac

SEQ ID NO: 19102 - DNA, 50 bp, synthetic construct
  source 1..50: mol_type = other DNA
ctcataaaacctataactctaataaaatacattaataccaatacaatttc

SEQ ID NO: 19103 - DNA, 50 bp, synthetic construct
  source 1..50: mol_type = other DNA
tttaaaaaactaaataaaaaactacaaccccttccaactacaataaaaac

SEQ ID NO: 19104 - DNA, 50 bp, synthetic construct
  source 1..50: mol_type = other DNA
aaataaaaaactacaaccccttccaactacaataaaaacrtaattcaccc

SEQ ID NO: 19105 - DNA, 50 bp, synthetic construct
  source 1..50: mol_type = other DNA
ctaaaacatacaaaaacaatctccccrccctcaatttataaaaaataccc

SEQ ID NO: 19106 - DNA, 50 bp, synthetic construct
  source 1..50: mol_type = other DNA
taactttcaaacctacrtcaaaacctaaaacatacaaaaacaatctcccc

SEQ ID NO: 19107 - DNA, 50 bp, synthetic construct
  source 1..50: mol_type = other DNA
tccacaaactaaaaacraaaaaactatccttacatacttcaaaccctaac

SEQ ID NO: 19108 - DNA, 50 bp, synthetic construct
  source 1..50: mol_type = other DNA
cattccttaactacrcaaaaaaaatatctcaataaatataaacaaatcrc

SEQ ID NO: 19109 - DNA, 50 bp, synthetic construct
  source 1..50: mol_type = other DNA
ctcattccttaactacrcaaaaaaaatatctcaataaatataaacaaatc

SEQ ID NO: 19110 - DNA, 50 bp, synthetic construct
  source 1..50: mol_type = other DNA
tatttatacaataaatcacaaaatacatttcaatctcattccttaactac

SEQ ID NO: 19111 - DNA, 50 bp, synthetic construct
  source 1..50: mol_type = other DNA
aactaaaatacattttataattcactatacaaatattaaacatctattcc

SEQ ID NO: 19112 - DNA, 50 bp, synthetic construct
  source 1..50: mol_type = other DNA
ctaaaatacattttataattcactatacaaatattaaacatctattccrc

SEQ ID NO: 19113 - DNA, 50 bp, synthetic construct
  source 1..50: mol_type = other DNA
ataattcactatacaaatattaaacatctattccrcrtccraaatataac

SEQ ID NO: 19114 - DNA, 50 bp, synthetic construct
  source 1..50: mol_type = other DNA
tataacratcactaccrataccaaaataaaaaaccatctactctccaacc

SEQ ID NO: 19115 - DNA, 50 bp, synthetic construct
  source 1..50: mol_type = other DNA
aaaatttctataataacaatctactttcctctaaacacaacttatctaac

SEQ ID NO: 19116 - DNA, 50 bp, synthetic construct
  source 1..50: mol_type = other DNA
atttctataataacaatctactttcctctaaacacaacttatctaacrac

SEQ ID NO: 19117 - DNA, 50 bp, synthetic construct
  source 1..50: mol_type = other DNA
ttccttctcttctaaaaacacataattttctcttcctaaaacataaaacc

SEQ ID NO: 19118 - DNA, 50 bp, synthetic construct
  source 1..50: mol_type = other DNA
aacatttattaaattcctttttatataataccactactattcccttattc

SEQ ID NO: 19119 - DNA, 50 bp, synthetic construct
  source 1..50: mol_type = other DNA
atataattcaataacatttacrttcataaatccaattaacaaaaaacatc

SEQ ID NO: 19120 - DNA, 50 bp, synthetic construct
  source 1..50: mol_type = other DNA
tacttttaacactctctttaaatacactacaaacctcatccccaaaaacc

SEQ ID NO: 19121 - DNA, 50 bp, synthetic construct
  source 1..50: mol_type = other DNA
tcttactaactacaaatcctcaaaataaactacatacattttaatattac

SEQ ID NO: 19122 - DNA, 50 bp, synthetic construct
  source 1..50: mol_type = other DNA
tccccaaaaaaccctaatacaaattctctaaaataataatcaacatatac

SEQ ID NO: 19123 - DNA, 50 bp, synthetic construct
  source 1..50: mol_type = other DNA
ataataataataactcattccactaaacaaaccacataaaccaacaaaac

SEQ ID NO: 19124 - DNA, 50 bp, synthetic construct
  source 1..50: mol_type = other DNA
ttccactaaacaaaccacataaaccaacaaaacraacaactaaaaataac

SEQ ID NO: 19125 - DNA, 50 bp, synthetic construct
  source 1..50: mol_type = other DNA
tattccctttaccattcacrtatcaaaaaataaaatttccccatataaac

SEQ ID NO: 19126 - DNA, 50 bp, synthetic construct
  source 1..50: mol_type = other DNA
acccttaacttaaattactccataataactttattccctttaccattcac

SEQ ID NO: 19127 - DNA, 50 bp, synthetic construct
  source 1..50: mol_type = other DNA
ttaaaccttatacaaataaaatacccaaccctcaataatttcctataaac

SEQ ID NO: 19128 - DNA, 50 bp, synthetic construct
  source 1..50: mol_type = other DNA
aaaaatactacaaatttaactctaaaccatcataataaaaaaaatcacac

SEQ ID NO: 19129 - DNA, 50 bp, synthetic construct
  source 1..50: mol_type = other DNA
taaatttaacctaacataacaaccccaaaataatacatttaacaccaccc

SEQ ID NO: 19130 - DNA, 50 bp, synthetic construct
  source 1..50: mol_type = other DNA
tttaacctaacataacaaccccaaaataatacatttaacaccacccrccc

SEQ ID NO: 19131 - DNA, 50 bp, synthetic construct
  source 1..50: mol_type = other DNA
atacatttaacaccacccrcccrctaaaatacaacctaatatatataacc

SEQ ID NO: 19132 - DNA, 50 bp, synthetic construct
  source 1..50: mol_type = other DNA
tcaaattcctaattaacattaaaacttaatctaattcctccctccccacc

SEQ ID NO: 19133 - DNA, 50 bp, synthetic construct
  source 1..50: mol_type = other DNA
ctataactcccaaaaatattctcacctcaatcccttctcacaattccacc

SEQ ID NO: 19134 - DNA, 50 bp, synthetic construct
  source 1..50: mol_type = other DNA
tttcctaaacaaaatcaaacaatattaaaacttacctaccrtacatcaac

SEQ ID NO: 19135 - DNA, 50 bp, synthetic construct
  source 1..50: mol_type = other DNA
tcttaaattctttcctaaacaaaatcaaacaatattaaaacttacctacc

SEQ ID NO: 19136 - DNA, 50 bp, synthetic construct
  source 1..50: mol_type = other DNA
atataactctaaacacactacctataaattaacccracaaaaaacaatac

SEQ ID NO: 19137 - DNA, 50 bp, synthetic construct
  source 1..50: mol_type = other DNA
ataaacccctaatattaacaatctattattaaaccrtactactccttacc

SEQ ID NO: 19138 - DNA, 50 bp, synthetic construct
  source 1..50: mol_type = other DNA
tcttttatcaaaaaaccctccctaacacctaaaaattaaccttaaaaacc

SEQ ID NO: 19139 - DNA, 50 bp, synthetic construct
  source 1..50: mol_type = other DNA
raaactccaaaaccctcaaaacaacctacraaatcactaaacctccaatc

SEQ ID NO: 19140 - DNA, 50 bp, synthetic construct
  source 1..50: mol_type = other DNA
aaaaaaaatataaacttaatcraactactccttaaccctcacacaaaaac

SEQ ID NO: 19141 - DNA, 50 bp, synthetic construct
  source 1..50: mol_type = other DNA
aaaaaatataaacttaatcraactactccttaaccctcacacaaaaacrc

SEQ ID NO: 19142 - DNA, 50 bp, synthetic construct
  source 1..50: mol_type = other DNA
acctcatctctaacaaaaattacaaaaattaactaaaaatactaacacac

SEQ ID NO: 19143 - DNA, 50 bp, synthetic construct
  source 1..50: mol_type = other DNA
actttattttcttactcataatcactaacttctctacattcctccaaacc

SEQ ID NO: 19144 - DNA, 50 bp, synthetic construct
  source 1..50: mol_type = other DNA
attttcttactcataatcactaacttctctacattcctccaaaccrtcac

SEQ ID NO: 19145 - DNA, 50 bp, synthetic construct
  source 1..50: mol_type = other DNA
raccccaacaactactaacaccaaactaatatcactaaaattcaaaaaac

SEQ ID NO: 19146 - DNA, 50 bp, synthetic construct
  source 1..50: mol_type = other DNA
ttcaaaaaacrctaaatatccacacaatttacaaacacttcaaaataaac

SEQ ID NO: 19147 - DNA, 50 bp, synthetic construct
  source 1..50: mol_type = other DNA
aaaaacrctaaatatccacacaatttacaaacacttcaaaataaacrccc

SEQ ID NO: 19148 - DNA, 50 bp, synthetic construct
  source 1..50: mol_type = other DNA
acttttacaaaattccccttaccrattattttcaacaatctataatttcc

SEQ ID NO: 19149 - DNA, 50 bp, synthetic construct
  source 1..50: mol_type = other DNA
tatacatataaactattctaaccacaataataaatttataattcacatcc

SEQ ID NO: 19150 - DNA, 50 bp, synthetic construct
  source 1..50: mol_type = other DNA
cccaaaactactaatactcaactaaacaaactaacaaacaacaataaaac

SEQ ID NO: 19151 - DNA, 50 bp, synthetic construct
  source 1..50: mol_type = other DNA
cccatttaactaaactaatactaatattcttaaaataacaaaaatcaatc

SEQ ID NO: 19152 - DNA, 50 bp, synthetic construct
  source 1..50: mol_type = other DNA
aatcrataaaacttaaactctaaaatctacctaataattataaaaaccac

SEQ ID NO: 19153 - DNA, 50 bp, synthetic construct
  source 1..50: mol_type = other DNA
rataaaacttaaactctaaaatctacctaataattataaaaaccacraac

SEQ ID NO: 19154 - DNA, 50 bp, synthetic construct
  source 1..50: mol_type = other DNA
ataaaaaatcaaataaaacattaacaacaaaacaaataaccaaaacctac

SEQ ID NO: 19155 - DNA, 50 bp, synthetic construct
  source 1..50: mol_type = other DNA
acaaaccttcccttccctaactctctattttctaactatactcattctac

SEQ ID NO: 19156 - DNA, 50 bp, synthetic construct
  source 1..50: mol_type = other DNA
aactctaaaaaaatcttaccaaacataataaacttcaaaaacaaatatac

SEQ ID NO: 19157 - DNA, 50 bp, synthetic construct
  source 1..50: mol_type = other DNA
aaaaactaaaaaaactcaaaaaaaacccaataccaacactaaaccactac

SEQ ID NO: 19158 - DNA, 50 bp, synthetic construct
  source 1..50: mol_type = other DNA
cccttctcaaccacacttcccaaaaaactaaaatctaaaaactaaaatac

SEQ ID NO: 19159 - DNA, 50 bp, synthetic construct
  source 1..50: mol_type = other DNA
aataccctcaaataattcttctatatactaaaactcraactaaattactc

SEQ ID NO: 19160 - DNA, 50 bp, synthetic construct
  source 1..50: mol_type = other DNA
acctttactttaataataccctcaaataattcttctatatactaaaactc

SEQ ID NO: 19161 - DNA, 50 bp, synthetic construct
  source 1..50: mol_type = other DNA
caaaaaaacctttaacacatttatcaaaataaacractataatcaaaacc

SEQ ID NO: 19162 - DNA, 50 bp, synthetic construct
  source 1..50: mol_type = other DNA
aatataaaaattacaaacrtaaatcacaactcccraccttaattacaacc

SEQ ID NO: 19163 - DNA, 50 bp, synthetic construct
  source 1..50: mol_type = other DNA
tcracatcccttacaataaaaaaatctaaccttaacctaaaaatctaaac

SEQ ID NO: 19164 - DNA, 50 bp, synthetic construct
  source 1..50: mol_type = other DNA
actaaatttccccattacaaaaaatatcraatcaaccccttccaaataac

SEQ ID NO: 19165 - DNA, 50 bp, synthetic construct
  source 1..50: mol_type = other DNA
taactaacractacctatatttccttacaccaaaaaaataaaactttccc

SEQ ID NO: 19166 - DNA, 50 bp, synthetic construct
  source 1..50: mol_type = other DNA
ttcatcacraaaaaactttatcctcctaatacaaaaaaacacaaacaacc

SEQ ID NO: 19167 - DNA, 50 bp, synthetic construct
  source 1..50: mol_type = other DNA
ctttatcctcctaatacaaaaaaacacaaacaaccrtcaaccatcccaac

SEQ ID NO: 19168 - DNA, 50 bp, synthetic construct
  source 1..50: mol_type = other DNA
tactaaaaattccctttattccctaataaaatatttcctatttacaatac

SEQ ID NO: 19169 - DNA, 50 bp, synthetic construct
  source 1..50: mol_type = other DNA
accaactcctcataaaaaatctctttctatatatctatatatatcctatc

SEQ ID NO: 19170 - DNA, 50 bp, synthetic construct
  source 1..50: mol_type = other DNA
aactctatacctcattacacaactcatcataattacrcaaatttaccccc

SEQ ID NO: 19171 - DNA, 50 bp, synthetic construct
  source 1..50: mol_type = other DNA
aatttacccccraaacaaacaaaaactataatacaaaataaaactaatac

SEQ ID NO: 19172 - DNA, 50 bp, synthetic construct
  source 1..50: mol_type = other DNA
tcctaacataaactatctacrataaaataaacaacataaaaaatcccaac

SEQ ID NO: 19173 - DNA, 50 bp, synthetic construct
  source 1..50: mol_type = other DNA
aaaactcacaaacataataaaaaccctaactatacaccttcatataatcc

SEQ ID NO: 19174 - DNA, 50 bp, synthetic construct
  source 1..50: mol_type = other DNA
tcaaaaacaaacaaccaactaacaaaccraaaaaaatataatatcaaacc

SEQ ID NO: 19175 - DNA, 50 bp, synthetic construct
  source 1..50: mol_type = other DNA
ccttaactatatccctcacttccttcaaatatctactatcttctcaacrc

SEQ ID NO: 19176 - DNA, 50 bp, synthetic construct
  source 1..50: mol_type = other DNA
aaacaataaaataacaaaatacactattataaatattcataaaacaccrc

SEQ ID NO: 19177 - DNA, 50 bp, synthetic construct
  source 1..50: mol_type = other DNA
ataattttaaaaataaaaaaccttaccataacccaattcctaatcatacc

SEQ ID NO: 19178 - DNA, 50 bp, synthetic construct
  source 1..50: mol_type = other DNA
caacctaatcctctaattctactaactaacaacaccaaaccactattatc

SEQ ID NO: 19179 - DNA, 50 bp, synthetic construct
  source 1..50: mol_type = other DNA
aaaatcaaaaaaccaaactacaacctctaaaatcaaaattacaacaaaac

SEQ ID NO: 19180 - DNA, 50 bp, synthetic construct
  source 1..50: mol_type = other DNA
attttcrttatactacatcttaataacaaactataccttcaaaacctctc

SEQ ID NO: 19181 - DNA, 50 bp, synthetic construct
  source 1..50: mol_type = other DNA
aaaaaaaacaacatctaaaaaccaaaaaataaccaaacacaataactcac

SEQ ID NO: 19182 - DNA, 50 bp, synthetic construct
  source 1..50: mol_type = other DNA
aataaaaccccttctctactaaaaatacaataattaactaaactctaatc

SEQ ID NO: 19183 - DNA, 50 bp, synthetic construct
  source 1..50: mol_type = other DNA
tctctactaaaaatacaataattaactaaactctaatcrtaataacaaac

SEQ ID NO: 19184 - DNA, 50 bp, synthetic construct
  source 1..50: mol_type = other DNA
aaaataaacaccccaatcctatcttcccacactacacataacccaaaatc

SEQ ID NO: 19185 - DNA, 50 bp, synthetic construct
  source 1..50: mol_type = other DNA
ataaaatcaataaacttcctcacacaacaaaaaactttaaattattaaac

SEQ ID NO: 19186 - DNA, 50 bp, synthetic construct
  source 1..50: mol_type = other DNA
aatatcrttaatctatttacccaaaaactcaataaaaaaacaattaaacc

SEQ ID NO: 19187 - DNA, 50 bp, synthetic construct
  source 1..50: mol_type = other DNA
aacattcaaaattatattctacctaaacaaaaaccaaaaattaacaaccc

SEQ ID NO: 19188 - DNA, 50 bp, synthetic construct
  source 1..50: mol_type = other DNA
tataatttaaaaaccctttaaaacttaaatacaaaataatatactccaac

SEQ ID NO: 19189 - DNA, 50 bp, synthetic construct
  source 1..50: mol_type = other DNA
atcctacatctaaatcttaaaaaatctttaaaccataacactaaaaaaac

SEQ ID NO: 19190 - DNA, 50 bp, synthetic construct
  source 1..50: mol_type = other DNA
cattctccttatacaaattaactcaaaaatttaacatattaaaaaaccac

SEQ ID NO: 19191 - DNA, 50 bp, synthetic construct
  source 1..50: mol_type = other DNA
cttcacaacctaacataaaacraaactaaatatccttaaaaccaattaac

SEQ ID NO: 19192 - DNA, 50 bp, synthetic construct
  source 1..50: mol_type = other DNA
ccattttaccaaacattaaatatattcrtaaatcccaaatcraaatccac

SEQ ID NO: 19193 - DNA, 50 bp, synthetic construct
  source 1..50: mol_type = other DNA
cacccctctccattttaccaaacattaaatatattcrtaaatcccaaatc

SEQ ID NO: 19194 - DNA, 50 bp, synthetic construct
  source 1..50: mol_type = other DNA
ataataacacataacacccctctccattttaccaaacattaaatatattc

SEQ ID NO: 19195 - DNA, 50 bp, synthetic construct
  source 1..50: mol_type = other DNA
aaataaattacaacatcaactaaataaaacaaaactaaaataacracctc

SEQ ID NO: 19196 - DNA, 50 bp, synthetic construct
  source 1..50: mol_type = other DNA
raatataacraaaatcccaatatacrataactcacttcctatcctccacc

SEQ ID NO: 19197 - DNA, 50 bp, synthetic construct
  source 1..50: mol_type = other DNA
catcctaatctaattaacttttaccraatataacraaaatcccaatatac

SEQ ID NO: 19198 - DNA, 50 bp, synthetic construct
  source 1..50: mol_type = other DNA
atctctctccttcctacatcctaatctaattaacttttaccraatataac

SEQ ID NO: 19199 - DNA, 50 bp, synthetic construct
  source 1..50: mol_type = other DNA
aacttttcaatctctctccttcctacatcctaatctaattaacttttacc

SEQ ID NO: 19200 - DNA, 50 bp, synthetic construct
  source 1..50: mol_type = other DNA
ccttttaaaattccctattttaaaaacrcacttcacrttaaaaaaaaccc

SEQ ID NO: 19201 - DNA, 50 bp, synthetic construct
  source 1..50: mol_type = other DNA
attaaacrtttttcccttttaaaattccctattttaaaaacrcacttcac

SEQ ID NO: 19202 - DNA, 50 bp, synthetic construct
  source 1..50: mol_type = other DNA
aaaaactaaactaaccctttcaaaaacraacttcctttaacrtaaaatac

SEQ ID NO: 19203 - DNA, 50 bp, synthetic construct
  source 1..50: mol_type = other DNA
tctatctattttcctttataaaacatataaaaaaaatatttctaaccaac

SEQ ID NO: 19204 - DNA, 50 bp, synthetic construct
  source 1..50: mol_type = other DNA
aatacttcataacacacaaactactaataaatattttaaaaaaaatttcc

SEQ ID NO: 19205 - DNA, 50 bp, synthetic construct
  source 1..50: mol_type = other DNA
actcctttcttataattcaaaactctatcaaataatattttcataataac

SEQ ID NO: 19206 - DNA, 50 bp, synthetic construct
  source 1..50: mol_type = other DNA
acatttaaaatactataaaaattacttacattttaacactttcattttac

SEQ ID NO: 19207 - DNA, 50 bp, synthetic construct
  source 1..50: mol_type = other DNA
taaaacactatctttttaacaacaaaccaactctactaactaaaaaactc

SEQ ID NO: 19208 - DNA, 50 bp, synthetic construct
  source 1..50: mol_type = other DNA
actaccaaaaaaacaataccttatataaaatcaaaacaaaactataattc

SEQ ID NO: 19209 - DNA, 50 bp, synthetic construct
  source 1..50: mol_type = other DNA
taaaaaactttcaaaacrccaaatacraataacrcttctaataaattccc

SEQ ID NO: 19210 - DNA, 50 bp, synthetic construct
  source 1..50: mol_type = other DNA
atcctacaataataataaaataatcracttacaacacrcaaaaccraacc

SEQ ID NO: 19211 - DNA, 50 bp, synthetic construct
  source 1..50: mol_type = other DNA
aacttatcctacaataataataaaataatcracttacaacacrcaaaacc

SEQ ID NO: 19212 - DNA, 50 bp, synthetic construct
  source 1..50: mol_type = other DNA
aactttctcttaaaaaaaacaatttaatccccaaatactataaaataaac

SEQ ID NO: 19213 - DNA, 50 bp, synthetic construct
  source 1..50: mol_type = other DNA
aaaaattaaactatttcccctaaaaaaaaattcaacractaaactcaaac

SEQ ID NO: 19214 - DNA, 50 bp, synthetic construct
  source 1..50: mol_type = other DNA
aaaaactctaaaaaaacttttaaatccttcactactactatattctcacc

SEQ ID NO: 19215 - DNA, 50 bp, synthetic construct
  source 1..50: mol_type = other DNA
ccacatctataaatcccrttttaattactctataaaatctacataaatac

SEQ ID NO: 19216 - DNA, 50 bp, synthetic construct
  source 1..50: mol_type = other DNA
aaaccaactaccatacacattttatactactcaccacatctataaatccc

SEQ ID NO: 19217 - DNA, 50 bp, synthetic construct
  source 1..50: mol_type = other DNA
aaaaataaaaccatccrtcraaatatctaataaccaccaactctactaac

SEQ ID NO: 19218 - DNA, 50 bp, synthetic construct
  source 1..50: mol_type = other DNA
taactacatccaaaatcctcattttttaccaattcttatatctccaaaac

SEQ ID NO: 19219 - DNA, 50 bp, synthetic construct
  source 1..50: mol_type = other DNA
tatatcattcrtttcatccttctataaatacattcaaataaatattttcc

SEQ ID NO: 19220 - DNA, 50 bp, synthetic construct
  source 1..50: mol_type = other DNA
taatactataaatacctaataaattccatcattattatatcactaaacac

SEQ ID NO: 19221 - DNA, 50 bp, synthetic construct
  source 1..50: mol_type = other DNA
atactcctccacaccatcatctcaaaaaaaacaataaaatataataaatc

SEQ ID NO: 19222 - DNA, 50 bp, synthetic construct
  source 1..50: mol_type = other DNA
ccaaaataaacracccccaaatacctcctaaaaaaattttctcraaattc

SEQ ID NO: 19223 - DNA, 50 bp, synthetic construct
  source 1..50: mol_type = other DNA
ttcaaaaaatcactctaaaaaactaaaatacctactcacaaatccctacc

SEQ ID NO: 19224 - DNA, 50 bp, synthetic construct
  source 1..50: mol_type = other DNA
acttctttatccttctacacaaatcrtatttccacattaaatatataaac

SEQ ID NO: 19225 - DNA, 50 bp, synthetic construct
  source 1..50: mol_type = other DNA
actatactcctaactttcactcrtaacttctttatccttctacacaaatc

SEQ ID NO: 19226 - DNA, 50 bp, synthetic construct
  source 1..50: mol_type = other DNA
aaaacttcataaacaataaccaactttaaaaatattcctaaaacraacac

SEQ ID NO: 19227 - DNA, 50 bp, synthetic construct
  source 1..50: mol_type = other DNA
ataaacaataaccaactttaaaaatattcctaaaacraacacrataaacc

SEQ ID NO: 19228 - DNA, 50 bp, synthetic construct
  source 1..50: mol_type = other DNA
taaccaactttaaaaatattcctaaaacraacacrataaaccraaattac

SEQ ID NO: 19229 - DNA, 50 bp, synthetic construct
  source 1..50: mol_type = other DNA
aaccctatctttacaaaaaaataaaccaaattaaccaaatataataacac

SEQ ID NO: 19230 - DNA, 50 bp, synthetic construct
  source 1..50: mol_type = other DNA
ccaaaaaccaaaataaacctaaaacraccacrataaaacctaaaacaatc

SEQ ID NO: 19231 - DNA, 50 bp, synthetic construct
  source 1..50: mol_type = other DNA
cacccaatattaacccaacttaaaactaacattaaaaaacaacrtattcc

SEQ ID NO: 19232 - DNA, 50 bp, synthetic construct
  source 1..50: mol_type = other DNA
caatattaacccaacttaaaactaacattaaaaaacaacrtattccraac

SEQ ID NO: 19233 - DNA, 50 bp, synthetic construct
  source 1..50: mol_type = other DNA
tacaataaacataccctacaaaacrcatttttctcattccacaaaacatc

SEQ ID NO: 19234 - DNA, 50 bp, synthetic construct
  source 1..50: mol_type = other DNA
aaaacttactttaaataaccracatatttaaaacaaccctaactcacacc

SEQ ID NO: 19235 - DNA, 50 bp, synthetic construct
  source 1..50: mol_type = other DNA
atatcractatctaaaataaatcccaacaaaaatcatttatttaaaaacc

SEQ ID NO: 19236 - DNA, 50 bp, synthetic construct
  source 1..50: mol_type = other DNA
aaaaattatttcraaacctcaactcaaccaaaaacaataaaactaaaaac

SEQ ID NO: 19237 - DNA, 50 bp, synthetic construct
  source 1..50: mol_type = other DNA
actataactcataacttatataaaactacttaaatccaaatataacaaac

SEQ ID NO: 19238 - DNA, 50 bp, synthetic construct
  source 1..50: mol_type = other DNA
acacatcacaaccctaattcccaaaaaacaactttaatttccatccatac

SEQ ID NO: 19239 - DNA, 50 bp, synthetic construct
  source 1..50: mol_type = other DNA
accctaattcccaaaaaacaactttaatttccatccatacrtttaaacac

SEQ ID NO: 19240 - DNA, 50 bp, synthetic construct
  source 1..50: mol_type = other DNA
aacaacrtatcctttaactacttaattattctttcctacrtttatatttc

SEQ ID NO: 19241 - DNA, 50 bp, synthetic construct
  source 1..50: mol_type = other DNA
aaaacaactctcrcttaaaaaacratttacataaaaatactttaaattcc

SEQ ID NO: 19242 - DNA, 50 bp, synthetic construct
  source 1..50: mol_type = other DNA
aaattaaatactccaaactcacttcacaaaacaactctcrcttaaaaaac

SEQ ID NO: 19243 - DNA, 50 bp, synthetic construct
  source 1..50: mol_type = other DNA
taataacrcttaaattaaatactccaaactcacttcacaaaacaactctc

SEQ ID NO: 19244 - DNA, 50 bp, synthetic construct
  source 1..50: mol_type = other DNA
acattcatttcaatccatatttttaaaacactttccctatacaaaactcc

SEQ ID NO: 19245 - DNA, 50 bp, synthetic construct
  source 1..50: mol_type = other DNA
ataaaatttctatacacrtacttttaccaaccraaaaattaaaatatacc

SEQ ID NO: 19246 - DNA, 50 bp, synthetic construct
  source 1..50: mol_type = other DNA
aaattccaataataaaataactaacttcatacracacaccttaatttccc

SEQ ID NO: 19247 - DNA, 50 bp, synthetic construct
  source 1..50: mol_type = other DNA
aataactaacttcatacracacaccttaatttcccrattaacaaaaacac

SEQ ID NO: 19248 - DNA, 50 bp, synthetic construct
  source 1..50: mol_type = other DNA
ccacactaaacacattacaataaaacttactacttctacrcttccttatc

SEQ ID NO: 19249 - DNA, 50 bp, synthetic construct
  source 1..50: mol_type = other DNA
acrtatactaaatatcacaacaaaaccttcccttcaaaacaaatctaaac

SEQ ID NO: 19250 - DNA, 50 bp, synthetic construct
  source 1..50: mol_type = other DNA
actcacttataaaatacrataaaatacratacctaaaactatcaaaacac

SEQ ID NO: 19251 - DNA, 50 bp, synthetic construct
  source 1..50: mol_type = other DNA
acaactaatcccttctccatttaactcacttataaaatacrataaaatac

SEQ ID NO: 19252 - DNA, 50 bp, synthetic construct
  source 1..50: mol_type = other DNA
tacatttacttttcacaatccttaacacccactacctttttatctccctc

SEQ ID NO: 19253 - DNA, 50 bp, synthetic construct
  source 1..50: mol_type = other DNA
aaacatacaaaaaatactccttatactaaacaaatacaaaaaaacaaaac

SEQ ID NO: 19254 - DNA, 50 bp, synthetic construct
  source 1..50: mol_type = other DNA
cacccttaattttaacaaaaaataaaactcaacaatttacatacacttac

SEQ ID NO: 19255 - DNA, 50 bp, synthetic construct
  source 1..50: mol_type = other DNA
ccatcaaattcttttaaaacaacacactaacraaaaaactctttttatcc

SEQ ID NO: 19256 - DNA, 50 bp, synthetic construct
  source 1..50: mol_type = other DNA
tacatataatcataactctccatcaaattcttttaaaacaacacactaac

SEQ ID NO: 19257 - DNA, 50 bp, synthetic construct
  source 1..50: mol_type = other DNA
aacactacctctaattaatttttaaataacacttataacatatatctaac

SEQ ID NO: 19258 - DNA, 50 bp, synthetic construct
  source 1..50: mol_type = other DNA
tacattttcacctaaaaatacatttaacaaaaatctattatacatctacc

SEQ ID NO: 19259 - DNA, 50 bp, synthetic construct
  source 1..50: mol_type = other DNA
caaaaacttctcaacacttccacaccaccaaactctctaattactaaatc

SEQ ID NO: 19260 - DNA, 50 bp, synthetic construct
  source 1..50: mol_type = other DNA
tatatcatcctctacaaaacatatatctaccaatacaaaaataaaacctc

SEQ ID NO: 19261 - DNA, 50 bp, synthetic construct
  source 1..50: mol_type = other DNA
tctacaaccattcaaaaaaataactataattaaaaacrtttaaatactcc

SEQ ID NO: 19262 - DNA, 50 bp, synthetic construct
  source 1..50: mol_type = other DNA
ctccaactacaaccattcccctaaataactacaaaaatcaataaaataac

SEQ ID NO: 19263 - DNA, 50 bp, synthetic construct
  source 1..50: mol_type = other DNA
attttctaattcatttttaaaatatactctaaattcataaccccaacttc

SEQ ID NO: 19264 - DNA, 50 bp, synthetic construct
  source 1..50: mol_type = other DNA
ctcctttaaaatacaaaactaaattcaaactaaattttccaacactaaac

SEQ ID NO: 19265 - DNA, 50 bp, synthetic construct
  source 1..50: mol_type = other DNA
tataaaatccaccraataaaaccaactaaactcctaaatctaataaaaac

SEQ ID NO: 19266 - DNA, 50 bp, synthetic construct
  source 1..50: mol_type = other DNA
tccccaattcatctatatatttataaaacrccacattaactaccactaac

SEQ ID NO: 19267 - DNA, 50 bp, synthetic construct
  source 1..50: mol_type = other DNA
taacatacttctttactacacattaaatacatctaaaaacacatatctac

SEQ ID NO: 19268 - DNA, 50 bp, synthetic construct
  source 1..50: mol_type = other DNA
taaaaacraaatttcaccatatttaatcaaactaatctcctaatttaccc

SEQ ID NO: 19269 - DNA, 50 bp, synthetic construct
  source 1..50: mol_type = other DNA
tcaaacataaattatacataaattcacraaactctctaatataaattcac

SEQ ID NO: 19270 - DNA, 50 bp, synthetic construct
  source 1..50: mol_type = other DNA
atctcaaacaattaaattaaaataaccrtaaatctatattaaaaaacctc

SEQ ID NO: 19271 - DNA, 50 bp, synthetic construct
  source 1..50: mol_type = other DNA
atatttatttacraatatccctcttaactattctatttttacataaaaac

SEQ ID NO: 19272 - DNA, 50 bp, synthetic construct
  source 1..50: mol_type = other DNA
caaaattccaccatattacccaaactaatctaaaattcctaaactcaaac

SEQ ID NO: 19273 - DNA, 50 bp, synthetic construct
  source 1..50: mol_type = other DNA
caccttatctactaattactaaaaccttaaaaaaaatacaatatttaaac

SEQ ID NO: 19274 - DNA, 50 bp, synthetic construct
  source 1..50: mol_type = other DNA
ctccacaaaaatccccctaaaacrcactaaaaactaacacctataatcac

SEQ ID NO: 19275 - DNA, 50 bp, synthetic construct
  source 1..50: mol_type = other DNA
ccaaaatctcctatttactaaacaaacrctttaaccaactaaaccacrac

SEQ ID NO: 19276 - DNA, 50 bp, synthetic construct
  source 1..50: mol_type = other DNA
cctatataaaatttattatcccctctctaccttcacttcctcttcctctc

SEQ ID NO: 19277 - DNA, 50 bp, synthetic construct
  source 1..50: mol_type = other DNA
atctccttcaaaccaatcatcccattcacctaaccaaaattcttacraac

SEQ ID NO: 19278 - DNA, 50 bp, synthetic construct
  source 1..50: mol_type = other DNA
actaatctccttcaaaccaatcatcccattcacctaaccaaaattcttac

SEQ ID NO: 19279 - DNA, 50 bp, synthetic construct
  source 1..50: mol_type = other DNA
ttaaatcctaactcaaaccaaccaactatttaaaatatttaatacatacc

SEQ ID NO: 19280 - DNA, 50 bp, synthetic construct
  source 1..50: mol_type = other DNA
cctaactcaaaccaaccaactatttaaaatatttaatacataccraacrc

SEQ ID NO: 19281 - DNA, 50 bp, synthetic construct
  source 1..50: mol_type = other DNA
aatttcatcatattaacaaaaataatctcratctcctaacctcrtaatcc

SEQ ID NO: 19282 - DNA, 50 bp, synthetic construct
  source 1..50: mol_type = other DNA
attttacaacaaatcccaaaccaataaaatctttattaataaataaatcc

SEQ ID NO: 19283 - DNA, 50 bp, synthetic construct
  source 1..50: mol_type = other DNA
aacacaattaaaacttaaaacccaatcccaactaaatcccaaattaaacc

SEQ ID NO: 19284 - DNA, 50 bp, synthetic construct
  source 1..50: mol_type = other DNA
taaaataaaacttctaaaacctaataaaaatcaactaatataattctccc

SEQ ID NO: 19285 - DNA, 50 bp, synthetic construct
  source 1..50: mol_type = other DNA
ttttttttcttctttttctaaaaacaaaatcttatatcacccaaactaac

SEQ ID NO: 19286 - DNA, 50 bp, synthetic construct
  source 1..50: mol_type = other DNA
ccaaactaacrtacaaaaccctaatcacaactaccaataactaaaaccac

SEQ ID NO: 19287 - DNA, 50 bp, synthetic construct
  source 1..50: mol_type = other DNA
aaccctaatcacaactaccaataactaaaaccacraaaatataccaccac

SEQ ID NO: 19288 - DNA, 50 bp, synthetic construct
  source 1..50: mol_type = other DNA
aaactatcaccaattttaaaaaaccaaattttaaataaaaaatctatctc

SEQ ID NO: 19289 - DNA, 50 bp, synthetic construct
  source 1..50: mol_type = other DNA
accaaaataacttactattcttaccaatatctaaccataaactcctaacc

SEQ ID NO: 19290 - DNA, 50 bp, synthetic construct
  source 1..50: mol_type = other DNA
taccaaatcttcacrtacacattactcctatcactactatacaataaacc

SEQ ID NO: 19291 - DNA, 50 bp, synthetic construct
  source 1..50: mol_type = other DNA
cttcacrtacacattactcctatcactactatacaataaaccrtaactac

SEQ ID NO: 19292 - DNA, 50 bp, synthetic construct
  source 1..50: mol_type = other DNA
atcatactcacaaaactctaaaaacacctcraaacaaccaactataaacc

SEQ ID NO: 19293 - DNA, 50 bp, synthetic construct
  source 1..50: mol_type = other DNA
taaactaataatcatatctaaacaaaactcaaacctctaaacccrctaac

SEQ ID NO: 19294 - DNA, 50 bp, synthetic construct
  source 1..50: mol_type = other DNA
aatccaaaaacctaaattctatccaaacataaccaccaactcactctacc

SEQ ID NO: 19295 - DNA, 50 bp, synthetic construct
  source 1..50: mol_type = other DNA
ctttaatttcctctaaaaactatcctaaaaatataaactacccaaatacc

SEQ ID NO: 19296 - DNA, 50 bp, synthetic construct
  source 1..50: mol_type = other DNA
aaaaaactacactccctcccaacaaaatatacaccaaaaaacacttccac

SEQ ID NO: 19297 - DNA, 50 bp, synthetic construct
  source 1..50: mol_type = other DNA
ctcccaacaaaatatacaccaaaaaacacttccacrctaaatataaaaac

SEQ ID NO: 19298 - DNA, 50 bp, synthetic construct
  source 1..50: mol_type = other DNA
cctataacacaaataaaattctcccacttttaacttcccaaatactaccc

SEQ ID NO: 19299 - DNA, 50 bp, synthetic construct
  source 1..50: mol_type = other DNA
taattccacctttaccacatttatttttctaaaaattaaattaataaacc

SEQ ID NO: 19300 - DNA, 50 bp, synthetic construct
  source 1..50: mol_type = other DNA
tataaaaaaacccaaaaccctaatcctaatccractctcctaaatcctcc

SEQ ID NO: 19301 - DNA, 50 bp, synthetic construct
  source 1..50: mol_type = other DNA
caaaacaaacctaaacaatatctaaataaaacctaaaaaccacaaaaaac

SEQ ID NO: 19302 - DNA, 50 bp, synthetic construct
  source 1..50: mol_type = other DNA
tctaaaaaattacacaactctctaacaaatatttaaactataactattac

SEQ ID NO: 19303 - DNA, 50 bp, synthetic construct
  source 1..50: mol_type = other DNA
atttaaactataactattacrcatactaaaaattcttaactccaacctac

SEQ ID NO: 19304 - DNA, 50 bp, synthetic construct
  source 1..50: mol_type = other DNA
aaaatcattttccaacacataataatacctcaaaaatttttaaaacacac

SEQ ID NO: 19305 - DNA, 50 bp, synthetic construct
  source 1..50: mol_type = other DNA
aacaacrtaatttaccctcaactataaatactaaaacaaaacaaaaaccc

SEQ ID NO: 19306 - DNA, 50 bp, synthetic construct
  source 1..50: mol_type = other DNA
aaataacaaaactaaattcaaacaacatacctaaatttacacacatcccc

SEQ ID NO: 19307 - DNA, 50 bp, synthetic construct
  source 1..50: mol_type = other DNA
taaaatcacccaaaatcrcccaaaatcaataaaaaatatccaaaaataac

SEQ ID NO: 19308 - DNA, 50 bp, synthetic construct
  source 1..50: mol_type = other DNA
aaactccatttttaattcaaactttaaaccttccaaaatcrtactatacc

SEQ ID NO: 19309 - DNA, 50 bp, synthetic construct
  source 1..50: mol_type = other DNA
aaaacracaaaaactccatttttaattcaaactttaaaccttccaaaatc

SEQ ID NO: 19310 - DNA, 50 bp, synthetic construct
  source 1..50: mol_type = other DNA
caacaaaaacttctacaaaatccccttaaataaaataataatccttcacc

SEQ ID NO: 19311 - DNA, 50 bp, synthetic construct
  source 1..50: mol_type = other DNA
acaaaatccccttaaataaaataataatccttcaccraacttcccaatac

SEQ ID NO: 19312 - DNA, 50 bp, synthetic construct
  source 1..50: mol_type = other DNA
aaaaatctaaactctactttccctaacaaatactatcctttttccttacc

SEQ ID NO: 19313 - DNA, 50 bp, synthetic construct
  source 1..50: mol_type = other DNA
aaaaaacacaacatatacacttttacaatctcttaaccaataaaacttac

SEQ ID NO: 19314 - DNA, 50 bp, synthetic construct
  source 1..50: mol_type = other DNA
ttctactactactacccaataccaaaaaattattttaaataactatttac

SEQ ID NO: 19315 - DNA, 50 bp, synthetic construct
  source 1..50: mol_type = other DNA
aacatcaaaaaaacatttaatcatccaaacctaataaaaataactttacc

SEQ ID NO: 19316 - DNA, 50 bp, synthetic construct
  source 1..50: mol_type = other DNA
aacaactcaaaaaaaccaatccctaatttatatccactctcttcaccacc

SEQ ID NO: 19317 - DNA, 50 bp, synthetic construct
  source 1..50: mol_type = other DNA
tatcctcrtaaacaattaaaaaattatacatctttccccactcaaaattc

SEQ ID NO: 19318 - DNA, 50 bp, synthetic construct
  source 1..50: mol_type = other DNA
tcttcattcatatttaaaaaaaatcacctcctaattaaatataacacttc

SEQ ID NO: 19319 - DNA, 50 bp, synthetic construct
  source 1..50: mol_type = other DNA
aaaacccacaaaaaccaaacaattattctcaattattctccacctactac

SEQ ID NO: 19320 - DNA, 50 bp, synthetic construct
  source 1..50: mol_type = other DNA
aacttcacccaataaatcctacaccraactacaaataaaactacctaccc

SEQ ID NO: 19321 - DNA, 50 bp, synthetic construct
  source 1..50: mol_type = other DNA
actaactcaaaaattataaacacaccaatcaacaccctatatctaactcc

SEQ ID NO: 19322 - DNA, 50 bp, synthetic construct
  source 1..50: mol_type = other DNA
caacatcaaaaaatctatactaaacatcttcctcttccaacctcctctcc

SEQ ID NO: 19323 - DNA, 50 bp, synthetic construct
  source 1..50: mol_type = other DNA
aataaactatatcattatatcacccactataaaatctcaacctcaataac

SEQ ID NO: 19324 - DNA, 50 bp, synthetic construct
  source 1..50: mol_type = other DNA
cacaataacataatttactctacttatatcaaaaataaaccaactaaacc

SEQ ID NO: 19325 - DNA, 50 bp, synthetic construct
  source 1..50: mol_type = other DNA
attccaaaaaatacttaaataaaaaattaacctaaatcttaaacaacaac

SEQ ID NO: 19326 - DNA, 50 bp, synthetic construct
  source 1..50: mol_type = other DNA
aacattctttaaaatcttaaaaatacatacatacctaaaatattttacac

SEQ ID NO: 19327 - DNA, 50 bp, synthetic construct
  source 1..50: mol_type = other DNA
aaaactaatatcaattaaaatctattcrtcaactaaaatcctaaaaaaac

SEQ ID NO: 19328 - DNA, 50 bp, synthetic construct
  source 1..50: mol_type = other DNA
aacaacacttctactaaaaactaaaccccaaaatcacaacaaaaccaacc

SEQ ID NO: 19329 - DNA, 50 bp, synthetic construct
  source 1..50: mol_type = other DNA
aaaccccaaaatcacaacaaaaccaaccrttcataacttcaaaaaaaaac

SEQ ID NO: 19330 - DNA, 50 bp, synthetic construct
  source 1..50: mol_type = other DNA
aacaaaaacccrccacraaacatttactattcttataataaaacaataac

SEQ ID NO: 19331 - DNA, 50 bp, synthetic construct
  source 1..50: mol_type = other DNA
aaactatcrcaaacacratttataaaatttcaaaacrttaacaaaaaccc

SEQ ID NO: 19332 - DNA, 50 bp, synthetic construct
  source 1..50: mol_type = other DNA
atatttaaactatataccaatactaaaaatactaaaactatcrcaaacac

SEQ ID NO: 19333 - DNA, 50 bp, synthetic construct
  source 1..50: mol_type = other DNA
taaccaatatatttaaactatataccaatactaaaaatactaaaactatc

SEQ ID NO: 19334 - DNA, 50 bp, synthetic construct
  source 1..50: mol_type = other DNA
tattcacttactttacaaaataaaaaaaccaaacctttttttaaaacccc

SEQ ID NO: 19335 - DNA, 50 bp, synthetic construct
  source 1..50: mol_type = other DNA
ccaacacaataattttttcccataccactccctataactaaaacaatctc

SEQ ID NO: 19336 - DNA, 50 bp, synthetic construct
  source 1..50: mol_type = other DNA
aaaacactatatttttctatcactaaaaatacatcaataaacttactatc

SEQ ID NO: 19337 - DNA, 50 bp, synthetic construct
  source 1..50: mol_type = other DNA
tttcaaacaatcttttaaatctccattaaacaataacaaatatcactaac

SEQ ID NO: 19338 - DNA, 50 bp, synthetic construct
  source 1..50: mol_type = other DNA
caaacaattataaaaacattacaaaaaatttcctctcctaaaatacatcc

SEQ ID NO: 19339 - DNA, 50 bp, synthetic construct
  source 1..50: mol_type = other DNA
tttatacatattttttcttcaccaaaaactttttaaaacttaaattaacc

SEQ ID NO: 19340 - DNA, 50 bp, synthetic construct
  source 1..50: mol_type = other DNA
catattttttcttcaccaaaaactttttaaaacttaaattaaccraaaac

SEQ ID NO: 19341 - DNA, 50 bp, synthetic construct
  source 1..50: mol_type = other DNA
cttcaccaaaaactttttaaaacttaaattaaccraaaacrataactcac

SEQ ID NO: 19342 - DNA, 50 bp, synthetic construct
  source 1..50: mol_type = other DNA
aaatatataaaatttaaacttaccattaaacccactaacttaaaaataac

SEQ ID NO: 19343 - DNA, 50 bp, synthetic construct
  source 1..50: mol_type = other DNA
taactcataacaaatccccaatattaacaattcrataatatcaatattcc

SEQ ID NO: 19344 - DNA, 50 bp, synthetic construct
  source 1..50: mol_type = other DNA
ttttttattaaaatctaccacataataaacccttataattataataaaac

SEQ ID NO: 19345 - DNA, 50 bp, synthetic construct
  source 1..50: mol_type = other DNA
cattttccataaaaataatcttattttcaaattaaatcatcttttatcac

SEQ ID NO: 19346 - DNA, 50 bp, synthetic construct
  source 1..50: mol_type = other DNA
tattcatatattctatatctaactcaacaataacrccttttaactcatcc

SEQ ID NO: 19347 - DNA, 50 bp, synthetic construct
  source 1..50: mol_type = other DNA
ttacaaaacaaaacaacrtcctaatccaaaaaccraataaatcaaaaaac

SEQ ID NO: 19348 - DNA, 50 bp, synthetic construct
  source 1..50: mol_type = other DNA
ataaatacctaaaaattcrtaaataattctccaaaaactattaaaataac

SEQ ID NO: 19349 - DNA, 50 bp, synthetic construct
  source 1..50: mol_type = other DNA
ttcrtaaataattctccaaaaactattaaaataacrttttcaaaccraac

SEQ ID NO: 19350 - DNA, 50 bp, synthetic construct
  source 1..50: mol_type = other DNA
taacttccaatttattcttaatcctcattataataaatatcccacaaaac

SEQ ID NO: 19351 - DNA, 50 bp, synthetic construct
  source 1..50: mol_type = other DNA
aaacaatccttccacctcaacctcttaaataactaaaactacaaatatac

SEQ ID NO: 19352 - DNA, 50 bp, synthetic construct
  source 1..50: mol_type = other DNA
ttatactttcctttcttttttctccrccaaaaccraaatctttttctatc

SEQ ID NO: 19353 - DNA, 50 bp, synthetic construct
  source 1..50: mol_type = other DNA
tttaatattatccaatttatactttcctttcttttttctccrccaaaacc

SEQ ID NO: 19354 - DNA, 50 bp, synthetic construct
  source 1..50: mol_type = other DNA
ctataactcataataaaactttcaataaaccacraacaatacccttttcc

SEQ ID NO: 19355 - DNA, 50 bp, synthetic construct
  source 1..50: mol_type = other DNA
tatttctaaatacaattctataactcataataaaactttcaataaaccac

SEQ ID NO: 19356 - DNA, 50 bp, synthetic construct
  source 1..50: mol_type = other DNA
tctaaaactatacaaaataaatctcattcttttatcraatatcaaccttc

SEQ ID NO: 19357 - DNA, 50 bp, synthetic construct
  source 1..50: mol_type = other DNA
aataaattctactttctaaaactatacaaaataaatctcattcttttatc

SEQ ID NO: 19358 - DNA, 50 bp, synthetic construct
  source 1..50: mol_type = other DNA
taaacttaccatttcaactaacacttttattatactaaaatacacataac

SEQ ID NO: 19359 - DNA, 50 bp, synthetic construct
  source 1..50: mol_type = other DNA
tttaaccatttttaaatatataactctataacattaaatatatttacatc

SEQ ID NO: 19360 - DNA, 50 bp, synthetic construct
  source 1..50: mol_type = other DNA
actaaattaattacataatataacactattatccataaaataaaacaaac

SEQ ID NO: 19361 - DNA, 50 bp, synthetic construct
  source 1..50: mol_type = other DNA
ttatccataaaataaaacaaacraataactcaaaaaaaacacacctaaac

SEQ ID NO: 19362 - DNA, 50 bp, synthetic construct
  source 1..50: mol_type = other DNA
aactaaaaacaacraaaaataaacctctaccaaaaaccaaaactcccatc

SEQ ID NO: 19363 - DNA, 50 bp, synthetic construct
  source 1..50: mol_type = other DNA
tatttctaaatacrataaaaatcctaacccttaataaaaacccacccctc

SEQ ID NO: 19364 - DNA, 50 bp, synthetic construct
  source 1..50: mol_type = other DNA
cacacattctttcaaaaaaaacctattaacaaccaaaaatataccctaac

SEQ ID NO: 19365 - DNA, 50 bp, synthetic construct
  source 1..50: mol_type = other DNA
acctattaacaaccaaaaatataccctaacrtacaaatttaaaaaacacc

SEQ ID NO: 19366 - DNA, 50 bp, synthetic construct
  source 1..50: mol_type = other DNA
tacatttcctaacttaaccaataattttcaaaacaatccacraatctccc

SEQ ID NO: 19367 - DNA, 50 bp, synthetic construct
  source 1..50: mol_type = other DNA
aaaaaaacatacatttcctaacttaaccaataattttcaaaacaatccac

SEQ ID NO: 19368 - DNA, 50 bp, synthetic construct
  source 1..50: mol_type = other DNA
tttaccatattacccaaactaatcttaaactcctaaaactcaaaccattc

SEQ ID NO: 19369 - DNA, 50 bp, synthetic construct
  source 1..50: mol_type = other DNA
aaaaaataaaattaataacataacctcrtttcttaaaactcaatatttac

SEQ ID NO: 19370 - DNA, 50 bp, synthetic construct
  source 1..50: mol_type = other DNA
ctctaccacctccaaccaactaaatacrcaaatactaaactttaaaaaac

SEQ ID NO: 19371 - DNA, 50 bp, synthetic construct
  source 1..50: mol_type = other DNA
aacaaaaaaaattcaaaatcaaaccttcctctcttaacaaacrtactacc

SEQ ID NO: 19372 - DNA, 50 bp, synthetic construct
  source 1..50: mol_type = other DNA
ccaaactcaaaaaaccaaatattttaatctaaatttaaaaacracaacac

SEQ ID NO: 19373 - DNA, 50 bp, synthetic construct
  source 1..50: mol_type = other DNA
aactcraccccaaataaccaaaataaccaaaatcttctaaaattaaaacc

SEQ ID NO: 19374 - DNA, 50 bp, synthetic construct
  source 1..50: mol_type = other DNA
aaaacaccaacaccttacttaaactaataaaacaataaataaccacaaac

SEQ ID NO: 19375 - DNA, 50 bp, synthetic construct
  source 1..50: mol_type = other DNA
acaccttacttaaactaataaaacaataaataaccacaaacraatctatc

SEQ ID NO: 19376 - DNA, 50 bp, synthetic construct
  source 1..50: mol_type = other DNA
aaaaccaaacaaactactactacaaaaaatataaataacctattactcac

SEQ ID NO: 19377 - DNA, 50 bp, synthetic construct
  source 1..50: mol_type = other DNA
caacttatctaattttaaacrattacaaatactttatatatatactacac

SEQ ID NO: 19378 - DNA, 50 bp, synthetic construct
  source 1..50: mol_type = other DNA
actataacttacaatatacatcctcaaaactataaccccaaataaaaccc

SEQ ID NO: 19379 - DNA, 50 bp, synthetic construct
  source 1..50: mol_type = other DNA
rcttctcccaactcatcctcttttaacaaatattaatatctcraaataac

SEQ ID NO: 19380 - DNA, 50 bp, synthetic construct
  source 1..50: mol_type = other DNA
aacaatccrcttctcccaactcatcctcttttaacaaatattaatatctc

SEQ ID NO: 19381 - DNA, 50 bp, synthetic construct
  source 1..50: mol_type = other DNA
aacataattataactccttactaccttaaactcctaaactcaaacaatcc

SEQ ID NO: 19382 - DNA, 50 bp, synthetic construct
  source 1..50: mol_type = other DNA
aaaaaatattcaataaacacaaaacacttctattccaataacaataaccc

SEQ ID NO: 19383 - DNA, 50 bp, synthetic construct
  source 1..50: mol_type = other DNA
acctcaataaccaaaactattcaataactaactattaaattaaacaaaac

SEQ ID NO: 19384 - DNA, 50 bp, synthetic construct
  source 1..50: mol_type = other DNA
aaataaaaataactactaacataaattcaatacttcttactatcaacccc

SEQ ID NO: 19385 - DNA, 50 bp, synthetic construct
  source 1..50: mol_type = other DNA
tacaaaactataaaaacttacaataaaacccaataaacacaaactaaaac

SEQ ID NO: 19386 - DNA, 50 bp, synthetic construct
  source 1..50: mol_type = other DNA
ctctaacaaataccaacaacaccracccaaccctaatcttaactaaaaac

SEQ ID NO: 19387 - DNA, 50 bp, synthetic construct
  source 1..50: mol_type = other DNA
acrctaaatcrctctatactaattaataaacaaccactatcacctcaaac

SEQ ID NO: 19388 - DNA, 50 bp, synthetic construct
  source 1..50: mol_type = other DNA
atattcatcaataaccaacacaaccaacccattcataaaaacrctaaatc

SEQ ID NO: 19389 - DNA, 50 bp, synthetic construct
  source 1..50: mol_type = other DNA
aaaaacccatattcatcaataaccaacacaaccaacccattcataaaaac

SEQ ID NO: 19390 - DNA, 50 bp, synthetic construct
  source 1..50: mol_type = other DNA
aattactaataaatataaaccccttataaaactacaaaacacacacatac

SEQ ID NO: 19391 - DNA, 50 bp, synthetic construct
  source 1..50: mol_type = other DNA
aacatcataaaaacacaaatacacacacatctatacaaacaaacttcctc

SEQ ID NO: 19392 - DNA, 50 bp, synthetic construct
  source 1..50: mol_type = other DNA
atataacacacctcaaaaaaacctatacttaacatttataaaattatttc

SEQ ID NO: 19393 - DNA, 50 bp, synthetic construct
  source 1..50: mol_type = other DNA
tcaatccaaacccraccaaaaaactatatcatatcataaccctttaacrc

SEQ ID NO: 19394 - DNA, 50 bp, synthetic construct
  source 1..50: mol_type = other DNA
attcaatccaaacccraccaaaaaactatatcatatcataaccctttaac

SEQ ID NO: 19395 - DNA, 50 bp, synthetic construct
  source 1..50: mol_type = other DNA
acaaaaactttaaacrctacaattctaaatccactattcaatccaaaccc

SEQ ID NO: 19396 - DNA, 50 bp, synthetic construct
  source 1..50: mol_type = other DNA
cacaattccctaaccraatttaaactaaacaataaattcaaaactacaac

SEQ ID NO: 19397 - DNA, 50 bp, synthetic construct
  source 1..50: mol_type = other DNA
aacttaactaaaataaccacctctaacaaacrctaaaaacaaaacccaac

SEQ ID NO: 19398 - DNA, 50 bp, synthetic construct
  source 1..50: mol_type = other DNA
ttttaattaaaataaaatcttactctctcrcccaaactaaatacaataac

SEQ ID NO: 19399 - DNA, 50 bp, synthetic construct
  source 1..50: mol_type = other DNA
caaaatataactttccattacttaaaaaatatcactttaaccttaccaac

SEQ ID NO: 19400 - DNA, 50 bp, synthetic construct
  source 1..50: mol_type = other DNA
atataactttccattacttaaaaaatatcactttaaccttaccaacraac

SEQ ID NO: 19401 - DNA, 50 bp, synthetic construct
  source 1..50: mol_type = other DNA
aactataaataaaatttctaattccactccccaaccaaaccaacaaaacc

SEQ ID NO: 19402 - DNA, 50 bp, synthetic construct
  source 1..50: mol_type = other DNA
ctataaataaaatttctaattccactccccaaccaaaccaacaaaaccrc

SEQ ID NO: 19403 - DNA, 50 bp, synthetic construct
  source 1..50: mol_type = other DNA
aaaaaccctctaaacctcccttaccattctactaaataacaccaaaaaac

SEQ ID NO: 19404 - DNA, 50 bp, synthetic construct
  source 1..50: mol_type = other DNA
tatataataaccttctaatttaatcatttaaaaccaaaaatttttatccc

SEQ ID NO: 19405 - DNA, 50 bp, synthetic construct
  source 1..50: mol_type = other DNA
caaaaaaaatcttctttataaatattctcctttctttaatatcctctatc

SEQ ID NO: 19406 - DNA, 50 bp, synthetic construct
  source 1..50: mol_type = other DNA
aaaatcacacrccaccatacrtaactaattttcrcattttttataaatac

SEQ ID NO: 19407 - DNA, 50 bp, synthetic construct
  source 1..50: mol_type = other DNA
atctacatttatttaatttcatatttattaaaattcatacatacttatac

SEQ ID NO: 19408 - DNA, 50 bp, synthetic construct
  source 1..50: mol_type = other DNA
ccccracaaatacacaaataactacrcaactatctaaaatacaaatcaac

SEQ ID NO: 19409 - DNA, 50 bp, synthetic construct
  source 1..50: mol_type = other DNA
actaaacttttaactctacctttattctacttctcaaacccaccaacatc

SEQ ID NO: 19410 - DNA, 50 bp, synthetic construct
  source 1..50: mol_type = other DNA
acctctcctaataacataaactcacattaacattcctttcatacttttac

SEQ ID NO: 19411 - DNA, 50 bp, synthetic construct
  source 1..50: mol_type = other DNA
ttatacttaatactttccaaactttctcctttattcctatcaccatatac

SEQ ID NO: 19412 - DNA, 50 bp, synthetic construct
  source 1..50: mol_type = other DNA
aactacttcctttattactacaaatattattttctattatctcaaatttc

SEQ ID NO: 19413 - DNA, 50 bp, synthetic construct
  source 1..50: mol_type = other DNA
acaaaaaataaaaccaaaccaaccraatttaataatataaacctataatc

SEQ ID NO: 19414 - DNA, 50 bp, synthetic construct
  source 1..50: mol_type = other DNA
ttaatactattctaaacactaaaaattcaacaataaacaaaataaacaac

SEQ ID NO: 19415 - DNA, 50 bp, synthetic construct
  source 1..50: mol_type = other DNA
ttattttccataaactatccaaaatatacaccccaccccctatacaaaac

SEQ ID NO: 19416 - DNA, 50 bp, synthetic construct
  source 1..50: mol_type = other DNA
caaaacrtctaccttcctccataatcaaaaaaattctaaccacaacttcc

SEQ ID NO: 19417 - DNA, 50 bp, synthetic construct
  source 1..50: mol_type = other DNA
rtctaccttcctccataatcaaaaaaattctaaccacaacttccratctc

SEQ ID NO: 19418 - DNA, 50 bp, synthetic construct
  source 1..50: mol_type = other DNA
ataccctcaactaaaaaacctctctaacaaaaacracracrtaaaatatc

SEQ ID NO: 19419 - DNA, 50 bp, synthetic construct
  source 1..50: mol_type = other DNA
aaacacctacctaataccctcaactaaaaaacctctctaacaaaaacrac

SEQ ID NO: 19420 - DNA, 50 bp, synthetic construct
  source 1..50: mol_type = other DNA
tctaaacacctacctaataccctcaactaaaaaacctctctaacaaaaac

SEQ ID NO: 19421 - DNA, 50 bp, synthetic construct
  source 1..50: mol_type = other DNA
aaaaactaacttatactttccccaacaaacaactaacaccctaaaccctc

SEQ ID NO: 19422 - DNA, 50 bp, synthetic construct
  source 1..50: mol_type = other DNA
cctaatatcaaaaaccaaaacttaaaatcattttaaacccaataaaactc

SEQ ID NO: 19423 - DNA, 50 bp, synthetic construct
  source 1..50: mol_type = other DNA
caacatcrtaaaaccacatctctaccaaaaaattaactaaacataataac

SEQ ID NO: 19424 - DNA, 50 bp, synthetic construct
  source 1..50: mol_type = other DNA
tctaccaaaaaattaactaaacataataacrtacatatataatcccaacc

SEQ ID NO: 19425 - DNA, 50 bp, synthetic construct
  source 1..50: mol_type = other DNA
aaatatactaacacaatcttaattcactacaacttccrcctcccaaactc

SEQ ID NO: 19426 - DNA, 50 bp, synthetic construct
  source 1..50: mol_type = other DNA
tcaaaaactacaataaaactataacracccataaaaaaaataccaccaac

SEQ ID NO: 19427 - DNA, 50 bp, synthetic construct
  source 1..50: mol_type = other DNA
taataatatctcctttataaatcrttataattctattataactcctaacc

SEQ ID NO: 19428 - DNA, 50 bp, synthetic construct
  source 1..50: mol_type = other DNA
aaatcrctaaaaataactttacrtacaacccraataaaaaccctacaacc

SEQ ID NO: 19429 - DNA, 50 bp, synthetic construct
  source 1..50: mol_type = other DNA
ccatttacaccraaattaataactttaaaattttccaccctcctcccaac

SEQ ID NO: 19430 - DNA, 50 bp, synthetic construct
  source 1..50: mol_type = other DNA
aataaaaaatctcaaaatcaccaatcccratacaaataacracaaaaacc

SEQ ID NO: 19431 - DNA, 50 bp, synthetic construct
  source 1..50: mol_type = other DNA
ccaaataataaaatatcctctaaaaatatattccccaaaaccaacttcrc

SEQ ID NO: 19432 - DNA, 50 bp, synthetic construct
  source 1..50: mol_type = other DNA
aactcactcacttactaaaaacaaactattttacataaaaactttcaaac

SEQ ID NO: 19433 - DNA, 50 bp, synthetic construct
  source 1..50: mol_type = other DNA
cctattcccaacaaataaataaattcataaaacccccaatttaaattctc

SEQ ID NO: 19434 - DNA, 50 bp, synthetic construct
  source 1..50: mol_type = other DNA
aataaattacttttttccatctcattctcccrtctatctatctattaacc

SEQ ID NO: 19435 - DNA, 50 bp, synthetic construct
  source 1..50: mol_type = other DNA
aaaaaaaatttataaatcatctcraaccacataccaacaaacaacaaacc

SEQ ID NO: 19436 - DNA, 50 bp, synthetic construct
  source 1..50: mol_type = other DNA
atacaaataaaatatctcccraactacaaataaaaacraacrtattaacc

SEQ ID NO: 19437 - DNA, 50 bp, synthetic construct
  source 1..50: mol_type = other DNA
aaaatataacattcaatactactaaaaacctaccaaacaacractaacac

SEQ ID NO: 19438 - DNA, 50 bp, synthetic construct
  source 1..50: mol_type = other DNA
tataacattcaatactactaaaaacctaccaaacaacractaacacrctc

SEQ ID NO: 19439 - DNA, 50 bp, synthetic construct
  source 1..50: mol_type = other DNA
aaaaaaatactataatataacctatttaaaatacaaataaaatatctccc

SEQ ID NO: 19440 - DNA, 50 bp, synthetic construct
  source 1..50: mol_type = other DNA
cctcrcatatacaataaaatctaaatctttatcttctaataacctcacac

SEQ ID NO: 19441 - DNA, 50 bp, synthetic construct
  source 1..50: mol_type = other DNA
aaatatacatcaaacccacctccccaaatactaatacaaatataccctcc

SEQ ID NO: 19442 - DNA, 50 bp, synthetic construct
  source 1..50: mol_type = other DNA
caaatacacttactataatctccrtatccacttctccctaaaaataaaac

SEQ ID NO: 19443 - DNA, 50 bp, synthetic construct
  source 1..50: mol_type = other DNA
tccttaaaactcatctattatcctaccaaaacatttcctataacacatac

SEQ ID NO: 19444 - DNA, 50 bp, synthetic construct
  source 1..50: mol_type = other DNA
ctcatctattatcctaccaaaacatttcctataacacatacrcccacaac

SEQ ID NO: 19445 - DNA, 50 bp, synthetic construct
  source 1..50: mol_type = other DNA
aaaattctcacttcatataacctccctaaactaactaaaaactaaaaaac

SEQ ID NO: 19446 - DNA, 50 bp, synthetic construct
  source 1..50: mol_type = other DNA
acctattctacttaatcctatcctaaaaacttaacaacaaaattttccac

SEQ ID NO: 19447 - DNA, 50 bp, synthetic construct
  source 1..50: mol_type = other DNA
ctatataaatccaaaccaattaactccctaaacaaatacccctcacccac

SEQ ID NO: 19448 - DNA, 50 bp, synthetic construct
  source 1..50: mol_type = other DNA
craaatcccttataactaaactatacatttacaaaaacrctaacaaaatc

SEQ ID NO: 19449 - DNA, 50 bp, synthetic construct
  source 1..50: mol_type = other DNA
cacatacacaaccraaatcccttataactaaactatacatttacaaaaac

SEQ ID NO: 19450 - DNA, 50 bp, synthetic construct
  source 1..50: mol_type = other DNA
ctcctacaaatacacaacttaatcacaaaaaactccractatacatatac

SEQ ID NO: 19451 - DNA, 50 bp, synthetic construct
  source 1..50: mol_type = other DNA
ccctccaaaaaaaacaataacaaaaacacataaaatcaacaatatcatcc

SEQ ID NO: 19452 - DNA, 50 bp, synthetic construct
  source 1..50: mol_type = other DNA
aacaaaaacacataaaatcaacaatatcatccrtaaacacaaaaacaccc

SEQ ID NO: 19453 - DNA, 50 bp, synthetic construct
  source 1..50: mol_type = other DNA
taaaatattttccaataacaactcaatacraatcaaaaataatctcctac

SEQ ID NO: 19454 - DNA, 50 bp, synthetic construct
  source 1..50: mol_type = other DNA
aaatcctcctacaattaacatattacrtaacacacraaaaaattctcatc

SEQ ID NO: 19455 - DNA, 50 bp, synthetic construct
  source 1..50: mol_type = other DNA
acacrcctacttaaaaaatcctcctacaattaacatattacrtaacacac

SEQ ID NO: 19456 - DNA, 50 bp, synthetic construct
  source 1..50: mol_type = other DNA
crtattaacacacrcctacttaaaaaatcctcctacaattaacatattac

SEQ ID NO: 19457 - DNA, 50 bp, synthetic construct
  source 1..50: mol_type = other DNA
aaaaaccccctccacacctctataatccttaaacaacacaaaaaaataac

SEQ ID NO: 19458 - DNA, 50 bp, synthetic construct
  source 1..50: mol_type = other DNA
ataaaaaatctcraaacraaaacaccaatatcatcaacrcctctactatc

SEQ ID NO: 19459 - DNA, 50 bp, synthetic construct
  source 1..50: mol_type = other DNA
tataaaaactactatctcctactatctaaaaaataatctttaaaaaaaac

SEQ ID NO: 19460 - DNA, 50 bp, synthetic construct
  source 1..50: mol_type = other DNA
taactccaaatattttcttatcaacttcattctcttctcttattttctac

SEQ ID NO: 19461 - DNA, 50 bp, synthetic construct
  source 1..50: mol_type = other DNA
atcaaaactcraaaataacaatacaataacaaactttcctcaaacctcac

SEQ ID NO: 19462 - DNA, 50 bp, synthetic construct
  source 1..50: mol_type = other DNA
aaaatctaaacttttaaaatttacatataaaaacaacrtttcaaaacctc

SEQ ID NO: 19463 - DNA, 50 bp, synthetic construct
  source 1..50: mol_type = other DNA
aaaccacccttctactaaataaacataaatattcaaacctacctaaacac

SEQ ID NO: 19464 - DNA, 50 bp, synthetic construct
  source 1..50: mol_type = other DNA
aaataaacataaatattcaaacctacctaaacacraccctaaattctttc

SEQ ID NO: 19465 - DNA, 50 bp, synthetic construct
  source 1..50: mol_type = other DNA
aaacacraccctaaattctttcrattaaaaatacaaaacaacattttatc

SEQ ID NO: 19466 - DNA, 50 bp, synthetic construct
  source 1..50: mol_type = other DNA
craccctaaattctttcrattaaaaatacaaaacaacattttatcraacc

SEQ ID NO: 19467 - DNA, 50 bp, synthetic construct
  source 1..50: mol_type = other DNA
acctcaacaatttaaaaatatcacctcacctataaatacctccataatcc

SEQ ID NO: 19468 - DNA, 50 bp, synthetic construct
  source 1..50: mol_type = other DNA
ccataatccrctaaccatttattcttttattaaaaaacacaaaacacaac

SEQ ID NO: 19469 - DNA, 50 bp, synthetic construct
  source 1..50: mol_type = other DNA
ttattcttttattaaaaaacacaaaacacaacrctatccctataatctac

SEQ ID NO: 19470 - DNA, 50 bp, synthetic construct
  source 1..50: mol_type = other DNA
aaatcccaaaaaaactttactcccaaacaaaactacaactcacaaaaacc

SEQ ID NO: 19471 - DNA, 50 bp, synthetic construct
  source 1..50: mol_type = other DNA
attcctaaaatattaaaaaccraaaatactttcaaatcccctatctaccc

SEQ ID NO: 19472 - DNA, 50 bp, synthetic construct
  source 1..50: mol_type = other DNA
ctaaactaaactaacttctaaacaaaaaaattcctaaaatattaaaaacc

SEQ ID NO: 19473 - DNA, 50 bp, synthetic construct
  source 1..50: mol_type = other DNA
cccttaatattccaaaaatctttctatccaaaaaccaattcaatccaacc

SEQ ID NO: 19474 - DNA, 50 bp, synthetic construct
  source 1..50: mol_type = other DNA
ttaatattccaaaaatctttctatccaaaaaccaattcaatccaaccrcc

SEQ ID NO: 19475 - DNA, 50 bp, synthetic construct
  source 1..50: mol_type = other DNA
attaacaacaaactaaaaaataaaactatccaccttcraactaaccccac

SEQ ID NO: 19476 - DNA, 50 bp, synthetic construct
  source 1..50: mol_type = other DNA
aacttccacccaaatcctataatcrtttcattttaaaaacaataccaccc

SEQ ID NO: 19477 - DNA, 50 bp, synthetic construct
  source 1..50: mol_type = other DNA
aaattaccaaatcatttaaacccttaaacaaattatctaaacctccctac

SEQ ID NO: 19478 - DNA, 50 bp, synthetic construct
  source 1..50: mol_type = other DNA
caaaaaaacaaaaaccaaaatcctacttaaacccctaactctataacccc

SEQ ID NO: 19479 - DNA, 50 bp, synthetic construct
  source 1..50: mol_type = other DNA
aaaaattctaaaatctaataaaaatacctacattaaccaaaaactcaacc

SEQ ID NO: 19480 - DNA, 50 bp, synthetic construct
  source 1..50: mol_type = other DNA
ccttaaacaactaaactaactatataataactactccataccaaatcccc

SEQ ID NO: 19481 - DNA, 50 bp, synthetic construct
  source 1..50: mol_type = other DNA
tatatatacatccatttattaaatacccactctatactctacactcccac

SEQ ID NO: 19482 - DNA, 50 bp, synthetic construct
  source 1..50: mol_type = other DNA
aaataacccaaacaactcccaaaacctaaactcatacctatcactctcac

SEQ ID NO: 19483 - DNA, 50 bp, synthetic construct
  source 1..50: mol_type = other DNA
caaacaactcccaaaacctaaactcatacctatcactctcacrtaaacac

SEQ ID NO: 19484 - DNA, 50 bp, synthetic construct
  source 1..50: mol_type = other DNA
actaaacaaaaatcctataactcraaaatatcacccatacraacrtaaac

SEQ ID NO: 19485 - DNA, 50 bp, synthetic construct
  source 1..50: mol_type = other DNA
aacaaaactaaacaaaaatcctataactcraaaatatcacccatacraac

SEQ ID NO: 19486 - DNA, 50 bp, synthetic construct
  source 1..50: mol_type = other DNA
tcaaacaaaatctactaattcaacaaaactaaacaaaaatcctataactc

SEQ ID NO: 19487 - DNA, 50 bp, synthetic construct
  source 1..50: mol_type = other DNA
cctacctaaaaaaaaactctatatctcaaaacccaacacccaacaaaacc

SEQ ID NO: 19488 - DNA, 50 bp, synthetic construct
  source 1..50: mol_type = other DNA
aaccccctaaatcaaccctaacctccaaataaaatcacrtttctcaaaac

SEQ ID NO: 19489 - DNA, 50 bp, synthetic construct
  source 1..50: mol_type = other DNA
tctaaaatctataaccccctaaatcaaccctaacctccaaataaaatcac

SEQ ID NO: 19490 - DNA, 50 bp, synthetic construct
  source 1..50: mol_type = other DNA
aacttcaaaaaacaatacccaccccctatcttttacatataaccaaaaac

SEQ ID NO: 19491 - DNA, 50 bp, synthetic construct
  source 1..50: mol_type = other DNA
tactctcaaacataatatcacaaaattataaacataaaaataaaaccttc

SEQ ID NO: 19492 - DNA, 50 bp, synthetic construct
  source 1..50: mol_type = other DNA
ctctcaaacataatatcacaaaattataaacataaaaataaaaccttcrc

SEQ ID NO: 19493 - DNA, 50 bp, synthetic construct
  source 1..50: mol_type = other DNA
tcacaaaattataaacataaaaataaaaccttcrcrtaccaacaataaac

SEQ ID NO: 19494 - DNA, 50 bp, synthetic construct
  source 1..50: mol_type = other DNA
aattataaacataaaaataaaaccttcrcrtaccaacaataaacraaacc

SEQ ID NO: 19495 - DNA, 50 bp, synthetic construct
  source 1..50: mol_type = other DNA
aaaaatctaaccraaccrtaaaaacacacaaccttttaattctcccaacc

SEQ ID NO: 19496 - DNA, 50 bp, synthetic construct
  source 1..50: mol_type = other DNA
aataaaaaaaaccacacractaaaaaaaccaaaaaattatatactcccac

SEQ ID NO: 19497 - DNA, 50 bp, synthetic construct
  source 1..50: mol_type = other DNA
cctcaaaaccatatatatacttctataaaataaaacaccccttctaaccc

SEQ ID NO: 19498 - DNA, 50 bp, synthetic construct
  source 1..50: mol_type = other DNA
caataactactaaaccccaaaaaaccaaaattaactctaacraaaccacc

SEQ ID NO: 19499 - DNA, 50 bp, synthetic construct
  source 1..50: mol_type = other DNA
acaaaaacacacacataaccctaaaactacactaataatacrataatctc

SEQ ID NO: 19500 - DNA, 50 bp, synthetic construct
  source 1..50: mol_type = other DNA
aaaaataacacaaaaaacacataaccacaaaaactcacaatcctcraacc

SEQ ID NO: 19501 - DNA, 50 bp, synthetic construct
  source 1..50: mol_type = other DNA
caaaaaaaaataacacaaaaaacacataaccacaaaaactcacaatcctc

SEQ ID NO: 19502 - DNA, 50 bp, synthetic construct
  source 1..50: mol_type = other DNA
acccractaaaaactaaaactctaaaactaaacttcctacctataaaccc

SEQ ID NO: 19503 - DNA, 50 bp, synthetic construct
  source 1..50: mol_type = other DNA
aactcataaaccctaaaaacaaaactaaccrcaaaattattactctaccc

SEQ ID NO: 19504 - DNA, 50 bp, synthetic construct
  source 1..50: mol_type = other DNA
aaaacaaaaataaataatctaactcataaaccctaaaaacaaaactaacc

SEQ ID NO: 19505 - DNA, 50 bp, synthetic construct
  source 1..50: mol_type = other DNA
tcaaatcraccacacattaacaacaaaaatctatttatattaactaaccc

SEQ ID NO: 19506 - DNA, 50 bp, synthetic construct
  source 1..50: mol_type = other DNA
aaaacacccttcctacttccatttaattccaaaataaatcttacaacttc

SEQ ID NO: 19507 - DNA, 50 bp, synthetic construct
  source 1..50: mol_type = other DNA
cccattattaccaacccccataaaaaacaactctatcatttctaaaaacc

SEQ ID NO: 19508 - DNA, 50 bp, synthetic construct
  source 1..50: mol_type = other DNA
ataaaactacctcccataaaaattaacaataataaaaataaaatatccac

SEQ ID NO: 19509 - DNA, 50 bp, synthetic construct
  source 1..50: mol_type = other DNA
ataaaactcccatctatcaaaaatctctaaaccccractcttctcatcac

SEQ ID NO: 19510 - DNA, 50 bp, synthetic construct
  source 1..50: mol_type = other DNA
ataactaaaccacacataaaactcccatctatcaaaaatctctaaacccc

SEQ ID NO: 19511 - DNA, 50 bp, synthetic construct
  source 1..50: mol_type = other DNA
aaccattaaatactctaaaacaaccctaccatccctctctaaacctcaac

SEQ ID NO: 19512 - DNA, 50 bp, synthetic construct
  source 1..50: mol_type = other DNA
cataataactaaaaacctcaaaaccaataaaaaacacatataaatttccc

SEQ ID NO: 19513 - DNA, 50 bp, synthetic construct
  source 1..50: mol_type = other DNA
actcctaatacccaataaaacaaaataataaacacacaacccttaaatcc

SEQ ID NO: 19514 - DNA, 50 bp, synthetic construct
  source 1..50: mol_type = other DNA
caaaaaaataaaaactctaacccacctcttaaatctactctacccaactc

SEQ ID NO: 19515 - DNA, 50 bp, synthetic construct
  source 1..50: mol_type = other DNA
aaaaaaaacacaaatcaacaaaaccaaaccccaattccaaaatcataccc

SEQ ID NO: 19516 - DNA, 50 bp, synthetic construct
  source 1..50: mol_type = other DNA
aaccaaaatccctttacctttcaaatatctaaacctcctacctaaatttc

SEQ ID NO: 19517 - DNA, 50 bp, synthetic construct
  source 1..50: mol_type = other DNA
aaaaatttatatacaaaaaaccctaaacatacactaatttacaaaaactc

SEQ ID NO: 19518 - DNA, 50 bp, synthetic construct
  source 1..50: mol_type = other DNA
ccacaaattacaaaaaaccctatcactaacaaaaaactaactttattctc

SEQ ID NO: 19519 - DNA, 50 bp, synthetic construct
  source 1..50: mol_type = other DNA
aaaaaaaacrtacctaaaaaaataacctatacatctaataaatatatcac

SEQ ID NO: 19520 - DNA, 50 bp, synthetic construct
  source 1..50: mol_type = other DNA
atttactacatacacatttctaataaaaacractaaataaataaaacacc

SEQ ID NO: 19521 - DNA, 50 bp, synthetic construct
  source 1..50: mol_type = other DNA
aaacaaaaacatacaaatctatttactacatacacatttctaataaaaac

SEQ ID NO: 19522 - DNA, 50 bp, synthetic construct
  source 1..50: mol_type = other DNA
actcatacaatcattcccctttacctataactaaaacttaacttcatttc

SEQ ID NO: 19523 - DNA, 50 bp, synthetic construct
  source 1..50: mol_type = other DNA
caaaaaaatatctatttctaacaaatccacaaataaccccraaattcacc

SEQ ID NO: 19524 - DNA, 50 bp, synthetic construct
  source 1..50: mol_type = other DNA
aaaaaaaaaccaaaaaaatatctatttctaacaaatccacaaataacccc

SEQ ID NO: 19525 - DNA, 50 bp, synthetic construct
  source 1..50: mol_type = other DNA
aacttataatctaaaaccaaatatcttaaaaatctcattacctaatctcc

SEQ ID NO: 19526 - DNA, 50 bp, synthetic construct
  source 1..50: mol_type = other DNA
tttaaatctcccaacttccaatccataactatttatcctacatcaaacac

SEQ ID NO: 19527 - DNA, 50 bp, synthetic construct
  source 1..50: mol_type = other DNA
crcttctcactaacaatttcttacctttcctatcattctaactcattccc

SEQ ID NO: 19528 - DNA, 50 bp, synthetic construct
  source 1..50: mol_type = other DNA
attaaaaacccaaactctactaaatataacacrttctcataaacacrccc

SEQ ID NO: 19529 - DNA, 50 bp, synthetic construct
  source 1..50: mol_type = other DNA
taaaattaaaaacccaaactctactaaatataacacrttctcataaacac

SEQ ID NO: 19530 - DNA, 50 bp, synthetic construct
  source 1..50: mol_type = other DNA
taaaaaaacacccataaaattaaaaacccaaactctactaaatataacac

SEQ ID NO: 19531 - DNA, 50 bp, synthetic construct
  source 1..50: mol_type = other DNA
attctcctaccttaacttcccaaataacttaaattacaaacaccaatcac

SEQ ID NO: 19532 - DNA, 50 bp, synthetic construct
  source 1..50: mol_type = other DNA
tttttcactctccctctatttcaacaaatatttactaaatactcaacttc

SEQ ID NO: 19533 - DNA, 50 bp, synthetic construct
  source 1..50: mol_type = other DNA
tctaccttacacccaaaattactctaaaaactaaaatatttccattacrc

SEQ ID NO: 19534 - DNA, 50 bp, synthetic construct
  source 1..50: mol_type = other DNA
ccaaaaaaaattttttctaaataattttttcattactttataactttccc

SEQ ID NO: 19535 - DNA, 50 bp, synthetic construct
  source 1..50: mol_type = other DNA
caaattataaaacaaaaccccatacccaaataaccccatttaaaaactcc

SEQ ID NO: 19536 - DNA, 50 bp, synthetic construct
  source 1..50: mol_type = other DNA
taaaataacacaaaaaaacrtacaacraaaaattaaaactccttcctccc

SEQ ID NO: 19537 - DNA, 50 bp, synthetic construct
  source 1..50: mol_type = other DNA
ataaattaacctataataaaacraccaaaattaatcatctaacttctttc

SEQ ID NO: 19538 - DNA, 50 bp, synthetic construct
  source 1..50: mol_type = other DNA
aacaataataatcatacctacacacactttaaatacrctaaaacactacc

SEQ ID NO: 19539 - DNA, 50 bp, synthetic construct
  source 1..50: mol_type = other DNA
ccaactcaactactaacaataataatcatacctacacacactttaaatac

SEQ ID NO: 19540 - DNA, 50 bp, synthetic construct
  source 1..50: mol_type = other DNA
ctttttaaaaaccttaacatacrtttccctatccacattaaataattatc

SEQ ID NO: 19541 - DNA, 50 bp, synthetic construct
  source 1..50: mol_type = other DNA
aaaaacacaaaaaatatcacaacraaaactttttaaaaaccttaacatac

SEQ ID NO: 19542 - DNA, 50 bp, synthetic construct
  source 1..50: mol_type = other DNA
ctatccaatataaacaaaaaaacrcataccaaaatttctaaaaaactccc

SEQ ID NO: 19543 - DNA, 50 bp, synthetic construct
  source 1..50: mol_type = other DNA
tacctcctcaataaatacccataaccaaacaacaaatacaacctaactcc

SEQ ID NO: 19544 - DNA, 50 bp, synthetic construct
  source 1..50: mol_type = other DNA
ccaaactatatctattatctaaccataaacatccactaaaaaaacaaaac

SEQ ID NO: 19545 - DNA, 50 bp, synthetic construct
  source 1..50: mol_type = other DNA
rcttccaaaaacccctacctccaaaaacaaatcctaaaatctaaaaaacc

SEQ ID NO: 19546 - DNA, 50 bp, synthetic construct
  source 1..50: mol_type = other DNA
aaacctaaaaccaaaaatcttctaaaaaaaacttttcttatcttaaaaac

SEQ ID NO: 19547 - DNA, 50 bp, synthetic construct
  source 1..50: mol_type = other DNA
tctatcccctacccttcctccaactttactaaaattaataaataataaac

SEQ ID NO: 19548 - DNA, 50 bp, synthetic construct
  source 1..50: mol_type = other DNA
ctaaacttccattaaccattaccacttacttatcrttataaaaaaaaacc

SEQ ID NO: 19549 - DNA, 50 bp, synthetic construct
  source 1..50: mol_type = other DNA
tattcactatacatcrtactaaaaaacttccatacacttcctccattccc

SEQ ID NO: 19550 - DNA, 50 bp, synthetic construct
  source 1..50: mol_type = other DNA
acaataataaaaacraaaattcacactcataaatccttacaatacactcc

SEQ ID NO: 19551 - DNA, 50 bp, synthetic construct
  source 1..50: mol_type = other DNA
aaacttttataccaataacacctttaccaaaaactacrtatttaaaaccc

SEQ ID NO: 19552 - DNA, 50 bp, synthetic construct
  source 1..50: mol_type = other DNA
tttaaaacccraaaaaaactttacttttctaaaaaaatacacacacacac

SEQ ID NO: 19553 - DNA, 50 bp, synthetic construct
  source 1..50: mol_type = other DNA
aatataaaaaaactataccaaacatacatcactaaaccaacraacraatc

SEQ ID NO: 19554 - DNA, 50 bp, synthetic construct
  source 1..50: mol_type = other DNA
caataactactatcattccccaatttaaaaaactttctccatctcrattc

SEQ ID NO: 19555 - DNA, 50 bp, synthetic construct
  source 1..50: mol_type = other DNA
aactactatcattccccaatttaaaaaactttctccatctcrattcrctc

SEQ ID NO: 19556 - DNA, 50 bp, synthetic construct
  source 1..50: mol_type = other DNA
tcttaaacatataaaataaatacactattacactacctaacccataaaac

SEQ ID NO: 19557 - DNA, 50 bp, synthetic construct
  source 1..50: mol_type = other DNA
taaatataatctacaacacaaaacctcaaaaaaaatcttcacaactaatc

SEQ ID NO: 19558 - DNA, 50 bp, synthetic construct
  source 1..50: mol_type = other DNA
taaaatcttaaaacctactatcacraaaaataatattacaaactaaaacc

SEQ ID NO: 19559 - DNA, 50 bp, synthetic construct
  source 1..50: mol_type = other DNA
ttataaccattattttaaatcattaaataatctttatccctacataaatc

SEQ ID NO: 19560 - DNA, 50 bp, synthetic construct
  source 1..50: mol_type = other DNA
attcaaacttactataacttcttacrattttaaataacttctacttatac

SEQ ID NO: 19561 - DNA, 50 bp, synthetic construct
  source 1..50: mol_type = other DNA
actacttcctaacatttctaaaaatattcaaacttactataacttcttac

SEQ ID NO: 19562 - DNA, 50 bp, synthetic construct
  source 1..50: mol_type = other DNA
tttaatattttcraaccrtaattcaccacaaataacaaaccaaaaaaaac

SEQ ID NO: 19563 - DNA, 50 bp, synthetic construct
  source 1..50: mol_type = other DNA
tcaaaaataaacaatatataaattatcaattacacactattctaaataac

SEQ ID NO: 19564 - DNA, 50 bp, synthetic construct
  source 1..50: mol_type = other DNA
ctctcccaaaatccccaataaatacctaaaaccccraataatacccaatc

SEQ ID NO: 19565 - DNA, 50 bp, synthetic construct
  source 1..50: mol_type = other DNA
tatctaaaatttcctctctcccaaaatccccaataaatacctaaaacccc

SEQ ID NO: 19566 - DNA, 50 bp, synthetic construct
  source 1..50: mol_type = other DNA
aaaccractacaacataatataaaatataatatttctcttcaaataaccc

SEQ ID NO: 19567 - DNA, 50 bp, synthetic construct
  source 1..50: mol_type = other DNA
cccttttttctctttttctccttttttacttttattaaatacccaaacac

SEQ ID NO: 19568 - DNA, 50 bp, synthetic construct
  source 1..50: mol_type = other DNA
ttacrtcaaaaataaactcctacccctttattcaaatatactctcaaaac

SEQ ID NO: 19569 - DNA, 50 bp, synthetic construct
  source 1..50: mol_type = other DNA
tttattcaaatatactctcaaaacractaaccaaaaaaacacccctctac

SEQ ID NO: 19570 - DNA, 50 bp, synthetic construct
  source 1..50: mol_type = other DNA
aaaaattattcataacaataaactcctatttcaatatttcctaatacrac

SEQ ID NO: 19571 - DNA, 50 bp, synthetic construct
  source 1..50: mol_type = other DNA
tttaatcatcatctctaaataactccaaacaaaaaaacaaaatccrcctc

SEQ ID NO: 19572 - DNA, 50 bp, synthetic construct
  source 1..50: mol_type = other DNA
aaaaataaattcaaaatcctccaaataacrtccaatatccatttcatcac

SEQ ID NO: 19573 - DNA, 50 bp, synthetic construct
  source 1..50: mol_type = other DNA
aacrtccaatatccatttcatcacratttaaaacctataataaccttatc

SEQ ID NO: 19574 - DNA, 50 bp, synthetic construct
  source 1..50: mol_type = other DNA
taattactattatttcctctctacaactaaaaaaattttaaactaaaaac

SEQ ID NO: 19575 - DNA, 50 bp, synthetic construct
  source 1..50: mol_type = other DNA
ataatccaaaaccraaacrctaaaattaaatataaaacttttaacrtaac

SEQ ID NO: 19576 - DNA, 50 bp, synthetic construct
  source 1..50: mol_type = other DNA
acttaataatccaaaaccraaacrctaaaattaaatataaaacttttaac

SEQ ID NO: 19577 - DNA, 50 bp, synthetic construct
  source 1..50: mol_type = other DNA
crtaaaaaaataatctatctacttactccraaacttaataatccaaaacc

SEQ ID NO: 19578 - DNA, 50 bp, synthetic construct
  source 1..50: mol_type = other DNA
aaccattaatccractactctatctctttttcaaattaaaacrccraatc

SEQ ID NO: 19579 - DNA, 50 bp, synthetic construct
  source 1..50: mol_type = other DNA
acatccctttatctcraaatatccrtttaatttaatctataaacaaacac

SEQ ID NO: 19580 - DNA, 50 bp, synthetic construct
  source 1..50: mol_type = other DNA
caaatactacraactcttaaccrctccacctaatttcatttaaaaacctc

SEQ ID NO: 19581 - DNA, 50 bp, synthetic construct
  source 1..50: mol_type = other DNA
ctcrcraaaataacttaaatccraaacctccaaataaaaccaaataaaac

SEQ ID NO: 19582 - DNA, 50 bp, synthetic construct
  source 1..50: mol_type = other DNA
ctaacctaaaacrcctcctcrataaatacrctccctaaattaacaataac

SEQ ID NO: 19583 - DNA, 50 bp, synthetic construct
  source 1..50: mol_type = other DNA
ctaaacccraaataacaacaactatttccaaacraaaaacaacraaactc

SEQ ID NO: 19584 - DNA, 50 bp, synthetic construct
  source 1..50: mol_type = other DNA
craaactaaccrcaccrtaactcaaattaattttcctacaccttacaaac

SEQ ID NO: 19585 - DNA, 50 bp, synthetic construct
  source 1..50: mol_type = other DNA
taaattattatcctatctatctaattccaacctcraaaatttaataatac

SEQ ID NO: 19586 - DNA, 50 bp, synthetic construct
  source 1..50: mol_type = other DNA
taattccaacctcraaaatttaataatacracccraacctaactataatc

SEQ ID NO: 19587 - DNA, 50 bp, synthetic construct
  source 1..50: mol_type = other DNA
ctaacrttttcacaatacrccctaaatttccttaaattactactaaaacc

SEQ ID NO: 19588 - DNA, 50 bp, synthetic construct
  source 1..50: mol_type = other DNA
aaaaaataacttaaactttctaacaatctttcttccaataaccttatttc

SEQ ID NO: 19589 - DNA, 50 bp, synthetic construct
  source 1..50: mol_type = other DNA
ctttactttaaatttctccactcattatttcaaaatatttattataaacc

SEQ ID NO: 19590 - DNA, 50 bp, synthetic construct
  source 1..50: mol_type = other DNA
ttactataatataatttaaatatttacaaatccactctcaatttctaacc

SEQ ID NO: 19591 - DNA, 50 bp, synthetic construct
  source 1..50: mol_type = other DNA
aataaataacttaactataaaataaaaccrtccrtaaaacractaacctc

SEQ ID NO: 19592 - DNA, 50 bp, synthetic construct
  source 1..50: mol_type = other DNA
ttaattttaaaaaatctacacaccttttcttaacctcctaaatacttaac

SEQ ID NO: 19593 - DNA, 50 bp, synthetic construct
  source 1..50: mol_type = other DNA
aattttaaaaaatctacacaccttttcttaacctcctaaatacttaacrc

SEQ ID NO: 19594 - DNA, 50 bp, synthetic construct
  source 1..50: mol_type = other DNA
aaaacaaaactaaatttccacaaaccctaaaaaaaattctaaaattcccc

SEQ ID NO: 19595 - DNA, 50 bp, synthetic construct
  source 1..50: mol_type = other DNA
aaccctattcctaaaattctaatctattaaaactaaactaaactaaaacc

SEQ ID NO: 19596 - DNA, 50 bp, synthetic construct
  source 1..50: mol_type = other DNA
rctcacatcaataattccccaaaaataatatccraacccrcaactttaac

SEQ ID NO: 19597 - DNA, 50 bp, synthetic construct
  source 1..50: mol_type = other DNA
aaaccraaaatttatatttccaacaaaaactaaaataacrccaaaactac

SEQ ID NO: 19598 - DNA, 50 bp, synthetic construct
  source 1..50: mol_type = other DNA
aaaatttatatttccaacaaaaactaaaataacrccaaaactacraaccc

SEQ ID NO: 19599 - DNA, 50 bp, synthetic construct
  source 1..50: mol_type = other DNA
ttaatattaccaaatctctaaacctatataattaaattacaaaccccaac

SEQ ID NO: 19600 - DNA, 50 bp, synthetic construct
  source 1..50: mol_type = other DNA
cataatttcttaaaaaaatacactttcttataaaaaacaccacacaaaac

SEQ ID NO: 19601 - DNA, 50 bp, synthetic construct
  source 1..50: mol_type = other DNA
aaaaatacactttcttataaaaaacaccacacaaaacratcaacaactac

SEQ ID NO: 19602 - DNA, 50 bp, synthetic construct
  source 1..50: mol_type = other DNA
tctcatcccttctaatatcacaaacaaaatttataattaaaaccaaatac

SEQ ID NO: 19603 - DNA, 50 bp, synthetic construct
  source 1..50: mol_type = other DNA
atttaaacatttaataccaattaaataacttttaaacctctaatttttac

SEQ ID NO: 19604 - DNA, 50 bp, synthetic construct
  source 1..50: mol_type = other DNA
tacattaatacccctctaataacaactaaaatcctttctctatcaatccc

SEQ ID NO: 19605 - DNA, 50 bp, synthetic construct
  source 1..50: mol_type = other DNA
aataaaataatacatataaaaaacttaacaaaccraacacratatctcac

SEQ ID NO: 19606 - DNA, 50 bp, synthetic construct
  source 1..50: mol_type = other DNA
aattaaatacataaactcaaaaatcatactaaacctaattaaaaaacttc

SEQ ID NO: 19607 - DNA, 50 bp, synthetic construct
  source 1..50: mol_type = other DNA
aactaactcaaatacaaaacacactctaaatatactcaaaaactcaaatc

SEQ ID NO: 19608 - DNA, 50 bp, synthetic construct
  source 1..50: mol_type = other DNA
taaatatactcaaaaactcaaatcrttcttcaaaacatttcctattttcc

SEQ ID NO: 19609 - DNA, 50 bp, synthetic construct
  source 1..50: mol_type = other DNA
caaaaactcaaatcrttcttcaaaacatttcctattttccrattaactac

SEQ ID NO: 19610 - DNA, 50 bp, synthetic construct
  source 1..50: mol_type = other DNA
ccaaacaaaatttccraaaaaactaaacaactctcttaaccaaaccaccc

SEQ ID NO: 19611 - DNA, 50 bp, synthetic construct
  source 1..50: mol_type = other DNA
ttattaactatcataaataattaattttcctatccccctaaatcccccac

SEQ ID NO: 19612 - DNA, 50 bp, synthetic construct
  source 1..50: mol_type = other DNA
ctttcccctttcacaaaaaaataaacttaaactaactactaaaaccttac

SEQ ID NO: 19613 - DNA, 50 bp, synthetic construct
  source 1..50: mol_type = other DNA
aaaaataacatttttctcccctcactataaaactaaaaactcttaaatcc

SEQ ID NO: 19614 - DNA, 50 bp, synthetic construct
  source 1..50: mol_type = other DNA
tttccrctctttctaccctacttcctcatcttcaaaatcatctaaaatcc

SEQ ID NO: 19615 - DNA, 50 bp, synthetic construct
  source 1..50: mol_type = other DNA
aactaaacacacaacatatatactcaaaaaatacccaaaaaaaaattaac

SEQ ID NO: 19616 - DNA, 50 bp, synthetic construct
  source 1..50: mol_type = other DNA
ccattacttaaacacaatttattcatactttccaattccctcaaaccctc

SEQ ID NO: 19617 - DNA, 50 bp, synthetic construct
  source 1..50: mol_type = other DNA
attaatccaaaaactcaaactttctcatcaatatttatcttattcttaac

SEQ ID NO: 19618 - DNA, 50 bp, synthetic construct
  source 1..50: mol_type = other DNA
cacccrtctaaattctaaataaaacraatcaaacctcattaatttccrac

SEQ ID NO: 19619 - DNA, 50 bp, synthetic construct
  source 1..50: mol_type = other DNA
caattccaaaatcctatatatataaaaaatacrcacrataccraatctcc

SEQ ID NO: 19620 - DNA, 50 bp, synthetic construct
  source 1..50: mol_type = other DNA
tcatcatcccracccaattccaaaatcctatatatataaaaaatacrcac

SEQ ID NO: 19621 - DNA, 50 bp, synthetic construct
  source 1..50: mol_type = other DNA
attctataaacattctaaatcaacccaaaacacccraaaacatccttatc

SEQ ID NO: 19622 - DNA, 50 bp, synthetic construct
  source 1..50: mol_type = other DNA
tctaacacaaaaacaattctataaacattctaaatcaacccaaaacaccc

SEQ ID NO: 19623 - DNA, 50 bp, synthetic construct
  source 1..50: mol_type = other DNA
taaacaattactcctttataacctccatttatttttatcttattaacatc

SEQ ID NO: 19624 - DNA, 50 bp, synthetic construct
  source 1..50: mol_type = other DNA
acttctaataatcaaaaacttattataaaatatcttcatattaccactac

SEQ ID NO: 19625 - DNA, 50 bp, synthetic construct
  source 1..50: mol_type = other DNA
tcaacaaatactaacatattatctaaatttaaaccttaaaacaataacac

SEQ ID NO: 19626 - DNA, 50 bp, synthetic construct
  source 1..50: mol_type = other DNA
taaatacaaccttaaactattccaccctttaatacttaatctattaactc

SEQ ID NO: 19627 - DNA, 50 bp, synthetic construct
  source 1..50: mol_type = other DNA
caaaaaataaaacaactcaaaattacatttaaaaaactccaacctcracc

SEQ ID NO: 19628 - DNA, 50 bp, synthetic construct
  source 1..50: mol_type = other DNA
aaataaaacaactcaaaattacatttaaaaaactccaacctcraccrccc

SEQ ID NO: 19629 - DNA, 50 bp, synthetic construct
  source 1..50: mol_type = other DNA
tctaacctaacccttctttatataccaaatttttatttccrtcatttccc

SEQ ID NO: 19630 - DNA, 50 bp, synthetic construct
  source 1..50: mol_type = other DNA
aaacctcacttctaacctaacccttctttatataccaaatttttatttcc

SEQ ID NO: 19631 - DNA, 50 bp, synthetic construct
  source 1..50: mol_type = other DNA
aataaaatcccaccctaacaaaaaaaacracttttctaaaaaaacttaac

SEQ ID NO: 19632 - DNA, 50 bp, synthetic construct
  source 1..50: mol_type = other DNA
ataaaactacctaacracaaaataccccccacaatcrtaaaaactatatc

SEQ ID NO: 19633 - DNA, 50 bp, synthetic construct
  source 1..50: mol_type = other DNA
ccraaaacaactatcataactactatcaataaaaacccrtaataaaaatc

SEQ ID NO: 19634 - DNA, 50 bp, synthetic construct
  source 1..50: mol_type = other DNA
raaccctcactaacaacaaccataacaattacttccraatatattaaatc

SEQ ID NO: 19635 - DNA, 50 bp, synthetic construct
  source 1..50: mol_type = other DNA
ccctcactaacaacaaccataacaattacttccraatatattaaatcrcc

SEQ ID NO: 19636 - DNA, 50 bp, synthetic construct
  source 1..50: mol_type = other DNA
ataacttaccaataaaatattcaacacaatacctacctaacacrtaaaac

SEQ ID NO: 19637 - DNA, 50 bp, synthetic construct
  source 1..50: mol_type = other DNA
tccraaatcrtataactaatacttaataaacrtaatctaacccaaacacc

SEQ ID NO: 19638 - DNA, 50 bp, synthetic construct
  source 1..50: mol_type = other DNA
ctctaaacaacaaaatacctaacttaaaaaaacttacraaaataccatac

SEQ ID NO: 19639 - DNA, 50 bp, synthetic construct
  source 1..50: mol_type = other DNA
aaaaaccaacttataaccaatatactctttataataaacacaaaacccac

SEQ ID NO: 19640 - DNA, 50 bp, synthetic construct
  source 1..50: mol_type = other DNA
tttcaaaaataataatcctaattctctacaccaaccactaacraaataac

SEQ ID NO: 19641 - DNA, 50 bp, synthetic construct
  source 1..50: mol_type = other DNA
aaaaaactttattctctaattcttcaaattctctattaaaaatcctaaac

SEQ ID NO: 19642 - DNA, 50 bp, synthetic construct
  source 1..50: mol_type = other DNA
aacaacctaaaactccccaactaaaacttacactataaatattcacttcc

SEQ ID NO: 19643 - DNA, 50 bp, synthetic construct
  source 1..50: mol_type = other DNA
taattaactaaaaatctctacaccaatactttccactaaaaacraacatc

SEQ ID NO: 19644 - DNA, 50 bp, synthetic construct
  source 1..50: mol_type = other DNA
aacaaaataattaactaaaaatctctacaccaatactttccactaaaaac

SEQ ID NO: 19645 - DNA, 50 bp, synthetic construct
  source 1..50: mol_type = other DNA
aataaacacataatcacatacctacaaaaatatttaaaaataccaaatac

SEQ ID NO: 19646 - DNA, 50 bp, synthetic construct
  source 1..50: mol_type = other DNA
tctaataaaacttacataacccacacaactataaaataccccaccttctc

SEQ ID NO: 19647 - DNA, 50 bp, synthetic construct
  source 1..50: mol_type = other DNA
aaaataacatctaaaacccacaaaataatactaaaaacaataatcacccc

SEQ ID NO: 19648 - DNA, 50 bp, synthetic construct
  source 1..50: mol_type = other DNA
tttcataaaatttccattccccaaaattaactttctctaaacaaaacccc

SEQ ID NO: 19649 - DNA, 50 bp, synthetic construct
  source 1..50: mol_type = other DNA
ttctacaaaaactaataaacccctactctactctattttaacaataaaac

SEQ ID NO: 19650 - DNA, 50 bp, synthetic construct
  source 1..50: mol_type = other DNA
aaaactaaatacaataacttacrcctataatcacaacattttaaaaaacc

SEQ ID NO: 19651 - DNA, 50 bp, synthetic construct
  source 1..50: mol_type = other DNA
ttttccttttatcattaaaaatattcatttattaattcttattttttacc

SEQ ID NO: 19652 - DNA, 50 bp, synthetic construct
  source 1..50: mol_type = other DNA
aacaaacatcctaaaacaaataaacctattaaaatctatcaaatcacatc

SEQ ID NO: 19653 - DNA, 50 bp, synthetic construct
  source 1..50: mol_type = other DNA
aatctcacttttactttcaaaaaattctttcaaataacaaacataaatac

SEQ ID NO: 19654 - DNA, 50 bp, synthetic construct
  source 1..50: mol_type = other DNA
catccttttaaaataatacttttatttctataaaaaaaattccccaaacc

SEQ ID NO: 19655 - DNA, 50 bp, synthetic construct
  source 1..50: mol_type = other DNA
cctttattaattttctcctacatactaaacaaaatactaaaatactaaac

SEQ ID NO: 19656 - DNA, 50 bp, synthetic construct
  source 1..50: mol_type = other DNA
aacaaatccctaacaacaaaatcattaaaacctaactatcacccaaaatc

SEQ ID NO: 19657 - DNA, 50 bp, synthetic construct
  source 1..50: mol_type = other DNA
tcttactcacraatctaattctataacaataataaaacccaaaaacratc

SEQ ID NO: 19658 - DNA, 50 bp, synthetic construct
  source 1..50: mol_type = other DNA
tctaaaaacctcctctttcaaaataacctaaaaataccataaaaacracc

SEQ ID NO: 19659 - DNA, 50 bp, synthetic construct
  source 1..50: mol_type = other DNA
tctcctaatctctaccctaatataaacacttaaaataaatttactaaacc

SEQ ID NO: 19660 - DNA, 50 bp, synthetic construct
  source 1..50: mol_type = other DNA
atttaacatccaactaacttaactcataactaataaaaacattaatctac

SEQ ID NO: 19661 - DNA, 50 bp, synthetic construct
  source 1..50: mol_type = other DNA
taactcctataaacaaaataaactaatacatcccaacaattaccacrtac

SEQ ID NO: 19662 - DNA, 50 bp, synthetic construct
  source 1..50: mol_type = other DNA
aaataataaatccacaaaaacaaaaaacaaactaataatcaccaaaaacc

SEQ ID NO: 19663 - DNA, 50 bp, synthetic construct
  source 1..50: mol_type = other DNA
ttctatctctataaatttaccacttcaaaatatttcctatacataaaatc

SEQ ID NO: 19664 - DNA, 50 bp, synthetic construct
  source 1..50: mol_type = other DNA
ccctataaatataatacccaataaacaattaaaaattaaaatctaatatc

SEQ ID NO: 19665 - DNA, 50 bp, synthetic construct
  source 1..50: mol_type = other DNA
ccaaatcttcttattctataatttctctttaaatcatcaatttctctccc

SEQ ID NO: 19666 - DNA, 50 bp, synthetic construct
  source 1..50: mol_type = other DNA
acaaatatatatcaccacacccractaatttttacaatttttataaaatc

SEQ ID NO: 19667 - DNA, 50 bp, synthetic construct
  source 1..50: mol_type = other DNA
ttaaaaattatccaaacataataacraacrcctattaattccaacttctc

SEQ ID NO: 19668 - DNA, 50 bp, synthetic construct
  source 1..50: mol_type = other DNA
cacrataaactaattcccraaaaaatccaaaaccaactaaaaaaaatccc

SEQ ID NO: 19669 - DNA, 50 bp, synthetic construct
  source 1..50: mol_type = other DNA
catccaaaaaaccaaaaccaaaaatctaaaaaaccaaacccaaccaaacc

SEQ ID NO: 19670 - DNA, 50 bp, synthetic construct
  source 1..50: mol_type = other DNA
ctttccaaactcctaactctaactccctaaatatataactctcaaaaccc

SEQ ID NO: 19671 - DNA, 50 bp, synthetic construct
  source 1..50: mol_type = other DNA
atataactctcaaaacccractctataacactttaaacttataaaccctc

SEQ ID NO: 19672 - DNA, 50 bp, synthetic construct
  source 1..50: mol_type = other DNA
tataaaccctcractccrtaaaattaaaaaaccctaactcactaaatccc

SEQ ID NO: 19673 - DNA, 50 bp, synthetic construct
  source 1..50: mol_type = other DNA
taaaattaaaaaaccctaactcactaaatcccrctaactatccccttatc

SEQ ID NO: 19674 - DNA, 50 bp, synthetic construct
  source 1..50: mol_type = other DNA
tataataacacrtacctataatctcaactacttaataaactaaaacaaac

SEQ ID NO: 19675 - DNA, 50 bp, synthetic construct
  source 1..50: mol_type = other DNA
taaacraaactaacacaatataacaaatcctaaactcacctaaaaaaatc

SEQ ID NO: 19676 - DNA, 50 bp, synthetic construct
  source 1..50: mol_type = other DNA
aattaaaataaaaacctcaaatacctcaacctactaaatcaaaaaaaacc

SEQ ID NO: 19677 - DNA, 50 bp, synthetic construct
  source 1..50: mol_type = other DNA
tctcctaatataaaaattatcctaaaacccaaaccttccaaaactcctcc

SEQ ID NO: 19678 - DNA, 50 bp, synthetic construct
  source 1..50: mol_type = other DNA
ctaatataaaaattatcctaaaacccaaaccttccaaaactcctccrccc

SEQ ID NO: 19679 - DNA, 50 bp, synthetic construct
  source 1..50: mol_type = other DNA
tctctcataatttatcattaaatctaaaacccaccctaatcaaatataac

SEQ ID NO: 19680 - DNA, 50 bp, synthetic construct
  source 1..50: mol_type = other DNA
aaaaaaaaaacratctaaatttcactcaattccctcatacttttcacaac

SEQ ID NO: 19681 - DNA, 50 bp, synthetic construct
  source 1..50: mol_type = other DNA
aacccaataaatccataaaaataaaactcaaacacttaatttaataaaac

SEQ ID NO: 19682 - DNA, 50 bp, synthetic construct
  source 1..50: mol_type = other DNA
ataaatccataaaaataaaactcaaacacttaatttaataaaacrtaacc

SEQ ID NO: 19683 - DNA, 50 bp, synthetic construct
  source 1..50: mol_type = other DNA
aaatactaaatcaacaaaaacactaaaaccactaccacctcatccttacc

SEQ ID NO: 19684 - DNA, 50 bp, synthetic construct
  source 1..50: mol_type = other DNA
aatcaaacaaaatattttctcaaacaattactaaaccctcacaaatttac

SEQ ID NO: 19685 - DNA, 50 bp, synthetic construct
  source 1..50: mol_type = other DNA
catttactatacttaattacaaaatcttacaaatatataactaattaacc

SEQ ID NO: 19686 - DNA, 50 bp, synthetic construct
  source 1..50: mol_type = other DNA
acaaaactatttacacaatattaaatttctataccataaaatcatacttc

SEQ ID NO: 19687 - DNA, 50 bp, synthetic construct
  source 1..50: mol_type = other DNA
aaaaaatctcaactaccaaacttacccttacccaaaaaaatattctctac

SEQ ID NO: 19688 - DNA, 50 bp, synthetic construct
  source 1..50: mol_type = other DNA
atcattcttctaaaaaaaataatacattcctctataatatatctcttcac

SEQ ID NO: 19689 - DNA, 50 bp, synthetic construct
  source 1..50: mol_type = other DNA
aacaaaaaacccataaacttaaacaaaaatacaaattcaaaataaacccc

SEQ ID NO: 19690 - DNA, 50 bp, synthetic construct
  source 1..50: mol_type = other DNA
caataaaaaaataaatatatattaaacactcacttccctacaacttaaac

SEQ ID NO: 19691 - DNA, 50 bp, synthetic construct
  source 1..50: mol_type = other DNA
ctactacccaaatttaaaccccttattacttttaatatatattcattaac

SEQ ID NO: 19692 - DNA, 50 bp, synthetic construct
  source 1..50: mol_type = other DNA
ccacacccacactcttaacaaatctaaacraactacttaatacctaacac

SEQ ID NO: 19693 - DNA, 50 bp, synthetic construct
  source 1..50: mol_type = other DNA
taccattaaaaaattaaatatctcactattaaaccttcaaaataaatatc

SEQ ID NO: 19694 - DNA, 50 bp, synthetic construct
  source 1..50: mol_type = other DNA
attaaaaaattaaatatctcactattaaaccttcaaaataaatatcracc

SEQ ID NO: 19695 - DNA, 50 bp, synthetic construct
  source 1..50: mol_type = other DNA
aaaaattaaatatctcactattaaaccttcaaaataaatatcraccraac

SEQ ID NO: 19696 - DNA, 50 bp, synthetic construct
  source 1..50: mol_type = other DNA
ttaaatatctcactattaaaccttcaaaataaatatcraccraacrtaac

SEQ ID NO: 19697 - DNA, 50 bp, synthetic construct
  source 1..50: mol_type = other DNA
tctcaaataatccrcccractcaacctctaaaaatactataattacaaac

SEQ ID NO: 19698 - DNA, 50 bp, synthetic construct
  source 1..50: mol_type = other DNA
cccataactacctataaaacctatatctatctataaaacacaattccaac

SEQ ID NO: 19699 - DNA, 50 bp, synthetic construct
  source 1..50: mol_type = other DNA
acaataaaataaaactaaaccaattacraactattcccaatacaccaacc

SEQ ID NO: 19700 - DNA, 50 bp, synthetic construct
  source 1..50: mol_type = other DNA
acaaaaatcctccctcctaaataacaataaaataaaactaaaccaattac

SEQ ID NO: 19701 - DNA, 50 bp, synthetic construct
  source 1..50: mol_type = other DNA
actcaaacccaaaacctcaaaatcctcctcaattccctaattaatttcac

SEQ ID NO: 19702 - DNA, 50 bp, synthetic construct
  source 1..50: mol_type = other DNA
ccttaataccctccaaatctataatataacatctcaaacaccacataaac

SEQ ID NO: 19703 - DNA, 50 bp, synthetic construct
  source 1..50: mol_type = other DNA
aaataataaacaccaacaccaacaaataaaaacaaccctaacraaacrtc

SEQ ID NO: 19704 - DNA, 50 bp, synthetic construct
  source 1..50: mol_type = other DNA
caaaacacaaataataaacaccaacaccaacaaataaaaacaaccctaac

SEQ ID NO: 19705 - DNA, 50 bp, synthetic construct
  source 1..50: mol_type = other DNA
acaaattctaacrctaaaccttaaccatatacaaacrtctcccatacaac

SEQ ID NO: 19706 - DNA, 50 bp, synthetic construct
  source 1..50: mol_type = other DNA
aatttaaacctataacaaattctaacrctaaaccttaaccatatacaaac

SEQ ID NO: 19707 - DNA, 50 bp, synthetic construct
  source 1..50: mol_type = other DNA
ctctcacaccatcttaacatccaaaatttaaacctataacaaattctaac

SEQ ID NO: 19708 - DNA, 50 bp, synthetic construct
  source 1..50: mol_type = other DNA
caaaaactttcactacaataatacttctaactcaaccccaaaaactaccc

SEQ ID NO: 19709 - DNA, 50 bp, synthetic construct
  source 1..50: mol_type = other DNA
attacctaataaaacccaatatactaaaataaaatcrttccrataaacac

SEQ ID NO: 19710 - DNA, 50 bp, synthetic construct
  source 1..50: mol_type = other DNA
acaaaccacattacctaataaaacccaatatactaaaataaaatcrttcc

SEQ ID NO: 19711 - DNA, 50 bp, synthetic construct
  source 1..50: mol_type = other DNA
ctcrcacaaaccacattacctaataaaacccaatatactaaaataaaatc

SEQ ID NO: 19712 - DNA, 50 bp, synthetic construct
  source 1..50: mol_type = other DNA
tttcaatacactaaaccccaccaaacaatataatttatacraaactatac

SEQ ID NO: 19713 - DNA, 50 bp, synthetic construct
  source 1..50: mol_type = other DNA
aaatataaaccacaacaacaaatatatataaaaacaacrtaacrccccrc

SEQ ID NO: 19714 - DNA, 50 bp, synthetic construct
  source 1..50: mol_type = other DNA
ccaaatataaaccacaacaacaaatatatataaaaacaacrtaacrcccc

SEQ ID NO: 19715 - DNA, 50 bp, synthetic construct
  source 1..50: mol_type = other DNA
ccctaccaaatataaaccacaacaacaaatatatataaaaacaacrtaac

SEQ ID NO: 19716 - DNA, 50 bp, synthetic construct
  source 1..50: mol_type = other DNA
catacctactactataacccacacctaacaaaaacctttaatcataaaac

SEQ ID NO: 19717 - DNA, 50 bp, synthetic construct
  source 1..50: mol_type = other DNA
acctactactataacccacacctaacaaaaacctttaatcataaaacrac

SEQ ID NO: 19718 - DNA, 50 bp, synthetic construct
  source 1..50: mol_type = other DNA
ttaatccccttcccaaaacctctaaataaaactaatactaaactaaactc

SEQ ID NO: 19719 - DNA, 50 bp, synthetic construct
  source 1..50: mol_type = other DNA
aatcaatctctataaaaccaaaactttaaatcraaaacaaaaatacaatc

SEQ ID NO: 19720 - DNA, 50 bp, synthetic construct
  source 1..50: mol_type = other DNA
rtaaacccaaaatcacataacaaaaataccctaaatccaatactttatcc

SEQ ID NO: 19721 - DNA, 50 bp, synthetic construct
  source 1..50: mol_type = other DNA
acttaataatataaatctaaataaaacccraaaatctaataccaaaaacc

SEQ ID NO: 19722 - DNA, 50 bp, synthetic construct
  source 1..50: mol_type = other DNA
aatcacaataataactaacatcctacaacratttctaacaccaaattctc

SEQ ID NO: 19723 - DNA, 50 bp, synthetic construct
  source 1..50: mol_type = other DNA
attaacttccraaactctaaataataaaacctaaaaacraatacccrccc

SEQ ID NO: 19724 - DNA, 50 bp, synthetic construct
  source 1..50: mol_type = other DNA
aaaaattaacttccraaactctaaataataaaacctaaaaacraataccc

SEQ ID NO: 19725 - DNA, 50 bp, synthetic construct
  source 1..50: mol_type = other DNA
aaaactataaaaattaacttccraaactctaaataataaaacctaaaaac

SEQ ID NO: 19726 - DNA, 50 bp, synthetic construct
  source 1..50: mol_type = other DNA
rcctcttaaccttaccraataaaactaaacctctacrataattaactcac

SEQ ID NO: 19727 - DNA, 50 bp, synthetic construct
  source 1..50: mol_type = other DNA
aaaaaataacaaaaacrtaaaccaatcaccrcaaaaacctaacctcatcc

SEQ ID NO: 19728 - DNA, 50 bp, synthetic construct
  source 1..50: mol_type = other DNA
tccratcrctctattaattactctaactatccatcttaaccaataatacc

SEQ ID NO: 19729 - DNA, 50 bp, synthetic construct
  source 1..50: mol_type = other DNA
aaaaaacratatcattaactaaaataaacaaccaaaacaaccaataaaac

SEQ ID NO: 19730 - DNA, 50 bp, synthetic construct
  source 1..50: mol_type = other DNA
aacratatcattaactaaaataaacaaccaaaacaaccaataaaacratc

SEQ ID NO: 19731 - DNA, 50 bp, synthetic construct
  source 1..50: mol_type = other DNA
aatccttaaacccttaactctaaaaaccttaaccrctatataaaattccc

SEQ ID NO: 19732 - DNA, 50 bp, synthetic construct
  source 1..50: mol_type = other DNA
ctttcctttatccactccaaaattctccatcccacttttactaactaacc

SEQ ID NO: 19733 - DNA, 50 bp, synthetic construct
  source 1..50: mol_type = other DNA
acrtctttcctatctataaaaaaacttaaactctcctcctcraaaaaatc

SEQ ID NO: 19734 - DNA, 50 bp, synthetic construct
  source 1..50: mol_type = other DNA
aacttactaaaaattataattcttcaaaaacraaatcraaccrctccctc

SEQ ID NO: 19735 - DNA, 50 bp, synthetic construct
  source 1..50: mol_type = other DNA
atcrctaacccaaacrcaaaacttactaaaaattataattcttcaaaaac

SEQ ID NO: 19736 - DNA, 50 bp, synthetic construct
  source 1..50: mol_type = other DNA
crtaattcataaatatttaaattttacaaatcaaccctaccactcccccc

SEQ ID NO: 19737 - DNA, 50 bp, synthetic construct
  source 1..50: mol_type = other DNA
aattcataaatatttaaattttacaaatcaaccctaccactccccccrac

SEQ ID NO: 19738 - DNA, 50 bp, synthetic construct
  source 1..50: mol_type = other DNA
aaacaacraaaaatacrccaacaaaaaatttattactattttactaacrc

SEQ ID NO: 19739 - DNA, 50 bp, synthetic construct
  source 1..50: mol_type = other DNA
aataaatcaatccattatcaaatttatatttaaatcctaattaacaacrc

SEQ ID NO: 19740 - DNA, 50 bp, synthetic construct
  source 1..50: mol_type = other DNA
taacaacrcrtcaacaaaacaataacaaatcctttattaacrcacttctc

SEQ ID NO: 19741 - DNA, 50 bp, synthetic construct
  source 1..50: mol_type = other DNA
rtcaacaaaacaataacaaatcctttattaacrcacttctcrctactttc

SEQ ID NO: 19742 - DNA, 50 bp, synthetic construct
  source 1..50: mol_type = other DNA
ctacctataactaacacaaacattaaccaataaatacttaaataaaatac

SEQ ID NO: 19743 - DNA, 50 bp, synthetic construct
  source 1..50: mol_type = other DNA
actacttaaaaattactctcaactccccraaaaaactacaaaccataacc

SEQ ID NO: 19744 - DNA, 50 bp, synthetic construct
  source 1..50: mol_type = other DNA
tacaataaaacattaaaaaaaacttctcraccataacctacaatttctcc

SEQ ID NO: 19745 - DNA, 50 bp, synthetic construct
  source 1..50: mol_type = other DNA
tcctaaacaaaaataacaatatcataatactataaacataatacttctcc

SEQ ID NO: 19746 - DNA, 50 bp, synthetic construct
  source 1..50: mol_type = other DNA
ctctacatttctaccctctaactatatctactcataccaaaataatcctc

SEQ ID NO: 19747 - DNA, 50 bp, synthetic construct
  source 1..50: mol_type = other DNA
taaaatctcactatattacccaaactaatctcaaatacctaaactaaaac

SEQ ID NO: 19748 - DNA, 50 bp, synthetic construct
  source 1..50: mol_type = other DNA
taacccaataattaaaaactcaaactctaaaactaaatacaataattcac

SEQ ID NO: 19749 - DNA, 50 bp, synthetic construct
  source 1..50: mol_type = other DNA
atatacrtaaacaaatatatctatatacacatcaaacataaataacacac

SEQ ID NO: 19750 - DNA, 50 bp, synthetic construct
  source 1..50: mol_type = other DNA
caaatctaaacaattcacttacttaattacactactaaacatattctcac

SEQ ID NO: 19751 - DNA, 50 bp, synthetic construct
  source 1..50: mol_type = other DNA
ccrcaatcctacaacccaaccttaaaaataacatcaaaacaataaaaaac

SEQ ID NO: 19752 - DNA, 50 bp, synthetic construct
  source 1..50: mol_type = other DNA
accccctacactcrctttaaaataaaaacctacaaaatctctaacaaccc

SEQ ID NO: 19753 - DNA, 50 bp, synthetic construct
  source 1..50: mol_type = other DNA
aaaaactataaaaacctacccaactttaaccaatacttatttttaatcac

SEQ ID NO: 19754 - DNA, 50 bp, synthetic construct
  source 1..50: mol_type = other DNA
ctttattcctataaaaccctaacttactttcaaaaaccactaaatactcc

SEQ ID NO: 19755 - DNA, 50 bp, synthetic construct
  source 1..50: mol_type = other DNA
aaaaatatttatactcaacaataccaaaacctacacaaaaacaaaatctc

SEQ ID NO: 19756 - DNA, 50 bp, synthetic construct
  source 1..50: mol_type = other DNA
aaactaataaaatactaaataataactcccacctttaccaaaaaatcrcc

SEQ ID NO: 19757 - DNA, 50 bp, synthetic construct
  source 1..50: mol_type = other DNA
aaaaaactaataaaatactaaataataactcccacctttaccaaaaaatc

SEQ ID NO: 19758 - DNA, 50 bp, synthetic construct
  source 1..50: mol_type = other DNA
acacacaaaaaacacaactaaaaataaaccaataaaactcccttaattcc

SEQ ID NO: 19759 - DNA, 50 bp, synthetic construct
  source 1..50: mol_type = other DNA
acataaccttcaaaccaaaactaaaccctatatcaattccrtaaataacc

SEQ ID NO: 19760 - DNA, 50 bp, synthetic construct
  source 1..50: mol_type = other DNA
caaaccaacctcacactcaaacctcatttattaaaaacctaaaaaaaccc

SEQ ID NO: 19761 - DNA, 50 bp, synthetic construct
  source 1..50: mol_type = other DNA
aaatacaaaattaaaaactataaacaaaacctctaaacccaccrtattcc

SEQ ID NO: 19762 - DNA, 50 bp, synthetic construct
  source 1..50: mol_type = other DNA
taaccttcttctataaaatctttattacacatttactatctaacaaactc

SEQ ID NO: 19763 - DNA, 50 bp, synthetic construct
  source 1..50: mol_type = other DNA
ttaaaaatctatttcttcctttccaaaaaaacaaaccccctaaataaccc

SEQ ID NO: 19764 - DNA, 50 bp, synthetic construct
  source 1..50: mol_type = other DNA
aattataaaatactaaaaaaaccccaaaaaaaaccaaaaactctccttcc

SEQ ID NO: 19765 - DNA, 50 bp, synthetic construct
  source 1..50: mol_type = other DNA
caaaaaactccacaacaaatctaacataaataaatttctattttaactcc

SEQ ID NO: 19766 - DNA, 50 bp, synthetic construct
  source 1..50: mol_type = other DNA
caacaaatctaacataaataaatttctattttaactccrttctttactcc

SEQ ID NO: 19767 - DNA, 50 bp, synthetic construct
  source 1..50: mol_type = other DNA
aaattcaaacaccaacaaaaaattctaaaattaaaatattaacaataacc

SEQ ID NO: 19768 - DNA, 50 bp, synthetic construct
  source 1..50: mol_type = other DNA
acacctcaacttcaaaattccttactaatacttaaattctcaatccaaac

SEQ ID NO: 19769 - DNA, 50 bp, synthetic construct
  source 1..50: mol_type = other DNA
acaccraaaatcaaaaataaacrataaaaatacccctaattatacaactc

SEQ ID NO: 19770 - DNA, 50 bp, synthetic construct
  source 1..50: mol_type = other DNA
aaacrctacatccccctccctcraattacacaatcaaaaatatttttatc

SEQ ID NO: 19771 - DNA, 50 bp, synthetic construct
  source 1..50: mol_type = other DNA
ttttcccttccctaaaaaaataactcactactaaaatattaaataacacc

SEQ ID NO: 19772 - DNA, 50 bp, synthetic construct
  source 1..50: mol_type = other DNA
tttaaccacaatcccaatcctataaatcataacrtctacaataaacacac

SEQ ID NO: 19773 - DNA, 50 bp, synthetic construct
  source 1..50: mol_type = other DNA
cccctccaccctaatctctctaaacraaaaaatcttaatttttcacattc

SEQ ID NO: 19774 - DNA, 50 bp, synthetic construct
  source 1..50: mol_type = other DNA
aaaaaacaaatcttaaaatacaaaaaaaccctatatcccaaccrtaaacc

SEQ ID NO: 19775 - DNA, 50 bp, synthetic construct
  source 1..50: mol_type = other DNA
taaaaccccaaaaacctataccaaattcctcctaactataaccttaacac

SEQ ID NO: 19776 - DNA, 50 bp, synthetic construct
  source 1..50: mol_type = other DNA
atcaaaaaaaatctaatacaaactcctaaaaccttaaaacccaacaaaac

SEQ ID NO: 19777 - DNA, 50 bp, synthetic construct
  source 1..50: mol_type = other DNA
aactaaactcttacraatcaaaccaataaacttaactaaaaaacaaaacc

SEQ ID NO: 19778 - DNA, 50 bp, synthetic construct
  source 1..50: mol_type = other DNA
ctacccaccaaaactccccaacraaatattctctaacaacaaacataaac

SEQ ID NO: 19779 - DNA, 50 bp, synthetic construct
  source 1..50: mol_type = other DNA
cctaacaaattctaaacaaaacrcccatatctattaccaaaaaacattcc

SEQ ID NO: 19780 - DNA, 50 bp, synthetic construct
  source 1..50: mol_type = other DNA
aaaacattccrctaaaaaattctaataaacaacaaaaaactcctactctc

SEQ ID NO: 19781 - DNA, 50 bp, synthetic construct
  source 1..50: mol_type = other DNA
attccrctaaaaaattctaataaacaacaaaaaactcctactctcrcctc

SEQ ID NO: 19782 - DNA, 50 bp, synthetic construct
  source 1..50: mol_type = other DNA
cactaaaaccaaaaaaactcccatcccactaaaatactacraacaaaaac

SEQ ID NO: 19783 - DNA, 50 bp, synthetic construct
  source 1..50: mol_type = other DNA
acccataaaacactaaaaccaaaaaaactcccatcccactaaaatactac

SEQ ID NO: 19784 - DNA, 50 bp, synthetic construct
  source 1..50: mol_type = other DNA
ccttcccttatcctatctaccaaaaaatatacttaaaaaaaaactccttc

SEQ ID NO: 19785 - DNA, 50 bp, synthetic construct
  source 1..50: mol_type = other DNA
aaaaaaccctaaaaactaaaaactccaaccctaactaaaacctaactccc

SEQ ID NO: 19786 - DNA, 50 bp, synthetic construct
  source 1..50: mol_type = other DNA
caatcaaaccaaaaccaactacccaaaaacrcttccraaaaaaccttatc

SEQ ID NO: 19787 - DNA, 50 bp, synthetic construct
  source 1..50: mol_type = other DNA
cctcttcrctccctctactaaaaaactatctctaccaaaaccaaaataac

SEQ ID NO: 19788 - DNA, 50 bp, synthetic construct
  source 1..50: mol_type = other DNA
ctaaaactaaaaacaaacraacctaacccttcctaactacctccctcttc

SEQ ID NO: 19789 - DNA, 50 bp, synthetic construct
  source 1..50: mol_type = other DNA
taaatcactacrcccracccaaaatctatcttttctaatttaactaaacc

SEQ ID NO: 19790 - DNA, 50 bp, synthetic construct
  source 1..50: mol_type = other DNA
taacaaactaaactcaaacractaaaattaataaccccttctttccccac

SEQ ID NO: 19791 - DNA, 50 bp, synthetic construct
  source 1..50: mol_type = other DNA
crtaacttcattctcaaatactaaacccaaataacaaactaaactcaaac

SEQ ID NO: 19792 - DNA, 50 bp, synthetic construct
  source 1..50: mol_type = other DNA
crtttaaacccaacctaccacctaaatctaacatttaaaaataaaaccac

SEQ ID NO: 19793 - DNA, 50 bp, synthetic construct
  source 1..50: mol_type = other DNA
tccaaaaattacccaaacctatccccraaaaactaaaaataaaacaaacc

SEQ ID NO: 19794 - DNA, 50 bp, synthetic construct
  source 1..50: mol_type = other DNA
attaacaaaatacaccrtaatctttccaaaaattacccaaacctatcccc

SEQ ID NO: 19795 - DNA, 50 bp, synthetic construct
  source 1..50: mol_type = other DNA
aaaaaacctttatataaacctattattctctatcacrtaaattatcctcc

SEQ ID NO: 19796 - DNA, 50 bp, synthetic construct
  source 1..50: mol_type = other DNA
tatttttctaaaccctaaaaattcccaaaaaaacrtacaaaaaatttaac

SEQ ID NO: 19797 - DNA, 50 bp, synthetic construct
  source 1..50: mol_type = other DNA
aaaaaaaaataatcccactacrccrtaacatcatcrcttttttaacaaac

SEQ ID NO: 19798 - DNA, 50 bp, synthetic construct
  source 1..50: mol_type = other DNA
aaaccccctcccatcccaatatttaatataccraaatttataaaaatcac

SEQ ID NO: 19799 - DNA, 50 bp, synthetic construct
  source 1..50: mol_type = other DNA
catcccaatatttaatataccraaatttataaaaatcacrtaaaactctc

SEQ ID NO: 19800 - DNA, 50 bp, synthetic construct
  source 1..50: mol_type = other DNA
ttaatataccraaatttataaaaatcacrtaaaactctcraatctacccc

SEQ ID NO: 19801 - DNA, 50 bp, synthetic construct
  source 1..50: mol_type = other DNA
acctcaacttataaaccaataacaaaaacaacctccraaacaaccccaac

SEQ ID NO: 19802 - DNA, 50 bp, synthetic construct
  source 1..50: mol_type = other DNA
ctaacctaatatcacaaaaatcaacctatcraaataaataatcccraaac

SEQ ID NO: 19803 - DNA, 50 bp, synthetic construct
  source 1..50: mol_type = other DNA
aaccactaacctaatatcacaaaaatcaacctatcraaataaataatccc

SEQ ID NO: 19804 - DNA, 50 bp, synthetic construct
  source 1..50: mol_type = other DNA
aaaaatttaaccaaaaaccactaacctaatatcacaaaaatcaacctatc

SEQ ID NO: 19805 - DNA, 50 bp, synthetic construct
  source 1..50: mol_type = other DNA
aaaaccractctccctatataaaaatcrctaccctatatacctatatatc

SEQ ID NO: 19806 - DNA, 50 bp, synthetic construct
  source 1..50: mol_type = other DNA
aaaaaccaaaataataaaaacaaatacttaaaaacttattcatacraccc

SEQ ID NO: 19807 - DNA, 50 bp, synthetic construct
  source 1..50: mol_type = other DNA
accrcataaacaaaccttcaaatatctatcttcatcatcctaaccctttc

SEQ ID NO: 19808 - DNA, 50 bp, synthetic construct
  source 1..50: mol_type = other DNA
acaaaattctttttccrtcttccacttcccctccccaaatataaaaaaac

SEQ ID NO: 19809 - DNA, 50 bp, synthetic construct
  source 1..50: mol_type = other DNA
cccaaccracaacccaaaaaaaccaactacctaaaaccaaatttcaaaac

SEQ ID NO: 19810 - DNA, 50 bp, synthetic construct
  source 1..50: mol_type = other DNA
aatctaatttcaaacaactaactcccctaaactaccractaaataattac

SEQ ID NO: 19811 - DNA, 50 bp, synthetic construct
  source 1..50: mol_type = other DNA
ccctcaaacctctaaacctaattttaaaactaaactaaaacaatacttcc

SEQ ID NO: 19812 - DNA, 50 bp, synthetic construct
  source 1..50: mol_type = other DNA
ctaaaaatatctctaaataaaaatccctaaaaattaataaaaaccaatac

SEQ ID NO: 19813 - DNA, 50 bp, synthetic construct
  source 1..50: mol_type = other DNA
cctcatttccaaactcrtaaattaaataaaaacaaacactaaactttatc

SEQ ID NO: 19814 - DNA, 50 bp, synthetic construct
  source 1..50: mol_type = other DNA
caaactcrtaaattaaataaaaacaaacactaaactttatcracaactcc

SEQ ID NO: 19815 - DNA, 50 bp, synthetic construct
  source 1..50: mol_type = other DNA
caaactcaaaaataataaattacatcaaaaccaaatatacaattctatac

SEQ ID NO: 19816 - DNA, 50 bp, synthetic construct
  source 1..50: mol_type = other DNA
ccaaatctctatacttctacccctatatcctaaaaaattctataaccctc

SEQ ID NO: 19817 - DNA, 50 bp, synthetic construct
  source 1..50: mol_type = other DNA
aacacaaaaacctaacacctaccttaaaatctaaactctacttcttatac

SEQ ID NO: 19818 - DNA, 50 bp, synthetic construct
  source 1..50: mol_type = other DNA
caataatctcraaatcatccaataaatatccaaacctcracaatataacc

SEQ ID NO: 19819 - DNA, 50 bp, synthetic construct
  source 1..50: mol_type = other DNA
acacatcctaaacaataatctcraaatcatccaataaatatccaaacctc

SEQ ID NO: 19820 - DNA, 50 bp, synthetic construct
  source 1..50: mol_type = other DNA
aaatcctacrctattatattaaatacaatctaacraaacraaacaaaccc

SEQ ID NO: 19821 - DNA, 50 bp, synthetic construct
  source 1..50: mol_type = other DNA
aacttttaccatacaaaaaacaacrctctaaaacaacaaaacaaaaaaac

SEQ ID NO: 19822 - DNA, 50 bp, synthetic construct
  source 1..50: mol_type = other DNA
aaacttcccaactacaaaataaaattaacttttaccatacaaaaaacaac

SEQ ID NO: 19823 - DNA, 50 bp, synthetic construct
  source 1..50: mol_type = other DNA
acaaaaactaattccactctacaactaaaaaaccctctctaaaatctacc

SEQ ID NO: 19824 - DNA, 50 bp, synthetic construct
  source 1..50: mol_type = other DNA
actaattccactctacaactaaaaaaccctctctaaaatctaccraactc

SEQ ID NO: 19825 - DNA, 50 bp, synthetic construct
  source 1..50: mol_type = other DNA
tattattatttattaacttttatacaacccaaaatccccaaacctcaccc

SEQ ID NO: 19826 - DNA, 50 bp, synthetic construct
  source 1..50: mol_type = other DNA
aactttcctaaaacaaaaatataaaaactcaaaattcrctactccaaacc

SEQ ID NO: 19827 - DNA, 50 bp, synthetic construct
  source 1..50: mol_type = other DNA
aataatctacccraaacctataaaaacaaaaacataaaaaatcaaaaacc

SEQ ID NO: 19828 - DNA, 50 bp, synthetic construct
  source 1..50: mol_type = other DNA
aataaaaataacractcctaattcttcatacttttatcctcataaacccc

SEQ ID NO: 19829 - DNA, 50 bp, synthetic construct
  source 1..50: mol_type = other DNA
atacttttatcctcataaaccccraacaaatcaccaaaaacctaaaaccc

SEQ ID NO: 19830 - DNA, 50 bp, synthetic construct
  source 1..50: mol_type = other DNA
aatactctctacrcaaacaaataaactaaaaacaccttacacataccacc

SEQ ID NO: 19831 - DNA, 50 bp, synthetic construct
  source 1..50: mol_type = other DNA
aaaaaataaaacrataacatatataaaatacctccaacccacctacctac

SEQ ID NO: 19832 - DNA, 50 bp, synthetic construct
  source 1..50: mol_type = other DNA
cctacctacrcaaaaaatacttactctaaactaaactaaaaaatctaatc

SEQ ID NO: 19833 - DNA, 50 bp, synthetic construct
  source 1..50: mol_type = other DNA
ccctattttccaacattttccaatatcttaacaacctaatttactcattc

SEQ ID NO: 19834 - DNA, 50 bp, synthetic construct
  source 1..50: mol_type = other DNA
ccaatatcttaacaacctaatttactcattcrataaactaaaataaaatc

SEQ ID NO: 19835 - DNA, 50 bp, synthetic construct
  source 1..50: mol_type = other DNA
tatcccacccaaattacctaaaacaaacaaaaacttaaaaaaaccctacc

SEQ ID NO: 19836 - DNA, 50 bp, synthetic construct
  source 1..50: mol_type = other DNA
acctacraaataaatataaacaactcaattcctatccccaaaaaaactac

SEQ ID NO: 19837 - DNA, 50 bp, synthetic construct
  source 1..50: mol_type = other DNA
cctaaaactcacctaaatcctccctaaaccaactcctaataaatttaatc

SEQ ID NO: 19838 - DNA, 50 bp, synthetic construct
  source 1..50: mol_type = other DNA
ttccctataaaaaaattaaatcaaatacctttacacctctaactataccc

SEQ ID NO: 19839 - DNA, 50 bp, synthetic construct
  source 1..50: mol_type = other DNA
aaatcaaatacctttacacctctaactatacccrccaacatacctaaaac

SEQ ID NO: 19840 - DNA, 50 bp, synthetic construct
  source 1..50: mol_type = other DNA
acatacctaaaacraactcraaactcaaataacaaaatattcccatatac

SEQ ID NO: 19841 - DNA, 50 bp, synthetic construct
  source 1..50: mol_type = other DNA
acacacacaacataaataaacaaacrcaaaaacacctaacacaaaactac

SEQ ID NO: 19842 - DNA, 50 bp, synthetic construct
  source 1..50: mol_type = other DNA
ccaacccaaaaatcaaaacccracaacacacacaacataaataaacaaac

SEQ ID NO: 19843 - DNA, 50 bp, synthetic construct
  source 1..50: mol_type = other DNA
aaaacaccaaaaaacacaaaaatctactaccaacccaaaaatcaaaaccc

SEQ ID NO: 19844 - DNA, 50 bp, synthetic construct
  source 1..50: mol_type = other DNA
acaaaataaaatcaaactaaaatctataataaaccttaatttacccctac

SEQ ID NO: 19845 - DNA, 50 bp, synthetic construct
  source 1..50: mol_type = other DNA
aaatatcrattcctcatacaccaacctcatttcaaatacccaatacctac

SEQ ID NO: 19846 - DNA, 50 bp, synthetic construct
  source 1..50: mol_type = other DNA
actcactacaaaaaattactatatcaaaatccaaacaaaaacccaactcc

SEQ ID NO: 19847 - DNA, 50 bp, synthetic construct
  source 1..50: mol_type = other DNA
ttcctataataaacactttatataaatcrtaaacttcctattctcaaaac

SEQ ID NO: 19848 - DNA, 50 bp, synthetic construct
  source 1..50: mol_type = other DNA
atctatctaaaacacacaccaaaatccaaccttctaataaacataataac

SEQ ID NO: 19849 - DNA, 50 bp, synthetic construct
  source 1..50: mol_type = other DNA
aaaatccaaccttctaataaacataataacrcaatcccactccctacctc

SEQ ID NO: 19850 - DNA, 50 bp, synthetic construct
  source 1..50: mol_type = other DNA
aattttactcccctaaatccaactaattccaaacctataaatatcaattc

SEQ ID NO: 19851 - DNA, 50 bp, synthetic construct
  source 1..50: mol_type = other DNA
tttactcccctaaatccaactaattccaaacctataaatatcaattcrtc

SEQ ID NO: 19852 - DNA, 50 bp, synthetic construct
  source 1..50: mol_type = other DNA
ctccttcrtcctcaactaaaaacacattaacaaaacctcaaaaaaatacc

SEQ ID NO: 19853 - DNA, 50 bp, synthetic construct
  source 1..50: mol_type = other DNA
tcttacaaaatttacctccttcaaaccacaaatatttaaatacacactac

SEQ ID NO: 19854 - DNA, 50 bp, synthetic construct
  source 1..50: mol_type = other DNA
cccttttaacaaactcccaaaacatacttaaaactttaaaaaactctacc

SEQ ID NO: 19855 - DNA, 50 bp, synthetic construct
  source 1..50: mol_type = other DNA
aacatatcttaaaaacttattaaaaaaaccrattccttactataactcac

SEQ ID NO: 19856 - DNA, 50 bp, synthetic construct
  source 1..50: mol_type = other DNA
tttaaaactaaccaaaccaaaccataaccttaatcttactaactacctcc

SEQ ID NO: 19857 - DNA, 50 bp, synthetic construct
  source 1..50: mol_type = other DNA
caaaaaaccaaaaacaatataacaacaactaacctaccccttccctcccc

SEQ ID NO: 19858 - DNA, 50 bp, synthetic construct
  source 1..50: mol_type = other DNA
aacacaatacccctccaacccaaaatacaaaatacctaaaaacaaatacc

SEQ ID NO: 19859 - DNA, 50 bp, synthetic construct
  source 1..50: mol_type = other DNA
ctacaaaaccaaaaacaactaaataactaaaaacaactaaataaattaac

SEQ ID NO: 19860 - DNA, 50 bp, synthetic construct
  source 1..50: mol_type = other DNA
taaaaataatttcctctactacctaccraccccaactctttcatattacc

SEQ ID NO: 19861 - DNA, 50 bp, synthetic construct
  source 1..50: mol_type = other DNA
caactacaaaacaaaaacctaaaaaataataaataccccctacaactacc

SEQ ID NO: 19862 - DNA, 50 bp, synthetic construct
  source 1..50: mol_type = other DNA
caaaacaaaaacctaaaaaataataaataccccctacaactaccraaaac

SEQ ID NO: 19863 - DNA, 50 bp, synthetic construct
  source 1..50: mol_type = other DNA
accctttaaaactaaaaaaaactttaaactaaaatctcctaaccaaatac

SEQ ID NO: 19864 - DNA, 50 bp, synthetic construct
  source 1..50: mol_type = other DNA
ctctccattcccrtcaaaatttactttaatttccctttcctttccttctc

SEQ ID NO: 19865 - DNA, 50 bp, synthetic construct
  source 1..50: mol_type = other DNA
ttatccracctaacctaaaaaataacaccatatcaccctcaccaaaactc

SEQ ID NO: 19866 - DNA, 50 bp, synthetic construct
  source 1..50: mol_type = other DNA
aaaaacraatcctaataaaaataacataatatcaccctccaaaccaaacc

SEQ ID NO: 19867 - DNA, 50 bp, synthetic construct
  source 1..50: mol_type = other DNA
ctaataaaaataacataatatcaccctccaaaccaaaccraataaaaaac

SEQ ID NO: 19868 - DNA, 50 bp, synthetic construct
  source 1..50: mol_type = other DNA
tctttattcccctctaaactaaaataataactatttttataccactctac

SEQ ID NO: 19869 - DNA, 50 bp, synthetic construct
  source 1..50: mol_type = other DNA
aaactaaaaaacatatcratacacaactaaaaatcaacrattataccrac

SEQ ID NO: 19870 - DNA, 50 bp, synthetic construct
  source 1..50: mol_type = other DNA
aaaaaatatattacactaaatacaaaaaatccaaccaaaaacaaccacac

SEQ ID NO: 19871 - DNA, 50 bp, synthetic construct
  source 1..50: mol_type = other DNA
ttacactaaatacaaaaaatccaaccaaaaacaaccacacraaataaatc

SEQ ID NO: 19872 - DNA, 50 bp, synthetic construct
  source 1..50: mol_type = other DNA
acctaaaaaatactcrtaatatatactcaaaccaattataaaaaaaactc

SEQ ID NO: 19873 - DNA, 50 bp, synthetic construct
  source 1..50: mol_type = other DNA
ataaatcttaacraaacttttaccctacrcacaattacatctaaatatac

SEQ ID NO: 19874 - DNA, 50 bp, synthetic construct
  source 1..50: mol_type = other DNA
tctaatttactctcaactacaaaaacacaaaaacactacaaatatcacac

SEQ ID NO: 19875 - DNA, 50 bp, synthetic construct
  source 1..50: mol_type = other DNA
rtaatactccaaaactacttaccaattctccacraatataaatacctacc

SEQ ID NO: 19876 - DNA, 50 bp, synthetic construct
  source 1..50: mol_type = other DNA
acccaaaaatcttaaaaactaaataacccataacaacctctaacactatc

SEQ ID NO: 19877 - DNA, 50 bp, synthetic construct
  source 1..50: mol_type = other DNA
tccataccactcttactttcacctaacaaaaaaaactttttttttaaaac

SEQ ID NO: 19878 - DNA, 50 bp, synthetic construct
  source 1..50: mol_type = other DNA
atttactaaaaataataatttccatacaatctctttcacaactcttaaac

SEQ ID NO: 19879 - DNA, 50 bp, synthetic construct
  source 1..50: mol_type = other DNA
cccattatctctaaaataccrtaatcaaatcttactttataaaacaaatc

SEQ ID NO: 19880 - DNA, 50 bp, synthetic construct
  source 1..50: mol_type = other DNA
ttaacacaaaaattacctaattcattctttcccattatctctaaaatacc

SEQ ID NO: 19881 - DNA, 50 bp, synthetic construct
  source 1..50: mol_type = other DNA
ctcttatatcaaacctcaaacctactcttctaaacaatataaaatctaac

SEQ ID NO: 19882 - DNA, 50 bp, synthetic construct
  source 1..50: mol_type = other DNA
crattcacaacaacactaaaaaaacttcctccaactacatccttatactc

SEQ ID NO: 19883 - DNA, 50 bp, synthetic construct
  source 1..50: mol_type = other DNA
tcacataatctaaaaatacctaaaaattaacrtacaatccaacaaaaatc

SEQ ID NO: 19884 - DNA, 50 bp, synthetic construct
  source 1..50: mol_type = other DNA
ataaccctaaattccacattcacataatctaaaaatacctaaaaattaac

SEQ ID NO: 19885 - DNA, 50 bp, synthetic construct
  source 1..50: mol_type = other DNA
caaaactctcaacaaataactaaataattcraaactaaaaaaacrcaccc

SEQ ID NO: 19886 - DNA, 50 bp, synthetic construct
  source 1..50: mol_type = other DNA
taccrcttaaaaaaaatacctaataaattttacrccrtcttaatatctac

SEQ ID NO: 19887 - DNA, 50 bp, synthetic construct
  source 1..50: mol_type = other DNA
acracacaaaaaaataccrcttaaaaaaaatacctaataaattttacrcc

SEQ ID NO: 19888 - DNA, 50 bp, synthetic construct
  source 1..50: mol_type = other DNA
cccacracacaaaaaaataccrcttaaaaaaaatacctaataaattttac

SEQ ID NO: 19889 - DNA, 50 bp, synthetic construct
  source 1..50: mol_type = other DNA
aatcccaaaaactacraaaaacaactttcrctaacaaacttaaacttccc

SEQ ID NO: 19890 - DNA, 50 bp, synthetic construct
  source 1..50: mol_type = other DNA
aaaaatctaaacctactaacraaaactactctccrcaattcctaaaatcc

SEQ ID NO: 19891 - DNA, 50 bp, synthetic construct
  source 1..50: mol_type = other DNA
taaaacrtcrctcaacctactatctaaattataaactaatttcraaaatc

SEQ ID NO: 19892 - DNA, 50 bp, synthetic construct
  source 1..50: mol_type = other DNA
aaaaaaataaaacrtcrctcaacctactatctaaattataaactaatttc

SEQ ID NO: 19893 - DNA, 50 bp, synthetic construct
  source 1..50: mol_type = other DNA
aactaataacatttatcccraaaccaaataaaaaaccttaaaacaataac

SEQ ID NO: 19894 - DNA, 50 bp, synthetic construct
  source 1..50: mol_type = other DNA
tcraataaatactaaaattactatcctaactacccaaacraaactacaac

SEQ ID NO: 19895 - DNA, 50 bp, synthetic construct
  source 1..50: mol_type = other DNA
tcctaaacaataaaaatcaaaacaaaaaaacccatctacaaccccaaaac

SEQ ID NO: 19896 - DNA, 50 bp, synthetic construct
  source 1..50: mol_type = other DNA
taaaaactaaccctaaaccctaaaataaactaaaaacacaaataaaaaac

SEQ ID NO: 19897 - DNA, 50 bp, synthetic construct
  source 1..50: mol_type = other DNA
crtctctacaaaaacaaaatacaaaaaattatccaaacrtaataacrccc

SEQ ID NO: 19898 - DNA, 50 bp, synthetic construct
  source 1..50: mol_type = other DNA
actccrtctctacaaaaacaaaatacaaaaaattatccaaacrtaataac

SEQ ID NO: 19899 - DNA, 50 bp, synthetic construct
  source 1..50: mol_type = other DNA
ataacraaactccrtctctacaaaaacaaaatacaaaaaattatccaaac

SEQ ID NO: 19900 - DNA, 50 bp, synthetic construct
  source 1..50: mol_type = other DNA
catcraaatcatatctataatatttactactacatatttcacataccctc

SEQ ID NO: 19901 - DNA, 50 bp, synthetic construct
  source 1..50: mol_type = other DNA
tcttaaaaaataacrtacctccaacatatcaacttcctaatatctcttcc

SEQ ID NO: 19902 - DNA, 50 bp, synthetic construct
  source 1..50: mol_type = other DNA
caaaataaaactaaaaacaaatcctatacrattttcacrcacraaacctc

SEQ ID NO: 19903 - DNA, 50 bp, synthetic construct
  source 1..50: mol_type = other DNA
aaaaaaaaatacttaaaaataaaacccctaccractaaaaaccaaaccac

SEQ ID NO: 19904 - DNA, 50 bp, synthetic construct
  source 1..50: mol_type = other DNA
taaccacractataaacataaacatattaacaaaaatataatctaaaacc

SEQ ID NO: 19905 - DNA, 50 bp, synthetic construct
  source 1..50: mol_type = other DNA
acatattaacaaaaatataatctaaaaccrctacaacataataaccacrc

SEQ ID NO: 19906 - DNA, 50 bp, synthetic construct
  source 1..50: mol_type = other DNA
cccccaaaaacaattccccaaactaaataaattaaaaataaccaaaaccc

SEQ ID NO: 19907 - DNA, 50 bp, synthetic construct
  source 1..50: mol_type = other DNA
aaaaataaccaaaacccractaaccaaataataaaaaatacaccaaaacc

SEQ ID NO: 19908 - DNA, 50 bp, synthetic construct
  source 1..50: mol_type = other DNA
ctaaacctctaaaaaaccctaaaattaacaactcccataataataacccc

SEQ ID NO: 19909 - DNA, 50 bp, synthetic construct
  source 1..50: mol_type = other DNA
aactcccataataataaccccraaaataataaataactttaaattaaacc

SEQ ID NO: 19910 - DNA, 50 bp, synthetic construct
  source 1..50: mol_type = other DNA
aaaactataaacaacaaacctaaaaaacacaaacactactaacatcraac

SEQ ID NO: 19911 - DNA, 50 bp, synthetic construct
  source 1..50: mol_type = other DNA
aacaaaaactataaacaacaaacctaaaaaacacaaacactactaacatc

SEQ ID NO: 19912 - DNA, 50 bp, synthetic construct
  source 1..50: mol_type = other DNA
aaaaatcaaaaaaatactaattttatccccctaccaaaataaatatcctc

SEQ ID NO: 19913 - DNA, 50 bp, synthetic construct
  source 1..50: mol_type = other DNA
aaaaaaatactaattttatccccctaccaaaataaatatcctcrcactac

SEQ ID NO: 19914 - DNA, 50 bp, synthetic construct
  source 1..50: mol_type = other DNA
aaatcccraaaaaaacrtctatacctaacrtaaacaaaatctaaaaaaac

SEQ ID NO: 19915 - DNA, 50 bp, synthetic construct
  source 1..50: mol_type = other DNA
ccacctctatctaattccaaaacattttcatcaccccaataaaaaacctc

SEQ ID NO: 19916 - DNA, 50 bp, synthetic construct
  source 1..50: mol_type = other DNA
acttacrataaaatcatattctaataaacccatcataaattaaaaatatc

SEQ ID NO: 19917 - DNA, 50 bp, synthetic construct
  source 1..50: mol_type = other DNA
actaacratattttcaatttataataaatttaccaaaacataaccccatc

SEQ ID NO: 19918 - DNA, 50 bp, synthetic construct
  source 1..50: mol_type = other DNA
tttaatccaatattcctcaaacaatttttaacacaatacraaaatttctc

SEQ ID NO: 19919 - DNA, 50 bp, synthetic construct
  source 1..50: mol_type = other DNA
ttataataaatttaccaaaacataaccccatcrtaaaccraaaaacttcc

SEQ ID NO: 19920 - DNA, 50 bp, synthetic construct
  source 1..50: mol_type = other DNA
aaacactaaattaaataatacttccactattctactctccctaaaaaaac

SEQ ID NO: 19921 - DNA, 50 bp, synthetic construct
  source 1..50: mol_type = other DNA
tacaccraaacaaaaaacctaaaataaacaaaacctcactctacttcacc

SEQ ID NO: 19922 - DNA, 50 bp, synthetic construct
  source 1..50: mol_type = other DNA
tcataacctactactatcaatcaacttttctctcraatcttctatacacc

SEQ ID NO: 19923 - DNA, 50 bp, synthetic construct
  source 1..50: mol_type = other DNA
taaacaaataacatcctcataacctactactatcaatcaacttttctctc

SEQ ID NO: 19924 - DNA, 50 bp, synthetic construct
  source 1..50: mol_type = other DNA
tatataccattcacaccatcataactaaaaaaccattaaattaaaccatc

SEQ ID NO: 19925 - DNA, 50 bp, synthetic construct
  source 1..50: mol_type = other DNA
tctacrtacaatattataaaaacctcattatcaaaatttataaatttctc

SEQ ID NO: 19926 - DNA, 50 bp, synthetic construct
  source 1..50: mol_type = other DNA
ttaaaaccaaaaaacacctaaaaatttataataaaaacrtacactaaacc

SEQ ID NO: 19927 - DNA, 50 bp, synthetic construct
  source 1..50: mol_type = other DNA
actaaaccraaaaactaattttcaatcctatactttctcttatcctctcc

SEQ ID NO: 19928 - DNA, 50 bp, synthetic construct
  source 1..50: mol_type = other DNA
aacaactatccrccraatatacactataaacaaaaccaacctaaattacc

SEQ ID NO: 19929 - DNA, 50 bp, synthetic construct
  source 1..50: mol_type = other DNA
aaccttcaacatttcttcattctaaacaataacacaatcacttactaaac

SEQ ID NO: 19930 - DNA, 50 bp, synthetic construct
  source 1..50: mol_type = other DNA
ccaacrttaacctcaacccaaaatatacttaaaaccactatacaaataac

SEQ ID NO: 19931 - DNA, 50 bp, synthetic construct
  source 1..50: mol_type = other DNA
tctcratctattttttaaaatcaaatttattaaaatataattcacattcc

SEQ ID NO: 19932 - DNA, 50 bp, synthetic construct
  source 1..50: mol_type = other DNA
ctaaaaataaaaaactaaactccccaaataacaaacrcctaaatataaac

SEQ ID NO: 19933 - DNA, 50 bp, synthetic construct
  source 1..50: mol_type = other DNA
aataaaaaataactatctacccactatataaacccactatatatcccatc

SEQ ID NO: 19934 - DNA, 50 bp, synthetic construct
  source 1..50: mol_type = other DNA
ctcaaccctaaaactacaaaaacaaccttacatctccaaaaataaaaaac

SEQ ID NO: 19935 - DNA, 50 bp, synthetic construct
  source 1..50: mol_type = other DNA
aatatttactatccccatcataataaaataaaaacatcccraataaaaac

SEQ ID NO: 19936 - DNA, 50 bp, synthetic construct
  source 1..50: mol_type = other DNA
taccaaaaccaatatttactatccccatcataataaaataaaaacatccc

SEQ ID NO: 19937 - DNA, 50 bp, synthetic construct
  source 1..50: mol_type = other DNA
atcccaccataataaaaacaacaaacactaaccttaacaatactaacacc

SEQ ID NO: 19938 - DNA, 50 bp, synthetic construct
  source 1..50: mol_type = other DNA
taaaacccataaacttaacacataataaaatactcacctataactataac

SEQ ID NO: 19939 - DNA, 50 bp, synthetic construct
  source 1..50: mol_type = other DNA
taaactaacaaaataaaaacctaacacctctaataacctaaaaaacaaac

SEQ ID NO: 19940 - DNA, 50 bp, synthetic construct
  source 1..50: mol_type = other DNA
aaaattaaaatataccccrtcaaaaaaactaaccacaaattacacaaccc

SEQ ID NO: 19941 - DNA, 50 bp, synthetic construct
  source 1..50: mol_type = other DNA
actaacactatactaaaaactaaactataataataacratccctaccctc

SEQ ID NO: 19942 - DNA, 50 bp, synthetic construct
  source 1..50: mol_type = other DNA
taataataacratccctaccctcrcaaaaaatactatatataaacactac

SEQ ID NO: 19943 - DNA, 50 bp, synthetic construct
  source 1..50: mol_type = other DNA
aacrtcatcattattcataataccctctcraaccacacttaaatttatac

SEQ ID NO: 19944 - DNA, 50 bp, synthetic construct
  source 1..50: mol_type = other DNA
aattataaataaaacaataaataaaaaccctttacrcracccctacaccc

SEQ ID NO: 19945 - DNA, 50 bp, synthetic construct
  source 1..50: mol_type = other DNA
atccctaccaaaaaattataaataaaacaataaataaaaaccctttacrc

SEQ ID NO: 19946 - DNA, 50 bp, synthetic construct
  source 1..50: mol_type = other DNA
taatccctaccaaaaaattataaataaaacaataaataaaaaccctttac

SEQ ID NO: 19947 - DNA, 50 bp, synthetic construct
  source 1..50: mol_type = other DNA
taattacatcatctataaaataaaataattactctccracctaccttctc

SEQ ID NO: 19948 - DNA, 50 bp, synthetic construct
  source 1..50: mol_type = other DNA
tatctaatttcctaaacttattttcaaattcrccattaaaaaaaacctcc

SEQ ID NO: 19949 - DNA, 50 bp, synthetic construct
  source 1..50: mol_type = other DNA
ttaaatttaaaaatacataataatcacctataactcaccrctacatttcc

SEQ ID NO: 19950 - DNA, 50 bp, synthetic construct
  source 1..50: mol_type = other DNA
acaccrcctacrtcacctaaattaaaaaactcatttaaaatacaaacttc

SEQ ID NO: 19951 - DNA, 50 bp, synthetic construct
  source 1..50: mol_type = other DNA
ataacraaatctatatttcaaataaacccctcaacccaaataacrcaaac

SEQ ID NO: 19952 - DNA, 50 bp, synthetic construct
  source 1..50: mol_type = other DNA
atattaaacaaaaattaaaattaacaaacctactataaaccccraaattc

SEQ ID NO: 19953 - DNA, 50 bp, synthetic construct
  source 1..50: mol_type = other DNA
ttcacatccaacaaaatacaacctaaaaataaaaaacaaatctttaaacc

SEQ ID NO: 19954 - DNA, 50 bp, synthetic construct
  source 1..50: mol_type = other DNA
ccaaattcccctacttaccaataccttaaacacrtaaacacrtaaaactc

SEQ ID NO: 19955 - DNA, 50 bp, synthetic construct
  source 1..50: mol_type = other DNA
caacacattcccaaaaaccaaattcccctacttaccaataccttaaacac

SEQ ID NO: 19956 - DNA, 50 bp, synthetic construct
  source 1..50: mol_type = other DNA
tattccttaacaccattaaaacaaaaatttcattatacaaattccaaatc

SEQ ID NO: 19957 - DNA, 50 bp, synthetic construct
  source 1..50: mol_type = other DNA
tataaaataaaactatctaaatcacatctaaacaacaaatttatctaaac

SEQ ID NO: 19958 - DNA, 50 bp, synthetic construct
  source 1..50: mol_type = other DNA
tcrtaacatcctacactaaattaacaaaaaacctaaataaataattatcc

SEQ ID NO: 19959 - DNA, 50 bp, synthetic construct
  source 1..50: mol_type = other DNA
aaaaataattcccaaccataaaacttaaccrtaaccccactcacctattc

SEQ ID NO: 19960 - DNA, 50 bp, synthetic construct
  source 1..50: mol_type = other DNA
ataaaatataacrtaaacacaaaaataattcccaaccataaaacttaacc

SEQ ID NO: 19961 - DNA, 50 bp, synthetic construct
  source 1..50: mol_type = other DNA
aaataaaaccacraccaaaccctataactaaaaaccatccctatatctac

SEQ ID NO: 19962 - DNA, 50 bp, synthetic construct
  source 1..50: mol_type = other DNA
acctccaataaatacacatactaaattctaacccaatcttatctcctctc

SEQ ID NO: 19963 - DNA, 50 bp, synthetic construct
  source 1..50: mol_type = other DNA
aaacaaaactaaatcaaaacccaatatatacacctactaaaaataacttc

SEQ ID NO: 19964 - DNA, 50 bp, synthetic construct
  source 1..50: mol_type = other DNA
aaataaaaatacrcaaataaccctacctactaaaattcaaaacraaatac

SEQ ID NO: 19965 - DNA, 50 bp, synthetic construct
  source 1..50: mol_type = other DNA
taaaaatacrcaaataaccctacctactaaaattcaaaacraaatacrcc

SEQ ID NO: 19966 - DNA, 50 bp, synthetic construct
  source 1..50: mol_type = other DNA
ccaatactactatacactacctacatcctaccaaaattccttataaaaac

SEQ ID NO: 19967 - DNA, 50 bp, synthetic construct
  source 1..50: mol_type = other DNA
aacctatattctaaccttaaataactataaataaatcrcacaacttctac

SEQ ID NO: 19968 - DNA, 50 bp, synthetic construct
  source 1..50: mol_type = other DNA
ttctaaccttaaataactataaataaatcrcacaacttctacrctcccac

SEQ ID NO: 19969 - DNA, 50 bp, synthetic construct
  source 1..50: mol_type = other DNA
ctataccaaacacratactaaacacccaaaatatataatctcactcaccc

SEQ ID NO: 19970 - DNA, 50 bp, synthetic construct
  source 1..50: mol_type = other DNA
aaaatattaaaacraataaataaaatcatacaccttaaatacttaacacc

SEQ ID NO: 19971 - DNA, 50 bp, synthetic construct
  source 1..50: mol_type = other DNA
acctaaaatcctcctacaaatcaaaaattccctctaactcactttctcac

SEQ ID NO: 19972 - DNA, 50 bp, synthetic construct
  source 1..50: mol_type = other DNA
caaaatttaacaaaaaaccaaataacaactaaaatccratccraaaaaac

SEQ ID NO: 19973 - DNA, 50 bp, synthetic construct
  source 1..50: mol_type = other DNA
aacctatacaaaatttaacaaaaaaccaaataacaactaaaatccratcc

SEQ ID NO: 19974 - DNA, 50 bp, synthetic construct
  source 1..50: mol_type = other DNA
aaaccaacctatacaaaatttaacaaaaaaccaaataacaactaaaatcc

SEQ ID NO: 19975 - DNA, 50 bp, synthetic construct
  source 1..50: mol_type = other DNA
ctctacacaaactaactctatctacaacaccctataaaataaaacaaacc

SEQ ID NO: 19976 - DNA, 50 bp, synthetic construct
  source 1..50: mol_type = other DNA
aaaaaaataccaaaaacttcaaactaaaccccatctaataaaccctaaac

SEQ ID NO: 19977 - DNA, 50 bp, synthetic construct
  source 1..50: mol_type = other DNA
tcttattactacaaaatctattttatcactcctaaaatctctattttaac

SEQ ID NO: 19978 - DNA, 50 bp, synthetic construct
  source 1..50: mol_type = other DNA
cattcacacaacaaccctaataaacaaccactattaaaaacttaacattc

SEQ ID NO: 19979 - DNA, 50 bp, synthetic construct
  source 1..50: mol_type = other DNA
acttacccaaccaacatctaactatacaataaaaactcccactaataaac

SEQ ID NO: 19980 - DNA, 50 bp, synthetic construct
  source 1..50: mol_type = other DNA
aaataaacaaacctataacrataactccraaaaatatcaaatcaaaaacc

SEQ ID NO: 19981 - DNA, 50 bp, synthetic construct
  source 1..50: mol_type = other DNA
aaaattatcttcccracaaataaaataaacaaacctataacrataactcc

SEQ ID NO: 19982 - DNA, 50 bp, synthetic construct
  source 1..50: mol_type = other DNA
aataatataaaaattctacracctttaatttaacacctcccraaactacc

SEQ ID NO: 19983 - DNA, 50 bp, synthetic construct
  source 1..50: mol_type = other DNA
ttttaaaaatcaatcacccacccaccaccaaaaaccaaaattatcttccc

SEQ ID NO: 19984 - DNA, 50 bp, synthetic construct
  source 1..50: mol_type = other DNA
taactactcctactttatatttaaatcctttataacctcaaataacaccc

SEQ ID NO: 19985 - DNA, 50 bp, synthetic construct
  source 1..50: mol_type = other DNA
ctaacccacatataaaaataaaaatttaaccccaacaaaaccccaaaacc

SEQ ID NO: 19986 - DNA, 50 bp, synthetic construct
  source 1..50: mol_type = other DNA
aaaataaaaatttaaccccaacaaaaccccaaaaccrtaccaaccctaac

SEQ ID NO: 19987 - DNA, 50 bp, synthetic construct
  source 1..50: mol_type = other DNA
aaccctaacrcraacaccttaaaatataacaatattaaaaatcaaaactc

SEQ ID NO: 19988 - DNA, 50 bp, synthetic construct
  source 1..50: mol_type = other DNA
atataaaactcaaattacataactttaaaacaaactcctaactcracrcc

SEQ ID NO: 19989 - DNA, 50 bp, synthetic construct
  source 1..50: mol_type = other DNA
craactatataaaactcaaattacataactttaaaacaaactcctaactc

SEQ ID NO: 19990 - DNA, 50 bp, synthetic construct
  source 1..50: mol_type = other DNA
craattaaaaacctattttaaaaccatacaacttaaatttcacacaatcc

SEQ ID NO: 19991 - DNA, 50 bp, synthetic construct
  source 1..50: mol_type = other DNA
tcccttcaattcaaaacataatataattaataaatattcttaatttactc

SEQ ID NO: 19992 - DNA, 50 bp, synthetic construct
  source 1..50: mol_type = other DNA
atcataactaaaacccaaacacaaaataacaacattaacccaataatctc

SEQ ID NO: 19993 - DNA, 50 bp, synthetic construct
  source 1..50: mol_type = other DNA
taaaatacaaactacctctatcctcaaaactaataaaaataactataatc

SEQ ID NO: 19994 - DNA, 50 bp, synthetic construct
  source 1..50: mol_type = other DNA
aaaaaccaataaaattaacrtcctctataaaaccrcctaaatcacacacc

SEQ ID NO: 19995 - DNA, 50 bp, synthetic construct
  source 1..50: mol_type = other DNA
acaaacaaaaaaccrcaaaaaccaataaaattaacrtcctctataaaacc

SEQ ID NO: 19996 - DNA, 50 bp, synthetic construct
  source 1..50: mol_type = other DNA
cccaactcttctctatctcratatataacttaaacratttcacaaaaaac

SEQ ID NO: 19997 - DNA, 50 bp, synthetic construct
  source 1..50: mol_type = other DNA
tatataacttaaacratttcacaaaaaacrccaacttcattaacttttac

SEQ ID NO: 19998 - DNA, 50 bp, synthetic construct
  source 1..50: mol_type = other DNA
ataaaaaaatcataaattctcaactctactctaaaaatctaaccttcaac

SEQ ID NO: 19999 - DNA, 50 bp, synthetic construct
  source 1..50: mol_type = other DNA
aatcatacctaaaaaatattttcttacctaatcatcaaccctctcacctc

SEQ ID NO: 20000 - DNA, 50 bp, synthetic construct
  source 1..50: mol_type = other DNA
attcaaaaatttaaattcacttccaatacaactaactaaataataaatac

SEQ ID NO: 20001 - DNA, 50 bp, synthetic construct
  source 1..50: mol_type = other DNA
ctaaaatctatatacaacctaacttttaatacaatatacaccctaaaaac

SEQ ID NO: 20002 - DNA, 50 bp, synthetic construct
  source 1..50: mol_type = other DNA
ttccaaaaaataacctcattaactacaaaacatatctaaacaaaaactcc

SEQ ID NO: 20003 - DNA, 50 bp, synthetic construct
  source 1..50: mol_type = other DNA
ccrttattcattcccaaccctattaccctaacaaaatacaaactccaaac

SEQ ID NO: 20004 - DNA, 50 bp, synthetic construct
  source 1..50: mol_type = other DNA
tacrcttaacaaaaaatatcctaaaaaaactaaaaccctaaaccactcac

SEQ ID NO: 20005 - DNA, 50 bp, synthetic construct
  source 1..50: mol_type = other DNA
attacccaatcccactacctaaaaaaacraataaacaaaactttctctac

SEQ ID NO: 20006 - DNA, 50 bp, synthetic construct
  source 1..50: mol_type = other DNA
ccctacaaataattttcaaaaaaattaacaatcatacttttcctttcttc

SEQ ID NO: 20007 - DNA, 50 bp, synthetic construct
  source 1..50: mol_type = other DNA
acaatttaatctcaaactactatactaacaatcaacraaactccrtaaac

SEQ ID NO: 20008 - DNA, 50 bp, synthetic construct; identical to SEQ ID NO: 20007
  source 1..50: mol_type = other DNA

SEQ ID NO: 20009 - DNA, 50 bp, synthetic construct
  source 1..50: mol_type = other DNA
acaatttaatctcaaactactatactaacaatcaacaaaactccrtaaac

SEQ ID NO: 20010 - DNA, 50 bp, synthetic construct; identical to SEQ ID NO: 20009
  source 1..50: mol_type = other DNA

SEQ ID NO: 20011 - DNA, 50 bp, synthetic construct; identical to SEQ ID NO: 20009
  source 1..50: mol_type = other DNA

SEQ ID NO: 20012 - DNA, 50 bp, synthetic construct
  source 1..50: mol_type = other DNA
atacttataaaataaaaacactcatatctaaatcccaccttaaaaccatc

SEQ ID NO: 20013 - DNA, 50 bp, synthetic construct
  source 1..50: mol_type = other DNA
tttctacaaaaacataacaaaaaacttacrtaattctacctctcccttcc

SEQ ID NO: 20014 - DNA, 50 bp, synthetic construct
  source 1..50: mol_type = other DNA
actacctaaacaaactaatttattcacctttacccaaaatacatatttac

SEQ ID NO: 20015 - DNA, 50 bp, synthetic construct
  source 1..50: mol_type = other DNA
tctaacataacacacrtatttaaaacaatatttataaactcaaaaacctc

SEQ ID NO: 20016 - DNA, 50 bp, synthetic construct
  source 1..50: mol_type = other DNA
aaccttactaactacraaacttctaaactcacaaacactactttaaacac

SEQ ID NO: 20017 - DNA, 50 bp, synthetic construct
  source 1..50: mol_type = other DNA
catttcttttctatcccaaacrcaaaaatcctcttctaaacrtctattcc

SEQ ID NO: 20018 - DNA, 50 bp, synthetic construct
  source 1..50: mol_type = other DNA
ccccttaaaaactcttatacctaaaaaaactaaataaaacaaataataac

SEQ ID NO: 20019 - DNA, 50 bp, synthetic construct
  source 1..50: mol_type = other DNA
aataccaaataaaaccttcrtacaactaatttcattaatcacatttaaac

SEQ ID NO: 20020 - DNA, 50 bp, synthetic construct
  source 1..50: mol_type = other DNA
ttcaaaatctacaataaacrctcaaatataactaataaaaccaattacac

SEQ ID NO: 20021 - DNA, 50 bp, synthetic construct
  source 1..50: mol_type = other DNA
tatactaaaaactatatatacaacaaaaaaatcaacatctacccccacac

SEQ ID NO: 20022 - DNA, 50 bp, synthetic construct
  source 1..50: mol_type = other DNA
tcctattccttccaaaaaataaaaccctttaaaaattaaaaactaacrac

SEQ ID NO: 20023 - DNA, 50 bp, synthetic construct
  source 1..50: mol_type = other DNA
cattcctattccttccaaaaaataaaaccctttaaaaattaaaaactaac

SEQ ID NO: 20024 - DNA, 50 bp, synthetic construct
  source 1..50: mol_type = other DNA
tccaataaattcttctcatattaaaaacctcaacatcaataaaaaacrac

SEQ ID NO: 20025 - DNA, 50 bp, synthetic construct
  source 1..50: mol_type = other DNA
aaaatcctaaaccaaaaaactaaaacccacattaattcaaaacattccac

SEQ ID NO: 20026 - DNA, 50 bp, synthetic construct
  source 1..50: mol_type = other DNA
accaaaaaactaaaacccacattaattcaaaacattccacrttaaaaacc

SEQ ID NO: 20027 - DNA, 50 bp, synthetic construct
  source 1..50: mol_type = other DNA
aaaaaactaaaacccacattaattcaaaacattccacrttaaaaaccrac

SEQ ID NO: 20028 - DNA, 50 bp, synthetic construct
  source 1..50: mol_type = other DNA
ttaaatccccaaactcratattaaaaatacaaacccaacataccrctaac

SEQ ID NO: 20029 - DNA, 50 bp, synthetic construct
  source 1..50: mol_type = other DNA
ttcaataccataatccttcctaaaatctaaaccccaataaaaaccccaac

SEQ ID NO: 20030 - DNA, 50 bp, synthetic construct
  source 1..50: mol_type = other DNA
caacrtatttatttttccccttaaaaaaaaactctcttctcaacctacac

SEQ ID NO: 20031 - DNA, 50 bp, synthetic construct
  source 1..50: mol_type = other DNA
aaaatatcataataaattaaaaaacccaacacaaacctaacataaaaacc

SEQ ID NO: 20032 - DNA, 50 bp, synthetic construct
  source 1..50: mol_type = other DNA
ataaaaacccaaaacraaaaacactatattaatctaccttcttaaaaaac

SEQ ID NO: 20033 - DNA, 50 bp, synthetic construct
  source 1..50: mol_type = other DNA
ataaccraaccaacaataaacaaatcaccccttaaataaaaacccaaaac

SEQ ID NO: 20034 - DNA, 50 bp, synthetic construct
  source 1..50: mol_type = other DNA
cctaatataaaatctacccaaaaacaaaacaccaaataatcccaataacc

SEQ ID NO: 20035 - DNA, 50 bp, synthetic construct
  source 1..50: mol_type = other DNA
caaaaaaatcaacaatatccractcctccaaaatacaaacccatctcttc

SEQ ID NO: 20036 - DNA, 50 bp, synthetic construct
  source 1..50: mol_type = other DNA
accctctcaacaaacaaatctaaacaatatatataaatttatacacatac

SEQ ID NO: 20037 - DNA, 50 bp, synthetic construct
  source 1..50: mol_type = other DNA
tatattacctaaatctatctactaaaaaaacttaaaaacaataaaacccc

SEQ ID NO: 20038 - DNA, 50 bp, synthetic construct
  source 1..50: mol_type = other DNA
ctccttctttaaaatctctacttaattttcatttattccaaaaaataatc

SEQ ID NO: 20039 - DNA, 50 bp, synthetic construct
  source 1..50: mol_type = other DNA
ttacraatctaaatttcaaataaatcaaaccaacctcrattctaatcccc

SEQ ID NO: 20040 - DNA, 50 bp, synthetic construct
  source 1..50: mol_type = other DNA
ctataaaaatcaattacraatctaaatttcaaataaatcaaaccaacctc

SEQ ID NO: 20041 - DNA, 50 bp, synthetic construct
  source 1..50: mol_type = other DNA
caaaccrcctaaaaaatacaaaactctatctataaaaactaacccraacc

SEQ ID NO: 20042 - DNA, 50 bp, synthetic construct
  source 1..50: mol_type = other DNA
caaaacaaaccrcctaaaaaatacaaaactctatctataaaaactaaccc

SEQ ID NO: 20043 - DNA, 50 bp, synthetic construct
  source 1..50: mol_type = other DNA
aaaaaaactctaaaatcaattcccaaactcctacccaaccaaaatatatc

SEQ ID NO: 20044 - DNA, 50 bp, synthetic construct
  source 1..50: mol_type = other DNA
aaaaacaaacacacacctaattcaacacataatcttccttttcaaccaac

SEQ ID NO: 20045 - DNA, 50 bp, synthetic construct
  source 1..50: mol_type = other DNA
attaaaattcttaccctaccccttaccaactatataaccttaaacaaatc

SEQ ID NO: 20046 - DNA, 50 bp, synthetic construct
  source 1..50: mol_type = other DNA
aattcttaccctaccccttaccaactatataaccttaaacaaatcrtaac

SEQ ID NO: 20047 - DNA, 50 bp, synthetic construct
  source 1..50: mol_type = other DNA
accttaaacaaatcrtaacrttataaactatctaaatcaccttccttctc

SEQ ID NO: 20048 - DNA, 50 bp, synthetic construct
  source 1..50: mol_type = other DNA
taacrttataaactatctaaatcaccttccttctcrtaaataataaaacc

SEQ ID NO: 20049 - DNA, 50 bp, synthetic construct
  source 1..50: mol_type = other DNA
tatttatcaaatatattcatatacataacttcactaacctccccaacttc

SEQ ID NO: 20050 - DNA, 50 bp, synthetic construct
  source 1..50: mol_type = other DNA
actataaaacrcaattcttccttatttaaaaactatatattaactctacc

SEQ ID NO: 20051 - DNA, 50 bp, synthetic construct
  source 1..50: mol_type = other DNA
cttatttaaaaactatatattaactctaccrtccataaactaattatctc

SEQ ID NO: 20052 - DNA, 50 bp, synthetic construct
  source 1..50: mol_type = other DNA
atattaaaccacattcaaaactatcctaaaccacatacaacccrtaaacc

SEQ ID NO: 20053 - DNA, 50 bp, synthetic construct
  source 1..50: mol_type = other DNA
tattttataaaactatatttttcttcacaatctaaaaaacttaaaaaccc

SEQ ID NO: 20054 - DNA, 50 bp, synthetic construct
  source 1..50: mol_type = other DNA
ttccccratattcctataacttctctataactaaataaccaaacataacc

SEQ ID NO: 20055 - DNA, 50 bp, synthetic construct
  source 1..50: mol_type = other DNA
ataaccaaacataaccraaaaaactctaaataaatataaactctataccc

SEQ ID NO: 20056 - DNA, 50 bp, synthetic construct
  source 1..50: mol_type = other DNA
taacccaataatcctataaccaataaacacactttaaaaaattaattatc

SEQ ID NO: 20057 - DNA, 50 bp, synthetic construct
  source 1..50: mol_type = other DNA
accccrtaatttaataaaacaacttaaccttaaacaacccataaaaaaac

SEQ ID NO: 20058 - DNA, 50 bp, synthetic construct
  source 1..50: mol_type = other DNA
aatttaaaaacaaactactaaaaaaatatccaaaatataataatctcacc

SEQ ID NO: 20059 - DNA, 50 bp, synthetic construct
  source 1..50: mol_type = other DNA
taataatctcaccraaaaaaaccaatcaaaataacacaacctataaccac

SEQ ID NO: 20060 - DNA, 50 bp, synthetic construct
  source 1..50: mol_type = other DNA
ataatctcaccraaaaaaaccaatcaaaataacacaacctataaccacrc

SEQ ID NO: 20061 - DNA, 50 bp, synthetic construct
  source 1..50: mol_type = other DNA
cataaaactttaaaaaacaaccaacaacaaaacataaactatatacaaac

SEQ ID NO: 20062 - DNA, 50 bp, synthetic construct
  source 1..50: mol_type = other DNA
aactttaaaaaacaaccaacaacaaaacataaactatatacaaacraaac

SEQ ID NO: 20063 - DNA, 50 bp, synthetic construct
  source 1..50: mol_type = other DNA
caaccaacaacaaaacataaactatatacaaacraaacrctaacctaaac

SEQ ID NO: 20064 - DNA, 50 bp, synthetic construct
  source 1..50: mol_type = other DNA
ccaacaacaaaacataaactatatacaaacraaacrctaacctaaacrcc

SEQ ID NO: 20065 - DNA, 50 bp, synthetic construct
  source 1..50: mol_type = other DNA
ccraaaaatattcttttccaattttaaaccaaaataaaaactatctcctc

SEQ ID NO: 20066 - DNA, 50 bp, synthetic construct
  source 1..50: mol_type = other DNA
aaaatcaaatcaaacacactctacaaaactcrtctattaaaatcrttcac

SEQ ID NO: 20067 - DNA, 50 bp, synthetic construct
  source 1..50: mol_type = other DNA
ctaaactcccaaaacaacaaaaatcaaatcaaacacactctacaaaactc

SEQ ID NO: 20068 - DNA, 50 bp, synthetic construct
  source 1..50: mol_type = other DNA
ttttactaaaataaaactactactttattctttaattaatctatcaattc

SEQ ID NO: 20069 - DNA, 50 bp, synthetic construct
  source 1..50: mol_type = other DNA
atacrttatttttatacaactacaactattcaacaatactaaacttaacc

SEQ ID NO: 20070 - DNA, 50 bp, synthetic construct
  source 1..50: mol_type = other DNA
tttatttttatatttaaaaccctttcccatttccctacttaaaactatac

SEQ ID NO: 20071 - DNA, 50 bp, synthetic construct
  source 1..50: mol_type = other DNA
atatctaatattattttcccctaacratccaaaatatttcccaaaaaacc

SEQ ID NO: 20072 - DNA, 50 bp, synthetic construct
  source 1..50: mol_type = other DNA
aaaaaaaaaccractcrcctttaaaaaactacctttcttccaaatttatc

SEQ ID NO: 20073 - DNA, 50 bp, synthetic construct
  source 1..50: mol_type = other DNA
acaaaacaaaaaacracacaaaacttaaaaacracacaaaacttaaaaac

SEQ ID NO: 20074 - DNA, 50 bp, synthetic construct
  source 1..50: mol_type = other DNA
acaaaacttaaaaacracacaaaacttaaaaacracacaaaactaaaaac

SEQ ID NO: 20075 - DNA, 50 bp, synthetic construct
  source 1..50: mol_type = other DNA
tttactcctcaaattaaatattttaaataacttttaaacaactttacrcc

SEQ ID NO: 20076 - DNA, 50 bp, synthetic construct
  source 1..50: mol_type = other DNA
ttaacctatactcttaaaaactattttcttactctaaaaaaataatcrac

SEQ ID NO: 20077 - DNA, 50 bp, synthetic construct
  source 1..50: mol_type = other DNA
aaacttaactacctaacaatatttattataaacaattaccataccactcc

SEQ ID NO: 20078 - DNA, 50 bp, synthetic construct
  source 1..50: mol_type = other DNA
acatcaccttctccaattacttaaaataaaccaaatcctaaaaaccraac

SEQ ID NO: 20079 - DNA, 50 bp, synthetic construct
  source 1..50: mol_type = other DNA
crcatatcaataacaacatatatcttctaattaataccctctaaaaccac

SEQ ID NO: 20080 - DNA, 50 bp, synthetic construct
  source 1..50: mol_type = other DNA
crtaacctcaaaaaacaccaaccaaaaaacacatactatcactaacatac

SEQ ID NO: 20081 - DNA, 50 bp, synthetic construct
  source 1..50: mol_type = other DNA
cactataaaaacaactaaaataaaaactcraaactcctacctaccctaac

SEQ ID NO: 20082 - DNA, 50 bp, synthetic construct
  source 1..50: mol_type = other DNA
acctatctcccactaaaaaacctactcaaccttataataaaataacaacc

SEQ ID NO: 20083 - DNA, 50 bp, synthetic construct
  source 1..50: mol_type = other DNA
ctcrtcactaaacctaaaaaaaataaccraaaattaatcaatacccccac

SEQ ID NO: 20084 - DNA, 50 bp, synthetic construct
  source 1..50: mol_type = other DNA
tctccaaacccaataacraacaccatccraaaataaaaactaataaatac

SEQ ID NO: 20085 - DNA, 50 bp, synthetic construct
  source 1..50: mol_type = other DNA
ctaccttaaccaacaacctttaactcaaactttaactactaaaaaaaacc

SEQ ID NO: 20086 - DNA, 50 bp, synthetic construct
  source 1..50: mol_type = other DNA
cactatctctaatcctaccttatacttaaaccactaaatatcaaaaatac

SEQ ID NO: 20087 - DNA, 50 bp, synthetic construct
  source 1..50: mol_type = other DNA
aaactattccrttaaaaaaaacaataccaaaatttaccctaaactacctc

SEQ ID NO: 20088 - DNA, 50 bp, synthetic construct
  source 1..50: mol_type = other DNA
tatctaaaacraaacaatccaaaacaaactttaacactaccttccctaac

SEQ ID NO: 20089 - DNA, 50 bp, synthetic construct
  source 1..50: mol_type = other DNA
ttccctaacraaacaacctataacctaaaaataataaactttactttccc

SEQ ID NO: 20090 - DNA, 50 bp, synthetic construct
  source 1..50: mol_type = other DNA
aaacaacctataacctaaaaataataaactttactttcccraccaaaaac

SEQ ID NO: 20091 - DNA, 50 bp, synthetic construct
  source 1..50: mol_type = other DNA
aacttcaattataaataatttattcccaaaacccctataaaaaaaccrcc

SEQ ID NO: 20092 - DNA, 50 bp, synthetic construct
  source 1..50: mol_type = other DNA
taaaacttcaattataaataatttattcccaaaacccctataaaaaaacc

SEQ ID NO: 20093 - DNA, 50 bp, synthetic construct
  source 1..50: mol_type = other DNA
acctaaaaacacacaaaaaaaacacacttaataaacraaaaaacttctac

SEQ ID NO: 20094 - DNA, 50 bp, synthetic construct
  source 1..50: mol_type = other DNA
aaaacacacttaatacctaaaaacacacaaaaaaaacacacttaataaac

SEQ ID NO: 20095 - DNA, 50 bp, synthetic construct
  source 1..50: mol_type = other DNA
aaatatactcccaaactaacctaaaacaaaaaacaacctaaaacctaccc

SEQ ID NO: 20096 - DNA, 50 bp, synthetic construct
  source 1..50: mol_type = other DNA
aacaaaactaacctacrtacccttaaaatcctattcaaactctacctacc

SEQ ID NO: 20097 - DNA, 50 bp, synthetic construct
  source 1..50: mol_type = other DNA
aaacaaacatattaaaaaaaacaactactaacttacctaaaaataaaacc

SEQ ID NO: 20098 - DNA, 50 bp, synthetic construct
  source 1..50: mol_type = other DNA
ccacatccttacaataactaaaattttaacaataccttatattatacrac

SEQ ID NO: 20099 - DNA, 50 bp, synthetic construct
  source 1..50: mol_type = other DNA
tttctttttttaaaacaaaaactcactctatcactcaaactaataaactc

SEQ ID NO: 20100 - DNA, 50 bp, synthetic construct
  source 1..50: mol_type = other DNA
rtaaaataaaatattcaaacctcacataaaattaaacrtaattcctctcc

SEQ ID NO: 20101 - DNA, 50 bp, synthetic construct
  source 1..50: mol_type = other DNA
accataaacaaacrtaaaataaaatattcaaacctcacataaaattaaac

SEQ ID NO: 20102 - DNA, 50 bp, synthetic construct
  source 1..50: mol_type = other DNA
raaaaaaaaccacrtccaaccctatataaaatttaaatattccatcccac

SEQ ID NO: 20103 - DNA, 50 bp, synthetic construct
  source 1..50: mol_type = other DNA
acttaaaatataaaaacrataaacrtactaataactaacacacaaaacac

SEQ ID NO: 20104 - DNA, 50 bp, synthetic construct
  source 1..50: mol_type = other DNA
aataaaaaattccacaaacaaaaacctcccctctctccctaaaaaacaac

SEQ ID NO: 20105 - DNA, 50 bp, synthetic construct
  source 1..50: mol_type = other DNA
aaaacaaaatcaacacccrtataaacctaaaaactatataataaaaaacc

SEQ ID NO: 20106 - DNA, 50 bp, synthetic construct
  source 1..50: mol_type = other DNA
acaaaatcaacacccrtataaacctaaaaactatataataaaaaaccrac

SEQ ID NO: 20107 - DNA, 50 bp, synthetic construct
  source 1..50: mol_type = other DNA
aaaaaaaaatacaacttcatataccaaaaactctcaaatccttatccccc

SEQ ID NO: 20108 - DNA, 50 bp, synthetic construct
  source 1..50: mol_type = other DNA
atctaaataactctctctccttccctaaccttttactttaaaatttaccc

SEQ ID NO: 20109 - DNA, 50 bp, synthetic construct
  source 1..50: mol_type = other DNA
taccraaaacactaaataaatcttaatatcaaaaacaaaactaaaaaacc

SEQ ID NO: 20110 - DNA, 50 bp, synthetic construct
  source 1..50: mol_type = other DNA
aaaatcttaattaaatccttcacraccaatcraaacaacacccaaatacc

SEQ ID NO: 20111 - DNA, 50 bp, synthetic construct
  source 1..50: mol_type = other DNA
aacataaaatatataaatcaaaatcttaattaaatccttcacraccaatc

SEQ ID NO: 20112 - DNA, 50 bp, synthetic construct
  source 1..50: mol_type = other DNA
aaaactataaaaaaacaactaaaacccataaaaataacctccctaaaaac

SEQ ID NO: 20113 - DNA, 50 bp, synthetic construct
  source 1..50: mol_type = other DNA
ataaaaaaacaactaaaacccataaaaataacctccctaaaaacrtaacc

SEQ ID NO: 20114 - DNA, 50 bp, synthetic construct
  source 1..50: mol_type = other DNA
aaactctatatataaacraaatattacatacatctaaaaatcctactctc

SEQ ID NO: 20115 - DNA, 50 bp, synthetic construct
  source 1..50: mol_type = other DNA
crtaaccrataatacccraaaacaaaattctcaaatatatataacactcc

SEQ ID NO: 20116 - DNA, 50 bp, synthetic construct
  source 1..50: mol_type = other DNA
ataaaaataacraaacctaaacactcaacaccaaaaacaaccaacaaaac

SEQ ID NO: 20117 - DNA, 50 bp, synthetic construct
  source 1..50: mol_type = other DNA
aaaaattcaccccaaaacataaactacacccraaattaaataaaaataac

SEQ ID NO: 20118 - DNA, 50 bp, synthetic construct
  source 1..50: mol_type = other DNA
caaaaaacrcccttctaaaaattaactctcttctccccttcraaataaac

SEQ ID NO: 20119 - DNA, 50 bp, synthetic construct
  source 1..50: mol_type = other DNA
aaaaatccaatattacttatttaaaacrccrccaacctaaacrcatcttc

SEQ ID NO: 20120 - DNA, 50 bp, synthetic construct
  source 1..50: mol_type = other DNA
raccatctaaaaatccaatattacttatttaaaacrccrccaacctaaac

SEQ ID NO: 20121 - DNA, 50 bp, synthetic construct
  source 1..50: mol_type = other DNA
aatccaaaacrcraccatctaaaaatccaatattacttatttaaaacrcc

SEQ ID NO: 20122 - DNA, 50 bp, synthetic construct
  source 1..50: mol_type = other DNA
tctaatccaaaacrcraccatctaaaaatccaatattacttatttaaaac

SEQ ID NO: 20123 - DNA, 50 bp, synthetic construct
  source 1..50: mol_type = other DNA
atttcaaaaaaacacaaactaaacaatcccrccracctctaatccaaaac

SEQ ID NO: 20124 - DNA, 50 bp, synthetic construct
  source 1..50: mol_type = other DNA
taaaaaataatattaacatttcaaaaaaacacaaactaaacaatcccrcc

SEQ ID NO: 20125 - DNA, 50 bp, synthetic construct
  source 1..50: mol_type = other DNA
tcaactatatacataactatacrttttatacaataaattccacaaaatcc

SEQ ID NO: 20126 - DNA, 50 bp, synthetic construct
  source 1..50: mol_type = other DNA
aacaaaaactaacrtccctaataacrcttcaactatatacataactatac

SEQ ID NO: 20127 - DNA, 50 bp, synthetic construct
  source 1..50: mol_type = other DNA
ttctataaaacctactatacaaaacrtacaaccatatacacaactaaaac

SEQ ID NO: 20128 - DNA, 50 bp, synthetic construct
  source 1..50: mol_type = other DNA
cctcattccttatcrtatactaattataacattatcccccacaccctatc

SEQ ID NO: 20129 - DNA, 50 bp, synthetic construct
  source 1..50: mol_type = other DNA
ctattaaataatccaccccataactacaatttccctcctcattccttatc

SEQ ID NO: 20130 - DNA, 50 bp, synthetic construct
  source 1..50: mol_type = other DNA
cctaacactaactcrctaccacrcaaattaaataaaaatcaatatcctcc

SEQ ID NO: 20131 - DNA, 50 bp, synthetic construct
  source 1..50: mol_type = other DNA
ctaccacrcaaattaaataaaaatcaatatcctccratctataaaacatc

SEQ ID NO: 20132 - DNA, 50 bp, synthetic construct
  source 1..50: mol_type = other DNA
accctcctatcacttaacaacacataattaaaaaatatattttcaaatcc

SEQ ID NO: 20133 - DNA, 50 bp, synthetic construct
  source 1..50: mol_type = other DNA
ttacataacrataacatttattactccaataatttcatctaataataacc

SEQ ID NO: 20134 - DNA, 50 bp, synthetic construct
  source 1..50: mol_type = other DNA
attaaataattaaacaatcttcrataatcccracccctccactacaaacc

SEQ ID NO: 20135 - DNA, 50 bp, synthetic construct
  source 1..50: mol_type = other DNA
aaaaccraaactatcraaaattacttaatcactcaacaaaattttaaaac

SEQ ID NO: 20136 - DNA, 50 bp, synthetic construct
  source 1..50: mol_type = other DNA
tcraaaattacttaatcactcaacaaaattttaaaacrtaattaaaaacc

SEQ ID NO: 20137 - DNA, 50 bp, synthetic construct
  source 1..50: mol_type = other DNA
acaaaattttaaaacrtaattaaaaaccrcctacctataaaaacaacrcc

SEQ ID NO: 20138 - DNA, 50 bp, synthetic construct
  source 1..50: mol_type = other DNA
atacaaaaatcacccatcttctacctcactctcrctaaaaactataaacc

SEQ ID NO: 20139 - DNA, 50 bp, synthetic construct
  source 1..50: mol_type = other DNA
aaataactaaaataaccaaataaaaacaacttcratctacaactcccaac

SEQ ID NO: 20140 - DNA, 50 bp, synthetic construct
  source 1..50: mol_type = other DNA
ttccatctaaaataccrattcatctcactaaaaaataccaaacaataaac

SEQ ID NO: 20141 - DNA, 50 bp, synthetic construct
  source 1..50: mol_type = other DNA
atcaaattaaacctaaactactaataataaaataaacrccrataaacaac

SEQ ID NO: 20142 - DNA, 50 bp, synthetic construct
  source 1..50: mol_type = other DNA
acaaacaaaaatcaaattaaacctaaactactaataataaaataaacrcc

SEQ ID NO: 20143 - DNA, 50 bp, synthetic construct
  source 1..50: mol_type = other DNA
caaacaaacaaaaatcaaattaaacctaaactactaataataaaataaac

SEQ ID NO: 20144 - DNA, 50 bp, synthetic construct
  source 1..50: mol_type = other DNA
ccaccracactctactaaaaaacacattaacaactaatacaataaacctc

SEQ ID NO: 20145 - DNA, 50 bp, synthetic construct
  source 1..50: mol_type = other DNA
aaactataatctcaataaaataatctcaaaccratcctctaataaccacc

SEQ ID NO: 20146 - DNA, 50 bp, synthetic construct
  source 1..50: mol_type = other DNA
accraacraacaccttcattataatcrataccataataaccataatacac

SEQ ID NO: 20147 - DNA, 50 bp, synthetic construct
  source 1..50: mol_type = other DNA
rctaattacraattcraaacacaaattcaaacacatccaccttctactcc

SEQ ID NO: 20148 - DNA, 50 bp, synthetic construct
  source 1..50: mol_type = other DNA
tataaatcataccttcctcttaccctaatctaacttcccaaaacaaaccc

SEQ ID NO: 20149 - DNA, 50 bp, synthetic construct
  source 1..50: mol_type = other DNA
cttcccaattaatacaaacaacatttttttaaatatctttactacrtaac

SEQ ID NO: 20150 - DNA, 50 bp, synthetic construct
  source 1..50: mol_type = other DNA
tccrtcttcccaattaatacaaacaacatttttttaaatatctttactac

SEQ ID NO: 20151 - DNA, 50 bp, synthetic construct
  source 1..50: mol_type = other DNA
caactacaacaaaataataaactcaaatcacaaaaacacracaaaataac

SEQ ID NO: 20152 - DNA, 50 bp, synthetic construct
  source 1..50: mol_type = other DNA
aaaaataccttcaactacaacaaaataataaactcaaatcacaaaaacac

SEQ ID NO: 20153 - DNA, 50 bp, synthetic construct
  source 1..50: mol_type = other DNA
attaaaaatatcctttaacaaaaccctattcttaaccattataataaaac

SEQ ID NO: 20154 - DNA, 50 bp, synthetic construct
  source 1..50: mol_type = other DNA
aacaaaaccctattcttaaccattataataaaacrcataaatccctcttc

SEQ ID NO: 20155 - DNA, 50 bp, synthetic construct
  source 1..50: mol_type = other DNA
taataacccctaactatcraaacccctaaatatcraaattcctaactatc

SEQ ID NO: 20156 - DNA, 50 bp, synthetic construct
  source 1..50: mol_type = other DNA
aaacaacttaaaaaacaaccccraaaaataaaccttacaaactacacaac

SEQ ID NO: 20157 - DNA, 50 bp, synthetic construct
  source 1..50: mol_type = other DNA
cctacctacaaaccctactaaaaaactcaactaactcaacctacaaaacc

SEQ ID NO: 20158 - DNA, 50 bp, synthetic construct
  source 1..50: mol_type = other DNA
aaacaacttaaaaaacaaccccracaaataaaccttacaaactacacaac

SEQ ID NO: 20159 - DNA, 50 bp, synthetic construct
  source 1..50: mol_type = other DNA
accaactaaacctcccaactaaacctaaaaaatatacaataaacaacacc

SEQ ID NO: 20160 - DNA, 50 bp, synthetic construct
  source 1..50: mol_type = other DNA
atctttcaaacccaactaaaaaactcaactaacactaaaacttacatacc

SEQ ID NO: 20161 - DNA, 50 bp, synthetic construct
  source 1..50: mol_type = other DNA
acactaaaacttacataccraacctatctactatcctaccttcaaaactc

SEQ ID NO: 20162 - DNA, 50 bp, synthetic construct
  source 1..50: mol_type = other DNA
aaacaaaacaacraacaactcaaactaataatccatacaaacaaaacaac

SEQ ID NO: 20163 - DNA, 50 bp, synthetic construct
  source 1..50: mol_type = other DNA
aaacaaaacaacraacaactcaaactaacraaccctacaaacaaaaaaac

SEQ ID NO: 20164 - DNA, 50 bp, synthetic construct
  source 1..50: mol_type = other DNA
rtccttcaaacccaactaaaaaactcaactaacactaaaacctacatacc

SEQ ID NO: 20165 - DNA, 50 bp, synthetic construct
  source 1..50: mol_type = other DNA
tcaactaacactaaaacctacataccraacctatctactatctaatcttc

SEQ ID NO: 20166 - DNA, 50 bp, synthetic construct
  source 1..50: mol_type = other DNA
ctataatctcatttcttcctctcattatttttaatttcacaacraaaaac

SEQ ID NO: 20167 - DNA, 50 bp, synthetic construct
  source 1..50: mol_type = other DNA
acaccaattcatctacctactaacctaaaatccratttactaatacctcc

SEQ ID NO: 20168 - DNA, 50 bp, synthetic construct
  source 1..50: mol_type = other DNA
tcatctacctactaacctaaaatccratttactaatacctccrataaaac

SEQ ID NO: 20169 - DNA, 50 bp, synthetic construct
  source 1..50: mol_type = other DNA
tcatttaaacacacttcctaacacataaccacaaaccaaatactactcrc

SEQ ID NO: 20170 - DNA, 50 bp, synthetic construct
  source 1..50: mol_type = other DNA
aatcatttaaacacacttcctaacacataaccacaaaccaaatactactc

SEQ ID NO: 20171 - DNA, 50 bp, synthetic construct
  source 1..50: mol_type = other DNA
aaaaaaatccctaacaaacataatataaaaatttcccrcaaatcctcttc

SEQ ID NO: 20172 - DNA, 50 bp, synthetic construct
  source 1..50: mol_type = other DNA
aaaaaatatatttaaataacccactccaaaactaaccraaaaaaacctac

SEQ ID NO: 20173 - DNA, 50 bp, synthetic construct
  source 1..50: mol_type = other DNA
cccaaataccacaatcaatctattaccaaaaaaaatacaatacttaaaac

SEQ ID NO: 20174 - DNA, 50 bp, synthetic construct
  source 1..50: mol_type = other DNA
ttttttcaaactaataatattatctttatacttttcaaaaacttcctccc

SEQ ID NO: 20175 - DNA, 50 bp, synthetic construct
  source 1..50: mol_type = other DNA
aaaaaccccttaaaaactacracaaccctccaacaaaaataataaatacc

SEQ ID NO: 20176 - DNA, 50 bp, synthetic construct
  source 1..50: mol_type = other DNA
cccttaaaaactacracaaccctccaacaaaaataataaataccrtaaac

SEQ ID NO: 20177 - DNA, 50 bp, synthetic construct
  source 1..50: mol_type = other DNA
aataaaaatataactatttcacttctctacttctctaaatcttcactacc

SEQ ID NO: 20178 - DNA, 50 bp, synthetic construct
  source 1..50: mol_type = other DNA
caaatcaactctcaactcttcttatcccraaaaacaatatctcctaaccc

SEQ ID NO: 20179 - DNA, 50 bp, synthetic construct
  source 1..50: mol_type = other DNA
aatatatcaaatataaatacatcaaatcaactctcaactcttcttatccc

SEQ ID NO: 20180 - DNA, 50 bp, synthetic construct
  source 1..50: mol_type = other DNA
aaaatcacccattttccrattataaaaccrcrttactcctaacattatac

SEQ ID NO: 20181 - DNA, 50 bp, synthetic construct
  source 1..50: mol_type = other DNA
tttataaactctttaccataaaatcacccattttccrattataaaaccrc

SEQ ID NO: 20182 - DNA, 50 bp, synthetic construct
  source 1..50: mol_type = other DNA
tttttataaactctttaccataaaatcacccattttccrattataaaacc

SEQ ID NO: 20183 - DNA, 50 bp, synthetic construct
  source 1..50: mol_type = other DNA
atccaaaaaatatttttataaactctttaccataaaatcacccattttcc

SEQ ID NO: 20184 - DNA, 50 bp, synthetic construct
  source 1..50: mol_type = other DNA
aaaaaccctaaaaaaacracttcaatacccrcttccctaaacaaaaactc

SEQ ID NO: 20185 - DNA, 50 bp, synthetic construct
  source 1..50: mol_type = other DNA
craattaaaaaaacacaaacaaaaaaacrctacccrtacaacactcaatc

SEQ ID NO: 20186 - DNA, 50 bp, synthetic construct
  source 1..50: mol_type = other DNA
actttaaataacttacraattaaaaaaacacaaacaaaaaaacrctaccc

SEQ ID NO: 20187 - DNA, 50 bp, synthetic construct
  source 1..50: mol_type = other DNA
cractaaatactacacraacaacrtccttttacttatattttcttaaccc

SEQ ID NO: 20188 - DNA, 50 bp, synthetic construct
  source 1..50: mol_type = other DNA
aaaatacaaacatttcccatccttttacttctttctaattccatacaatc

SEQ ID NO: 20189 - DNA, 50 bp, synthetic construct
  source 1..50: mol_type = other DNA
tatatcataattaaaattataacttatacraccacaattcacactcatac

SEQ ID NO: 20190 - DNA, 50 bp, synthetic construct
  source 1..50: mol_type = other DNA
aaattataacttatacraccacaattcacactcatacrtatatccctatc

SEQ ID NO: 20191 - DNA, 50 bp, synthetic construct
  source 1..50: mol_type = other DNA
atcccctaaacactactaaacraaacccatatcrtacraattaaaataac

SEQ ID NO: 20192 - DNA, 50 bp, synthetic construct
  source 1..50: mol_type = other DNA
ttcaaaaaccaactacrataaaaatcatccaacccttaaacccctaatcc

SEQ ID NO: 20193 - DNA, 50 bp, synthetic construct
  source 1..50: mol_type = other DNA
aaaataaaaattcrtaacaaaaacaaacaacaaaaatccaaaaaaccctc

SEQ ID NO: 20194 - DNA, 50 bp, synthetic construct
  source 1..50: mol_type = other DNA
tataaactacrtctcaaaaaaaactattttttcaaaaaaacttatttccc

SEQ ID NO: 20195 - DNA, 50 bp, synthetic construct
  source 1..50: mol_type = other DNA
caaacacaaatacaaatttcaaatctctcatctccaaatccaatcaaaac

SEQ ID NO: 20196 - DNA, 50 bp, synthetic construct
  source 1..50: mol_type = other DNA
ttaaaatataaaccacctaattacaaccaaaacatcctacccttaaacrc

SEQ ID NO: 20197 - DNA, 50 bp, synthetic construct
  source 1..50: mol_type = other DNA
aattaaaatataaaccacctaattacaaccaaaacatcctacccttaaac

SEQ ID NO: 20198 - DNA, 50 bp, synthetic construct
  source 1..50: mol_type = other DNA
taattaaataactcacatttcaatttaacaaaaatattaaaaaacatccc

SEQ ID NO: 20199 - DNA, 50 bp, synthetic construct
  source 1..50: mol_type = other DNA
aaaataaaaacccaaaaccrtactactaattcctcaaaaaatcctacccc

SEQ ID NO: 20200 - DNA, 50 bp, synthetic construct
  source 1..50: mol_type = other DNA
atatcrccatcaataatcactatttcttaaaatataaaatataatcccrc

SEQ ID NO: 20201 - DNA, 50 bp, synthetic construct
  source 1..50: mol_type = other DNA
tatattatcataataatcactatttcttaaaatataaaatataatcccac

SEQ ID NO: 20202 - DNA, 50 bp, synthetic construct
  source 1..50: mol_type = other DNA
atttcttaaaatataaaatataatcccacrttctaatatatatcrccatc

SEQ ID NO: 20203 - DNA, 50 bp, synthetic construct
  source 1..50: mol_type = other DNA
atatcrccatcrctaatcactatttcttaaaatataaattataatcccac

SEQ ID NO: 20204 - DNA, 50 bp, synthetic construct
  source 1..50: mol_type = other DNA
atcactatttcttaaaatataaattataatcccacrttctaatatatatc

SEQ ID NO: 20205 - DNA, 50 bp, synthetic construct
  source 1..50: mol_type = other DNA
atttcttaaaatataaattataatcccacrttctaatatatatcrccatc

SEQ ID NO: 20206 - DNA, 50 bp, synthetic construct
  source 1..50: mol_type = other DNA
cctaatcaaaaaaactaataaacttcaaaaactaaacaaaaaccctacac

SEQ ID NO: 20207 - DNA, 50 bp, synthetic construct
  source 1..50: mol_type = other DNA
aaaaaaaataacatacctctctaaaacacacccaccaaaaaaaataatac

SEQ ID NO: 20208 - DNA, 50 bp, synthetic construct
  source 1..50: mol_type = other DNA
cttaataaatataccccaaaaaaacatatcatctcccttaaatatacccc

SEQ ID NO: 20209 - DNA, 50 bp, synthetic construct
  source 1..50: mol_type = other DNA
atataccccaaaaaaacatatcatctcccttaaatataccccraaaaaac

SEQ ID NO: 20210 - DNA, 50 bp, synthetic construct
  source 1..50: mol_type = other DNA
cttaaatataccccraaaaaacrtatcatctcccttaataaatataccac

SEQ ID NO: 20211 - DNA, 50 bp, synthetic construct
  source 1..50: mol_type = other DNA
caaacaatcaaaatacaaaacacaatcaaactccrtaatccacttaacac

SEQ ID NO: 20212 - DNA, 50 bp, synthetic construct
  source 1..50: mol_type = other DNA
aaaaaacaaaaatactccrtaacatataaaaacaaacrcttcccatatac

SEQ ID NO: 20213 - DNA, 50 bp, synthetic construct
  source 1..50: mol_type = other DNA
aatctcaatcctactaaataaaaccaaaaccccaaaacacactataaaac

SEQ ID NO: 20214 - DNA, 50 bp, synthetic construct
  source 1..50: mol_type = other DNA
aaaaccaaacaaaataactaactctcccacataaccctttccataaaaac

SEQ ID NO: 20215 - DNA, 50 bp, synthetic construct
  source 1..50: mol_type = other DNA
aactaaaaaaaactatatatataacctcctaaacacaacraaaaaccaac

SEQ ID NO: 20216 - DNA, 50 bp, synthetic construct
  source 1..50: mol_type = other DNA
ccaactatctacaaacaccaaactaaaataaactatatacttacraatac

SEQ ID NO: 20217 - DNA, 50 bp, synthetic construct
  source 1..50: mol_type = other DNA
aaacacacaactcatcccaacctaatacctacaaacaactaaaactacac

SEQ ID NO: 20218 - DNA, 50 bp, synthetic construct
  source 1..50: mol_type = other DNA
tcatcccaacctaatacctacaaacaactaaaactacacrtaaccaaaac

SEQ ID NO: 20219 - DNA, 50 bp, synthetic construct
  source 1..50: mol_type = other DNA
actattctaacctcaaaaatacatctacctaaaaaactcctactatccac

SEQ ID NO: 20220 - DNA, 50 bp, synthetic construct
  source 1..50: mol_type = other DNA
aaaaaacraacctaaaataaacaaaaccaaaaacrttcttaataccracc

SEQ ID NO: 20221 - DNA, 50 bp, synthetic construct
  source 1..50: mol_type = other DNA
tttacacraaaccaaacaaaacaaatccaaatacrcaaataaaaacaaac

SEQ ID NO: 20222 - DNA, 50 bp, synthetic construct
  source 1..50: mol_type = other DNA
aaacrctataactccaaaactaataccaacatcctctcccaaaaaaacac

SEQ ID NO: 20223 - DNA, 50 bp, synthetic construct
  source 1..50: mol_type = other DNA
acacctatccttattaacatacaaaatcaattacttcacttaatctttcc

SEQ ID NO: 20224 - DNA, 50 bp, synthetic construct
  source 1..50: mol_type = other DNA
ctactattaaaccctaaaattccacraatccctaaacaattttaaaaacc

SEQ ID NO: 20225 - DNA, 50 bp, synthetic construct
  source 1..50: mol_type = other DNA
aaactacraaaacctccraaaaataattttttaccctaaaaaaaatcacc

SEQ ID NO: 20226 - DNA, 50 bp, synthetic construct
  source 1..50: mol_type = other DNA
acaacrataaattcacrttatataccctcacctaaacttctaataaaaac

SEQ ID NO: 20227 - DNA, 50 bp, synthetic construct
  source 1..50: mol_type = other DNA
cctcacctatccctccttaaactaaaaataataactaaaaaaaactacac

SEQ ID NO: 20228 - DNA, 50 bp, synthetic construct
  source 1..50: mol_type = other DNA
taatttaaaaaacctatttaccaaaaaactaaaataaccraaaccaaccc

SEQ ID NO: 20229 - DNA, 50 bp, synthetic construct
  source 1..50: mol_type = other DNA
tcaaactaaaatacctaaaccttaaacrttacctacaaaccctattcctc

SEQ ID NO: 20230 - DNA, 50 bp, synthetic construct
  source 1..50: mol_type = other DNA
craaatcrtcctcacctatactaaaaaccctataaaaacaacaaacttcc

SEQ ID NO: 20231 - DNA, 50 bp, synthetic construct
  source 1..50: mol_type = other DNA
crtcctcacctatactaaaaaccctataaaaacaacaaacttccraacac

SEQ ID NO: 20232 - DNA, 50 bp, synthetic construct
  source 1..50: mol_type = other DNA
ataactaaaaatataataacaataaaaaaaatctaaccctaacccactcc

SEQ ID NO: 20233 - DNA, 50 bp, synthetic construct
  source 1..50: mol_type = other DNA
ctatcaaaaaccacacatcactacraaataaaataaaacttaaatttccc

SEQ ID NO: 20234 - DNA, 50 bp, synthetic construct
  source 1..50: mol_type = other DNA
caaaaccttataaaaaatttatataaacaatcctcratatctcaaaacac

SEQ ID NO: 20235 - DNA, 50 bp, synthetic construct
  source 1..50: mol_type = other DNA
ctaaatctctacaaaattcrataactaccrtaactattaaacccatacac

SEQ ID NO: 20236 - DNA, 50 bp, synthetic construct
  source 1..50: mol_type = other DNA
caccccctactataataacctataaaacccaaaaaattcccaaacaaacc

SEQ ID NO: 20237 - DNA, 50 bp, synthetic construct
  source 1..50: mol_type = other DNA
tactataataacctataaaacccaaaaaattcccaaacaaaccraaaacc

SEQ ID NO: 20238 - DNA, 50 bp, synthetic construct
  source 1..50: mol_type = other DNA
caaaaaattcccaaacaaaccraaaaccraacacctccaaaacaaaaacc

SEQ ID NO: 20239 - DNA, 50 bp, synthetic construct
  source 1..50: mol_type = other DNA
aacacaaaacacaaaacctaaaaaaactccaaatattaaaaactcttccc

SEQ ID NO: 20240 - DNA, 50 bp, synthetic construct
  source 1..50: mol_type = other DNA
ccctaaactcaaaaataaacccraaccctaaaaacracctaaatataccc

SEQ ID NO: 20241 - DNA, 50 bp, synthetic construct
  source 1..50: mol_type = other DNA
tactaaacttctccaattaaaaaataaaactaaacraacatacccaaatc

SEQ ID NO: 20242 - DNA, 50 bp, synthetic construct
  source 1..50: mol_type = other DNA
cttaaaaaccaaaacrccaaaaacttccraaatattcacacctacaaacc

SEQ ID NO: 20243 - DNA, 50 bp, synthetic construct
  source 1..50: mol_type = other DNA
crtaaacaaccrcaaatatactcttaaaaaccaaaacrccaaaaacttcc

SEQ ID NO: 20244 - DNA, 50 bp, synthetic construct
  source 1..50: mol_type = other DNA
tttcaatatattaaaacaatctactaacaaatcatataaattactcaaac

SEQ ID NO: 20245 - DNA, 50 bp, synthetic construct
  source 1..50: mol_type = other DNA
acacaactactatactctctttcaataactttttcaacattcccaattac

SEQ ID NO: 20246 - DNA, 50 bp, synthetic construct
  source 1..50: mol_type = other DNA
ttacaaccaaaactctaaaaataactaaaaattcctctaataacrcccac

SEQ ID NO: 20247 - DNA, 50 bp, synthetic construct
  source 1..50: mol_type = other DNA
ctaactttacaaccaaaactctaaaaataactaaaaattcctctaataac

SEQ ID NO: 20248 - DNA, 50 bp, synthetic construct
  source 1..50: mol_type = other DNA
taatcrtaaaaaaacttccacrctaaataaaaccaacraccaatacaacc

SEQ ID NO: 20249 - DNA, 50 bp, synthetic construct
  source 1..50: mol_type = other DNA
tttacaaaataccatatcaacaatttaaatcaactaaaatcaacrtatcc

SEQ ID NO: 20250 - DNA, 50 bp, synthetic construct
  source 1..50: mol_type = other DNA
ttcactatattaaccaaaccaatctcraactcctaaccttataatctacc

SEQ ID NO: 20251 - DNA, 50 bp, synthetic construct
  source 1..50: mol_type = other DNA
craaaacaactaaaatataacactctatatccaaacaaactccaaatacc

SEQ ID NO: 20252 - DNA, 50 bp, synthetic construct
  source 1..50: mol_type = other DNA
racttaatccttctcacaaaaaaacatcracaaaaaaccaacccaaaatc

SEQ ID NO: 20253 - DNA, 50 bp, synthetic construct
  source 1..50: mol_type = other DNA
raccctaaactaaccctttaccratactcctctataaaaaaaatcaaacc

SEQ ID NO: 20254 - DNA, 50 bp, synthetic construct
  source 1..50: mol_type = other DNA
aaaaaataaactaccctcttatcctaccttctaaaactaccctatacccc

SEQ ID NO: 20255 - DNA, 50 bp, synthetic construct
  source 1..50: mol_type = other DNA
tctaaaactaccctataccccrtataataaatataacacccttactactc

SEQ ID NO: 20256 - DNA, 50 bp, synthetic construct
  source 1..50: mol_type = other DNA
cttactactcraactaccraaaactcaaaaaaccttcaccaaaaaactac

SEQ ID NO: 20257 - DNA, 50 bp, synthetic construct
  source 1..50: mol_type = other DNA
aaattaaaacraactacaacaactacaaaactaaacccttaaatttaaac

SEQ ID NO: 20258 - DNA, 50 bp, synthetic construct
  source 1..50: mol_type = other DNA
tacaaaactaaacccttaaatttaaacrtctccraaaataaaattcctac

SEQ ID NO: 20259 - DNA, 50 bp, synthetic construct
  source 1..50: mol_type = other DNA
ctaaacccttaaatttaaacrtctccraaaataaaattcctacrataacc

SEQ ID NO: 20260 - DNA, 50 bp, synthetic construct
  source 1..50: mol_type = other DNA
taaaaaaacraatttactcrcttaactactaaccaaataatctacratcc

SEQ ID NO: 20261 - DNA, 50 bp, synthetic construct
  source 1..50: mol_type = other DNA
aaacctaaaaaaacraatttactcrcttaactactaaccaaataatctac

SEQ ID NO: 20262 - DNA, 50 bp, synthetic construct
  source 1..50: mol_type = other DNA
aatctaacctacctacctataaaaataaacctaaaaaaacraatttactc

SEQ ID NO: 20263 - DNA, 50 bp, synthetic construct
  source 1..50: mol_type = other DNA
acacacccaaaatctaacctacctacctataaaaataaacctaaaaaaac

SEQ ID NO: 20264 - DNA, 50 bp, synthetic construct
  source 1..50: mol_type = other DNA
tatatcctctacctaaattccataaattctaacrccaatctcaaaaatac

SEQ ID NO: 20265 - DNA, 50 bp, synthetic construct
  source 1..50: mol_type = other DNA
taaaacctataaatcaatcttaaattttctatacctaactctcctctcrc

SEQ ID NO: 20266 - DNA, 50 bp, synthetic construct
  source 1..50: mol_type = other DNA
tcaacaaccttactaaacaaaaaacaaccctaaacaaacacaccctatac

SEQ ID NO: 20267 - DNA, 50 bp, synthetic construct
  source 1..50: mol_type = other DNA
acctaactacactataatataaacataacttttatatacaataaaaaacc

SEQ ID NO: 20268 - DNA, 50 bp, synthetic construct
  source 1..50: mol_type = other DNA
rattcaattctaaacaccrcaataacacaaatatcrcaataaaaccaatc

SEQ ID NO: 20269 - DNA, 50 bp, synthetic construct
  source 1..50: mol_type = other DNA
aacctaaattaccacrattcaattctaaacaccrcaataacacaaatatc

SEQ ID NO: 20270 - DNA, 50 bp, synthetic construct
  source 1..50: mol_type = other DNA
aaaaattaacacaaacraacctaaattaccacrattcaattctaaacacc

SEQ ID NO: 20271 - DNA, 50 bp, synthetic construct
  source 1..50: mol_type = other DNA
rtcaacctcrataatactaaaaattaacacaaacraacctaaattaccac

SEQ ID NO: 20272 - DNA, 50 bp, synthetic construct
  source 1..50: mol_type = other DNA
acatttatattattacratatctaaaactaaaccrtaataacccaaaccc

SEQ ID NO: 20273 - DNA, 50 bp, synthetic construct
  source 1..50: mol_type = other DNA
caataataacaaaacaaccctatattctacccaattccaaaaactccacc

SEQ ID NO: 20274 - DNA, 50 bp, synthetic construct
  source 1..50: mol_type = other DNA
tctatcractaaaaaaaacattaataaaaaactttaaacaatactactcc

SEQ ID NO: 20275 - DNA, 50 bp, synthetic construct
  source 1..50: mol_type = other DNA
aaaatactatactctcracaaatataaaaaaacctcccatcccatcattc

SEQ ID NO: 20276 - DNA, 50 bp, synthetic construct
  source 1..50: mol_type = other DNA
tctacaacatctataacaaactcccaaaaatcataaaatactatactctc

SEQ ID NO: 20277 - DNA, 50 bp, synthetic construct
  source 1..50: mol_type = other DNA
aaaccctaaaaaaacaaacccaaactaacaaaaacattaacaaatatccc

SEQ ID NO: 20278 - DNA, 50 bp, synthetic construct
  source 1..50: mol_type = other DNA
atcatttctctaacccaaatcacactaacatcctccttttcattcttaac

SEQ ID NO: 20279 - DNA, 50 bp, synthetic construct
  source 1..50: mol_type = other DNA
accatattaaccaaacttatatcaaactcctaacctctaataatccaccc

SEQ ID NO: 20280 - DNA, 50 bp, synthetic construct
  source 1..50: mol_type = other DNA
aaaacraaatttcataatattaaccaaaataatctcratctcctaacctc

SEQ ID NO: 20281 - DNA, 50 bp, synthetic construct
  source 1..50: mol_type = other DNA
accrtaaaaaacaataacracaaaaccttaaatctatacccacaaaaaac

SEQ ID NO: 20282 - DNA, 50 bp, synthetic construct
  source 1..50: mol_type = other DNA
crcrataaataataacatcactactacccaacatcaaaaaactctaaccc

SEQ ID NO: 20283 - DNA, 50 bp, synthetic construct
  source 1..50: mol_type = other DNA
atcraaccaaaacctcctaatactaaacaacaataatatcatcatccacc

SEQ ID NO: 20284 - DNA, 50 bp, synthetic construct
  source 1..50: mol_type = other DNA
accaaaaataaccctaaaaacccaccctacaaaaaaaaatcaaaataaac

SEQ ID NO: 20285 - DNA, 50 bp, synthetic construct
  source 1..50: mol_type = other DNA
aactacaccaaactctccttatatctctcactctaatatcraaacctaac

SEQ ID NO: 20286 - DNA, 50 bp, synthetic construct
  source 1..50: mol_type = other DNA
aactaataaaaactacaccaaactctccttatatctctcactctaatatc

SEQ ID NO: 20287 - DNA, 50 bp, synthetic construct
  source 1..50: mol_type = other DNA
aatctaacccaaaaaatattcccctttacccaaacaaaacraataccaac

SEQ ID NO: 20288 - DNA, 50 bp, synthetic construct
  source 1..50: mol_type = other DNA
ccaatctcaacraacacacaaaaacaataatcacctattccacaaaaaac

SEQ ID NO: 20289 - DNA, 50 bp, synthetic construct
  source 1..50: mol_type = other DNA
aaaacaataatcacctattccacaaaaaacrccataactccaaataaccc

SEQ ID NO: 20290 - DNA, 50 bp, synthetic construct
  source 1..50: mol_type = other DNA
rattttaaatacraaacctaccctcaaaaaacaatccaaactaacctctc

SEQ ID NO: 20291 - DNA, 50 bp, synthetic construct
  source 1..50: mol_type = other DNA
taaataaaacccraaaaaccaacctaaactatctcctaaaaacaaactcc

SEQ ID NO: 20292 - DNA, 50 bp, synthetic construct
  source 1..50: mol_type = other DNA
raaaaaccaacctaaactatctcctaaaaacaaactccrcactcaaaatc

SEQ ID NO: 20293 - DNA, 50 bp, synthetic construct
  source 1..50: mol_type = other DNA
ctatctcctaaaaacaaactccrcactcaaaatcrtattaacaaacaccc

SEQ ID NO: 20294 - DNA, 50 bp, synthetic construct
  source 1..50: mol_type = other DNA
cctcacccttcctaaaaacaaaactaaaaataaccaaataaaaaacaaac

SEQ ID NO: 20295 - DNA, 50 bp, synthetic construct
  source 1..50: mol_type = other DNA
tcctactccatacataaacttaccctaacccaaaactcaaaatcacacac

SEQ ID NO: 20296 - DNA, 50 bp, synthetic construct
  source 1..50: mol_type = other DNA
actaaaaaaacaaaacctacracaatctactaaacactttatttttcctc

SEQ ID NO: 20297 - DNA, 50 bp, synthetic construct
  source 1..50: mol_type = other DNA
aatcttaacrccaacaaactaaaaacaacacttcaaaaaaccraaaaaac

SEQ ID NO: 20298 - DNA, 50 bp, synthetic construct
  source 1..50: mol_type = other DNA
aaacrtaaaatcttaacrccaacaaactaaaaacaacacttcaaaaaacc

SEQ ID NO: 20299 - DNA, 50 bp, synthetic construct
  source 1..50: mol_type = other DNA
aatcctcttacaaaactaaccaaaaaaacaaaatcaaatcctaccaaaac

SEQ ID NO: 20300 - DNA, 50 bp, synthetic construct
  source 1..50: mol_type = other DNA
acaaaactaaccaaaaaaacaaaatcaaatcctaccaaaacracaaaaac

SEQ ID NO: 20301 - DNA, 50 bp, synthetic construct
  source 1..50: mol_type = other DNA
caaacctatttattaaatctactaaacccaaacractctccaacccttcc

SEQ ID NO: 20302 - DNA, 50 bp, synthetic construct
  source 1..50: mol_type = other DNA
taactataaaaactaaaactaataaactaaaaatataatccaacctaccc

SEQ ID NO: 20303 - DNA, 50 bp, synthetic construct
  source 1..50: mol_type = other DNA
actaaaactaataaactaaaaatataatccaacctacccracccaaaccc

SEQ ID NO: 20304 - DNA, 50 bp, synthetic construct
  source 1..50: mol_type = other DNA
taaaaacaaaacccaaaacaaataaaactcacctttaaaaaccaaaaaac

SEQ ID NO: 20305 - DNA, 50 bp, synthetic construct
  source 1..50: mol_type = other DNA
aaactctaaaacaactaaaccaaaataacctccaacaactaaaaatcctc

SEQ ID NO: 20306 - DNA, 50 bp, synthetic construct
  source 1..50: mol_type = other DNA
ctaaaccaaaataacctccaacaactaaaaatcctcrtaaatactcaaac

SEQ ID NO: 20307 - DNA, 50 bp, synthetic construct
  source 1..50: mol_type = other DNA
aactacaaaaactactaaacacacaaatacaacaactactaacaaccccc

SEQ ID NO: 20308 - DNA, 50 bp, synthetic construct
  source 1..50: mol_type = other DNA
caaatacaacaactactaacaacccccraaatacaaatccaaactcaacc

SEQ ID NO: 20309 - DNA, 50 bp, synthetic construct
  source 1..50: mol_type = other DNA
actactaccrcaaaaaatacttcaaaaaattcraacrcaaaatccaaaac

SEQ ID NO: 20310 - DNA, 50 bp, synthetic construct
  source 1..50: mol_type = other DNA
aaacrataactacaacrataaaaaaaccaaaactaaaaacaactactacc

SEQ ID NO: 20311 - DNA, 50 bp, synthetic construct
  source 1..50: mol_type = other DNA
acctaaacaaacctacctacrtactaaaacatatctaacctccaaaaacc

SEQ ID NO: 20312 - DNA, 50 bp, synthetic construct
  source 1..50: mol_type = other DNA
aaaacaaaatatcttataccttaccccaccctaacccaaactaaaatacc

SEQ ID NO: 20313 - DNA, 50 bp, synthetic construct
  source 1..50: mol_type = other DNA
aactctactaaaccattaactcctaatacctactaaactctaacacccac

SEQ ID NO: 20314 - DNA, 50 bp, synthetic construct
  source 1..50: mol_type = other DNA
accttccaaaaataacatctccrcttaaaattcaaaacaaaacrctatcc

SEQ ID NO: 20315 - DNA, 50 bp, synthetic construct
  source 1..50: mol_type = other DNA
ttccccraccttccaaaaataacatctccrcttaaaattcaaaacaaaac

SEQ ID NO: 20316 - DNA, 50 bp, synthetic construct
  source 1..50: mol_type = other DNA
ataactactaataccccaaaattcaaaccaaacctatcactaatatcttc

SEQ ID NO: 20317 - DNA, 50 bp, synthetic construct
  source 1..50: mol_type = other DNA
cccctccctaaacaatacatcaaccaacrccaaactaaaaattaaaaacc

SEQ ID NO: 20318 - DNA, 50 bp, synthetic construct
  source 1..50: mol_type = other DNA
accctatctatatctctcctattactataccccaactaaaaaactataac

SEQ ID NO: 20319 - DNA, 50 bp, synthetic construct
  source 1..50: mol_type = other DNA
tctctcctattactataccccaactaaaaaactataacrtactaaatatc

SEQ ID NO: 20320 - DNA, 50 bp, synthetic construct
  source 1..50: mol_type = other DNA
taccccaactaaaaaactataacrtactaaatatcracatctaactaacc

SEQ ID NO: 20321 - DNA, 50 bp, synthetic construct
  source 1..50: mol_type = other DNA
ataacrtactaaatatcracatctaactaaccrccacacaaaaaaacttc

SEQ ID NO: 20322 - DNA, 50 bp, synthetic construct
  source 1..50: mol_type = other DNA
ctaaaacaaaacaccacaaaaaatatataaactaaactaaacaaaacrac

SEQ ID NO: 20323 - DNA, 50 bp, synthetic construct
  source 1..50: mol_type = other DNA
cccctaaaacaaaacaccacaaaaaatatataaactaaactaaacaaaac

SEQ ID NO: 20324 - DNA, 50 bp, synthetic construct
  source 1..50: mol_type = other DNA
caactcaactcacacatcctctataataccttattttaaaaaaaataacc

SEQ ID NO: 20325 - DNA, 50 bp, synthetic construct
  source 1..50: mol_type = other DNA
tcctcacatactttattaatttaaaaaaaacctatcctaccctactcttc

SEQ ID NO: 20326 - DNA, 50 bp, synthetic construct
  source 1..50: mol_type = other DNA
aaaaaaaacaactaacaaacaaaaccaaacaaaaacrcaactctcaaaac

SEQ ID NO: 20327 - DNA, 50 bp, synthetic construct
  source 1..50: mol_type = other DNA
tccctaacaatacaaaaaaaaacaactaacaaacaaaaccaaacaaaaac

SEQ ID NO: 20328 - DNA, 50 bp, synthetic construct
  source 1..50: mol_type = other DNA
aacctacrtcctaaaaaaacaaatcctctaactaaacaaacaaaaaaccc

SEQ ID NO: 20329 - DNA, 50 bp, synthetic construct
  source 1..50: mol_type = other DNA
tctccaaaacrcaaatccaataataacaaccaatactactacccaatatc

SEQ ID NO: 20330 - DNA, 50 bp, synthetic construct
  source 1..50: mol_type = other DNA
actctataaaactaataacctacttttaaccctatctcctcccrtaaaac

SEQ ID NO: 20331 - DNA, 50 bp, synthetic construct
  source 1..50: mol_type = other DNA
aaatttctaaaaacaaaaacttacttataaaaatttatctataaactacc

SEQ ID NO: 20332 - DNA, 50 bp, synthetic construct
  source 1..50: mol_type = other DNA
aacttacttataaaaatttatctataaactaccraaacaaaaaccttccc

SEQ ID NO: 20333 - DNA, 50 bp, synthetic construct
  source 1..50: mol_type = other DNA
aatttatctataaactaccraaacaaaaaccttcccrtaaatactaaacc

SEQ ID NO: 20334 - DNA, 50 bp, synthetic construct
  source 1..50: mol_type = other DNA
tatttaaatttccttctatatttctcttttcttatcccttctaatatctc

SEQ ID NO: 20335 - DNA, 50 bp, synthetic construct
  source 1..50: mol_type = other DNA
ataaatactacctccccttaaaactcccrcaaaaatatattacttctctc

SEQ ID NO: 20336 - DNA, 50 bp, synthetic construct
  source 1..50: mol_type = other DNA
caaacaataattaacttcttctttatttattctttaaccraacaacctcc

SEQ ID NO: 20337 - DNA, 50 bp, synthetic construct
  source 1..50: mol_type = other DNA
aaatctatatatccatctaaacatctcttaactaaaaaaataaaactaac

SEQ ID NO: 20338 - DNA, 50 bp, synthetic construct
  source 1..50: mol_type = other DNA
atatataaaaaacacctatacccacrcaaaaaccctactttaaaataccc

SEQ ID NO: 20339 - DNA, 50 bp, synthetic construct
  source 1..50: mol_type = other DNA
crtttataaacatcaatatataaaaatatataaaaaacacctatacccac

SEQ ID NO: 20340 - DNA, 50 bp, synthetic construct
  source 1..50: mol_type = other DNA
atcttaccccaaaaacccratccaattataaaattaccccaaatataacc

SEQ ID NO: 20341 - DNA, 50 bp, synthetic construct
  source 1..50: mol_type = other DNA
ctctaaaaaacrtactaaccatactcactcrtaacaaacactaaaaaacc

SEQ ID NO: 20342 - DNA, 50 bp, synthetic construct
  source 1..50: mol_type = other DNA
ttatcaaaaaaacacaaacaataacaaaacracttctcaatacctatcac

SEQ ID NO: 20343 - DNA, 50 bp, synthetic construct
  source 1..50: mol_type = other DNA
aataacaaaacracttctcaatacctatcacraataaacataaccaacac

SEQ ID NO: 20344 - DNA, 50 bp, synthetic construct
  source 1..50: mol_type = other DNA
ataaaaaaatctaataaaaaacccttaatctccaaaatcacataacaccc

SEQ ID NO: 20345 - DNA, 50 bp, synthetic construct
  source 1..50: mol_type = other DNA
ccctataaactcctaaacttcactaaaaataacaaaaataactaacaaac

SEQ ID NO: 20346 - DNA, 50 bp, synthetic construct
  source 1..50: mol_type = other DNA
taaacttcactaaaaataacaaaaataactaacaaacrctaaccaaaaac

SEQ ID NO: 20347 - DNA, 50 bp, synthetic construct
  source 1..50: mol_type = other DNA
aatcaaaaaactaccrctcattctaaacctcttcctaaaaatactctccc

SEQ ID NO: 20348 - DNA, 50 bp, synthetic construct
  source 1..50: mol_type = other DNA
ataactaaaaaacaaaaacraactaccccaaccaaaactaaacraataac

SEQ ID NO: 20349 - DNA, 50 bp, synthetic construct
  source 1..50: mol_type = other DNA
ttttctacaaactctcaactataaacttctaataactaaaaaacaaaaac

SEQ ID NO: 20350 - DNA, 50 bp, synthetic construct
  source 1..50: mol_type = other DNA
ctatcattataattttcracctcataaaccatttctcaactataaattac

SEQ ID NO: 20351 - DNA, 50 bp, synthetic construct
  source 1..50: mol_type = other DNA
caccaacaactctaaacrtaattcttacttacaccatacttcttccttcc

SEQ ID NO: 20352 - DNA, 50 bp, synthetic construct
  source 1..50: mol_type = other DNA
catataaaaatacaaactatctactaataaatacttataaaaaaacttcc

SEQ ID NO: 20353 - DNA, 50 bp, synthetic construct
  source 1..50: mol_type = other DNA
aaaaaatataacctctcctacrcaaaccccaaatcatactccatctactc

SEQ ID NO: 20354 - DNA, 50 bp, synthetic construct
  source 1..50: mol_type = other DNA
acaaatatccttaacaaccaaaacctcaacacaaaaccaaaactcraaac

SEQ ID NO: 20355 - DNA, 50 bp, synthetic construct
  source 1..50: mol_type = other DNA
aaaaaacaaatatccttaacaaccaaaacctcaacacaaaaccaaaactc

SEQ ID NO: 20356 - DNA, 50 bp, synthetic construct
  source 1..50: mol_type = other DNA
ccaccrtattaaccaaaataatcttaatctcctaaactcrtaatctaccc

SEQ ID NO: 20357 - DNA, 50 bp, synthetic construct
  source 1..50: mol_type = other DNA
tttttataaaaaaaccaatcacactaactaaacratcaccctcctccacc

SEQ ID NO: 20358 - DNA, 50 bp, synthetic construct
  source 1..50: mol_type = other DNA
tataataaaattctaaccctacccctaacctaacccctcaaaacrtaacc

SEQ ID NO: 20359 - DNA, 50 bp, synthetic construct
  source 1..50: mol_type = other DNA
cattcatataataaaattctaaccctacccctaacctaacccctcaaaac

SEQ ID NO: 20360 - DNA, 50 bp, synthetic construct
  source 1..50: mol_type = other DNA
aaatacctaataaaaaatctaaaacccccaataaaaaaacttaaatatcc

SEQ ID NO: 20361 - DNA, 50 bp, synthetic construct
  source 1..50: mol_type = other DNA
aaaaatcttactaaaacccccctctcacaacaaaaataaaaatctcttcc

SEQ ID NO: 20362 - DNA, 50 bp, synthetic construct
  source 1..50: mol_type = other DNA
ataaaaatctcttccrcctacctctataccctaaactcactaaaaaaaac

SEQ ID NO: 20363 - DNA, 50 bp, synthetic construct
  source 1..50: mol_type = other DNA
rtcttaaaatctcctcrcttcaaacatccaccataaacttaaaatcccac

SEQ ID NO: 20364 - DNA, 50 bp, synthetic construct
  source 1..50: mol_type = other DNA
rtaaaatcctaaacccataataaatacctaaaacraaaaaaccccaaaac

SEQ ID NO: 20365 - DNA, 50 bp, synthetic construct
  source 1..50: mol_type = other DNA
aaaacaaaataacccctctcaaataatcctataaacaaataaccaaaccc

SEQ ID NO: 20366 - DNA, 50 bp, synthetic construct
  source 1..50: mol_type = other DNA
cccacaaaactatctaaaaaaaactatcctaccttaaaaatctaaaaacc

SEQ ID NO: 20367 - DNA, 50 bp, synthetic construct
  source 1..50: mol_type = other DNA
ctaacacccaacacaaacacctaccaaaatccttaaccttatcctttacc

SEQ ID NO: 20368 - DNA, 50 bp, synthetic construct
  source 1..50: mol_type = other DNA
aaataccaaactaacttaatccttctctctaaataccractataactccc

SEQ ID NO: 20369 - DNA, 50 bp, synthetic construct
  source 1..50: mol_type = other DNA
aaaactcttaccrtactcacraaacaaacttttaacacrttctaaaacac

SEQ ID NO: 20370 - DNA, 50 bp, synthetic construct
  source 1..50: mol_type = other DNA
craactatcrataaacctataaatatcaaaactccttaatcccctcctac

SEQ ID NO: 20371 - DNA, 50 bp, synthetic construct
  source 1..50: mol_type = other DNA
acctataaatatcaaaactccttaatcccctcctacraaaaacaaacacc

SEQ ID NO: 20372 - DNA, 50 bp, synthetic construct
  source 1..50: mol_type = other DNA
cttaatcccctcctacraaaaacaaacaccraataaaactacatataaac

SEQ ID NO: 20373 - DNA, 50 bp, synthetic construct
  source 1..50: mol_type = other DNA
ctataatcaccctaatacacrctaataaaattaaaatctatctaactaac

SEQ ID NO: 20374 - DNA, 50 bp, synthetic construct
  source 1..50: mol_type = other DNA
ctacaatcaccccratacacrctaataaaattaaaatctatctaactaac

SEQ ID NO: 20375 - DNA, 50 bp, synthetic construct
  source 1..50: mol_type = other DNA
aaaaaaatatatataacraacaaacctaaactataatcaccctaacctac

SEQ ID NO: 20376 - DNA, 50 bp, synthetic construct
  source 1..50: mol_type = other DNA
ctataatcaccctaacctacrctaataaaattaaaatctatccractaac

SEQ ID NO: 20377 - DNA, 50 bp, synthetic construct
  source 1..50: mol_type = other DNA
aaaacttctacaaacrcaaattatccttccctaacttaaacaacaaaaac

SEQ ID NO: 20378 - DNA, 50 bp, synthetic construct
  source 1..50: mol_type = other DNA
aacaaacatacccctaaccaactactaaccaaacccaaaactaaaaaaac

SEQ ID NO: 20379 - DNA, 50 bp, synthetic construct
  source 1..50: mol_type = other DNA
tcaacattccttacraccataataacaaaaactataaccacaaaaacrac

SEQ ID NO: 20380 - DNA, 50 bp, synthetic construct
  source 1..50: mol_type = other DNA
aactcaacattccttacraccataataacaaaaactataaccacaaaaac

SEQ ID NO: 20381 - DNA, 50 bp, synthetic construct
  source 1..50: mol_type = other DNA
ctattaaaaaaaaacacrctccattataaaactaactcaacattccttac

SEQ ID NO: 20382 - DNA, 50 bp, synthetic construct
  source 1..50: mol_type = other DNA
cccctaccaccataaccrtaaaaaatactaaaccaactccacaataaaac

SEQ ID NO: 20383 - DNA, 50 bp, synthetic construct
  source 1..50: mol_type = other DNA
aatcccaaaacacaaacrtactaaataattaatctaaataattaaacctc

SEQ ID NO: 20384 - DNA, 50 bp, synthetic construct
  source 1..50: mol_type = other DNA
taaaactaatacccactccccrcrtaaaacaaaatcaaaatactaacttc

SEQ ID NO: 20385 - DNA, 50 bp, synthetic construct
  source 1..50: mol_type = other DNA
ccaaataaaaaaaccttccctaaataactcttacaaacacraaccaaaac

SEQ ID NO: 20386 - DNA, 50 bp, synthetic construct
  source 1..50: mol_type = other DNA
tatatctatatatctttctatatatacratctatatctataaatctacac

SEQ ID NO: 20387 - DNA, 50 bp, synthetic construct
  source 1..50: mol_type = other DNA
cccrctaaaactaaattccaacttctatttctactccacttcacctaaac

SEQ ID NO: 20388 - DNA, 50 bp, synthetic construct
  source 1..50: mol_type = other DNA
aaaaataaacccaacraaacctaaaccaacaaaaccacaacraataaaac

SEQ ID NO: 20389 - DNA, 50 bp, synthetic construct
  source 1..50: mol_type = other DNA
raaaaaaaccctaaactccaataataccaaaccctaaaaataaacccaac

SEQ ID NO: 20390 - DNA, 50 bp, synthetic construct
  source 1..50: mol_type = other DNA
rattccraaactttctaaaacccccataaacrtaaaaaataacctatatc

SEQ ID NO: 20391 - DNA, 50 bp, synthetic construct
  source 1..50: mol_type = other DNA
acaaaaatatttaactaaaatctacaaccccracacaaatcacctcccac

SEQ ID NO: 20392 - DNA, 50 bp, synthetic construct
  source 1..50: mol_type = other DNA
aatttcactatattaaccaaaataatctcratctcctcacctcatcatcc

SEQ ID NO: 20393 - DNA, 50 bp, synthetic construct
  source 1..50: mol_type = other DNA
tacctcctccrtaaaataaatctaaataaaatctaaaatacaaccaaacc

SEQ ID NO: 20394 - DNA, 50 bp, synthetic construct
  source 1..50: mol_type = other DNA
aatcaattctatttaccaataactcctatcacctacacttcccaaataac

SEQ ID NO: 20395 - DNA, 50 bp, synthetic construct
  source 1..50: mol_type = other DNA
actactctactaaaaaaaaacctatataaaacacacctcttcaaaaaaac

SEQ ID NO: 20396 - DNA, 50 bp, synthetic construct
  source 1..50: mol_type = other DNA
actaaccaaaatctaaacacraacaatccctaaaaaacraaatccctaac

SEQ ID NO: 20397 - DNA, 50 bp, synthetic construct
  source 1..50: mol_type = other DNA
aaaattttccatactaaccaaaatctaaacacraacaatccctaaaaaac

SEQ ID NO: 20398 - DNA, 50 bp, synthetic construct
  source 1..50: mol_type = other DNA
cccctacccccactatctaaaattttccatactaaccaaaatctaaacac

SEQ ID NO: 20399 - DNA, 50 bp, synthetic construct
  source 1..50: mol_type = other DNA
tactaacaaacraaaacctatttttatacaaaaaacccttaacctaaaac

SEQ ID NO: 20400 - DNA, 50 bp, synthetic construct
  source 1..50: mol_type = other DNA
taaaatctctaatactaacraatcctaaaacaaattaaaatactaaaaac

SEQ ID NO: 20401 - DNA, 50 bp, synthetic construct
  source 1..50: mol_type = other DNA
cctaatccctactcraaaaccaacaaaacaaaaaactacttaaaccttac

SEQ ID NO: 20402 - DNA, 50 bp, synthetic construct
  source 1..50: mol_type = other DNA
aaaaacraaaacaatatcacatatacraaaaacactacaacaaaaaatac

SEQ ID NO: 20403 - DNA, 50 bp, synthetic construct
  source 1..50: mol_type = other DNA
acttaaaccttacrtataaaataaacrcactccctactacaatactcttc

SEQ ID NO: 20404 - DNA, 50 bp, synthetic construct
  source 1..50: mol_type = other DNA
ctaactaaaaacrtaatcctaaatataaccctataactccrccataaccc

SEQ ID NO: 20405 - DNA, 50 bp, synthetic construct
  source 1..50: mol_type = other DNA
aaatacrtctacraccacatatacactcacctacataaaaaatattaaac

SEQ ID NO: 20406 - DNA, 50 bp, synthetic construct
  source 1..50: mol_type = other DNA
aaacaaacccrcrcccaacaccttctatataaataaatacacatataacc

SEQ ID NO: 20407 - DNA, 50 bp, synthetic construct
  source 1..50: mol_type = other DNA
tcctccctaaaaaaccttaaaaaaatctccctacccaacaaatttccrac

SEQ ID NO: 20408 - DNA, 50 bp, synthetic construct
  source 1..50: mol_type = other DNA
ctctcctccctaaaaaaccttaaaaaaatctccctacccaacaaatttcc

SEQ ID NO: 20409 - DNA, 50 bp, synthetic construct
  source 1..50: mol_type = other DNA
aaaaaaaaccccaacctaacttctaaattcaaaaaaaactatatatacac

SEQ ID NO: 20410 - DNA, 50 bp, synthetic construct
  source 1..50: mol_type = other DNA
cacacrtataccacttccacaaacataaatacacaaacrtacacatacac

SEQ ID NO: 20411 - DNA, 50 bp, synthetic construct
  source 1..50: mol_type = other DNA
aatacacacatacacacrtataccacttccacaaacataaatacacaaac

SEQ ID NO: 20412 - DNA, 50 bp, synthetic construct
  source 1..50: mol_type = other DNA
crtacrtacatatacacrtctatatacccatatctataaaaataacacac

SEQ ID NO: 20413 - DNA, 50 bp, synthetic construct
  source 1..50: mol_type = other DNA
acccatatctataaaaataacacacrtatacatatatacactcaatatac

SEQ ID NO: 20414 - DNA, 50 bp, synthetic construct
  source 1..50: mol_type = other DNA
tcttacctaaaaaaaaattcccratttaaataactctcctatttcttacc

SEQ ID NO: 20415 - DNA, 50 bp, synthetic construct
  source 1..50: mol_type = other DNA
taaccacaaacattacaaaacaattccctaatatattcaccaccaaaaac

SEQ ID NO: 20416 - DNA, 50 bp, synthetic construct
  source 1..50: mol_type = other DNA
aataaacataccaaaaaattatcctacaatacctataattaaaaaacccc

SEQ ID NO: 20417 - DNA, 50 bp, synthetic construct
  source 1..50: mol_type = other DNA
aaattatcctacaatacctataattaaaaaaccccrtaaactacracccc

SEQ ID NO: 20418 - DNA, 50 bp, synthetic construct
  source 1..50: mol_type = other DNA
ctcccaacaacaaaataaaaccctataaaaaatctctaaacctccrtaac

SEQ ID NO: 20419 - DNA, 50 bp, synthetic construct
  source 1..50: mol_type = other DNA
caaaataaaaccctataaaaaatctctaaacctccrtaacraccctaaac

SEQ ID NO: 20420 - DNA, 50 bp, synthetic construct
  source 1..50: mol_type = other DNA
acttccctaaactctaacrattcttcttttaatcracaaatactataaac

SEQ ID NO: 20421 - DNA, 50 bp, synthetic construct
  source 1..50: mol_type = other DNA
caacaactcaataaccaaaataaaaacattaacaaatactaactaaacrc

SEQ ID NO: 20422 - DNA, 50 bp, synthetic construct
  source 1..50: mol_type = other DNA
aaaaaaaaactataatatacaaaacatccacrccccataactataatatc

SEQ ID NO: 20423 - DNA, 50 bp, synthetic construct
  source 1..50: mol_type = other DNA
ctatataaacttaattaaaataactctaactctataccaaaaataaacac

SEQ ID NO: 20424 - DNA, 50 bp, synthetic construct
  source 1..50: mol_type = other DNA
ccccaaccaaacccacacaacttctaaaaacaaaaaacaaaatatattac

SEQ ID NO: 20425 - DNA, 50 bp, synthetic construct
  source 1..50: mol_type = other DNA
acttaatataaaaaaaacccttcrtatcaaaccaataactaacacttccc

SEQ ID NO: 20426 - DNA, 50 bp, synthetic construct
  source 1..50: mol_type = other DNA
atataaaaaaaacccttcrtatcaaaccaataactaacacttcccraaac

SEQ ID NO: 20427 - DNA, 50 bp, synthetic construct
  source 1..50: mol_type = other DNA
aaatctcaacataaatacaaaacttaaaataacttcctaaaataactctc

SEQ ID NO: 20428 - DNA, 50 bp, synthetic construct
  source 1..50: mol_type = other DNA
atacaaaacttaaaataacttcctaaaataactctcrctaataaaataac

SEQ ID NO: 20429 - DNA, 50 bp, synthetic construct
  source 1..50: mol_type = other DNA
ttaaaataacttcctaaaataactctcrctaataaaataacraatacaac

SEQ ID NO: 20430 - DNA, 50 bp, synthetic construct
  source 1..50: mol_type = other DNA
tacttaaaataaataaccatcttattaaaatcaaataaaacaataactcc

SEQ ID NO: 20431 - DNA, 50 bp, synthetic construct
  source 1..50: mol_type = other DNA
ccaaatcccaacatcctaaaccaaaatctataaactaaaatatatcaacc

SEQ ID NO: 20432 - DNA, 50 bp, synthetic construct
  source 1..50: mol_type = other DNA
caactaaaacctaaacraactataaaaaccccccrcttaataaacraaac

SEQ ID NO: 20433 - DNA, 50 bp, synthetic construct
  source 1..50: mol_type = other DNA
cccaaaaaacctaactcaactaaaacctaaacraactataaaaacccccc

SEQ ID NO: 20434 - DNA, 50 bp, synthetic construct
  source 1..50: mol_type = other DNA
ttaactattttacrccttcccaaaaaacctaactcaactaaaacctaaac

SEQ ID NO: 20435 - DNA, 50 bp, synthetic construct
  source 1..50: mol_type = other DNA
atatatacaatattctcaaatttcacctacttaaatcttaactattttac

SEQ ID NO: 20436 - DNA, 50 bp, synthetic construct
  source 1..50: mol_type = other DNA
caaaattcaaacaaataaaatctaaaaacactacacacactcataaatac

SEQ ID NO: 20437 - DNA, 50 bp, synthetic construct
  source 1..50: mol_type = other DNA
acacacactcataaatacraaaaactctaatcacatcaaaatcttactcc

SEQ ID NO: 20438 - DNA, 50 bp, synthetic construct
  source 1..50: mol_type = other DNA
ataaataataaaacaatcaaactaaccctaaaacccccrcactaccaaac

SEQ ID NO: 20439 - DNA, 50 bp, synthetic construct
  source 1..50: mol_type = other DNA
taacccataaccataaataataaaacaatcaaactaaccctaaaaccccc

SEQ ID NO: 20440 - DNA, 50 bp, synthetic construct
  source 1..50: mol_type = other DNA
aactattaactaataaaaaataaacttaaatactattcccaaaatctccc

SEQ ID NO: 20441 - DNA, 50 bp, synthetic construct
  source 1..50: mol_type = other DNA
aaaatctaaccaataaaacataactcattactaaaataacaaatttaaac

SEQ ID NO: 20442 - DNA, 50 bp, synthetic construct
  source 1..50: mol_type = other DNA
cactatattacccaaacttatctcaacacctaacctcacataatactccc

SEQ ID NO: 20443 - DNA, 50 bp, synthetic construct
  source 1..50: mol_type = other DNA
acratctttataaaatttcatctataacatcttttccctaaaaccttttc

SEQ ID NO: 20444 - DNA, 50 bp, synthetic construct
  source 1..50: mol_type = other DNA
crtaatatataaaactaatataaaaacttctaatttaaactacccaaaac

SEQ ID NO: 20445 - DNA, 50 bp, synthetic construct
  source 1..50: mol_type = other DNA
crctttaaataacccaaatcaaaaacttctacaccaaccttacatattac

SEQ ID NO: 20446 - DNA, 50 bp, synthetic construct
  source 1..50: mol_type = other DNA
caaaatactaattaatatatttacaaaccttaaactaaatacaaactacc

SEQ ID NO: 20447 - DNA, 50 bp, synthetic construct
  source 1..50: mol_type = other DNA
taataaaaaaattactaacacaccaattatcatatcattttcaaatcatc

SEQ ID NO: 20448 - DNA, 50 bp, synthetic construct
  source 1..50: mol_type = other DNA
aataacaaccatattcatacrcactctcaaaaattaaacccaattttatc

SEQ ID NO: 20449 - DNA, 50 bp, synthetic construct
  source 1..50: mol_type = other DNA
ctcaactccctttctaatctaaaaattataactcatcctcaaccrtacac

SEQ ID NO: 20450 - DNA, 50 bp, synthetic construct
  source 1..50: mol_type = other DNA
acctaactaaatcaaaacatctcactaaaaaaccacattaaaaaaataac

SEQ ID NO: 20451 - DNA, 50 bp, synthetic construct
  source 1..50: mol_type = other DNA
taacraacraaatcctaaaaaaaacaaccacaataaaaatccctatccac

SEQ ID NO: 20452 - DNA, 50 bp, synthetic construct
  source 1..50: mol_type = other DNA
cctcctctatcatttctttaaaaactatcccaaaatttaaatatcccaac

SEQ ID NO: 20453 - DNA, 50 bp, synthetic construct
  source 1..50: mol_type = other DNA
tatatttctcccctccaaaacrcacatttaaaacaaacacaccaaaacac

SEQ ID NO: 20454 - DNA, 50 bp, synthetic construct
  source 1..50: mol_type = other DNA
aaaataaaaacctaaaccctaaaaaaaattcatctcctcaacataaacac

SEQ ID NO: 20455 - DNA, 50 bp, synthetic construct
  source 1..50: mol_type = other DNA
aaataaaaataaatactatttttaaattttctccaaaatctacataacac

SEQ ID NO: 20456 - DNA, 50 bp, synthetic construct
  source 1..50: mol_type = other DNA
tataaaaacraaaatctcactatattacccaaactaatattaaactactc

SEQ ID NO: 20457 - DNA, 50 bp, synthetic construct
  source 1..50: mol_type = other DNA
actatattacccaaactaatattaaactactcrcctcaaaaaatcctccc

SEQ ID NO: 20458 - DNA, 50 bp, synthetic construct
  source 1..50: mol_type = other DNA
atacaaatattataaatactttttctaaataccacatttaaaccaaacrc

SEQ ID NO: 20459 - DNA, 50 bp, synthetic construct
  source 1..50: mol_type = other DNA
taatacaaatattataaatactttttctaaataccacatttaaaccaaac

SEQ ID NO: 20460 - DNA, 50 bp, synthetic construct
  source 1..50: mol_type = other DNA
ccraaatacttccratacttacctacaaaaatacaaaactacrtaaaacc

SEQ ID NO: 20461 - DNA, 50 bp, synthetic construct
  source 1..50: mol_type = other DNA
ctatttatcraaattaatccrataataatacaaaccaccaacattaccrc

SEQ ID NO: 20462 - DNA, 50 bp, synthetic construct
  source 1..50: mol_type = other DNA
tactattttttaccaaattaacacttaatataaactaaaaacctatcatc

SEQ ID NO: 20463 - DNA, 50 bp, synthetic construct
  source 1..50: mol_type = other DNA
caattatctacttaatctcaatcttccctcaaaaaaattccttaaaatac

SEQ ID NO: 20464 - DNA, 50 bp, synthetic construct
  source 1..50: mol_type = other DNA
caataaatatctactaaataaaatacataaaaccccatttcttcctatcc

SEQ ID NO: 20465 - DNA, 50 bp, synthetic construct
  source 1..50: mol_type = other DNA
aaaaaaaacttaaaacaactatttcatatcactcattacctcttttcatc

SEQ ID NO: 20466 - DNA, 50 bp, synthetic construct
  source 1..50: mol_type = other DNA
tatcatcrtaaaaactaaaccattcctacacaataatctaacaataaccc

SEQ ID NO: 20467 - DNA, 50 bp, synthetic construct
  source 1..50: mol_type = other DNA
aaaaaaatattttatccttaaaactactaacctaaaaaaaccttatcatc

SEQ ID NO: 20468 - DNA, 50 bp, synthetic construct
  source 1..50: mol_type = other DNA
ctttatataaacacatattttcatttctcttaaaaatacaaacttaaacc

SEQ ID NO: 20469 - DNA, 50 bp, synthetic construct
  source 1..50: mol_type = other DNA
ttacctaacttcttttaattaacataatatttttaaaactcacacatatc

SEQ ID NO: 20470 - DNA, 50 bp, synthetic construct
  source 1..50: mol_type = other DNA
ttacacaaaaaaataacttacaaaatacaatataccataaaaatacaccc

SEQ ID NO: 20471 - DNA, 50 bp, synthetic construct
  source 1..50: mol_type = other DNA
aaaaaaaactacatctaaaaaacatttcaaaaaaaatacaaaccaaacac

SEQ ID NO: 20472 - DNA, 50 bp, synthetic construct
  source 1..50: mol_type = other DNA
cttcccaatattaaccaaactaatctccaactcctaatctcaaataatcc

SEQ ID NO: 20473 - DNA, 50 bp, synthetic construct
  source 1..50: mol_type = other DNA
tttaaatttcacacataaccctatcaccataacaaaaaataactattttc

SEQ ID NO: 20474 - DNA, 50 bp, synthetic construct
  source 1..50: mol_type = other DNA
ccatccaacctcttcacacacttaaatacaaaaccaaattctccaaaacc

SEQ ID NO: 20475 - DNA, 50 bp, synthetic construct
  source 1..50: mol_type = other DNA
aatatttaatacatactcatcaacaaaacccrccaataacttttttaatc

SEQ ID NO: 20476 - DNA, 50 bp, synthetic construct
  source 1..50: mol_type = other DNA
aaactaaataaatacatttataccattaaacratcaaaaaaaccattaac

SEQ ID NO: 20477 - DNA, 50 bp, synthetic construct
  source 1..50: mol_type = other DNA
tttatatctaacttctttcacttaacataatattttcaaaattcatccac

SEQ ID NO: 20478 - DNA, 50 bp, synthetic construct
  source 1..50: mol_type = other DNA
tcaattcatcaattattaaacatataaattattcactttaatacaatcac

SEQ ID NO: 20479 - DNA, 50 bp, synthetic construct
  source 1..50: mol_type = other DNA
tacctcaaaaccttcaaacatactacttcctatactataaaaccaactcc

SEQ ID NO: 20480 - DNA, 50 bp, synthetic construct
  source 1..50: mol_type = other DNA
taaaacccacccttcccaaaactaaccaactctcctataatatatttccc

SEQ ID NO: 20481 - DNA, 50 bp, synthetic construct
  source 1..50: mol_type = other DNA
acctaaaacacctaatattttatcttcatacatattctttaaaaaatcac

SEQ ID NO: 20482 - DNA, 50 bp, synthetic construct
  source 1..50: mol_type = other DNA
atctaaactaaaccaaaccacttaataaacctatcrctaataaactaacc

SEQ ID NO: 20483 - DNA, 50 bp, synthetic construct
  source 1..50: mol_type = other DNA
taaaatatttcccraactctccaataataaccttaaataactaaccaacc

SEQ ID NO: 20484 - DNA, 50 bp, synthetic construct
  source 1..50: mol_type = other DNA
aacaaataactacrattaatcaaccattcaaaactactactaaaaaatcc

SEQ ID NO: 20485 - DNA, 50 bp, synthetic construct
  source 1..50: mol_type = other DNA
ttctaaaaaatccctataataccaaacaaaaataaactactttaaaaccc

SEQ ID NO: 20486 - DNA, 50 bp, synthetic construct
  source 1..50: mol_type = other DNA
aaaacaaaacraactaccaaacraacttaaaaacttacccraaactatcc

SEQ ID NO: 20487 - DNA, 50 bp, synthetic construct
  source 1..50: mol_type = other DNA
ttttctttcacaactaaaaaacraataacctcraacaaattttcaaaccc

SEQ ID NO: 20488 - DNA, 50 bp, synthetic construct
  source 1..50: mol_type = other DNA
crctataccccccaataaccctaaatctatttccaaacaaaaaacaaaac

SEQ ID NO: 20489 - DNA, 50 bp, synthetic construct
  source 1..50: mol_type = other DNA
crtcttaccctctacctaaaaacaaactcaaaactactaaaaaacacaac

SEQ ID NO: 20490 - DNA, 50 bp, synthetic construct
  source 1..50: mol_type = other DNA
aaaactaacccttctatttacrtaaaaactaaataaaacctataactacc

SEQ ID NO: 20491 - DNA, 50 bp, synthetic construct
  source 1..50: mol_type = other DNA
taaactccataaaaacccttaactttaataatttaatactctatttttac

SEQ ID NO: 20492 - DNA, 50 bp, synthetic construct
  source 1..50: mol_type = other DNA
aaataatatataaatatacaaatataaaaaactaacctaacctactatac

SEQ ID NO: 20493 - DNA, 50 bp, synthetic construct
  source 1..50: mol_type = other DNA
ttatacaacatataattacacacacacatacacacccataccttatctcc

SEQ ID NO: 20494 - DNA, 50 bp, synthetic construct
  source 1..50: mol_type = other DNA
cttcctccctaactttctctttcaaaaataaacatacataaattcatttc

SEQ ID NO: 20495 - DNA, 50 bp, synthetic construct
  source 1..50: mol_type = other DNA
aaaataacaaaacatcaaatcaacaacttcctctcaaattattaaaaaac

SEQ ID NO: 20496 - DNA, 50 bp, synthetic construct
  source 1..50: mol_type = other DNA
aatctaaaaaaactacaaaaactacaaaaaacaacaaacacttaaacctc

SEQ ID NO: 20497 - DNA, 50 bp, synthetic construct
  source 1..50: mol_type = other DNA
ctacaaaaactacaaaaaacaacaaacacttaaacctcrcaaacaataac

SEQ ID NO: 20498 - DNA, 50 bp, synthetic construct
  source 1..50: mol_type = other DNA
cccraaacttatacccaacctacctttaacaactttatttactaactaac

SEQ ID NO: 20499 - DNA, 50 bp, synthetic construct
  source 1..50: mol_type = other DNA
aacrtcaaccaacaaacaaaactaccaaaaacaaattaaacacaaacttc

SEQ ID NO: 20500 - DNA, 50 bp, synthetic construct
  source 1..50: mol_type = other DNA
ttaccttaaattccctcaaatcataaaacttcctcaacacaaaactaaac

SEQ ID NO: 20501 - DNA, 50 bp, synthetic construct
  source 1..50: mol_type = other DNA
ttaatcctaaactcataccaaactaatcttaaaaaaatctctatctcctc

SEQ ID NO: 20502 - DNA, 50 bp, synthetic construct
  source 1..50: mol_type = other DNA
aaccaatttaatataaattcaaaattaaccaaaaatcaccatcaaacccc

SEQ ID NO: 20503 - DNA, 50 bp, synthetic construct
  source 1..50: mol_type = other DNA
acaataactaaaaataaaaactataactactcctcaactataaacaaatc

SEQ ID NO: 20504 - DNA, 50 bp, synthetic construct
  source 1..50: mol_type = other DNA
ttaactattcaaccaaaatattaacttttcaaaaaattacctaatacccc

SEQ ID NO: 20505 - DNA, 50 bp, synthetic construct
  source 1..50: mol_type = other DNA
atcaacactacccccacactataaaaaaaaccaataccctaaactaaaac

SEQ ID NO: 20506 - DNA, 50 bp, synthetic construct
  source 1..50: mol_type = other DNA
caaaaaaataaatcaaaacccttcaaaacaaatcaaaacaacaatcactc

SEQ ID NO: 20507 - DNA, 50 bp, synthetic construct
  source 1..50: mol_type = other DNA
acaacatatacttttttatatctaacttctttcattctaaacaatatttc

SEQ ID NO: 20508 - DNA, 50 bp, synthetic construct
  source 1..50: mol_type = other DNA
aaaaaaaaaactccctaaccccttacacttcccaaataaaacaatacctc

SEQ ID NO: 20509 - DNA, 50 bp, synthetic construct
  source 1..50: mol_type = other DNA
accaaaaaaatcctaaacaaaaacrcttaaaaaactaataataaccaaac

SEQ ID NO: 20510 - DNA, 50 bp, synthetic construct
  source 1..50: mol_type = other DNA
ctaaacaaaaacrcttaaaaaactaataataaccaaacraaataactcac

SEQ ID NO: 20511 - DNA, 50 bp, synthetic construct
  source 1..50: mol_type = other DNA
cactaccttaaaacatctatttatatcactctaataaaaataacaaaccc

SEQ ID NO: 20512 - DNA, 50 bp, synthetic construct
  source 1..50: mol_type = other DNA
ccaaactacttcccttcctactttacaaaattactactaaactaccttcc

SEQ ID NO: 20513 - DNA, 50 bp, synthetic construct
  source 1..50: mol_type = other DNA
aaaatcctaatatccaaaaaaaaccatatactaaaaactaataccaaatc

SEQ ID NO: 20514 - DNA, 50 bp, synthetic construct
  source 1..50: mol_type = other DNA
catacatttccttaaataactcrtccaaaatctctcaacaactcaaaaac

SEQ ID NO: 20515 - DNA, 50 bp, synthetic construct
  source 1..50: mol_type = other DNA
aattttttctcactccrtttaaataatccatacatttccttaaataactc

SEQ ID NO: 20516 - DNA, 50 bp, synthetic construct
  source 1..50: mol_type = other DNA
attcaaacaattctcctaactcaaccttccraataattaaaactataaac

SEQ ID NO: 20517 - DNA, 50 bp, synthetic construct
  source 1..50: mol_type = other DNA
aatcccaatcataacaaaaaaaccaaaaccttcaaatcactaacaatctc

SEQ ID NO: 20518 - DNA, 50 bp, synthetic construct
  source 1..50: mol_type = other DNA
aatatccccaacaataaaatactacccaacaataaatctttcatactaac

SEQ ID NO: 20519 - DNA, 50 bp, synthetic construct
  source 1..50: mol_type = other DNA
atcattataaaaaaattccttctataaccataaaaatcttaatctttaac

SEQ ID NO: 20520 - DNA, 50 bp, synthetic construct
  source 1..50: mol_type = other DNA
actaaaaatcatttaaataaaaataaccaaaaactacttaaatactccac

SEQ ID NO: 20521 - DNA, 50 bp, synthetic construct
  source 1..50: mol_type = other DNA
ccaaacatccctatacttttccttcaaaacactaaccacaacctataacc

SEQ ID NO: 20522 - DNA, 50 bp, synthetic construct
  source 1..50: mol_type = other DNA
aaatatatatcatcaatctaacataactaccaaaaaaactaacacccccc

SEQ ID NO: 20523 - DNA, 50 bp, synthetic construct
  source 1..50: mol_type = other DNA
ccatatcaaactaataacacacacttaacacaaaacccaacttatttctc

SEQ ID NO: 20524 - DNA, 50 bp, synthetic construct
  source 1..50: mol_type = other DNA
aaacaactatattaataccaatattcccctaatcttataactactacccc

SEQ ID NO: 20525 - DNA, 50 bp, synthetic construct
  source 1..50: mol_type = other DNA
taacccataccaacaatcattactcctacaacaaaactaaactaccacac

SEQ ID NO: 20526 - DNA, 50 bp, synthetic construct
  source 1..50: mol_type = other DNA
tatactaatactataaattacttaaaaaaacaataaaacaacrattctcc

SEQ ID NO: 20527 - DNA, 50 bp, synthetic construct
  source 1..50: mol_type = other DNA
aaattacattactccaatatactccaacctaaataacaaaataaaactcc

SEQ ID NO: 20528 - DNA, 50 bp, synthetic construct
  source 1..50: mol_type = other DNA
caaactaaaacacactaaaacaatataactcactacaacttccrcttccc

SEQ ID NO: 20529 - DNA, 50 bp, synthetic construct
  source 1..50: mol_type = other DNA
aaaactttcaatttctctctaaataattaaaaaatacaaccaaaactcac

SEQ ID NO: 20530 - DNA, 50 bp, synthetic construct
  source 1..50: mol_type = other DNA
ataaatataaccttcacttaaacrccaactttaaaaaaaatcaatactac

SEQ ID NO: 20531 - DNA, 50 bp, synthetic construct
  source 1..50: mol_type = other DNA
ccacatactttcaattaaaccctccttataaatataaccttcacttaaac

SEQ ID NO: 20532 - DNA, 50 bp, synthetic construct
  source 1..50: mol_type = other DNA
aaacctaactaaaaacatataaaaacatcattataaactattactaacac

SEQ ID NO: 20533 - DNA, 50 bp, synthetic construct
  source 1..50: mol_type = other DNA
ccccaattcccactcccattaaatatcraattctaaaaaaaccaatcaac

SEQ ID NO: 20534 - DNA, 50 bp, synthetic construct
  source 1..50: mol_type = other DNA
ataatacccaaacaacaaaatccaacatcataaccttaaaaaacaaaaac

SEQ ID NO: 20535 - DNA, 50 bp, synthetic construct
  source 1..50: mol_type = other DNA
tacracrtctccaacactaaaacctaaactcaaaaattactttaaaaaac

SEQ ID NO: 20536 - DNA, 50 bp, synthetic construct
  source 1..50: mol_type = other DNA
aaattcrtctttcaaaataatccttaaattcaaaccccaatactaaaaac

SEQ ID NO: 20537 - DNA, 50 bp, synthetic construct
  source 1..50: mol_type = other DNA
attttactcaaacatcataatttcccttaatcaaaaaatataataataac

SEQ ID NO: 20538 - DNA, 50 bp, synthetic construct
  source 1..50: mol_type = other DNA
tttcatatcaaactttaaacttctaaaataaaacatcaaaacacaaacac

SEQ ID NO: 20539 - DNA, 50 bp, synthetic construct
  source 1..50: mol_type = other DNA
cttctaaaataaaacatcaaaacacaaacacrattcaaccaacctccaac

SEQ ID NO: 20540 - DNA, 50 bp, synthetic construct
  source 1..50: mol_type = other DNA
tcaaccttcaacrataattcaaccccactaataattcaatctttactaac

SEQ ID NO: 20541 - DNA, 50 bp, synthetic construct
  source 1..50: mol_type = other DNA
attcaaccccactaataattcaatctttactaacrcaaaaatcttttaac

SEQ ID NO: 20542 - DNA, 50 bp, synthetic construct
  source 1..50: mol_type = other DNA
tctttacatcacaaaaaaacccaaaaaaatacatctaaatctaactactc

SEQ ID NO: 20543 - DNA, 50 bp, synthetic construct
  source 1..50: mol_type = other DNA
ttttatcacccaaaaaacatttaacaatatctaaaaacatttttaaaacc

SEQ ID NO: 20544 - DNA, 50 bp, synthetic construct
  source 1..50: mol_type = other DNA
attcatctacaaatcctaaaaaacataaaccctatacctaaaattaaaac

SEQ ID NO: 20545 - DNA, 50 bp, synthetic construct
  source 1..50: mol_type = other DNA
actcaaacctaaaataaaatctacatttaaacaaaatcaccaaataattc

SEQ ID NO: 20546 - DNA, 50 bp, synthetic construct
  source 1..50: mol_type = other DNA
ccaatccccaacaaacttcatataactctacacaccaacrtctaaataac

SEQ ID NO: 20547 - DNA, 50 bp, synthetic construct
  source 1..50: mol_type = other DNA
cctactaaaaactaaaaaccaaaaaacaacaaaccaactaaaactaaaac

SEQ ID NO: 20548 - DNA, 50 bp, synthetic construct
  source 1..50: mol_type = other DNA
ataaccccctctacccaaaaatatccaataaaactctacaccactacttc

SEQ ID NO: 20549 - DNA, 50 bp, synthetic construct
  source 1..50: mol_type = other DNA
aaaaccaaattaacaacctactaaacctcaccctacraaaaaaattcacc

SEQ ID NO: 20550 - DNA, 50 bp, synthetic construct
  source 1..50: mol_type = other DNA
taaaaaatactaaacrcrtactaaaaaacatcaacaaaaacatctcctac

SEQ ID NO: 20551 - DNA, 50 bp, synthetic construct
  source 1..50: mol_type = other DNA
aaaaaatttatccraattaaaataaacatccccratctaataaaactccc

SEQ ID NO: 20552 - DNA, 50 bp, synthetic construct
  source 1..50: mol_type = other DNA
ccaaaaactaaaataacrataacctaaaacccaaacactctaaaaaatcc

SEQ ID NO: 20553 - DNA, 50 bp, synthetic construct
  source 1..50: mol_type = other DNA
tcaaacttcatttctcaaaacttccaaacctactcccattaatactaacc

SEQ ID NO: 20554 - DNA, 50 bp, synthetic construct
  source 1..50: mol_type = other DNA
caaatactattattaaaaacaccctaccaaataaaattattttaacaaac

SEQ ID NO: 20555 - DNA, 50 bp, synthetic construct
  source 1..50: mol_type = other DNA
taaataaaaacrcctaaaactctcccraataaaaaatctaaacraatccc

SEQ ID NO: 20556 - DNA, 50 bp, synthetic construct
  source 1..50: mol_type = other DNA
cataaacttcaataaacttctactccctcaaatacttcaaaaaaaaaatc

SEQ ID NO: 20557 - DNA, 50 bp, synthetic construct
  source 1..50: mol_type = other DNA
atttaaaatttaaaattaacccracattacttcccaaaaacractctttc

SEQ ID NO: 20558 - DNA, 50 bp, synthetic construct
  source 1..50: mol_type = other DNA
ctcttttctcttatcaacccacaaaattcttccaatccctaaataaaaac

SEQ ID NO: 20559 - DNA, 50 bp, synthetic construct
  source 1..50: mol_type = other DNA
aaatatttccaaattaaaaactcaaaacacrtttacrcaatactacactc

SEQ ID NO: 20560 - DNA, 50 bp, synthetic construct
  source 1..50: mol_type = other DNA
atcctcaaacaaaaattaccaaccattccaaactaaacraaaataataac

SEQ ID NO: 20561 - DNA, 50 bp, synthetic construct
  source 1..50: mol_type = other DNA
taccaaccattccaaactaaacraaaataataacrtcaataaaaaaaacc

SEQ ID NO: 20562 - DNA, 50 bp, synthetic construct
  source 1..50: mol_type = other DNA
acctcaaaaacatccttcaaaaaccaaaattcaaaccccaaacraaaatc

SEQ ID NO: 20563 - DNA, 50 bp, synthetic construct
  source 1..50: mol_type = other DNA
ttctaaaataataataactcacctaaactccaaactaacaaaactacctc

SEQ ID NO: 20564 - DNA, 50 bp, synthetic construct
  source 1..50: mol_type = other DNA
ttccatcatttataatctatctaacttaaatccataacaacattccttac

SEQ ID NO: 20565 - DNA, 50 bp, synthetic construct
  source 1..50: mol_type = other DNA
taattttacaaatccttacctaaaacccaaaataatttttaaccrctaac

SEQ ID NO: 20566 - DNA, 50 bp, synthetic construct
  source 1..50: mol_type = other DNA
tccttacctaaaacccaaaataatttttaaccrctaacraccttataacc

SEQ ID NO: 20567 - DNA, 50 bp, synthetic construct
  source 1..50: mol_type = other DNA
tcatacctattaataaaactttccaaacttaaaaaataccttaaaatacc

SEQ ID NO: 20568 - DNA, 50 bp, synthetic construct
  source 1..50: mol_type = other DNA
actaatctcattaatttcaaaaataattacataactaaacaaaaactctc

SEQ ID NO: 20569 - DNA, 50 bp, synthetic construct
  source 1..50: mol_type = other DNA
atttcaaaaataattacataactaaacaaaaactctcraataaatacaac

SEQ ID NO: 20570 - DNA, 50 bp, synthetic construct
  source 1..50: mol_type = other DNA
ataactaaacaaaaactctcraataaatacaacrctaactaaataccccc

SEQ ID NO: 20571 - DNA, 50 bp, synthetic construct
  source 1..50: mol_type = other DNA
cataacctcacccataataatttccaaaatttaaataaaaaccaatttcc

SEQ ID NO: 20572 - DNA, 50 bp, synthetic construct
  source 1..50: mol_type = other DNA
ttccaccaaacattctaaataattaataaaaaaacaaattttccaattac

SEQ ID NO: 20573 - DNA, 50 bp, synthetic construct
  source 1..50: mol_type = other DNA
aatcttatttcactcttatctctatacaaatctcrataaatcraaaccac

SEQ ID NO: 20574 - DNA, 50 bp, synthetic construct
  source 1..50: mol_type = other DNA
caaaacacaatcttatttcactcttatctctatacaaatctcrataaatc

SEQ ID NO: 20575 - DNA, 50 bp, synthetic construct
  source 1..50: mol_type = other DNA
acaatttccaaaacacaatcttatttcactcttatctctatacaaatctc

SEQ ID NO: 20576 - DNA, 50 bp, synthetic construct
  source 1..50: mol_type = other DNA
racactaaattctacttccrctttaataactccttctacctcaaaaaccc

SEQ ID NO: 20577 - DNA, 50 bp, synthetic construct
  source 1..50: mol_type = other DNA
tatctctaaattccctatacaatcttcaaatctcccttcactatcracac

SEQ ID NO: 20578 - DNA, 50 bp, synthetic construct
  source 1..50: mol_type = other DNA
ataaatatctctaaattccctatacaatcttcaaatctcccttcactatc

SEQ ID NO: 20579 - DNA, 50 bp, synthetic construct
  source 1..50: mol_type = other DNA
atatttaattaaaccctaaacttaaacataaatataaccctaaaattacc

SEQ ID NO: 20580 - DNA, 50 bp, synthetic construct
  source 1..50: mol_type = other DNA
caccctataacatttaaaaacataaaacaaacaccaaatatatttatatc

SEQ ID NO: 20581 - DNA, 50 bp, synthetic construct
  source 1..50: mol_type = other DNA
aaacacatctaatatctatctcataccttcaaataccacaaaatattaac

SEQ ID NO: 20582 - DNA, 50 bp, synthetic construct
  source 1..50: mol_type = other DNA
caaaaaatcttccaaaaccracttttaaaaaaccacaaaaaaatataacc

SEQ ID NO: 20583 - DNA, 50 bp, synthetic construct
  source 1..50: mol_type = other DNA
tacataaattaaatttctacaactttcrataaacaaatcaacaacaaaac

SEQ ID NO: 20584 - DNA, 50 bp, synthetic construct
  source 1..50: mol_type = other DNA
aatattactaaaatacaaataccattcrttctattactaatttacttacc

SEQ ID NO: 20585 - DNA, 50 bp, synthetic construct
  source 1..50: mol_type = other DNA
cctaacaacraaacattttacaacactccaaaacctactcaaaataaatc

SEQ ID NO: 20586 - DNA, 50 bp, synthetic construct
  source 1..50: mol_type = other DNA
caccccttcracttaccttaaacaaactctaaaatactacaaaatactcc

SEQ ID NO: 20587 - DNA, 50 bp, synthetic construct
  source 1..50: mol_type = other DNA
tacaaaatactccrctatcaaaacaaccatcttaccraaatcacataacc

SEQ ID NO: 20588 - DNA, 50 bp, synthetic construct
  source 1..50: mol_type = other DNA
tacaaacttaacaaacrccttaaaaacrtaattattcaaaaataatcrac

SEQ ID NO: 20589 - DNA, 50 bp, synthetic construct
  source 1..50: mol_type = other DNA
ttttttttttaccttttatatactcatttattattacttcaacacccccc

SEQ ID NO: 20590 - DNA, 50 bp, synthetic construct
  source 1..50: mol_type = other DNA
aaatataaaaatcrcatactctcattcttataactctaactcactaaaac

SEQ ID NO: 20591 - DNA, 50 bp, synthetic construct
  source 1..50: mol_type = other DNA
ttccctttttaaaaaccctattccttcacttttaacaccaaaatactaac

SEQ ID NO: 20592 - DNA, 50 bp, synthetic construct
  source 1..50: mol_type = other DNA
ataaatactaaaatactaaactattaacaatttcacacatcacccttaac

SEQ ID NO: 20593 - DNA, 50 bp, synthetic construct
  source 1..50: mol_type = other DNA
ataactatatcactaaaccaaacctaaacctaatttatctctacaccctc

SEQ ID NO: 20594 - DNA, 50 bp, synthetic construct
  source 1..50: mol_type = other DNA
ataataaataacctaactcttatcttttcttttccccttcctcctaaccc

SEQ ID NO: 20595 - DNA, 50 bp, synthetic construct
  source 1..50: mol_type = other DNA
ctctccrataaaaaaacttcctcraaaaaaccraaaactttttcctaaac

SEQ ID NO: 20596 - DNA, 50 bp, synthetic construct
  source 1..50: mol_type = other DNA
aaataaaaaacrtctctaaaaaaaaccraaatcataaactcaacaaccrc

SEQ ID NO: 20597 - DNA, 50 bp, synthetic construct
  source 1..50: mol_type = other DNA
ttaaccaaacatcacttcccttatctaaaaaactacatactacaaaaacc

SEQ ID NO: 20598 - DNA, 50 bp, synthetic construct
  source 1..50: mol_type = other DNA
aaaaaaatactccatacaaataaaaaccaaaaataaacaaaaataactac

SEQ ID NO: 20599 - DNA, 50 bp, synthetic construct
  source 1..50: mol_type = other DNA
aaaaacaaacaaaaatataaaacccactaataaaacaaatacacaaatac

SEQ ID NO: 20600 - DNA, 50 bp, synthetic construct
  source 1..50: mol_type = other DNA
atatactactcraacraaccaaaaaacaactataaactatctcctaaacc

SEQ ID NO: 20601 - DNA, 50 bp, synthetic construct
  source 1..50: mol_type = other DNA
taaacacaaaaaattttttaataacataaaaatattttttacttcccacc

SEQ ID NO: 20602 - DNA, 50 bp, synthetic construct
  source 1..50: mol_type = other DNA
ataaaaatattttttacttcccaccraacccactaacctctaataccacc

SEQ ID NO: 20603 - DNA, 50 bp, synthetic construct
  source 1..50: mol_type = other DNA
cttaaacccaaaatcaaacccaaaaccccaaaaacccttaaaacataccc

SEQ ID NO: 20604 - DNA, 50 bp, synthetic construct
  source 1..50: mol_type = other DNA
aaaaccccaaaaacccttaaaacatacccraaattaatttcttaactaac

SEQ ID NO: 20605 - DNA, 50 bp, synthetic construct
  source 1..50: mol_type = other DNA
craattctattcctaaaaataataaatactctatactaaaccccaataac

SEQ ID NO: 20606 - DNA, 50 bp, synthetic construct
  source 1..50: mol_type = other DNA
cttcaaaaacttacatcctacttcctattaacaacactaccaaaaacacc

SEQ ID NO: 20607 - DNA, 50 bp, synthetic construct
  source 1..50: mol_type = other DNA
atataaatctttaaaaaacttaaatctaaaaatcaaaaaacctaaactcc

SEQ ID NO: 20608 - DNA, 50 bp, synthetic construct
  source 1..50: mol_type = other DNA
ttactacacttaacttttataaataaaacacatataataccacaataaac

SEQ ID NO: 20609 - DNA, 50 bp, synthetic construct
  source 1..50: mol_type = other DNA
cccctacaactctactctatcaaaccaaaatacaaacaactacatataac

SEQ ID NO: 20610 - DNA, 50 bp, synthetic construct
  source 1..50: mol_type = other DNA
caactctactctatcaaaccaaaatacaaacaactacatataacrtaccc

SEQ ID NO: 20611 - DNA, 50 bp, synthetic construct
  source 1..50: mol_type = other DNA
ctactctatcaaaccaaaatacaaacaactacatataacrtacccrttac

SEQ ID NO: 20612 - DNA, 50 bp, synthetic construct
  source 1..50: mol_type = other DNA
caaaaaaaccaaaacaaaaaaaccccatacaaaacaatcctcaacaatcc

SEQ ID NO: 20613 - DNA, 50 bp, synthetic construct
  source 1..50: mol_type = other DNA
ctaatcaacattctttaataaaatatacaaaaactaacccctccacactc

SEQ ID NO: 20614 - DNA, 50 bp, synthetic construct
  source 1..50: mol_type = other DNA
ctttaataaaatatacaaaaactaacccctccacactcrtctatatccac

SEQ ID NO: 20615 - DNA, 50 bp, synthetic construct
  source 1..50: mol_type = other DNA
attaaataacctactatattaatcatctcaaactaccataacaaaatacc

SEQ ID NO: 20616 - DNA, 50 bp, synthetic construct
  source 1..50: mol_type = other DNA
aaaaccaataaactaacattctaatcttaaacttcctaaactctaaaacc

SEQ ID NO: 20617 - DNA, 50 bp, synthetic construct
  source 1..50: mol_type = other DNA
aaaatccaaaatcaaaataccaacctattaattcctaataataacactcc

SEQ ID NO: 20618 - DNA, 50 bp, synthetic construct
  source 1..50: mol_type = other DNA
caactaaacttctaaactaaaacctaaacccacttaaaaataatcccaac

SEQ ID NO: 20619 - DNA, 50 bp, synthetic construct
  source 1..50: mol_type = other DNA
cttctaaactaaaacctaaacccacttaaaaataatcccaacrattattc

SEQ ID NO: 20620 - DNA, 50 bp, synthetic construct
  source 1..50: mol_type = other DNA
actacacttaaactttcctaacttctcactattcctaaaacrtaccaaac

SEQ ID NO: 20621 - DNA, 50 bp, synthetic construct
  source 1..50: mol_type = other DNA
ctaatcctaactactttattcctctattattactcccctacctaaaccac

SEQ ID NO: 20622 - DNA, 50 bp, synthetic construct
  source 1..50: mol_type = other DNA
tcttaaaataaacaaaaattctaaaaacataacattatacctaattcatc

SEQ ID NO: 20623 - DNA, 50 bp, synthetic construct
  source 1..50: mol_type = other DNA
taacatattttaaaaatacrtctctaaaacaaaaccccaacrtaaccttc

SEQ ID NO: 20624 - DNA, 50 bp, synthetic construct
  source 1..50: mol_type = other DNA
aaaaaaaaataacatattttaaaaatacrtctctaaaacaaaaccccaac

SEQ ID NO: 20625 - DNA, 50 bp, synthetic construct
  source 1..50: mol_type = other DNA
caaaacttccccaatccctacacaacraattttatcatctactaaaaaac

SEQ ID NO: 20626 - DNA, 50 bp, synthetic construct
  source 1..50: mol_type = other DNA
tacatcatctacttaaaataaataactaatttttctcttctccaaaatac

SEQ ID NO: 20627 - DNA, 50 bp, synthetic construct
  source 1..50: mol_type = other DNA
cactctatactcrataactattataaaaataaatcctttcatctatatac

SEQ ID NO: 20628 - DNA, 50 bp, synthetic construct
  source 1..50: mol_type = other DNA
aaaaaaatctattttcataataactaccraatacaaaatacttcttttac

SEQ ID NO: 20629 - DNA, 50 bp, synthetic construct
  source 1..50: mol_type = other DNA
caaatatcaccatcttatacctataacaaaactttaaccaaaactctaac

SEQ ID NO: 20630 - DNA, 50 bp, synthetic construct
  source 1..50: mol_type = other DNA
accatcttatacctataacaaaactttaaccaaaactctaacraaaaacc

SEQ ID NO: 20631 - DNA, 50 bp, synthetic construct
  source 1..50: mol_type = other DNA
ataaaaaaactaaatacaaacaattcataacaaatatactactcttaatc

SEQ ID NO: 20632 - DNA, 50 bp, synthetic construct
  source 1..50: mol_type = other DNA
aactaaatacaaacaattcataacaaatatactactcttaatcrtaaacc

SEQ ID NO: 20633 - DNA, 50 bp, synthetic construct
  source 1..50: mol_type = other DNA
ataacaaatatactactcttaatcrtaaaccrctacctaccctaataacc

SEQ ID NO: 20634 - DNA, 50 bp, synthetic construct
  source 1..50: mol_type = other DNA
tataaaataaaaaacrtaaaaccccaaaaatacctaacctaactccctac

SEQ ID NO: 20635 - DNA, 50 bp, synthetic construct
  source 1..50: mol_type = other DNA
rcttttctcttttttttcactttaaaaccrtcrattactttttctcctcc

SEQ ID NO: 20636 - DNA, 50 bp, synthetic construct
  source 1..50: mol_type = other DNA
crtaacaaaccccrcaaatatatacaaacaaacaatctaaaatcatcccc

SEQ ID NO: 20637 - DNA, 50 bp, synthetic construct
  source 1..50: mol_type = other DNA
caacccrccctacacaaacttaccaacacaaaacatattatcaataatac

SEQ ID NO: 20638 - DNA, 50 bp, synthetic construct
  source 1..50: mol_type = other DNA
raatccrcatcactaacaacatattctatactaacaaatctatacaaaac

SEQ ID NO: 20639 - DNA, 50 bp, synthetic construct
  source 1..50: mol_type = other DNA
atctaaacccctcacaaacaccaaaaaaaatactataaaaaataacaacc

SEQ ID NO: 20640 - DNA, 50 bp, synthetic construct
  source 1..50: mol_type = other DNA
aaactacaatattaacaacrataactatacccaaaaataccaaataatac

SEQ ID NO: 20641 - DNA, 50 bp, synthetic construct
  source 1..50: mol_type = other DNA
aaaaattctaaactcaactcccaactctaacttaactaacacaaaacccc

SEQ ID NO: 20642 - DNA, 50 bp, synthetic construct
  source 1..50: mol_type = other DNA
aattaccrtaaatatccccaataaacraacctaacccataatttataacc

SEQ ID NO: 20643 - DNA, 50 bp, synthetic construct
  source 1..50: mol_type = other DNA
ccctttaaaccctataaataaaattcraccacaaaccataaaccaaatcc

SEQ ID NO: 20644 - DNA, 50 bp, synthetic construct
  source 1..50: mol_type = other DNA
aatcaacractataataacaacaacracraaaacccacaacaaaattacc

SEQ ID NO: 20645 - DNA, 50 bp, synthetic construct
  source 1..50: mol_type = other DNA
tctaaaaaacccccaatataccttaaaccaattcctatattaaaataaac

SEQ ID NO: 20646 - DNA, 50 bp, synthetic construct
  source 1..50: mol_type = other DNA
tctaaaacaccccraaaaacaccacctatattctcacaattctcttcatc

SEQ ID NO: 20647 - DNA, 50 bp, synthetic construct
  source 1..50: mol_type = other DNA
acaccacctatattctcacaattctcttcatcrctattatctacacaatc

SEQ ID NO: 20648 - DNA, 50 bp, synthetic construct
  source 1..50: mol_type = other DNA
taaacctttactttacccaaccacctccatatatacracaaaacaattcc

SEQ ID NO: 20649 - DNA, 50 bp, synthetic construct
  source 1..50: mol_type = other DNA
tacttttttctaattcacacaaaaacactatataaaccaactataatccc

SEQ ID NO: 20650 - DNA, 50 bp, synthetic construct
  source 1..50: mol_type = other DNA
acaaataactttttaaaaactcattatattccatactctataaaatccac

SEQ ID NO: 20651 - DNA, 50 bp, synthetic construct
  source 1..50: mol_type = other DNA
aaaataacttaattttattcctattataaaaacaatatataaaaccaaac

SEQ ID NO: 20652 - DNA, 50 bp, synthetic construct
  source 1..50: mol_type = other DNA
ttttattcctattataaaaacaatatataaaaccaaacrcaataacccac

SEQ ID NO: 20653 - DNA, 50 bp, synthetic construct
  source 1..50: mol_type = other DNA
acactaaactaactcttcaatacattaaaaccttcaacaataattaactc

SEQ ID NO: 20654 - DNA, 50 bp, synthetic construct
  source 1..50: mol_type = other DNA
cataaattcatcrtaaatcttaccctactaaaaaacaaacccataaaaac

SEQ ID NO: 20655 - DNA, 50 bp, synthetic construct
  source 1..50: mol_type = other DNA
cataaacctactcttcaacaaaacaaaacccacrataaactcataataac

SEQ ID NO: 20656 - DNA, 50 bp, synthetic construct
  source 1..50: mol_type = other DNA
aaaatttaccraatacacctctcttaataaaacctaccctacctactctc

SEQ ID NO: 20657 - DNA, 50 bp, synthetic construct
  source 1..50: mol_type = other DNA
ctaactaatccctctacccraaattcttctcccaaacatctacttaactc

SEQ ID NO: 20658 - DNA, 50 bp, synthetic construct
  source 1..50: mol_type = other DNA
aaaaattccraacaaaaaaactaatcaataccaataccccaaacaaaaac

SEQ ID NO: 20659 - DNA, 50 bp, synthetic construct
  source 1..50: mol_type = other DNA
aaaccataatataaaatttaactttaactccaaaaaacataaaatatatc

SEQ ID NO: 20660 - DNA, 50 bp, synthetic construct
  source 1..50: mol_type = other DNA
ctaaaactcaaaaataaccrtaaatcracacaacrtaacttaatcaatcc

SEQ ID NO: 20661 - DNA, 50 bp, synthetic construct
  source 1..50: mol_type = other DNA
taaatcracacaacrtaacttaatcaatccraaatataaataaaactttc

SEQ ID NO: 20662 - DNA, 50 bp, synthetic construct
  source 1..50: mol_type = other DNA
raaaactacacttccrtcatctacaaaataacactaacaaaacctacctc

SEQ ID NO: 20663 - DNA, 50 bp, synthetic construct
  source 1..50: mol_type = other DNA
raaacaaaccttatcaataccattctacaaataacraaaatacaattccc

SEQ ID NO: 20664 - DNA, 50 bp, synthetic construct
  source 1..50: mol_type = other DNA
ccaaacaaataatctcaaaaatcraaaatcaaaaatccaaaaataaaaac

SEQ ID NO: 20665 - DNA, 50 bp, synthetic construct
  source 1..50: mol_type = other DNA
aaaaaaaaactaaaacctaaaacctaaaaaactctaaactcctccaaacc

SEQ ID NO: 20666 - DNA, 50 bp, synthetic construct
  source 1..50: mol_type = other DNA
ataacctcaataaaaactaccaaaatctaaaaattaaacacaaaattccc

SEQ ID NO: 20667 - DNA, 50 bp, synthetic construct
  source 1..50: mol_type = other DNA
attaaccaaactaatctaaaactcctaaccttaaataatccacctacctc

SEQ ID NO: 20668 - DNA, 50 bp, synthetic construct
  source 1..50: mol_type = other DNA
cacttaaaaccaaaaattccaaaccaacctaaccaatataaaaaaacacc

SEQ ID NO: 20669 - DNA, 50 bp, synthetic construct
  source 1..50: mol_type = other DNA
acaaacctaaattcaattcatcactctaacattcacacttaaactttaac

SEQ ID NO: 20670 - DNA, 50 bp, synthetic construct
  source 1..50: mol_type = other DNA
tatatacactttaaccaatacaaaatttattatttttctttacccaaaac

SEQ ID NO: 20671 - DNA, 50 bp, synthetic construct
  source 1..50: mol_type = other DNA
actaactacaaaataaaaatattaaccctaacttataaaataacactatc

SEQ ID NO: 20672 - DNA, 50 bp, synthetic construct
  source 1..50: mol_type = other DNA
taaaaaataaaactacttaaacaactccaaacaacaacaatatactaatc

SEQ ID NO: 20673 - DNA, 50 bp, synthetic construct
  source 1..50: mol_type = other DNA
tttcccatccaaatcaacactctcttattttctattttaaatcctatttc

SEQ ID NO: 20674 - DNA, 50 bp, synthetic construct
  source 1..50: mol_type = other DNA
aacacaataatacrtccctatcattaaaaataaaatcaaaataaaaacac

SEQ ID NO: 20675 - DNA, 50 bp, synthetic construct
  source 1..50: mol_type = other DNA
ttctcaaatacttaataaactacaatatcccaattaacattaacttccac

SEQ ID NO: 20676 - DNA, 50 bp, synthetic construct
  source 1..50: mol_type = other DNA
ctttcaactcattttaaatactcaaacttaccaactctaaactaataaac

SEQ ID NO: 20677 - DNA, 50 bp, synthetic construct
  source 1..50: mol_type = other DNA
aaaaatcctaacrtaccctccactctattcacttaaaattatctaatttc

SEQ ID NO: 20678 - DNA, 50 bp, synthetic construct
  source 1..50: mol_type = other DNA
actaaaaatacatatcaactaatactttcaaaaaatatcaactccacctc

SEQ ID NO: 20679 - DNA, 50 bp, synthetic construct
  source 1..50: mol_type = other DNA
tttaaaccaaacactcaacataatacttaacatacaataaacactcaatc

SEQ ID NO: 20680 - DNA, 50 bp, synthetic construct
  source 1..50: mol_type = other DNA
aactaaaaaaactatcattaatattaaaaccttaccttacaaaaaaaatc

SEQ ID NO: 20681 - DNA, 50 bp, synthetic construct
  source 1..50: mol_type = other DNA
ttccctactctacataaatataacttccctatcacrtactaaattaaacc

SEQ ID NO: 20682 - DNA, 50 bp, synthetic construct
  source 1..50: mol_type = other DNA
catttccttacctcrttccctactctacataaatataacttccctatcac

SEQ ID NO: 20683 - DNA, 50 bp, synthetic construct
  source 1..50: mol_type = other DNA
actcaattcaacacrtaataaaaaaaccacatttatacaaaacaaaaaac

SEQ ID NO: 20684 - DNA, 50 bp, synthetic construct
  source 1..50: mol_type = other DNA
tctaaaaaaaatcccrctacctaaaactattcctaacaactactaaaaac

SEQ ID NO: 20685 - DNA, 50 bp, synthetic construct
  source 1..50: mol_type = other DNA
tccttcaaacaacaacctaacttaaaataaaatccaaaatcaaacaaccc

SEQ ID NO: 20686 - DNA, 50 bp, synthetic construct
  source 1..50: mol_type = other DNA
ttacccacctttacctaaactaacctttaaaacttacataactataaaac

SEQ ID NO: 20687 - DNA, 50 bp, synthetic construct
  source 1..50: mol_type = other DNA
cctttacctaaactaacctttaaaacttacataactataaaacrtaccac

SEQ ID NO: 20688 - DNA, 50 bp, synthetic construct
  source 1..50: mol_type = other DNA
aacctttaaaacttacataactataaaacrtaccacrataatcttaaacc

SEQ ID NO: 20689 - DNA, 50 bp, synthetic construct
  source 1..50: mol_type = other DNA
aattaaaaacaaccacatttcaactcaacttaaaaaacaaatttacracc

SEQ ID NO: 20690 - DNA, 50 bp, synthetic construct
  source 1..50: mol_type = other DNA
aaataattaaaaacaaccacatttcaactcaacttaaaaaacaaatttac

SEQ ID NO: 20691 - DNA, 50 bp, synthetic construct
  source 1..50: mol_type = other DNA
acrtaaccacactactaactaaactactaaaatacctaaactttactaac

SEQ ID NO: 20692 - DNA, 50 bp, synthetic construct
  source 1..50: mol_type = other DNA
aaaaaaattttccaaatactcaaacrccaaacttacracrcctataatcc

SEQ ID NO: 20693 - DNA, 50 bp, synthetic construct
  source 1..50: mol_type = other DNA
aaacttaacttaccaaaaaaattttccaaatactcaaacrccaaacttac

SEQ ID NO: 20694 - DNA, 50 bp, synthetic construct
  source 1..50: mol_type = other DNA
crtttaaacacttaaaaaattcctctaacaaaccaaacccttcctttccc

SEQ ID NO: 20695 - DNA, 50 bp, synthetic construct
  source 1..50: mol_type = other DNA
cctcttccaacaacctctatctttattctacaaaatccaaaaaatcaccc

SEQ ID NO: 20696 - DNA, 50 bp, synthetic construct
  source 1..50: mol_type = other DNA
aaaaaaaacctctacccactcaaacaaaaattttcctacaccctacatcc

SEQ ID NO: 20697 - DNA, 50 bp, synthetic construct
  source 1..50: mol_type = other DNA
taccccrtttactcatactattccctcttattaaaacatcttcatcccac

SEQ ID NO: 20698 - DNA, 50 bp, synthetic construct
  source 1..50: mol_type = other DNA
ctatataaaaacttaaaacccaactatatccataactattaattcacctc

SEQ ID NO: 20699 - DNA, 50 bp, synthetic construct
  source 1..50: mol_type = other DNA
acrttaaaataaaatttctatacctttctcctattaatataccctttatc

SEQ ID NO: 20700 - DNA, 50 bp, synthetic construct
  source 1..50: mol_type = other DNA
catctataccccactaaatcattctcctacaattccctcatactatacac

SEQ ID NO: 20701 - DNA, 50 bp, synthetic construct
  source 1..50: mol_type = other DNA
actaaaaaaactcatcttctattaattccaaatccctaaaactaatttac

SEQ ID NO: 20702 - DNA, 50 bp, synthetic construct
  source 1..50: mol_type = other DNA
acacatatcccctcaaaccccacaaaactcaaaaaaacaaaataaccttc

SEQ ID NO: 20703 - DNA, 50 bp, synthetic construct
  source 1..50: mol_type = other DNA
ctaacctttttccaacctctacaaatccctcattcttatacttctaatcc

SEQ ID NO: 20704 - DNA, 50 bp, synthetic construct
  source 1..50: mol_type = other DNA
tctcrctatataaccacccttaatctccaataacctccaaaaaacaaaac

SEQ ID NO: 20705 - DNA, 50 bp, synthetic construct
  source 1..50: mol_type = other DNA
aactacaataacaatccaatccaaaaatatttaccaaaaatttattccrc

SEQ ID NO: 20706 - DNA, 50 bp, synthetic construct
  source 1..50: mol_type = other DNA
acctaactcttccattatcctacatccaaaatactcttatctcacaaacc

SEQ ID NO: 20707 - DNA, 50 bp, synthetic construct
  source 1..50: mol_type = other DNA
tacccttctcaacttctaaaataactaaaaccaaaaatacatcccatcac

SEQ ID NO: 20708 - DNA, 50 bp, synthetic construct
  source 1..50: mol_type = other DNA
actaaaacatatattaactaaaaatacacctattaatccaaaattacttc

SEQ ID NO: 20709 - DNA, 50 bp, synthetic construct
  source 1..50: mol_type = other DNA
ttaaactaacaaatatatcttcaaccaacacatatcccaacatctcccac

SEQ ID NO: 20710 - DNA, 50 bp, synthetic construct
  source 1..50: mol_type = other DNA
aaaatcccaaaaataaaaaactattaacctccctctaataaataaaaacc

SEQ ID NO: 20711 - DNA, 50 bp, synthetic construct
  source 1..50: mol_type = other DNA
cctcctatttacttatccttacattctccccctcctcttaaatctttctc

SEQ ID NO: 20712 - DNA, 50 bp, synthetic construct
  source 1..50: mol_type = other DNA
ctatcccaattcctaacacrtaaaacaaattcaacaaatattaataaaac

SEQ ID NO: 20713 - DNA, 50 bp, synthetic construct
  source 1..50: mol_type = other DNA
tattaccratctatattccrtttcattaacacttactaaacttattccac

SEQ ID NO: 20714 - DNA, 50 bp, synthetic construct
  source 1..50: mol_type = other DNA
aatcaacaatttaatactttaatattattttacatatacacttatctccc

SEQ ID NO: 20715 - DNA, 50 bp, synthetic construct
  source 1..50: mol_type = other DNA
ctaaacctataacaacttcaatttcttaacaaaataaactcaacccaacc

SEQ ID NO: 20716 - DNA, 50 bp, synthetic construct
  source 1..50: mol_type = other DNA
aaaatcccaaactccaaaaataaacaacaactaaaaaaccttccttctcc

SEQ ID NO: 20717 - DNA, 50 bp, synthetic construct
  source 1..50: mol_type = other DNA
aaaaaattacccaaactctaccactaactctatacrtaaactttaacaac

SEQ ID NO: 20718 - DNA, 50 bp, synthetic construct
  source 1..50: mol_type = other DNA
tcccctttcrccatatacataaacataccaaattcacaaaatccctaaac

SEQ ID NO: 20719 - DNA, 50 bp, synthetic construct
  source 1..50: mol_type = other DNA
aaaaaacccaacactaccaaccacatcctataacrattaccctaaaaaac

SEQ ID NO: 20720 - DNA, 50 bp, synthetic construct
  source 1..50: mol_type = other DNA
aatctccraatactactcraaaattatttaccttaaacatttcccttccc

SEQ ID NO: 20721 - DNA, 50 bp, synthetic construct
  source 1..50: mol_type = other DNA
acatatattactacrcaacttatacacaaaaactcacrtcaacactactc

SEQ ID NO: 20722 - DNA, 50 bp, synthetic construct
  source 1..50: mol_type = other DNA
taaacatcaaaataatttccaatttaaaactattaacraacaatactaac

SEQ ID NO: 20723 - DNA, 50 bp, synthetic construct
  source 1..50: mol_type = other DNA
ttaaaactattaacraacaatactaacrtaaacttttatatacaaactac

SEQ ID NO: 20724 - DNA, 50 bp, synthetic construct
  source 1..50: mol_type = other DNA
ataatttaacaatttcttaaacaattaaacatacacctaccrtacaacac

SEQ ID NO: 20725 - DNA, 50 bp, synthetic construct
  source 1..50: mol_type = other DNA
ttccaacctaaaacacaaaaaaatacctatttaaccccratctcataaac

SEQ ID NO: 20726 - DNA, 50 bp, synthetic construct
  source 1..50: mol_type = other DNA
accctaattcctaaaaccaaaataaatcctaactttatactataaaaacc

SEQ ID NO: 20727 - DNA, 50 bp, synthetic construct
  source 1..50: mol_type = other DNA
tattcattatctcaaaaattcaactaatcactatcttaccttaaaaaatc

SEQ ID NO: 20728 - DNA, 50 bp, synthetic construct
  source 1..50: mol_type = other DNA
attaaaaaatattccctttacaacraaaaataaaactttaaaactccttc

SEQ ID NO: 20729 - DNA, 50 bp, synthetic construct
  source 1..50: mol_type = other DNA
aatattccctttacaacraaaaataaaactttaaaactccttcraaaaac

SEQ ID NO: 20730 - DNA, 50 bp, synthetic construct
  source 1..50: mol_type = other DNA
acctaaaataaacracaaccataacaaaaaatccacaacaaattaatcac

SEQ ID NO: 20731 - DNA, 50 bp, synthetic construct
  source 1..50: mol_type = other DNA
accataacaaaaaatccacaacaaattaatcacraaacctaaaccaaatc

SEQ ID NO: 20732 - DNA, 50 bp, synthetic construct
  source 1..50: mol_type = other DNA
aattaatcacraaacctaaaccaaatcracaaaattaccaaaaaaatacc

SEQ ID NO: 20733 - DNA, 50 bp, synthetic construct
  source 1..50: mol_type = other DNA
aaacttatcttctaattccaatacactccaactaaaaaccttactccatc

SEQ ID NO: 20734 - DNA, 50 bp, synthetic construct
  source 1..50: mol_type = other DNA
aacatttctccctacaataaatacaatattaaactttatcaacaaaaaac

SEQ ID NO: 20735 - DNA, 50 bp, synthetic construct
  source 1..50: mol_type = other DNA
aacctcatcaaaatcactaaaactatccataacactaaaacacaaaaacc

SEQ ID NO: 20736 - DNA, 50 bp, synthetic construct
  source 1..50: mol_type = other DNA
aaaaatataattaataaacccaaccctacccaacctcctaaacttaaccc

SEQ ID NO: 20737 - DNA, 50 bp, synthetic construct
  source 1..50: mol_type = other DNA
acccaacctcctaaacttaacccrctactataatcaaaaacataaaaacc

SEQ ID NO: 20738 - DNA, 50 bp, synthetic construct
  source 1..50: mol_type = other DNA
ctaaacttaacccrctactataatcaaaaacataaaaaccraaccaaaac

SEQ ID NO: 20739 - DNA, 50 bp, synthetic construct
  source 1..50: mol_type = other DNA
cctaaactaaaataaaccctccaaacaaaaccaacattacctcaatcctc

SEQ ID NO: 20740 - DNA, 50 bp, synthetic construct
  source 1..50: mol_type = other DNA
ttacctcaatcctcraaaatacatcrctctacttaaaaaaataaccacac

SEQ ID NO: 20741 - DNA, 50 bp, synthetic construct
  source 1..50: mol_type = other DNA
caaatctaatcaaaaaactacttcctaacccttaataaaaacaactaaac

SEQ ID NO: 20742 - DNA, 50 bp, synthetic construct
  source 1..50: mol_type = other DNA
attttctaaaaccaataatctaaccactataaaaacrtaactaaaaatac

SEQ ID NO: 20743 - DNA, 50 bp, synthetic construct
  source 1..50: mol_type = other DNA
taacraaaattctcaacttaatatctataaacactaatccacaaaactcc

SEQ ID NO: 20744 - DNA, 50 bp, synthetic construct
  source 1..50: mol_type = other DNA
ttccraaactttataaaccaatatctataaacaccaaactaaaaaccccc

SEQ ID NO: 20745 - DNA, 50 bp, synthetic construct
  source 1..50: mol_type = other DNA
aacattaactaaccrataacaataaaattaacatttatacaaatctttac

SEQ ID NO: 20746 - DNA, 50 bp, synthetic construct
  source 1..50: mol_type = other DNA
aaaaaactataaacrtaaaaatctatacaaatattaacttcattatcacc

SEQ ID NO: 20747 - DNA, 50 bp, synthetic construct
  source 1..50: mol_type = other DNA
acaacctctatacaaatctctaaccacrttccataaacttctttattttc

SEQ ID NO: 20748 - DNA, 50 bp, synthetic construct
  source 1..50: mol_type = other DNA
taaacacraattcracaaaaaaactttccaaataaaaataacacaccacc

SEQ ID NO: 20749 - DNA, 50 bp, synthetic construct
  source 1..50: mol_type = other DNA
aacacaccaccrataacaaaaatatacaaactaaaaaatattcaaaattc

SEQ ID NO: 20750 - DNA, 50 bp, synthetic construct
  source 1..50: mol_type = other DNA
tattctccctaaaaaaactaattaccataaaaacaaccrtctaaaaaaac

SEQ ID NO: 20751 - DNA, 50 bp, synthetic construct
  source 1..50: mol_type = other DNA
aaactaattaccataaaaacaaccrtctaaaaaaacrcaacctacactac

SEQ ID NO: 20752 - DNA, 50 bp, synthetic construct
  source 1..50: mol_type = other DNA
aaaaaaatcaaaaactacataatctaatcctcaatccacactccaacaac

SEQ ID NO: 20753 - DNA, 50 bp, synthetic construct
  source 1..50: mol_type = other DNA
aaaaatcaaaaactacataatctaatcctcaatccacactccaacaacrc

SEQ ID NO: 20754 - DNA, 50 bp, synthetic construct
  source 1..50: mol_type = other DNA
attatctcaattaaccctaacaacaaccctaaaaaacaaacataataatc

SEQ ID NO: 20755 - DNA, 50 bp, synthetic construct
  source 1..50: mol_type = other DNA
racatttaccatccrtataacattaccaaaccactaaaatttattttctc

SEQ ID NO: 20756 - DNA, 50 bp, synthetic construct
  source 1..50: mol_type = other DNA
raaaaaataaacctcaataacttaataatatcacacraataataaatacc

SEQ ID NO: 20757 - DNA, 50 bp, synthetic construct
  source 1..50: mol_type = other DNA
taattcccctataaactacaacracaaaaactctaaccttaaatctaaac

SEQ ID NO: 20758 - DNA, 50 bp, synthetic construct
  source 1..50: mol_type = other DNA
tcacacraataataaataccrcrcctaaattcaaaaccaaaacttttacc

SEQ ID NO: 20759 - DNA, 50 bp, synthetic construct
  source 1..50: mol_type = other DNA
aaaaacactcctttaatctcataaaataaaaaactaaaaatctattcaac

SEQ ID NO: 20760 - DNA, 50 bp, synthetic construct
  source 1..50: mol_type = other DNA
acataaatatccctattaacttcaaataaccctaacaaaaatactaaaac

SEQ ID NO: 20761 - DNA, 50 bp, synthetic construct
  source 1..50: mol_type = other DNA
aaaactttttatcaacaccaattttcaaaaaataccctaattataaaacc

SEQ ID NO: 20762 - DNA, 50 bp, synthetic construct
  source 1..50: mol_type = other DNA
caacccrctccaattcccttacaaactataaaaacattattcttttactc

SEQ ID NO: 20763 - DNA, 50 bp, synthetic construct
  source 1..50: mol_type = other DNA
atacattttacaaacctctaaatacaaaaaaattctctaaatccccattc

SEQ ID NO: 20764 - DNA, 50 bp, synthetic construct
  source 1..50: mol_type = other DNA
actaaattaaaatcctaaaaactcaatcctaaaaactcraaaatcraaac

SEQ ID NO: 20765 - DNA, 50 bp, synthetic construct
  source 1..50: mol_type = other DNA
tctctactaaattaaaatcctaaaaactcaatcctaaaaactcraaaatc

SEQ ID NO: 20766 - DNA, 50 bp, synthetic construct
  source 1..50: mol_type = other DNA
cracrcctctctactaaattaaaatcctaaaaactcaatcctaaaaactc

SEQ ID NO: 20767 - DNA, 50 bp, synthetic construct
  source 1..50: mol_type = other DNA
attaaaaataacatacacttaacraaaacccccaaaactattctcraatc

SEQ ID NO: 20768 - DNA, 50 bp, synthetic construct
  source 1..50: mol_type = other DNA
aactctaaaaatcctcrctaaatatataccattcccaatcccttatatac

SEQ ID NO: 20769 - DNA, 50 bp, synthetic construct
  source 1..50: mol_type = other DNA
ttaacaacccaactataaattacccaaaacccaccraaaaacraaatctc

SEQ ID NO: 20770 - DNA, 50 bp, synthetic construct
  source 1..50: mol_type = other DNA
acaaacaaacaataatttccaaccctaaaaaatcaacrtctaaaaacccc

SEQ ID NO: 20771 - DNA, 50 bp, synthetic construct
  source 1..50: mol_type = other DNA
actttcaaaaactctcaaactactacttcraacaacacaattaacracac

SEQ ID NO: 20772 - DNA, 50 bp, synthetic construct
  source 1..50: mol_type = other DNA
ctacaactttcaaaaactctcaaactactacttcraacaacacaattaac

SEQ ID NO: 20773 - DNA, 50 bp, synthetic construct
  source 1..50: mol_type = other DNA
actattcacaaaataactacaactttcaaaaactctcaaactactacttc

SEQ ID NO: 20774 - DNA, 50 bp, synthetic construct
  source 1..50: mol_type = other DNA
aacctaaaaacccttaaaaattacaattatcttataaacaacatatttac

SEQ ID NO: 20775 - DNA, 50 bp, synthetic construct
  source 1..50: mol_type = other DNA
tcctaaataaaataaatttaatttacatctatcctactaacctataatcc

SEQ ID NO: 20776 - DNA, 50 bp, synthetic construct
  source 1..50: mol_type = other DNA
aaaaaacraatcacctaaaatcaaaaactccaaacccacttaaccaacac

SEQ ID NO: 20777 - DNA, 50 bp, synthetic construct
  source 1..50: mol_type = other DNA
aacctaaaaaaatacaaataaataaacctataaaccactaaacaaatatc

SEQ ID NO: 20778 - DNA, 50 bp, synthetic construct
  source 1..50: mol_type = other DNA
aaacacraatcactatacctaacctaacattaaaatcttaaactcatttc

SEQ ID NO: 20779 - DNA, 50 bp, synthetic construct
  source 1..50: mol_type = other DNA
caaaacraaataaacttaaaaccctaataccaaaccaaacacaataactc

SEQ ID NO: 20780 - DNA, 50 bp, synthetic construct
  source 1..50: mol_type = other DNA
tccaacaaccactaacaattaaattattcaattataacttcattacaatc

SEQ ID NO: 20781 - DNA, 50 bp, synthetic construct
  source 1..50: mol_type = other DNA
caataacctaaatcctttacaaaatcaacacatataaaaaaaacaatacc

SEQ ID NO: 20782 - DNA, 50 bp, synthetic construct
  source 1..50: mol_type = other DNA
atccccccaccacccctacattactataaaatttaaattaaacaaaaccc

SEQ ID NO: 20783 - DNA, 50 bp, synthetic construct
  source 1..50: mol_type = other DNA
cccattaaaatctaaaaaccctataactcctctaataattcccaaacctc

SEQ ID NO: 20784 - DNA, 50 bp, synthetic construct
  source 1..50: mol_type = other DNA
aaaaacaaacccctcaaaccccaactaaataaaacracttaataccraac

SEQ ID NO: 20785 - DNA, 50 bp, synthetic construct
  source 1..50: mol_type = other DNA
aacaaaaaacaaacccctcaaaccccaactaaataaaacracttaatacc

SEQ ID NO: 20786 - DNA, 50 bp, synthetic construct
  source 1..50: mol_type = other DNA
tttaaacrtaaaacaaaaaacaaacccctcaaaccccaactaaataaaac

SEQ ID NO: 20787 - DNA, 50 bp, synthetic construct
  source 1..50: mol_type = other DNA
cattaaacaataatattatacaaactccaacaaataaaaactaccrtatc

SEQ ID NO: 20788 - DNA, 50 bp, synthetic construct
  source 1..50: mol_type = other DNA
cttccacrattcccaaaaaaactaaacttactaaaaccaaaacaaaaacc

SEQ ID NO: 20789 - DNA, 50 bp, synthetic construct
  source 1..50: mol_type = other DNA
aaaaactaaacttactaaaaccaaaacaaaaaccrcrccaattcctcatc

SEQ ID NO: 20790 - DNA, 50 bp, synthetic construct
  source 1..50: mol_type = other DNA
aaaattacraaacctctactctactttcttaatctaaacrccataactac

SEQ ID NO: 20791 - DNA, 50 bp, synthetic construct
  source 1..50: mol_type = other DNA
aaattatacttctaaatctcctcccaactaaaaataaacaccracacctc

SEQ ID NO: 20792 - DNA, 50 bp, synthetic construct
  source 1..50: mol_type = other DNA
cratacrcaaattatacttctaaatctcctcccaactaaaaataaacacc

SEQ ID NO: 20793 - DNA, 50 bp, synthetic construct
  source 1..50: mol_type = other DNA
aaccatttaataatattataaaccttacratcaataaccaaccacctatc

SEQ ID NO: 20794 - DNA, 50 bp, synthetic construct
  source 1..50: mol_type = other DNA
atcattaaccrcaaaatttacaacatcaccaaataatccatccaacaccc

SEQ ID NO: 20795 - DNA, 50 bp, synthetic construct
  source 1..50: mol_type = other DNA
caaaatttacaacatcaccaaataatccatccaacacccraaaaaccaac

SEQ ID NO: 20796 - DNA, 50 bp, synthetic construct
  source 1..50: mol_type = other DNA
raaatttatctaaaaacaaaaactccccaaaaaaaacrctcraaccaaac

SEQ ID NO: 20797 - DNA, 50 bp, synthetic construct
  source 1..50: mol_type = other DNA
ctaaataaaaaatacraaacaaacrcraaatcccacacctaactacctac

SEQ ID NO: 20798 - DNA, 50 bp, synthetic construct
  source 1..50: mol_type = other DNA
ccattaaaaaacttcttaaacaaaaatcccaacaaaaacratctccracc

SEQ ID NO: 20799 - DNA, 50 bp, synthetic construct
  source 1..50: mol_type = other DNA
ataaccattaaaaaacttcttaaacaaaaatcccaacaaaaacratctcc

SEQ ID NO: 20800 - DNA, 50 bp, synthetic construct
  source 1..50: mol_type = other DNA
rataaatttaacaacactaaactaacttaacaacaaatccrtctacactc

SEQ ID NO: 20801 - DNA, 50 bp, synthetic construct
  source 1..50: mol_type = other DNA
ctaaactaacttaacaacaaatccrtctacactcraaattactctcraac

SEQ ID NO: 20802 - DNA, 50 bp, synthetic construct
  source 1..50: mol_type = other DNA
aactaaaatccccratacraataactaatacraaataatcactaaaccac

SEQ ID NO: 20803 - DNA, 50 bp, synthetic construct
  source 1..50: mol_type = other DNA
aataaataccaaaatttcaaactaaaatccccratacraataactaatac

SEQ ID NO: 20804 - DNA, 50 bp, synthetic construct
  source 1..50: mol_type = other DNA
aactacatccttaaataaataccaaaatttcaaactaaaatccccratac

SEQ ID NO: 20805 - DNA, 50 bp, synthetic construct
  source 1..50: mol_type = other DNA
ataccaactacatccttaaataaataccaaaatttcaaactaaaatcccc

SEQ ID NO: 20806 - DNA, 50 bp, synthetic construct
  source 1..50: mol_type = other DNA
tctatctcataaaaatataataatctcrtcatttctaatcctactccaac

SEQ ID NO: 20807 - DNA, 50 bp, synthetic construct
  source 1..50: mol_type = other DNA
taaacccaataataacatctttcttcaattctaaatctatttacaacccc

SEQ ID NO: 20808 - DNA, 50 bp, synthetic construct
  source 1..50: mol_type = other DNA
cccaaaacttcctatcttctaaaataaaacttttaaaacataaaatacac

SEQ ID NO: 20809 - DNA, 50 bp, synthetic construct
  source 1..50: mol_type = other DNA
ctaaacccatcacaatacaatcattcctaacacaaaactaaaaacaaatc

SEQ ID NO: 20810 - DNA, 50 bp, synthetic construct
  source 1..50: mol_type = other DNA
tcaaaataaccattcttaaaacaatcctcraaatcaaaaaaaccattctc

SEQ ID NO: 20811 - DNA, 50 bp, synthetic construct
  source 1..50: mol_type = other DNA
aaccaaatttaatacctcaaaacaataaaaaatacctacraaactaatcc

SEQ ID NO: 20812 - DNA, 50 bp, synthetic construct
  source 1..50: mol_type = other DNA
tacaaaacacattcatatatatcacttcatttcatactcraatcaacccc

SEQ ID NO: 20813 - DNA, 50 bp, synthetic construct
  source 1..50: mol_type = other DNA
tcctattactacctctaatctcttccctttaatactacratacttctctc

SEQ ID NO: 20814 - DNA, 50 bp, synthetic construct
  source 1..50: mol_type = other DNA
aaaaatttattccacctttcaacctactcctatattattcttataaaaac

SEQ ID NO: 20815 - DNA, 50 bp, synthetic construct
  source 1..50: mol_type = other DNA
tccacctttcaacctactcctatattattcttataaaaacrcaacaaatc

SEQ ID NO: 20816 - DNA, 50 bp, synthetic construct
  source 1..50: mol_type = other DNA
tcttataaaaacrcaacaaatcraaaataaaactctaacctcctttacac

SEQ ID NO: 20817 - DNA, 50 bp, synthetic construct
  source 1..50: mol_type = other DNA
accctcaaaataatacataaaccctatattataaaaaaaactctcactac

SEQ ID NO: 20818 - DNA, 50 bp, synthetic construct
  source 1..50: mol_type = other DNA
aaaaaaaaatcaacatccctatcttactcttcatttccactaaaaaatac

SEQ ID NO: 20819 - DNA, 50 bp, synthetic construct
  source 1..50: mol_type = other DNA
cctatacatctccacactcttaaatcacttattccataaaattctaatcc

SEQ ID NO: 20820 - DNA, 50 bp, synthetic construct
  source 1..50: mol_type = other DNA
tatttataaccrtacccatatcctctaaaaaacaaaactaatctctaatc

SEQ ID NO: 20821 - DNA, 50 bp, synthetic construct
  source 1..50: mol_type = other DNA
caattactcrccatccactaaacacctaataccaaaatttatttataacc

SEQ ID NO: 20822 - DNA, 50 bp, synthetic construct
  source 1..50: mol_type = other DNA
aaccataaaaataacttacatacatcaaccaaacatctttaccaaacttc

SEQ ID NO: 20823 - DNA, 50 bp, synthetic construct
  source 1..50: mol_type = other DNA
aatttaataaaaatacctaactaatatatacaaaccactcccataacccc

SEQ ID NO: 20824 - DNA, 50 bp, synthetic construct
  source 1..50: mol_type = other DNA
taaaaatacctaactaatatatacaaaccactcccataaccccrtaactc

SEQ ID NO: 20825 - DNA, 50 bp, synthetic construct
  source 1..50: mol_type = other DNA
taaaatcaaaatatatacaactataaaatcctaaatccatttattccctc

SEQ ID NO: 20826 - DNA, 50 bp, synthetic construct
  source 1..50: mol_type = other DNA
tcrtaaaccatcttattaaaccccrttacaaacactatatttattacaac

SEQ ID NO: 20827 - DNA, 50 bp, synthetic construct
  source 1..50: mol_type = other DNA
caacraacaaaacaaatacaaaccttcccaactaaaatttatactccaac

SEQ ID NO: 20828 - DNA, 50 bp, synthetic construct
  source 1..50: mol_type = other DNA
caaaacaaatacaaaccttcccaactaaaatttatactccaacraaaaac

SEQ ID NO: 20829 - DNA, 50 bp, synthetic construct
  source 1..50: mol_type = other DNA
ctattaaatcttcataacaatcatcaaaattcrtcatcaaactacrtaac

SEQ ID NO: 20830 - DNA, 50 bp, synthetic construct
  source 1..50: mol_type = other DNA
ttaccctattaaatcttcataacaatcatcaaaattcrtcatcaaactac

SEQ ID NO: 20831 - DNA, 50 bp, synthetic construct
  source 1..50: mol_type = other DNA
cttccctaaatcattaccctattaaatcttcataacaatcatcaaaattc

SEQ ID NO: 20832 - DNA, 50 bp, synthetic construct
  source 1..50: mol_type = other DNA
ccttacccataatcaatataacaactttccraacaaacctaatacraacc

SEQ ID NO: 20833 - DNA, 50 bp, synthetic construct
  source 1..50: mol_type = other DNA
caactccttacccataatcaatataacaactttccraacaaacctaatac

SEQ ID NO: 20834 - DNA, 50 bp, synthetic construct
  source 1..50: mol_type = other DNA
aacaatctattaaatcaactccttacccataatcaatataacaactttcc

SEQ ID NO: 20835 - DNA, 50 bp, synthetic construct
  source 1..50: mol_type = other DNA
aaaccaaaatcaaatccaaatccatctacctctaaaaactcttttctcac

SEQ ID NO: 20836 - DNA, 50 bp, synthetic construct
  source 1..50: mol_type = other DNA
raaccctaccttaaccttaattactactcaaccatttccaaaaaactctc

SEQ ID NO: 20837 - DNA, 50 bp, synthetic construct
  source 1..50: mol_type = other DNA
raaaaccctctaaaaataactaaacaacaaccaaaatcaaaacaaaactc

SEQ ID NO: 20838 - DNA, 50 bp, synthetic construct
  source 1..50: mol_type = other DNA
aaatcaaaacaaaactcrtcatctatctactcccttaaaattaaaacctc

SEQ ID NO: 20839 - DNA, 50 bp, synthetic construct
  source 1..50: mol_type = other DNA
actcrtcatctatctactcccttaaaattaaaacctcractacaaaattc

SEQ ID NO: 20840 - DNA, 50 bp, synthetic construct
  source 1..50: mol_type = other DNA
aaaaaactttttcaaacccaaccctaaaccctaactttaacaactcctcc

SEQ ID NO: 20841 - DNA, 50 bp, synthetic construct
  source 1..50: mol_type = other DNA
aactttactaactctaaataaaataatcaatccccaccaaaacctcaacc

SEQ ID NO: 20842 - DNA, 50 bp, synthetic construct
  source 1..50: mol_type = other DNA
aaaaaaactaaacccacratttcttaaaaaatacctataacccactaacc

SEQ ID NO: 20843 - DNA, 50 bp, synthetic construct
  source 1..50: mol_type = other DNA
ccatcccttttcractcractaataaatcacaaacattttttaaaaaacc

SEQ ID NO: 20844 - DNA, 50 bp, synthetic construct
  source 1..50: mol_type = other DNA
taaatcacaaacattttttaaaaaaccrtaaacccaattttctcctacac

SEQ ID NO: 20845 - DNA, 50 bp, synthetic construct
  source 1..50: mol_type = other DNA
tatatatcctcaaccaaaattcactaatcttaacattttaccacatttac

SEQ ID NO: 20846 - DNA, 50 bp, synthetic construct
  source 1..50: mol_type = other DNA
tacrtttttcctctttatatatatacaattaccttttaaaaataaactac

SEQ ID NO: 20847 - DNA, 50 bp, synthetic construct
  source 1..50: mol_type = other DNA
taatataatcaaatatctaatccatattcattttttctcattcaactccc

SEQ ID NO: 20848 - DNA, 50 bp, synthetic construct
  source 1..50: mol_type = other DNA
attacaatttttatatcattttaatctcttttaatctaaaccatacttcc

SEQ ID NO: 20849 - DNA, 50 bp, synthetic construct
  source 1..50: mol_type = other DNA
tttcctctttattctactataccttttctaacttaaccaaaactcaacac

SEQ ID NO: 20850 - DNA, 50 bp, synthetic construct
  source 1..50: mol_type = other DNA
ttaacatatacaataataacctaaatcctcctaaactttttttcaaaaac

SEQ ID NO: 20851 - DNA, 50 bp, synthetic construct
  source 1..50: mol_type = other DNA
tttttttatttacttcatcacaacacatttccaataccaaaataatattc

SEQ ID NO: 20852 - DNA, 50 bp, synthetic construct
  source 1..50: mol_type = other DNA
taaataatataatttatacaccatacaaaacactcaactcacraacaatc

SEQ ID NO: 20853 - DNA, 50 bp, synthetic construct
  source 1..50: mol_type = other DNA
aaacaaatcraaaaataataaccctccaaaaaaacrcaccaaacaaacac

SEQ ID NO: 20854 - DNA, 50 bp, synthetic construct
  source 1..50: mol_type = other DNA
acataaactacctttaaacaaatcraaaaataataaccctccaaaaaaac

SEQ ID NO: 20855 - DNA, 50 bp, synthetic construct
  source 1..50: mol_type = other DNA
tataacatacctacaccaacacaaaaacccaaataactattaccattaac

SEQ ID NO: 20856 - DNA, 50 bp, synthetic construct
  source 1..50: mol_type = other DNA
aatatcccctatctaaaaccttataaaataacttttactttttatacccc

SEQ ID NO: 20857 - DNA, 50 bp, synthetic construct
  source 1..50: mol_type = other DNA
aactcctacacttctaataacttttatcctttaaaccaactaatcattcc

SEQ ID NO: 20858 - DNA, 50 bp, synthetic construct
  source 1..50: mol_type = other DNA
ataaaaaaacaaactaaaattaccaactaccttattctaatctaacaaac

SEQ ID NO: 20859 - DNA, 50 bp, synthetic construct
  source 1..50: mol_type = other DNA
aaaaaaactaaatcctaaaaaatccatccctccacaccctaacaaaaaac

SEQ ID NO: 20860 - DNA, 50 bp, synthetic construct
  source 1..50: mol_type = other DNA
aaaaacraactacatataaaatataacttatcccctcttccacccaaacc

SEQ ID NO: 20861 - DNA, 50 bp, synthetic construct
  source 1..50: mol_type = other DNA
aaaaataattaaccaccaataaaatctacaaccracaaaccaaaaacccc

SEQ ID NO: 20862 - DNA, 50 bp, synthetic construct
  source 1..50: mol_type = other DNA
aaactaataaccaactcaaaaataattaaccaccaataaaatctacaacc

SEQ ID NO: 20863 - DNA, 50 bp, synthetic construct
  source 1..50: mol_type = other DNA
cacttaacaaaaataaactatatcctacttccaaattctaaacaaaaacc

SEQ ID NO: 20864 - DNA, 50 bp, synthetic construct
  source 1..50: mol_type = other DNA
aaaattattcctatccaattaccctcaatctttaaaaaaccccaaaacac

SEQ ID NO: 20865 - DNA, 50 bp, synthetic construct
  source 1..50: mol_type = other DNA
cctatccaattaccctcaatctttaaaaaaccccaaaacacractattac

SEQ ID NO: 20866 - DNA, 50 bp, synthetic construct
  source 1..50: mol_type = other DNA
aattaccctcaatctttaaaaaaccccaaaacacractattacrtcaaac

SEQ ID NO: 20867 - DNA, 50 bp, synthetic construct
  source 1..50: mol_type = other DNA
ctcaatctttaaaaaaccccaaaacacractattacrtcaaacraaaaac

SEQ ID NO: 20868 - DNA, 50 bp, synthetic construct
  source 1..50: mol_type = other DNA
actatacacctaccraatactaaaaccaatttcaaacaaacttaacctcc

SEQ ID NO: 20869 - DNA, 50 bp, synthetic construct
  source 1..50: mol_type = other DNA
ataccccaaaacacraaaatcaaacttacctaaaattaactctaacactc

SEQ ID NO: 20870 - DNA, 50 bp, synthetic construct
  source 1..50: mol_type = other DNA
ataacctactcacaaatctttccaacctatactaaaacatctaaattaac

SEQ ID NO: 20871 - DNA, 50 bp, synthetic construct
  source 1..50: mol_type = other DNA
cctacacaactactcaactttctatctctataaatttccctattctaaac

SEQ ID NO: 20872 - DNA, 50 bp, synthetic construct
  source 1..50: mol_type = other DNA
tactcaactttctatctctataaatttccctattctaaacrtttcatatc

SEQ ID NO: 20873 - DNA, 50 bp, synthetic construct
  source 1..50: mol_type = other DNA
taatcttttataactccttccttcccttaacatattctccaaactcatcc

SEQ ID NO: 20874 - DNA, 50 bp, synthetic construct
  source 1..50: mol_type = other DNA
cttaacatattctccaaactcatccrtattataacaaaaatcaataattc

SEQ ID NO: 20875 - DNA, 50 bp, synthetic construct
  source 1..50: mol_type = other DNA
ataaataaaatacaaattatccacacaataaaatatcatttaactatacc

SEQ ID NO: 20876 - DNA, 50 bp, synthetic construct
  source 1..50: mol_type = other DNA
acaataaaaaataatccctactatataacccaaaaatctccctcctaaac

SEQ ID NO: 20877 - DNA, 50 bp, synthetic construct
  source 1..50: mol_type = other DNA
aaaacrataataacaaataaaacrtactactaaaaaaccacacrataaac

SEQ ID NO: 20878 - DNA, 50 bp, synthetic construct
  source 1..50: mol_type = other DNA
tctctaaacttcaatttccctaatcataaaacrataataacaaataaaac

SEQ ID NO: 20879 - DNA, 50 bp, synthetic construct
  source 1..50: mol_type = other DNA
aaataaaatcactttatctctctaaacttcaatttccctaatcataaaac

SEQ ID NO: 20880 - DNA, 50 bp, synthetic construct
  source 1..50: mol_type = other DNA
tatcaactaaacaataccaaccaatccctaaccatttaaccccaaaaaac

SEQ ID NO: 20881 - DNA, 50 bp, synthetic construct
  source 1..50: mol_type = other DNA
aaaacrtaaaccctacaaactacaaaaaaacactaaaactaaaaaatctc

SEQ ID NO: 20882 - DNA, 50 bp, synthetic construct
  source 1..50: mol_type = other DNA
aaacaaaaccatataataaaaaacaaattatcacaaaacccaaccctacc

SEQ ID NO: 20883 - DNA, 50 bp, synthetic construct
  source 1..50: mol_type = other DNA
taaacattacratcaactccctataaattcattctacctctacraaaatc

SEQ ID NO: 20884 - DNA, 50 bp, synthetic construct
  source 1..50: mol_type = other DNA
aacataataaacattacratcaactccctataaattcattctacctctac

SEQ ID NO: 20885 - DNA, 50 bp, synthetic construct
  source 1..50: mol_type = other DNA
ataaccacaaaatatcctaaataaaacctaacattacaaaaaccctaaac

SEQ ID NO: 20886 - DNA, 50 bp, synthetic construct
  source 1..50: mol_type = other DNA
aaatatcctaaataaaacctaacattacaaaaaccctaaacraaataacc

SEQ ID NO: 20887 - DNA, 50 bp, synthetic construct
  source 1..50: mol_type = other DNA
ccacaaaaacaaactaaaaaaaccccaaaaataccattatctcaacaccc

SEQ ID NO: 20888 - DNA, 50 bp, synthetic construct
  source 1..50: mol_type = other DNA
ataaaaaccrtacctaccaaaatcttataaccttaaaaaccactaccaac

SEQ ID NO: 20889 - DNA, 50 bp, synthetic construct
  source 1..50: mol_type = other DNA
aataaacccrctaacaataaccttcaaaattacaaaaccctaacaaacac

SEQ ID NO: 20890 - DNA, 50 bp, synthetic construct
  source 1..50: mol_type = other DNA
taaacrctaaaactataaaaacaccaaataaatcttaacctaacctcacc

SEQ ID NO: 20891 - DNA, 50 bp, synthetic construct
  source 1..50: mol_type = other DNA
atataaatatcctcaacttcttaacccaaaaaaatattcaaaaacaaaac

SEQ ID NO: 20892 - DNA, 50 bp, synthetic construct
  source 1..50: mol_type = other DNA
ctactatataacctacrcaatcctatcctctctctaaactcaacctcttc

SEQ ID NO: 20893 - DNA, 50 bp, synthetic construct
  source 1..50: mol_type = other DNA
aatactataacaccacaaacraatcctcraaatatctaactaaacactcc

SEQ ID NO: 20894 - DNA, 50 bp, synthetic construct
  source 1..50: mol_type = other DNA
ctcttaactactatcactctttctcttaaacacttactcttaaataaaac

SEQ ID NO: 20895 - DNA, 50 bp, synthetic construct
  source 1..50: mol_type = other DNA
ctaactcttaaacatcatcatttccaacatctacctaaactaaaaaaccc

SEQ ID NO: 20896 - DNA, 50 bp, synthetic construct
  source 1..50: mol_type = other DNA
tctaaaaaaccrtattccttttttattatctatacaaaaaacrtaaaccc

SEQ ID NO: 20897 - DNA, 50 bp, synthetic construct
  source 1..50: mol_type = other DNA
tctaaacctctaaaaaaccrtattccttttttattatctatacaaaaaac

SEQ ID NO: 20898 - DNA, 50 bp, synthetic construct
  source 1..50: mol_type = other DNA
tctaaaaaaatctaaaaataactactaaaaacraaacctcccaaaaatcc

SEQ ID NO: 20899 - DNA, 50 bp, synthetic construct
  source 1..50: mol_type = other DNA
tcccaaaaatccrcaaaacaaattaccaaaaacaataaaaaacacraccc

SEQ ID NO: 20900 - DNA, 50 bp, synthetic construct
  source 1..50: mol_type = other DNA
aaatccctacaaaaaaaccaacctatacaaaaaccctaaatacaaaacac

SEQ ID NO: 20901 - DNA, 50 bp, synthetic construct
  source 1..50: mol_type = other DNA
raaaataaaattaaatactccttaaaaaatacttcctacctcaaacacac

SEQ ID NO: 20902 - DNA, 50 bp, synthetic construct
  source 1..50: mol_type = other DNA
ccaaaatcraataaacaaattccacrtcctctctatccttaaattacaac

SEQ ID NO: 20903 - DNA, 50 bp, synthetic construct
  source 1..50: mol_type = other DNA
ctaactccactaaccaatatcaaacccaaaatcraataaacaaattccac

SEQ ID NO: 20904 - DNA, 50 bp, synthetic construct
  source 1..50: mol_type = other DNA
acaaattattaacatttctaactccactaaccaatatcaaacccaaaatc

SEQ ID NO: 20905 - DNA, 50 bp, synthetic construct
  source 1..50: mol_type = other DNA
aaaaaacaaaaaccaaattccaaatcttatacctctacrcctttatacac

SEQ ID NO: 20906 - DNA, 50 bp, synthetic construct
  source 1..50: mol_type = other DNA
ttacatcttaaaaaactacccctactaaaaataactaacraacaaaaatc

SEQ ID NO: 20907 - DNA, 50 bp, synthetic construct
  source 1..50: mol_type = other DNA
caaacaaaaaacacttaaccctaaataccaaactcataacataaataacc

SEQ ID NO: 20908 - DNA, 50 bp, synthetic construct
  source 1..50: mol_type = other DNA
acaacaatataactcacatatatacrcrcaacaaaaaaacraatataccc

SEQ ID NO: 20909 - DNA, 50 bp, synthetic construct
  source 1..50: mol_type = other DNA
atatatacrtacaacaatataactcacatatatacrcrcaacaaaaaaac

SEQ ID NO: 20910 - DNA, 50 bp, synthetic construct
  source 1..50: mol_type = other DNA
caatataactcacatatatacrtacaacaatataactcacatatatacrc

SEQ ID NO: 20911 - DNA, 50 bp, synthetic construct
  source 1..50: mol_type = other DNA
aacaatataactcacatatatacrtacaacaatataactcacatatatac

SEQ ID NO: 20912 - DNA, 50 bp, synthetic construct
  source 1..50: mol_type = other DNA
aaacaaacaaaatacacatatacrtacaacaatataactcacatatatac

SEQ ID NO: 20913 - DNA, 50 bp, synthetic construct
  source 1..50: mol_type = other DNA
acctcraaaaacaatacctacccataaaaacaaacaaaatacacatatac

SEQ ID NO: 20914 - DNA, 50 bp, synthetic construct
  source 1..50: mol_type = other DNA
tacaataaacrataaataaaattacccaaaaccccraacatacractacc

SEQ ID NO: 20915 - DNA, 50 bp, synthetic construct
  source 1..50: mol_type = other DNA
atatacatacaataaacrataaataaaattacccaaaaccccraacatac

SEQ ID NO: 20916 - DNA, 50 bp, synthetic construct
  source 1..50: mol_type = other DNA
acatactaatatacatacaataaacrataaataaaattacccaaaacccc

SEQ ID NO: 20917 - DNA, 50 bp, synthetic construct
  source 1..50: mol_type = other DNA
ctatatctatctatccrcctaactatctactctccttcaaaataccttcc

SEQ ID NO: 20918 - DNA, 50 bp, synthetic construct
  source 1..50: mol_type = other DNA
aaaaaaacaaacaatcaaacraacaaacaaacacaactaaataacacaac

SEQ ID NO: 20919 - DNA, 50 bp, synthetic construct
  source 1..50: mol_type = other DNA
aatcttcccraaaaatctttctataaatccaaaactacaaatatttaacc

SEQ ID NO: 20920 - DNA, 50 bp, synthetic construct
  source 1..50: mol_type = other DNA
tctaaacacratcaaacatctacaactctaaatttacaaaaaaacctccc

SEQ ID NO: 20921 - DNA, 50 bp, synthetic construct
  source 1..50: mol_type = other DNA
tctaaatttacaaaaaaacctcccraaaaaactttaatttcttaaaccac

SEQ ID NO: 20922 - DNA, 50 bp, synthetic construct
  source 1..50: mol_type = other DNA
ctaaactcacttaaccttccaaatctacctataatcttaatattataatc

SEQ ID NO: 20923 - DNA, 50 bp, synthetic construct
  source 1..50: mol_type = other DNA
tcttactaataaacctaccaactaataaatcttaaaacraaaataacaac

SEQ ID NO: 20924 - DNA, 50 bp, synthetic construct
  source 1..50: mol_type = other DNA
acttatttcactcaacacaatatccttaaaatccatccatattacaacac

SEQ ID NO: 20925 - DNA, 50 bp, synthetic construct
  source 1..50: mol_type = other DNA
catattacaacacrtatcaaaatatcctacctttttaaaactaaaccaac

SEQ ID NO: 20926 - DNA, 50 bp, synthetic construct
  source 1..50: mol_type = other DNA
ttacrtaccatatatacaaaactatatttaactaaatattcatataaacc

SEQ ID NO: 20927 - DNA, 50 bp, synthetic construct
  source 1..50: mol_type = other DNA
tcaaccaaacacaaccttacacacataatacrcaaaaatacaactaacac

SEQ ID NO: 20928 - DNA, 50 bp, synthetic construct
  source 1..50: mol_type = other DNA
actaaaaaccacaaatccccatctcacaaaactactaaaaaaatacaatc

SEQ ID NO: 20929 - DNA, 50 bp, synthetic construct
  source 1..50: mol_type = other DNA
cactaacctctaactccactactaaaacctaactatttcatcaaaaaccc

SEQ ID NO: 20930 - DNA, 50 bp, synthetic construct
  source 1..50: mol_type = other DNA
taaaaccttctcaaaacccttaaaaaataaaacctttatactcraaccac

SEQ ID NO: 20931 - DNA, 50 bp, synthetic construct
  source 1..50: mol_type = other DNA
catctacaaaataaactaacaataaaacttacctcataaaattattaaac

SEQ ID NO: 20932 - DNA, 50 bp, synthetic construct
  source 1..50: mol_type = other DNA
aaaaaatctactaaaacttaaattttcccacaattattaaaacttcaacc

SEQ ID NO: 20933 - DNA, 50 bp, synthetic construct
  source 1..50: mol_type = other DNA
aaactctattcataaatataataaatacattacccacaacaactcaaaac

SEQ ID NO: 20934 - DNA, 50 bp, synthetic construct
  source 1..50: mol_type = other DNA
cacataataaacactcaacacataacccttatatacttataaccaacaac

SEQ ID NO: 20935 - DNA, 50 bp, synthetic construct
  source 1..50: mol_type = other DNA
aaatttctataccataaaatcaacctataaccatcttaaaacacaaaacc

SEQ ID NO: 20936 - DNA, 50 bp, synthetic construct
  source 1..50: mol_type = other DNA
ctaacaaaaaaacttcattacctaaacttaaaaacaactaataaacaacc

SEQ ID NO: 20937 - DNA, 50 bp, synthetic construct
  source 1..50: mol_type = other DNA
cctaaacttaaaaacaactaataaacaaccraaactaataaaaaataacc

SEQ ID NO: 20938 - DNA, 50 bp, synthetic construct
  source 1..50: mol_type = other DNA
aaaataaccrtacaaaactatcccaccatacrctacaatttacaaaacac

SEQ ID NO: 20939 - DNA, 50 bp, synthetic construct
  source 1..50: mol_type = other DNA
atatctaaataaatataatatatatacctacctttctaccaaaacrtaac

SEQ ID NO: 20940 - DNA, 50 bp, synthetic construct
  source 1..50: mol_type = other DNA
tttacatatctaaataaatataatatatatacctacctttctaccaaaac

SEQ ID NO: 20941 - DNA, 50 bp, synthetic construct
  source 1..50: mol_type = other DNA
aacccaaaaaccctaaaataaaaaacaataacaacttctacaaaaacttc

SEQ ID NO: 20942 - DNA, 50 bp, synthetic construct
  source 1..50: mol_type = other DNA
aaaaaacctaaaacaaaaaactccctataaacacaaaaaatcctattcac

SEQ ID NO: 20943 - DNA, 50 bp, synthetic construct
  source 1..50: mol_type = other DNA
ttatctaaaattcaataaaaaaacaatcataactaaacacaataactcac

SEQ ID NO: 20944 - DNA, 50 bp, synthetic construct
  source 1..50: mol_type = other DNA
caacccatataaacacctacacacaaataaaaaacactcaacacctcacc

SEQ ID NO: 20945 - DNA, 50 bp, synthetic construct
  source 1..50: mol_type = other DNA
cttaatacactaattccttctttttcaaaatcacctctattttaacttac

SEQ ID NO: 20946 - DNA, 50 bp, synthetic construct
  source 1..50: mol_type = other DNA
ttcaaaatcacctctattttaacttacrataaccctttttaaatcrttac

SEQ ID NO: 20947 - DNA, 50 bp, synthetic construct
  source 1..50: mol_type = other DNA
taaccctttttaaatcrttacrctaaaatctactaaaaacaaacctcccc

SEQ ID NO: 20948 - DNA, 50 bp, synthetic construct
  source 1..50: mol_type = other DNA
aaaaaaatccaattactttcataaactttataaaaaaaactctcatccac

SEQ ID NO: 20949 - DNA, 50 bp, synthetic construct
  source 1..50: mol_type = other DNA
aacctttaacttccttaaacaattttctcttttctaacctaaaatcctac

SEQ ID NO: 20950 - DNA, 50 bp, synthetic construct
  source 1..50: mol_type = other DNA
tttcactatattaaccaaactaatactaaactcctaacctcaaaaaatcc

SEQ ID NO: 20951 - DNA, 50 bp, synthetic construct
  source 1..50: mol_type = other DNA
cracrcaacctataacaacaaacaaaataaacratacractataataatc

SEQ ID NO: 20952 - DNA, 50 bp, synthetic construct
  source 1..50: mol_type = other DNA
crcaacctataacaacaaacaaaataaacratacractataataatcrcc

SEQ ID NO: 20953 - DNA, 50 bp, synthetic construct
  source 1..50: mol_type = other DNA
acacaacctacacaaccctaaatccattaaaccttaaataaacacaacac

SEQ ID NO: 20954 - DNA, 50 bp, synthetic construct
  source 1..50: mol_type = other DNA
caaaataccaacttactttctcrcttacttctacaaattctttattctac

SEQ ID NO: 20955 - DNA, 50 bp, synthetic construct
  source 1..50: mol_type = other DNA
aataacataatcaccaattaaccttaaccaaaataccaacttactttctc

SEQ ID NO: 20956 - DNA, 50 bp, synthetic construct
  source 1..50: mol_type = other DNA
ccaaaccctaaaccaaacccttataaatacaaacatttaataataaattc

SEQ ID NO: 20957 - DNA, 50 bp, synthetic construct
  source 1..50: mol_type = other DNA
ccatttcaattaataactactaccrccattttatactataactataatcc

SEQ ID NO: 20958 - DNA, 50 bp, synthetic construct
  source 1..50: mol_type = other DNA
aaataatataaaaaacactataaatcataaaaaacctaaaccaaaacccc

SEQ ID NO: 20959 - DNA, 50 bp, synthetic construct
  source 1..50: mol_type = other DNA
aaaaacactataaatcataaaaaacctaaaccaaaaccccrcctacaacc

SEQ ID NO: 20960 - DNA, 50 bp, synthetic construct
  source 1..50: mol_type = other DNA
catataaaaacaaccratatacatacattaattaactattaatactttcc

SEQ ID NO: 20961 - DNA, 50 bp, synthetic construct
  source 1..50: mol_type = other DNA
aacrtataattaaatactaaacccaactatatccatccctaactaattcc

SEQ ID NO: 20962 - DNA, 50 bp, synthetic construct
  source 1..50: mol_type = other DNA
tatctaacacataaatacrtaaataatataaaatcaccrtctaacrcaac

SEQ ID NO: 20963 - DNA, 50 bp, synthetic construct
  source 1..50: mol_type = other DNA
aaaaatccaacccaaaaaacccctcraaaccraaaaaacttacctaaaac

SEQ ID NO: 20964 - DNA, 50 bp, synthetic construct
  source 1..50: mol_type = other DNA
ccraaaaacctcctaaactaaatcttcaaatttctaaactctcacccaac

SEQ ID NO: 20965 - DNA, 50 bp, synthetic construct
  source 1..50: mol_type = other DNA
acctcctaaactaaatcttcaaatttctaaactctcacccaacracacac

SEQ ID NO: 20966 - DNA, 50 bp, synthetic construct
  source 1..50: mol_type = other DNA
aactacctacacctatatactaaactttcacrtctacrataaacaaaaac

SEQ ID NO: 20967 - DNA, 50 bp, synthetic construct
  source 1..50: mol_type = other DNA
raaaccraaaataaactacctacacctatatactaaactttcacrtctac

SEQ ID NO: 20968 - DNA, 50 bp, synthetic construct
  source 1..50: mol_type = other DNA
aaaaccraaaccraaaataaactacctacacctatatactaaactttcac

SEQ ID NO: 20969 - DNA, 50 bp, synthetic construct
  source 1..50: mol_type = other DNA
crtaactaaaaactacaaacaactaaaaaatcrctataaaaaccraaacc

SEQ ID NO: 20970 - DNA, 50 bp, synthetic construct
  source 1..50: mol_type = other DNA
rtaaacrtaaaaacccaacacacaaatataaataacccattcccratctc

SEQ ID NO: 20971 - DNA, 50 bp, synthetic construct
  source 1..50: mol_type = other DNA
ctccctctccccaaaaaacrtaactaaaaactacaaacaactaaaaaatc

SEQ ID NO: 20972 - DNA, 50 bp, synthetic construct
  source 1..50: mol_type = other DNA
ctttccctaacatcttccctactaaaaacaaaataaaaactaaactaaac

SEQ ID NO: 20973 - DNA, 50 bp, synthetic construct
  source 1..50: mol_type = other DNA
atcaaaccaaaaaactaataaataaactacaactaaaataccactactac

SEQ ID NO: 20974 - DNA, 50 bp, synthetic construct
  source 1..50: mol_type = other DNA
aaaaactaataaataaactacaactaaaataccactactacraacrccac

SEQ ID NO: 20975 - DNA, 50 bp, synthetic construct
  source 1..50: mol_type = other DNA
craacrccacraatacaaaaattaatttaaaatccaataaatcaacaacc

SEQ ID NO: 20976 - DNA, 50 bp, synthetic construct
  source 1..50: mol_type = other DNA
tataacaatttcattataaatacacaccaaatccctcttatccaattccc

SEQ ID NO: 20977 - DNA, 50 bp, synthetic construct
  source 1..50: mol_type = other DNA
cctttataactacaccrtaataataaataatacccaattcttaacccatc

SEQ ID NO: 20978 - DNA, 50 bp, synthetic construct
  source 1..50: mol_type = other DNA
ctaaatactacccaccatcacratacaatcacaaaaaaaaccctaaaacc

SEQ ID NO: 20979 - DNA, 50 bp, synthetic construct
  source 1..50: mol_type = other DNA
aaatactataaaattcccaaaacacaatcaacaactactacaaaacctcc

SEQ ID NO: 20980 - DNA, 50 bp, synthetic construct
  source 1..50: mol_type = other DNA
ttttctcaaaaaaccactaataaaaaccttttttaaaccccctttccttc

SEQ ID NO: 20981 - DNA, 50 bp, synthetic construct
  source 1..50: mol_type = other DNA
ttacraccctacctttaacaaaaaacattttttttcccttcaaaaactcc

SEQ ID NO: 20982 - DNA, 50 bp, synthetic construct
  source 1..50: mol_type = other DNA
ttaacataactaaataaaaaacaaaattatctctactctcccraatttac

SEQ ID NO: 20983 - DNA, 50 bp, synthetic construct
  source 1..50: mol_type = other DNA
aaaatcctttaacataactaaataaaaaacaaaattatctctactctccc

SEQ ID NO: 20984 - DNA, 50 bp, synthetic construct
  source 1..50: mol_type = other DNA
aaatcaaaaattttttctttaaaacccaaaattctaccaaaaaaaacaac

SEQ ID NO: 20985 - DNA, 50 bp, synthetic construct
  source 1..50: mol_type = other DNA
caaaactccaaaactctcaaacaaataaaaattcactactaaaaaaacac

SEQ ID NO: 20986 - DNA, 50 bp, synthetic construct
  source 1..50: mol_type = other DNA
ttattataacaatattatataaccaacaaccctaaaacttaatcatttac

SEQ ID NO: 20987 - DNA, 50 bp, synthetic construct
  source 1..50: mol_type = other DNA
aaaaaaacaacatatccctaaaacatactcttctcaaataaataacacac

SEQ ID NO: 20988 - DNA, 50 bp, synthetic construct
  source 1..50: mol_type = other DNA
aaataacacacrcaataaaaaccaaacacacaccatacaattactacaac

SEQ ID NO: 20989 - DNA, 50 bp, synthetic construct
  source 1..50: mol_type = other DNA
aatacctcaaataaaacaataaatatttccccacccttataactataaac

SEQ ID NO: 20990 - DNA, 50 bp, synthetic construct
  source 1..50: mol_type = other DNA
aaacaataaaccaaccaactcaaaacaaatacttaccattcttactctac

SEQ ID NO: 20991 - DNA, 50 bp, synthetic construct
  source 1..50: mol_type = other DNA
tttaaaaaacaaatcaaaaaaaattcatcaaaccaaacataataactcac

SEQ ID NO: 20992 - DNA, 50 bp, synthetic construct
  source 1..50: mol_type = other DNA
taccatattctaccacttaaactactaaactcaaataatcctcccacctc

SEQ ID NO: 20993 - DNA, 50 bp, synthetic construct
  source 1..50: mol_type = other DNA
ttaacattttttataaaaacraaactcttactatttcccaaactaatctc

SEQ ID NO: 20994 - DNA, 50 bp, synthetic construct
  source 1..50: mol_type = other DNA
ataataataatttaaaaacaaacattttaaaaccaaacaaaataactcac

SEQ ID NO: 20995 - DNA, 50 bp, synthetic construct
  source 1..50: mol_type = other DNA
cacatcracraaatactcctaaaaattataaaacaaatcaataaatatcc

SEQ ID NO: 20996 - DNA, 50 bp, synthetic construct
  source 1..50: mol_type = other DNA
acraaatactcctaaaaattataaaacaaatcaataaatatccrctaccc

SEQ ID NO: 20997 - DNA, 50 bp, synthetic construct
  source 1..50: mol_type = other DNA
ttatcraaaactaaacaacaaaaataacccraaaatacccaaaaacaccc

SEQ ID NO: 20998 - DNA, 50 bp, synthetic construct
  source 1..50: mol_type = other DNA
cctaaatcaccrtaacaccattatcraaaactaaacaacaaaaataaccc

SEQ ID NO: 20999 - DNA, 50 bp, synthetic construct
  source 1..50: mol_type = other DNA
aaaaaatatcttttttaaaaccaaataattaaactaatacctaaatcacc

SEQ ID NO: 21000 - DNA, 50 bp, synthetic construct
  source 1..50: mol_type = other DNA
aacccrtaaataaaaacaaatatctaccacaaaaacttctaaaaaaaccc

SEQ ID NO: 21001 - DNA, 50 bp, synthetic construct
  source 1..50: mol_type = other DNA
aaataaaaataaacaaaaattccactatatcccctaacctcttaaaaccc

SEQ ID NO: 21002 - DNA, 50 bp, synthetic construct
  source 1..50: mol_type = other DNA
aacataataaaacccttatccacccttacctaatatatttctcaccatcc

SEQ ID NO: 21003 - DNA, 50 bp, synthetic construct
  source 1..50: mol_type = other DNA
actaacccaaaaatatcaaaaacaacraacraaactcccccaaaaaatcc

SEQ ID NO: 21004 - DNA, 50 bp, synthetic construct
  source 1..50: mol_type = other DNA
cacrcaactctaaactaactaaacraaataaccacaaaaccaaaacraac

SEQ ID NO: 21005 - DNA, 50 bp, synthetic construct
  source 1..50: mol_type = other DNA
taaattaaaaccttaatcaaaactttactccctataacacccacaccctc

SEQ ID NO: 21006 - DNA, 50 bp, synthetic construct
  source 1..50: mol_type = other DNA
cttaatcaaaactttactccctataacacccacaccctcraactaacaac

SEQ ID NO: 21007 - DNA, 50 bp, synthetic construct
  source 1..50: mol_type = other DNA
aaacaaaaccaccttaaaacttaaaaaatataaaataacccaataaaaac

SEQ ID NO: 21008 - DNA, 50 bp, synthetic construct
  source 1..50: mol_type = other DNA
aaattaaaaattatacatattttatctattccaaaatacttaatattcac

SEQ ID NO: 21009 - DNA, 50 bp, synthetic construct
  source 1..50: mol_type = other DNA
aaaaacccctaaactaaaaatcrataaataacacatattaaacaaatacc

SEQ ID NO: 21010 - DNA, 50 bp, synthetic construct
  source 1..50: mol_type = other DNA
taaaaatcaaaaaaactacctttctatccttaacctaccatcctaaacac

SEQ ID NO: 21011 - DNA, 50 bp, synthetic construct
  source 1..50: mol_type = other DNA
crttaaaatataatatacrctcacccaaaataaaatacaacttaacatcc

SEQ ID NO: 21012 - DNA, 50 bp, synthetic construct
  source 1..50: mol_type = other DNA
aatattcacccacctctaccaacrccaatacttcaaaaaaactaaaatac

SEQ ID NO: 21013 - DNA, 50 bp, synthetic construct
  source 1..50: mol_type = other DNA
atatcataacccraaaaacaatattaccactaaaaaacrcaaacaaaaac

SEQ ID NO: 21014 - DNA, 50 bp, synthetic construct
  source 1..50: mol_type = other DNA
tattctaatcctatatcataacccraaaaacaatattaccactaaaaaac

SEQ ID NO: 21015 - DNA, 50 bp, synthetic construct
  source 1..50: mol_type = other DNA
ctcacttcraaaaaaccttattcttatattctaatcctatatcataaccc

SEQ ID NO: 21016 - DNA, 50 bp, synthetic construct
  source 1..50: mol_type = other DNA
tattcttcraattataacacaaaaccaaaacacaaaaacaaaatcttccc

SEQ ID NO: 21017 - DNA, 50 bp, synthetic construct
  source 1..50: mol_type = other DNA
aaaacaaaatcttcccraaataaaaaatccccaaactaacctaaaatccc

SEQ ID NO: 21018 - DNA, 50 bp, synthetic construct
  source 1..50: mol_type = other DNA
ttaatctaacttccccattctctactacaaaaactaaaaactataaccac

SEQ ID NO: 21019 - DNA, 50 bp, synthetic construct
  source 1..50: mol_type = other DNA
aacccccaaactcaccrataaaaataaattattaacraaaacaacaaaac

SEQ ID NO: 21020 - DNA, 50 bp, synthetic construct
  source 1..50: mol_type = other DNA
aaatacttcacccaattcaaccataaaaaacaaatattctttatccatcc

SEQ ID NO: 21021 - DNA, 50 bp, synthetic construct
  source 1..50: mol_type = other DNA
acttaaaaaaacctatacttcatcratactcaaaatctcctatactcttc

SEQ ID NO: 21022 - DNA, 50 bp, synthetic construct
  source 1..50: mol_type = other DNA
aactaacacaactaccaaaacraacttcctaaacaaaaccttacatattc

SEQ ID NO: 21023 - DNA, 50 bp, synthetic construct
  source 1..50: mol_type = other DNA
cctaaacaaaaccttacatattcrccaaccaatcaaaaaatattaatatc

SEQ ID NO: 21024 - DNA, 50 bp, synthetic construct
  source 1..50: mol_type = other DNA
aaaaataaacaaactacaaccaataaacaaaataaacataaacraaactc

SEQ ID NO: 21025 - DNA, 50 bp, synthetic construct
  source 1..50: mol_type = other DNA
caccaactacctaactcacctataactataaacctactccaactactctc

SEQ ID NO: 21026 - DNA, 50 bp, synthetic construct
  source 1..50: mol_type = other DNA
aatcaaaacttcacaaacataaaatactactcccccacactaacaaaaac

SEQ ID NO: 21027 - DNA, 50 bp, synthetic construct
  source 1..50: mol_type = other DNA
aaacttcacaaacataaaatactactcccccacactaacaaaaacractc

SEQ ID NO: 21028 - DNA, 50 bp, synthetic construct
  source 1..50: mol_type = other DNA
ctctttccttacaaaactacracaaaaattcataaacaaaacaccaaaac

SEQ ID NO: 21029 - DNA, 50 bp, synthetic construct
  source 1..50: mol_type = other DNA
acctacatcttacraaaactcraaaaatccccaaaaaaaatctaatactc

SEQ ID NO: 21030 - DNA, 50 bp, synthetic construct
  source 1..50: mol_type = other DNA
ctacatcttacraaaactcraaaaatccccaaaaaaaatctaatactcrc

SEQ ID NO: 21031 - DNA, 50 bp, synthetic construct
  source 1..50: mol_type = other DNA
aaacraacaccttaaaatatccttaaaatatccttaaaaactctactctc

SEQ ID NO: 21032 - DNA, 50 bp, synthetic construct
  source 1..50: mol_type = other DNA
ccccraaaacaaaacctccaaaaacactccaaaaatactccaaaatactc

SEQ ID NO: 21033 - DNA, 50 bp, synthetic construct
  source 1..50: mol_type = other DNA
cttaccaaattatatctactcctaaaactataaaaaccrataataataac

SEQ ID NO: 21034 - DNA, 50 bp, synthetic construct
  source 1..50: mol_type = other DNA
acaactataactcttaccaaattatatctactcctaaaactataaaaacc

SEQ ID NO: 21035 - DNA, 50 bp, synthetic construct
  source 1..50: mol_type = other DNA
tttaaattaacaaactaaattttactcttcctaaatcatcacaataatcc

SEQ ID NO: 21036 - DNA, 50 bp, synthetic construct
  source 1..50: mol_type = other DNA
aaaccraattaaaaaaatcccaccccrcaaaactataataaaaattaaac

SEQ ID NO: 21037 - DNA, 50 bp, synthetic construct
  source 1..50: mol_type = other DNA
aacaacctttcccaaccttacttaaaaccraattaaaaaaatcccacccc

SEQ ID NO: 21038 - DNA, 50 bp, synthetic construct
  source 1..50: mol_type = other DNA
actacctaaaatacttaactcccacataaaaaaactaaaattaaaacccc

SEQ ID NO: 21039 - DNA, 50 bp, synthetic construct
  source 1..50: mol_type = other DNA
taataaaataaaacrtaacacraacccattaaaattctataaactccatc

SEQ ID NO: 21040 - DNA, 50 bp, synthetic construct
  source 1..50: mol_type = other DNA
aaaactaacaaccaccaaaaaaaacctttttaaaatttttcaaatccttc

SEQ ID NO: 21041 - DNA, 50 bp, synthetic construct
  source 1..50: mol_type = other DNA
actaaacacracttaacaaaaccraaaaatctaaaaactaaactactctc

SEQ ID NO: 21042 - DNA, 50 bp, synthetic construct
  source 1..50: mol_type = other DNA
cacccaaaacacaaactcaaactaaacraaataataaataaactaaaacc

SEQ ID NO: 21043 - DNA, 50 bp, synthetic construct
  source 1..50: mol_type = other DNA
tataccctaaataaaaacctaactaaaaactacctaaaaaaaacaacccc

SEQ ID NO: 21044 - DNA, 50 bp, synthetic construct
  source 1..50: mol_type = other DNA
aaaaaataacaaatataaaacaacactaaaaaccacaaaattttccaaac

SEQ ID NO: 21045 - DNA, 50 bp, synthetic construct
  source 1..50: mol_type = other DNA
acccatacaaaaacccaaataactaaccctaacctcaaaaaacaaaaaac

SEQ ID NO: 21046 - DNA, 50 bp, synthetic construct
  source 1..50: mol_type = other DNA
raaaatattaataatcttacccaaaaaccacataaaaaccccrtacaccc

SEQ ID NO: 21047 - DNA, 50 bp, synthetic construct
  source 1..50: mol_type = other DNA
aattctcraaaataatcaaaactctaaaaaaccataaaaacaaaatccrc

SEQ ID NO: 21048 - DNA, 50 bp, synthetic construct
  source 1..50: mol_type = other DNA
atcttatcctcataattcttcaaaaccttaatcacttccraaaactcatc

SEQ ID NO: 21049 - DNA, 50 bp, synthetic construct
  source 1..50: mol_type = other DNA
raaaatatccaacttataaacrtcraaaaacaaaataatacratccacac

SEQ ID NO: 21050 - DNA, 50 bp, synthetic construct
  source 1..50: mol_type = other DNA
ctaacctaatatttctcaacctaaaataatttttaaaattcctataaacc

SEQ ID NO: 21051 - DNA, 50 bp, synthetic construct
  source 1..50: mol_type = other DNA
cctaatatttctcaacctaaaataatttttaaaattcctataaaccraac

SEQ ID NO: 21052 - DNA, 50 bp, synthetic construct
  source 1..50: mol_type = other DNA
tttaaaaaaacrccataaacatctaaaacacaataaaaaaatatctctac

SEQ ID NO: 21053 - DNA, 50 bp, synthetic construct
  source 1..50: mol_type = other DNA
aaccaaccaaccctaactcactcacctaaaatacaatatttaaaaaactc

SEQ ID NO: 21054 - DNA, 50 bp, synthetic construct
  source 1..50: mol_type = other DNA
ctctatacaataattctcccttccctaaaattttcttcrccatctaaaac

SEQ ID NO: 21055 - DNA, 50 bp, synthetic construct
  source 1..50: mol_type = other DNA
caaaaaaactacaaaccrctctattcctaaacctcraaaataataaactc

SEQ ID NO: 21056 - DNA, 50 bp, synthetic construct
  source 1..50: mol_type = other DNA
aaccaacaccaaactaaaaaccaacaaaaaacacaaaaaaactacaaacc

SEQ ID NO: 21057 - DNA, 50 bp, synthetic construct
  source 1..50: mol_type = other DNA
tataatcaattaatattatcccccrcaaatcccaactatccaatcacctc

SEQ ID NO: 21058 - DNA, 50 bp, synthetic construct
  source 1..50: mol_type = other DNA
aaacraacaaaactaaaaaccaactatataatcaattaatattatccccc

SEQ ID NO: 21059 - DNA, 50 bp, synthetic construct
  source 1..50: mol_type = other DNA
cccrttcaactaaaaaactcctcaataaaaattcttaaaacaaataacac

SEQ ID NO: 21060 - DNA, 50 bp, synthetic construct
  source 1..50: mol_type = other DNA
ctcctcaataaaaattcttaaaacaaataacacraaacctccccaaaacc

SEQ ID NO: 21061 - DNA, 50 bp, synthetic construct
  source 1..50: mol_type = other DNA
actacrccaaaactcaccaaacccatactataataaccraaaaaataacc

SEQ ID NO: 21062 - DNA, 50 bp, synthetic construct
  source 1..50: mol_type = other DNA
cataaacttaataaaccctaacrcaatctaaaaccaaaaatataaaaacc

SEQ ID NO: 21063 - DNA, 50 bp, synthetic construct
  source 1..50: mol_type = other DNA
taaaccctaacrcaatctaaaaccaaaaatataaaaaccrcctcattttc

SEQ ID NO: 21064 - DNA, 50 bp, synthetic construct
  source 1..50: mol_type = other DNA
acaactataaccaacattcaaaacactatccctattttaaaaacaattac

SEQ ID NO: 21065 - DNA, 50 bp, synthetic construct
  source 1..50: mol_type = other DNA
ctctaccttccttactctccttttctttataaaaaattactatttcttac

SEQ ID NO: 21066 - DNA, 50 bp, synthetic construct
  source 1..50: mol_type = other DNA
ataactattccattccaattccractcctttctatttccctaacatatcc

SEQ ID NO: 21067 - DNA, 50 bp, synthetic construct
  source 1..50: mol_type = other DNA
ctccaaaatctaaactattaacaatatttaaaaatctactaaataaatac

SEQ ID NO: 21068 - DNA, 50 bp, synthetic construct
  source 1..50: mol_type = other DNA
cataaaaaccctaaaaattcttacaaaccccataaaaaaaacacaaactc

SEQ ID NO: 21069 - DNA, 50 bp, synthetic construct
  source 1..50: mol_type = other DNA
aaaaatatcaaaaacccaaataaaaaaacctcaaatacaattaaacttcc

SEQ ID NO: 21070 - DNA, 50 bp, synthetic construct
  source 1..50: mol_type = other DNA
aaaataacatcctaaaacaaaataaactaactctaaacaccctaccrccc

SEQ ID NO: 21071 - DNA, 50 bp, synthetic construct
  source 1..50: mol_type = other DNA
cactaaatttaaatcaccactaaacctcccactaaactacractacaacc

SEQ ID NO: 21072 - DNA, 50 bp, synthetic construct
  source 1..50: mol_type = other DNA
ataaaatctaaatatcaaaactctttaactacaaaaaaacractataacc

SEQ ID NO: 21073 - DNA, 50 bp, synthetic construct
  source 1..50: mol_type = other DNA
caaaacccaaaaaaccttttacccccacaaacttaaaaatacctactccc

SEQ ID NO: 21074 - DNA, 50 bp, synthetic construct
  source 1..50: mol_type = other DNA
aaaaataacctaaaacctaaaaactaaactaccaattctaaataaaatcc

SEQ ID NO: 21075 - DNA, 50 bp, synthetic construct
  source 1..50: mol_type = other DNA
cractccatacraaactacractaaaccaaatataatacacacaacttcc

SEQ ID NO: 21076 - DNA, 50 bp, synthetic construct
  source 1..50: mol_type = other DNA
aaacacraatacccrcaacraaaactatatatattacatctaatccaacc

SEQ ID NO: 21077 - DNA, 50 bp, synthetic construct
  source 1..50: mol_type = other DNA
aaaccaaaccaaaaatatataaaccaacraatataaaatccaaccaccrc

SEQ ID NO: 21078 - DNA, 50 bp, synthetic construct
  source 1..50: mol_type = other DNA
aaaaaccaaaccaaaaatatataaaccaacraatataaaatccaaccacc

SEQ ID NO: 21079 - DNA, 50 bp, synthetic construct
  source 1..50: mol_type = other DNA
acacaaatcctacacctaccaaaaaccaaaccaaaaatatataaaccaac

SEQ ID NO: 21080 - DNA, 50 bp, synthetic construct
  source 1..50: mol_type = other DNA
aaaccataccaaacaaaaattaaatcatataaaacccaccttcatacccc

SEQ ID NO: 21081 - DNA, 50 bp, synthetic construct
  source 1..50: mol_type = other DNA
caatatctattctatccatctcataatccctattttattcattcatactc

SEQ ID NO: 21082 - DNA, 50 bp, synthetic construct
  source 1..50: mol_type = other DNA
actccatttctctcttccacraaactccaataacaaaaaaatccaaaaac

SEQ ID NO: 21083 - DNA, 50 bp, synthetic construct
  source 1..50: mol_type = other DNA
aaaaacrtaatactactacaaaaaaactaaacatctccaaaactaaaccc

SEQ ID NO: 21084 - DNA, 50 bp, synthetic construct
  source 1..50: mol_type = other DNA
ctctacraacccaaccttaaaaatattcaatccttctacaacaacaccac

SEQ ID NO: 21085 - DNA, 50 bp, synthetic construct
  source 1..50: mol_type = other DNA
ccaaacccaacttcctaaatacttacaaaaaataacaaacaaaacaatac

SEQ ID NO: 21086 - DNA, 50 bp, synthetic construct
  source 1..50: mol_type = other DNA
aacaaaacaatacrttctaatcccaactccaataaaaacttcctaaaaac

SEQ ID NO: 21087 - DNA, 50 bp, synthetic construct
  source 1..50: mol_type = other DNA
aaaaacctatctcaaacttaaaatataacaataacttactttatcacctc

SEQ ID NO: 21088 - DNA, 50 bp, synthetic construct
  source 1..50: mol_type = other DNA
tcatttcatccttacaacaactctacaaaaccccrcaaataaaaaaatcc

SEQ ID NO: 21089 - DNA, 50 bp, synthetic construct
  source 1..50: mol_type = other DNA
acacatatacrttacctcatttcatccttacaacaactctacaaaacccc

SEQ ID NO: 21090 - DNA, 50 bp, synthetic construct
  source 1..50: mol_type = other DNA
cactaaaaattaaactatataaaatcaactatactaccaaacacatatac

SEQ ID NO: 21091 - DNA, 50 bp, synthetic construct
  source 1..50: mol_type = other DNA
ctcaaaccctaaaccttattaacaaacccttcctaaaactaactctaatc

SEQ ID NO: 21092 - DNA, 50 bp, synthetic construct
  source 1..50: mol_type = other DNA
aaccactactatctttctatttctaacttaaacccactaacctacctaac

SEQ ID NO: 21093 - DNA, 50 bp, synthetic construct
  source 1..50: mol_type = other DNA
ccaaaatattaaaattactaatataaacccccacacctaaccraaccaac

SEQ ID NO: 21094 - DNA, 50 bp, synthetic construct
  source 1..50: mol_type = other DNA
accactatattttttacaaacaaaatctccctatttcctaaactaatctc

SEQ ID NO: 21095 - DNA, 50 bp, synthetic construct
  source 1..50: mol_type = other DNA
accttaatactccaatcccraattaaaactaacctaaaaaaactactcac

SEQ ID NO: 21096 - DNA, 50 bp, synthetic construct
  source 1..50: mol_type = other DNA
actaaaaaactacaaacccraactactaaaaaactccctaaaattactac

SEQ ID NO: 21097 - DNA, 50 bp, synthetic construct
  source 1..50: mol_type = other DNA
caaaacaataataaccrccaacaacaataaccracraaaaactaaaaacc

SEQ ID NO: 21098 - DNA, 50 bp, synthetic construct
  source 1..50: mol_type = other DNA
aaaataaaaaaaccaaaatatccaacaaaaaaataacraccacttcracc

SEQ ID NO: 21099 - DNA, 50 bp, synthetic construct
  source 1..50: mol_type = other DNA
aaaaccaaaatatccaacaaaaaaataacraccacttcraccrcaaaaac

SEQ ID NO: 21100 - DNA, 50 bp, synthetic construct
  source 1..50: mol_type = other DNA
aaataaaaataacraaacraaataaacctaaaccccaaataccraatacc

SEQ ID NO: 21101 - DNA, 50 bp, synthetic construct
  source 1..50: mol_type = other DNA
ccaacactccaaacttcaataaactaaattctaactatttaaaaacattc

SEQ ID NO: 21102 - DNA, 50 bp, synthetic construct
  source 1..50: mol_type = other DNA
taatctataaaacacctacaacctaaacctctaacctaaaaaaaaccrcc

SEQ ID NO: 21103 - DNA, 50 bp, synthetic construct
  source 1..50: mol_type = other DNA
tacrttaaaaaataacrataacaacccacctatttattacctatcraacc

SEQ ID NO: 21104 - DNA, 50 bp, synthetic construct
  source 1..50: mol_type = other DNA
aattaactaataataaaataacccaaccaaaaaacaaaccaacacaaaac

SEQ ID NO: 21105 - DNA, 50 bp, synthetic construct
  source 1..50: mol_type = other DNA
aacrcttaactaatcacaacttaccaaaaatctataaaataaacraaaac

SEQ ID NO: 21106 - DNA, 50 bp, synthetic construct
  source 1..50: mol_type = other DNA
aaaatcaacrcttaactaatcacaacttaccaaaaatctataaaataaac

SEQ ID NO: 21107 - DNA, 50 bp, synthetic construct
  source 1..50: mol_type = other DNA
ctctaataaaataattaccctataatcattcctaaaccrtatttaacaac

SEQ ID NO: 21108 - DNA, 50 bp, synthetic construct
  source 1..50: mol_type = other DNA
aatcctatcacccaaactactaaactatctatactaaacttaaatatccc

SEQ ID NO: 21109 - DNA, 50 bp, synthetic construct
  source 1..50: mol_type = other DNA
atacaaaactactaaaaaccaactacactatactaacatactaaaccccc

SEQ ID NO: 21110 - DNA, 50 bp, synthetic construct
  source 1..50: mol_type = other DNA
aaaacaaaaacacraacaccraaaaactatatccaaaacaactacccatc

SEQ ID NO: 21111 - DNA, 50 bp, synthetic construct
  source 1..50: mol_type = other DNA
acttacctctacctaaacaatattaaaaaccaaactcaaaacaaaaacac

SEQ ID NO: 21112 - DNA, 50 bp, synthetic construct
  source 1..50: mol_type = other DNA
ctaattaaatatttccracaaaacrataacrctataactactcatcaccc

SEQ ID NO: 21113 - DNA, 50 bp, synthetic construct
  source 1..50: mol_type = other DNA
actaattaaaccctacttataatactctctatccctaattaaatatttcc

SEQ ID NO: 21114 - DNA, 50 bp, synthetic construct
  source 1..50: mol_type = other DNA
aaaaaataaacctacctactttaactctctaatccacctccaccctaaac

SEQ ID NO: 21115 - DNA, 50 bp, synthetic construct
  source 1..50: mol_type = other DNA
cccacctctactattccacacaaacctaactaaactaatactaaaaaacc

SEQ ID NO: 21116 - DNA, 50 bp, synthetic construct
  source 1..50: mol_type = other DNA
caaaataatataaaactaataaataaaactcaaaacrccccrctactacc

SEQ ID NO: 21117 - DNA, 50 bp, synthetic construct
  source 1..50: mol_type = other DNA
acctactaaatcctaatttaacatactctactctcaacaacracaacaac

SEQ ID NO: 21118 - DNA, 50 bp, synthetic construct
  source 1..50: mol_type = other DNA
aacaatccctaaatatcacaaacttaaaaaaaaccattacccaaaaaatc

SEQ ID NO: 21119 - DNA, 50 bp, synthetic construct
  source 1..50: mol_type = other DNA
caaatatcaataaactttttcractaacratactataacctacracaaac

SEQ ID NO: 21120 - DNA, 50 bp, synthetic construct
  source 1..50: mol_type = other DNA
tataacccaaatatcaataaactttttcractaacratactataacctac

SEQ ID NO: 21121 - DNA, 50 bp, synthetic construct
  source 1..50: mol_type = other DNA
aacaacctcaaaccctataacccaaatatcaataaactttttcractaac

SEQ ID NO: 21122 - DNA, 50 bp, synthetic construct
  source 1..50: mol_type = other DNA
aaatcaaaacaacctcaaaccctataacccaaatatcaataaactttttc

SEQ ID NO: 21123 - DNA, 50 bp, synthetic construct
  source 1..50: mol_type = other DNA
ctaaattacaaaacttaaaactaccttaatttctaactaacaactaaacc

SEQ ID NO: 21124 - DNA, 50 bp, synthetic construct
  source 1..50: mol_type = other DNA
tacaaaacttaaaactaccttaatttctaactaacaactaaaccrtcctc

SEQ ID NO: 21125 - DNA, 50 bp, synthetic construct
  source 1..50: mol_type = other DNA
ttatacaaaaaaacatcaaaataacaaaacacraaaaatctccccaaccc

SEQ ID NO: 21126 - DNA, 50 bp, synthetic construct
  source 1..50: mol_type = other DNA
cataattaacccrctcccttatacaaaaaaacatcaaaataacaaaacac

SEQ ID NO: 21127 - DNA, 50 bp, synthetic construct
  source 1..50: mol_type = other DNA
raattaaccatatccttaccacctcatcttcraaaacaactcataaaaac

SEQ ID NO: 21128 - DNA, 50 bp, synthetic construct
  source 1..50: mol_type = other DNA
caaattacracacattatacacaatcrcttttaaattcaattaaattaac

SEQ ID NO: 21129 - DNA, 50 bp, synthetic construct
  source 1..50: mol_type = other DNA
acctaccctatcaacaaaacactatttacataaactaaataccaaattac

SEQ ID NO: 21130 - DNA, 50 bp, synthetic construct
  source 1..50: mol_type = other DNA
aacttaactaaaccataactaaatctaaaaacactctctcttcccaatcc

SEQ ID NO: 21131 - DNA, 50 bp, synthetic construct
  source 1..50: mol_type = other DNA
ttccataatataaaacracaaaatcactcataaccctaaacattaacaac

SEQ ID NO: 21132 - DNA, 50 bp, synthetic construct
  source 1..50: mol_type = other DNA
aaaaccttaaaaaaacrttattaatattcaaaactataaataaccttacc

SEQ ID NO: 21133 - DNA, 50 bp, synthetic construct
  source 1..50: mol_type = other DNA
aactatttattaaacaaataaataaacaaccttataattaaatcaactac

SEQ ID NO: 21134 - DNA, 50 bp, synthetic construct
  source 1..50: mol_type = other DNA
ttaaacaaataaataaacaaccttataattaaatcaactacrtatactcc

SEQ ID NO: 21135 - DNA, 50 bp, synthetic construct
  source 1..50: mol_type = other DNA
tttcattccttttctctctaaaattaaaaaatttctcaataaccaataac

SEQ ID NO: 21136 - DNA, 50 bp, synthetic construct
  source 1..50: mol_type = other DNA
aaaaatcataaaatcttcacraaataactataaactaaacaatctccctc

SEQ ID NO: 21137 - DNA, 50 bp, synthetic construct
  source 1..50: mol_type = other DNA
tttaaaactctcaataaatatcaaatcaacacattcatccaccatatccc

SEQ ID NO: 21138 - DNA, 50 bp, synthetic construct
  source 1..50: mol_type = other DNA
tacaaaaccataaacacccccctacraaaaatatacaaactttaaattac

SEQ ID NO: 21139 - DNA, 50 bp, synthetic construct
  source 1..50: mol_type = other DNA
cctatttcaaataaaacrcactttttaaccacattaaaaaaacraaactc

SEQ ID NO: 21140 - DNA, 50 bp, synthetic construct
  source 1..50: mol_type = other DNA
atttcaaataaaacrcactttttaaccacattaaaaaaacraaactcrcc

SEQ ID NO: 21141 - DNA, 50 bp, synthetic construct
  source 1..50: mol_type = other DNA
ccctcaaataaacrcraccaaaatttctttaaacaaaataacctaacaac

SEQ ID NO: 21142 - DNA, 50 bp, synthetic construct
  source 1..50: mol_type = other DNA
aaataaaataaaaacrctaccaaatcatcctatctaaaaaaactctaatc

SEQ ID NO: 21143 - DNA, 50 bp, synthetic construct
  source 1..50: mol_type = other DNA
taccaaatcatcctatctaaaaaaactctaatcrcrcctacctaaaaaac

SEQ ID NO: 21144 - DNA, 50 bp, synthetic construct
  source 1..50: mol_type = other DNA
aacrcatcaaaacaaataacccacrtcaccraaataatacactaatactc

SEQ ID NO: 21145 - DNA, 50 bp, synthetic construct
  source 1..50: mol_type = other DNA
ctaatttcttcatcaaacracraaataacrcatcaaaacaaataacccac

SEQ ID NO: 21146 - DNA, 50 bp, synthetic construct
  source 1..50: mol_type = other DNA
rcctctatattttcctaaatactaatttcttcatcaaacracraaataac

SEQ ID NO: 21147 - DNA, 50 bp, synthetic construct
  source 1..50: mol_type = other DNA
taatatacrcctctatattttcctaaatactaatttcttcatcaaacrac

SEQ ID NO: 21148 - DNA, 50 bp, synthetic construct
  source 1..50: mol_type = other DNA
crctaatatacrcctctatattttcctaaatactaatttcttcatcaaac

SEQ ID NO: 21149 - DNA, 50 bp, synthetic construct
  source 1..50: mol_type = other DNA
rttattccrccrcttaataaaaaaaccaacatttaaaaaaacacaaaaac

SEQ ID NO: 21150 - DNA, 50 bp, synthetic construct
  source 1..50: mol_type = other DNA
crcttaataaaaaaaccaacatttaaaaaaacacaaaaacrcacattaac

SEQ ID NO: 21151 - DNA, 50 bp, synthetic construct
  source 1..50: mol_type = other DNA
ataaaaaaaccaacatttaaaaaaacacaaaaacrcacattaacrtacac

SEQ ID NO: 21152 - DNA, 50 bp, synthetic construct
  source 1..50: mol_type = other DNA
aaaccaacatttaaaaaaacacaaaaacrcacattaacrtacacraaatc

SEQ ID NO: 21153 - DNA, 50 bp, synthetic construct
  source 1..50: mol_type = other DNA
aaaaactaacrtctaatacttactttaaccaacratcaaaacrtttatcc

SEQ ID NO: 21154 - DNA, 50 bp, synthetic construct
  source 1..50: mol_type = other DNA
ccacctaaaaaaactaacrtctaatacttactttaaccaacratcaaaac

SEQ ID NO: 21155 - DNA, 50 bp, synthetic construct
  source 1..50: mol_type = other DNA
acrtacttaccacctaaaaaaactaacrtctaatacttactttaaccaac

SEQ ID NO: 21156 - DNA, 50 bp, synthetic construct
  source 1..50: mol_type = other DNA
tataaaaactaaaacttaaccaaacrtacttaccacctaaaaaaactaac

SEQ ID NO: 21157 - DNA, 50 bp, synthetic construct
  source 1..50: mol_type = other DNA
ttactcctaatcaccctctaaaatatacaaaaataaataatattaccatc

SEQ ID NO: 21158 - DNA, 50 bp, synthetic construct
  source 1..50: mol_type = other DNA
caaaaataacctcraaaaaacracctaaattttactaaaacctaaacaac

SEQ ID NO: 21159 - DNA, 50 bp, synthetic construct
  source 1..50: mol_type = other DNA
ctctcaaaacaacataactaattttataactatactcccaattcaaacac

SEQ ID NO: 21160 - DNA, 50 bp, synthetic construct
  source 1..50: mol_type = other DNA
taaaaccaatcatattattctaaaaataacrtctctcttccaataacttc

SEQ ID NO: 21161 - DNA, 50 bp, synthetic construct
  source 1..50: mol_type = other DNA
tttatataaaaataactcccraaaccaaactaatctaccatataaacctc

SEQ ID NO: 21162 - DNA, 50 bp, synthetic construct
  source 1..50: mol_type = other DNA
ctcacraaaaactaaccctacaaattctcccctaaaaacaaaaaataatc

SEQ ID NO: 21163 - DNA, 50 bp, synthetic construct
  source 1..50: mol_type = other DNA
caatataaaaactaaaatcaaaattcataaaatcrcaaaaaccrcrtacc

SEQ ID NO: 21164 - DNA, 50 bp, synthetic construct
  source 1..50: mol_type = other DNA
aacracaatataaaaactaaaatcaaaattcataaaatcrcaaaaaccrc

SEQ ID NO: 21165 - DNA, 50 bp, synthetic construct
  source 1..50: mol_type = other DNA
taaacracaatataaaaactaaaatcaaaattcataaaatcrcaaaaacc

SEQ ID NO: 21166 - DNA, 50 bp, synthetic construct
  source 1..50: mol_type = other DNA
cttaaaaactaaaacctaaaacaaaaacracaaacaatacaaccaataac

SEQ ID NO: 21167 - DNA, 50 bp, synthetic construct
  source 1..50: mol_type = other DNA
actaaaacctaaaacaaaaacracaaacaatacaaccaataacrtcacrc

SEQ ID NO: 21168 - DNA, 50 bp, synthetic construct
  source 1..50: mol_type = other DNA
tctcaatcrtacracaacacraaaaattcatctaactacataatacctac

SEQ ID NO: 21169 - DNA, 50 bp, synthetic construct
  source 1..50: mol_type = other DNA
taaaaaaaacaaacaaaacacttaaataaaaaccaaaaactataataacc

SEQ ID NO: 21170 - DNA, 50 bp, synthetic construct
  source 1..50: mol_type = other DNA
aaaacaaacaaaacacttaaataaaaaccaaaaactataataaccrtctc

SEQ ID NO: 21171 - DNA, 50 bp, synthetic construct
  source 1..50: mol_type = other DNA
acaattacaacaaacccaccaaaactacttaatacaattactacacaaac

SEQ ID NO: 21172 - DNA, 50 bp, synthetic construct
  source 1..50: mol_type = other DNA
tttaacatattaatttttatcaacracttctaaaacctaacaccattccc

SEQ ID NO: 21173 - DNA, 50 bp, synthetic construct
  source 1..50: mol_type = other DNA
aaaatcrctaataaaaattaacataccaaactcaaatacccaaaaacctc

SEQ ID NO: 21174 - DNA, 50 bp, synthetic construct
  source 1..50: mol_type = other DNA
raaaaccraaacccattaatccaatttaacttaactaaaactactacrcc

SEQ ID NO: 21175 - DNA, 50 bp, synthetic construct
  source 1..50: mol_type = other DNA
taacttaactaaaactactacrccrtaaactaaacacaatcctaaaaaac

SEQ ID NO: 21176 - DNA, 50 bp, synthetic construct
  source 1..50: mol_type = other DNA
acctaaaaaacctaaaaaacacrtataactaaattaaacacaaacraccc

SEQ ID NO: 21177 - DNA, 50 bp, synthetic construct
  source 1..50: mol_type = other DNA
ttccracataacaactaaaaaccraatactacttcaaaccctaacraatc

SEQ ID NO: 21178 - DNA, 50 bp, synthetic construct
  source 1..50: mol_type = other DNA
aaaaataaaaaccctacaaaaaacttcaacctaaaaaacctaaaaaacac

SEQ ID NO: 21179 - DNA, 50 bp, synthetic construct
  source 1..50: mol_type = other DNA
tatctctaacratcttttcccttaactccactccaaccaacctttaaaac

SEQ ID NO: 21180 - DNA, 50 bp, synthetic construct
  source 1..50: mol_type = other DNA
raaactaaactattctctccaaataataaatccraaacataatcacctac

SEQ ID NO: 21181 - DNA, 50 bp, synthetic construct
  source 1..50: mol_type = other DNA
tcrtaaaatataaaattaactcttttctctcccrcaaataaccatacccc

SEQ ID NO: 21182 - DNA, 50 bp, synthetic construct
  source 1..50: mol_type = other DNA
cccttaccccttcctcactaacataaaaaaatcctaaacttccrcaaatc

SEQ ID NO: 21183 - DNA, 50 bp, synthetic construct
  source 1..50: mol_type = other DNA
aaaaaaattccataatcaaactacttaaaaatcccaactcaattaattac

SEQ ID NO: 21184 - DNA, 50 bp, synthetic construct
  source 1..50: mol_type = other DNA
tatctctcaatttccttctctataaaataaaccaaataataaaataatcc

SEQ ID NO: 21185 - DNA, 50 bp, synthetic construct
  source 1..50: mol_type = other DNA
ctataaactacracaacctaaacaaactttctttaaaccctccatctccc

SEQ ID NO: 21186 - DNA, 50 bp, synthetic construct
  source 1..50: mol_type = other DNA
tctaaaatccaaccctaaccccatctcatcctaactatataaacttaaac

SEQ ID NO: 21187 - DNA, 50 bp, synthetic construct
  source 1..50: mol_type = other DNA
ccatttacccaaaactttataattatttttatataatcctcccaacaaac

SEQ ID NO: 21188 - DNA, 50 bp, synthetic construct
  source 1..50: mol_type = other DNA
ctacaatactttaaaataaataaactaccacttaataaaaacctaccctc

SEQ ID NO: 21189 - DNA, 50 bp, synthetic construct
  source 1..50: mol_type = other DNA
aaccraaatcraatacccaaaaaacaactaaatacacaataacaaaaaac

SEQ ID NO: 21190 - DNA, 50 bp, synthetic construct
  source 1..50: mol_type = other DNA
ctcctataaaaccttcctatatcrctaccaccaaaactataaactacatc

SEQ ID NO: 21191 - DNA, 50 bp, synthetic construct
  source 1..50: mol_type = other DNA
ataaccctaataacaacracacaaaaaaatcccataaaaattaaaacaac

SEQ ID NO: 21192 - DNA, 50 bp, synthetic construct
  source 1..50: mol_type = other DNA
ccataaaaattaaaacaacrctactcrcataaaacccccatatcacactc

SEQ ID NO: 21193 - DNA, 50 bp, synthetic construct
  source 1..50: mol_type = other DNA
ctcccttcttaaccaacccaaataaaataaaaactctaaactcctcctcc

SEQ ID NO: 21194 - DNA, 50 bp, synthetic construct
  source 1..50: mol_type = other DNA
aaaaaaaaacccaaaacctccactctacctaaactaatcaaaaaaaaaac

SEQ ID NO: 21195 - DNA, 50 bp, synthetic construct
  source 1..50: mol_type = other DNA
tcctcraacacaaaattataaataataaaaccttaaatcccaaccractc

SEQ ID NO: 21196 - DNA, 50 bp, synthetic construct
  source 1..50: mol_type = other DNA
tcaactcctcraacacaaaattataaataataaaaccttaaatcccaacc

SEQ ID NO: 21197 - DNA, 50 bp, synthetic construct
  source 1..50: mol_type = other DNA
raaaaatatttaaaaaatatcctaactaaccctacctaattcaactcctc

SEQ ID NO: 21198 - DNA, 50 bp, synthetic construct
  source 1..50: mol_type = other DNA
aatcraacccraatatataaataaatccaaaaaacaacttctataatccc

SEQ ID NO: 21199 - DNA, 50 bp, synthetic construct
  source 1..50: mol_type = other DNA
acttacctaactcctatcaatacacctaccctaataattaccrcaaaatc

SEQ ID NO: 21200 - DNA, 50 bp, synthetic construct
  source 1..50: mol_type = other DNA
aaaaaaaataaaatacatcaaccactacraaaactacttatacctacccc

SEQ ID NO: 21201 - DNA, 50 bp, synthetic construct
  source 1..50: mol_type = other DNA
ttaatacacttcatttcccccttacaaacctcaaaaataatcaaacactc

SEQ ID NO: 21202 - DNA, 50 bp, synthetic construct
  source 1..50: mol_type = other DNA
taaccaaaactaaaaataaaacaactattcccactattaccctcattctc

SEQ ID NO: 21203 - DNA, 50 bp, synthetic construct
  source 1..50: mol_type = other DNA
aaaaataaataaaaaaaccccccatcttaaactaaactaaaactaaaacc

SEQ ID NO: 21204 - DNA, 50 bp, synthetic construct
  source 1..50: mol_type = other DNA
accactctcctatcccaactctttatctcatcacaacctaaaaaaataac

SEQ ID NO: 21205 - DNA, 50 bp, synthetic construct
  source 1..50: mol_type = other DNA
aaaacccaaaaaaccttatccctacccctcaaaaaaactaaatcctatac

SEQ ID NO: 21206 - DNA, 50 bp, synthetic construct
  source 1..50: mol_type = other DNA
accrtcattataaaaaatcctaaaacttcatccaaaatccccaaaccctc

SEQ ID NO: 21207 - DNA, 50 bp, synthetic construct
  source 1..50: mol_type = other DNA
cttctcaaaaacttccattcattttataccaaaaaaaaactaccrccctc

SEQ ID NO: 21208 - DNA, 50 bp, synthetic construct
  source 1..50: mol_type = other DNA
aaacrtatccttaaaacraaatataaacraaactaactcccaaaaaaaac

SEQ ID NO: 21209 - DNA, 50 bp, synthetic construct
  source 1..50: mol_type = other DNA
aatataaacraaactaactcccaaaaaaaacrtaacctctatttacccac

SEQ ID NO: 21210 - DNA, 50 bp, synthetic construct
  source 1..50: mol_type = other DNA
tccctcccaactactaaaacaaaaaattaaataataactctttaaaaacc

SEQ ID NO: 21211 - DNA, 50 bp, synthetic construct
  source 1..50: mol_type = other DNA
ccttaaaacccaaataaatactcccaaacccttacctataccaatcccac

SEQ ID NO: 21212 - DNA, 50 bp, synthetic construct
  source 1..50: mol_type = other DNA
aaacaataaacaaaaaaatcattactaaaaccccaccttaattcccaacc

SEQ ID NO: 21213 - DNA, 50 bp, synthetic construct
  source 1..50: mol_type = other DNA
aaccactcaacaaaacaaaccaaaactaaaaatatattccctaatttccc

SEQ ID NO: 21214 - DNA, 50 bp, synthetic construct
  source 1..50: mol_type = other DNA
ctaaataaacaaataactaaataataaccccctatccactacctaaaatc

SEQ ID NO: 21215 - DNA, 50 bp, synthetic construct
  source 1..50: mol_type = other DNA
ccaaaaaaccatctctaaccaccctaaataaaaaaccaaacaaaaaatcc

SEQ ID NO: 21216 - DNA, 50 bp, synthetic construct
  source 1..50: mol_type = other DNA
aaataaccaaaaataatcctctaactacctctaaaaaaaacccaaccctc

SEQ ID NO: 21217 - DNA, 50 bp, synthetic construct
  source 1..50: mol_type = other DNA
aaaaaattatcctaaactaactcccaaacccttaaaaacaaaaaataacc

SEQ ID NO: 21218 - DNA, 50 bp, synthetic construct
  source 1..50: mol_type = other DNA
cttaaaaatcaacctaaaacaactcccttttaatccaaaacatactcacc

SEQ ID NO: 21219 - DNA, 50 bp, synthetic construct
  source 1..50: mol_type = other DNA
rctaaatactaattcaaaaaaaaccrcacrtcrctaaataaccaataatc

SEQ ID NO: 21220 - DNA, 50 bp, synthetic construct
  source 1..50: mol_type = other DNA
tatacaaatactaaatattctcttaaacccrcaatttataaaaccctacc

SEQ ID NO: 21221 - DNA, 50 bp, synthetic construct
  source 1..50: mol_type = other DNA
aacctaatctatccctaacctatacaaatactaaatattctcttaaaccc

SEQ ID NO: 21222 - DNA, 50 bp, synthetic construct
  source 1..50: mol_type = other DNA
ttaacacttatataaaccaaaaacaaaccaaattaaatatcaaaaaacac

SEQ ID NO: 21223 - DNA, 50 bp, synthetic construct
  source 1..50: mol_type = other DNA
acraaatccacaaacaaatctctaacatctttattataaatcaacttaac

SEQ ID NO: 21224 - DNA, 50 bp, synthetic construct
  source 1..50: mol_type = other DNA
tccacaaacaaatctctaacatctttattataaatcaacttaacraccac

SEQ ID NO: 21225 - DNA, 50 bp, synthetic construct
  source 1..50: mol_type = other DNA
aaaataacattttaaaatatacctttaactaaccaaaataataaaacccc

SEQ ID NO: 21226 - DNA, 50 bp, synthetic construct
  source 1..50: mol_type = other DNA
aacttttacctacctttaaaacctcrctctctctctcttaacattttctc

SEQ ID NO: 21227 - DNA, 50 bp, synthetic construct
  source 1..50: mol_type = other DNA
tttcaaaaaccaaactatcctcattattcctaaaacaactaaactctttc

SEQ ID NO: 21228 - DNA, 50 bp, synthetic construct
  source 1..50: mol_type = other DNA
taaatcttatttctcaaaaaaaccraaaaacctaaactcaaacttaaaac

SEQ ID NO: 21229 - DNA, 50 bp, synthetic construct
  source 1..50: mol_type = other DNA
ctattaacaaaaactaaccraactaaaaaaccrccaaaaaaaactactac

SEQ ID NO: 21230 - DNA, 50 bp, synthetic construct
  source 1..50: mol_type = other DNA
ctaaccraactaaaaaaccrccaaaaaaaactactacraaaaaacctaac

SEQ ID NO: 21231 - DNA, 50 bp, synthetic construct
  source 1..50: mol_type = other DNA
caaaaaaaactactacraaaaaacctaacrcttaaaaaactctacctaac

SEQ ID NO: 21232 - DNA, 50 bp, synthetic construct
  source 1..50: mol_type = other DNA
acccttcttaatatcaaaatttcttaatccataccaacracccctcctac

SEQ ID NO: 21233 - DNA, 50 bp, synthetic construct
  source 1..50: mol_type = other DNA
ctacaatccttctaaataaaaattataccctatatcaacaccccaccctc

SEQ ID NO: 21234 - DNA, 50 bp, synthetic construct
  source 1..50: mol_type = other DNA
acaattcccatccaaaaaaactacaaaactaataattcccccattacttc

SEQ ID NO: 21235 - DNA, 50 bp, synthetic construct
  source 1..50: mol_type = other DNA
aactacaaaactaataattcccccattacttcraacctaaaataaaatac

SEQ ID NO: 21236 - DNA, 50 bp, synthetic construct
  source 1..50: mol_type = other DNA
tcraacctaaaataaaatacraaacaataataaaccaaacttcccccatc

SEQ ID NO: 21237 - DNA, 50 bp, synthetic construct
  source 1..50: mol_type = other DNA
acctaaaataaaatacraaacaataataaaccaaacttcccccatcraac

SEQ ID NO: 21238 - DNA, 50 bp, synthetic construct
  source 1..50: mol_type = other DNA
tatccaaaacaataaaacaaaaaacaaatactaaaaacctaaaaccactc

SEQ ID NO: 21239 - DNA, 50 bp, synthetic construct
  source 1..50: mol_type = other DNA
ttaatatttttaaactttatcttatctaacaaataaaactacatccrctc

SEQ ID NO: 21240 - DNA, 50 bp, synthetic construct
  source 1..50: mol_type = other DNA
ttctttaatatttttaaactttatcttatctaacaaataaaactacatcc

SEQ ID NO: 21241 - DNA, 50 bp, synthetic construct
  source 1..50: mol_type = other DNA
actccaacaattcttatacctcaacctactaaatacctaaaactacaaac

SEQ ID NO: 21242 - DNA, 50 bp, synthetic construct
  source 1..50: mol_type = other DNA
cataaaaaacraattccaaacaaccaataacccaaaatcctcctcactac

SEQ ID NO: 21243 - DNA, 50 bp, synthetic construct
  source 1..50: mol_type = other DNA
aataaaacccrcaataaaaaaaaccctaaactactaactacctaaaactc

SEQ ID NO: 21244 - DNA, 50 bp, synthetic construct
  source 1..50: mol_type = other DNA
caacrcctcaatacaaaaaactaattaaatacaataatccctaaatcacc

SEQ ID NO: 21245 - DNA, 50 bp, synthetic construct
  source 1..50: mol_type = other DNA
aaccrataatttaaaaatcactacacccaaccaattccctacactaaaac

SEQ ID NO: 21246 - DNA, 50 bp, synthetic construct
  source 1..50: mol_type = other DNA
attccctacactaaaacrctatctactttaattaataaaatttcctcctc

SEQ ID NO: 21247 - DNA, 50 bp, synthetic construct
  source 1..50: mol_type = other DNA
cctcaacctcctaaactcaaacaatcctactaaaatcctaactaaaaaac

SEQ ID NO: 21248 - DNA, 50 bp, synthetic construct
  source 1..50: mol_type = other DNA
aaacrttatactaaacrcttactacatcatttaccatatttcacraaatc

SEQ ID NO: 21249 - DNA, 50 bp, synthetic construct
  source 1..50: mol_type = other DNA
aaacaaaaacrttatactaaacrcttactacatcatttaccatatttcac

SEQ ID NO: 21250 - DNA, 50 bp, synthetic construct
  source 1..50: mol_type = other DNA
cttcrattccrtaaaatataataaataatataacaaacrcccaacacaac

SEQ ID NO: 21251 - DNA, 50 bp, synthetic construct
  source 1..50: mol_type = other DNA
aaaaataaattctaactctaccrctaaaccctaaatataaacrcccaatc

SEQ ID NO: 21252 - DNA, 50 bp, synthetic construct
  source 1..50: mol_type = other DNA
craaaaacacccraaaaactacaaatacccatttcctatcraaaaactac

SEQ ID NO: 21253 - DNA, 50 bp, synthetic construct
  source 1..50: mol_type = other DNA
aaactccacctaaacrcracraaaaaattacaccatatataaacaactac

SEQ ID NO: 21254 - DNA, 50 bp, synthetic construct
  source 1..50: mol_type = other DNA
cttaaaacaaaaccaataaaaaaacctcactccacraaactttaaataac

SEQ ID NO: 21255 - DNA, 50 bp, synthetic construct
  source 1..50: mol_type = other DNA
ccaccatttttataaccctaatttatcatttattcacttttcatatactc

SEQ ID NO: 21256 - DNA, 50 bp, synthetic construct
  source 1..50: mol_type = other DNA
aaaattaaaatatactccctctaaaaaaacctccttataactccaataac

SEQ ID NO: 21257 - DNA, 50 bp, synthetic construct
  source 1..50: mol_type = other DNA
ataaaaactaataaaatcaaaaaccaaaaacrtttctacaaccacaaaac

SEQ ID NO: 21258 - DNA, 50 bp, synthetic construct
  source 1..50: mol_type = other DNA
ccataaaataccttaacccactttaataaaatacaaaaccctaacaaccc

SEQ ID NO: 21259 - DNA, 50 bp, synthetic construct
  source 1..50: mol_type = other DNA
cctactctaaattccrattcrataaaactactaaaaactaaatcaatccc

SEQ ID NO: 21260 - DNA, 50 bp, synthetic construct
  source 1..50: mol_type = other DNA
aaaaaccaaaatatctaacaaaaaaccccttaaaacacaactctcrtacc

SEQ ID NO: 21261 - DNA, 50 bp, synthetic construct
  source 1..50: mol_type = other DNA
taattaaaaaccaaaatatctaacaaaaaaccccttaaaacacaactctc

SEQ ID NO: 21262 - DNA, 50 bp, synthetic construct
  source 1..50: mol_type = other DNA
cccactctactaaaacttactataaccttaaaacctaactcctacacccc

SEQ ID NO: 21263 - DNA, 50 bp, synthetic construct
  source 1..50: mol_type = other DNA
cttccaattcattcattcaacaaaaacttataaaccaactaatatatacc

SEQ ID NO: 21264 - DNA, 50 bp, synthetic construct
  source 1..50: mol_type = other DNA
ccrtcatacttaaaaaaaatccccttttcataattcaaaaaatactaaac

SEQ ID NO: 21265 - DNA, 50 bp, synthetic construct
  source 1..50: mol_type = other DNA
cacttactattccctctacctataataccctttccctaaatccttaaatc

SEQ ID NO: 21266 - DNA, 50 bp, synthetic construct
  source 1..50: mol_type = other DNA
cacctacccaaccccttctaaaaatttataaaactacttcacacctactc

SEQ ID NO: 21267 - DNA, 50 bp, synthetic construct
  source 1..50: mol_type = other DNA
acaacaccacaaaaacctaactaaacaaaccctaaaaaacctataaatcc

SEQ ID NO: 21268 - DNA, 50 bp, synthetic construct
  source 1..50: mol_type = other DNA
tcacaaccaaaaaaaccctcaaaacaactaacactacacccaaaattctc

SEQ ID NO: 21269 - DNA, 50 bp, synthetic construct
  source 1..50: mol_type = other DNA
acctacttaaaactaaataaataatttcrcaattaattatccttaacttc

SEQ ID NO: 21270 - DNA, 50 bp, synthetic construct
  source 1..50: mol_type = other DNA
aataatttcrcaattaattatccttaacttcraaacaaaacccctaactc

SEQ ID NO: 21271 - DNA, 50 bp, synthetic construct
  source 1..50: mol_type = other DNA
cacctccattctaaaataatacctaaattttaacctttttaaacctaaac

SEQ ID NO: 21272 - DNA, 50 bp, synthetic construct
  source 1..50: mol_type = other DNA
aaaaaaaatattcttcatctaattcaaaaccaatctttcacccraacctc

SEQ ID NO: 21273 - DNA, 50 bp, synthetic construct
  source 1..50: mol_type = other DNA
taatctcaaaaaaaatattcttcatctaattcaaaaccaatctttcaccc

SEQ ID NO: 21274 - DNA, 50 bp, synthetic construct
  source 1..50: mol_type = other DNA
taatacaactcrcactcattattaccatccttaaaacaactataacaaac

SEQ ID NO: 21275 - DNA, 50 bp, synthetic construct
  source 1..50: mol_type = other DNA
aatactcaataaatatacaataatcaatctcataccctaaaatactcttc

SEQ ID NO: 21276 - DNA, 50 bp, synthetic construct
  source 1..50: mol_type = other DNA
attctttaacctttctatacctcaatttcctcacttaaattaaaacaaac

SEQ ID NO: 21277 - DNA, 50 bp, synthetic construct
  source 1..50: mol_type = other DNA
acaaaaactacaataaacaaaattacactactacrctccaacctaactcc

SEQ ID NO: 21278 - DNA, 50 bp, synthetic construct
  source 1..50: mol_type = other DNA
taaattaactatatccccaaacaaatctcatctcraattataatccccac

SEQ ID NO: 21279 - DNA, 50 bp, synthetic construct
  source 1..50: mol_type = other DNA
accttcrccaataatataaattaactatatccccaaacaaatctcatctc

SEQ ID NO: 21280 - DNA, 50 bp, synthetic construct
  source 1..50: mol_type = other DNA
caaaccctaaccaactaaaaaaaacaacacctaaacaataaatcaacacc

SEQ ID NO: 21281 - DNA, 50 bp, synthetic construct
  source 1..50: mol_type = other DNA
ccctcccaactaaccaaaacctaactcaaaaaaccaacraacaaacaaac

SEQ ID NO: 21282 - DNA, 50 bp, synthetic construct
  source 1..50: mol_type = other DNA
ctaactcaaaaaaccaacraacaaacaaacrtaaaattctcctaaatcac

SEQ ID NO: 21283 - DNA, 50 bp, synthetic construct
  source 1..50: mol_type = other DNA
caataacccaaacttactaacctatccaaaatcaaaatttaatatttacc

SEQ ID NO: 21284 - DNA, 50 bp, synthetic construct
  source 1..50: mol_type = other DNA
tcaaccaatataattcacttaaataacattttctcactataacattattc

SEQ ID NO: 21285 - DNA, 50 bp, synthetic construct
  source 1..50: mol_type = other DNA
taaaaattttaatctaaactcttctcttacctatacaaatcaaaacaatc

SEQ ID NO: 21286 - DNA, 50 bp, synthetic construct
  source 1..50: mol_type = other DNA
crtaacatctataatatcaaaacctaccaaccraaaatcratcatattcc

SEQ ID NO: 21287 - DNA, 50 bp, synthetic construct
  source 1..50: mol_type = other DNA
ataaaacraaacrtaacatctataatatcaaaacctaccaaccraaaatc

SEQ ID NO: 21288 - DNA, 50 bp, synthetic construct
  source 1..50: mol_type = other DNA
acraattataaaacraaacrtaacatctataatatcaaaacctaccaacc

SEQ ID NO: 21289 - DNA, 50 bp, synthetic construct
  source 1..50: mol_type = other DNA
acaaaactaaccaaactccaactaaatattaactacrcaaacaaacaacc

SEQ ID NO: 21290 - DNA, 50 bp, synthetic construct
  source 1..50: mol_type = other DNA
caaacacaaaaactacaaaactaaccaaactccaactaaatattaactac

SEQ ID NO: 21291 - DNA, 50 bp, synthetic construct
  source 1..50: mol_type = other DNA
acaatactcacatacacacaactttcctctaccattcaattcctataacc

SEQ ID NO: 21292 - DNA, 50 bp, synthetic construct
  source 1..50: mol_type = other DNA
aaccatactactaataataacccaatataaaaacctaaactacctaactc

SEQ ID NO: 21293 - DNA, 50 bp, synthetic construct
  source 1..50: mol_type = other DNA
caaacaacccaaattttcacattaaatcaccatcaacaacataaccttcc

SEQ ID NO: 21294 - DNA, 50 bp, synthetic construct
  source 1..50: mol_type = other DNA
cccaaattttcacattaaatcaccatcaacaacataaccttccrcaaatc

SEQ ID NO: 21295 - DNA, 50 bp, synthetic construct
  source 1..50: mol_type = other DNA
ataaaaataaccaataacccttcccaaaccttaacrcactaacattcrac

SEQ ID NO: 21296 - DNA, 50 bp, synthetic construct
  source 1..50: mol_type = other DNA
catataaaaataaccaataacccttcccaaaccttaacrcactaacattc

SEQ ID NO: 21297 - DNA, 50 bp, synthetic construct
  source 1..50: mol_type = other DNA
acctatataatccaaaaacccraaaccccattccaactttcttctataac

SEQ ID NO: 21298 - DNA, 50 bp, synthetic construct
  source 1..50: mol_type = other DNA
cccaaacaaaaaataccaatcaacccacaccrcaaaatataaacaaaaac

SEQ ID NO: 21299 - DNA, 50 bp, synthetic construct
  source 1..50: mol_type = other DNA
atccacattttacratataaactaactaacaccccttatctaaaaccatc

SEQ ID NO: 21300 - DNA, 50 bp, synthetic construct
  source 1..50: mol_type = other DNA
ctaacraaaccctaaaataaaactacccctcratacaataactttaccac

SEQ ID NO: 21301 - DNA, 50 bp, synthetic construct
  source 1..50: mol_type = other DNA
aaaaaacaaactcctacatctaacraaaccctaaaataaaactacccctc

SEQ ID NO: 21302 - DNA, 50 bp, synthetic construct
  source 1..50: mol_type = other DNA
ctcaaaaaccctacactaaaaaccaaacaataaaaactaaaataataacc

SEQ ID NO: 21303 - DNA, 50 bp, synthetic construct
  source 1..50: mol_type = other DNA
caatctaacacraataaccaaactcraactaaataacctctcataccttc

SEQ ID NO: 21304 - DNA, 50 bp, synthetic construct
  source 1..50: mol_type = other DNA
ccrtatcaaactaaaaacctaaaaaaaacctctatcccctaataatactc

SEQ ID NO: 21305 - DNA, 50 bp, synthetic construct
  source 1..50: mol_type = other DNA
ccaaataaaatatcctcatacctaaataaaaaacctaaaccctaaacccc

SEQ ID NO: 21306 - DNA, 50 bp, synthetic construct
  source 1..50: mol_type = other DNA
cctaccaccaacaaaaaaatctatctatcttaaccccaacccaaaatcac

SEQ ID NO: 21307 - DNA, 50 bp, synthetic construct
  source 1..50: mol_type = other DNA
aacaaaacttctcttccaaaaaatccaatctctcccacrtaaacctaacc

SEQ ID NO: 21308 - DNA, 50 bp, synthetic construct
  source 1..50: mol_type = other DNA
aaacccaaaactaacaaaacttctcttccaaaaaatccaatctctcccac

SEQ ID NO: 21309 - DNA, 50 bp, synthetic construct
  source 1..50: mol_type = other DNA
aaaaaaatacrtaataacaaatattccaaaatttcaaaccataatccacc

SEQ ID NO: 21310 - DNA, 50 bp, synthetic construct
  source 1..50: mol_type = other DNA
aaattaactcrataaattataacctaaaaccctaaaatacttactactac

SEQ ID NO: 21311 - DNA, 50 bp, synthetic construct
  source 1..50: mol_type = other DNA
aacctaaaaccctaaaatacttactactacrcacccttctaaaaacacac

SEQ ID NO: 21312 - DNA, 50 bp, synthetic construct
  source 1..50: mol_type = other DNA
cactaaatctcaaaatcctactctataaaaaaaacacaataactccctcc

SEQ ID NO: 21313 - DNA, 50 bp, synthetic construct
  source 1..50: mol_type = other DNA
cactataataccccacttaacccaccctctccaaaacaaaataattaaac

SEQ ID NO: 21314 - DNA, 50 bp, synthetic construct
  source 1..50: mol_type = other DNA
aaacrtaactaaaccataacaatacrtcaaaacttaataaaaaaccaaac

SEQ ID NO: 21315 - DNA, 50 bp, synthetic construct
  source 1..50: mol_type = other DNA
acrtcttactaaaaacracraactatctccacaaatatttaaacataaac

SEQ ID NO: 21316 - DNA, 50 bp, synthetic construct
  source 1..50: mol_type = other DNA
ataaaattcaaaaaacraaacaacaaaactaaaatattatcctccctccc

SEQ ID NO: 21317 - DNA, 50 bp, synthetic construct
  source 1..50: mol_type = other DNA
caaaaaacraaacaacaaaactaaaatattatcctccctcccraaaaaac

SEQ ID NO: 21318 - DNA, 50 bp, synthetic construct
  source 1..50: mol_type = other DNA
aacrtaactataaacaacttaacttttaacrtacrtaccacaaacattcc

SEQ ID NO: 21319 - DNA, 50 bp, synthetic construct
  source 1..50: mol_type = other DNA
atcctcttcaatatcaaaaaaacrtaaacatatataaaaactcaaacctc

SEQ ID NO: 21320 - DNA, 50 bp, synthetic construct
  source 1..50: mol_type = other DNA
taaaaatatttctccaaaaaattataaatcctcttcaatatcaaaaaaac

SEQ ID NO: 21321 - DNA, 50 bp, synthetic construct
  source 1..50: mol_type = other DNA
ctcccctaacactaaaaaaaatccacaactccttaaaaaaacaccctcac

SEQ ID NO: 21322 - DNA, 50 bp, synthetic construct
  source 1..50: mol_type = other DNA
actaaaaaaaatccacaactccttaaaaaaacaccctcacrtctattacc

SEQ ID NO: 21323 - DNA, 50 bp, synthetic construct
  source 1..50: mol_type = other DNA
ctactatattatttaaactaaacctaatctaatccccccatctaccttac

SEQ ID NO: 21324 - DNA, 50 bp, synthetic construct
  source 1..50: mol_type = other DNA
ctaccttacraactaaataaaacccacattcaaaaaaacaatatccctac

SEQ ID NO: 21325 - DNA, 50 bp, synthetic construct
  source 1..50: mol_type = other DNA
acctaaatactaaatccaatcaaatactaaacatactaaataaaaataac

SEQ ID NO: 21326 - DNA, 50 bp, synthetic construct
  source 1..50: mol_type = other DNA
aaacrataataaaaactactataactacccaacracacaccccatttcac

SEQ ID NO: 21327 - DNA, 50 bp, synthetic construct
  source 1..50: mol_type = other DNA
aaaaaaacaataaacccaaacrataataaaaactactataactacccaac

SEQ ID NO: 21328 - DNA, 50 bp, synthetic construct
  source 1..50: mol_type = other DNA
aaacrtaaaataaaatataccrctaaacaaccacaataactcctaccacc

SEQ ID NO: 21329 - DNA, 50 bp, synthetic construct
  source 1..50: mol_type = other DNA
accrcrcctaacaaacaccctcaataatcaaaaacttaaaaatacaaaac

SEQ ID NO: 21330 - DNA, 50 bp, synthetic construct
  source 1..50: mol_type = other DNA
ctaacrttctacatttctaaatctttaaccactaaaaatatctatcaaac

SEQ ID NO: 21331 - DNA, 50 bp, synthetic construct
  source 1..50: mol_type = other DNA
aacrttctacatttctaaatctttaaccactaaaaatatctatcaaacrc

SEQ ID NO: 21332 - DNA, 50 bp, synthetic construct
  source 1..50: mol_type = other DNA
actaaaactaaaataccaacctccaaatcccaaacctacrtcatctctac

SEQ ID NO: 21333 - DNA, 50 bp, synthetic construct
  source 1..50: mol_type = other DNA
tattaaaaacaaaactaaacrtaaaactcctaccttaccaaccaaaaacc

SEQ ID NO: 21334 - DNA, 50 bp, synthetic construct
  source 1..50: mol_type = other DNA
atactaaaacttacccaaaaacacraaacatattaaaaacaaaactaaac

SEQ ID NO: 21335 - DNA, 50 bp, synthetic construct
  source 1..50: mol_type = other DNA
ataaaataaaataacctcaaccaaataacttaccraatcatacacaaacc

SEQ ID NO: 21336 - DNA, 50 bp, synthetic construct
  source 1..50: mol_type = other DNA
aaaccaaactccttatatctatttaatttcccaaacracaaatacraccc

SEQ ID NO: 21337 - DNA, 50 bp, synthetic construct
  source 1..50: mol_type = other DNA
tccaaaaaccaaactccttatatctatttaatttcccaaacracaaatac

SEQ ID NO: 21338 - DNA, 50 bp, synthetic construct
  source 1..50: mol_type = other DNA
ccccaaaaatccaaaaaccaaactccttatatctatttaatttcccaaac

SEQ ID NO: 21339 - DNA, 50 bp, synthetic construct
  source 1..50: mol_type = other DNA
aaaaaactaaacaaacacaaaaaatctaatccttaaactcttaaaaccac

SEQ ID NO: 21340 - DNA, 50 bp, synthetic construct
  source 1..50: mol_type = other DNA
aacaaacacaaaaaatctaatccttaaactcttaaaaccacraaaaaatc

SEQ ID NO: 21341 - DNA, 50 bp, synthetic construct
  source 1..50: mol_type = other DNA
tctcttccttatccccattactcaaaaaaataaactaacctccaaaaatc

SEQ ID NO: 21342 - DNA, 50 bp, synthetic construct
  source 1..50: mol_type = other DNA
cccctctctaaatctcaatttccccaactacaataaaaaaattaaccccc

SEQ ID NO: 21343 - DNA, 50 bp, synthetic construct
  source 1..50: mol_type = other DNA
aaacracaaatctataataacctctaacatcrctaaaccttaaaaaaaac

SEQ ID NO: 21344 - DNA, 50 bp, synthetic construct
  source 1..50: mol_type = other DNA
aataaataactcttaaaaaacaaaaaacccaaaccccaaccaaaacaccc

SEQ ID NO: 21345 - DNA, 50 bp, synthetic construct
  source 1..50: mol_type = other DNA
acctcccaaaacctcaaactaaaaaacaacaaataacaaaaactcaaacc

SEQ ID NO: 21346 - DNA, 50 bp, synthetic construct
  source 1..50: mol_type = other DNA
tataactaaacrcaaaccaactcaaaaccaacaaaacctatatcaccctc

SEQ ID NO: 21347 - DNA, 50 bp, synthetic construct
  source 1..50: mol_type = other DNA
aacaatcacacraaaataacacaaaccctactaaccctaaactaacctac

SEQ ID NO: 21348 - DNA, 50 bp, synthetic construct
  source 1..50: mol_type = other DNA
aaaccaacaaaacaaaaaataataaacaataaccraaccaacaccctaac

SEQ ID NO: 21349 - DNA, 50 bp, synthetic construct
  source 1..50: mol_type = other DNA
ttattataaaatataccctacataaccctaaacaaaccctttcacctctc

SEQ ID NO: 21350 - DNA, 50 bp, synthetic construct
  source 1..50: mol_type = other DNA
atcctaaacaaaacraaaccccaaaatcaactaaacctactctacaaaac

SEQ ID NO: 21351 - DNA, 50 bp, synthetic construct
  source 1..50: mol_type = other DNA
aaaaaacctacctaacccctactaaacctacraatttatctaatatttac

SEQ ID NO: 21352 - DNA, 50 bp, synthetic construct
  source 1..50: mol_type = other DNA
atctaattaaaactacrttccctattctaaaataacccctattaaacrcc

SEQ ID NO: 21353 - DNA, 50 bp, synthetic construct
  source 1..50: mol_type = other DNA
tccatctaattaaaactacrttccctattctaaaataacccctattaaac

SEQ ID NO: 21354 - DNA, 50 bp, synthetic construct
  source 1..50: mol_type = other DNA
ttttaacaaacatttcracrtctaacaaaaaccattccaaaacaaaaaac

SEQ ID NO: 21355 - DNA, 50 bp, synthetic construct
  source 1..50: mol_type = other DNA
aaccattccaaaacaaaaaacrcaatcctaactaaataaaatacracacc

SEQ ID NO: 21356 - DNA, 50 bp, synthetic construct
  source 1..50: mol_type = other DNA
aaaaatactatttatccaaccctaaaaaaaccatacttatcattctcccc

SEQ ID NO: 21357 - DNA, 50 bp, synthetic construct
  source 1..50: mol_type = other DNA
tattataaataatttaactaaaacaacatatctataaacaccaaaccccc

SEQ ID NO: 21358 - DNA, 50 bp, synthetic construct
  source 1..50: mol_type = other DNA
aaactcctacttcccaaaaaaaccaaatttctatattctaatttaaaacc

SEQ ID NO: 21359 - DNA, 50 bp, synthetic construct
  source 1..50: mol_type = other DNA
tctaacaaaaaactaaatcctaaaaaactattctctaaattaaacacccc

SEQ ID NO: 21360 - DNA, 50 bp, synthetic construct
  source 1..50: mol_type = other DNA
ccattctctaaatacatttataaactcaacccctatcractaatctattc

SEQ ID NO: 21361 - DNA, 50 bp, synthetic construct
  source 1..50: mol_type = other DNA
ctctttcctataaataacctaaacactcttctaaactaaaaaactaaacc

SEQ ID NO: 21362 - DNA, 50 bp, synthetic construct
  source 1..50: mol_type = other DNA
caaactttttccaacrtacatacatacaaaaaacactaaataaactaacc

SEQ ID NO: 21363 - DNA, 50 bp, synthetic construct
  source 1..50: mol_type = other DNA
aaactaaataaaaacratcaacttactcaatacctcttatatacatacac

SEQ ID NO: 21364 - DNA, 50 bp, synthetic construct
  source 1..50: mol_type = other DNA
aaaccraactccaaaacaaacattctacaaaacaatatacractaatcac

SEQ ID NO: 21365 - DNA, 50 bp, synthetic construct
  source 1..50: mol_type = other DNA
acccaaaataaaaccraactccaaaacaaacattctacaaaacaatatac

SEQ ID NO: 21366 - DNA, 50 bp, synthetic construct
  source 1..50: mol_type = other DNA
acctaatcccctacttctctaaatcccttaaaaattctaaaatttccttc

SEQ ID NO: 21367 - DNA, 50 bp, synthetic construct
  source 1..50: mol_type = other DNA
catctcttccctacaaaaataaaacaatcaactacttactacaaccaaac

SEQ ID NO: 21368 - DNA, 50 bp, synthetic construct
  source 1..50: mol_type = other DNA
rcccraaaataaaattaaacatcrcttttatcctctatatcactactcac

SEQ ID NO: 21369 - DNA, 50 bp, synthetic construct
  source 1..50: mol_type = other DNA
rtaaacaataacataaaaaacaaaaacratactcaattccatttccraac

SEQ ID NO: 21370 - DNA, 50 bp, synthetic construct
  source 1..50: mol_type = other DNA
aaataacrataatataaaaaacaaaaatccccaaaactccaaaacccaac

SEQ ID NO: 21371 - DNA, 50 bp, synthetic construct
  source 1..50: mol_type = other DNA
ttccctaatactcatactcccaataactcaaatatataactaaaaataac

SEQ ID NO: 21372 - DNA, 50 bp, synthetic construct
  source 1..50: mol_type = other DNA
caccaaaaaactttttctcaataaaaaaatttcttcacaacaaatatttc

SEQ ID NO: 21373 - DNA, 50 bp, synthetic construct
  source 1..50: mol_type = other DNA
aactcctaaactcaaacaccaaactccttttatcacattctatctcacac

SEQ ID NO: 21374 - DNA, 50 bp, synthetic construct
  source 1..50: mol_type = other DNA
tatccccaaacaaataataacatatcctataacaactccctaaaaaaaac

SEQ ID NO: 21375 - DNA, 50 bp, synthetic construct
  source 1..50: mol_type = other DNA
actcctccatttaaatttatctatttcctcataattcattaaaattatac

SEQ ID NO: 21376 - DNA, 50 bp, synthetic construct
  source 1..50: mol_type = other DNA
tacatcataataaaaaacatataatataaaatttactcattcctaataac

SEQ ID NO: 21377 - DNA, 50 bp, synthetic construct
  source 1..50: mol_type = other DNA
caaaacacaaaaaaccaaacttaataacttacccactaccatactctacc

SEQ ID NO: 21378 - DNA, 50 bp, synthetic construct
  source 1..50: mol_type = other DNA
aattttaaatactcaaactacaaaaaactaaaccttttcccraccataac

SEQ ID NO: 21379 - DNA, 50 bp, synthetic construct
  source 1..50: mol_type = other DNA
caaacccaaaaaaacaaatcctcatcaaaatcacaaaactaactaaaccc

SEQ ID NO: 21380 - DNA, 50 bp, synthetic construct
  source 1..50: mol_type = other DNA
ccctaataataatccaatcaaaaacaaccctcaaaaactcccaataatac

SEQ ID NO: 21381 - DNA, 50 bp, synthetic construct
  source 1..50: mol_type = other DNA
attatataaacacaaaaacacttatctaaacrcaacrataaatcatattc

SEQ ID NO: 21382 - DNA, 50 bp, synthetic construct
  source 1..50: mol_type = other DNA
aaaaaactatattaatataaatacacttaacctaacccccttatacatac

SEQ ID NO: 21383 - DNA, 50 bp, synthetic construct
  source 1..50: mol_type = other DNA
acatacraatccaaacctaaaaacaaatttccataaacrtaacctattcc

SEQ ID NO: 21384 - DNA, 50 bp, synthetic construct
  source 1..50: mol_type = other DNA
acctaaaaacaaatttccataaacrtaacctattccrtataaatatattc

SEQ ID NO: 21385 - DNA, 50 bp, synthetic construct
  source 1..50: mol_type = other DNA
aaaaattttataaaaaccttaaactacccccrtctactaaaaaaaacccc

SEQ ID NO: 21386 - DNA, 50 bp, synthetic construct
  source 1..50: mol_type = other DNA
tttctccatatttatcaaactaatcttaaactcccracctcaaataatcc

SEQ ID NO: 21387 - DNA, 50 bp, synthetic construct
  source 1..50: mol_type = other DNA
ttactaaaaataaaatttctccatatttatcaaactaatcttaaactccc

SEQ ID NO: 21388 - DNA, 50 bp, synthetic construct
  source 1..50: mol_type = other DNA
cattcaaaaacaaccccaaaataaccacaaataaacccataaactacaac

SEQ ID NO: 21389 - DNA, 50 bp, synthetic construct
  source 1..50: mol_type = other DNA
aatctacctataattaccttaaaactacccttaaatatataaaaacccac

SEQ ID NO: 21390 - DNA, 50 bp, synthetic construct
  source 1..50: mol_type = other DNA
accttcatcaacccaatctatcatttaaacaccaatcttcactaaacctc

SEQ ID NO: 21391 - DNA, 50 bp, synthetic construct
  source 1..50: mol_type = other DNA
caataaaaactaatactcaaataacaaattaaattaataaaaataccctc

SEQ ID NO: 21392 - DNA, 50 bp, synthetic construct
  source 1..50: mol_type = other DNA
caccaaaactaataatatttactttacactactacccaactcctcaattc

SEQ ID NO: 21393 - DNA, 50 bp, synthetic construct
  source 1..50: mol_type = other DNA
caacatattaaaccaattatccaaaaatcatccccaaaaatcatatcccc

SEQ ID NO: 21394 - DNA, 50 bp, synthetic construct
  source 1..50: mol_type = other DNA
atctctaaataacaccaacaaatatttcctccaccaaacctcaaaaattc

SEQ ID NO: 21395 - DNA, 50 bp, synthetic construct
  source 1..50: mol_type = other DNA
ataaaaaacaaaactcctccaataaaatacacaaaataaacccccrtacc

SEQ ID NO: 21396 - DNA, 50 bp, synthetic construct
  source 1..50: mol_type = other DNA
taacctccaaaacaaaaaaactaaccaatctaattaccactatatctccc

SEQ ID NO: 21397 - DNA, 50 bp, synthetic construct
  source 1..50: mol_type = other DNA
aaaaacaccttatacactatactccacctaaaccaacctctatcattacc

SEQ ID NO: 21398 - DNA, 50 bp, synthetic construct
  source 1..50: mol_type = other DNA
ctcaaataaaacacaatacataaaatattcccaaaaacattaaaacattc

SEQ ID NO: 21399 - DNA, 50 bp, synthetic construct
  source 1..50: mol_type = other DNA
aaaactcaaatattacccaacaataatataacccactacctaaaataatc

SEQ ID NO: 21400 - DNA, 50 bp, synthetic construct
  source 1..50: mol_type = other DNA
tattaaacaatatttaaacccctccctataaaaaattaacacctcatcac

SEQ ID NO: 21401 - DNA, 50 bp, synthetic construct
  source 1..50: mol_type = other DNA
ttttactttaatcaataaaatataaacaataacttaaatcaccttcaaac

SEQ ID NO: 21402 - DNA, 50 bp, synthetic construct
  source 1..50: mol_type = other DNA
taaaaataaaaaccaaatactcacacttaaaatatacttaaaactctccc

SEQ ID NO: 21403 - DNA, 50 bp, synthetic construct
  source 1..50: mol_type = other DNA
aaaaattcaaaaaacaaaattaactcatcaatatccccaaaacccaaccc

SEQ ID NO: 21404 - DNA, 50 bp, synthetic construct
  source 1..50: mol_type = other DNA
ctaaaaacctttataaaacttctttcactccacaacacacttccactaac

SEQ ID NO: 21405 - DNA, 50 bp, synthetic construct
  source 1..50: mol_type = other DNA
aaactttacaaaaacttccaacractaactaaaaatatttcttcctaccc

SEQ ID NO: 21406 - DNA, 50 bp, synthetic construct
  source 1..50: mol_type = other DNA
aactcctttcaactatatcctacrccttcaaaaactaactaaaacctcac

SEQ ID NO: 21407 - DNA, 50 bp, synthetic construct
  source 1..50: mol_type = other DNA
ctaacaatacaaaaccaacratacaaatcaatccaaccaatttccrttac

SEQ ID NO: 21408 - DNA, 50 bp, synthetic construct
  source 1..50: mol_type = other DNA
aataactatactaacctccatcacaaaactactaacaatacaaaaccaac

SEQ ID NO: 21409 - DNA, 50 bp, synthetic construct
  source 1..50: mol_type = other DNA
ctacactactaataaccttataataaaaaccaacacaaccactaccttcc

SEQ ID NO: 21410 - DNA, 50 bp, synthetic construct
  source 1..50: mol_type = other DNA
accttataaccccrttttcaccaaaaaaacatactaaacacattaactac

SEQ ID NO: 21411 - DNA, 50 bp, synthetic construct
  source 1..50: mol_type = other DNA
aaaaaacatactaaacacattaactacrtatcccaaaaacactaaatcac

SEQ ID NO: 21412 - DNA, 50 bp, synthetic construct
  source 1..50: mol_type = other DNA
acrtatcccaaaaacactaaatcacraaataaaaaaactccataaaaccc

SEQ ID NO: 21413 - DNA, 50 bp, synthetic construct
  source 1..50: mol_type = other DNA
tattccccacaaaaacttctcraaaaacctaaaacccataaaccrtaaac

SEQ ID NO: 21414 - DNA, 50 bp, synthetic construct
  source 1..50: mol_type = other DNA
aaaactaaatcaaatatacaatttctcratttaactaccraatcctaaac

SEQ ID NO: 21415 - DNA, 50 bp, synthetic construct
  source 1..50: mol_type = other DNA
acatttcratcaaaactaaatcaaatatacaatttctcratttaactacc

SEQ ID NO: 21416 - DNA, 50 bp, synthetic construct
  source 1..50: mol_type = other DNA
aactttaacctaacatttcratcaaaactaaatcaaatatacaatttctc

SEQ ID NO: 21417 - DNA, 50 bp, synthetic construct
  source 1..50: mol_type = other DNA
atcctaaacaaaaaaattctctctaaaccatatataaaactccctaacrc

SEQ ID NO: 21418 - DNA, 50 bp, synthetic construct
  source 1..50: mol_type = other DNA
aaatcctaaacaaaaaaattctctctaaaccatatataaaactccctaac

SEQ ID NO: 21419 - DNA, 50 bp, synthetic construct
  source 1..50: mol_type = other DNA
raaacraaaaaacrcaaactctaaaatacctcctattctacttacaaaac

SEQ ID NO: 21420 - DNA, 50 bp, synthetic construct
  source 1..50: mol_type = other DNA
raaaaaacrcaaactctaaaatacctcctattctacttacaaaacraaac

SEQ ID NO: 21421 - DNA, 50 bp, synthetic construct
  source 1..50: mol_type = other DNA
actctaaaatacctcctattctacttacaaaacraaacraaaactcttac

SEQ ID NO: 21422 - DNA, 50 bp, synthetic construct
  source 1..50: mol_type = other DNA
acttatcraactaaaaaaattctttaaataacaaccaaaatacaaaaacc

SEQ ID NO: 21423 - DNA, 50 bp, synthetic construct
  source 1..50: mol_type = other DNA
aactaaaaaaattctttaaataacaaccaaaatacaaaaaccrcttactc

SEQ ID NO: 21424 - DNA, 50 bp, synthetic construct
  source 1..50: mol_type = other DNA
attctttaaataacaaccaaaatacaaaaaccrcttactcrttttcaatc

SEQ ID NO: 21425 - DNA, 50 bp, synthetic construct
  source 1..50: mol_type = other DNA
tctacaatcrtaataaacacraaataaaacctaacacattcraaaaaatc

SEQ ID NO: 21426 - DNA, 50 bp, synthetic construct
  source 1..50: mol_type = other DNA
acttaacrttctacaatcrtaataaacacraaataaaacctaacacattc

SEQ ID NO: 21427 - DNA, 50 bp, synthetic construct
  source 1..50: mol_type = other DNA
ttcttaatttttttaactatttaacacrcrtaacttaacrttctacaatc

SEQ ID NO: 21428 - DNA, 50 bp, synthetic construct
  source 1..50: mol_type = other DNA
raacccctcttttcttaatttttttaactatttaacacrcrtaacttaac

SEQ ID NO: 21429 - DNA, 50 bp, synthetic construct
  source 1..50: mol_type = other DNA
tataccaaatcccatttcrtattcattacractataaaacrccaaattac

SEQ ID NO: 21430 - DNA, 50 bp, synthetic construct
  source 1..50: mol_type = other DNA
caaatcccraacraacccctcttttcttaatttttttaactatttaacac

SEQ ID NO: 21431 - DNA, 50 bp, synthetic construct
  source 1..50: mol_type = other DNA
actcaacaaataactcrttaatctaaaaatataattctcratttaaatcc

SEQ ID NO: 21432 - DNA, 50 bp, synthetic construct
  source 1..50: mol_type = other DNA
raaaaaaccttactcaacaaataactcrttaatctaaaaatataattctc

SEQ ID NO: 21433 - DNA, 50 bp, synthetic construct
  source 1..50: mol_type = other DNA
ctatcatcrcctctaataaattcraaaaaaccttactcaacaaataactc

SEQ ID NO: 21434 - DNA, 50 bp, synthetic construct
  source 1..50: mol_type = other DNA
aaaccaacraaccatctactaaacaaaatctcctcraatttactaaaaac

SEQ ID NO: 21435 - DNA, 50 bp, synthetic construct
  source 1..50: mol_type = other DNA
tactaaacaaaatctcctcraatttactaaaaacrataacaacracaaac

SEQ ID NO: 21436 - DNA, 50 bp, synthetic construct
  source 1..50: mol_type = other DNA
aatcraaaaacattaacaaacctaaatccctacrtatccaaaaaaaacrc

SEQ ID NO: 21437 - DNA, 50 bp, synthetic construct
  source 1..50: mol_type = other DNA
aaaatcraaaaacattaacaaacctaaatccctacrtatccaaaaaaaac

SEQ ID NO: 21438 - DNA, 50 bp, synthetic construct
  source 1..50: mol_type = other DNA
cacrcaaaaattcaaacctactaatatctcccractttactcctaaaaac

SEQ ID NO: 21439 - DNA, 50 bp, synthetic construct
  source 1..50: mol_type = other DNA
ttaattaaacacttactatataccraacctaaaacaaccactatccraac

SEQ ID NO: 21440 - DNA, 50 bp, synthetic construct
  source 1..50: mol_type = other DNA
taaattaattaaacacttactatataccraacctaaaacaaccactatcc

SEQ ID NO: 21441 - DNA, 50 bp, synthetic construct
  source 1..50: mol_type = other DNA
acactatatccaacattcracctaaattaattaaacacttactatatacc

SEQ ID NO: 21442 - DNA, 50 bp, synthetic construct
  source 1..50: mol_type = other DNA
aataactacctcaaactcracatacaacaaatacttaatcaattcaaacc

SEQ ID NO: 21443 - DNA, 50 bp, synthetic construct
  source 1..50: mol_type = other DNA
atacaacaaatacttaatcaattcaaaccraatattaaacacaatacatc

SEQ ID NO: 21444 - DNA, 50 bp, synthetic construct
  source 1..50: mol_type = other DNA
cttaatcaattcaaaccraatattaaacacaatacatcraccccaaaaac

SEQ ID NO: 21445 - DNA, 50 bp, synthetic construct
  source 1..50: mol_type = other DNA
ttttcttattttttacattaacraacattacccccaaacactcacctacc

SEQ ID NO: 21446 - DNA, 50 bp, synthetic construct
  source 1..50: mol_type = other DNA
aaaaaaaaaccaacttaactcctacccccrcaaaacttccaatctaaatc

SEQ ID NO: 21447 - DNA, 50 bp, synthetic construct
  source 1..50: mol_type = other DNA
aaaatcctctattctttcccaattccaacractcaaactaaaaactctac

SEQ ID NO: 21448 - DNA, 50 bp, synthetic construct
  source 1..50: mol_type = other DNA
aaaacaaaaactaaattaaccctttccccatactcaaaatataaaacaac

SEQ ID NO: 21449 - DNA, 50 bp, synthetic construct
  source 1..50: mol_type = other DNA
tacctataatttacaaaaataatacataaaataccacaaccaaattctcc

SEQ ID NO: 21450 - DNA, 50 bp, synthetic construct
  source 1..50: mol_type = other DNA
aaataccataaccracaaacraattactcaacaaacttataacactcctc

SEQ ID NO: 21451 - DNA, 50 bp, synthetic construct
  source 1..50: mol_type = other DNA
aacacaactctaaccaactaaatcrtaaaaaataatacataaacractcc

SEQ ID NO: 21452 - DNA, 50 bp, synthetic construct
  source 1..50: mol_type = other DNA
ctaccttcrcaaaaaactactccrataaaataaaccataatctcraaatc

SEQ ID NO: 21453 - DNA, 50 bp, synthetic construct
  source 1..50: mol_type = other DNA
ttacacrattcaaaattcattttctaactatcaccrttactcattttctc

SEQ ID NO: 21454 - DNA, 50 bp, synthetic construct
  source 1..50: mol_type = other DNA
ataacrataacaaccaaaaaataaatcctaaaccrtacaataacaaatcc

SEQ ID NO: 21455 - DNA, 50 bp, synthetic construct
  source 1..50: mol_type = other DNA
cccraaacaatatttctattttaaatcccrctaccttctttcatctcatc

SEQ ID NO: 21456 - DNA, 50 bp, synthetic construct
  source 1..50: mol_type = other DNA
taaccacaaccataaaatcctactctcttttaacaactaaaaaaactaac

SEQ ID NO: 21457 - DNA, 50 bp, synthetic construct
  source 1..50: mol_type = other DNA
tactataaattctcrccrtaactcacttactatataacctcraaaaaatc

SEQ ID NO: 21458 - DNA, 50 bp, synthetic construct
  source 1..50: mol_type = other DNA
atcaaaccaatacacrcacatctaccraaaatttaccaatcaccaaaatc

SEQ ID NO: 21459 - DNA, 50 bp, synthetic construct
  source 1..50: mol_type = other DNA
aataactaacaaactctcracaaatatacrtacactaatttaatacaaac

SEQ ID NO: 21460 - DNA, 50 bp, synthetic construct
  source 1..50: mol_type = other DNA
actctcracaaatatacrtacactaatttaatacaaacrtaattataaac

SEQ ID NO: 21461 - DNA, 50 bp, synthetic construct
  source 1..50: mol_type = other DNA
acttttataaatttttatccctcaacttccaatcraaactaaaaaaatcc

SEQ ID NO: 21462 - DNA, 50 bp, synthetic construct
  source 1..50: mol_type = other DNA
tacacctacaaccctataaaaattaatctatccrtctttcccttacaatc

SEQ ID NO: 21463 - DNA, 50 bp, synthetic construct
  source 1..50: mol_type = other DNA
tcrtaacctattaaacrttcctatattattcaataccaaaataaataacc

SEQ ID NO: 21464 - DNA, 50 bp, synthetic construct
  source 1..50: mol_type = other DNA
tccttaatacatctatatttttctcattcataatataaaaaaccttaatc

SEQ ID NO: 21465 - DNA, 50 bp, synthetic construct
  source 1..50: mol_type = other DNA
cattcataatataaaaaaccttaatcrtacctatcacactaaaatattac

SEQ ID NO: 21466 - DNA, 50 bp, synthetic construct
  source 1..50: mol_type = other DNA
ccttcaaaaaatcrtaaaataaaacatattaatcaccaaaccctccctcc

SEQ ID NO: 21467 - DNA, 50 bp, synthetic construct
  source 1..50: mol_type = other DNA
aacatttaaatttcctactactatttacccattaactaaaaataccctcc

SEQ ID NO: 21468 - DNA, 50 bp, synthetic construct
  source 1..50: mol_type = other DNA
tcttataatacaccacrtaaacrttataaattataaaccactatacaaac

SEQ ID NO: 21469 - DNA, 50 bp, synthetic construct
  source 1..50: mol_type = other DNA
aaattaaattaatactaccctataaaaatcttataatacaccacrtaaac

SEQ ID NO: 21470 - DNA, 50 bp, synthetic construct
  source 1..50: mol_type = other DNA
cttaaaaaattaaattaatactaccctataaaaatcttataatacaccac

SEQ ID NO: 21471 - DNA, 50 bp, synthetic construct
  source 1..50: mol_type = other DNA
tataaaatacacattaaaaactctttctaacraacrtttctaccraatcc

SEQ ID NO: 21472 - DNA, 50 bp, synthetic construct
  source 1..50: mol_type = other DNA
aaatttcattaaatcttcaatatcaaacaactaacttctattttataacc

SEQ ID NO: 21473 - DNA, 50 bp, synthetic construct
  source 1..50: mol_type = other DNA
ccrcaaataactatatattaaaccccttttctcacctataaaataaaaac

SEQ ID NO: 21474 - DNA, 50 bp, synthetic construct
  source 1..50: mol_type = other DNA
tacccttaacaaaaataacacraaatatcactaccattcccacttcacac

SEQ ID NO: 21475 - DNA, 50 bp, synthetic construct
  source 1..50: mol_type = other DNA
attataatccraatccaaactccaacctctttcrctccaaatttactatc

SEQ ID NO: 21476 - DNA, 50 bp, synthetic construct
  source 1..50: mol_type = other DNA
crcraaaaatactaaaaattataatccraatccaaactccaacctctttc

SEQ ID NO: 21477 - DNA, 50 bp, synthetic construct
  source 1..50: mol_type = other DNA
aaaacaaacaccaaaaaacctccattcatcttatccttcttttcctccrc

SEQ ID NO: 21478 - DNA, 50 bp, synthetic construct
  source 1..50: mol_type = other DNA
raaaaacaaacaccaaaaaacctccattcatcttatccttcttttcctcc

SEQ ID NO: 21479 - DNA, 50 bp, synthetic construct
  source 1..50: mol_type = other DNA
ctcaaacaaaatcctaaaaaaaactaacaaaccaaccaaactaaaaaaac

SEQ ID NO: 21480 - DNA, 50 bp, synthetic construct
  source 1..50: mol_type = other DNA
aaaaaaactaacaaaccaaccaaactaaaaaaacrccraaccaaacattc

SEQ ID NO: 21481 - DNA, 50 bp, synthetic construct
  source 1..50: mol_type = other DNA
ctaactaacctaatactaaaactctaaaaatttaactctaaaaaactccc

SEQ ID NO: 21482 - DNA, 50 bp, synthetic construct
  source 1..50: mol_type = other DNA
tttaactctaaaaaactcccrataaatccaaatcrtctaactaaatatcc

SEQ ID NO: 21483 - DNA, 50 bp, synthetic construct
  source 1..50: mol_type = other DNA
aacaactactaacccaaaaaaacttaaatcrtaaacttaacattaaaacc

SEQ ID NO: 21484 - DNA, 50 bp, synthetic construct
  source 1..50: mol_type = other DNA
aactactaacccaaaaaaacttaaatcrtaaacttaacattaaaaccrac

SEQ ID NO: 21485 - DNA, 50 bp, synthetic construct
  source 1..50: mol_type = other DNA
aataaaaaacctaaactaactactcttattataatactactaaaaaatac

SEQ ID NO: 21486 - DNA, 50 bp, synthetic construct
  source 1..50: mol_type = other DNA
cctaaaaatcaaacaccraaccraaataactactatatcccrttccaaac

SEQ ID NO: 21487 - DNA, 50 bp, synthetic construct
  source 1..50: mol_type = other DNA
actatctaacctaaaaatcaaacaccraaccraaataactactatatccc

SEQ ID NO: 21488 - DNA, 50 bp, synthetic construct
  source 1..50: mol_type = other DNA
taaataaataaacraactcactatctaacctaaaaatcaaacaccraacc

SEQ ID NO: 21489 - DNA, 50 bp, synthetic construct
  source 1..50: mol_type = other DNA
aaattaacaaccccaacrcctaaaacraaatataacaattatttcrattc

SEQ ID NO: 21490 - DNA, 50 bp, synthetic construct
  source 1..50: mol_type = other DNA
taacaattatttcrattcratatctaacttctaaactaaacaataaactc

SEQ ID NO: 21491 - DNA, 50 bp, synthetic construct
  source 1..50: mol_type = other DNA
aaacaataaactcrttcattcattcattcatccattcrttttactcaatc

SEQ ID NO: 21492 - DNA, 50 bp, synthetic construct
  source 1..50: mol_type = other DNA
acaataaactcrttcattcattcattcatccattcrttttactcaatcrc

SEQ ID NO: 21493 - DNA, 50 bp, synthetic construct
  source 1..50: mol_type = other DNA
aacacractctaaaaacacrcrcaatacctacttaacacaaaataaaacc

SEQ ID NO: 21494 - DNA, 50 bp, synthetic construct
  source 1..50: mol_type = other DNA
catttaacaaatacttaaaacractctactctatactaaacaaatattac

SEQ ID NO: 21495 - DNA, 50 bp, synthetic construct
  source 1..50: mol_type = other DNA
tttaacaaatacttaaaacractctactctatactaaacaaatattacrc

SEQ ID NO: 21496 - DNA, 50 bp, synthetic construct
  source 1..50: mol_type = other DNA
actctaacaccctctttaaaactctataattctaatatctccaaactttc

SEQ ID NO: 21497 - DNA, 50 bp, synthetic construct
  source 1..50: mol_type = other DNA
taacaccctctttaaaactctataattctaatatctccaaactttcraac

SEQ ID NO: 21498 - DNA, 50 bp, synthetic construct
  source 1..50: mol_type = other DNA
aaactctataattctaatatctccaaactttcraacrccactatattctc

SEQ ID NO: 21499 - DNA, 50 bp, synthetic construct
  source 1..50: mol_type = other DNA
taacaaaaataccaaactccatacraaactacractaaaccaaatatacc

SEQ ID NO: 21500 - DNA, 50 bp, synthetic construct
  source 1..50: mol_type = other DNA
aaatacraatacccrcaacaaaaactatatacratacatctaatccaacc

SEQ ID NO: 21501 - DNA, 50 bp, synthetic construct
  source 1..50: mol_type = other DNA
acaataaaacraacaactccaaacactaacaaaaataccaaactccatac

SEQ ID NO: 21502 - DNA, 50 bp, synthetic construct
  source 1..50: mol_type = other DNA
taaaaactaatataacraaactaactaaaatataaactcaaccaaacccc

SEQ ID NO: 21503 - DNA, 50 bp, synthetic construct
  source 1..50: mol_type = other DNA
cacccaaaactcaaactaaaaacacccaaaaaaattccrcttaactacac

SEQ ID NO: 21504 - DNA, 50 bp, synthetic construct
  source 1..50: mol_type = other DNA
aatcacaacccaaaaatataaacatccaaacatcaacaacaaacatactc

SEQ ID NO: 21505 - DNA, 50 bp, synthetic construct
  source 1..50: mol_type = other DNA
aatataaacatccaaacatcaacaacaaacatactcrctaactatcaacc

SEQ ID NO: 21506 - DNA, 50 bp, synthetic construct
  source 1..50: mol_type = other DNA
aaacaactaaaactaataatattaaaaaaaccactacctaataaacctcc

SEQ ID NO: 21507 - DNA, 50 bp, synthetic construct
  source 1..50: mol_type = other DNA
aaaacacacaaataatacctcrattaataataaaaccaaaccaaaaatcc

SEQ ID NO: 21508 - DNA, 50 bp, synthetic construct
  source 1..50: mol_type = other DNA
aaaaaaaatactcccacctaaaaatttcaaaacaaccccrtaaaaactac

SEQ ID NO: 21509 - DNA, 50 bp, synthetic construct
  source 1..50: mol_type = other DNA
aactaaaacctatactaccccctcctaaaaattttacaaaaaatcaaatc

SEQ ID NO: 21510 - DNA, 50 bp, synthetic construct
  source 1..50: mol_type = other DNA
caaaaccaccccaaaataaatcactaaaccaaaattaaaatccaaactcc

SEQ ID NO: 21511 - DNA, 50 bp, synthetic construct
  source 1..50: mol_type = other DNA
caccccaaaataaatcactaaaccaaaattaaaatccaaactccrtaaac

SEQ ID NO: 21512 - DNA, 50 bp, synthetic construct
  source 1..50: mol_type = other DNA
ttccttatatctaaaaaactattttaaaccraaccaaccraacaatactc

SEQ ID NO: 21513 - DNA, 50 bp, synthetic construct
  source 1..50: mol_type = other DNA
cccractcaaaataactttccaaacacaaaaaaatattttatcccactcc

SEQ ID NO: 21514 - DNA, 50 bp, synthetic construct
  source 1..50: mol_type = other DNA
taccctatcacaaactaatataaataataccaaataaacccacctaaaac

SEQ ID NO: 21515 - DNA, 50 bp, synthetic construct
  source 1..50: mol_type = other DNA
aaaatacaaacacaaacaaacaaaccccatttaaaatcctaccactacac

SEQ ID NO: 21516 - DNA, 50 bp, synthetic construct
  source 1..50: mol_type = other DNA
crccattccaaaaaccatatcaacacraataactctaatataaattaacc

SEQ ID NO: 21517 - DNA, 50 bp, synthetic construct
  source 1..50: mol_type = other DNA
ataacctaaataaaactacaattccrccattccaaaaaccatatcaacac

SEQ ID NO: 21518 - DNA, 50 bp, synthetic construct
  source 1..50: mol_type = other DNA
ctcacttcaccatctataaatcaatataacctaaataaaactacaattcc

SEQ ID NO: 21519 - DNA, 50 bp, synthetic construct
  source 1..50: mol_type = other DNA
ctctcaaaatccaaaaatacccacatcaaatatcraaaacaaaaccttcc

SEQ ID NO: 21520 - DNA, 50 bp, synthetic construct
  source 1..50: mol_type = other DNA
ccctactctcratacctaatataaacacttctaaaccctaaaaacccatc

SEQ ID NO: 21521 - DNA, 50 bp, synthetic construct
  source 1..50: mol_type = other DNA
atataaacacttctaaaccctaaaaacccatcrtaaaaacaacaaaaccc

SEQ ID NO: 21522 - DNA, 50 bp, synthetic construct
  source 1..50: mol_type = other DNA
ccacacccrtaaaaccactaaatatattatacctaaacctaaaaacttac

SEQ ID NO: 21523 - DNA, 50 bp, synthetic construct
  source 1..50: mol_type = other DNA
cctcaccatataccaaataccaatcaaacccttcataaatatcatctcac

SEQ ID NO: 21524 - DNA, 50 bp, synthetic construct
  source 1..50: mol_type = other DNA
taaaaaccatcccctaaactaaataaaaatatacaactataacacactcc

SEQ ID NO: 21525 - DNA, 50 bp, synthetic construct
  source 1..50: mol_type = other DNA
taaactaaataaaaatatacaactataacacactccrtacctaccrtcac

SEQ ID NO: 21526 - DNA, 50 bp, synthetic construct
  source 1..50: mol_type = other DNA
actaacaccraatccctacaaaaatcattatttaaccaaaacaaaaaacc

SEQ ID NO: 21527 - DNA, 50 bp, synthetic construct
  source 1..50: mol_type = other DNA
ttcraatcctataaatccctaataaatcacacatcttctccttacttccc

SEQ ID NO: 21528 - DNA, 50 bp, synthetic construct
  source 1..50: mol_type = other DNA
aaaacctcaaatatcaccaaatacaaacrcacattctacctcaaaaaaac

SEQ ID NO: 21529 - DNA, 50 bp, synthetic construct
  source 1..50: mol_type = other DNA
taatcaaaaactttcccctctaaacctcrtctccctaaaataaaatatac

SEQ ID NO: 21530 - DNA, 50 bp, synthetic construct
  source 1..50: mol_type = other DNA
aaaataaaatatacrtttatatttaataacatctaaaaccttctctaccc

SEQ ID NO: 21531 - DNA, 50 bp, synthetic construct
  source 1..50: mol_type = other DNA
tttatatttaataacatctaaaaccttctctacccrcaattctaaactcc

SEQ ID NO: 21532 - DNA, 50 bp, synthetic construct
  source 1..50: mol_type = other DNA
taacctaaaactttatcraatactacaaacataataaaaaaacacaaacc

SEQ ID NO: 21533 - DNA, 50 bp, synthetic construct
  source 1..50: mol_type = other DNA
ccataaccataaacatacaaacccttacacacctattctcttactcaaac

SEQ ID NO: 21534 - DNA, 50 bp, synthetic construct
  source 1..50: mol_type = other DNA
ttataatcaaacctccccaaaaaaaaatatcaacttaaaaccctaaatcc

SEQ ID NO: 21535 - DNA, 50 bp, synthetic construct
  source 1..50: mol_type = other DNA
ccaaaaaaaaatatcaacttaaaaccctaaatccraaactaacacccaac

SEQ ID NO: 21536 - DNA, 50 bp, synthetic construct
  source 1..50: mol_type = other DNA
tcaatatatcaatatattcaattctttaccttctacttttaaacttcctc

SEQ ID NO: 21537 - DNA, 50 bp, synthetic construct
  source 1..50: mol_type = other DNA
acacrtaacccctactactatatcrttcccctattaactaatattaaacc

SEQ ID NO: 21538 - DNA, 50 bp, synthetic construct
  source 1..50: mol_type = other DNA
aattaaaattaatttaacctatacratctaacactaaccaataaaaaaac

SEQ ID NO: 21539 - DNA, 50 bp, synthetic construct
  source 1..50: mol_type = other DNA
atacratctaacactaaccaataaaaaaacracacaacaacaaaaaccac

SEQ ID NO: 21540 - DNA, 50 bp, synthetic construct
  source 1..50: mol_type = other DNA
raatttattaaacctactaaatcaaaatccraattattttaacataaacc

SEQ ID NO: 21541 - DNA, 50 bp, synthetic construct
  source 1..50: mol_type = other DNA
tcaatcattacrcaatctacraatttattaaacctactaaatcaaaatcc

SEQ ID NO: 21542 - DNA, 50 bp, synthetic construct
  source 1..50: mol_type = other DNA
rattcatattaaaataattcraattctaattcaataaacccaacaaactc

SEQ ID NO: 21543 - DNA, 50 bp, synthetic construct
  source 1..50: mol_type = other DNA
taaaataattcraattctaattcaataaacccaacaaactcrcaaattac

SEQ ID NO: 21544 - DNA, 50 bp, synthetic construct
  source 1..50: mol_type = other DNA
actaccaaaaaaccaaaaaaatacctaacataacataaaactcctttaac

SEQ ID NO: 21545 - DNA, 50 bp, synthetic construct
  source 1..50: mol_type = other DNA
ctatatacattcraaaatatactaacaaaaaactacacacaccacacacc

SEQ ID NO: 21546 - DNA, 50 bp, synthetic construct
  source 1..50: mol_type = other DNA
accaacataaaacaactaccaaaaacrcaaccracaaacaaatattcrac

SEQ ID NO: 21547 - DNA, 50 bp, synthetic construct
  source 1..50: mol_type = other DNA
aactaacccataaaatcaaaaacaatatctccattataacrtaaccraac

SEQ ID NO: 21548 - DNA, 50 bp, synthetic construct
  source 1..50: mol_type = other DNA
aaaaaaaaatcaacaattaacctttacctctacrtctctctattaataac

SEQ ID NO: 21549 - DNA, 50 bp, synthetic construct
  source 1..50: mol_type = other DNA
ataatttattactccccaaaaaaaattactcttaaaaaataaacttaacc

SEQ ID NO: 21550 - DNA, 50 bp, synthetic construct
  source 1..50: mol_type = other DNA
cttaattaactctcacaaaactttaaatacatataaataaaaacctaacc

SEQ ID NO: 21551 - DNA, 50 bp, synthetic construct
  source 1..50: mol_type = other DNA
cccttcctacctcctcatttttacaaataaaaacatttttacaaaaaccc

SEQ ID NO: 21552 - DNA, 50 bp, synthetic construct
  source 1..50: mol_type = other DNA
ataaaacaaaaactcatctaaacctctaaaccttataaccattacttccc

SEQ ID NO: 21553 - DNA, 50 bp, synthetic construct
  source 1..50: mol_type = other DNA
ataaccattacttcccrtttaaaaccacttaaaactaacaaataactcac

SEQ ID NO: 21554 - DNA, 50 bp, synthetic construct
  source 1..50: mol_type = other DNA
aactactaacaattcataatcccaccaaacraaaactccaaaaactatcc

SEQ ID NO: 21555 - DNA, 50 bp, synthetic construct
  source 1..50: mol_type = other DNA
ctctataactcattctaaaatacaataacaaaatcataactcactacaac

SEQ ID NO: 21556 - DNA, 50 bp, synthetic construct
  source 1..50: mol_type = other DNA
aaaatctaaaatactatttcacaccaaaatattactaatatacctaatac

SEQ ID NO: 21557 - DNA, 50 bp, synthetic construct
  source 1..50: mol_type = other DNA
acaaccccacctttattcctaaattaacaaaaataactaccaatctacac

SEQ ID NO: 21558 - DNA, 50 bp, synthetic construct
  source 1..50: mol_type = other DNA
acaaccatccttactaatctaaaaacaaaaataaaactacaactccctac

SEQ ID NO: 21559 - DNA, 50 bp, synthetic construct
  source 1..50: mol_type = other DNA
aatatattattaatcrcccaaaaataacctcatatctaccatatatatac

SEQ ID NO: 21560 - DNA, 50 bp, synthetic construct
  source 1..50: mol_type = other DNA
tttcctcctccraaaaaaaccccaaactaaaaacaaatatattattaatc

SEQ ID NO: 21561 - DNA, 50 bp, synthetic construct
  source 1..50: mol_type = other DNA
aaataattaaattaacttaaattctttcttatcctcacaattaaaaacac

SEQ ID NO: 21562 - DNA, 50 bp, synthetic construct
  source 1..50: mol_type = other DNA
aaaaaaactcaaaccaacccaaccactccttcatacataacctctaaaac

SEQ ID NO: 21563 - DNA, 50 bp, synthetic construct
  source 1..50: mol_type = other DNA
aaataaaacactactacacctttttctactaaataaccccttctcacrac

SEQ ID NO: 21564 - DNA, 50 bp, synthetic construct
  source 1..50: mol_type = other DNA
attaaataaaacactactacacctttttctactaaataaccccttctcac

SEQ ID NO: 21565 - DNA, 50 bp, synthetic construct
  source 1..50: mol_type = other DNA
aactaaaaattatctctaccaaaaattctaaccrccactactcrataaac

SEQ ID NO: 21566 - DNA, 50 bp, synthetic construct
  source 1..50: mol_type = other DNA
ccaataaaactaaaaattatctctaccaaaaattctaaccrccactactc

SEQ ID NO: 21567 - DNA, 50 bp, synthetic construct
  source 1..50: mol_type = other DNA
acccctaaccccaataaaactaaaaattatctctaccaaaaattctaacc

SEQ ID NO: 21568 - DNA, 50 bp, synthetic construct
  source 1..50: mol_type = other DNA
aaacrttatataaatcatctaacctaaaaaaaaacccactcttacacccc

SEQ ID NO: 21569 - DNA, 50 bp, synthetic construct
  source 1..50: mol_type = other DNA
aaacraaatataaaaataaattctttcccaaaccaaataacttacacaac

SEQ ID NO: 21570 - DNA, 50 bp, synthetic construct
  source 1..50: mol_type = other DNA
crctccaaactaactttacaaaacccataccaaattaatcatcctaaccc

SEQ ID NO: 21571 - DNA, 50 bp, synthetic construct
  source 1..50: mol_type = other DNA
actaatttcacaaatatttacaaaatattaccaaaaacttttaaaacccc

SEQ ID NO: 21572 - DNA, 50 bp, synthetic construct
  source 1..50: mol_type = other DNA
cccaaaaaacacctccccctaaactaaaaataattcatctctctatctcc

SEQ ID NO: 21573 - DNA, 50 bp, synthetic construct
  source 1..50: mol_type = other DNA
aaaacaccaaaattccaacaaccatatttccataacatacataaactaac

SEQ ID NO: 21574 - DNA, 50 bp, synthetic construct
  source 1..50: mol_type = other DNA
ctacttacattatctcaaatttttaaaacctaacttcacaatcttacctc

SEQ ID NO: 21575 - DNA, 50 bp, synthetic construct
  source 1..50: mol_type = other DNA
aaatctcactatattacccaaactaatcttaaaattctaacctcaacccc

SEQ ID NO: 21576 - DNA, 50 bp, synthetic construct
  source 1..50: mol_type = other DNA
aaatcraaactatattctcccraaaaataataactataactctaaaaaac

SEQ ID NO: 21577 - DNA, 50 bp, synthetic construct
  source 1..50: mol_type = other DNA
aaaatcttacataaaaaaataaatccrtaacccraaaactaaaaaccccc

SEQ ID NO: 21578 - DNA, 50 bp, synthetic construct
  source 1..50: mol_type = other DNA
atcttaaattatatataaccatatatataaaatactaactcacctcaaac

SEQ ID NO: 21579 - DNA, 50 bp, synthetic construct
  source 1..50: mol_type = other DNA
tatataaaatactaactcacctcaaacrttaaaatttttctccaaaatac

SEQ ID NO: 21580 - DNA, 50 bp, synthetic construct
  source 1..50: mol_type = other DNA
aaaaaataaatcacttaataaatcacttacrtaaacactttcaaatatac

SEQ ID NO: 21581 - DNA, 50 bp, synthetic construct
  source 1..50: mol_type = other DNA
acttaataaatcacttacrtaaacactttcaaatatacraacaaattttc

SEQ ID NO: 21582 - DNA, 50 bp, synthetic construct
  source 1..50: mol_type = other DNA
cctccaaccacaaaataattttctcctatctcaaaataaaacraataatc

SEQ ID NO: 21583 - DNA, 50 bp, synthetic construct
  source 1..50: mol_type = other DNA
caaaataattttctcctatctcaaaataaaacraataatcractttacac

SEQ ID NO: 21584 - DNA, 50 bp, synthetic construct
  source 1..50: mol_type = other DNA
aaaacraataatcractttacacraaaacattctattcccaaaaatatac

SEQ ID NO: 21585 - DNA, 50 bp, synthetic construct
  source 1..50: mol_type = other DNA
ttactaatccttctcaacacaaaccctttataaatatcaaactaaaaaac

SEQ ID NO: 21586 - DNA, 50 bp, synthetic construct
  source 1..50: mol_type = other DNA
aaatattatccaaaaattccccccactaaaacaacctaaaatataacctc

SEQ ID NO: 21587 - DNA, 50 bp, synthetic construct
  source 1..50: mol_type = other DNA
aaaaacataatacactacaaaaaactacaaaaacctctacccaaaaaaac

SEQ ID NO: 21588 - DNA, 50 bp, synthetic construct
  source 1..50: mol_type = other DNA
ataccttattaacaatatatttacaaactatatacttaataaaaatcatc

SEQ ID NO: 21589 - DNA, 50 bp, synthetic construct
  source 1..50: mol_type = other DNA
ataaaccaccatacctatcctattatttccraaattaaaaaaatctatcc

SEQ ID NO: 21590 - DNA, 50 bp, synthetic construct
  source 1..50: mol_type = other DNA
aaaaataaataaacaacacttaaatacctaatatttaataaaccataaac

SEQ ID NO: 21591 - DNA, 50 bp, synthetic construct
  source 1..50: mol_type = other DNA
tacctaatatttaataaaccataaacracaatactaatcaaacrtactac

SEQ ID NO: 21592 - DNA, 50 bp, synthetic construct
  source 1..50: mol_type = other DNA
aatccactatcaaataaaaacttaaaaaacatcccrataactatacctac

SEQ ID NO: 21593 - DNA, 50 bp, synthetic construct
  source 1..50: mol_type = other DNA
aaaacaaaaatcatacctcttttactcccraatccttaaaaatcaacacc

SEQ ID NO: 21594 - DNA, 50 bp, synthetic construct
  source 1..50: mol_type = other DNA
tccttcaatactaactatatactaaactcratactaacctccaaaaaccc

SEQ ID NO: 21595 - DNA, 50 bp, synthetic construct
  source 1..50: mol_type = other DNA
atatactaaaaaaactcctaaaacacctatacctataataccttaaatac

SEQ ID NO: 21596 - DNA, 50 bp, synthetic construct
  source 1..50: mol_type = other DNA
caaaaaaacaatactaactcaaaaaaactaaatccttctctacccaaaac

SEQ ID NO: 21597 - DNA, 50 bp, synthetic construct
  source 1..50: mol_type = other DNA
aaaatatcttcaaactactttttaacatataccaactaacaaaacaaatc

SEQ ID NO: 21598 - DNA, 50 bp, synthetic construct
  source 1..50: mol_type = other DNA
ataccataataacttactttttctcacttaatatatttaaaaaactttcc

SEQ ID NO: 21599 - DNA, 50 bp, synthetic construct
  source 1..50: mol_type = other DNA
tctttcaaaatttctactcacacataaaacttatttacataaaaatcttc

SEQ ID NO: 21600 - DNA, 50 bp, synthetic construct
  source 1..50: mol_type = other DNA
caaaactattcraaaaataatatcatccttctaaaaactaatactactac

SEQ ID NO: 21601 - DNA, 50 bp, synthetic construct
  source 1..50: mol_type = other DNA
aaaaactaatcrcaacaatatcaatttccaaaaaaataacatcattttcc

SEQ ID NO: 21602 - DNA, 50 bp, synthetic construct
  source 1..50: mol_type = other DNA
tcaatttccaaaaaaataacatcattttccraataattttacattcctac

SEQ ID NO: 21603 - DNA, 50 bp, synthetic construct
  source 1..50: mol_type = other DNA
taaattcatttaaaacaaaaaccatatatccttaaaacttaatacatatc

SEQ ID NO: 21604 - DNA, 50 bp, synthetic construct
  source 1..50: mol_type = other DNA
ttcatttaaaacaaaaaccatatatccttaaaacttaatacatatcracc

SEQ ID NO: 21605 - DNA, 50 bp, synthetic construct
  source 1..50: mol_type = other DNA
tttaaaacaaaaaccatatatccttaaaacttaatacatatcraccraac

SEQ ID NO: 21606 - DNA, 50 bp, synthetic construct
  source 1..50: mol_type = other DNA
taaaacaaaaaccatatatccttaaaacttaatacatatcraccraacrc

SEQ ID NO: 21607 - DNA, 50 bp, synthetic construct
  source 1..50: mol_type = other DNA
tctcatttactcttcaaaataatattaaaaaataaacacrttaaatcttc

SEQ ID NO: 21608 - DNA, 50 bp, synthetic construct
  source 1..50: mol_type = other DNA
ctaaaaaacttcctaactcaaactacttaaaaaactcacraaaatctaac

SEQ ID NO: 21609 - DNA, 50 bp, synthetic construct
  source 1..50: mol_type = other DNA
aactactaccaaaaaaccraaaaccaaaaaacttaaaacaaaaaccatcc

SEQ ID NO: 21610 - DNA, 50 bp, synthetic construct
  source 1..50: mol_type = other DNA
aaaaaattcttcctcaccttataaccaatacaaaaataaaataacttaac

SEQ ID NO: 21611 - DNA, 50 bp, synthetic construct
  source 1..50: mol_type = other DNA
tctatacaaacaacttaaccttactattttaacctaaccctcatatctcc

SEQ ID NO: 21612 - DNA, 50 bp, synthetic construct
  source 1..50: mol_type = other DNA
aaaccaattataatacctcraaaatactttcractaaccaaaacaataac

SEQ ID NO: 21613 - DNA, 50 bp, synthetic construct
  source 1..50: mol_type = other DNA
atactttcractaaccaaaacaataacrtactaacctactcaccataaac

SEQ ID NO: 21614 - DNA, 50 bp, synthetic construct
  source 1..50: mol_type = other DNA
acaaaaaaccataattatttaatatttcaaaccttaactttttacttccc

SEQ ID NO: 21615 - DNA, 50 bp, synthetic construct
  source 1..50: mol_type = other DNA
cttaataattacatcttatactcctaataattaaacccaccattataaac

SEQ ID NO: 21616 - DNA, 50 bp, synthetic construct
  source 1..50: mol_type = other DNA
aaaaatctatatctttatttcattattctaattcaacacaaccrcaaatc

SEQ ID NO: 21617 - DNA, 50 bp, synthetic construct
  source 1..50: mol_type = other DNA
crtttctaaaaatctatatctttatttcattattctaattcaacacaacc

SEQ ID NO: 21618 - DNA, 50 bp, synthetic construct
  source 1..50: mol_type = other DNA
tcaattaaaaataatcaatatttccctatcatttttaactaccccattac

SEQ ID NO: 21619 - DNA, 50 bp, synthetic construct
  source 1..50: mol_type = other DNA
cacataaaatataaactaaaacataactatattcaaaccctaactctatc

SEQ ID NO: 21620 - DNA, 50 bp, synthetic construct
  source 1..50: mol_type = other DNA
ctactacrataacacttcctaaactatactacrcaataatcactaattac

SEQ ID NO: 21621 - DNA, 50 bp, synthetic construct
  source 1..50: mol_type = other DNA
actcccctctaaattattctactacrataacacttcctaaactatactac

SEQ ID NO: 21622 - DNA, 50 bp, synthetic construct
  source 1..50: mol_type = other DNA
actacacrtaattaataattactacrcaatataatttaaaaaatactacc

SEQ ID NO: 21623 - DNA, 50 bp, synthetic construct
  source 1..50: mol_type = other DNA
atactttcttccacccaattcattcrtaacactttattaataaaaccctc

SEQ ID NO: 21624 - DNA, 50 bp, synthetic construct
  source 1..50: mol_type = other DNA
aaatataaaacaacttaaccacaacacaaaacaaatataaaaacaaaacc

SEQ ID NO: 21625 - DNA, 50 bp, synthetic construct
  source 1..50: mol_type = other DNA
ttacaattcatcacrtctcttaactcraacctacctttaaaataattaac

SEQ ID NO: 21626 - DNA, 50 bp, synthetic construct
  source 1..50: mol_type = other DNA
aaaaaacatataccrccaaccattttaaaaacaaactcraaccaaaaaac

SEQ ID NO: 21627 - DNA, 50 bp, synthetic construct
  source 1..50: mol_type = other DNA
acctctatcaaactaatacttttctttttacctcaaatactataaaatac

SEQ ID NO: 21628 - DNA, 50 bp, synthetic construct
  source 1..50: mol_type = other DNA
ttaactcctaattcactataccaaacrtatactaaatcctaatcctcccc

SEQ ID NO: 21629 - DNA, 50 bp, synthetic construct
  source 1..50: mol_type = other DNA
tttacccaatcataaacatctaaaaaaacctacttaataaaacttaccrc

SEQ ID NO: 21630 - DNA, 50 bp, synthetic construct
  source 1..50: mol_type = other DNA
ataaaacatttctttttcccacctaaattccaaataaattaaaaaacttc

SEQ ID NO: 21631 - DNA, 50 bp, synthetic construct
  source 1..50: mol_type = other DNA
aaaataacacaacaaccaactataacttctacaacaataaactttcaatc

SEQ ID NO: 21632 - DNA, 50 bp, synthetic construct
  source 1..50: mol_type = other DNA
rctccctcacttccctcccaacataaatattactactataaaattaccac

SEQ ID NO: 21633 - DNA, 50 bp, synthetic construct
  source 1..50: mol_type = other DNA
acaatctcctaataaatatttctaaaaataaaaccrcaaataaaacaccc

SEQ ID NO: 21634 - DNA, 50 bp, synthetic construct
  source 1..50: mol_type = other DNA
ractttatatacttcacaatctcctaataaatatttctaaaaataaaacc

SEQ ID NO: 21635 - DNA, 50 bp, synthetic construct
  source 1..50: mol_type = other DNA
rattccatccccaaaaacacttaccaaaaaactataaaacacacaaaacc

SEQ ID NO: 21636 - DNA, 50 bp, synthetic construct
  source 1..50: mol_type = other DNA
actaataacacacacatacatacaaacctcattcttctctccatttaaac

SEQ ID NO: 21637 - DNA, 50 bp, synthetic construct
  source 1..50: mol_type = other DNA
attaaaacttcraaacctaatatcctttttctaccacctactctattccc

SEQ ID NO: 21638 - DNA, 50 bp, synthetic construct
  source 1..50: mol_type = other DNA
attttacccttaaataacaacactaacttataaaattatattaaaacttc

SEQ ID NO: 21639 - DNA, 50 bp, synthetic construct
  source 1..50: mol_type = other DNA
aaataactctttctaacttcccttaatccctaacctaaatccataataac

SEQ ID NO: 21640 - DNA, 50 bp, synthetic construct
  source 1..50: mol_type = other DNA
caaaaaaacttaatattaaactctcraaaaaaaacatcctctaaccaaac

SEQ ID NO: 21641 - DNA, 50 bp, synthetic construct
  source 1..50: mol_type = other DNA
atactattatatctaactactcctccaaaaaaacttaatattaaactctc

SEQ ID NO: 21642 - DNA, 50 bp, synthetic construct
  source 1..50: mol_type = other DNA
ctcctttaaactttttaaatactttaaaacttacataaccatttcctatc

SEQ ID NO: 21643 - DNA, 50 bp, synthetic construct
  source 1..50: mol_type = other DNA
aatccaatccaataatactcccttaaaacattcrttaaacaaacaaacac

SEQ ID NO: 21644 - DNA, 50 bp, synthetic construct
  source 1..50: mol_type = other DNA
attttcccaaacactccaatccaatccaataatactcccttaaaacattc

SEQ ID NO: 21645 - DNA, 50 bp, synthetic construct
  source 1..50: mol_type = other DNA
atcacctaactaccttaaaaaccattaaatatattcraataatttcatac

SEQ ID NO: 21646 - DNA, 50 bp, synthetic construct
  source 1..50: mol_type = other DNA
ccaaaaataaacaccaacaaaacataataaataaacrcataaaaccaccc

SEQ ID NO: 21647 - DNA, 50 bp, synthetic construct
  source 1..50: mol_type = other DNA
acacttcctacaactaaaaaaaaccctaaataactcrtctcattcccaac

SEQ ID NO: 21648 - DNA, 50 bp, synthetic construct
  source 1..50: mol_type = other DNA
ttactatatatattttcccacatatattaaaaatattctataaaccttcc

SEQ ID NO: 21649 - DNA, 50 bp, synthetic construct
  source 1..50: mol_type = other DNA
aacaaatatttaaaaaacttccaaataacaaaccacttaattaaaaaacc

SEQ ID NO: 21650 - DNA, 50 bp, synthetic construct
  source 1..50: mol_type = other DNA
aaaaaacaaacatcraattcaacraacaaaaaacrtcaacttcaaaaatc

SEQ ID NO: 21651 - DNA, 50 bp, synthetic construct
  source 1..50: mol_type = other DNA
caacttcaaaaatcrttcrttaattatcataccacaaacatttactacac

SEQ ID NO: 21652 - DNA, 50 bp, synthetic construct
  source 1..50: mol_type = other DNA
taaataaaaacccttaacttttactaatcataaaccttttatatcccccc

SEQ ID NO: 21653 - DNA, 50 bp, synthetic construct
  source 1..50: mol_type = other DNA
tatacataatacccttaaattaaaaatatttatacccatctaaaaaaccc

SEQ ID NO: 21654 - DNA, 50 bp, synthetic construct
  source 1..50: mol_type = other DNA
tcaaaaaaataatcttacaaccaaaaaaaacacattcccaaaaaaaatac

SEQ ID NO: 21655 - DNA, 50 bp, synthetic construct
  source 1..50: mol_type = other DNA
aattcatctcactaaaaaataccaaacaataaacccaaatcaataaatac

SEQ ID NO: 21656 - DNA, 50 bp, synthetic construct
  source 1..50: mol_type = other DNA
ctccctaataaaataaacccratacctcaaataaaaatacaaaaatcacc

SEQ ID NO: 21657 - DNA, 50 bp, synthetic construct
  source 1..50: mol_type = other DNA
attcraccatcttaactcctccctcaactttatctatttttatacttttc

SEQ ID NO: 21658 - DNA, 50 bp, synthetic construct
  source 1..50: mol_type = other DNA
aaaaaaaaaacttcctaaccccttatacttcccraataaaacaatacctc

SEQ ID NO: 21659 - DNA, 50 bp, synthetic construct
  source 1..50: mol_type = other DNA
tcccaaccatatacraaatataatctcrtaatacaccrttttttaaaccc

SEQ ID NO: 21660 - DNA, 50 bp, synthetic construct
  source 1..50: mol_type = other DNA
rctaccaaaaccttcccaaccatatacraaatataatctcrtaatacacc

SEQ ID NO: 21661 - DNA, 50 bp, synthetic construct
  source 1..50: mol_type = other DNA
tttaatctcaaactactatactaaccatcaaaaaactccrtaaacrtctc

SEQ ID NO: 21662 - DNA, 50 bp, synthetic construct
  source 1..50: mol_type = other DNA
tacaatttaatctcaaactactatactaaccatcaaaaaactccrtaaac

SEQ ID NO: 21663 - DNA, 50 bp, synthetic construct
  source 1..50: mol_type = other DNA
ctaccttacaatttaatctcaaactactatactaaccatcaaaaaactcc

SEQ ID NO: 21664 - DNA, 50 bp, synthetic construct
  source 1..50: mol_type = other DNA
attcraatttcctaactactttatttacctaaacaaacctaaaaaataac

SEQ ID NO: 21665 - DNA, 50 bp, synthetic construct
  source 1..50: mol_type = other DNA
taactaatattatccatataaattattatacacaatacctaacacaaaac

SEQ ID NO: 21666 - DNA, 50 bp, synthetic construct
  source 1..50: mol_type = other DNA
taaaaaaataaacctaacrtaataatacactcctacratcccaactactc

SEQ ID NO: 21667 - DNA, 50 bp, synthetic construct
  source 1..50: mol_type = other DNA
caaaatttctccatattatccaaactaatcttaaactcctaaactccaac

SEQ ID NO: 21668 - DNA, 50 bp, synthetic construct
  source 1..50: mol_type = other DNA
aaacaatacttacattatttaaaatcatttaaaaactcattcaaaaaatc

SEQ ID NO: 21669 - DNA, 50 bp, synthetic construct
  source 1..50: mol_type = other DNA
atacataatatacatttaaataaaataattccractctattaacaaaaac

SEQ ID NO: 21670 - DNA, 50 bp, synthetic construct
  source 1..50: mol_type = other DNA
aaaatttataaaaccctaatatacacacatacrtttctatcaataaaatc

SEQ ID NO: 21671 - DNA, 50 bp, synthetic construct
  source 1..50: mol_type = other DNA
taattcaaaacaccactcctaaaattatctttaaacattactttaataac

SEQ ID NO: 21672 - DNA, 50 bp, synthetic construct
  source 1..50: mol_type = other DNA
ataatactaaacraaaaaacctaattaattataacctctaatcttcaaac

SEQ ID NO: 21673 - DNA, 50 bp, synthetic construct
  source 1..50: mol_type = other DNA
caaccaaacttttccrctcaatatcattaaattacaatacttattttccc

SEQ ID NO: 21674 - DNA, 50 bp, synthetic construct
  source 1..50: mol_type = other DNA
ttttccrctcaatatcattaaattacaatacttattttcccraacaccac

SEQ ID NO: 21675 - DNA, 50 bp, synthetic construct
  source 1..50: mol_type = other DNA
aatatcattaaattacaatacttattttcccraacaccacratctcctac

SEQ ID NO: 21676 - DNA, 50 bp, synthetic construct
  source 1..50: mol_type = other DNA
ttatcrcaaactcacctaatacaaaaaattaaacctctaaaaaacctcrc

SEQ ID NO: 21677 - DNA, 50 bp, synthetic construct
  source 1..50: mol_type = other DNA
ccaaacaaacatatactctaaatacctaaaattctacctaaaaataaaac

SEQ ID NO: 21678 - DNA, 50 bp, synthetic construct
  source 1..50: mol_type = other DNA
atatctacctaaatataaaacaaaaaaaacctcactacaccataatttac

SEQ ID NO: 21679 - DNA, 50 bp, synthetic construct
  source 1..50: mol_type = other DNA
craccttataaaataaaataacracaaaacttatactaactaacaaactc

SEQ ID NO: 21680 - DNA, 50 bp, synthetic construct
  source 1..50: mol_type = other DNA
tctaaccattctataatcaaacttaaaactcrcrtcacaattttcctacc

SEQ ID NO: 21681 - DNA, 50 bp, synthetic construct
  source 1..50: mol_type = other DNA
aattacttctaataattaatctaaccattctataatcaaacttaaaactc

SEQ ID NO: 21682 - DNA, 50 bp, synthetic construct
  source 1..50: mol_type = other DNA
attattttcccattctatcacaatctacctctaaaaacaaaaattatacc

SEQ ID NO: 21683 - DNA, 50 bp, synthetic construct
  source 1..50: mol_type = other DNA
ttaaataaaacaattataaactttattttcctttatataaaccaaacaac

SEQ ID NO: 21684 - DNA, 50 bp, synthetic construct
  source 1..50: mol_type = other DNA
ccactacaaaaaatacaataaatttatctttaaccttaatttttatcccc

SEQ ID NO: 21685 - DNA, 50 bp, synthetic construct
  source 1..50: mol_type = other DNA
ataaatcataaactaccctttcttcaccacaataattcatacacaaaaac

SEQ ID NO: 21686 - DNA, 50 bp, synthetic construct
  source 1..50: mol_type = other DNA
atactctaacaaaaacrtaaataatttaactataactatcaaacccaaac

SEQ ID NO: 21687 - DNA, 50 bp, synthetic construct
  source 1..50: mol_type = other DNA
attaccttttctctttaaaaccracaatttaacttctttaatataaaacc

SEQ ID NO: 21688 - DNA, 50 bp, synthetic construct
  source 1..50: mol_type = other DNA
aacraaaacccaaacctttaaaaaacccaaaaaacaacctcaactcaaac

SEQ ID NO: 21689 - DNA, 50 bp, synthetic construct
  source 1..50: mol_type = other DNA
accrcttaaactaaaactatttcctaaactttttaaaaacctaaattccc

SEQ ID NO: 21690 - DNA, 50 bp, synthetic construct
  source 1..50: mol_type = other DNA
ttaaactaaaactatttcctaaactttttaaaaacctaaattcccrctac

SEQ ID NO: 21691 - DNA, 50 bp, synthetic construct
  source 1..50: mol_type = other DNA
aactatttcctaaactttttaaaaacctaaattcccrctacrtaaaccrc

SEQ ID NO: 21692 - DNA, 50 bp, synthetic construct
  source 1..50: mol_type = other DNA
ctattactctatcccaactaactaactccraatataaaacrctctaaacc

SEQ ID NO: 21693 - DNA, 50 bp, synthetic construct
  source 1..50: mol_type = other DNA
ccaattaaaaaccaataacccctaaaaatcrcatttcccrctaaacaaac

SEQ ID NO: 21694 - DNA, 50 bp, synthetic construct
  source 1..50: mol_type = other DNA
aaaacacraacatattctccttccttccttaaaaattaacctctttttcc

SEQ ID NO: 21695 - DNA, 50 bp, synthetic construct
  source 1..50: mol_type = other DNA
aaaactctattcatcttatacctacaaacccaaatccaatcaaaaaacac

SEQ ID NO: 21696 - DNA, 50 bp, synthetic construct
  source 1..50: mol_type = other DNA
aacattctataaatctataaacractacactactatcaaaataactcctc

SEQ ID NO: 21697 - DNA, 50 bp, synthetic construct
  source 1..50: mol_type = other DNA
aaacaatacrttactcacaaactcctttctttatatccttttctcttctc

SEQ ID NO: 21698 - DNA, 50 bp, synthetic construct
  source 1..50: mol_type = other DNA
acaacrcrtcctaaatttaacaccracaaaaaactataactaaacaatac

SEQ ID NO: 21699 - DNA, 50 bp, synthetic construct
  source 1..50: mol_type = other DNA
catcraaaacacrctaaacaaaaacaacttcrctataataaaactaaaac

SEQ ID NO: 21700 - DNA, 50 bp, synthetic construct
  source 1..50: mol_type = other DNA
aaacacrctaaacaaaaacaacttcrctataataaaactaaaacracacc

SEQ ID NO: 21701 - DNA, 50 bp, synthetic construct
  source 1..50: mol_type = other DNA
aaaaacaacttcrctataataaaactaaaacracaccraatcaccaaaac

SEQ ID NO: 21702 - DNA, 50 bp, synthetic construct
  source 1..50: mol_type = other DNA
ctaaatacaactacaactccaaaaatcactcacrtttacaaatacccttc

SEQ ID NO: 21703 - DNA, 50 bp, synthetic construct
  source 1..50: mol_type = other DNA
raaattaaacaaaacttctaaatacaactacaactccaaaaatcactcac

SEQ ID NO: 21704 - DNA, 50 bp, synthetic construct
  source 1..50: mol_type = other DNA
aatccattttctcctataaataactactcaaaaacaaccaatcataaaac

SEQ ID NO: 21705 - DNA, 50 bp, synthetic construct
  source 1..50: mol_type = other DNA
aacccctataaaaaaataattatttacctcattaccttaactattccccc

SEQ ID NO: 21706 - DNA, 50 bp, synthetic construct
  source 1..50: mol_type = other DNA
ccacaacccccataccaatatactattctacctaccattaaacaatatac

SEQ ID NO: 21707 - DNA, 50 bp, synthetic construct
  source 1..50: mol_type = other DNA
tacrtaacaactacataaaaaaaaccaatacttacraaaaactatactac

SEQ ID NO: 21708 - DNA, 50 bp, synthetic construct
  source 1..50: mol_type = other DNA
taaaccccaatacactaaattttatctcctccaacaacatatacrttatc

SEQ ID NO: 21709 - DNA, 50 bp, synthetic construct
  source 1..50: mol_type = other DNA
aactaataaaccccaatacactaaattttatctcctccaacaacatatac

SEQ ID NO: 21710 - DNA, 50 bp, synthetic construct
  source 1..50: mol_type = other DNA
aaacacctataatatcaaaacccttatctaacccttaataacaaataaac

SEQ ID NO: 21711 - DNA, 50 bp, synthetic construct
  source 1..50: mol_type = other DNA
tttatcctaattaaaataacctaactaattctaaaaaacaaccatcctac

SEQ ID NO: 21712 - DNA, 50 bp, synthetic construct
  source 1..50: mol_type = other DNA
acctatcaacaaactcaaacacacactaaaacacaaataaaaaaccaaac

SEQ ID NO: 21713 - DNA, 50 bp, synthetic construct
  source 1..50: mol_type = other DNA
ctcaaacacacactaaaacacaaataaaaaaccaaacracaacaatactc

SEQ ID NO: 21714 - DNA, 50 bp, synthetic construct
  source 1..50: mol_type = other DNA
caaacccacccaaaaaaaactataataaattctacccaaatactctactc

SEQ ID NO: 21715 - DNA, 50 bp, synthetic construct
  source 1..50: mol_type = other DNA
caacactaaaaaccaaaaaaccaaaaccaaaaaccaatcaacccaaacrc

SEQ ID NO: 21716 - DNA, 50 bp, synthetic construct
  source 1..50: mol_type = other DNA
tccaacactaaaaaccaaaaaaccaaaaccaaaaaccaatcaacccaaac

SEQ ID NO: 21717 - DNA, 50 bp, synthetic construct
  source 1..50: mol_type = other DNA
caaaataaatataatattattcccacaaccttattctccactcaacaacc

SEQ ID NO: 21718 - DNA, 50 bp, synthetic construct
  source 1..50: mol_type = other DNA
tccatactctaaaaattccacccaaaacccrataaaacaaaaaccctatc

SEQ ID NO: 21719 - DNA, 50 bp, synthetic construct
  source 1..50: mol_type = other DNA
ctaacrtatactcraacrattcaaaacaaaatattatttaccctactaac

SEQ ID NO: 21720 - DNA, 50 bp, synthetic construct
  source 1..50: mol_type = other DNA
aatatattctcattaacrtcaacaaaataaataataccttactctaaatc

SEQ ID NO: 21721 - DNA, 50 bp, synthetic construct
  source 1..50: mol_type = other DNA
tattctcattaacrtcaacaaaataaataataccttactctaaatcrccc

SEQ ID NO: 21722 - DNA, 50 bp, synthetic construct
  source 1..50: mol_type = other DNA
ttaacrtcaacaaaataaataataccttactctaaatcrcccraatacac

SEQ ID NO: 21723 - DNA, 50 bp, synthetic construct
  source 1..50: mol_type = other DNA
caacaaaataaataataccttactctaaatcrcccraatacacrttaacc

SEQ ID NO: 21724 - DNA, 50 bp, synthetic construct
  source 1..50: mol_type = other DNA
aacaaaaccctatccttatacaaactacrattaacaatacttccrtcaac

SEQ ID NO: 21725 - DNA, 50 bp, synthetic construct
  source 1..50: mol_type = other DNA
atacccaacaaaaccctatccttatacaaactacrattaacaatacttcc

SEQ ID NO: 21726 - DNA, 50 bp, synthetic construct
  source 1..50: mol_type = other DNA
aaacaataattaaacaatacccaacaaaaccctatccttatacaaactac

SEQ ID NO: 21727 - DNA, 50 bp, synthetic construct
  source 1..50: mol_type = other DNA
aaacactacttaattactactccttaattctcaaaatcccaaaacaaaac

SEQ ID NO: 21728 - DNA, 50 bp, synthetic construct
  source 1..50: mol_type = other DNA
cccaaaacaaaacrcatcaacccaaataacctaaacaaaaacctcatacc

SEQ ID NO: 21729 - DNA, 50 bp, synthetic construct
  source 1..50: mol_type = other DNA
aaaaaatataacatcrtaactaaataacaatatcttttacctaacaactc

SEQ ID NO: 21730 - DNA, 50 bp, synthetic construct
  source 1..50: mol_type = other DNA
aaaaaaaaatactacraactaccaaacaaaaaacactactacttaatcac

SEQ ID NO: 21731 - DNA, 50 bp, synthetic construct
  source 1..50: mol_type = other DNA
tactacttaatcacratatcacatcttctctaaaatctaccaaaaacctc

SEQ ID NO: 21732 - DNA, 50 bp, synthetic construct
  source 1..50: mol_type = other DNA
cctcaaaaaaataccccrcccatataaaaaaatacactatataaacrcac

SEQ ID NO: 21733 - DNA, 50 bp, synthetic construct
  source 1..50: mol_type = other DNA
taaacctcaaaaaaataccccrcccatataaaaaaatacactatataaac

SEQ ID NO: 21734 - DNA, 50 bp, synthetic construct
  source 1..50: mol_type = other DNA
aaaatacaaaaaaacaacttaacacataatacctccaacaccctaaaaac

SEQ ID NO: 21735 - DNA, 50 bp, synthetic construct
  source 1..50: mol_type = other DNA
ccctaaataaaaaaccactattatatccaacttactaacaacaaaatctc

SEQ ID NO: 21736 - DNA, 50 bp, synthetic construct
  source 1..50: mol_type = other DNA
ttcaaaacaactctaaatcaatctaccctaaaaaatccccccaaaaacac

SEQ ID NO: 21737 - DNA, 50 bp, synthetic construct
  source 1..50: mol_type = other DNA
acaaaaaaaaattccaaacccaaaaaaaacataaactaaactaaaccccc

SEQ ID NO: 21738 - DNA, 50 bp, synthetic construct
  source 1..50: mol_type = other DNA
aaacttttctacttatccaacttttaaaaactcractccaaaaaaaatcc

SEQ ID NO: 21739 - DNA, 50 bp, synthetic construct
  source 1..50: mol_type = other DNA
ataacaataaacaatctcctcaaaatctaatttatcaatcaaccccactc

SEQ ID NO: 21740 - DNA, 50 bp, synthetic construct
  source 1..50: mol_type = other DNA
cttaaactaacctcctatcaataccctctccactataaaacctaaaaacc

SEQ ID NO: 21741 - DNA, 50 bp, synthetic construct
  source 1..50: mol_type = other DNA
aaccttaaaatccataaaaaaatcaaacrtaaactaataacaaaacacac

SEQ ID NO: 21742 - DNA, 50 bp, synthetic construct
  source 1..50: mol_type = other DNA
taacttccaactaaaacaattaaaccttaaaatccataaaaaaatcaaac

SEQ ID NO: 21743 - DNA, 50 bp, synthetic construct
  source 1..50: mol_type = other DNA
aaatcaaataaaacatccataaataataactacaaacactacctaactac

SEQ ID NO: 21744 - DNA, 50 bp, synthetic construct
  source 1..50: mol_type = other DNA
accattatttataaatacttcacttaattttaatctccaaacctaaactc

SEQ ID NO: 21745 - DNA, 50 bp, synthetic construct
  source 1..50: mol_type = other DNA
aacatccaacacaaaaacacctccacaaacttcaaaaataccaaaaaaac

SEQ ID NO: 21746 - DNA, 50 bp, synthetic construct
  source 1..50: mol_type = other DNA
ccaacctcaaaaccctcaaaaaaccattaaacatccctaaaactaaaccc

SEQ ID NO: 21747 - DNA, 50 bp, synthetic construct
  source 1..50: mol_type = other DNA
accctaaaactaactaaaaactaacaattcccaaaactctcaacaacaac

SEQ ID NO: 21748 - DNA, 50 bp, synthetic construct
  source 1..50: mol_type = other DNA
cctaaaactaactaaaaactaacaattcccaaaactctcaacaacaacrc

SEQ ID NO: 21749 - DNA, 50 bp, synthetic construct
  source 1..50: mol_type = other DNA
ttcttaacccctcactatctaaaatacrtaataaacttaccaatctatcc

SEQ ID NO: 21750 - DNA, 50 bp, synthetic construct
  source 1..50: mol_type = other DNA
taatactaaacctctaaaacttcaattcatttaactcaaaaaaatccccc

SEQ ID NO: 21751 - DNA, 50 bp, synthetic construct
  source 1..50: mol_type = other DNA
raactacctctactaaccraaaaattactaaaaataaattaccrttactc

SEQ ID NO: 21752 - DNA, 50 bp, synthetic construct
  source 1..50: mol_type = other DNA
aaaacccraactacctctactaaccraaaaattactaaaaataaattacc

SEQ ID NO: 21753 - DNA, 50 bp, synthetic construct
  source 1..50: mol_type = other DNA
ctacaataaccaaaactcraataacracaacttattctcaataactcctc

SEQ ID NO: 21754 - DNA, 50 bp, synthetic construct
  source 1..50: mol_type = other DNA
raataacracaacttattctcaataactcctcractaacaaaaacaaccc

SEQ ID NO: 21755 - DNA, 50 bp, synthetic construct
  source 1..50: mol_type = other DNA
catatcctctccaaacactataaatcttaaaaaataattcttatcaaccc

SEQ ID NO: 21756 - DNA, 50 bp, synthetic construct
  source 1..50: mol_type = other DNA
taccttttacttaaattcctctaacttttaaaaataataacactcttatc

SEQ ID NO: 21757 - DNA, 50 bp, synthetic construct
  source 1..50: mol_type = other DNA
aaaaaactaaaacttacccttaaacrtcacattaactctatccctataac

SEQ ID NO: 21758 - DNA, 50 bp, synthetic construct
  source 1..50: mol_type = other DNA
tatttaaccaccctaccctaccatcrccacaaaaacaaaaccaatataac

SEQ ID NO: 21759 - DNA, 50 bp, synthetic construct
  source 1..50: mol_type = other DNA
caaattacttacrtaaacttccaaaaaaacaaacctatccttcctaaccc

SEQ ID NO: 21760 - DNA, 50 bp, synthetic construct
  source 1..50: mol_type = other DNA
acrcaaacaacctaaatacctaaacaaaccaactcaaaaatcaaactacc

SEQ ID NO: 21761 - DNA, 50 bp, synthetic construct
  source 1..50: mol_type = other DNA
ctacatcacaataactaaactataatatttctataaactaaaaacaaccc

SEQ ID NO: 21762 - DNA, 50 bp, synthetic construct
  source 1..50: mol_type = other DNA
ctataatatttctataaactaaaaacaacccrttatttcaacaaaacctc

SEQ ID NO: 21763 - DNA, 50 bp, synthetic construct
  source 1..50: mol_type = other DNA
caacacctataatttcaaaaaaaaattcccacaaaacraatacactactc

SEQ ID NO: 21764 - DNA, 50 bp, synthetic construct
  source 1..50: mol_type = other DNA
aaatcccttcatctcracttaaaactaactcracttattaaataaaaaac

SEQ ID NO: 21765 - DNA, 50 bp, synthetic construct
  source 1..50: mol_type = other DNA
aaccctttaaaatacccctaaatcccttcatctcracttaaaactaactc

SEQ ID NO: 21766 - DNA, 50 bp, synthetic construct
  source 1..50: mol_type = other DNA
aaatccaaaaacacttcaaaaaacttctaaacatcctacrcccctcaacc

SEQ ID NO: 21767 - DNA, 50 bp, synthetic construct
  source 1..50: mol_type = other DNA
crcctcaaaaaatccraaacaaaattactaaaaaaatacccraaaaaatc

SEQ ID NO: 21768 - DNA, 50 bp, synthetic construct
  source 1..50: mol_type = other DNA
actccttcaaactacaacraactaaataaatccctatccctatttctttc

SEQ ID NO: 21769 - DNA, 50 bp, synthetic construct
  source 1..50: mol_type = other DNA
aacacaacrcaaatcattcaaataaattcctaactccttcaaactacaac

SEQ ID NO: 21770 - DNA, 50 bp, synthetic construct
  source 1..50: mol_type = other DNA
ctaacttcttcctaaccctaaaccactaaatctccaaccctaatttctcc

SEQ ID NO: 21771 - DNA, 50 bp, synthetic construct
  source 1..50: mol_type = other DNA
atctttctaaattcctaccctctaaaaacaactaataaatttaaaataac

SEQ ID NO: 21772 - DNA, 50 bp, synthetic construct
  source 1..50: mol_type = other DNA
taaatttaaaataacrtctacttataaaaaacttcccttataaccttaac

SEQ ID NO: 21773 - DNA, 50 bp, synthetic construct
  source 1..50: mol_type = other DNA
tcctaataattcatatacacataaaaacataaaaaacactaacccaaccc

SEQ ID NO: 21774 - DNA, 50 bp, synthetic construct
  source 1..50: mol_type = other DNA
tccatattcataatttactatttaaataaccataaacaaattatttcacc

SEQ ID NO: 21775 - DNA, 50 bp, synthetic construct
  source 1..50: mol_type = other DNA
caacaatcttaacaaatacaaaccaaaaactactatccaatacctaactc

SEQ ID NO: 21776 - DNA, 50 bp, synthetic construct
  source 1..50: mol_type = other DNA
acccacaaaaccttactcacaactaatacaacaatcaaaaattaaactac

SEQ ID NO: 21777 - DNA, 50 bp, synthetic construct
  source 1..50: mol_type = other DNA
ttaacataatctctaaataatcttaatacaaataatccctaaatctcacc

SEQ ID NO: 21778 - DNA, 50 bp, synthetic construct
  source 1..50: mol_type = other DNA
cttcaaaacttacaattaaaacaactcattaactaatatatttaaattcc

SEQ ID NO: 21779 - DNA, 50 bp, synthetic construct
  source 1..50: mol_type = other DNA
ccaattactaaaacaaaaaattcatctctttatcttctcctaatcccaac

SEQ ID NO: 21780 - DNA, 50 bp, synthetic construct
  source 1..50: mol_type = other DNA
aaacttccttaaataatttataaacttctccactttaactattattattc

SEQ ID NO: 21781 - DNA, 50 bp, synthetic construct
  source 1..50: mol_type = other DNA
aaaaaccaccataaaaccaaaaacaaataaaataattactaatcaaatcc

SEQ ID NO: 21782 - DNA, 50 bp, synthetic construct
  source 1..50: mol_type = other DNA
ctcacctaacatactaattttcaaaaaacattaaccrttctttctttttc

SEQ ID NO: 21783 - DNA, 50 bp, synthetic construct
  source 1..50: mol_type = other DNA
ccctcttaaacraaattatcaataactaacaaaactaacacaacrtatcc

SEQ ID NO: 21784 - DNA, 50 bp, synthetic construct
  source 1..50: mol_type = other DNA
aacatcaaatatttaactctaaaaaacrccttatatacccaattactctc

SEQ ID NO: 21785 - DNA, 50 bp, synthetic construct
  source 1..50: mol_type = other DNA
actcaaactttcttttcctaatatcatcccacrttaaaccaattattcac

SEQ ID NO: 21786 - DNA, 50 bp, synthetic construct
  source 1..50: mol_type = other DNA
ttactcaataaccctataactcaaactttcttttcctaatatcatcccac

SEQ ID NO: 21787 - DNA, 50 bp, synthetic construct
  source 1..50: mol_type = other DNA
cctactttaatattttacctaccaacatcctacctctctcrtcacaattc

SEQ ID NO: 21788 - DNA, 50 bp, synthetic construct
  source 1..50: mol_type = other DNA
caaaatatatcctactttaatattttacctaccaacatcctacctctctc

SEQ ID NO: 21789 - DNA, 50 bp, synthetic construct
  source 1..50: mol_type = other DNA
ataaaaacacctaatcttttaacataaaatcrtaaatatctaactcaaac

SEQ ID NO: 21790 - DNA, 50 bp, synthetic construct
  source 1..50: mol_type = other DNA
ccaaacaaaaaacaattcaataaaaacacctaatcttttaacataaaatc

SEQ ID NO: 21791 - DNA, 50 bp, synthetic construct
  source 1..50: mol_type = other DNA
crtctttaaaactacctcataaacractcttataaacccraatcaattcc

SEQ ID NO: 21792 - DNA, 50 bp, synthetic construct
  source 1..50: mol_type = other DNA
cataaacractcttataaacccraatcaattccratatataaactctacc

SEQ ID NO: 21793 - DNA, 50 bp, synthetic construct
  source 1..50: mol_type = other DNA
atcccataaactataaaatcataaaaaataacaaaaatctatatctattc

SEQ ID NO: 21794 - DNA, 50 bp, synthetic construct
  source 1..50: mol_type = other DNA
ccataaccctacaattcataaaactaaatctaaaacaataccaaaaacac

SEQ ID NO: 21795 - DNA, 50 bp, synthetic construct
  source 1..50: mol_type = other DNA
ctaaatctacatattctatccrtaactcacraataaaccaaaaattttcc

SEQ ID NO: 21796 - DNA, 50 bp, synthetic construct
  source 1..50: mol_type = other DNA
taacaatacraaacttatatcaccaaaacctaaatctacatattctatcc

SEQ ID NO: 21797 - DNA, 50 bp, synthetic construct
  source 1..50: mol_type = other DNA
aaacatacaaactcaaaccttaataacataaactccrcattactaaaacc

SEQ ID NO: 21798 - DNA, 50 bp, synthetic construct
  source 1..50: mol_type = other DNA
acatacaaactcaaaccttaataacataaactccrcattactaaaaccrc

SEQ ID NO: 21799 - DNA, 50 bp, synthetic construct
  source 1..50: mol_type = other DNA
ctatcctatcctccccrataccctccaccttaaacaaaaatttaaaattc

SEQ ID NO: 21800 - DNA, 50 bp, synthetic construct
  source 1..50: mol_type = other DNA
tcacattctataccaaaaaatttaacataaaaaaactcaaactaaaaaac

SEQ ID NO: 21801 - DNA, 50 bp, synthetic construct
  source 1..50: mol_type = other DNA
attctataccaaaaaatttaacataaaaaaactcaaactaaaaaacracc

SEQ ID NO: 21802 - DNA, 50 bp, synthetic construct
  source 1..50: mol_type = other DNA
tctataccaaaaaatttaacataaaaaaactcaaactaaaaaacraccrc

SEQ ID NO: 21803 - DNA, 50 bp, synthetic construct
  source 1..50: mol_type = other DNA
accaaaaaatttaacataaaaaaactcaaactaaaaaacraccrcraaac

SEQ ID NO: 21804 - DNA, 50 bp, synthetic construct
  source 1..50: mol_type = other DNA
ataataacaacttactactctattcttaaaaattctcaaaattaaatttc

SEQ ID NO: 21805 - DNA, 50 bp, synthetic construct
  source 1..50: mol_type = other DNA
atacctctaacaatttaaccaaaaattatcccttatttcttataaaatac

SEQ ID NO: 21806 - DNA, 50 bp, synthetic construct
  source 1..50: mol_type = other DNA
cctaacacttaaaatacctaacctcctaaaaatacaacccaataaatctc

SEQ ID NO: 21807 - DNA, 50 bp, synthetic construct
  source 1..50: mol_type = other DNA
ctaaaattaccataacatctataaactatcataacrctaataaaaatatc

SEQ ID NO: 21808 - DNA, 50 bp, synthetic construct
  source 1..50: mol_type = other DNA
attccttccttaaaaaactaacaaactacttaaaaaacaaacccatacac

SEQ ID NO: 21809 - DNA, 50 bp, synthetic construct
  source 1..50: mol_type = other DNA
taataaaattctaaaaaattatcaaatttctatctaatttcaactccaac

SEQ ID NO: 21810 - DNA, 50 bp, synthetic construct
  source 1..50: mol_type = other DNA
cctattaaaacttatctatataaactaaactcactcaattaaatactttc

SEQ ID NO: 21811 - DNA, 50 bp, synthetic construct
  source 1..50: mol_type = other DNA
taaatctaaaataaaataccatcaatatccaaaaactccttatctaccac

SEQ ID NO: 21812 - DNA, 50 bp, synthetic construct
  source 1..50: mol_type = other DNA
atatattcctaacataacttactaataactcatccaacaattccrtactc

SEQ ID NO: 21813 - DNA, 50 bp, synthetic construct
  source 1..50: mol_type = other DNA
tcaaactaattcattcaaaactattaaaacttctcaaaaacattacctac

SEQ ID NO: 21814 - DNA, 50 bp, synthetic construct
  source 1..50: mol_type = other DNA
aacraataacttaatccctttctaaaataataatataatcatacaatccc

SEQ ID NO: 21815 - DNA, 50 bp, synthetic construct
  source 1..50: mol_type = other DNA
taaataatctcacctatcaaataaataaatccctaattcctcctaataac

SEQ ID NO: 21816 - DNA, 50 bp, synthetic construct
  source 1..50: mol_type = other DNA
cctttactaatctaactcctactctatttttattttttaaaaacaatctc

SEQ ID NO: 21817 - DNA, 50 bp, synthetic construct
  source 1..50: mol_type = other DNA
aaccctatctctactaaaaacacaaaaactaaccaaacrtaataatacac

SEQ ID NO: 21818 - DNA, 50 bp, synthetic construct
  source 1..50: mol_type = other DNA
ataaacataacraaccctatctctactaaaaacacaaaaactaaccaaac

SEQ ID NO: 21819 - DNA, 50 bp, synthetic construct
  source 1..50: mol_type = other DNA
aaaaaacttaaatctttaacttaaaaatcaaaaaacaaacractaaatcc

SEQ ID NO: 21820 - DNA, 50 bp, synthetic construct
  source 1..50: mol_type = other DNA
caaacaaataaatacttaaccrtctcaaatctctacctccaaaaatcacc

SEQ ID NO: 21821 - DNA, 50 bp, synthetic construct
  source 1..50: mol_type = other DNA
aacaaaactaatcatcaaattacaaaaaacaaacaaataaatacttaacc

SEQ ID NO: 21822 - DNA, 50 bp, synthetic construct
  source 1..50: mol_type = other DNA
cctaataaccaaccttatttcctaaaaaactctaatattaatttcatcac

SEQ ID NO: 21823 - DNA, 50 bp, synthetic construct
  source 1..50: mol_type = other DNA
ctaacctatctctaaaaaaaaatactacccacttaatcaaaacttatctc

SEQ ID NO: 21824 - DNA, 50 bp, synthetic construct
  source 1..50: mol_type = other DNA
rtaattaaccaaaccaaaaactcaacctcatataaaatccaaataaacac

SEQ ID NO: 21825 - DNA, 50 bp, synthetic construct
  source 1..50: mol_type = other DNA
tattatactaatttaacctcaccrtaccaattctactccaatctataacc

SEQ ID NO: 21826 - DNA, 50 bp, synthetic construct
  source 1..50: mol_type = other DNA
rataaaaccaaatcaatataacacccaaaaaacccacttcctatactatc

SEQ ID NO: 21827 - DNA, 50 bp, synthetic construct
  source 1..50: mol_type = other DNA
ttctaaaatatacaaatcaaaaaattaactaccacctaaacttctaaaac

SEQ ID NO: 21828 - DNA, 50 bp, synthetic construct
  source 1..50: mol_type = other DNA
tccttaatacctattctattttatttacactctctaactttccccrtttc

SEQ ID NO: 21829 - DNA, 50 bp, synthetic construct
  source 1..50: mol_type = other DNA
rcttatccttaatacctattctattttatttacactctctaactttcccc

SEQ ID NO: 21830 - DNA, 50 bp, synthetic construct
  source 1..50: mol_type = other DNA
aataactacttaataaaattctctcatcattcrttctctcctaattaccc

SEQ ID NO: 21831 - DNA, 50 bp, synthetic construct
  source 1..50: mol_type = other DNA
tcctaaactcaatacaaaaataactacttaataaaattctctcatcattc

SEQ ID NO: 21832 - DNA, 50 bp, synthetic construct
  source 1..50: mol_type = other DNA
aaacctttcaataaaattcccatttttctaaaatactttaaaataaaacc

SEQ ID NO: 21833 - DNA, 50 bp, synthetic construct
  source 1..50: mol_type = other DNA
accacctctcctttacctctaaaaatcttcatactacatttcttcctctc

SEQ ID NO: 21834 - DNA, 50 bp, synthetic construct
  source 1..50: mol_type = other DNA
cattctaataaaatactacaaaatacaaaacattacacctattctaaaac

SEQ ID NO: 21835 - DNA, 50 bp, synthetic construct
  source 1..50: mol_type = other DNA
acraaaacttacaaaaaaattaacttaactatcataaaaccctaatttac

SEQ ID NO: 21836 - DNA, 50 bp, synthetic construct
  source 1..50: mol_type = other DNA
aaaaatactcaaaaccaaaaccacacaataaaaatataatcataaaaaac

SEQ ID NO: 21837 - DNA, 50 bp, synthetic construct
  source 1..50: mol_type = other DNA
ccttaaaatttaaaaaatacccctaactctacccatacataaactaaatc

SEQ ID NO: 21838 - DNA, 50 bp, synthetic construct
  source 1..50: mol_type = other DNA
cttcttcataacaccaaaatacaaaataaaacatacaatcaaccattcac

SEQ ID NO: 21839 - DNA, 50 bp, synthetic construct
  source 1..50: mol_type = other DNA
aattccctttctctcctccttaatcctctaaattctctccatttaacaac

SEQ ID NO: 21840 - DNA, 50 bp, synthetic construct
  source 1..50: mol_type = other DNA
ctctacacataactaaaaacatccccacaaaaactaacacctataactcc

SEQ ID NO: 21841 - DNA, 50 bp, synthetic construct
  source 1..50: mol_type = other DNA
aaccaaaaactaacacatctaaaaactcattaccaacttacttaaccctc

SEQ ID NO: 21842 - DNA, 50 bp, synthetic construct
  source 1..50: mol_type = other DNA
aactctaaaatcaaacacatataaattcatatacccactctaccccttac

SEQ ID NO: 21843 - DNA, 50 bp, synthetic construct
  source 1..50: mol_type = other DNA
aaatcaaacacatataaattcatatacccactctaccccttacraactcc

SEQ ID NO: 21844 - DNA, 50 bp, synthetic construct
  source 1..50: mol_type = other DNA
aaaaaaattaactataaaaacaattattcctcctacatcatctccacctc

SEQ ID NO: 21845 - DNA, 50 bp, synthetic construct
  source 1..50: mol_type = other DNA
ataactactactaaataaatcaccaaccaaaataacactatttacaaaac

SEQ ID NO: 21846 - DNA, 50 bp, synthetic construct
  source 1..50: mol_type = other DNA
accacaaaacaactatatcaacaaatctccaaaaaccaaaataaaacctc

SEQ ID NO: 21847 - DNA, 50 bp, synthetic construct
  source 1..50: mol_type = other DNA
aaaataattccattcaactacaacttcaaaataaaattaatatttcactc

SEQ ID NO: 21848 - DNA, 50 bp, synthetic construct
  source 1..50: mol_type = other DNA
cactactccttaataaactaaatacctataattaatctacaaataacacc

SEQ ID NO: 21849 - DNA, 50 bp, synthetic construct
  source 1..50: mol_type = other DNA
ttaataaactaaatacctataattaatctacaaataacaccrtactcatc

SEQ ID NO: 21850 - DNA, 50 bp, synthetic construct
  source 1..50: mol_type = other DNA
ttctataaccccttaaaaaactacaatacctaaaaaaaacacctcraaac

SEQ ID NO: 21851 - DNA, 50 bp, synthetic construct
  source 1..50: mol_type = other DNA
taaacttctataaccccttaaaaaactacaatacctaaaaaaaacacctc

SEQ ID NO: 21852 - DNA, 50 bp, synthetic construct
  source 1..50: mol_type = other DNA
aaaactattacttaaatatccrataataaaaaaatacctctccrcratcc

SEQ ID NO: 21853 - DNA, 50 bp, synthetic construct
  source 1..50: mol_type = other DNA
tcctccaaacccacatacaaataaacacactaaaacctaaaacraaaatc

SEQ ID NO: 21854 - DNA, 50 bp, synthetic construct
  source 1..50: mol_type = other DNA
aacactcctaaacactacaaaaactactaaaaaacaaaacracttctccc

SEQ ID NO: 21855 - DNA, 50 bp, synthetic construct
  source 1..50: mol_type = other DNA
acrcccaataaacactcctaaacactacaaaaactactaaaaaacaaaac

SEQ ID NO: 21856 - DNA, 50 bp, synthetic construct
  source 1..50: mol_type = other DNA
aaatcaaacttaacaaaactcaaaacaaacrcaactaaaataataacrac

SEQ ID NO: 21857 - DNA, 50 bp, synthetic construct
  source 1..50: mol_type = other DNA
aaaaaatcaaacttaacaaaactcaaaacaaacrcaactaaaataataac

SEQ ID NO: 21858 - DNA, 50 bp, synthetic construct
  source 1..50: mol_type = other DNA
accaacaaatcaaccatatataaaaaaataaactaacctaaaccctcccc

SEQ ID NO: 21859 - DNA, 50 bp, synthetic construct
  source 1..50: mol_type = other DNA
catattaataaatcaaaatctaactaccctaaaaaattccaaacattccc

SEQ ID NO: 21860 - DNA, 50 bp, synthetic construct
  source 1..50: mol_type = other DNA
attccaaacattcccrtaactataaataaaactaaactaaaaaccaaaac

SEQ ID NO: 21861 - DNA, 50 bp, synthetic construct
  source 1..50: mol_type = other DNA
attcccrtaactataaataaaactaaactaaaaaccaaaacrctaaaccc

SEQ ID NO: 21862 - DNA, 50 bp, synthetic construct
  source 1..50: mol_type = other DNA
ccaaaaccaccttctataccctcacctccaaatatttcaaaaccttatcc

SEQ ID NO: 21863 - DNA, 50 bp, synthetic construct
  source 1..50: mol_type = other DNA
ccctaaacacaatcctataaaataaacaaaccaatacctaattcractac

SEQ ID NO: 21864 - DNA, 50 bp, synthetic construct
  source 1..50: mol_type = other DNA
taaccrccctaaacacaatcctataaaataaacaaaccaatacctaattc

SEQ ID NO: 21865 - DNA, 50 bp, synthetic construct
  source 1..50: mol_type = other DNA
taatcraaccaaacactaatctactcatcccacaaaactatattcaaaac

SEQ ID NO: 21866 - DNA, 50 bp, synthetic construct
  source 1..50: mol_type = other DNA
ccaaacactaatctactcatcccacaaaactatattcaaaacraccaaac

SEQ ID NO: 21867 - DNA, 50 bp, synthetic construct
  source 1..50: mol_type = other DNA
cactaatctactcatcccacaaaactatattcaaaacraccaaacrctac

SEQ ID NO: 21868 - DNA, 50 bp, synthetic construct
  source 1..50: mol_type = other DNA
ctttctaaaaaactcctataaaacccaaaaacaacactaccccaaaaaac

SEQ ID NO: 21869 - DNA, 50 bp, synthetic construct
  source 1..50: mol_type = other DNA
cttcctaatctaaatataaaaaacracctaaaaacctaaccacaacaccc

SEQ ID NO: 21870 - DNA, 50 bp, synthetic construct
  source 1..50: mol_type = other DNA
aattaccraaatttacccaaaactaataaattaatcataaaaacaaaccc

SEQ ID NO: 21871 - DNA, 50 bp, synthetic construct
  source 1..50: mol_type = other DNA
aaattaatcataaaaacaaacccraactcatctctattttcttacattcc

SEQ ID NO: 21872 - DNA, 50 bp, synthetic construct
  source 1..50: mol_type = other DNA
actaaaaatcaaactacraaacaacaaacctaccccttaataatctaccc

SEQ ID NO: 21873 - DNA, 50 bp, synthetic construct
  source 1..50: mol_type = other DNA
ttaaccctcaactacctaatacccataattaaaatttaaactaaatcacc

SEQ ID NO: 21874 - DNA, 50 bp, synthetic construct
  source 1..50: mol_type = other DNA
ctccacacccttactacaaaaattactatcrtatacaaaatttcraaaac

SEQ ID NO: 21875 - DNA, 50 bp, synthetic construct
  source 1..50: mol_type = other DNA
aacaccctccacacccttactacaaaaattactatcrtatacaaaatttc

SEQ ID NO: 21876 - DNA, 50 bp, synthetic construct
  source 1..50: mol_type = other DNA
ataactaacccacaaacaccctccacacccttactacaaaaattactatc

SEQ ID NO: 21877 - DNA, 50 bp, synthetic construct
  source 1..50: mol_type = other DNA
tcaataaaatctcttaaaaactaatatccccraaaatcaactaacactac

SEQ ID NO: 21878 - DNA, 50 bp, synthetic construct
  source 1..50: mol_type = other DNA
taataatacaaccaaaccttcaataaaatctcttaaaaactaatatcccc

SEQ ID NO: 21879 - DNA, 50 bp, synthetic construct
  source 1..50: mol_type = other DNA
tataccatcataaactatatacccttaaacaaaaacctctaccattcctc

SEQ ID NO: 21880 - DNA, 50 bp, synthetic construct
  source 1..50: mol_type = other DNA
tcrccacacaccaacaaaaacaaattatactataatacaaaccactaacc

SEQ ID NO: 21881 - DNA, 50 bp, synthetic construct
  source 1..50: mol_type = other DNA
aactatactcactcrttattaaatcccacaattaccattattcctaaccc

SEQ ID NO: 21882 - DNA, 50 bp, synthetic construct
  source 1..50: mol_type = other DNA
aaacaacttaaccttactattttaacctaaccctcatatctccrtacaac

SEQ ID NO: 21883 - DNA, 50 bp, synthetic construct
  source 1..50: mol_type = other DNA
ttcctaaacataattaatacratcaaaattcttacacaaaaaccaaaacc

SEQ ID NO: 21884 - DNA, 50 bp, synthetic construct
  source 1..50: mol_type = other DNA
cccattacttcaatcaaacccaaatttcatcctcatctattacctatctc

SEQ ID NO: 21885 - DNA, 50 bp, synthetic construct
  source 1..50: mol_type = other DNA
tactctatactaaatctcaaacrtactttctttactattcctttacaccc

SEQ ID NO: 21886 - DNA, 50 bp, synthetic construct
  source 1..50: mol_type = other DNA
atatcccatcccacaacatactttaaaaaaattaaaacctattatcactc

SEQ ID NO: 21887 - DNA, 50 bp, synthetic construct
  source 1..50: mol_type = other DNA
actttaatcctttcaaaacatactataaaataaaatattaacattaaacc

SEQ ID NO: 21888 - DNA, 50 bp, synthetic construct
  source 1..50: mol_type = other DNA
cttacccaaccttctaaactccaaacattattcactcaaaaaattttctc

SEQ ID NO: 21889 - DNA, 50 bp, synthetic construct
  source 1..50: mol_type = other DNA
aatacataaaattaactttatctactatttaactaaaataaaatacaatc

SEQ ID NO: 21890 - DNA, 50 bp, synthetic construct
  source 1..50: mol_type = other DNA
aaccattttaactaaacaaacccattataacaaaattctctattctaacc

SEQ ID NO: 21891 - DNA, 50 bp, synthetic construct
  source 1..50: mol_type = other DNA
acacctataaatctctaaacrataaacaacaataacttactctcttacac

SEQ ID NO: 21892 - DNA, 50 bp, synthetic construct
  source 1..50: mol_type = other DNA
ccactctaaacaacaaaataaaactctatctcaaaaataataaaccraac

SEQ ID NO: 21893 - DNA, 50 bp, synthetic construct
  source 1..50: mol_type = other DNA
atactttaaaaactataaaaaaccccccraaccractctaaaaaactctc

SEQ ID NO: 21894 - DNA, 50 bp, synthetic construct
  source 1..50: mol_type = other DNA
ataataactaacaaaaataaacctaccttcrcccctccaaaataaaaatc

SEQ ID NO: 21895 - DNA, 50 bp, synthetic construct
  source 1..50: mol_type = other DNA
aaaacaaaaaactaacctaacttctccaactaaccraaaaaactaatacc

SEQ ID NO: 21896 - DNA, 50 bp, synthetic construct
  source 1..50: mol_type = other DNA
acctaacttctccaactaaccraaaaaactaataccraacctaaaaaacc

SEQ ID NO: 21897 - DNA, 50 bp, synthetic construct
  source 1..50: mol_type = other DNA
ctaacttctccaactaaccraaaaaactaataccraacctaaaaaaccrc

SEQ ID NO: 21898 - DNA, 50 bp, synthetic construct
  source 1..50: mol_type = other DNA
tctattataactaacrcttcactaacttccctccctttaataaaaaaccc

SEQ ID NO: 21899 - DNA, 50 bp, synthetic construct
  source 1..50: mol_type = other DNA
caactctaaaccaatcaaaaaaaaccaaatatactcctcacaccaatcrc

SEQ ID NO: 21900 - DNA, 50 bp, synthetic construct
  source 1..50: mol_type = other DNA
ttttccactcccctacctacctataaatctattaaatcaaataataaatc

SEQ ID NO: 21901 - DNA, 50 bp, synthetic construct
  source 1..50: mol_type = other DNA
raccaccaaataaaaataaactatttactcaaaactaacaaaaatcaacc

SEQ ID NO: 21902 - DNA, 50 bp, synthetic construct
  source 1..50: mol_type = other DNA
ataccaactccttaacaacactacaaactattataaccctataccaaaac

SEQ ID NO: 21903 - DNA, 50 bp, synthetic construct
  source 1..50: mol_type = other DNA
cttaacataactttcctttaactacratattaccacrtcacctaatactc

SEQ ID NO: 21904 - DNA, 50 bp, synthetic construct
  source 1..50: mol_type = other DNA
tcacaaaactacraaacaataacctcttaacataactttcctttaactac

SEQ ID NO: 21905 - DNA, 50 bp, synthetic construct
  source 1..50: mol_type = other DNA
aaaaactaaaccataaaacaaaattttaaattttctttcttactaaaacc

SEQ ID NO: 21906 - DNA, 50 bp, synthetic construct
  source 1..50: mol_type = other DNA
aaacrtatcccaccaaacctaactaacttttatattttaaataaaaatac

SEQ ID NO: 21907 - DNA, 50 bp, synthetic construct
  source 1..50: mol_type = other DNA
aaccrcatctctacccaaaatacaaaaattaaccaaacttaataaaacac

SEQ ID NO: 21908 - DNA, 50 bp, synthetic construct
  source 1..50: mol_type = other DNA
tacaaaaattaaccaaacttaataaaacacrcctataatcctaactactc

SEQ ID NO: 21909 - DNA, 50 bp, synthetic construct
  source 1..50: mol_type = other DNA
taatatttctaaaaccaaccaatctcatcataaatacccccactactttc

SEQ ID NO: 21910 - DNA, 50 bp, synthetic construct
  source 1..50: mol_type = other DNA
cttacttaaataactttctattatcattaaaaaaccaataaaactttctc

SEQ ID NO: 21911 - DNA, 50 bp, synthetic construct
  source 1..50: mol_type = other DNA
aaaaccaactaacaaatataaaacctataatcacctaatttatatatacc

SEQ ID NO: 21912 - DNA, 50 bp, synthetic construct
  source 1..50: mol_type = other DNA
ataatctctattttatttcttaaacaaaccaaaactctataaactaaaac

SEQ ID NO: 21913 - DNA, 50 bp, synthetic construct
  source 1..50: mol_type = other DNA
taccatatatccttccaaaactatatctatacaattataaacacacacac

SEQ ID NO: 21914 - DNA, 50 bp, synthetic construct
  source 1..50: mol_type = other DNA
taaaaattttcttcaaaactaccaattcaaataactccaaaaaaaacaac

SEQ ID NO: 21915 - DNA, 50 bp, synthetic construct
  source 1..50: mol_type = other DNA
aaccccatctctattaaaaatacaaaatttaaccraacataataacaaac

SEQ ID NO: 21916 - DNA, 50 bp, synthetic construct
  source 1..50: mol_type = other DNA
aaaactttttaaaatttacattcttattaataaattcatccaaaccaaac

SEQ ID NO: 21917 - DNA, 50 bp, synthetic construct
  source 1..50: mol_type = other DNA
aacaaccactaaactaaaaaaatttaccrtcaaaaaaccctaaaaaaacc

SEQ ID NO: 21918 - DNA, 50 bp, synthetic construct
  source 1..50: mol_type = other DNA
aaaaccractatactactacccaacaaccactaaactaaaaaaatttacc

SEQ ID NO: 21919 - DNA, 50 bp, synthetic construct
  source 1..50: mol_type = other DNA
tctaacracaaattcctccaactcaataactactaaacaacaacacaacc

SEQ ID NO: 21920 - DNA, 50 bp, synthetic construct
  source 1..50: mol_type = other DNA
aaatcttataaaaaacttatctatcatctaaaactaatacacaataacrc

SEQ ID NO: 21921 - DNA, 50 bp, synthetic construct
  source 1..50: mol_type = other DNA
aaaaatcttataaaaaacttatctatcatctaaaactaatacacaataac

SEQ ID NO: 21922 - DNA, 50 bp, synthetic construct
  source 1..50: mol_type = other DNA
aaaccttctctataataaactcaaactacttacctcaaaaaaaaaactac

SEQ ID NO: 21923 - DNA, 50 bp, synthetic construct
  source 1..50: mol_type = other DNA
rataaccaaacttcaaaactataaaactcrctattctaaaaactaaaccc

SEQ ID NO: 21924 - DNA, 50 bp, synthetic construct
  source 1..50: mol_type = other DNA
raattcaacctccaaaacaacraattccacaaccctaaaacctaaccatc

SEQ ID NO: 21925 - DNA, 50 bp, synthetic construct
  source 1..50: mol_type = other DNA
atcrtcccttttctaaacactaaactaattcataaaactcaataccctac

SEQ ID NO: 21926 - DNA, 50 bp, synthetic construct
  source 1..50: mol_type = other DNA
accaatttattttctaaatcaacctacaacaaaaaacractaccctcacc

SEQ ID NO: 21927 - DNA, 50 bp, synthetic construct
  source 1..50: mol_type = other DNA
caacaacaaccacttatactcctataatttccaaaacaccttacttaatc

SEQ ID NO: 21928 - DNA, 50 bp, synthetic construct
  source 1..50: mol_type = other DNA
aaattctcraaatccatttccaacrttaacraataattcataactatacc

SEQ ID NO: 21929 - DNA, 50 bp, synthetic construct
  source 1..50: mol_type = other DNA
aaacaataaccaatctaataactcacaaccracacaaccataaactaccc

SEQ ID NO: 21930 - DNA, 50 bp, synthetic construct
  source 1..50: mol_type = other DNA
acaaaaaatattaaaattccaaacaaaacctcracracaaaaaactaccc

SEQ ID NO: 21931 - DNA, 50 bp, synthetic construct
  source 1..50: mol_type = other DNA
acctcraaaacctaaaaaacctaataaataaacacraataacttcctatc

SEQ ID NO: 21932 - DNA, 50 bp, synthetic construct
  source 1..50: mol_type = other DNA
tcraaaacctaaaaaacctaataaataaacacraataacttcctatcrcc

SEQ ID NO: 21933 - DNA, 50 bp, synthetic construct
  source 1..50: mol_type = other DNA
aaaaaatcataaaaaaccaaactctaaaacttaaaccaacttcaccrtac

SEQ ID NO: 21934 - DNA, 50 bp, synthetic construct
  source 1..50: mol_type = other DNA
taaaaaaaaatcataaaaaaccaaactctaaaacttaaaccaacttcacc

SEQ ID NO: 21935 - DNA, 50 bp, synthetic construct
  source 1..50: mol_type = other DNA
taaacaattaccacacatcataacttcaatataaccaaaacatcacaaac

SEQ ID NO: 21936 - DNA, 50 bp, synthetic construct
  source 1..50: mol_type = other DNA
aattttaattcctcttcttcacacctacataataaaataaaataatccac

SEQ ID NO: 21937 - DNA, 50 bp, synthetic construct
  source 1..50: mol_type = other DNA
acctcctctactaaaattcctctaaaacttttaacctaattacraaaaac

SEQ ID NO: 21938 - DNA, 50 bp, synthetic construct
  source 1..50: mol_type = other DNA
caattaaacctcctctactaaaattcctctaaaacttttaacctaattac

SEQ ID NO: 21939 - DNA, 50 bp, synthetic construct
  source 1..50: mol_type = other DNA
accccaaaaccaaactaaaaataaatcaaaatcaaaataaatataaattc

SEQ ID NO: 21940 - DNA, 50 bp, synthetic construct
  source 1..50: mol_type = other DNA
atcaaaatcaaaataaatataaattcraacatacaaactacaaaatctcc

SEQ ID NO: 21941 - DNA, 50 bp, synthetic construct
  source 1..50: mol_type = other DNA
acatacaaactacaaaatctccrtcaaaaactcttactttccccaaaaac

SEQ ID NO: 21942 - DNA, 50 bp, synthetic construct
  source 1..50: mol_type = other DNA
attcttatatcctaattcttaaatccacatatacraccactatttctacc

SEQ ID NO: 21943 - DNA, 50 bp, synthetic construct
  source 1..50: mol_type = other DNA
caaactacaactaatcccactcctctaacaaaacracaaaaacaataacc

SEQ ID NO: 21944 - DNA, 50 bp, synthetic construct
  source 1..50: mol_type = other DNA
cacaaccttcaaaaacaaatctataaaactcctctttcatctctacccac

SEQ ID NO: 21945 - DNA, 50 bp, synthetic construct
  source 1..50: mol_type = other DNA
ctaaaaaccatctaaaactctaacttaccatttatcacatctcccttacc

SEQ ID NO: 21946 - DNA, 50 bp, synthetic construct
  source 1..50: mol_type = other DNA
aaaataaaactaaactataaataaaaatataaatctataccccttacccc

SEQ ID NO: 21947 - DNA, 50 bp, synthetic construct
  source 1..50: mol_type = other DNA
aaaaaaatataaaacttatatactcccccctaaccaaaacaataactaac

SEQ ID NO: 21948 - DNA, 50 bp, synthetic construct
  source 1..50: mol_type = other DNA
acctaaaactaaactaattctcaacataatctccrtctaactcaataacc

SEQ ID NO: 21949 - DNA, 50 bp, synthetic construct
  source 1..50: mol_type = other DNA
ctatctatcctaccctacctaaaactaaactaattctcaacataatctcc

SEQ ID NO: 21950 - DNA, 50 bp, synthetic construct
  source 1..50: mol_type = other DNA
acccacttaactaatactaaaattcaacaatcttcacrcaaaaccaaacc

SEQ ID NO: 21951 - DNA, 50 bp, synthetic construct
  source 1..50: mol_type = other DNA
crtcactaaacacacccacttaactaatactaaaattcaacaatcttcac

SEQ ID NO: 21952 - DNA, 50 bp, synthetic construct
  source 1..50: mol_type = other DNA
taaatcctatcttaaatactctccctctattaaaaactatttccaatacc

SEQ ID NO: 21953 - DNA, 50 bp, synthetic construct
  source 1..50: mol_type = other DNA
aaaccatctaactaataaacttcctccttaccttaccaaaaattctcttc

SEQ ID NO: 21954 - DNA, 50 bp, synthetic construct
  source 1..50: mol_type = other DNA
acccatcaccaacataaacaacaaaaatcccrccacataataaaaaaatc

SEQ ID NO: 21955 - DNA, 50 bp, synthetic construct
  source 1..50: mol_type = other DNA
aaaaataattaaaataactcccacraaccccttccaatccacctttctcc

SEQ ID NO: 21956 - DNA, 50 bp, synthetic construct
  source 1..50: mol_type = other DNA
ttccctacctaaaataataccacraaaaaaataattaaaataactcccac

SEQ ID NO: 21957 - DNA, 50 bp, synthetic construct
  source 1..50: mol_type = other DNA
ttccctacctcaatatatttcttacacttccctacctaaaataataccac

SEQ ID NO: 21958 - DNA, 50 bp, synthetic construct
  source 1..50: mol_type = other DNA
crcaaaaaactactccrtacttatttactcacctaaaatataaaaaaccc

SEQ ID NO: 21959 - DNA, 50 bp, synthetic construct
  source 1..50: mol_type = other DNA
aaccaaactccttaaaaaaccccactaaaaaaataacaactataactcac

SEQ ID NO: 21960 - DNA, 50 bp, synthetic construct
  source 1..50: mol_type = other DNA
aaaccccactaaaaaaataacaactataactcacrtaaaaatatcttcac

SEQ ID NO: 21961 - DNA, 50 bp, synthetic construct
  source 1..50: mol_type = other DNA
aaaaaataacaactataactcacrtaaaaatatcttcacracaaaacaac

SEQ ID NO: 21962 - DNA, 50 bp, synthetic construct
  source 1..50: mol_type = other DNA
aactcacrtaaaaatatcttcacracaaaacaacraaaaaaccctaaaac

SEQ ID NO: 21963 - DNA, 50 bp, synthetic construct
  source 1..50: mol_type = other DNA
aaacaacraaaaaaccctaaaacrtcccttttttctctaaatatctcctc

SEQ ID NO: 21964 - DNA, 50 bp, synthetic construct
  source 1..50: mol_type = other DNA
cctaaaacrtcccttttttctctaaatatctcctcrcaaactaaataatc

SEQ ID NO: 21965 - DNA, 50 bp, synthetic construct
  source 1..50: mol_type = other DNA
aaaacacctataaaacaaatcaatacaatacaaacaacacaaaaaccccc

SEQ ID NO: 21966 - DNA, 50 bp, synthetic construct
  source 1..50: mol_type = other DNA
ctctatatttaaaaaaccacttacccttcatcctaccaaacrctttaccc

SEQ ID NO: 21967 - DNA, 50 bp, synthetic construct
  source 1..50: mol_type = other DNA
aataaccccccaaacacaaaaaccctaaccataaaccctaaaaaataacc

SEQ ID NO: 21968 - DNA, 50 bp, synthetic construct
  source 1..50: mol_type = other DNA
aaaaaataaccraaataaatcaaaaacctattatcaaccccaaaaaaaac

SEQ ID NO: 21969 - DNA, 50 bp, synthetic construct
  source 1..50: mol_type = other DNA
aataaatcaaaaacctattatcaaccccaaaaaaaacrctaaacctaacc

SEQ ID NO: 21970 - DNA, 50 bp, synthetic construct
  source 1..50: mol_type = other DNA
aacctaaaaaacctaatcttacactaacaactataatacaaaaaaaactc

SEQ ID NO: 21971 - DNA, 50 bp, synthetic construct
  source 1..50: mol_type = other DNA
acctccaaaaccaaaaaccattctaaacaaaatatcttctaccaaaaccc

SEQ ID NO: 21972 - DNA, 50 bp, synthetic construct
  source 1..50: mol_type = other DNA
tttcctacctcraaaaataacaaaacaattccctaactaaaaccttttac

SEQ ID NO: 21973 - DNA, 50 bp, synthetic construct
  source 1..50: mol_type = other DNA
aaaaacccaataataataaaacccaaactatactaaccaaaaaaaaaacc

SEQ ID NO: 21974 - DNA, 50 bp, synthetic construct
  source 1..50: mol_type = other DNA
tactaacaatattctataccaataccatcaatatcctaacaaaaattaac

SEQ ID NO: 21975 - DNA, 50 bp, synthetic construct
  source 1..50: mol_type = other DNA
atacaaaacactaccaacaaccccatataaacataatacaaaattcctac

SEQ ID NO: 21976 - DNA, 50 bp, synthetic construct
  source 1..50: mol_type = other DNA
atctctatatcttcccaaatcctttctaataacccttcatcctatcrtcc

SEQ ID NO: 21977 - DNA, 50 bp, synthetic construct
  source 1..50: mol_type = other DNA
cctctttaaaatttctaaatacaccacttcctactcacaacctaaaattc

SEQ ID NO: 21978 - DNA, 50 bp, synthetic construct
  source 1..50: mol_type = other DNA
ctatatacaatcttaactctacccrcaaaaaaaatatcacraaactaacc

SEQ ID NO: 21979 - DNA, 50 bp, synthetic construct
  source 1..50: mol_type = other DNA
ttataaaaatctatatacaatcttaactctacccrcaaaaaaaatatcac

SEQ ID NO: 21980 - DNA, 50 bp, synthetic construct
  source 1..50: mol_type = other DNA
ctcttttacraacaaaattaaaattatacacaaatccccacaaataccac

SEQ ID NO: 21981 - DNA, 50 bp, synthetic construct
  source 1..50: mol_type = other DNA
ctatctacttttttttaatccttctcraccatatttcttactctccaatc

SEQ ID NO: 21982 - DNA, 50 bp, synthetic construct
  source 1..50: mol_type = other DNA
aacccttcaacatctaaactctccctatctacttttttttaatccttctc

SEQ ID NO: 21983 - DNA, 50 bp, synthetic construct
  source 1..50: mol_type = other DNA
acactaataactacaaaaaaaacaaatatcrtcaataccccaaaaaaaac

SEQ ID NO: 21984 - DNA, 50 bp, synthetic construct
  source 1..50: mol_type = other DNA
actaaaaactaaccaaaaactaacataaactcrctcrccaactaataccc

SEQ ID NO: 21985 - DNA, 50 bp, synthetic construct
  source 1..50: mol_type = other DNA
aaaaaaaaaactctactaaaaactaaccaaaaactaacataaactcrctc

SEQ ID NO: 21986 - DNA, 50 bp, synthetic construct
  source 1..50: mol_type = other DNA
actctaaaaaacacctctcaacaaacrcaaaaaacccttaacaaaaccac

SEQ ID NO: 21987 - DNA, 50 bp, synthetic construct
  source 1..50: mol_type = other DNA
acccttcaaaatattatatacaaaacrtaactctatcaaaaacctcttac

SEQ ID NO: 21988 - DNA, 50 bp, synthetic construct
  source 1..50: mol_type = other DNA
atactactataaactactctttaacttaaacaaaaacctaaatttatttc

SEQ ID NO: 21989 - DNA, 50 bp, synthetic construct
  source 1..50: mol_type = other DNA
aacttacacccaaaaaataaaacatctattaataaataaaactcccaacc

SEQ ID NO: 21990 - DNA, 50 bp, synthetic construct
  source 1..50: mol_type = other DNA
aactcccaaccrtaaatcaaatctctacaataaaacaaatataaaaatac

SEQ ID NO: 21991 - DNA, 50 bp, synthetic construct
  source 1..50: mol_type = other DNA
cactatacttacracttatatctcttaaacrccaaatatttctaaaaaac

SEQ ID NO: 21992 - DNA, 50 bp, synthetic construct
  source 1..50: mol_type = other DNA
caaattcaactacrcrcttacactatacttacracttatatctcttaaac

SEQ ID NO: 21993 - DNA, 50 bp, synthetic construct
  source 1..50: mol_type = other DNA
aacaaacacaaaactcaacaaattcaactacrcrcttacactatacttac

SEQ ID NO: 21994 - DNA, 50 bp, synthetic construct
  source 1..50: mol_type = other DNA
taataaatactataaaaaacaaacacaaaactcaacaaattcaactacrc

SEQ ID NO: 21995 - DNA, 50 bp, synthetic construct
  source 1..50: mol_type = other DNA
actaataaatactataaaaaacaaacacaaaactcaacaaattcaactac

SEQ ID NO: 21996 - DNA, 50 bp, synthetic construct
  source 1..50: mol_type = other DNA
acatactaatcccaaatttatcaacttactttatttttaaatcaatcttc

SEQ ID NO: 21997 - DNA, 50 bp, synthetic construct
  source 1..50: mol_type = other DNA
catcaaaaaactttaaccctctaattcaattacttaatctattttttcac

SEQ ID NO: 21998 - DNA, 50 bp, synthetic construct
  source 1..50: mol_type = other DNA
ttacattaattcctaacaaaacttttatttacaaactcaacaaaaaaaac

SEQ ID NO: 21999 - DNA, 50 bp, synthetic construct
  source 1..50: mol_type = other DNA
atatataaaataaatccrttctatttccataaattaaacacctcaacatc

SEQ ID NO: 22000 - DNA, 50 bp, synthetic construct
  source 1..50: mol_type = other DNA
aaaaaccattacttaaaaacttttcactcacttatatataaaataaatcc

SEQ ID NO: 22001 - DNA, 50 bp, synthetic construct
  source 1..50: mol_type = other DNA
ataataatttttcttcaacattacttctcaaaaattttccttatcttctc

SEQ ID NO: 22002 - DNA, 50 bp, synthetic construct
  source 1..50: mol_type = other DNA
aacaaactttcaataatttcatatttattaaatatttatataccatctac

SEQ ID NO: 22003 - DNA, 50 bp, synthetic construct
  source 1..50: mol_type = other DNA
aaataatcaattcaattttctaaaaacattcctcatctccracaaaccac

SEQ ID NO: 22004 - DNA, 50 bp, synthetic construct
  source 1..50: mol_type = other DNA
aaaactcccaatcctacaattaaaattaacatcaacaaaaatataaaatc

SEQ ID NO: 22005 - DNA, 50 bp, synthetic construct
  source 1..50: mol_type = other DNA
atttcttcaccaacaaaataacacaataaaataatatatttacaaaattc

SEQ ID NO: 22006 - DNA, 50 bp, synthetic construct
  source 1..50: mol_type = other DNA
aaaatcactaaaacaatacaaacaaaaactaaaaaacaaaccaccttccc

SEQ ID NO: 22007 - DNA, 50 bp, synthetic construct
  source 1..50: mol_type = other DNA
ttatctaaacctacctaatctaattataaaaaaaactaactcaaaactac

SEQ ID NO: 22008 - DNA, 50 bp, synthetic construct
  source 1..50: mol_type = other DNA
tttttctccactcaattaaaaaaaccacaaacccraacttaaataaaatc

SEQ ID NO: 22009 - DNA, 50 bp, synthetic construct
  source 1..50: mol_type = other DNA
taaaataattctttaattcctaaacrcataaataatctactatattaacc

SEQ ID NO: 22010 - DNA, 50 bp, synthetic construct
  source 1..50: mol_type = other DNA
tcttacccaaataataacaaaaccctaaaataattctttaattcctaaac

SEQ ID NO: 22011 - DNA, 50 bp, synthetic construct
  source 1..50: mol_type = other DNA
acttaactaactacataaaaaatcccaaatcttcctaccattcctttctc

SEQ ID NO: 22012 - DNA, 50 bp, synthetic construct
  source 1..50: mol_type = other DNA
cratatttcctttttctatccctaaatcctttcctaaactttatactccc

SEQ ID NO: 22013 - DNA, 50 bp, synthetic construct
  source 1..50: mol_type = other DNA
aaaaacractttcataaaaataactaaatcacacaaaaaaacctaaaaac

SEQ ID NO: 22014 - DNA, 50 bp, synthetic construct
  source 1..50: mol_type = other DNA
tatacattaacaaactcaaataaaacrattctaaaaacctttataaaacc

SEQ ID NO: 22015 - DNA, 50 bp, synthetic construct
  source 1..50: mol_type = other DNA
atatattttaccattacctcccaaacraccttacaaaaatctccaaaatc

SEQ ID NO: 22016 - DNA, 50 bp, synthetic construct
  source 1..50: mol_type = other DNA
aacctaaaaatcaaaacacaatccttattccaaattaccttttcctctcc

SEQ ID NO: 22017 - DNA, 50 bp, synthetic construct
  source 1..50: mol_type = other DNA
cttttcctctccracaaatcaaaattcaattcaaccattttctatttaac

SEQ ID NO: 22018 - DNA, 50 bp, synthetic construct
  source 1..50: mol_type = other DNA
acaaaataaaaaaactctttcaacaaaacctacctaattcacactacccc

SEQ ID NO: 22019 - DNA, 50 bp, synthetic construct
  source 1..50: mol_type = other DNA
ataaataatacttcaatattaatcaccaacctaattaacttccctaactc

SEQ ID NO: 22020 - DNA, 50 bp, synthetic construct
  source 1..50: mol_type = other DNA
ccacccactcaacctaaaatacratactctaaaaatcaaataacatcccc

SEQ ID NO: 22021 - DNA, 50 bp, synthetic construct
  source 1..50: mol_type = other DNA
cctaactctaaaaacaatacaaaacctacaaatataactaacaacataac

SEQ ID NO: 22022 - DNA, 50 bp, synthetic construct
  source 1..50: mol_type = other DNA
actccactttaaaatactaaaaaaaaccataaacaaaaactaatcaaaac

SEQ ID NO: 22023 - DNA, 50 bp, synthetic construct
  source 1..50: mol_type = other DNA
aaccataaacaaaaactaatcaaaacraaccaaatcccaacatatatccc

SEQ ID NO: 22024 - DNA, 50 bp, synthetic construct
  source 1..50: mol_type = other DNA
aaacaaatttccttcaaataaaacracatccttcccctaaacaataaacc

SEQ ID NO: 22025 - DNA, 50 bp, synthetic construct
  source 1..50: mol_type = other DNA
acaaaacaaaaactcaaaaaaactacaactaacttccctatactaacacc

SEQ ID NO: 22026 - DNA, 50 bp, synthetic construct
  source 1..50: mol_type = other DNA
ataaacatcttataaaccaaaaacaacataaaaactctacataattaaac

SEQ ID NO: 22027 - DNA, 50 bp, synthetic construct
  source 1..50: mol_type = other DNA
acaaaccccaaaaacattaataactaaatttaaaaacatacaaaaacacc

SEQ ID NO: 22028 - DNA, 50 bp, synthetic construct
  source 1..50: mol_type = other DNA
craaacaaaaaacctaactttaatcatcctcttccatactatattaattc

SEQ ID NO: 22029 - DNA, 50 bp, synthetic construct
  source 1..50: mol_type = other DNA
ttacctactacaatccatattaaaacrtaacttacttctccttaccttcc

SEQ ID NO: 22030 - DNA, 50 bp, synthetic construct
  source 1..50: mol_type = other DNA
ccacctactattacacataaatcacrcctccaaatcctattattttacac

SEQ ID NO: 22031 - DNA, 50 bp, synthetic construct
  source 1..50: mol_type = other DNA
aatataaaaaacraaacaatacttctaacatctactaaataaaaaccaac

SEQ ID NO: 22032 - DNA, 50 bp, synthetic construct
  source 1..50: mol_type = other DNA
aaacraaacaatacttctaacatctactaaataaaaaccaacrattcatc

SEQ ID NO: 22033 - DNA, 50 bp, synthetic construct
  source 1..50: mol_type = other DNA
ccctcttatacaactttaaaaaattccaaataccaacttcttcatcactc

SEQ ID NO: 22034 - DNA, 50 bp, synthetic construct
  source 1..50: mol_type = other DNA
aaatcrctataatataaacacttatacacrccttcatcttacaaaattac

SEQ ID NO: 22035 - DNA, 50 bp, synthetic construct
  source 1..50: mol_type = other DNA
ttcacttcctttatacttacaaaatcrctataatataaacacttatacac

SEQ ID NO: 22036 - DNA, 50 bp, synthetic construct
  source 1..50: mol_type = other DNA
attccttactctaaacaacatttttaaactaaaaaattcaatttaaaaac

SEQ ID NO: 22037 - DNA, 50 bp, synthetic construct
  source 1..50: mol_type = other DNA
attatacctaattcatctctaattcccraaaacctcacataatacctaac

SEQ ID NO: 22038 - DNA, 50 bp, synthetic construct
  source 1..50: mol_type = other DNA
acrcaaactccttataaacaaaaattatacctaattcatctctaattccc

SEQ ID NO: 22039 - DNA, 50 bp, synthetic construct
  source 1..50: mol_type = other DNA
cataaaattccacttcatttacatacatatttttcttcctaaactaatac

SEQ ID NO: 22040 - DNA, 50 bp, synthetic construct
  source 1..50: mol_type = other DNA
atctactcaaatcctctctaccaaacaattcctcttttctataaaaaaac

SEQ ID NO: 22041 - DNA, 50 bp, synthetic construct
  source 1..50: mol_type = other DNA
tataaaactaaataaatcccaaataattaaaaaactatcacttcctatcc

SEQ ID NO: 22042 - DNA, 50 bp, synthetic construct
  source 1..50: mol_type = other DNA
taaatcatcttcctaccaatctattaaaccaacaaaataatcctctatcc

SEQ ID NO: 22043 - DNA, 50 bp, synthetic construct
  source 1..50: mol_type = other DNA
acaatataaatcatcctctaacacaaaacccattatatattactaacaac

SEQ ID NO: 22044 - DNA, 50 bp, synthetic construct
  source 1..50: mol_type = other DNA
accctaaacacaaaatcaaaacaaaaaatccaaacaactaaaatctaaac

SEQ ID NO: 22045 - DNA, 50 bp, synthetic construct
  source 1..50: mol_type = other DNA
ttcattacacatttacatttcattacaaatatataactcracaacccacc

SEQ ID NO: 22046 - DNA, 50 bp, synthetic construct
  source 1..50: mol_type = other DNA
taaaacraattttcattacacatttacatttcattacaaatatataactc

SEQ ID NO: 22047 - DNA, 50 bp, synthetic construct
  source 1..50: mol_type = other DNA
actaccraatcacacatttacaataaaatacaaatatataataaaaaccc

SEQ ID NO: 22048 - DNA, 50 bp, synthetic construct
  source 1..50: mol_type = other DNA
cacacatttacaataaaatacaaatatataataaaaacccrtcccatttc

SEQ ID NO: 22049 - DNA, 50 bp, synthetic construct
  source 1..50: mol_type = other DNA
cacaaaatcactcaaaaaacttacaaaaactaaaactattcctaaaactc

SEQ ID NO: 22050 - DNA, 50 bp, synthetic construct
  source 1..50: mol_type = other DNA
caaaatcactcaaaaaacttacaaaaactaaaactattcctaaaactcrc

SEQ ID NO: 22051 - DNA, 50 bp, synthetic construct
  source 1..50: mol_type = other DNA
ctaaaaataaaatttttacacaaattttaaaacctcacctccaccccacc

SEQ ID NO: 22052 - DNA, 50 bp, synthetic construct
  source 1..50: mol_type = other DNA
caataaacaacactaacattactaaattcttaaaaaaaaccaccaacaac

SEQ ID NO: 22053 - DNA, 50 bp, synthetic construct
  source 1..50: mol_type = other DNA
ctaaatttaaacacatatctacctacacccacacacatctatcttcatac

SEQ ID NO: 22054 - DNA, 50 bp, synthetic construct
  source 1..50: mol_type = other DNA
ttcctatactaataactaataacctaaaaccaaaaacrcctattaccttc

SEQ ID NO: 22055 - DNA, 50 bp, synthetic construct
  source 1..50: mol_type = other DNA
tcaatctaatcatttcctatactaataactaataacctaaaaccaaaaac

SEQ ID NO: 22056 - DNA, 50 bp, synthetic construct
  source 1..50: mol_type = other DNA
tttctccctctaaactaaaaaatccrtccattcaaaataaaaactatctc

SEQ ID NO: 22057 - DNA, 50 bp, synthetic construct
  source 1..50: mol_type = other DNA
tttaaaaaaatactaaaacctaaaatctcatcaacctcrccttctacccc

SEQ ID NO: 22058 - DNA, 50 bp, synthetic construct
  source 1..50: mol_type = other DNA
ctaaccctccaaaaacrtcattatactatcacacaaatcatttaataaac

SEQ ID NO: 22059 - DNA, 50 bp, synthetic construct
  source 1..50: mol_type = other DNA
acactactcttttctaaaatataaaatacaataactaaccctccaaaaac

SEQ ID NO: 22060 - DNA, 50 bp, synthetic construct
  source 1..50: mol_type = other DNA
attccatttcttctaaaacttccaaaaattaaacataactcatccaaaac

SEQ ID NO: 22061 - DNA, 50 bp, synthetic construct
  source 1..50: mol_type = other DNA
atattttctaaacaatctacracacrcttcatatctacaatcttcactac

SEQ ID NO: 22062 - DNA, 50 bp, synthetic construct
  source 1..50: mol_type = other DNA
tttattaatacaaatctctttcttaatattttctaaacaatctacracac

SEQ ID NO: 22063 - DNA, 50 bp, synthetic construct
  source 1..50: mol_type = other DNA
aacattttattaatacaaatctctttcttaatattttctaaacaatctac

SEQ ID NO: 22064 - DNA, 50 bp, synthetic construct
  source 1..50: mol_type = other DNA
actatttaaattccccctacactctctaaattactaacaaaaaaaattcc

SEQ ID NO: 22065 - DNA, 50 bp, synthetic construct
  source 1..50: mol_type = other DNA
racctcactaaaattatacaaacaataaataacaaaacttaaaatctcrc

SEQ ID NO: 22066 - DNA, 50 bp, synthetic construct
  source 1..50: mol_type = other DNA
ccracctcactaaaattatacaaacaataaataacaaaacttaaaatctc

SEQ ID NO: 22067 - DNA, 50 bp, synthetic construct
  source 1..50: mol_type = other DNA
rcraaatttcaaatcctaccacctactacctatacaacctcaataaaacc

SEQ ID NO: 22068 - DNA, 50 bp, synthetic construct
  source 1..50: mol_type = other DNA
aaactttacaatataccaaatactcccacrtaccctataacatttactcc

SEQ ID NO: 22069 - DNA, 50 bp, synthetic construct
  source 1..50: mol_type = other DNA
tcatataaaaaaactctaatttttctaataacactacacccaaattttcc

SEQ ID NO: 22070 - DNA, 50 bp, synthetic construct
  source 1..50: mol_type = other DNA
acrttaatattaaaacaaactatatatatctatctcrccaaaaatattcc

SEQ ID NO: 22071 - DNA, 50 bp, synthetic construct
  source 1..50: mol_type = other DNA
aaaacraaaattaccatccctaatcttcaaaactacraaatatttctaac

SEQ ID NO: 22072 - DNA, 50 bp, synthetic construct
  source 1..50: mol_type = other DNA
aaataaaattatcaataaaaaaccractatacccaaaatcctaaaaccac

SEQ ID NO: 22073 - DNA, 50 bp, synthetic construct
  source 1..50: mol_type = other DNA
caataaaaaaccractatacccaaaatcctaaaaccacrttataaaaatc

SEQ ID NO: 22074 - DNA, 50 bp, synthetic construct
  source 1..50: mol_type = other DNA
catattaacaattctaaactaaccraaaaatccctaccaaccaaatcccc

SEQ ID NO: 22075 - DNA, 50 bp, synthetic construct
  source 1..50: mol_type = other DNA
actatctactataaatatttcctcraaaacctaactaacaaaaacctccc

SEQ ID NO: 22076 - DNA, 50 bp, synthetic construct
  source 1..50: mol_type = other DNA
cctattcccaaaattcaaaaaaaataaatccrcctaaacctaacttccac

SEQ ID NO: 22077 - DNA, 50 bp, synthetic construct
  source 1..50: mol_type = other DNA
aaactcaacctataccaaacctattcccaaaattcaaaaaaaataaatcc

SEQ ID NO: 22078 - DNA, 50 bp, synthetic construct
  source 1..50: mol_type = other DNA
aaattctcacaaaaaacacacacccrtatcactatctcctaaactatacc

SEQ ID NO: 22079 - DNA, 50 bp, synthetic construct
  source 1..50: mol_type = other DNA
ataaacrtacaatacattatttcaattattaattcrccatacaatacatc

SEQ ID NO: 22080 - DNA, 50 bp, synthetic construct
  source 1..50: mol_type = other DNA
caatacattatttcaattattaattcrccatacaatacatcrttaatcac

SEQ ID NO: 22081 - DNA, 50 bp, synthetic construct
  source 1..50: mol_type = other DNA
ctatcctaaaacctctaaaactaaaaacattttaataccaaaaaccaatc

SEQ ID NO: 22082 - DNA, 50 bp, synthetic construct
  source 1..50: mol_type = other DNA
ctcaaaaaaaatatccttccccacaaacccaaaaaaaatcaacacatcac

SEQ ID NO: 22083 - DNA, 50 bp, synthetic construct
  source 1..50: mol_type = other DNA
aaattcaaaattcctaccacataaaaaatctatacttcaactttctttcc

SEQ ID NO: 22084 - DNA, 50 bp, synthetic construct
  source 1..50: mol_type = other DNA
tccattaactattttccacactaataaactctactaatcaaaaaactaac

SEQ ID NO: 22085 - DNA, 50 bp, synthetic construct
  source 1..50: mol_type = other DNA
aaacataacactaccttaacccaaactaataaccatattctataataacc

SEQ ID NO: 22086 - DNA, 50 bp, synthetic construct
  source 1..50: mol_type = other DNA
tcttttaacctaaaataatttacaaactactaaattttactccctctaac

SEQ ID NO: 22087 - DNA, 50 bp, synthetic construct
  source 1..50: mol_type = other DNA
ttctaaaattactctttctaaaaataattttctaaaaactcrccctaatc

SEQ ID NO: 22088 - DNA, 50 bp, synthetic construct
  source 1..50: mol_type = other DNA
aaaaataattttctaaaaactcrccctaatcractaaaaaacacacaaac

SEQ ID NO: 22089 - DNA, 50 bp, synthetic construct
  source 1..50: mol_type = other DNA
aaacacacaaacraaataacraaccaataaataaaaaactctcctacaac

SEQ ID NO: 22090 - DNA, 50 bp, synthetic construct
  source 1..50: mol_type = other DNA
ctacaacraaaacaccttaaaaactaattatataaaccaaaaatacactc

SEQ ID NO: 22091 - DNA, 50 bp, synthetic construct
  source 1..50: mol_type = other DNA
craccttctacttctccaaaaataaatatatctaacctaccacrattccc

SEQ ID NO: 22092 - DNA, 50 bp, synthetic construct
  source 1..50: mol_type = other DNA
tcctaaccraccttctacttctccaaaaataaatatatctaacctaccac

SEQ ID NO: 22093 - DNA, 50 bp, synthetic construct
  source 1..50: mol_type = other DNA
tattactcctcacttctaaaactcaacaaaaatattcataactcctaacc

SEQ ID NO: 22094 - DNA, 50 bp, synthetic construct
  source 1..50: mol_type = other DNA
taaaattctatttattaacaaaatcataacctctcctaattataaccccc

SEQ ID NO: 22095 - DNA, 50 bp, synthetic construct
  source 1..50: mol_type = other DNA
aaaaaaccataaccctatcaataaacaaaaccccaatccttaatataacc

SEQ ID NO: 22096 - DNA, 50 bp, synthetic construct
  source 1..50: mol_type = other DNA
taaaataatcctacctaaaaacraaatctaatatacaaacccataaaacc

SEQ ID NO: 22097 - DNA, 50 bp, synthetic construct
  source 1..50: mol_type = other DNA
accrttttacattcactaaaccractccataaatttatataccaaattcc

SEQ ID NO: 22098 - DNA, 50 bp, synthetic construct
  source 1..50: mol_type = other DNA
ctaaaatatctacaattactacaaaaaccccaactacctttaaactcacc

SEQ ID NO: 22099 - DNA, 50 bp, synthetic construct
  source 1..50: mol_type = other DNA
ctatttcacttataccaattaaatataaactttattctaaacaaacacac

SEQ ID NO: 22100 - DNA, 50 bp, synthetic construct
  source 1..50: mol_type = other DNA
cacccttacctatctattcctatctacttttattatactttaaaactctc

SEQ ID NO: 22101 - DNA, 50 bp, synthetic construct
  source 1..50: mol_type = other DNA
cccacctaaatatatataattcccttctcaacccacataccatatactac

SEQ ID NO: 22102 - DNA, 50 bp, synthetic construct
  source 1..50: mol_type = other DNA
taaaacacacrtcttcaaaacaaaaactaaaccataatattacctaaaac

SEQ ID NO: 22103 - DNA, 50 bp, synthetic construct
  source 1..50: mol_type = other DNA
aacaaaataattttcttaactacaaactctaaactaaacataaaacacac

SEQ ID NO: 22104 - DNA, 50 bp, synthetic construct
  source 1..50: mol_type = other DNA
atcaaccacaaaccratcctactattcaacctatcctattaataacctac

SEQ ID NO: 22105 - DNA, 50 bp, synthetic construct
  source 1..50: mol_type = other DNA
aaaaaacaccaaaaaatcattactttcacttacacrattattacttcacc

SEQ ID NO: 22106 - DNA, 50 bp, synthetic construct
  source 1..50: mol_type = other DNA
ccctacacactaaataataactactattatcacaattactcctcatcacc

SEQ ID NO: 22107 - DNA, 50 bp, synthetic construct
  source 1..50: mol_type = other DNA
acttatattttcctataataataacttattaactaaaatccaacccaccc

SEQ ID NO: 22108 - DNA, 50 bp, synthetic construct
  source 1..50: mol_type = other DNA
ataaataactaaaaatctaaaacccacctcttaaacrtaatcccrcaatc

SEQ ID NO: 22109 - DNA, 50 bp, synthetic construct
  source 1..50: mol_type = other DNA
aactaaataaataactaaaaatctaaaacccacctcttaaacrtaatccc

SEQ ID NO: 22110 - DNA, 50 bp, synthetic construct
  source 1..50: mol_type = other DNA
catcctacaactaaataaataactaaaaatctaaaacccacctcttaaac

SEQ ID NO: 22111 - DNA, 50 bp, synthetic construct
  source 1..50: mol_type = other DNA
actaataacaaacattaaacctaattttctcatctactcaacaatataac

SEQ ID NO: 22112 - DNA, 50 bp, synthetic construct
  source 1..50: mol_type = other DNA
caaatacrcaaaaataccaaatctaacaatctctaaaacaaccaaatacc

SEQ ID NO: 22113 - DNA, 50 bp, synthetic construct
  source 1..50: mol_type = other DNA
tattaaaataaattaccttcttaaaatcaaattatttccccttttaaacc

SEQ ID NO: 22114 - DNA, 50 bp, synthetic construct
  source 1..50: mol_type = other DNA
aaaaaaacaatccattctaacaacaaaaacacatctcacaacaataaaac

SEQ ID NO: 22115 - DNA, 50 bp, synthetic construct
  source 1..50: mol_type = other DNA
acaaatcaccacctaatattaactcctaaaataaaaattttcattatctc

SEQ ID NO: 22116 - DNA, 50 bp, synthetic construct
  source 1..50: mol_type = other DNA
aatccccaaaatttaacacctctctaaaaaaataccaaaatactaatacc

SEQ ID NO: 22117 - DNA, 50 bp, synthetic construct
  source 1..50: mol_type = other DNA
acctaacracaccattaattctaaaattacatacactcccaataatcctc

SEQ ID NO: 22118 - DNA, 50 bp, synthetic construct
  source 1..50: mol_type = other DNA
actcaacraaaaccactaaaaatatatataaccccaaaactaataatatc

SEQ ID NO: 22119 - DNA, 50 bp, synthetic construct
  source 1..50: mol_type = other DNA
caaaacccrataaaatcaaataacaaaactacaaataatctaacaaactc

SEQ ID NO: 22120 - DNA, 50 bp, synthetic construct
  source 1..50: mol_type = other DNA
aaatttctcraaaaacatttattatataccactaatcctaaccccacaac

SEQ ID NO: 22121 - DNA, 50 bp, synthetic construct
  source 1..50: mol_type = other DNA
aaaaatatatttatctaaattaaaacttcctctccaaaaactttacaaac

SEQ ID NO: 22122 - DNA, 50 bp, synthetic construct
  source 1..50: mol_type = other DNA
aaaccttccrtacctttctaaaataaaattatttaactacatactacctc

SEQ ID NO: 22123 - DNA, 50 bp, synthetic construct
  source 1..50: mol_type = other DNA
acactctacraaacaacatataatcaaataactttaccccaaaaaaatac

SEQ ID NO: 22124 - DNA, 50 bp, synthetic construct
  source 1..50: mol_type = other DNA
aaattaaaaacctaaacctatctactaaacctcaaaataaaacctccacc

SEQ ID NO: 22125 - DNA, 50 bp, synthetic construct
  source 1..50: mol_type = other DNA
accraaaaaactaaataatacccraacttccccaaaccaatcaaaacaac

SEQ ID NO: 22126 - DNA, 50 bp, synthetic construct
  source 1..50: mol_type = other DNA
aacaaaattcraacctatacraaaaaaccccattaaatttcraatccaac

SEQ ID NO: 22127 - DNA, 50 bp, synthetic construct
  source 1..50: mol_type = other DNA
aaaaataactaaaaatcaaaaaaacatactaactactactacctattacc

SEQ ID NO: 22128 - DNA, 50 bp, synthetic construct
  source 1..50: mol_type = other DNA
caacaataaaattataaacttaactctaactttacatcaaaaataccccc

SEQ ID NO: 22129 - DNA, 50 bp, synthetic construct
  source 1..50: mol_type = other DNA
ataaaattataaacttaactctaactttacatcaaaaatacccccractc

SEQ ID NO: 22130 - DNA, 50 bp, synthetic construct
  source 1..50: mol_type = other DNA
aacaaaccaaaatccaaacacaaaaatattaaataaacaccctaaatatc

SEQ ID NO: 22131 - DNA, 50 bp, synthetic construct
  source 1..50: mol_type = other DNA
tacctaaaccttaacttacctcaacccaaaaaatactacctaacaatcac

SEQ ID NO: 22132 - DNA, 50 bp, synthetic construct
  source 1..50: mol_type = other DNA
tctatttacaaactttccccaacctacactcaatataacctaatctccac

SEQ ID NO: 22133 - DNA, 50 bp, synthetic construct
  source 1..50: mol_type = other DNA
catcctaaatacacaaaccacaacttcctccttttactcaaaacctatac

SEQ ID NO: 22134 - DNA, 50 bp, synthetic construct
  source 1..50: mol_type = other DNA
cctaaatttatatacacaaattaaattctctctaaaatatcrtcaacctc

SEQ ID NO: 22135 - DNA, 50 bp, synthetic construct
  source 1..50: mol_type = other DNA
cacttacctatatatacactaaatccaaccctacactaatcraaattaac

SEQ ID NO: 22136 - DNA, 50 bp, synthetic construct
  source 1..50: mol_type = other DNA
catcactaaaactaaaaaactacaaactcctttcccactctcctctaccc

SEQ ID NO: 22137 - DNA, 50 bp, synthetic construct
  source 1..50: mol_type = other DNA
crtctcaataacaaacaaaaataaacccaaccactcaccttccaaaaaac

SEQ ID NO: 22138 - DNA, 50 bp, synthetic construct
  source 1..50: mol_type = other DNA
ataacaaaaatattcaattaacaacaaataactccacacacttattctac

SEQ ID NO: 22139 - DNA, 50 bp, synthetic construct
  source 1..50: mol_type = other DNA
acttaaaaatcataaaacaataatacaaacaactcaacrtcaatcataac

SEQ ID NO: 22140 - DNA, 50 bp, synthetic construct
  source 1..50: mol_type = other DNA
ctttacaaaacatataaataccraacaaaacaatacaaaaatcaaccacc

SEQ ID NO: 22141 - DNA, 50 bp, synthetic construct
  source 1..50: mol_type = other DNA
atataaataccraacaaaacaatacaaaaatcaaccaccraattataatc

SEQ ID NO: 22142 - DNA, 50 bp, synthetic construct
  source 1..50: mol_type = other DNA
tcataatatacaaaaactatttctctctatcctacctcttaaaaaaacac

SEQ ID NO: 22143 - DNA, 50 bp, synthetic construct
  source 1..50: mol_type = other DNA
ccracttacctttaacttaaaaactcaacaaacattaacaaaaaactaac

SEQ ID NO: 22144 - DNA, 50 bp, synthetic construct
  source 1..50: mol_type = other DNA
tcrtcaaccctctatcaatatttactaaatcctcaaatcaaaaacaaatc

SEQ ID NO: 22145 - DNA, 50 bp, synthetic construct
  source 1..50: mol_type = other DNA
aaaaataaaccccaataaaactttaccccaaccctaacctctctctactc

SEQ ID NO: 22146 - DNA, 50 bp, synthetic construct
  source 1..50: mol_type = other DNA
aaaaccctactaaaacccactcccaaaactaaaaaaacaaacaaaaaaac

SEQ ID NO: 22147 - DNA, 50 bp, synthetic construct
  source 1..50: mol_type = other DNA
craaaccaaaatctatatctatcrttaactcaaatctctaaaaatacaac

SEQ ID NO: 22148 - DNA, 50 bp, synthetic construct
  source 1..50: mol_type = other DNA
aaaaccctaacraactaaaaatcrcacaaaaaaataacttctaaaacaac

SEQ ID NO: 22149 - DNA, 50 bp, synthetic construct
  source 1..50: mol_type = other DNA
aaaaacraacraaaccaaccaataaaaaaaaccctaacraactaaaaatc

SEQ ID NO: 22150 - DNA, 50 bp, synthetic construct
  source 1..50: mol_type = other DNA
tactaaatcaaaaaaatcaattctattcataacctatataaaaaacraac

SEQ ID NO: 22151 - DNA, 50 bp, synthetic construct
  source 1..50: mol_type = other DNA
aaactactaaatcaaaaaaatcaattctattcataacctatataaaaaac

SEQ ID NO: 22152 - DNA, 50 bp, synthetic construct
  source 1..50: mol_type = other DNA
ttcaacccaaaccattcaaaaaaatacatcattctctcttaacatcaaac

SEQ ID NO: 22153 - DNA, 50 bp, synthetic construct
  source 1..50: mol_type = other DNA
aaaccaaacccttatcaatcaaataccaacaaaacaattctaaacctacc

SEQ ID NO: 22154 - DNA, 50 bp, synthetic construct
  source 1..50: mol_type = other DNA
aacatccatcctcatttccctacaaaaatcctaacaaaacaatttattcc

SEQ ID NO: 22155 - DNA, 50 bp, synthetic construct
  source 1..50: mol_type = other DNA
tttttatcaacacaaacacttatcccacaaaaccatattattttccacac

SEQ ID NO: 22156 - DNA, 50 bp, synthetic construct
  source 1..50: mol_type = other DNA
attaatcaatatctaaatcacraaacctatatcttaacctcaaaccatac

SEQ ID NO: 22157 - DNA, 50 bp, synthetic construct
  source 1..50: mol_type = other DNA
aatcaaaaaaaccctacaaccrcataatctaaaaccaaaacacaaatccc

SEQ ID NO: 22158 - DNA, 50 bp, synthetic construct
  source 1..50: mol_type = other DNA
caaatacaattcacacacctacraataacttaaaccaaaactatcaattc

SEQ ID NO: 22159 - DNA, 50 bp, synthetic construct
  source 1..50: mol_type = other DNA
aaaataacctatatccaaattaatataacaaatacaattcacacacctac

SEQ ID NO: 22160 - DNA, 50 bp, synthetic construct
  source 1..50: mol_type = other DNA
ataacttcctactacctctaatacatatcrccccaaaaataaaaaacctc

SEQ ID NO: 22161 - DNA, 50 bp, synthetic construct
  source 1..50: mol_type = other DNA
cracaaaattaaactatcaccataacttcctactacctctaatacatatc

SEQ ID NO: 22162 - DNA, 50 bp, synthetic construct
  source 1..50: mol_type = other DNA
cratatacaccaaaaacaacaaaaaatcataataacaactcaaccctacc

SEQ ID NO: 22163 - DNA, 50 bp, synthetic construct
  source 1..50: mol_type = other DNA
aaaaaaattcataaaaacaacaaaaaactttaacaaataccacaaactcc

SEQ ID NO: 22164 - DNA, 50 bp, synthetic construct
  source 1..50: mol_type = other DNA
actccrtaaaaaccatactctaccccttacttacaaacacattttaaacc

SEQ ID NO: 22165 - DNA, 50 bp, synthetic construct
  source 1..50: mol_type = other DNA
aatattacraatacaaaattaaacaataccaaaaaaactcctacccccac

SEQ ID NO: 22166 - DNA, 50 bp, synthetic construct
  source 1..50: mol_type = other DNA
ataaactcrtaaaaataaaaactttcctaacattactcaaccctataccc

SEQ ID NO: 22167 - DNA, 50 bp, synthetic construct
  source 1..50: mol_type = other DNA
crcttaaacccaaaaattcaaaacaaacctaaacaacataacaaaacacc

SEQ ID NO: 22168 - DNA, 50 bp, synthetic construct
  source 1..50: mol_type = other DNA
cratattttaccatattatccaaacttatcttaaactcctaaactcaaac

SEQ ID NO: 22169 - DNA, 50 bp, synthetic construct
  source 1..50: mol_type = other DNA
ctaacataaccttattataccaactaaaaaaaaacaacacacctataaac

SEQ ID NO: 22170 - DNA, 50 bp, synthetic construct
  source 1..50: mol_type = other DNA
tacttaaaaataacacaaacctaccaacataacttcatccatttactttc

SEQ ID NO: 22171 - DNA, 50 bp, synthetic construct
  source 1..50: mol_type = other DNA
tctacraaaaaatactacatatttatacaactacccaaccctataaaaac

SEQ ID NO: 22172 - DNA, 50 bp, synthetic construct
  source 1..50: mol_type = other DNA
taaatattctataaaccaaatataaaaaaataaccacaatctaaatacac

SEQ ID NO: 22173 - DNA, 50 bp, synthetic construct
  source 1..50: mol_type = other DNA
aaaaacttaacaaacraatcctaaaaccratacacaaacraactcaatac

SEQ ID NO: 22174 - DNA, 50 bp, synthetic construct
  source 1..50: mol_type = other DNA
aaaaaaaaccaaaaaacttaacaaacraatcctaaaaccratacacaaac

SEQ ID NO: 22175 - DNA, 50 bp, synthetic construct
  source 1..50: mol_type = other DNA
attcctaacaactaaaccaaaaatcatcctactcaaattccacaaactac

SEQ ID NO: 22176 - DNA, 50 bp, synthetic construct
  source 1..50: mol_type = other DNA
tacatttctcaacacatcaccttactctaatccaccctattaataaaaac

SEQ ID NO: 22177 - DNA, 50 bp, synthetic construct
  source 1..50: mol_type = other DNA
caacacatcaccttactctaatccaccctattaataaaaacractacccc

SEQ ID NO: 22178 - DNA, 50 bp, synthetic construct
  source 1..50: mol_type = other DNA
ttatcataaaaacraacctttcccatccaccactaattaaatcaaatttc

SEQ ID NO: 22179 - DNA, 50 bp, synthetic construct
  source 1..50: mol_type = other DNA
cctactctataactaatttttctctctcacaataaaattatcataaaaac

SEQ ID NO: 22180 - DNA, 50 bp, synthetic construct
  source 1..50: mol_type = other DNA
acaacraacaaatatatctctctaaacataaacatccttaataacacccc

SEQ ID NO: 22181 - DNA, 50 bp, synthetic construct
  source 1..50: mol_type = other DNA
aacacraaataccatcaaaaatatttatactcaaaaaaacacacctactc

SEQ ID NO: 22182 - DNA, 50 bp, synthetic construct
  source 1..50: mol_type = other DNA
ttaacaaaaaatatttttactccttcccttaaattaaaaactcaataaac

SEQ ID NO: 22183 - DNA, 50 bp, synthetic construct
  source 1..50: mol_type = other DNA
acaaaaaatatttttactccttcccttaaattaaaaactcaataaacrcc

SEQ ID NO: 22184 - DNA, 50 bp, synthetic construct
  source 1..50: mol_type = other DNA
raacaatacttaaaatcatatatctaccracccaaaccraaaacctaacc

SEQ ID NO: 22185 - DNA, 50 bp, synthetic construct
  source 1..50: mol_type = other DNA
caaaaatacaaaaacctcttccataacrccaacaaaataaaacaaccctc

SEQ ID NO: 22186 - DNA, 50 bp, synthetic construct
  source 1..50: mol_type = other DNA
aaaattaactttaaaaatctaatttttaaacaaattaccaacatcaaaac

SEQ ID NO: 22187 - DNA, 50 bp, synthetic construct
  source 1..50: mol_type = other DNA
taaaatctaccctacctttctcaaaatacttccrtctctatccctctttc

SEQ ID NO: 22188 - DNA, 50 bp, synthetic construct
  source 1..50: mol_type = other DNA
atcctatttaacaattactcctaccaacaaaaacctcrtaactcactacc

SEQ ID NO: 22189 - DNA, 50 bp, synthetic construct
  source 1..50: mol_type = other DNA
taaccccrtctatatcctatttaacaattactcctaccaacaaaaacctc

SEQ ID NO: 22190 - DNA, 50 bp, synthetic construct
  source 1..50: mol_type = other DNA
aaatcacraaacctttactaacaaaaataactaccaaacaaaacacaaac

SEQ ID NO: 22191 - DNA, 50 bp, synthetic construct
  source 1..50: mol_type = other DNA
aaacacctacaaacrataaaaaaccaaaaattcatccatacactcaaaac

SEQ ID NO: 22192 - DNA, 50 bp, synthetic construct
  source 1..50: mol_type = other DNA
ctccratattcaaaaccactttttatacatatatatatacctatatacac

SEQ ID NO: 22193 - DNA, 50 bp, synthetic construct
  source 1..50: mol_type = other DNA
aaacrtacacacaaatacacacacatacacaaaaaataaccttaaacacc

SEQ ID NO: 22194 - DNA, 50 bp, synthetic construct
  source 1..50: mol_type = other DNA
atacacaaaaaataaccttaaacaccraaaataaaacattccctaacacc

SEQ ID NO: 22195 - DNA, 50 bp, synthetic construct
  source 1..50: mol_type = other DNA
tatactcactaactactctattaaaaacctctttctacctcccaactaac

SEQ ID NO: 22196 - DNA, 50 bp, synthetic construct
  source 1..50: mol_type = other DNA
aataaaaaattattcaacaatcctaattctctaaatctatccaaaccctc

SEQ ID NO: 22197 - DNA, 50 bp, synthetic construct
  source 1..50: mol_type = other DNA
tattaaaaccataacaaactctattcccatcctcacaaactaaaccccac

SEQ ID NO: 22198 - DNA, 50 bp, synthetic construct
  source 1..50: mol_type = other DNA
tttaaatttcctattttacaacttatttaaaacccaacrtctttaatctc

SEQ ID NO: 22199 - DNA, 50 bp, synthetic construct
  source 1..50: mol_type = other DNA
ctattttacaacttatttaaaacccaacrtctttaatctcraaaccctac

SEQ ID NO: 22200 - DNA, 50 bp, synthetic construct
  source 1..50: mol_type = other DNA
taatctcraaaccctacraacacaaattacttttcttaactaaataatac

SEQ ID NO: 22201 - DNA, 50 bp, synthetic construct
  source 1..50: mol_type = other DNA
ccttaacatcaaaaatatcctaaatacacractactcctatacccraaac

SEQ ID NO: 22202 - DNA, 50 bp, synthetic construct
  source 1..50: mol_type = other DNA
tcaaaccttaacatcaaaaatatcctaaatacacractactcctataccc

SEQ ID NO: 22203 - DNA, 50 bp, synthetic construct
  source 1..50: mol_type = other DNA
actaaaccaaaactactcaaaccttaacatcaaaaatatcctaaatacac

SEQ ID NO: 22204 - DNA, 50 bp, synthetic construct
  source 1..50: mol_type = other DNA
acactcaaaatacctctaataccaaaatttaaacaactctaacccaaccc

SEQ ID NO: 22205 - DNA, 50 bp, synthetic construct
  source 1..50: mol_type = other DNA
caaaaaaattaataaaaaataaactcaataataacccctatcacaacctc

SEQ ID NO: 22206 - DNA, 50 bp, synthetic construct
  source 1..50: mol_type = other DNA
aaattaataaaaaataaactcaataataacccctatcacaacctcraacc

SEQ ID NO: 22207 - DNA, 50 bp, synthetic construct
  source 1..50: mol_type = other DNA
taaaaaataaactcaataataacccctatcacaacctcraaccraaactc

SEQ ID NO: 22208 - DNA, 50 bp, synthetic construct
  source 1..50: mol_type = other DNA
aaacraaaataaatatacatataacaaaacaaaatactctccraacaaac

SEQ ID NO: 22209 - DNA, 50 bp, synthetic construct
  source 1..50: mol_type = other DNA
rcatatctaaaacataccccaaaaatcattaaaaactacccaacaaaaac

SEQ ID NO: 22210 - DNA, 50 bp, synthetic construct
  source 1..50: mol_type = other DNA
rcctctactaaacaatctctaataacccctaaaatatattccaaacatac

SEQ ID NO: 22211 - DNA, 50 bp, synthetic construct
  source 1..50: mol_type = other DNA
caatctctaataacccctaaaatatattccaaacatacrtaaacatctac

SEQ ID NO: 22212 - DNA, 50 bp, synthetic construct
  source 1..50: mol_type = other DNA
aaaacttcatactaaacataaacracaaaccaaaaaactatttcttcttc

SEQ ID NO: 22213 - DNA, 50 bp, synthetic construct
  source 1..50: mol_type = other DNA
aaaaacttctaaaaatattacaaaacaaaaaactttctaccaaaactacc

SEQ ID NO: 22214 - DNA, 50 bp, synthetic construct
  source 1..50: mol_type = other DNA
ctccaaaaaactttctaaataataaacrtacatctctacctctaccaatc

SEQ ID NO: 22215 - DNA, 50 bp, synthetic construct
  source 1..50: mol_type = other DNA
atactattctctttttccttctactccaaaaaactttctaaataataaac

SEQ ID NO: 22216 - DNA, 50 bp, synthetic construct
  source 1..50: mol_type = other DNA
ccattattactaccaaaaacttttataaacacacataaactaaaataacc

SEQ ID NO: 22217 - DNA, 50 bp, synthetic construct
  source 1..50: mol_type = other DNA
taattataacattaattctatatttttcttaaataacaaacttactctac

SEQ ID NO: 22218 - DNA, 50 bp, synthetic construct
  source 1..50: mol_type = other DNA
ctatctcatcctaacttatactcttctcatttatttcacaaaaattatcc

SEQ ID NO: 22219 - DNA, 50 bp, synthetic construct
  source 1..50: mol_type = other DNA
aaataacatctctataaaaacaaattaatcctatacttaattcctacctc

SEQ ID NO: 22220 - DNA, 50 bp, synthetic construct
  source 1..50: mol_type = other DNA
aaaaacaaattaatcctatacttaattcctacctcratacaaaactatcc

SEQ ID NO: 22221 - DNA, 50 bp, synthetic construct
  source 1..50: mol_type = other DNA
aaaattacaaaaacattttcacatactatcacacatttacrctatcacac

SEQ ID NO: 22222 - DNA, 50 bp, synthetic construct
  source 1..50: mol_type = other DNA
taaaatcttcaaaattacaaaaacattttcacatactatcacacatttac

SEQ ID NO: 22223 - DNA, 50 bp, synthetic construct
  source 1..50: mol_type = other DNA
aaataaattaaaattatacattaaacacctaacaaccctctaccataacc

SEQ ID NO: 22224 - DNA, 50 bp, synthetic construct
  source 1..50: mol_type = other DNA
aaccrcctaatcatcrtccaaattataaaaaactaataaaataaatccac

SEQ ID NO: 22225 - DNA, 50 bp, synthetic construct
  source 1..50: mol_type = other DNA
aattttcacaaactcttttcaaaatttaaataaaaaactcacctaccccc

SEQ ID NO: 22226 - DNA, 50 bp, synthetic construct
  source 1..50: mol_type = other DNA
aattatccataactacttccttctaacatcttctaataatttccaaacac

SEQ ID NO: 22227 - DNA, 50 bp, synthetic construct
  source 1..50: mol_type = other DNA
ccttctaacatcttctaataatttccaaacacrctatatatatttccctc

SEQ ID NO: 22228 - DNA, 50 bp, synthetic construct
  source 1..50: mol_type = other DNA
actattcccctataaacaaaacraactaaaaacattaataacrcaacaac

SEQ ID NO: 22229 - DNA, 50 bp, synthetic construct
  source 1..50: mol_type = other DNA
aaaaaaaaactattcccctataaacaaaacraactaaaaacattaataac

SEQ ID NO: 22230 - DNA, 50 bp, synthetic construct
  source 1..50: mol_type = other DNA
ccttaaactatcaattatataactcaattatactaataatcaatatattc

SEQ ID NO: 22231 - DNA, 50 bp, synthetic construct
  source 1..50: mol_type = other DNA
aataaaattataccctacttccataaaacrattaataaaccaacaaacac

SEQ ID NO: 22232 - DNA, 50 bp, synthetic construct
  source 1..50: mol_type = other DNA
aacccaaaaactacatcctaaaataaaattataccctacttccataaaac

SEQ ID NO: 22233 - DNA, 50 bp, synthetic construct
  source 1..50: mol_type = other DNA
aacaaaacacaattccattctaaaatataacccctaaatcctaaatatcc

SEQ ID NO: 22234 - DNA, 50 bp, synthetic construct
  source 1..50: mol_type = other DNA
tcttttctttaacrcttcaataatcaaatctatcacaataaataaacctc

SEQ ID NO: 22235 - DNA, 50 bp, synthetic construct
  source 1..50: mol_type = other DNA
cttaattaaattaaaccaccracrcttttaaccaccattatctacaaaac

SEQ ID NO: 22236 - DNA, 50 bp, synthetic construct
  source 1..50: mol_type = other DNA
ttcttaaaacaaaaactcactctattacccaaacaaaaatacaataatac

SEQ ID NO: 22237 - DNA, 50 bp, synthetic construct
  source 1..50: mol_type = other DNA
aaaaaacrcccraaccaaacatacctaactaaaatttctcctaccttaac

SEQ ID NO: 22238 - DNA, 50 bp, synthetic construct
  source 1..50: mol_type = other DNA
ccacrccccaataaattaaaaaatacacrattaaaacactactaaataac

SEQ ID NO: 22239 - DNA, 50 bp, synthetic construct
  source 1..50: mol_type = other DNA
acctaacccaatttaccttttattccccrctattcaacaatattttaatc

SEQ ID NO: 22240 - DNA, 50 bp, synthetic construct
  source 1..50: mol_type = other DNA
tataatttcaattaaacattttacctaattccrttttattcttcttcttc

SEQ ID NO: 22241 - DNA, 50 bp, synthetic construct
  source 1..50: mol_type = other DNA
aaataatactatcaaacaaaacaactttataaaaaatatcraaacacaac

SEQ ID NO: 22242 - DNA, 50 bp, synthetic construct
  source 1..50: mol_type = other DNA
aactaataaataaatcctcraactctaaataaacacctacrctatacccc

SEQ ID NO: 22243 - DNA, 50 bp, synthetic construct
  source 1..50: mol_type = other DNA
aataataaacccttaacaaccaacactaaacaactaataaataaatcctc

SEQ ID NO: 22244 - DNA, 50 bp, synthetic construct
  source 1..50: mol_type = other DNA
caaaaaccactccaccttccaaaactccttaaaaaatcaactaaaacccc

SEQ ID NO: 22245 - DNA, 50 bp, synthetic construct
  source 1..50: mol_type = other DNA
acctccctaaacraaacrtttatatacaaaaaatttactaaaaaactctc

SEQ ID NO: 22246 - DNA, 50 bp, synthetic construct
  source 1..50: mol_type = other DNA
aaaaacaaaattccttaataatactataaatcaacctccctaaacraaac

SEQ ID NO: 22247 - DNA, 50 bp, synthetic construct
  source 1..50: mol_type = other DNA
atctaaaaaacaaaattccttaataatactataaatcaacctccctaaac

SEQ ID NO: 22248 - DNA, 50 bp, synthetic construct
  source 1..50: mol_type = other DNA
tttaacccaatttaaatcaaatatctacctctattccttcaactaacaac

SEQ ID NO: 22249 - DNA, 50 bp, synthetic construct
  source 1..50: mol_type = other DNA
crctaaacccaatcaacaaatcacaaaaaataactaaatatttcctccac

SEQ ID NO: 22250 - DNA, 50 bp, synthetic construct
  source 1..50: mol_type = other DNA
taccaaaaacaaaattatccraaaataactctaaactaaattacatacac

SEQ ID NO: 22251 - DNA, 50 bp, synthetic construct
  source 1..50: mol_type = other DNA
aactaataacttaacaaaaaattacaacattccctaatccaaaaatctcc

SEQ ID NO: 22252 - DNA, 50 bp, synthetic construct
  source 1..50: mol_type = other DNA
aaattacaacattccctaatccaaaaatctccraaacctaaacttattcc

SEQ ID NO: 22253 - DNA, 50 bp, synthetic construct
  source 1..50: mol_type = other DNA
cccttaccctctaaattccaatcaaccaacaaaaaacaccaacaaaaatc

SEQ ID NO: 22254 - DNA, 50 bp, synthetic construct
  source 1..50: mol_type = other DNA
atttcccaacctaaccaaaaaaaacaaataaaacctctaaaataaaaaac

SEQ ID NO: 22255 - DNA, 50 bp, synthetic construct
  source 1..50: mol_type = other DNA
aaaaaataacttccaaccattccctaacctaacctaaataacaacttaac

SEQ ID NO: 22256 - DNA, 50 bp, synthetic construct
  source 1..50: mol_type = other DNA
ttctccttcccrataaaactaaatcctaaaataataacaaattcactaac

SEQ ID NO: 22257 - DNA, 50 bp, synthetic construct
  source 1..50: mol_type = other DNA
tatactaaacctttatacataattttatatttaatacacctaccrtaaac

SEQ ID NO: 22258 - DNA, 50 bp, synthetic construct
  source 1..50: mol_type = other DNA
tcttttaaaaatctattaaacactacctaacatcctttaatctaaatttc

SEQ ID NO: 22259 - DNA, 50 bp, synthetic construct
  source 1..50: mol_type = other DNA
cataaaaactaaccactaaaaaaacrctaaaaaatatctcttttctttcc

SEQ ID NO: 22260 - DNA, 50 bp, synthetic construct
  source 1..50: mol_type = other DNA
ttttctaaccccataaaatataaaacataaaaactaaccactaaaaaaac

SEQ ID NO: 22261 - DNA, 50 bp, synthetic construct
  source 1..50: mol_type = other DNA
aaatctcaaacaaaaaactacraataaaatcatcaaaccccaaaactaac

SEQ ID NO: 22262 - DNA, 50 bp, synthetic construct
  source 1..50: mol_type = other DNA
ccacttccctcaaatccaacaatacaaaaaacaacaaaaattcrtaaaac

SEQ ID NO: 22263 - DNA, 50 bp, synthetic construct
  source 1..50: mol_type = other DNA
taacatttttttaatcaacaaacatttcctaaaccctacccatacaaaac

SEQ ID NO: 22264 - DNA, 50 bp, synthetic construct
  source 1..50: mol_type = other DNA
acatttcctaaaccctacccatacaaaacrtaaaactaacccaaaaaaac

SEQ ID NO: 22265 - DNA, 50 bp, synthetic construct
  source 1..50: mol_type = other DNA
aaaccaaacaaaactaactcacrcctaattacaaaaaacctaattaaaac

SEQ ID NO: 22266 - DNA, 50 bp, synthetic construct
  source 1..50: mol_type = other DNA
aattacaaaaaacctaattaaaacracaaacraaaataaaattacccaac

SEQ ID NO: 22267 - DNA, 50 bp, synthetic construct
  source 1..50: mol_type = other DNA
aaataacaaaatctctaacaacctcracaaaatattaatataataaaaac

SEQ ID NO: 22268 - DNA, 50 bp, synthetic construct
  source 1..50: mol_type = other DNA
caaaacaaatcraactacttctaccaaacatactcatcaaaaataaatac

SEQ ID NO: 22269 - DNA, 50 bp, synthetic construct
  source 1..50: mol_type = other DNA
crtatcccctctaactctaatctctatatccaatacaaccaaaacaaatc

SEQ ID NO: 22270 - DNA, 50 bp, synthetic construct
  source 1..50: mol_type = other DNA
cratttattctaattacactaaacacaaaaactaaaatcaaaaaaaacac

SEQ ID NO: 22271 - DNA, 50 bp, synthetic construct
  source 1..50: mol_type = other DNA
ataaaataataacctatcatcccaaacractattcataccaaaaccattc

SEQ ID NO: 22272 - DNA, 50 bp, synthetic construct
  source 1..50: mol_type = other DNA
tcrataataaaaaaacatctcctatacraataaccttaatataaacaacc

SEQ ID NO: 22273 - DNA, 50 bp, synthetic construct
  source 1..50: mol_type = other DNA
atattaaaaaatacttaaaacaataacaccaaaatacacaataaatactc

SEQ ID NO: 22274 - DNA, 50 bp, synthetic construct
  source 1..50: mol_type = other DNA
catttaaatatcaactcaacacaacctcctataccraaacattataaacc

SEQ ID NO: 22275 - DNA, 50 bp, synthetic construct
  source 1..50: mol_type = other DNA
aacacraaaaaaacacatctttaactaatacttaaacaaaaaccctaaac

SEQ ID NO: 22276 - DNA, 50 bp, synthetic construct
  source 1..50: mol_type = other DNA
acacatctttaactaatacttaaacaaaaaccctaaacrcacatacaccc

SEQ ID NO: 22277 - DNA, 50 bp, synthetic construct
  source 1..50: mol_type = other DNA
acatctttaactaatacttaaacaaaaaccctaaacrcacatacacccrc

SEQ ID NO: 22278 - DNA, 50 bp, synthetic construct
  source 1..50: mol_type = other DNA
aacaaataaacaacrtaaacacrtaaaccataacaaaaacaaaatacccc

SEQ ID NO: 22279 - DNA, 50 bp, synthetic construct
  source 1..50: mol_type = other DNA
acaacacacrcaactaaaaaaaacttctatccctatcaacracaaaaaac

SEQ ID NO: 22280 - DNA, 50 bp, synthetic construct
  source 1..50: mol_type = other DNA
aaaataaaataaaatacaactaaaaactacrcataacctctacaacacac

SEQ ID NO: 22281 - DNA, 50 bp, synthetic construct
  source 1..50: mol_type = other DNA
ctaacaaaaacaaaaaccctctccaactacrtatactacaaaaaccatac

SEQ ID NO: 22282 - DNA, 50 bp, synthetic construct
  source 1..50: mol_type = other DNA
ccaatacctaaaccaattaacaccaatataaaaaacaataaactaactcc

SEQ ID NO: 22283 - DNA, 50 bp, synthetic construct
  source 1..50: mol_type = other DNA
aatcccacattcacattcctaatacrtaaacaaaataaaaaaccrcaatc

SEQ ID NO: 22284 - DNA, 50 bp, synthetic construct
  source 1..50: mol_type = other DNA
ctaccattctaaaaccatttccaccacaattaaaactctcctaccttcac

SEQ ID NO: 22285 - DNA, 50 bp, synthetic construct
  source 1..50: mol_type = other DNA
aaaaaaacaaatctctatctcataaaactatcaaataaaacatcrcratc

SEQ ID NO: 22286 - DNA, 50 bp, synthetic construct
  source 1..50: mol_type = other DNA
taacaactaatatttttttctaaaaaatctcctactttcactacratccc

SEQ ID NO: 22287 - DNA, 50 bp, synthetic construct
  source 1..50: mol_type = other DNA
aacaactaactaaactaaaacctaaacaaaaataaacatcacraaaaacc

SEQ ID NO: 22288 - DNA, 50 bp, synthetic construct
  source 1..50: mol_type = other DNA
actatacaccaaaaactctatttaaacaaatactaaaactccratcctcc

SEQ ID NO: 22289 - DNA, 50 bp, synthetic construct
  source 1..50: mol_type = other DNA
acttttacaaaattaaataataccacaaaaaacaaaacaacraactcrac

SEQ ID NO: 22290 - DNA, 50 bp, synthetic construct
  source 1..50: mol_type = other DNA
aatacttttacaaaattaaataataccacaaaaaacaaaacaacraactc

SEQ ID NO: 22291 - DNA, 50 bp, synthetic construct
  source 1..50: mol_type = other DNA
cctacaaatacttttacaaaattaaataataccacaaaaaacaaaacaac

SEQ ID NO: 22292 - DNA, 50 bp, synthetic construct
  source 1..50: mol_type = other DNA
aacctcctctaaaaaaatcacaaaaaaataaccaaactaactcaaaaacc

SEQ ID NO: 22293 - DNA, 50 bp, synthetic construct
  source 1..50: mol_type = other DNA
ctaactcaaaaaccraaaatcccacaacaacataacaacaataaacacac

SEQ ID NO: 22294 - DNA, 50 bp, synthetic construct
  source 1..50: mol_type = other DNA
ttctaaaccctaaaacaaactatatctaattctcatttaccrtactcacc

SEQ ID NO: 22295 - DNA, 50 bp, synthetic construct
  source 1..50: mol_type = other DNA
atctctaaattctaaaccctaaaacaaactatatctaattctcatttacc

SEQ ID NO: 22296 - DNA, 50 bp, synthetic construct
  source 1..50: mol_type = other DNA
acaacctattccaaaacccaaaattcaaaaattaaaactacaaataaacc

SEQ ID NO: 22297 - DNA, 50 bp, synthetic construct
  source 1..50: mol_type = other DNA
cctattccaaaacccaaaattcaaaaattaaaactacaaataaaccraac

SEQ ID NO: 22298 - DNA, 50 bp, synthetic construct
  source 1..50: mol_type = other DNA
tccrctatactcccrtactatctcaaaaatataaaccaaaataacccaac

SEQ ID NO: 22299 - DNA, 50 bp, synthetic construct
  source 1..50: mol_type = other DNA
tcaaaaatataaaccaaaataacccaacrctaaaccatatatctcccatc

SEQ ID NO: 22300 - DNA, 50 bp, synthetic construct
  source 1..50: mol_type = other DNA
aaaaatataaaccaaaataacccaacrctaaaccatatatctcccatcrc

SEQ ID NO: 22301 - DNA, 50 bp, synthetic construct
  source 1..50: mol_type = other DNA
aataataaaaataccatactaaccttataacacaaaaataaaaacctcac

SEQ ID NO: 22302 - DNA, 50 bp, synthetic construct
  source 1..50: mol_type = other DNA
atacaactttattaaaaatacaattttacaaccccataactactcctacc

SEQ ID NO: 22303 - DNA, 50 bp, synthetic construct
  source 1..50: mol_type = other DNA
atttcaccraaacctcaataaactaaatacaaaaaccctactcaaaaacc

SEQ ID NO: 22304 - DNA, 50 bp, synthetic construct
  source 1..50: mol_type = other DNA
acctcaataaactaaatacaaaaaccctactcaaaaaccraaatatccac

SEQ ID NO: 22305 - DNA, 50 bp, synthetic construct
  source 1..50: mol_type = other DNA
aattcaaaacctaaataacacaaaaaaataaccaaaatacccraaattac

SEQ ID NO: 22306 - DNA, 50 bp, synthetic construct
  source 1..50: mol_type = other DNA
acaaaacaccctactactaaatataatactccaccaactctatcaaaatc

SEQ ID NO: 22307 - DNA, 50 bp, synthetic construct
  source 1..50: mol_type = other DNA
aacaaaactaataaaatactacactcaacaacaaaatatcctacaaaacc

SEQ ID NO: 22308 - DNA, 50 bp, synthetic construct
  source 1..50: mol_type = other DNA
caaaactaataaaatactacactcaacaacaaaatatcctacaaaaccrc

SEQ ID NO: 22309 - DNA, 50 bp, synthetic construct
  source 1..50: mol_type = other DNA
aactaataaaatactacactcaacaacaaaatatcctacaaaaccrcrac

SEQ ID NO: 22310 - DNA, 50 bp, synthetic construct
  source 1..50: mol_type = other DNA
tacttaaaaataacraaaatacraaaccctcacctctcactaataaaatc

SEQ ID NO: 22311 - DNA, 50 bp, synthetic construct
  source 1..50: mol_type = other DNA
ctattcaaaataaaaaccractcatccctacttaaaaataacraaaatac

SEQ ID NO: 22312 - DNA, 50 bp, synthetic construct
  source 1..50: mol_type = other DNA
ctccctaactattcaaaataaaaaccractcatccctacttaaaaataac

SEQ ID NO: 22313 - DNA, 50 bp, synthetic construct
  source 1..50: mol_type = other DNA
tatctccaataaaacctaaattacaacraccaaaactcccraaataaaac

SEQ ID NO: 22314 - DNA, 50 bp, synthetic construct
  source 1..50: mol_type = other DNA
acccaaatcccactaaaaacaaaaaaaccactactaataaccaacatatc

SEQ ID NO: 22315 - DNA, 50 bp, synthetic construct
  source 1..50: mol_type = other DNA
caataattcaaaacctatactaaaccaaaaaactcactatcttaaaatac

SEQ ID NO: 22316 - DNA, 50 bp, synthetic construct
  source 1..50: mol_type = other DNA
taaatcttaacrttctcatcaaaacctaacaactaattctaaacrcaaac

SEQ ID NO: 22317 - DNA, 50 bp, synthetic construct
  source 1..50: mol_type = other DNA
acratataaatcttaacrttctcatcaaaacctaacaactaattctaaac

SEQ ID NO: 22318 - DNA, 50 bp, synthetic construct
  source 1..50: mol_type = other DNA
tcattaaccrtaacctccaaacaaccctaactaacratataaatcttaac

SEQ ID NO: 22319 - DNA, 50 bp, synthetic construct
  source 1..50: mol_type = other DNA
acrtccaaaaccaactactaaaccctaataaaaacrctaaaacctacatc

SEQ ID NO: 22320 - DNA, 50 bp, synthetic construct
  source 1..50: mol_type = other DNA
aataaaaacrctaaaacctacatcrccaaccaaaattatctaaaaaccac

SEQ ID NO: 22321 - DNA, 50 bp, synthetic construct
  source 1..50: mol_type = other DNA
cratcaataacttctaacaaataacrtaacaaaaaaacaaccrtatcatc

SEQ ID NO: 22322 - DNA, 50 bp, synthetic construct
  source 1..50: mol_type = other DNA
rttatataatcraaactttatcactaaccctcaatttcccaacaaaaacc

SEQ ID NO: 22323 - DNA, 50 bp, synthetic construct
  source 1..50: mol_type = other DNA
acaaataataataaaaatttacccaactctacataaacacrctccacctc

SEQ ID NO: 22324 - DNA, 50 bp, synthetic construct
  source 1..50: mol_type = other DNA
aaatcaccraacaaataataataaaaatttacccaactctacataaacac

SEQ ID NO: 22325 - DNA, 50 bp, synthetic construct
  source 1..50: mol_type = other DNA
aataaaacrtatccatacaaaactaaacaaacctccatcatcacttaccc

SEQ ID NO: 22326 - DNA, 50 bp, synthetic construct
  source 1..50: mol_type = other DNA
atcactaaaaactcaaactactcctataatacctaaaactaaaactaaac

SEQ ID NO: 22327 - DNA, 50 bp, synthetic construct
  source 1..50: mol_type = other DNA
caaaactataccaaatacacatttaacacccrttaccttctctaaaaacc

SEQ ID NO: 22328 - DNA, 50 bp, synthetic construct
  source 1..50: mol_type = other DNA
taaacaaccttcrcraacacaaaactataccaaatacacatttaacaccc

SEQ ID NO: 22329 - DNA, 50 bp, synthetic construct
  source 1..50: mol_type = other DNA
aataccaaccrtactaaaacatattcatcaaccaacactaaacaaccttc

SEQ ID NO: 22330 - DNA, 50 bp, synthetic construct
  source 1..50: mol_type = other DNA
ttttctaactctaatacaatcatactactactactttaataaacactcac

SEQ ID NO: 22331 - DNA, 50 bp, synthetic construct
  source 1..50: mol_type = other DNA
aaaactaaacaatatataacccactaaataaaaaaaacccaaactcaaac

SEQ ID NO: 22332 - DNA, 50 bp, synthetic construct
  source 1..50: mol_type = other DNA
tctaataaaaaatcctcaaatttaaaatatactaaaaatcatcatccttc

SEQ ID NO: 22333 - DNA, 50 bp, synthetic construct
  source 1..50: mol_type = other DNA
ttaaatatatcccaacaactacttaaaaaaccacaacattaaccraacac

SEQ ID NO: 22334 - DNA, 50 bp, synthetic construct
  source 1..50: mol_type = other DNA
tacaaattaaatatatcccaacaactacttaaaaaaccacaacattaacc

SEQ ID NO: 22335 - DNA, 50 bp, synthetic construct
  source 1..50: mol_type = other DNA
ataaattaaaactctacacttacttcatatctaaaatatatctcaatcac

SEQ ID NO: 22336 - DNA, 50 bp, synthetic construct
  source 1..50: mol_type = other DNA
aaaaatattaaaaaaaatcactttaacttccrctttcctttattccctcc

SEQ ID NO: 22337 - DNA, 50 bp, synthetic construct
  source 1..50: mol_type = other DNA
tccccaaaaaactatctaaaaaaatattaaaaaaaatcactttaacttcc

SEQ ID NO: 22338 - DNA, 50 bp, synthetic construct
  source 1..50: mol_type = other DNA
craaattataccactacactccaatctaaataacaataaaaccctatctc

SEQ ID NO: 22339 - DNA, 50 bp, synthetic construct
  source 1..50: mol_type = other DNA
cttcacccttaaaccttttcccctaaaaaataaactatcataaaaatcac

SEQ ID NO: 22340 - DNA, 50 bp, synthetic construct
  source 1..50: mol_type = other DNA
cataaaaatcacrataacatctaaaatcctaaccttacccaaaacatacc

SEQ ID NO: 22341 - DNA, 50 bp, synthetic construct
  source 1..50: mol_type = other DNA
aaaaaacactttaacccraaaattaacattcccctacacactttcttctc

SEQ ID NO: 22342 - DNA, 50 bp, synthetic construct
  source 1..50: mol_type = other DNA
aaaaactaaaacaataattcaaaaccaacatcaaaaaaacactttaaccc

SEQ ID NO: 22343 - DNA, 50 bp, synthetic construct
  source 1..50: mol_type = other DNA
aaaaatatttctccatataccacaacaaaccaatacctaaaactaaattc

SEQ ID NO: 22344 - DNA, 50 bp, synthetic construct
  source 1..50: mol_type = other DNA
accaaaaatattaaataaaaacttcaatcccaaaaataaaaactccaaac

SEQ ID NO: 22345 - DNA, 50 bp, synthetic construct
  source 1..50: mol_type = other DNA
ctaaaaaaacaaacaactattactacaacaacccttaaaaaaaccccatc

SEQ ID NO: 22346 - DNA, 50 bp, synthetic construct
  source 1..50: mol_type = other DNA
aacaactattactacaacaacccttaaaaaaaccccatcrcttaaacacc

SEQ ID NO: 22347 - DNA, 50 bp, synthetic construct
  source 1..50: mol_type = other DNA
aaaataaaacctatccaataatacactaccattcccacaaaaaaacatac

SEQ ID NO: 22348 - DNA, 50 bp, synthetic construct
  source 1..50: mol_type = other DNA
actaaacaaatttcactttccctaatttcactttctataatttcaattac

SEQ ID NO: 22349 - DNA, 50 bp, synthetic construct
  source 1..50: mol_type = other DNA
aacatttttccttaactacrcctctcttcttaaaccttaaaaaaatcccc

SEQ ID NO: 22350 - DNA, 50 bp, synthetic construct
  source 1..50: mol_type = other DNA
aacaaaacaccaaataaattcctaaaatttctaactccaaaccctaactc

SEQ ID NO: 22351 - DNA, 50 bp, synthetic construct
  source 1..50: mol_type = other DNA
aaacaaaaaactttactaaacctctaaaaacacaaaaaatatccacaacc

SEQ ID NO: 22352 - DNA, 50 bp, synthetic construct
  source 1..50: mol_type = other DNA
tttaatatatacttaatcaaacaaaataaaacttatcatttccaataaac

SEQ ID NO: 22353 - DNA, 50 bp, synthetic construct
  source 1..50: mol_type = other DNA
tctccrcraaataattcaatccaataattaaatttataactccaaacctc

SEQ ID NO: 22354 - DNA, 50 bp, synthetic construct
  source 1..50: mol_type = other DNA
tcccccttaacactatatcataataaaaataaattctcrtaaaatctaac

SEQ ID NO: 22355 - DNA, 50 bp, synthetic construct
  source 1..50: mol_type = other DNA
taaaaacaaatttcccccttaacactatatcataataaaaataaattctc

SEQ ID NO: 22356 - DNA, 50 bp, synthetic construct
  source 1..50: mol_type = other DNA
ttaatcaaatatatctccaaatcattaacccactttttaatctaattttc

SEQ ID NO: 22357 - DNA, 50 bp, synthetic construct
  source 1..50: mol_type = other DNA
cactacatattcaaaaaatattaccccttacctacctaattactttccac

SEQ ID NO: 22358 - DNA, 50 bp, synthetic construct
  source 1..50: mol_type = other DNA
tacctacctaattactttccacrtctatcaaatatcaattaataatacac

SEQ ID NO: 22359 - DNA, 50 bp, synthetic construct
  source 1..50: mol_type = other DNA
acataaaactaacaaacaactctacctacaaccccratataaaatccacc

SEQ ID NO: 22360 - DNA, 50 bp, synthetic construct
  source 1..50: mol_type = other DNA
tctaccraaactcccactttaataacacttaaaaaacacttcaacccacc

SEQ ID NO: 22361 - DNA, 50 bp, synthetic construct
  source 1..50: mol_type = other DNA
tacaacrataaactaaaatactcctcaaataccaccaaaataaaaacccc

SEQ ID NO: 22362 - DNA, 50 bp, synthetic construct
  source 1..50: mol_type = other DNA
ctaaaatactcctcaaataccaccaaaataaaaaccccracaaaaaaaac

SEQ ID NO: 22363 - DNA, 50 bp, synthetic construct
  source 1..50: mol_type = other DNA
cttacttttaaaaaataacaacrtactaacaatcrtcacaaccctcrctc

SEQ ID NO: 22364 - DNA, 50 bp, synthetic construct
  source 1..50: mol_type = other DNA
caaacttacttttaaaaaataacaacrtactaacaatcrtcacaaccctc

SEQ ID NO: 22365 - DNA, 50 bp, synthetic construct
  source 1..50: mol_type = other DNA
aattctaaataacaaacttacttttaaaaaataacaacrtactaacaatc

SEQ ID NO: 22366 - DNA, 50 bp, synthetic construct
  source 1..50: mol_type = other DNA
aaatctattattcaaaatttcaattaattcctctatctttaataaaacac

SEQ ID NO: 22367 - DNA, 50 bp, synthetic construct
  source 1..50: mol_type = other DNA
aaccttccatttcctactataataataatctccacattcataaataaaac

SEQ ID NO: 22368 - DNA, 50 bp, synthetic construct
  source 1..50: mol_type = other DNA
actatttttttctcctttaccttactactccaatcaaaataacctcaaac

SEQ ID NO: 22369 - DNA, 50 bp, synthetic construct
  source 1..50: mol_type = other DNA
aaatacatataatatatcaaaaacaaacctctactatatacatttacatc

SEQ ID NO: 22370 - DNA, 50 bp, synthetic construct
  source 1..50: mol_type = other DNA
ttttaatacattatatacatttaaatcaaacaatattccaaataatatac

SEQ ID NO: 22371 - DNA, 50 bp, synthetic construct
  source 1..50: mol_type = other DNA
tttttttaaaacaaaatcttactctataacccaaactacaaaacaataac

SEQ ID NO: 22372 - DNA, 50 bp, synthetic construct
  source 1..50: mol_type = other DNA
tttttaaaacaaaatcttactctataacccaaactacaaaacaataacrc

SEQ ID NO: 22373 - DNA, 50 bp, synthetic construct
  source 1..50: mol_type = other DNA
ccctaccaataaaaaataacaacrtactaacaatcctcacaaccctactc

SEQ ID NO: 22374 - DNA, 50 bp, synthetic construct
  source 1..50: mol_type = other DNA
caactactaacccaaataataaacccttcactactcraactaataaaacc

SEQ ID NO: 22375 - DNA, 50 bp, synthetic construct
  source 1..50: mol_type = other DNA
tcaacccttaaataatcrataaaactaaactccrcraaacaaaaaataac

SEQ ID NO: 22376 - DNA, 50 bp, synthetic construct
  source 1..50: mol_type = other DNA
cataaaataatatatataaaaacaccttatcaactctaaaatactacccc

SEQ ID NO: 22377 - DNA, 50 bp, synthetic construct
  source 1..50: mol_type = other DNA
caaactttacttcaaatccacctatcractaacctaaatcacrattaccc

SEQ ID NO: 22378 - DNA, 50 bp, synthetic construct
  source 1..50: mol_type = other DNA
accaacatcaaactttacttcaaatccacctatcractaacctaaatcac

SEQ ID NO: 22379 - DNA, 50 bp, synthetic construct
  source 1..50: mol_type = other DNA
tactcaaatacrcaattataaaaaacraataaccrtaatccaaaccaatc

SEQ ID NO: 22380 - DNA, 50 bp, synthetic construct
  source 1..50: mol_type = other DNA
ataaacctaaaacaaaacctaatattaacataataacacaaccccaatcc

SEQ ID NO: 22381 - DNA, 50 bp, synthetic construct
  source 1..50: mol_type = other DNA
taataaaacaaatcccataacaacctcrcttatttccttttcccaaaacc

SEQ ID NO: 22382 - DNA, 50 bp, synthetic construct
  source 1..50: mol_type = other DNA
atccraaatcctaaaaccctaactaataaaacaaatcccataacaacctc

SEQ ID NO: 22383 - DNA, 50 bp, synthetic construct
  source 1..50: mol_type = other DNA
tatattcactatcaccaaaatttactcctaaaataaatcaccctttatcc

SEQ ID NO: 22384 - DNA, 50 bp, synthetic construct
  source 1..50: mol_type = other DNA
cttcaactactacctataaccctaccaatttaaaaaactacctactaatc

SEQ ID NO: 22385 - DNA, 50 bp, synthetic construct
  source 1..50: mol_type = other DNA
aaacctttatcctaactccttcctaataatatttaatttataataataac

SEQ ID NO: 22386 - DNA, 50 bp, synthetic construct
  source 1..50: mol_type = other DNA
aaaccaatacctaatatccaatttataacaataattaactttaaatatcc

SEQ ID NO: 22387 - DNA, 50 bp, synthetic construct
  source 1..50: mol_type = other DNA
cttttaactacaccraactttaataccacataatattatttaatcactac

SEQ ID NO: 22388 - DNA, 50 bp, synthetic construct
  source 1..50: mol_type = other DNA
ctaaatttaattccttattttaccattaactttatacttttaactacacc

SEQ ID NO: 22389 - DNA, 50 bp, synthetic construct
  source 1..50: mol_type = other DNA
atcattacctacattttaacaaatactaattcaaaaaattaccttacaac

SEQ ID NO: 22390 - DNA, 50 bp, synthetic construct
  source 1..50: mol_type = other DNA
tctaactacratacattataaaaaatacattttacatcataactcatcac

SEQ ID NO: 22391 - DNA, 50 bp, synthetic construct
  source 1..50: mol_type = other DNA
aaataatccatactaattacaaaataaacctttccattattaaaaacttc

SEQ ID NO: 22392 - DNA, 50 bp, synthetic construct
  source 1..50: mol_type = other DNA
tccatactaattacaaaataaacctttccattattaaaaacttcrtattc

SEQ ID NO: 22393 - DNA, 50 bp, synthetic construct
  source 1..50: mol_type = other DNA
aacaaaaattactacctttctaaaacttctaatttaataataaaaaacac

SEQ ID NO: 22394 - DNA, 50 bp, synthetic construct
  source 1..50: mol_type = other DNA
acttaaccttaatattatataataattatacttcctactaaacaaaaacc

SEQ ID NO: 22395 - DNA, 50 bp, synthetic construct
  source 1..50: mol_type = other DNA
ttaaccttaatattatataataattatacttcctactaaacaaaaaccrc

SEQ ID NO: 22396 - DNA, 50 bp, synthetic construct
  source 1..50: mol_type = other DNA
aaaaccrcrcctaatttataaatattactaatatcatacaaaacccatac

SEQ ID NO: 22397 - DNA, 50 bp, synthetic construct
  source 1..50: mol_type = other DNA
caataaatattcaatatctatcattttctaaaacctaaaatatatcaaac

SEQ ID NO: 22398 - DNA, 50 bp, synthetic construct
  source 1..50: mol_type = other DNA
aacracttaacctatattatttctaattctttaaacaatcccraacaatc

SEQ ID NO: 22399 - DNA, 50 bp, synthetic construct
  source 1..50: mol_type = other DNA
cacaaaaaaatttaacaacttatccaaaatctcacaattaatcaaaaacc

SEQ ID NO: 22400 - DNA, 50 bp, synthetic construct
  source 1..50: mol_type = other DNA
aaaaccaaatatttaaaaattaacraaaaaaatccacaaccaaaaaccrc

SEQ ID NO: 22401 - DNA, 50 bp, synthetic construct
  source 1..50: mol_type = other DNA
aaaaaaccaaatatttaaaaattaacraaaaaaatccacaaccaaaaacc

SEQ ID NO: 22402 - DNA, 50 bp, synthetic construct
  source 1..50: mol_type = other DNA
ctcctatatcaaataaacttaatactaaataacctataaactacttattc

SEQ ID NO: 22403 - DNA, 50 bp, synthetic construct
  source 1..50: mol_type = other DNA
cctaacaaaaaattcttatataattaatcaacaactcccrcccctaatcc

SEQ ID NO: 22404 - DNA, 50 bp, synthetic construct
  source 1..50: mol_type = other DNA
aaaactaatttcctaacaaaaaattcttatataattaatcaacaactccc

SEQ ID NO: 22405 - DNA, 50 bp, synthetic construct
  source 1..50: mol_type = other DNA
ttccattactaatacctacaattactaataataaacrtaccccaaaaatc

SEQ ID NO: 22406 - DNA, 50 bp, synthetic construct
  source 1..50: mol_type = other DNA
aaaacctcaaaccaatctacactaaaaaaccaaatatttcctctatactc

SEQ ID NO: 22407 - DNA, 50 bp, synthetic construct
  source 1..50: mol_type = other DNA
taaataacctctaaccttaaacataaacaaaaaactttaaatataaaaac

SEQ ID NO: 22408 - DNA, 50 bp, synthetic construct
  source 1..50: mol_type = other DNA
caacttaccaataaaacctcaaaattcatactttcctaaaaaccacctac

SEQ ID NO: 22409 - DNA, 50 bp, synthetic construct
  source 1..50: mol_type = other DNA
aattacactttaaatctaaaattaaaaacrcctaaccatatctaaacccc

SEQ ID NO: 22410 - DNA, 50 bp, synthetic construct
  source 1..50: mol_type = other DNA
cttctcatacaaactaccaaaaattacactttaaatctaaaattaaaaac

SEQ ID NO: 22411 - DNA, 50 bp, synthetic construct
  source 1..50: mol_type = other DNA
ctccctctaaactcaaaaactctatacaaacraaaactaaatcattaaac

SEQ ID NO: 22412 - DNA, 50 bp, synthetic construct
  source 1..50: mol_type = other DNA
cctatcaataaatctatatctccctctaaactcaaaaactctatacaaac

SEQ ID NO: 22413 - DNA, 50 bp, synthetic construct
  source 1..50: mol_type = other DNA
caaaaaacttactcctataaaaaccaaataaaccccacccttcacttaac

SEQ ID NO: 22414 - DNA, 50 bp, synthetic construct
  source 1..50: mol_type = other DNA
tttaatttttataaaaacaaattctttattaactaaactctaaatctccc

SEQ ID NO: 22415 - DNA, 50 bp, synthetic construct
  source 1..50: mol_type = other DNA
cttcaatctaaataaccctactcactctaaaaaaacacataaaataaaac

SEQ ID NO: 22416 - DNA, 50 bp, synthetic construct
  source 1..50: mol_type = other DNA
acatctcaaccatatattctccaactcattaatcctcaacaataactaac

SEQ ID NO: 22417 - DNA, 50 bp, synthetic construct
  source 1..50: mol_type = other DNA
ctaacrctaaaaacccaacccttatctttaactaccaaaaatataatttc

SEQ ID NO: 22418 - DNA, 50 bp, synthetic construct
  source 1..50: mol_type = other DNA
tctacctttcttttcacctatctattatacttaactctaccctcctacac

SEQ ID NO: 22419 - DNA, 50 bp, synthetic construct
  source 1..50: mol_type = other DNA
tatactataacacctatacctctaatattaatttaaatctaccatttctc

SEQ ID NO: 22420 - DNA, 50 bp, synthetic construct
  source 1..50: mol_type = other DNA
aatacraaataacttcaattctaattcaattccatttctcctttaaaaac

SEQ ID NO: 22421 - DNA, 50 bp, synthetic construct
  source 1..50: mol_type = other DNA
attaaaataaaaccctaaacccacctaataaatctaaaatatctctaaac

SEQ ID NO: 22422 - DNA, 50 bp, synthetic construct
  source 1..50: mol_type = other DNA
taataaatctaaaatatctctaaacraaaaacctcccctcccaacttacc

SEQ ID NO: 22423 - DNA, 50 bp, synthetic construct
  source 1..50: mol_type = other DNA
acttaccrccttccaaaaaactacaactttactaattaaaacatattacc

SEQ ID NO: 22424 - DNA, 50 bp, synthetic construct
  source 1..50: mol_type = other DNA
attatcttaacaacctctcccttaaaaacattctaactaccaaaacactc

SEQ ID NO: 22425 - DNA, 50 bp, synthetic construct
  source 1..50: mol_type = other DNA
acattctaactaccaaaacactcrtttatcaaaaacaaaaaacaactcac

SEQ ID NO: 22426 - DNA, 50 bp, synthetic construct
  source 1..50: mol_type = other DNA
cccaaactacaactaatcaaaaaatcaaacratattccctaaacraaaac

SEQ ID NO: 22427 - DNA, 50 bp, synthetic construct
  source 1..50: mol_type = other DNA
tactcccccaaactacaactaatcaaaaaatcaaacratattccctaaac

SEQ ID NO: 22428 - DNA, 50 bp, synthetic construct
  source 1..50: mol_type = other DNA
attaaaacccaacctactcccccaaactacaactaatcaaaaaatcaaac

SEQ ID NO: 22429 - DNA, 50 bp, synthetic construct
  source 1..50: mol_type = other DNA
attatttttacaaatactcccaaaaaaaataacctctctctcttatttcc

SEQ ID NO: 22430 - DNA, 50 bp, synthetic construct
  source 1..50: mol_type = other DNA
acaaactaaatataaacaacaaaacttatttattcacttaaatataaacc

SEQ ID NO: 22431 - DNA, 50 bp, synthetic construct
  source 1..50: mol_type = other DNA
tataaacaacaaaacttatttattcacttaaatataaaccractaaatcc

SEQ ID NO: 22432 - DNA, 50 bp, synthetic construct
  source 1..50: mol_type = other DNA
aattcatcatattttacaattacttttaaacataacaaacatcttctacc

SEQ ID NO: 22433 - DNA, 50 bp, synthetic construct
  source 1..50: mol_type = other DNA
taactataataccaatacaaaacacttccaaaaatcattttaatactatc

SEQ ID NO: 22434 - DNA, 50 bp, synthetic construct
  source 1..50: mol_type = other DNA
ttacaaataacacacccttctctaatatatatctttctcaaatatacttc

SEQ ID NO: 22435 - DNA, 50 bp, synthetic construct
  source 1..50: mol_type = other DNA
ccaaaccttaacaactaaactaaaccaaaacaaccraactaaacaaaatc

SEQ ID NO: 22436 - DNA, 50 bp, synthetic construct
  source 1..50: mol_type = other DNA
aactaaatcacacrattcaataactaaacaaaatatctcaaactaaaaac

SEQ ID NO: 22437 - DNA, 50 bp, synthetic construct
  source 1..50: mol_type = other DNA
tacccaatcctaacaataatcatatcttccaaaccaaaactaaatcacac

SEQ ID NO: 22438 - DNA, 50 bp, synthetic construct
  source 1..50: mol_type = other DNA
aaaaaattttaattatcatacaaatatctacaatatttctatcctccatc

SEQ ID NO: 22439 - DNA, 50 bp, synthetic construct
  source 1..50: mol_type = other DNA
ccaaattaattctaaaaacacratcaaattctcaatcatttaccttatcc

SEQ ID NO: 22440 - DNA, 50 bp, synthetic construct
  source 1..50: mol_type = other DNA
aactcctactaaaccctaactacattaatcataacaacatatctttaaac

SEQ ID NO: 22441 - DNA, 50 bp, synthetic construct
  source 1..50: mol_type = other DNA
tcctactaaaccctaactacattaatcataacaacatatctttaaacrac

SEQ ID NO: 22442 - DNA, 50 bp, synthetic construct
  source 1..50: mol_type = other DNA
tatacttcctttcactaaataacttccaacttccatactactcctccaac

SEQ ID NO: 22443 - DNA, 50 bp, synthetic construct
  source 1..50: mol_type = other DNA
aaataacttccaacttccatactactcctccaacrctctaacatacattc

SEQ ID NO: 22444 - DNA, 50 bp, synthetic construct
  source 1..50: mol_type = other DNA
cattcaattctcaactcaaatactacctcatcaaaaaaaatttctctaac

SEQ ID NO: 22445 - DNA, 50 bp, synthetic construct
  source 1..50: mol_type = other DNA
tacattacattacttttttatcacaacacctatcacaatctaaaaatctc

SEQ ID NO: 22446 - DNA, 50 bp, synthetic construct
  source 1..50: mol_type = other DNA
ttctacctttaaatttaatactcaatacraaactactacaactcaaacac

SEQ ID NO: 22447 - DNA, 50 bp, synthetic construct
  source 1..50: mol_type = other DNA
tcctttttctacataaattaacttaaacrtatctaaattacaacaacttc

SEQ ID NO: 22448 - DNA, 50 bp, synthetic construct
  source 1..50: mol_type = other DNA
aaaatctccttaatttcrcttaaatataaacctaatacrcaacctacacc

SEQ ID NO: 22449 - DNA, 50 bp, synthetic construct
  source 1..50: mol_type = other DNA
taaaaaatacctacaaaaaatcctataatataattcatcttcaaatctcc

SEQ ID NO: 22450 - DNA, 50 bp, synthetic construct
  source 1..50: mol_type = other DNA
taacataaccaatattcaaaaaaacaaatacactcaacatatctacaacc

SEQ ID NO: 22451 - DNA, 50 bp, synthetic construct
  source 1..50: mol_type = other DNA
ataaacttataatataaacacactcaaaacctctaattaaccaaaatatc

SEQ ID NO: 22452 - DNA, 50 bp, synthetic construct
  source 1..50: mol_type = other DNA
cctctaattaaccaaaatatcrcaaacaataaaattaactattattttcc

SEQ ID NO: 22453 - DNA, 50 bp, synthetic construct
  source 1..50: mol_type = other DNA
aaaaaattacttaccctaaattaacctaaacaaatattttaacttctaac

SEQ ID NO: 22454 - DNA, 50 bp, synthetic construct
  source 1..50: mol_type = other DNA
aataactataacaaaccccrcctaataaaaataaatctaaacccaattcc

SEQ ID NO: 22455 - DNA, 50 bp, synthetic construct
  source 1..50: mol_type = other DNA
aataaaaacaaaattaaacraaactaaactcaaactcactttcattaaac

SEQ ID NO: 22456 - DNA, 50 bp, synthetic construct
  source 1..50: mol_type = other DNA
actcactttcattaaacraaacttaccacaaccactataaaaaataaaac

SEQ ID NO: 22457 - DNA, 50 bp, synthetic construct
  source 1..50: mol_type = other DNA
aaaaataaaaataacttcacccactacataaaaactaaataaaatctctc

SEQ ID NO: 22458 - DNA, 50 bp, synthetic construct
  source 1..50: mol_type = other DNA
caaaccttaccccaaacttccctactaaaaaaacaaaaccttcaaacctc

SEQ ID NO: 22459 - DNA, 50 bp, synthetic construct
  source 1..50: mol_type = other DNA
tactctatcaacaactctacrctaatatctacaacaattcctattccctc

SEQ ID NO: 22460 - DNA, 50 bp, synthetic construct
  source 1..50: mol_type = other DNA
tccctaattctactaactatcttctactaatacccttataaaatataatc

SEQ ID NO: 22461 - DNA, 50 bp, synthetic construct
  source 1..50: mol_type = other DNA
attaaacaaacactctaacattactaataacracactaactctaaaaaac

SEQ ID NO: 22462 - DNA, 50 bp, synthetic construct
  source 1..50: mol_type = other DNA
ataaacaaacctaaactattttaaaatccaaaaaatataaaactaatacc

SEQ ID NO: 22463 - DNA, 50 bp, synthetic construct
  source 1..50: mol_type = other DNA
atctcaataaaatactaatttttacaactatctacctctttacaacaaac

SEQ ID NO: 22464 - DNA, 50 bp, synthetic construct
  source 1..50: mol_type = other DNA
aactatctacctctttacaacaaacrtcttctctatttaatttccatttc

SEQ ID NO: 22465 - DNA, 50 bp, synthetic construct
  source 1..50: mol_type = other DNA
ctacttatttctctcaactaccaacaaataactaaaaatcaaaacratac

SEQ ID NO: 22466 - DNA, 50 bp, synthetic construct
  source 1..50: mol_type = other DNA
attttctacaaacataaaaccaaatttaaacaacrtatactaaaactaac

SEQ ID NO: 22467 - DNA, 50 bp, synthetic construct
  source 1..50: mol_type = other DNA
ttaacatcrtatttttattttctacaaacataaaaccaaatttaaacaac

SEQ ID NO: 22468 - DNA, 50 bp, synthetic construct
  source 1..50: mol_type = other DNA
aataaatttatttatccattaaacaacctaccattaccctacctataccc

SEQ ID NO: 22469 - DNA, 50 bp, synthetic construct
  source 1..50: mol_type = other DNA
ctaaaacrcaaaatttcaaaacccactcraaataccctaacataaacatc

SEQ ID NO: 22470 - DNA, 50 bp, synthetic construct
  source 1..50: mol_type = other DNA
accaaactctaatctattctccctaacttcraattattcactatataatc

SEQ ID NO: 22471 - DNA, 50 bp, synthetic construct
  source 1..50: mol_type = other DNA
tctaaaatattacaattatcttacccaaatacctaaactcaacttatccc

SEQ ID NO: 22472 - DNA, 50 bp, synthetic construct
  source 1..50: mol_type = other DNA
acctcatactaattaaattaactatattcccattaacaatacrcraaatc

SEQ ID NO: 22473 - DNA, 50 bp, synthetic construct
  source 1..50: mol_type = other DNA
ctaaaaacctcatactaattaaattaactatattcccattaacaatacrc

SEQ ID NO: 22474 - DNA, 50 bp, synthetic construct
  source 1..50: mol_type = other DNA
tactaaaaacctcatactaattaaattaactatattcccattaacaatac

SEQ ID NO: 22475 - DNA, 50 bp, synthetic construct
  source 1..50: mol_type = other DNA
aatcactctccraacttaacctaaatctaaacaaacaatattactcratc

SEQ ID NO: 22476 - DNA, 50 bp, synthetic construct
  source 1..50: mol_type = other DNA
ccaaaatcactctccraacttaacctaaatctaaacaaacaatattactc

SEQ ID NO: 22477 - DNA, 50 bp, synthetic construct
  source 1..50: mol_type = other DNA
aaaatcaaaacraccraataacactacttacctaaactcaaaccaaattc

SEQ ID NO: 22478 - DNA, 50 bp, synthetic construct
  source 1..50: mol_type = other DNA
cccaaaaaaattcaatcrttaactcaaatccaaatacccaataaccattc

SEQ ID NO: 22479 - DNA, 50 bp, synthetic construct
  source 1..50: mol_type = other DNA
cacaaatcrttttaccatatctaaacrtaacaaacaaaacracaaaactc

SEQ ID NO: 22480 - DNA, 50 bp, synthetic construct
  source 1..50: mol_type = other DNA
caaaaaacaataaactaattaaatactcactctcaatattttaaacaaac

SEQ ID NO: 22481 - DNA, 50 bp, synthetic construct
  source 1..50: mol_type = other DNA
ataaaaataacaaaattaaattccaaaaccaatcctaaaaatcctcaacc

SEQ ID NO: 22482 - DNA, 50 bp, synthetic construct
  source 1..50: mol_type = other DNA
cctcccctctcaatccccaataaccattttaaataattataaaaaaactc

SEQ ID NO: 22483 - DNA, 50 bp, synthetic construct
  source 1..50: mol_type = other DNA
atactttcaaatatttaaaatcaatacatacaatccttatatcctaaatc

SEQ ID NO: 22484 - DNA, 50 bp, synthetic construct
  source 1..50: mol_type = other DNA
aatatcttacaaacacataaaaaaatccataaaacacaactatcaaactc

SEQ ID NO: 22485 - DNA, 50 bp, synthetic construct
  source 1..50: mol_type = other DNA
atatctcttaataacttacactcrttaaaaaaacacraaactaaaccatc

SEQ ID NO: 22486 - DNA, 50 bp, synthetic construct
  source 1..50: mol_type = other DNA
acaacctattctaaaataatttaaataatatctcttaataacttacactc

SEQ ID NO: 22487 - DNA, 50 bp, synthetic construct
  source 1..50: mol_type = other DNA
attattatataaaactaattctcaaaactaccctacctattttaaaaaac

SEQ ID NO: 22488 - DNA, 50 bp, synthetic construct
  source 1..50: mol_type = other DNA
ccatatcaactccaaaaacrtcaaaaatattaacatctttcccctacccc

SEQ ID NO: 22489 - DNA, 50 bp, synthetic construct
  source 1..50: mol_type = other DNA
acccactccaactcctaaaccttactcaaatcacaaaactaaaaacactc

SEQ ID NO: 22490 - DNA, 50 bp, synthetic construct
  source 1..50: mol_type = other DNA
crtataatttaaccccatatacaacaaacaaaccaaattaacaacaactc

SEQ ID NO: 22491 - DNA, 50 bp, synthetic construct
  source 1..50: mol_type = other DNA
aactcatctataaactaaaacttaaacaattccaacccaaaaaactctcc

SEQ ID NO: 22492 - DNA, 50 bp, synthetic construct
  source 1..50: mol_type = other DNA
caacaaaactaaaacaaccaaaaactacctccaacaaaactctcttaacc

SEQ ID NO: 22493 - DNA, 50 bp, synthetic construct
  source 1..50: mol_type = other DNA
tacctaaatactatttaaaaaacaataatccatataacaaataactcatc

SEQ ID NO: 22494 - DNA, 50 bp, synthetic construct
  source 1..50: mol_type = other DNA
aaaacaataatccatataacaaataactcatcrataatataaaattaaac

SEQ ID NO: 22495 - DNA, 50 bp, synthetic construct
  source 1..50: mol_type = other DNA
attacaataatccctataccaattaaaacaatcctcaataatcttcrttc

SEQ ID NO: 22496 - DNA, 50 bp, synthetic construct
  source 1..50: mol_type = other DNA
aatttttacaaaaaaatacacaaataaacctaacaaaaaattcaaaaacc

SEQ ID NO: 22497 - DNA, 50 bp, synthetic construct
  source 1..50: mol_type = other DNA
cccaaatccccattttcaataaataacaacrtaacccatcacattcctac

SEQ ID NO: 22498 - DNA, 50 bp, synthetic construct
  source 1..50: mol_type = other DNA
accaaccaaaaaacaaatactccaaaaatctcaatcctatcaaaacaacc

SEQ ID NO: 22499 - DNA, 50 bp, synthetic construct
  source 1..50: mol_type = other DNA
aaaaataataatactatatttcctaaaactactcaaatttccaactatac

SEQ ID NO: 22500 - DNA, 50 bp, synthetic construct
  source 1..50: mol_type = other DNA
aaataattatccaaaataacaaacccataacccctaacattaaccaaatc

SEQ ID NO: 22501 - DNA, 50 bp, synthetic construct
  source 1..50: mol_type = other DNA
actacctcttcataataaacraatacaaaatcactaaccaaaaaatctcc

SEQ ID NO: 22502 - DNA, 50 bp, synthetic construct
  source 1..50: mol_type = other DNA
aaaattacctaaaaaacaaatatcccttaaataattcccaatccactcrc

SEQ ID NO: 22503 - DNA, 50 bp, synthetic construct
  source 1..50: mol_type = other DNA
acaaaattacctaaaaaacaaatatcccttaaataattcccaatccactc

SEQ ID NO: 22504 - DNA, 50 bp, synthetic construct
  source 1..50: mol_type = other DNA
actatttctcccaccctaaataaaatatataaaacatcacccraaaaatc

SEQ ID NO: 22505 - DNA, 50 bp, synthetic construct
  source 1..50: mol_type = other DNA
aattcttaaaataattcaaaaaatataacctttatcaaacccractttcc

SEQ ID NO: 22506 - DNA, 50 bp, synthetic construct
  source 1..50: mol_type = other DNA
actacaataaaccaataaaaaccccrataaacraaaatctcrataacaac

SEQ ID NO: 22507 - DNA, 50 bp, synthetic construct
  source 1..50: mol_type = other DNA
tactaactaactacaataaaccaataaaaaccccrataaacraaaatctc

SEQ ID NO: 22508 - DNA, 50 bp, synthetic construct
  source 1..50: mol_type = other DNA
aactttaactactaactaactacaataaaccaataaaaaccccrataaac

SEQ ID NO: 22509 - DNA, 50 bp, synthetic construct
  source 1..50: mol_type = other DNA
aacaataaactttaactactaactaactacaataaaccaataaaaacccc

SEQ ID NO: 22510 - DNA, 50 bp, synthetic construct
  source 1..50: mol_type = other DNA
cactatttatccttataaaattatcctctaactctaaaaaccctataatc

SEQ ID NO: 22511 - DNA, 50 bp, synthetic construct
  source 1..50: mol_type = other DNA
tatcctctaactctaaaaaccctataatcraaattttatacattatattc

SEQ ID NO: 22512 - DNA, 50 bp, synthetic construct
  source 1..50: mol_type = other DNA
ctttctctttaatactatatacccttaacaaacratctaacacattatac

SEQ ID NO: 22513 - DNA, 50 bp, synthetic construct
  source 1..50: mol_type = other DNA
caactcaactttactactctatctactctcctcacaatacattaaaatcc

SEQ ID NO: 22514 - DNA, 50 bp, synthetic construct
  source 1..50: mol_type = other DNA
tctcctaaaaaaaccttaataaatatctcaaacrcctctcatttaccctc

SEQ ID NO: 22515 - DNA, 50 bp, synthetic construct
  source 1..50: mol_type = other DNA
cccaataaaacatcrtctctcctaaaaaaaccttaataaatatctcaaac

SEQ ID NO: 22516 - DNA, 50 bp, synthetic construct
  source 1..50: mol_type = other DNA
cttataaaaataaacttacacaacaacaaacaacaactactacaactacc

SEQ ID NO: 22517 - DNA, 50 bp, synthetic construct
  source 1..50: mol_type = other DNA
tacaaaatatatacaaatacttttattacaaactaaattaaaaaacaccc

SEQ ID NO: 22518 - DNA, 50 bp, synthetic construct
  source 1..50: mol_type = other DNA
acaaactaaattaaaaaacacccrtttactctcraatccttttaataaac

SEQ ID NO: 22519 - DNA, 50 bp, synthetic construct
  source 1..50: mol_type = other DNA
aactaaattaaaaaacacccrtttactctcraatccttttaataaacrcc

SEQ ID NO: 22520 - DNA, 50 bp, synthetic construct
  source 1..50: mol_type = other DNA
tcrccacctaaaaaaccrcattttcatatatttatattaaaacaaaacrc

SEQ ID NO: 22521 - DNA, 50 bp, synthetic construct
  source 1..50: mol_type = other DNA
tctcrccacctaaaaaaccrcattttcatatatttatattaaaacaaaac

SEQ ID NO: 22522 - DNA, 50 bp, synthetic construct
  source 1..50: mol_type = other DNA
acttctaaaacaaacccattaaaaacattaaaataaatctaaaacctaac

SEQ ID NO: 22523 - DNA, 50 bp, synthetic construct
  source 1..50: mol_type = other DNA
taaaacaaacccattaaaaacattaaaataaatctaaaacctaacrcccc

SEQ ID NO: 22524 - DNA, 50 bp, synthetic construct
  source 1..50: mol_type = other DNA
aacaaacccattaaaaacattaaaataaatctaaaacctaacrccccrac

SEQ ID NO: 22525 - DNA, 50 bp, synthetic construct
  source 1..50: mol_type = other DNA
aaacctaaccaataccracaaaaaccaacrcaaaaaaacctaaaaaatac

SEQ ID NO: 22526 - DNA, 50 bp, synthetic construct
  source 1..50: mol_type = other DNA
cttacctttaataaactacraaaacctaaccaataccracaaaaaccaac

SEQ ID NO: 22527 - DNA, 50 bp, synthetic construct
  source 1..50: mol_type = other DNA
ctacaaaaaccctcttacctttaataaactacraaaacctaaccaatacc

SEQ ID NO: 22528 - DNA, 50 bp, synthetic construct
  source 1..50: mol_type = other DNA
ataaaccaaaataaatatttactaaataaacactattcctttaattaaac

SEQ ID NO: 22529 - DNA, 50 bp, synthetic construct
  source 1..50: mol_type = other DNA
rcacaacttactaaaataacaacaacaacttaaaccttttatattaaccc

SEQ ID NO: 22530 - DNA, 50 bp, synthetic construct
  source 1..50: mol_type = other DNA
raaccaacacaaaaaacccaaattactactattaccccaacaaactatac

SEQ ID NO: 22531 - DNA, 50 bp, synthetic construct
  source 1..50: mol_type = other DNA
accatacaacttccaaaaaaaactcctctaaaacttcaaaaaaataaaac

SEQ ID NO: 22532 - DNA, 50 bp, synthetic construct
  source 1..50: mol_type = other DNA
caaataacaaaccaaattaaacccataaactataatttactaaccctaac

SEQ ID NO: 22533 - DNA, 50 bp, synthetic construct
  source 1..50: mol_type = other DNA
aattaaataaaatattaaaacctattcaaccaccctatttcaaataaaac

SEQ ID NO: 22534 - DNA, 50 bp, synthetic construct
  source 1..50: mol_type = other DNA
aaaacaatcattcaaataaaattccaatccccraccaaaaacaccaaccc

SEQ ID NO: 22535 - DNA, 50 bp, synthetic construct
  source 1..50: mol_type = other DNA
aaaattaccctaactataatcaaatctcaaaataaaaacataacaaatcc

SEQ ID NO: 22536 - DNA, 50 bp, synthetic construct
  source 1..50: mol_type = other DNA
aaatacccatacataaaataaaaatatccatattacaaaacaatacaaac

SEQ ID NO: 22537 - DNA, 50 bp, synthetic construct
  source 1..50: mol_type = other DNA
tccatattacaaaacaatacaaacrctcaaatttcaaacattcataatac

SEQ ID NO: 22538 - DNA, 50 bp, synthetic construct
  source 1..50: mol_type = other DNA
ttttttttctatttaaatctcatattaattcccactctaacaataattac

SEQ ID NO: 22539 - DNA, 50 bp, synthetic construct
  source 1..50: mol_type = other DNA
aatctcatattaattcccactctaacaataattacrtcctaaatcattac

SEQ ID NO: 22540 - DNA, 50 bp, synthetic construct
  source 1..50: mol_type = other DNA
ctcatattaattcccactctaacaataattacrtcctaaatcattacrtc

SEQ ID NO: 22541 - DNA, 50 bp, synthetic construct
  source 1..50: mol_type = other DNA
tctaaatttcttaataaactaaatatttccaaaaaaaaatttcacaaccc

SEQ ID NO: 22542 - DNA, 50 bp, synthetic construct
  source 1..50: mol_type = other DNA
ataccatttccaaatttaactaaccataactaatacttaaaaatataaac

SEQ ID NO: 22543 - DNA, 50 bp, synthetic construct
  source 1..50: mol_type = other DNA
cacataataatatactccrcttataattctaattactaaactcccacctc

SEQ ID NO: 22544 - DNA, 50 bp, synthetic construct
  source 1..50: mol_type = other DNA
aatctactatacatattttttcttccacatactttttttaaaacratctc

SEQ ID NO: 22545 - DNA, 50 bp, synthetic construct
  source 1..50: mol_type = other DNA
acactaaatctactatacatattttttcttccacatactttttttaaaac

SEQ ID NO: 22546 - DNA, 50 bp, synthetic construct
  source 1..50: mol_type = other DNA
aattaaacaaacaaaaaattatcttaataacatcccatcaatacctccac

SEQ ID NO: 22547 - DNA, 50 bp, synthetic construct
  source 1..50: mol_type = other DNA
cctccacrttctaaatataataacaaacttaaaaacattttaataaccac

SEQ ID NO: 22548 - DNA, 50 bp, synthetic construct
  source 1..50: mol_type = other DNA
ataaaaaattaaacaaaaatttaattataacctatcccatattactctcc

SEQ ID NO: 22549 - DNA, 50 bp, synthetic construct
  source 1..50: mol_type = other DNA
ataaaaaaacaaaattcacccaaatacaataactactatctacttaaaac

SEQ ID NO: 22550 - DNA, 50 bp, synthetic construct
  source 1..50: mol_type = other DNA
atttaacaatatcccttacctttaaaccacaaacttaattttccaattcc

SEQ ID NO: 22551 - DNA, 50 bp, synthetic construct
  source 1..50: mol_type = other DNA
ccaaactcaataattaacctatataattcaaacaattactcaatctcccc

SEQ ID NO: 22552 - DNA, 50 bp, synthetic construct
  source 1..50: mol_type = other DNA
atataattcaaacaattactcaatctccccraacttcaacttaacctaac

SEQ ID NO: 22553 - DNA, 50 bp, synthetic construct
  source 1..50: mol_type = other DNA
taaaaacactactaactactccctctaaaaaacccaaccctcaaatccac

SEQ ID NO: 22554 - DNA, 50 bp, synthetic construct
  source 1..50: mol_type = other DNA
atttaactctaactaaatcaaaaccaaaaaatatttattaataaatcacc

SEQ ID NO: 22555 - DNA, 50 bp, synthetic construct
  source 1..50: mol_type = other DNA
aaaaaaatacctccttaaacrtaaaacttcctcaacaactcaaaaacttc

SEQ ID NO: 22556 - DNA, 50 bp, synthetic construct
  source 1..50: mol_type = other DNA
actaaaaaatatccraaaacraaatccctaaactactaaaaaaactttac

SEQ ID NO: 22557 - DNA, 50 bp, synthetic construct
  source 1..50: mol_type = other DNA
aaaaaaacctactatctaacaaaccttatattattaaacccctaatatac

SEQ ID NO: 22558 - DNA, 50 bp, synthetic construct
  source 1..50: mol_type = other DNA
attaaacccctaatatacraaatctcttttcattttcactattatttaac

SEQ ID NO: 22559 - DNA, 50 bp, synthetic construct
  source 1..50: mol_type = other DNA
caacaatataaactctaataaaaactccactaaaaaccrctaacccaccc

SEQ ID NO: 22560 - DNA, 50 bp, synthetic construct
  source 1..50: mol_type = other DNA
aatcacataaactatacacaataacactatatcactaataatatttaaac

SEQ ID NO: 22561 - DNA, 50 bp, synthetic construct
  source 1..50: mol_type = other DNA
actatacacaataacactatatcactaataatatttaaacraaatcttcc

SEQ ID NO: 22562 - DNA, 50 bp, synthetic construct
  source 1..50: mol_type = other DNA
aaactaaaaaacctaccctaaacacaaaattctacaaacccaacrtaacc

SEQ ID NO: 22563 - DNA, 50 bp, synthetic construct
  source 1..50: mol_type = other DNA
ccctataaactaaaaaacctaccctaaacacaaaattctacaaacccaac

SEQ ID NO: 22564 - DNA, 50 bp, synthetic construct
  source 1..50: mol_type = other DNA
aaatacctccataacaactctaaacctaacataatcaaaataacaaacac

SEQ ID NO: 22565 - DNA, 50 bp, synthetic construct
  source 1..50: mol_type = other DNA
cacacaaataaaaaaaccttcctaaaaaaacctccttcaacaattccaac

SEQ ID NO: 22566 - DNA, 50 bp, synthetic construct
  source 1..50: mol_type = other DNA
raacctcratttccttatttaaaataacaaaataataataactacccccc

SEQ ID NO: 22567 - DNA, 50 bp, synthetic construct
  source 1..50: mol_type = other DNA
taaccccraaaaataatcattactatcttattatcctaaataaaaaaacc

SEQ ID NO: 22568 - DNA, 50 bp, synthetic construct
  source 1..50: mol_type = other DNA
tactaactctacccctaacaaaataactttaaacaaaacccttcacctcc

SEQ ID NO: 22569 - DNA, 50 bp, synthetic construct
  source 1..50: mol_type = other DNA
tccctaactataacataaacacaaaacaaaaacccaacaaaaaaataccc

SEQ ID NO: 22570 - DNA, 50 bp, synthetic construct
  source 1..50: mol_type = other DNA
acaaaaatattttaatattcraaacccaaactcaacccraataaaaatcc

SEQ ID NO: 22571 - DNA, 50 bp, synthetic construct
  source 1..50: mol_type = other DNA
cattacctcccaaaaaatccraattctcattcraattaaatctaaatttc

SEQ ID NO: 22572 - DNA, 50 bp, synthetic construct
  source 1..50: mol_type = other DNA
tctactcacaatccrtatataactaaaaccactaatcttaaatccaaatc

SEQ ID NO: 22573 - DNA, 50 bp, synthetic construct
  source 1..50: mol_type = other DNA
aaaccaaattaaaaccaaattataaaacctcacaaatactaaaacacctc

SEQ ID NO: 22574 - DNA, 50 bp, synthetic construct
  source 1..50: mol_type = other DNA
aatatcctctcattaaacactaatcacattattacattctattttttttc

SEQ ID NO: 22575 - DNA, 50 bp, synthetic construct
  source 1..50: mol_type = other DNA
tactactttaatttaaaacatacccataaaaccaaatctaaactaaacrc

SEQ ID NO: 22576 - DNA, 50 bp, synthetic construct
  source 1..50: mol_type = other DNA
actactactttaatttaaaacatacccataaaaccaaatctaaactaaac

SEQ ID NO: 22577 - DNA, 50 bp, synthetic construct
  source 1..50: mol_type = other DNA
ccctaccccatatcaaacaccaaacaaaatatattcttatatataaactc

SEQ ID NO: 22578 - DNA, 50 bp, synthetic construct
  source 1..50: mol_type = other DNA
ttaacttcttactttccttcctatttcactactcccaacaaaaacaaaac

SEQ ID NO: 22579 - DNA, 50 bp, synthetic construct
  source 1..50: mol_type = other DNA
actcctttaaatctatatctcaaaaacaaccacaattcctcttcaaaacc

SEQ ID NO: 22580 - DNA, 50 bp, synthetic construct
  source 1..50: mol_type = other DNA
accacaattcctcttcaaaaccraaaaataaaaacttcctacaaacaaac

SEQ ID NO: 22581 - DNA, 50 bp, synthetic construct
  source 1..50: mol_type = other DNA
ttcraaccraactttattacccaaaacataaactaatttaaaaaacaatc

SEQ ID NO: 22582 - DNA, 50 bp, synthetic construct
  source 1..50: mol_type = other DNA
aaaataaatttctcattcatcccaaactccctaaaacttccctaaaaacc

SEQ ID NO: 22583 - DNA, 50 bp, synthetic construct
  source 1..50: mol_type = other DNA
aacacacaaaacattaactttacratcaaataaacctaaatttaaacccc

SEQ ID NO: 22584 - DNA, 50 bp, synthetic construct
  source 1..50: mol_type = other DNA
aacaacttaaacaaattaaattatatttctaacttactttaccaatcacc

SEQ ID NO: 22585 - DNA, 50 bp, synthetic construct
  source 1..50: mol_type = other DNA
ccaaaacaaaacttccccaaaattctaaaattataaacrtaaaccacctc

SEQ ID NO: 22586 - DNA, 50 bp, synthetic construct
  source 1..50: mol_type = other DNA
tacccrccttaaccaaaacaaaacttccccaaaattctaaaattataaac

SEQ ID NO: 22587 - DNA, 50 bp, synthetic construct
  source 1..50: mol_type = other DNA
atactatctataatacacccaacacataataaatactcccttataataac

SEQ ID NO: 22588 - DNA, 50 bp, synthetic construct
  source 1..50: mol_type = other DNA
atattaatttacctcctatacttatctacaacctccttcctaacattaac

SEQ ID NO: 22589 - DNA, 50 bp, synthetic construct
  source 1..50: mol_type = other DNA
taacaaatataaaatacttaaaacaactcctaacacataataaaatattc

SEQ ID NO: 22590 - DNA, 50 bp, synthetic construct
  source 1..50: mol_type = other DNA
ccacttatctataacctcaaacaaattatctaatactactaaacctcaac

SEQ ID NO: 22591 - DNA, 50 bp, synthetic construct
  source 1..50: mol_type = other DNA
tacatacccatctaaatcctacatatatcctttactaactaacctataac

SEQ ID NO: 22592 - DNA, 50 bp, synthetic construct
  source 1..50: mol_type = other DNA
cataacttctaccctctcacctacrcaaaactaaaaattactactaacac

SEQ ID NO: 22593 - DNA, 50 bp, synthetic construct
  source 1..50: mol_type = other DNA
ttatcttcataaacacccaaaaataacataacttctaccctctcacctac

SEQ ID NO: 22594 - DNA, 50 bp, synthetic construct
  source 1..50: mol_type = other DNA
caactaactcctctacctatacaaaaaaataatacaacttactttaaaac

SEQ ID NO: 22595 - DNA, 50 bp, synthetic construct
  source 1..50: mol_type = other DNA
cctcttacctcraactaataaaaaccttcrtctaaataaacaaacatccc

SEQ ID NO: 22596 - DNA, 50 bp, synthetic construct
  source 1..50: mol_type = other DNA
aatatacaaaaacttctctatcctcttacctcraactaataaaaaccttc

SEQ ID NO: 22597 - DNA, 50 bp, synthetic construct
  source 1..50: mol_type = other DNA
atcaaaaactaaaaataactacctcaaaaccccaactaccctaaaataac

SEQ ID NO: 22598 - DNA, 50 bp, synthetic construct
  source 1..50: mol_type = other DNA
aactatttttaactcttaacacctaaatattttacaaccrcaaaatatcc

SEQ ID NO: 22599 - DNA, 50 bp, synthetic construct
  source 1..50: mol_type = other DNA
taaaatctctttctaaaaatcccacatacractattataaacaaccccac

SEQ ID NO: 22600 - DNA, 50 bp, synthetic construct
  source 1..50: mol_type = other DNA
ctattataaacaaccccacrcaacaataacctaaactaaaaaccaatatc

SEQ ID NO: 22601 - DNA, 50 bp, synthetic construct
  source 1..50: mol_type = other DNA
tcaaccactactaaaaaacaaactaaataaacaatccacrccaatatacc

SEQ ID NO: 22602 - DNA, 50 bp, synthetic construct
  source 1..50: mol_type = other DNA
tataaaactactaaaactccaaaacctaaacttaacatcratacactaac

SEQ ID NO: 22603 - DNA, 50 bp, synthetic construct
  source 1..50: mol_type = other DNA
caacccrcattttataaaaaacttaacaatttccaaaaaactcacrcaac

SEQ ID NO: 22604 - DNA, 50 bp, synthetic construct
  source 1..50: mol_type = other DNA
ttatacaacccrcattttataaaaaacttaacaatttccaaaaaactcac

SEQ ID NO: 22605 - DNA, 50 bp, synthetic construct
  source 1..50: mol_type = other DNA
ttacccccraatacccactctaaaaataacttactctaattatacaaccc

SEQ ID NO: 22606 - DNA, 50 bp, synthetic construct
  source 1..50: mol_type = other DNA
caaaatacraattacataaccaaaacaaatcaccctcaaaataaatactc

SEQ ID NO: 22607 - DNA, 50 bp, synthetic construct
  source 1..50: mol_type = other DNA
cattataacttctaccttcctctaccccaaatccaaaaatactaataacc

SEQ ID NO: 22608 - DNA, 50 bp, synthetic construct
  source 1..50: mol_type = other DNA
atatcaaaattcacaacttataactattcacatccraaatacctcaattc

SEQ ID NO: 22609 - DNA, 50 bp, synthetic construct
  source 1..50: mol_type = other DNA
ataacatccctataaatatcaaaattcacaacttataactattcacatcc

SEQ ID NO: 22610 - DNA, 50 bp, synthetic construct
  source 1..50: mol_type = other DNA
ttacctattactttaaaaaacaacaaaaatctaataaacaaattctccac

SEQ ID NO: 22611 - DNA, 50 bp, synthetic construct
  source 1..50: mol_type = other DNA
aatttaaacaaaccaactataaaaacaatttctaaccaactaaaaattcc

SEQ ID NO: 22612 - DNA, 50 bp, synthetic construct
  source 1..50: mol_type = other DNA
aaacatcacaaacrcatcaatcaaaaatcactacacatctttccatttcc

SEQ ID NO: 22613 - DNA, 50 bp, synthetic construct
  source 1..50: mol_type = other DNA
atccacaatacacataaactacctctataataattacrcaacatatatac

SEQ ID NO: 22614 - DNA, 50 bp, synthetic construct
  source 1..50: mol_type = other DNA
atatacrtacataaacacaacccataataacaaaatcaaaatataacctc

SEQ ID NO: 22615 - DNA, 50 bp, synthetic construct
  source 1..50: mol_type = other DNA
acataaacacaacccataataacaaaatcaaaatataacctcraactccc

SEQ ID NO: 22616 - DNA, 50 bp, synthetic construct
  source 1..50: mol_type = other DNA
caaaatataacctcraactcccrtaaacattaatccacaaaattttcacc

SEQ ID NO: 22617 - DNA, 50 bp, synthetic construct
  source 1..50: mol_type = other DNA
aaattataaataacacraaacctcaaaaaatatataatccaaaaaaaccc

SEQ ID NO: 22618 - DNA, 50 bp, synthetic construct
  source 1..50: mol_type = other DNA
tcttcttaaaccatatatcctctaaaattccrtattatctacaacctaac

SEQ ID NO: 22619 - DNA, 50 bp, synthetic construct
  source 1..50: mol_type = other DNA
attaaataaatcctaactttatacccaactctatattataaacccttaac

SEQ ID NO: 22620 - DNA, 50 bp, synthetic construct
  source 1..50: mol_type = other DNA
taaataataatcatttcctaaaaaaaatacctcatacctcttccaaaacc

SEQ ID NO: 22621 - DNA, 50 bp, synthetic construct
  source 1..50: mol_type = other DNA
aaaaatccaccctataacttctaactacaactctctaactattccaaacc

SEQ ID NO: 22622 - DNA, 50 bp, synthetic construct
  source 1..50: mol_type = other DNA
ttaacctaattttttctataaactaaaactaaacccaatttctattcttc

SEQ ID NO: 22623 - DNA, 50 bp, synthetic construct
  source 1..50: mol_type = other DNA
ataaaaacacaaaacaaaatatacccataatcacacttacaaaaaaaacc

SEQ ID NO: 22624 - DNA, 50 bp, synthetic construct
  source 1..50: mol_type = other DNA
accctactatatatataacaaaacctaacaaaaaaacttcctataaaaac

SEQ ID NO: 22625 - DNA, 50 bp, synthetic construct
  source 1..50: mol_type = other DNA
ttctctataccccacttaatacttaaaacactctacaaatattaattatc

SEQ ID NO: 22626 - DNA, 50 bp, synthetic construct
  source 1..50: mol_type = other DNA
tactcaaaatcccacacctttcractaaaattcaaacccaaatctctaac

SEQ ID NO: 22627 - DNA, 50 bp, synthetic construct
  source 1..50: mol_type = other DNA
aacccaaatctctaacrtcaaaataacacatttcttccctattatcacac

SEQ ID NO: 22628 - DNA, 50 bp, synthetic construct
  source 1..50: mol_type = other DNA
aaaaaaaatcacacctccttcaacrctaaaatctaaaaaacraaacctac

SEQ ID NO: 22629 - DNA, 50 bp, synthetic construct
  source 1..50: mol_type = other DNA
aattataaaactactctcaaaataacaaactaataacacccractaaaac

SEQ ID NO: 22630 - DNA, 50 bp, synthetic construct
  source 1..50: mol_type = other DNA
acrcrttcaaattataaaactactctcaaaataacaaactaataacaccc

SEQ ID NO: 22631 - DNA, 50 bp, synthetic construct
  source 1..50: mol_type = other DNA
ccraataccaccaacctatcattctaaaaacaattctataacctaaacrc

SEQ ID NO: 22632 - DNA, 50 bp, synthetic construct
  source 1..50: mol_type = other DNA
aacctatcattctaaaaacaattctataacctaaacrcrcctaaaaaaac

SEQ ID NO: 22633 - DNA, 50 bp, synthetic construct
  source 1..50: mol_type = other DNA
cracrattaaactataaccrtcttattttacttaccccacaaacctacac

SEQ ID NO: 22634 - DNA, 50 bp, synthetic construct
  source 1..50: mol_type = other DNA
raacrtacaaatttataaaacaaacaaaacaaaacrattacaacccaatc

SEQ ID NO: 22635 - DNA, 50 bp, synthetic construct
  source 1..50: mol_type = other DNA
crtacaaatttataaaacaaacaaaacaaaacrattacaacccaatcrcc

SEQ ID NO: 22636 - DNA, 50 bp, synthetic construct
  source 1..50: mol_type = other DNA
cccctctcaaaaaattaactttcacatcaacaacttaaatatcaaattcc

SEQ ID NO: 22637 - DNA, 50 bp, synthetic construct
  source 1..50: mol_type = other DNA
aaaactctaaaaaacccaaccaaaaaaccatctaaactcaaatttttccc

SEQ ID NO: 22638 - DNA, 50 bp, synthetic construct
  source 1..50: mol_type = other DNA
ratcactataaatatcaactcaacattctcctaataaaaaaaaacccacc

SEQ ID NO: 22639 - DNA, 50 bp, synthetic construct
  source 1..50: mol_type = other DNA
aaaactccataatctcctctactactactaaaaaacaaaccataacaaac

SEQ ID NO: 22640 - DNA, 50 bp, synthetic construct
  source 1..50: mol_type = other DNA
atatcaccttcaaaaaataatataaaacaacaaataaccraccacaaccc

SEQ ID NO: 22641 - DNA, 50 bp, synthetic construct
  source 1..50: mol_type = other DNA
ccctacatctcatatcaccttcaaaaaataatataaaacaacaaataacc

SEQ ID NO: 22642 - DNA, 50 bp, synthetic construct
  source 1..50: mol_type = other DNA
acctaataacrcctataaataaaaacccraataaaattcctaaaaacrcc

SEQ ID NO: 22643 - DNA, 50 bp, synthetic construct
  source 1..50: mol_type = other DNA
aaaacctaataacrcctataaataaaaacccraataaaattcctaaaaac

SEQ ID NO: 22644 - DNA, 50 bp, synthetic construct
  source 1..50: mol_type = other DNA
tcttcccacaacaacacactaaaaccttaaaataacacatctttctttac

SEQ ID NO: 22645 - DNA, 50 bp, synthetic construct
  source 1..50: mol_type = other DNA
ataaaaaccatctctaaaaattcctaaaaaaaaccctccaactctaacac

SEQ ID NO: 22646 - DNA, 50 bp, synthetic construct
  source 1..50: mol_type = other DNA
tacttaaaatactttatattatttaatcctcataaccacactaaaacatc

SEQ ID NO: 22647 - DNA, 50 bp, synthetic construct
  source 1..50: mol_type = other DNA
ttaaaaacccaactacattctcactcttaaattctataaaataaccttac

SEQ ID NO: 22648 - DNA, 50 bp, synthetic construct
  source 1..50: mol_type = other DNA
craaaaacaattcctaaatacccttcccatattttcratctttaaactac

SEQ ID NO: 22649 - DNA, 50 bp, synthetic construct
  source 1..50: mol_type = other DNA
aaaacaattcctaaatacccttcccatattttcratctttaaactacrcc

SEQ ID NO: 22650 - DNA, 50 bp, synthetic construct
  source 1..50: mol_type = other DNA
catattttcratctttaaactacrccrtaataacctcaaaacctaattac

SEQ ID NO: 22651 - DNA, 50 bp, synthetic construct
  source 1..50: mol_type = other DNA
tacacracacttcccaatcccctttcatatcccaataaaaaacacttatc

SEQ ID NO: 22652 - DNA, 50 bp, synthetic construct
  source 1..50: mol_type = other DNA
ctaaaaacaatttatatcctccaaaaaccaaaaaccaaaaccraaactac

SEQ ID NO: 22653 - DNA, 50 bp, synthetic construct
  source 1..50: mol_type = other DNA
tatatcctccaaaaaccaaaaaccaaaaccraaactacracaaaaaaaac

SEQ ID NO: 22654 - DNA, 50 bp, synthetic construct
  source 1..50: mol_type = other DNA
aactactttttcaaaaacraacactatctcattcaaaaccctaaactccc

SEQ ID NO: 22655 - DNA, 50 bp, synthetic construct
  source 1..50: mol_type = other DNA
raaatactaacaaaacaaaccraataacctaaaactactttttcaaaaac

SEQ ID NO: 22656 - DNA, 50 bp, synthetic construct
  source 1..50: mol_type = other DNA
accttaaataaaacaatactcrtccttaaaaaaacaattctaaatcactc

SEQ ID NO: 22657 - DNA, 50 bp, synthetic construct
  source 1..50: mol_type = other DNA
acrcaaactttataccaaaaaaataatactaactacrccrttaaaaatac

SEQ ID NO: 22658 - DNA, 50 bp, synthetic construct
  source 1..50: mol_type = other DNA
aatccaaaacaacrcaaactttataccaaaaaaataatactaactacrcc

SEQ ID NO: 22659 - DNA, 50 bp, synthetic construct
  source 1..50: mol_type = other DNA
aaaaatccaaaacaacrcaaactttataccaaaaaaataatactaactac

SEQ ID NO: 22660 - DNA, 50 bp, synthetic construct
  source 1..50: mol_type = other DNA
ataaataataatatactaaaccttcccattaactcaccactcactcactc

SEQ ID NO: 22661 - DNA, 50 bp, synthetic construct
  source 1..50: mol_type = other DNA
atacttatacaaatttacaacctaaatatattacaaactataccacctac

SEQ ID NO: 22662 - DNA, 50 bp, synthetic construct
  source 1..50: mol_type = other DNA
catactttattaaataatttttatcattcaaacttcataaaataactcac

SEQ ID NO: 22663 - DNA, 50 bp, synthetic construct
  source 1..50: mol_type = other DNA
cttattaaaactaacataaaacttacctaaaacttcatattccactttac

SEQ ID NO: 22664 - DNA, 50 bp, synthetic construct
  source 1..50: mol_type = other DNA
ataaaacttacctaaaacttcatattccactttacrattatataaatatc

SEQ ID NO: 22665 - DNA, 50 bp, synthetic construct
  source 1..50: mol_type = other DNA
aaacttacctaaaacttcatattccactttacrattatataaatatcrac

SEQ ID NO: 22666 - DNA, 50 bp, synthetic construct
  source 1..50: mol_type = other DNA
acrattatataaatatcracrcttcttctccttaaacaaatactaaaatc

SEQ ID NO: 22667 - DNA, 50 bp, synthetic construct
  source 1..50: mol_type = other DNA
tttaaaaataaaatcaaactcaaaaaccccaaaaccctctcaaatccccc

SEQ ID NO: 22668 - DNA, 50 bp, synthetic construct
  source 1..50: mol_type = other DNA
ttattccaatacatcttaattaattcatttcaattcaaacacataatccc

SEQ ID NO: 22669 - DNA, 50 bp, synthetic construct
  source 1..50: mol_type = other DNA
tatattacaaaatttatactaccctacactaaacaaacrctttcrcttac

SEQ ID NO: 22670 - DNA, 50 bp, synthetic construct
  source 1..50: mol_type = other DNA
taaaaacraaaaaccacaatcaaaaataacaaacrcctccaccttaaaac

SEQ ID NO: 22671 - DNA, 50 bp, synthetic construct
  source 1..50: mol_type = other DNA
aaacacrtccacaaaaaaatattttcttataaaaccaaaattaacccrac

SEQ ID NO: 22672 - DNA, 50 bp, synthetic construct
  source 1..50: mol_type = other DNA
aaaaaaatattttcttataaaaccaaaattaacccracrcaataactcac

SEQ ID NO: 22673 - DNA, 50 bp, synthetic construct
  source 1..50: mol_type = other DNA
tacctaatacctaactttcracctaaaacctactaaatcaacraaaaaac

SEQ ID NO: 22674 - DNA, 50 bp, synthetic construct
  source 1..50: mol_type = other DNA
aactaatccccaccaatctttataatatctctacctaatacctaactttc

SEQ ID NO: 22675 - DNA, 50 bp, synthetic construct
  source 1..50: mol_type = other DNA
caaacaccaaacaaaaacatcacaaaaattaataaaaatcaatcaacctc

SEQ ID NO: 22676 - DNA, 50 bp, synthetic construct
  source 1..50: mol_type = other DNA
taaataataaaacaaaccccataaaaacataacataccataacatttaac

SEQ ID NO: 22677 - DNA, 50 bp, synthetic construct
  source 1..50: mol_type = other DNA
aaccttccttccatataacctattaaaaaaaaactatctaaaactattac

SEQ ID NO: 22678 - DNA, 50 bp, synthetic construct
  source 1..50: mol_type = other DNA
cctaatattaataaactttaacataaaactattaaatactaaccaaacac

SEQ ID NO: 22679 - DNA, 50 bp, synthetic construct
  source 1..50: mol_type = other DNA
aattctaataaatacaaatacataatacaacrcctaacatattaattctc

SEQ ID NO: 22680 - DNA, 50 bp, synthetic construct
  source 1..50: mol_type = other DNA
ttaaaaatcctatcaaatcttaaacaaaaaccaaacttaacctcaataac

SEQ ID NO: 22681 - DNA, 50 bp, synthetic construct
  source 1..50: mol_type = other DNA
ctccattcrtaactactaaacaataaaaaccataccatctttatttttcc

SEQ ID NO: 22682 - DNA, 50 bp, synthetic construct
  source 1..50: mol_type = other DNA
aatacaaaacaataataattcaaatatctctcaccaaaatcaactaaacc

SEQ ID NO: 22683 - DNA, 50 bp, synthetic construct
  source 1..50: mol_type = other DNA
tacacccctaactacacatactaaaacttaaaattataactactaaaaac

SEQ ID NO: 22684 - DNA, 50 bp, synthetic construct
  source 1..50: mol_type = other DNA
atatataaccaaaaatatacaattaccttacattaacaccaacatatatc

SEQ ID NO: 22685 - DNA, 50 bp, synthetic construct
  source 1..50: mol_type = other DNA
atacaattaccttacattaacaccaacatatatcraaaacaaataccaac

SEQ ID NO: 22686 - DNA, 50 bp, synthetic construct
  source 1..50: mol_type = other DNA
ttacattaacaccaacatatatcraaaacaaataccaacratatatacac

SEQ ID NO: 22687 - DNA, 50 bp, synthetic construct
  source 1..50: mol_type = other DNA
aaatattaaaaatataacaatccttacaaccratatatcatccccraatc

SEQ ID NO: 22688 - DNA, 50 bp, synthetic construct
  source 1..50: mol_type = other DNA
raaatattcaaataaactacattcaaataacaatcaaataaaacaaaaac

SEQ ID NO: 22689 - DNA, 50 bp, synthetic construct
  source 1..50: mol_type = other DNA
atctaatcaccctaacctatccaacaaaaatcctattaaatcrattaacc

SEQ ID NO: 22690 - DNA, 50 bp, synthetic construct
  source 1..50: mol_type = other DNA
caaataatatctaatcaccctaacctatccaacaaaaatcctattaaatc

SEQ ID NO: 22691 - DNA, 50 bp, synthetic construct
  source 1..50: mol_type = other DNA
aaaacraataataatctaaatataaataaaaactccccacaaacaacaac

SEQ ID NO: 22692 - DNA, 50 bp, synthetic construct
  source 1..50: mol_type = other DNA
rtaacrctattatttataaaaaactctcacttatactcaaaccactactc

SEQ ID NO: 22693 - DNA, 50 bp, synthetic construct
  source 1..50: mol_type = other DNA
atatcctccccacctcctatatttaataaaacttactcaaataatcracc

SEQ ID NO: 22694 - DNA, 50 bp, synthetic construct
  source 1..50: mol_type = other DNA
ctaatatcaatctaaaataaaccctaccatcacraaaataccaatacccc

SEQ ID NO: 22695 - DNA, 50 bp, synthetic construct
  source 1..50: mol_type = other DNA
aaaaacrattaataaaaaataccatcrtttcttaaatcrtcatttccccc

SEQ ID NO: 22696 - DNA, 50 bp, synthetic construct
  source 1..50: mol_type = other DNA
actctttaaccctacccaaaaactaattccraaatttctattataatttc

SEQ ID NO: 22697 - DNA, 50 bp, synthetic construct
  source 1..50: mol_type = other DNA
tctactataaaaatataaaccraaatatcttatatttcataaatacctac

SEQ ID NO: 22698 - DNA, 50 bp, synthetic construct
  source 1..50: mol_type = other DNA
aatcaactaatacatcacaaaacaaatctatacaaccacaaatccctacc

SEQ ID NO: 22699 - DNA, 50 bp, synthetic construct
  source 1..50: mol_type = other DNA
raactaaaatttaaatcaaacaatctaactccaaaataaacacttaacac

SEQ ID NO: 22700 - DNA, 50 bp, synthetic construct
  source 1..50: mol_type = other DNA
rtatcaaatatctactctaaaaccaaattacctaattcaaatcccaattc

SEQ ID NO: 22701 - DNA, 50 bp, synthetic construct
  source 1..50: mol_type = other DNA
tctactctaaaaccaaattacctaattcaaatcccaattcrtcactatac

SEQ ID NO: 22702 - DNA, 50 bp, synthetic construct
  source 1..50: mol_type = other DNA
taccaaacaaaattctaataccttacaatacatatttactaacctatttc

SEQ ID NO: 22703 - DNA, 50 bp, synthetic construct
  source 1..50: mol_type = other DNA
actataaaacattaaaaccttacctaacacataataaatactcaataaac

SEQ ID NO: 22704 - DNA, 50 bp, synthetic construct
  source 1..50: mol_type = other DNA
acacataataaatactcaataaacrctaaatcttattaccttaacttccc

SEQ ID NO: 22705 - DNA, 50 bp, synthetic construct
  source 1..50: mol_type = other DNA
cccttataattattctttccctcccaataataaacttctatacttacttc

SEQ ID NO: 22706 - DNA, 50 bp, synthetic construct
  source 1..50: mol_type = other DNA
ttctccccctacctaaccctacctaacctctaaataatatttcaactaac

SEQ ID NO: 22707 - DNA, 50 bp, synthetic construct
  source 1..50: mol_type = other DNA
actatacaaaattattctaaacctttaataaaaaatacctactaacatcc

SEQ ID NO: 22708 - DNA, 50 bp, synthetic construct
  source 1..50: mol_type = other DNA
aaattattctaaacctttaataaaaaatacctactaacatccrctacatc

SEQ ID NO: 22709 - DNA, 50 bp, synthetic construct
  source 1..50: mol_type = other DNA
caccatcacttcctttctttcaccttttctaaatcaacctaaaaattatc

SEQ ID NO: 22710 - DNA, 50 bp, synthetic construct
  source 1..50: mol_type = other DNA
aaaactattatctccccaacttcccttatccttacccaaaatcraataac

SEQ ID NO: 22711 - DNA, 50 bp, synthetic construct
  source 1..50: mol_type = other DNA
aactactccctttacaaaaaatactaaaaataatctttcctaactactcc

SEQ ID NO: 22712 - DNA, 50 bp, synthetic construct
  source 1..50: mol_type = other DNA
attaaccaactctcattacacacacacacaaacaaaactatatctctacc

SEQ ID NO: 22713 - DNA, 50 bp, synthetic construct
  source 1..50: mol_type = other DNA
tccataatcaaaaatctctaccrtccacaataaaataaaatttcccacac

SEQ ID NO: 22714 - DNA, 50 bp, synthetic construct
  source 1..50: mol_type = other DNA
attacaataaaccctaatcataccactatattcaacataaataacaaaac

SEQ ID NO: 22715 - DNA, 50 bp, synthetic construct
  source 1..50: mol_type = other DNA
taccactaattattcaaaattctcaaaatcraacatacacaaaatcaccc

SEQ ID NO: 22716 - DNA, 50 bp, synthetic construct
  source 1..50: mol_type = other DNA
attaataacaaaactaaaataaaaatcctaataaacccrcctcctaaacc

SEQ ID NO: 22717 - DNA, 50 bp, synthetic construct
  source 1..50: mol_type = other DNA
rctccttctctattactaaaaccccaaaaaattacaacacacraaacaac

SEQ ID NO: 22718 - DNA, 50 bp, synthetic construct
  source 1..50: mol_type = other DNA
atttctaccataaaaaattttcaaattattaactatttaaaatcatacrc

SEQ ID NO: 22719 - DNA, 50 bp, synthetic construct
  source 1..50: mol_type = other DNA
aaatttctaccataaaaaattttcaaattattaactatttaaaatcatac

SEQ ID NO: 22720 - DNA, 50 bp, synthetic construct
  source 1..50: mol_type = other DNA
cctatactactaacrccctataataactaaccrctctttaaacaccaaac

SEQ ID NO: 22721 - DNA, 50 bp, synthetic construct
  source 1..50: mol_type = other DNA
aaaaaccatcccccaaactattaccataactaccaaacrataaaaaaaac

SEQ ID NO: 22722 - DNA, 50 bp, synthetic construct
  source 1..50: mol_type = other DNA
ctaatccraaaaatacrcttatcctaaataataacacaaattaccaccac

SEQ ID NO: 22723 - DNA, 50 bp, synthetic construct
  source 1..50: mol_type = other DNA
taaaatccaaacaaacatcaaaccatacaaaataccaaatcaaacaaccc

SEQ ID NO: 22724 - DNA, 50 bp, synthetic construct
  source 1..50: mol_type = other DNA
taataccctacataacctaatacttatttaaatttcaatccctatccacc

SEQ ID NO: 22725 - DNA, 50 bp, synthetic construct
  source 1..50: mol_type = other DNA
ccacacaacaaataactcaaaaataccacatacaactatacaaactatac

SEQ ID NO: 22726 - DNA, 50 bp, synthetic construct
  source 1..50: mol_type = other DNA
taaaaaactaaactactaatccttaaaatttctactacctcaaaaccttc

SEQ ID NO: 22727 - DNA, 50 bp, synthetic construct
  source 1..50: mol_type = other DNA
ctctacraaaccrataaaatcaacctcactcccaaaaataaacaaattac

SEQ ID NO: 22728 - DNA, 50 bp, synthetic construct
  source 1..50: mol_type = other DNA
atccccacccccrcaacttatttatttctaaaaataaaactaatctcatc

SEQ ID NO: 22729 - DNA, 50 bp, synthetic construct
  source 1..50: mol_type = other DNA
acccccrcaacttatttatttctaaaaataaaactaatctcatcractcc

SEQ ID NO: 22730 - DNA, 50 bp, synthetic construct
  source 1..50: mol_type = other DNA
aaactcaacctaaacaataaaatcaaataacaaacraataaaaaccaaac

SEQ ID NO: 22731 - DNA, 50 bp, synthetic construct
  source 1..50: mol_type = other DNA
aacaaataatatatatataaaacttccaattacaaaatacttccataaac

SEQ ID NO: 22732 - DNA, 50 bp, synthetic construct
  source 1..50: mol_type = other DNA
aatctactaaaaatcaaaaaaataaatcacaaattctaataaactacccc

SEQ ID NO: 22733 - DNA, 50 bp, synthetic construct
  source 1..50: mol_type = other DNA
aaaaatcaaaaaaataaatcacaaattctaataaactaccccractaccc

SEQ ID NO: 22734 - DNA, 50 bp, synthetic construct
  source 1..50: mol_type = other DNA
actacccratcataatcaaatactaaaaaactaaatctctccraaaaaac

SEQ ID NO: 22735 - DNA, 50 bp, synthetic construct
  source 1..50: mol_type = other DNA
tctaaaaattataaatctcacctcaaattaacaaaatttaaaactaaacc

SEQ ID NO: 22736 - DNA, 50 bp, synthetic construct
  source 1..50: mol_type = other DNA
aaaaaatatatatcaaaatatcctataaaattttataaaacccctacacc

SEQ ID NO: 22737 - DNA, 50 bp, synthetic construct
  source 1..50: mol_type = other DNA
aaaaaactcttattaacrataacctaaaaaatacccccraataaacacac

SEQ ID NO: 22738 - DNA, 50 bp, synthetic construct
  source 1..50: mol_type = other DNA
actttcaaaaaaacaccctttacttcctctataatctaaaacctttatcc

SEQ ID NO: 22739 - DNA, 50 bp, synthetic construct
  source 1..50: mol_type = other DNA
ccatttatcactccaaaaacctacaaaaaactaaaactaacacctactcc

SEQ ID NO: 22740 - DNA, 50 bp, synthetic construct
  source 1..50: mol_type = other DNA
caaaactaaaaaattactcaaaactaacccctaaaaaacctatcctaacc

SEQ ID NO: 22741 - DNA, 50 bp, synthetic construct
  source 1..50: mol_type = other DNA
acaattatccaaaaactactataaaccatatataccatactaaaaacttc

SEQ ID NO: 22742 - DNA, 50 bp, synthetic construct
  source 1..50: mol_type = other DNA
actactataaaccatatataccatactaaaaacttcrtattcaccttatc

SEQ ID NO: 22743 - DNA, 50 bp, synthetic construct
  source 1..50: mol_type = other DNA
aacaacatacaataaaaaaaccaaccaaatcccatcaaaaccaaaataac

SEQ ID NO: 22744 - DNA, 50 bp, synthetic construct
  source 1..50: mol_type = other DNA
ccaataaatctcaaacttattttacccaaccctattcaaaaaattactcc

SEQ ID NO: 22745 - DNA, 50 bp, synthetic construct
  source 1..50: mol_type = other DNA
attacactctccattcaataacctaaataatctctttttttctaattaac

SEQ ID NO: 22746 - DNA, 50 bp, synthetic construct
  source 1..50: mol_type = other DNA
tacactctccattcaataacctaaataatctctttttttctaattaacrc

SEQ ID NO: 22747 - DNA, 50 bp, synthetic construct
  source 1..50: mol_type = other DNA
aacttacataaaatacacaaatcttaaatattcacaaatcttaaatatac

SEQ ID NO: 22748 - DNA, 50 bp, synthetic construct
  source 1..50: mol_type = other DNA
ttattccrtctaaatatacctcattaaaaccattcttacacaaaacrttc

SEQ ID NO: 22749 - DNA, 50 bp, synthetic construct
  source 1..50: mol_type = other DNA
aaaaataactaaactaaactaacaactccactaaaaaaaatatattcatc

SEQ ID NO: 22750 - DNA, 50 bp, synthetic construct
  source 1..50: mol_type = other DNA
ccttctcttctacctctatctctacrctcrtaaaaccataaaaaatatac

SEQ ID NO: 22751 - DNA, 50 bp, synthetic construct
  source 1..50: mol_type = other DNA
aacaatttcacctttttttctctctctctcaaacaaaatcttactctatc

SEQ ID NO: 22752 - DNA, 50 bp, synthetic construct
  source 1..50: mol_type = other DNA
caaatattcttacttaaaaacactaattcttacccaacrcrataacttac

SEQ ID NO: 22753 - DNA, 50 bp, synthetic construct
  source 1..50: mol_type = other DNA
catcaattcacaaatattcttacttaaaaacactaattcttacccaacrc

SEQ ID NO: 22754 - DNA, 50 bp, synthetic construct
  source 1..50: mol_type = other DNA
tacatcaattcacaaatattcttacttaaaaacactaattcttacccaac

SEQ ID NO: 22755 - DNA, 50 bp, synthetic construct
  source 1..50: mol_type = other DNA
attaaaataaaacccaaacccctctataactcatcttacttaccaatccc

SEQ ID NO: 22756 - DNA, 50 bp, synthetic construct
  source 1..50: mol_type = other DNA
tttaaataaaaacataacaacaaacaaacattttaaatttccctaacttc

SEQ ID NO: 22757 - DNA, 50 bp, synthetic construct
  source 1..50: mol_type = other DNA
acaaatttacaaccaactcaaaaatacacttaaaaactttctacaaaaac

SEQ ID NO: 22758 - DNA, 50 bp, synthetic construct
  source 1..50: mol_type = other DNA
aaaataaactaaaaactcaaaaaacctaaaacatctaaattatacttctc

SEQ ID NO: 22759 - DNA, 50 bp, synthetic construct
  source 1..50: mol_type = other DNA
actctttcaaacaaaaaatcttttaccaaaacaaacaatcccaactctac

SEQ ID NO: 22760 - DNA, 50 bp, synthetic construct
  source 1..50: mol_type = other DNA
tttctctctaaattacaactaaaaaaaattaattctctccttacctattc

SEQ ID NO: 22761 - DNA, 50 bp, synthetic construct
  source 1..50: mol_type = other DNA
tactttaaaatcactaattatttaccaatacctttctcrcatcccracac

SEQ ID NO: 22762 - DNA, 50 bp, synthetic construct
  source 1..50: mol_type = other DNA
ctaattactttaaaatcactaattatttaccaatacctttctcrcatccc

SEQ ID NO: 22763 - DNA, 50 bp, synthetic construct
  source 1..50: mol_type = other DNA
actttaaaccccaaaacctcaaatactccraacaataaaaataataaatc

SEQ ID NO: 22764 - DNA, 50 bp, synthetic construct
  source 1..50: mol_type = other DNA
actaactaaaaaaattaataactttaaacratccactatctccattactc

SEQ ID NO: 22765 - DNA, 50 bp, synthetic construct
  source 1..50: mol_type = other DNA
aaaaaaaacattcccaaaaaaaattccrtaaaaaatctcctacaaacccc

SEQ ID NO: 22766 - DNA, 50 bp, synthetic construct
  source 1..50: mol_type = other DNA
cttccaaatatacrtaaccctaaatatattacaatttaatatataacccc

SEQ ID NO: 22767 - DNA, 50 bp, synthetic construct
  source 1..50: mol_type = other DNA
taaaatatattcccccacrcctccraatatatctacctaaatatataaac

SEQ ID NO: 22768 - DNA, 50 bp, synthetic construct
  source 1..50: mol_type = other DNA
aaaaaatatcttaacttaaattaaaataaatctaacccccaaattctctc

SEQ ID NO: 22769 - DNA, 50 bp, synthetic construct
  source 1..50: mol_type = other DNA
tcaaaccaataaaaattcacctaaaatattaaaaaaaccccctcccaccc

SEQ ID NO: 22770 - DNA, 50 bp, synthetic construct
  source 1..50: mol_type = other DNA
aataaaaattcacctaaaatattaaaaaaaccccctcccacccraaaaac

SEQ ID NO: 22771 - DNA, 50 bp, synthetic construct
  source 1..50: mol_type = other DNA
aaatacactcaataaaatcrttctaaaattaaaaaaaatacctcaacctc

SEQ ID NO: 22772 - DNA, 50 bp, synthetic construct
  source 1..50: mol_type = other DNA
ctcraactctaacacctccaaatctcrctataaatacactcaataaaatc

SEQ ID NO: 22773 - DNA, 50 bp, synthetic construct
  source 1..50: mol_type = other DNA
catttatatacatcrttaaaactcrctaatacctaaacccattaaaaaac

SEQ ID NO: 22774 - DNA, 50 bp, synthetic construct
  source 1..50: mol_type = other DNA
tttatcccaaacatctctctaccaaaatctaacctccaaataaaacattc

SEQ ID NO: 22775 - DNA, 50 bp, synthetic construct
  source 1..50: mol_type = other DNA
aaaacccataaacctaacactatacccataacrtaactaaaactaacccc

SEQ ID NO: 22776 - DNA, 50 bp, synthetic construct
  source 1..50: mol_type = other DNA
cctaaacaactccacccactttaaaaaattacaacaatataaaataaaac

SEQ ID NO: 22777 - DNA, 50 bp, synthetic construct
  source 1..50: mol_type = other DNA
acccaaaaccraactttccactataaaatctacaatatcaaaatcaactc

SEQ ID NO: 22778 - DNA, 50 bp, synthetic construct
  source 1..50: mol_type = other DNA
aaaaccaaaataaaacatatacacatacacatacacacccctacatacac

SEQ ID NO: 22779 - DNA, 50 bp, synthetic construct
  source 1..50: mol_type = other DNA
atacccttaaactaaacttacacaaccaaataatcatactaaatacccac

SEQ ID NO: 22780 - DNA, 50 bp, synthetic construct
  source 1..50: mol_type = other DNA
catacaaaaaaatccctaaatattcttaaactaactacaaaacactattc

SEQ ID NO: 22781 - DNA, 50 bp, synthetic construct
  source 1..50: mol_type = other DNA
aaattctatccatctatttttcttctacctaaaaaataatatacctatac

SEQ ID NO: 22782 - DNA, 50 bp, synthetic construct
  source 1..50: mol_type = other DNA
ttttacatacctatacatatatatatacataaacactcacatacacacac

SEQ ID NO: 22783 - DNA, 50 bp, synthetic construct
  source 1..50: mol_type = other DNA
tctttcctatttcacctaaaaaccraaaaatcattattaaattaactttc

SEQ ID NO: 22784 - DNA, 50 bp, synthetic construct
  source 1..50: mol_type = other DNA
ttctcccrttttacttcaatattctttctttcctatttcacctaaaaacc

SEQ ID NO: 22785 - DNA, 50 bp, synthetic construct
  source 1..50: mol_type = other DNA
tttaaaaattataacatacaaacrcctacttctataaatataattctccc

SEQ ID NO: 22786 - DNA, 50 bp, synthetic construct
  source 1..50: mol_type = other DNA
tccttatttataaaactaaactatctctcaccaccatttatactaatttc

SEQ ID NO: 22787 - DNA, 50 bp, synthetic construct
  source 1..50: mol_type = other DNA
cctttaaaaccaacaccaataaatacacttcaatttctctactaactcac

SEQ ID NO: 22788 - DNA, 50 bp, synthetic construct
  source 1..50: mol_type = other DNA
acttaacctacaaatatttaattaataaacctattcccactattacacac

SEQ ID NO: 22789 - DNA, 50 bp, synthetic construct
  source 1..50: mol_type = other DNA
ccataaaacctaaaacaaaacatcaccaacattccaaatacctcctttcc

SEQ ID NO: 22790 - DNA, 50 bp, synthetic construct
  source 1..50: mol_type = other DNA
ctacaacaacaatataaacataaacctaaaactattaatactttctcacc

SEQ ID NO: 22791 - DNA, 50 bp, synthetic construct
  source 1..50: mol_type = other DNA
cctactatcaccttttaccrccaaacaacataaacrcctatctaatattc

SEQ ID NO: 22792 - DNA, 50 bp, synthetic construct
  source 1..50: mol_type = other DNA
ctcttctaaaacctaaatctaccaattacractctaacraaaccaaaccc

SEQ ID NO: 22793 - DNA, 50 bp, synthetic construct
  source 1..50: mol_type = other DNA
ttccttcacttcaaatccaatccaaaacatatttttcttccaaataaaac

SEQ ID NO: 22794 - DNA, 50 bp, synthetic construct
  source 1..50: mol_type = other DNA
cttccaaataaaacrataattaacactataaaactttactctttaacccc

SEQ ID NO: 22795 - DNA, 50 bp, synthetic construct
  source 1..50: mol_type = other DNA
cacracaactctaaccaaaaaataacaaatcatctctactactcctcttc

SEQ ID NO: 22796 - DNA, 50 bp, synthetic construct
  source 1..50: mol_type = other DNA
taaatttaaaaacttcaaacatcacratttaataaacattatctcctcac

SEQ ID NO: 22797 - DNA, 50 bp, synthetic construct
  source 1..50: mol_type = other DNA
aacaaaatctcacacattataaccacttaataaatactcattatctaaac

SEQ ID NO: 22798 - DNA, 50 bp, synthetic construct
  source 1..50: mol_type = other DNA
ataaaaacccaataccttccaaaatcatcaaaaacacatacaaaaaaatc

SEQ ID NO: 22799 - DNA, 50 bp, synthetic construct
  source 1..50: mol_type = other DNA
aaaaaacaaaaatcaccctaacactaaaaaattatccccaattaatattc

SEQ ID NO: 22800 - DNA, 50 bp, synthetic construct
  source 1..50: mol_type = other DNA
acaaaaatatacattaaaatccaaaaccataaaaacaatcaaaaacaccc

SEQ ID NO: 22801 - DNA, 50 bp, synthetic construct
  source 1..50: mol_type = other DNA
ataaaactaaaaaattcccacaataatactattacttcttacctaaatcc

SEQ ID NO: 22802 - DNA, 50 bp, synthetic construct
  source 1..50: mol_type = other DNA
ctaccatttccaaccttttattctttcctcttttctacatttctctaaac

SEQ ID NO: 22803 - DNA, 50 bp, synthetic construct
  source 1..50: mol_type = other DNA
ccaaaccrttataaaatattctaaataccacaacaacctaaaaataatac

SEQ ID NO: 22804 - DNA, 50 bp, synthetic construct
  source 1..50: mol_type = other DNA
cacaaaacrataataatatcaactctcattactctataataccccaaacc

SEQ ID NO: 22805 - DNA, 50 bp, synthetic construct
  source 1..50: mol_type = other DNA
ttcataacratttaaaacaccacaaaacaataaaaactaataccatcacc

SEQ ID NO: 22806 - DNA, 50 bp, synthetic construct
  source 1..50: mol_type = other DNA
accacaaaacaataaaaactaataccatcaccrccctataataaaacccc

SEQ ID NO: 22807 - DNA, 50 bp, synthetic construct
  source 1..50: mol_type = other DNA
aacccataaaaccttctacatccacaaccaaaatatacatcattaccatc

SEQ ID NO: 22808 - DNA, 50 bp, synthetic construct
  source 1..50: mol_type = other DNA
atatcttactaaactcattattactacaatttccatctaattataacatc

SEQ ID NO: 22809 - DNA, 50 bp, synthetic construct
  source 1..50: mol_type = other DNA
accactcttacttcaaccttaaaaacatccatcattatacctaaaaaaac

SEQ ID NO: 22810 - DNA, 50 bp, synthetic construct
  source 1..50: mol_type = other DNA
aaaaaaaatttccaatcrtatcacacacttaaaaaaactctaaaccaatc

SEQ ID NO: 22811 - DNA, 50 bp, synthetic construct
  source 1..50: mol_type = other DNA
taaaccaatcrctctatattaataactttcatactctaataaattccccc

SEQ ID NO: 22812 - DNA, 50 bp, synthetic construct
  source 1..50: mol_type = other DNA
cttttccaaactaaaaaccaataaactaaaaacatcttcaaaatataacc

SEQ ID NO: 22813 - DNA, 50 bp, synthetic construct
  source 1..50: mol_type = other DNA
ataaacaaactcacaaaaaaaccttcaaaaaccctaaactactacrtctc

SEQ ID NO: 22814 - DNA, 50 bp, synthetic construct
  source 1..50: mol_type = other DNA
ataaacaacraatacaatctaactttaataaaataacctcaaacttcaac

SEQ ID NO: 22815 - DNA, 50 bp, synthetic construct
  source 1..50: mol_type = other DNA
acactacactaaaaaaacacttaacatctttccaaaaaccttaatctatc

SEQ ID NO: 22816 - DNA, 50 bp, synthetic construct
  source 1..50: mol_type = other DNA
aatatctacaaataacraaataatccatataacaccccaaaatatattcc

SEQ ID NO: 22817 - DNA, 50 bp, synthetic construct
  source 1..50: mol_type = other DNA
tatctacaaataacraaataatccatataacaccccaaaatatattccrc

SEQ ID NO: 22818 - DNA, 50 bp, synthetic construct
  source 1..50: mol_type = other DNA
tttctcaaacctaacaaaaaaaactctccttaaatctaacactcctacrc

SEQ ID NO: 22819 - DNA, 50 bp, synthetic construct
  source 1..50: mol_type = other DNA
tctttctcaaacctaacaaaaaaaactctccttaaatctaacactcctac

SEQ ID NO: 22820 - DNA, 50 bp, synthetic construct
  source 1..50: mol_type = other DNA
atacactctataatattcacacaaaaacrcatttctcaaaacatatcccc

SEQ ID NO: 22821 - DNA, 50 bp, synthetic construct
  source 1..50: mol_type = other DNA
attacacaatcatacatcacttaataacraaaacatactctaaaaaatac

SEQ ID NO: 22822 - DNA, 50 bp, synthetic construct
  source 1..50: mol_type = other DNA
taaaaaatacrtccttatataaacatcataaaatacatttacacaaaccc

SEQ ID NO: 22823 - DNA, 50 bp, synthetic construct
  source 1..50: mol_type = other DNA
caattacctacaacattcaatacaataacatactatccaaatttaaaacc

SEQ ID NO: 22824 - DNA, 50 bp, synthetic construct
  source 1..50: mol_type = other DNA
tcacrtttacttacatatttatattaattactcrtataaacaaacactac

SEQ ID NO: 22825 - DNA, 50 bp, synthetic construct
  source 1..50: mol_type = other DNA
ataacacaatacattactcacrtttacttacatatttatattaattactc

SEQ ID NO: 22826 - DNA, 50 bp, synthetic construct
  source 1..50: mol_type = other DNA
cctaataacrtcrtaaccataataatataataacacaatacattactcac

SEQ ID NO: 22827 - DNA, 50 bp, synthetic construct
  source 1..50: mol_type = other DNA
atacaaataaacrtaaataatacattatactaccacattaccataactac

SEQ ID NO: 22828 - DNA, 50 bp, synthetic construct
  source 1..50: mol_type = other DNA
caaataaacrtaaataatacattatactaccacattaccataactacrac

SEQ ID NO: 22829 - DNA, 50 bp, synthetic construct
  source 1..50: mol_type = other DNA
taaaaatacaatcttaaactacataacaatattctaatcaaaaataaacc

SEQ ID NO: 22830 - DNA, 50 bp, synthetic construct
  source 1..50: mol_type = other DNA
aaaaaatcaatattattttaaaaatctcaacacaaaccraaaatccaacc

SEQ ID NO: 22831 - DNA, 50 bp, synthetic construct
  source 1..50: mol_type = other DNA
atattattttaaaaatctcaacacaaaccraaaatccaaccraaaataac

SEQ ID NO: 22832 - DNA, 50 bp, synthetic construct
  source 1..50: mol_type = other DNA
aaatctcaacacaaaccraaaatccaaccraaaataacraataatactac

SEQ ID NO: 22833 - DNA, 50 bp, synthetic construct
  source 1..50: mol_type = other DNA
taaaactcctcaaataataaaatacaacraccracaaataacrtcacaac

SEQ ID NO: 22834 - DNA, 50 bp, synthetic construct
  source 1..50: mol_type = other DNA
aaaatcaccaaatatttacaaaacactacccaaaacaaaaaaccccraac

SEQ ID NO: 22835 - DNA, 50 bp, synthetic construct
  source 1..50: mol_type = other DNA
acctaaaaacaccaacaaaacaaactcaatcatactataccattaccacc

SEQ ID NO: 22836 - DNA, 50 bp, synthetic construct
  source 1..50: mol_type = other DNA
ctttcctactacracctttatctttacctaaatacttcctaaaacaacac

SEQ ID NO: 22837 - DNA, 50 bp, synthetic construct
  source 1..50: mol_type = other DNA
aaaaaaaaactcrtactaccccaaaaaacatccaaacaaaaacaaaaacc

SEQ ID NO: 22838 - DNA, 50 bp, synthetic construct
  source 1..50: mol_type = other DNA
aaaataacttttatctaatctcaattccaaaaataattatacttccctac

SEQ ID NO: 22839 - DNA, 50 bp, synthetic construct
  source 1..50: mol_type = other DNA
aactaaaaccaaacaaaaattactcccaaaaacactcctaaaaaaataac

SEQ ID NO: 22840 - DNA, 50 bp, synthetic construct
  source 1..50: mol_type = other DNA
ttactcccaaaaacactcctaaaaaaataacrataattcacaaccttacc

SEQ ID NO: 22841 - DNA, 50 bp, synthetic construct
  source 1..50: mol_type = other DNA
accttaccrttaccctaacrataaatttcccaaaataaattctaaaaacc

SEQ ID NO: 22842 - DNA, 50 bp, synthetic construct
  source 1..50: mol_type = other DNA
tccaaactaatccttttctttatacctataatataattaactaattatac

SEQ ID NO: 22843 - DNA, 50 bp, synthetic construct
  source 1..50: mol_type = other DNA
ctcaaaccctaacaaaaacaaattaatatacttaatcatacaatcatcac

SEQ ID NO: 22844 - DNA, 50 bp, synthetic construct
  source 1..50: mol_type = other DNA
taataaacaacttacccaaaatcacccaacatattaatacaaaatacacc

SEQ ID NO: 22845 - DNA, 50 bp, synthetic construct
  source 1..50: mol_type = other DNA
aaaattataccaataacaaaaatatactcataatatttataattattctc

SEQ ID NO: 22846 - DNA, 50 bp, synthetic construct
  source 1..50: mol_type = other DNA
ttctacttaacctaatattcttttaaaaaacraaacaacataatcacrtc

SEQ ID NO: 22847 - DNA, 50 bp, synthetic construct
  source 1..50: mol_type = other DNA
tcattctacttaacctaatattcttttaaaaaacraaacaacataatcac

SEQ ID NO: 22848 - DNA, 50 bp, synthetic construct
  source 1..50: mol_type = other DNA
ctacaactccttacrttcattctacttaacctaatattcttttaaaaaac

SEQ ID NO: 22849 - DNA, 50 bp, synthetic construct
  source 1..50: mol_type = other DNA
aaccatactatcccrcctcctaaaaaaacaccaaaccaaacaaaataaac

SEQ ID NO: 22850 - DNA, 50 bp, synthetic construct
  source 1..50: mol_type = other DNA
accaaacaaaataaacrcaaaaaactacaaaataaaccaaatatcctatc

SEQ ID NO: 22851 - DNA, 50 bp, synthetic construct
  source 1..50: mol_type = other DNA
crcaaaaaactacaaaataaaccaaatatcctatcraccrttttctcttc

SEQ ID NO: 22852 - DNA, 50 bp, synthetic construct
  source 1..50: mol_type = other DNA
aaatataattaattactcraaatccaaactccraactaaaactaaaccrc

SEQ ID NO: 22853 - DNA, 50 bp, synthetic construct
  source 1..50: mol_type = other DNA
taactaacrtctttccctaaatataattaattactcraaatccaaactcc

SEQ ID NO: 22854 - DNA, 50 bp, synthetic construct
  source 1..50: mol_type = other DNA
ttcaacccraaacctaaatctcraataactaaccatatccaaaaaaaaac

SEQ ID NO: 22855 - DNA, 50 bp, synthetic construct
  source 1..50: mol_type = other DNA
aaaaaaaatttcaaaaaaaacctctctaaaattccctctcccccataccc

SEQ ID NO: 22856 - DNA, 50 bp, synthetic construct
  source 1..50: mol_type = other DNA
cccaacccctacataactcacttaaataactcaatctctaaattcacacc

SEQ ID NO: 22857 - DNA, 50 bp, synthetic construct
  source 1..50: mol_type = other DNA
caaaccctattccttctttttaaaaaacaactaaatcactatcaaaaatc

SEQ ID NO: 22858 - DNA, 50 bp, synthetic construct
  source 1..50: mol_type = other DNA
aaacaactaaaccaaaaccaaattaaaaaaaattttatattactacccac

SEQ ID NO: 22859 - DNA, 50 bp, synthetic construct
  source 1..50: mol_type = other DNA
aaattccacatccratacccccacccactaaaatatataaaaactaaaac

SEQ ID NO: 22860 - DNA, 50 bp, synthetic construct
  source 1..50: mol_type = other DNA
ccttactctaaacaatactataattactcaaaaaccracaaaacctaccc

SEQ ID NO: 22861 - DNA, 50 bp, synthetic construct
  source 1..50: mol_type = other DNA
ctctaatccaactacaataccaaaaaacrcccaaaacctaaatcacaacc

SEQ ID NO: 22862 - DNA, 50 bp, synthetic construct
  source 1..50: mol_type = other DNA
crccaacaatacctttatcttcatcaccractataactcaaactttaaac

SEQ ID NO: 22863 - DNA, 50 bp, synthetic construct
  source 1..50: mol_type = other DNA
ctcaaactttaaacrccttctaacactacaactaaaccaaaaaaacttcc

SEQ ID NO: 22864 - DNA, 50 bp, synthetic construct
  source 1..50: mol_type = other DNA
ctactaaacrctctaaaaatcaataatatccaacaaaataatataaaaac

SEQ ID NO: 22865 - DNA, 50 bp, synthetic construct
  source 1..50: mol_type = other DNA
ccacaaaactttttaatctaataaataatactaatataactaatatcatc

SEQ ID NO: 22866 - DNA, 50 bp, synthetic construct
  source 1..50: mol_type = other DNA
aaataatactaatataactaatatcatcraacccacaccataactaaccc

SEQ ID NO: 22867 - DNA, 50 bp, synthetic construct
  source 1..50: mol_type = other DNA
atactaatataactaatatcatcraacccacaccataactaacccraaac

SEQ ID NO: 22868 - DNA, 50 bp, synthetic construct
  source 1..50: mol_type = other DNA
craatatcrcttaaactacttaaacctaaaaatttaaaattcaataaacc

SEQ ID NO: 22869 - DNA, 50 bp, synthetic construct
  source 1..50: mol_type = other DNA
cracccactaaacttcaaactcctaaactcaaacaactcaaacratatcc

SEQ ID NO: 22870 - DNA, 50 bp, synthetic construct
  source 1..50: mol_type = other DNA
acaacaaaaccccatctataaaaaaatactaaccaaacatactaacacrc

SEQ ID NO: 22871 - DNA, 50 bp, synthetic construct
  source 1..50: mol_type = other DNA
ccacaacaaaaccccatctataaaaaaatactaaccaaacatactaacac

SEQ ID NO: 22872 - DNA, 50 bp, synthetic construct
  source 1..50: mol_type = other DNA
taaaatcttactataataaccaaacttatctccaactcccracctcaaac

SEQ ID NO: 22873 - DNA, 50 bp, synthetic construct
  source 1..50: mol_type = other DNA
caaaacacataattaaaccctaaatactaaatattaaaaaatataatctc

SEQ ID NO: 22874 - DNA, 50 bp, synthetic construct
  source 1..50: mol_type = other DNA
tatcaacttataaacaactaaccaaatctaacttaaatactaaatttacc

SEQ ID NO: 22875 - DNA, 50 bp, synthetic construct
  source 1..50: mol_type = other DNA
taacctaccatacttaaaatattaactctctaaccctttaaaaaaaaaac

SEQ ID NO: 22876 - DNA, 50 bp, synthetic construct
  source 1..50: mol_type = other DNA
aattaccacaaaccaaaaacaaaaattttaacraaaatacctactacccc

SEQ ID NO: 22877 - DNA, 50 bp, synthetic construct
  source 1..50: mol_type = other DNA
aaaaccaaactccacrataaaaactcrtatcccaaaataaactacatccc

SEQ ID NO: 22878 - DNA, 50 bp, synthetic construct
  source 1..50: mol_type = other DNA
caaattaatcacaaaaattcraaaaaaaccaaactccacrataaaaactc

SEQ ID NO: 22879 - DNA, 50 bp, synthetic construct
  source 1..50: mol_type = other DNA
accccractctaaacraaatataactcattttaaaatacraatctccatc

SEQ ID NO: 22880 - DNA, 50 bp, synthetic construct
  source 1..50: mol_type = other DNA
aacttccracaacaaataaaaaattacccraaaaacaaccacactacttc

SEQ ID NO: 22881 - DNA, 50 bp, synthetic construct
  source 1..50: mol_type = other DNA
tcacatctacctacatcctatccaaaatcraaacaatataattatttttc

SEQ ID NO: 22882 - DNA, 50 bp, synthetic construct
  source 1..50: mol_type = other DNA
caatactcctccrtactctcaaataatatcaaaatttaataacaacttcc

SEQ ID NO: 22883 - DNA, 50 bp, synthetic construct
  source 1..50: mol_type = other DNA
ccraatctaaaaccctaatacttaaattctaactacaacaatactcctcc

SEQ ID NO: 22884 - DNA, 50 bp, synthetic construct
  source 1..50: mol_type = other DNA
acraaaaaacactattacaatcaaaattcaaacaccaaaatcccaaaccc

SEQ ID NO: 22885 - DNA, 50 bp, synthetic construct
  source 1..50: mol_type = other DNA
tcctacaatttaccatctttctatctcttatcatattaataaaaataacc

SEQ ID NO: 22886 - DNA, 50 bp, synthetic construct
  source 1..50: mol_type = other DNA
aaacataaccaaattcaaaaacctcccaaaaaaccttaacctcaaaacac

SEQ ID NO: 22887 - DNA, 50 bp, synthetic construct
  source 1..50: mol_type = other DNA
ccttctcctaacctaactaaccaaaaaaaccttaatcacaactaatacrc

SEQ ID NO: 22888 - DNA, 50 bp, synthetic construct
  source 1..50: mol_type = other DNA
crtcctcctactaaccttttacrtaaataacraaaaatcctaaaaaacrc

SEQ ID NO: 22889 - DNA, 50 bp, synthetic construct
  source 1..50: mol_type = other DNA
tacrtcctcctactaaccttttacrtaaataacraaaaatcctaaaaaac

SEQ ID NO: 22890 - DNA, 50 bp, synthetic construct
  source 1..50: mol_type = other DNA
aaataaaatatataaaattcttactctacrtcctcctactaaccttttac

SEQ ID NO: 22891 - DNA, 50 bp, synthetic construct
  source 1..50: mol_type = other DNA
tcccttatataccaaaaataatccccaaaaaaaactaatctaaacaaacc

SEQ ID NO: 22892 - DNA, 50 bp, synthetic construct
  source 1..50: mol_type = other DNA
ataatccccaaaaaaaactaatctaaacaaaccraaaaataaaaccracc

SEQ ID NO: 22893 - DNA, 50 bp, synthetic construct
  source 1..50: mol_type = other DNA
tcaaaaaataattcttaaaacaaaaccttaaaaacccaaaaaataaaacc

SEQ ID NO: 22894 - DNA, 50 bp, synthetic construct
  source 1..50: mol_type = other DNA
aaaaaatccraactaaactaaaaaacatcttccaaaatcacraccttccc

SEQ ID NO: 22895 - DNA, 50 bp, synthetic construct
  source 1..50: mol_type = other DNA
ttcacaatataaccaaaactcrattctacctactaacaaaaaacaaaacc

SEQ ID NO: 22896 - DNA, 50 bp, synthetic construct
  source 1..50: mol_type = other DNA
aacttctccaaaaaccttaaaatactaacaaataaactaatccaaaaaac

SEQ ID NO: 22897 - DNA, 50 bp, synthetic construct
  source 1..50: mol_type = other DNA
tctaccaacattttaaaatccttaaaaaaactaacattacacttaaaccc

SEQ ID NO: 22898 - DNA, 50 bp, synthetic construct
  source 1..50: mol_type = other DNA
ctaaaaaacatcaaatcrcaaatcttaaacaaactacractcaaaaaaac

SEQ ID NO: 22899 - DNA, 50 bp, synthetic construct
  source 1..50: mol_type = other DNA
ttactctcctaaaccatactaataacratctcrataataacrtaatactc

SEQ ID NO: 22900 - DNA, 50 bp, synthetic construct
  source 1..50: mol_type = other DNA
aaaataaataaactacraaacrcraacaataaaatactaactctaacccc

SEQ ID NO: 22901 - DNA, 50 bp, synthetic construct
  source 1..50: mol_type = other DNA
ttaaaatccraaaaaactaaaactaaacaataactctatcctaaaaaacc

SEQ ID NO: 22902 - DNA, 50 bp, synthetic construct
  source 1..50: mol_type = other DNA
acaaaaaacactacaatccaactaaaactacraaaatcctacaacctccc

SEQ ID NO: 22903 - DNA, 50 bp, synthetic construct
  source 1..50: mol_type = other DNA
aaccaacaaacctaaacccaccaaaattaactctaataataaaaatacac

SEQ ID NO: 22904 - DNA, 50 bp, synthetic construct
  source 1..50: mol_type = other DNA
ataaacctctaattaaaaactcatacctttaactaaacrtaataactcac

SEQ ID NO: 22905 - DNA, 50 bp, synthetic construct
  source 1..50: mol_type = other DNA
cccraaaaatccataaacctctaattaaaaactcatacctttaactaaac

SEQ ID NO: 22906 - DNA, 50 bp, synthetic construct
  source 1..50: mol_type = other DNA
catattttacatacaatttaaaaaacttcataaaactaccttataacccc

SEQ ID NO: 22907 - DNA, 50 bp, synthetic construct
  source 1..50: mol_type = other DNA
aaataattactcaattttttttaactcatcacaataaaaatcaaaaaacc

SEQ ID NO: 22908 - DNA, 50 bp, synthetic construct
  source 1..50: mol_type = other DNA
caaaaatacacaaaaataccaccatttactaacaaaaaaatctcaacttc

SEQ ID NO: 22909 - DNA, 50 bp, synthetic construct
  source 1..50: mol_type = other DNA
tcraaaccaaaatccrtttttcttccctaaaataatatttccaatctatc

SEQ ID NO: 22910 - DNA, 50 bp, synthetic construct
  source 1..50: mol_type = other DNA
cattacrtcaattaatccctcctttttaccccatatcraaaccaaaatcc

SEQ ID NO: 22911 - DNA, 50 bp, synthetic construct
  source 1..50: mol_type = other DNA
cttttcaaaactacattacrtcaattaatccctcctttttaccccatatc

SEQ ID NO: 22912 - DNA, 50 bp, synthetic construct
  source 1..50: mol_type = other DNA
cacccttccccactaaattatataaataccttctacctattatactcttc

SEQ ID NO: 22913 - DNA, 50 bp, synthetic construct
  source 1..50: mol_type = other DNA
taaaaactaaattctacaaaataacttacrccttctcctacrtcttctcc

SEQ ID NO: 22914 - DNA, 50 bp, synthetic construct
  source 1..50: mol_type = other DNA
aaacttttctaaaaactaaattctacaaaataacttacrccttctcctac

SEQ ID NO: 22915 - DNA, 50 bp, synthetic construct
  source 1..50: mol_type = other DNA
crattaatcaaccttacatctctacrcctaaaacraaaactcctaaaaac

SEQ ID NO: 22916 - DNA, 50 bp, synthetic construct
  source 1..50: mol_type = other DNA
tataacrtaaaaacaaaaataacaacrattaatcaaccttacatctctac

SEQ ID NO: 22917 - DNA, 50 bp, synthetic construct
  source 1..50: mol_type = other DNA
ttcctaaccaaacatcatcaactttaaaactaccacaattttaaaaatcc

SEQ ID NO: 22918 - DNA, 50 bp, synthetic construct
  source 1..50: mol_type = other DNA
ttcaaataatcactactacccctaaaatcaaaaccaaaactccacctttc

SEQ ID NO: 22919 - DNA, 50 bp, synthetic construct
  source 1..50: mol_type = other DNA
tactcaacatccccttcttcaacattcctattatctaaaccctaaccaac

SEQ ID NO: 22920 - DNA, 50 bp, synthetic construct
  source 1..50: mol_type = other DNA
ataaccraacctttccttaatcaaaaatctcaaaaaatatccctttcacc

SEQ ID NO: 22921 - DNA, 50 bp, synthetic construct
  source 1..50: mol_type = other DNA
aaaaataaactaaaacccataatccatttactcccaatatatcaataacc

SEQ ID NO: 22922 - DNA, 50 bp, synthetic construct
  source 1..50: mol_type = other DNA
ataaaaaaaatttaactcatcctcaaaaaccccaaccataatcaaaaatc

SEQ ID NO: 22923 - DNA, 50 bp, synthetic construct
  source 1..50: mol_type = other DNA
cccaaccataatcaaaaatcraaccacttcctcttcaaactaacaataac

SEQ ID NO: 22924 - DNA, 50 bp, synthetic construct
  source 1..50: mol_type = other DNA
aaccttacaacrttacttaactctactaaaaaataacaaaccataacaac

SEQ ID NO: 22925 - DNA, 50 bp, synthetic construct
  source 1..50: mol_type = other DNA
aaataaaactacctaactcttctcttaactaaattctccaaccttacaac

SEQ ID NO: 22926 - DNA, 50 bp, synthetic construct
  source 1..50: mol_type = other DNA
aaacccctaacttaaaaactaaaacataacctaaacccaaccccctaacc

SEQ ID NO: 22927 - DNA, 50 bp, synthetic construct
  source 1..50: mol_type = other DNA
tctcatctatacctacaaacaactaaaaaacaataatttaaacctttttc

SEQ ID NO: 22928 - DNA, 50 bp, synthetic construct
  source 1..50: mol_type = other DNA
aaaaaataaacrtaaaaatcccaaatcccctaatcracatcractaaatc

SEQ ID NO: 22929 - DNA, 50 bp, synthetic construct
  source 1..50: mol_type = other DNA
aaatactcraaaaaataaacrtaaaaatcccaaatcccctaatcracatc

SEQ ID NO: 22930 - DNA, 50 bp, synthetic construct
  source 1..50: mol_type = other DNA
ctaactaaattaacttacctctcaaccaaccrctatttcttttccttccc

SEQ ID NO: 22931 - DNA, 50 bp, synthetic construct
  source 1..50: mol_type = other DNA
aactaaaaaacaaaccaatccaactaaaactacrtcractccaaaaaaac

SEQ ID NO: 22932 - DNA, 50 bp, synthetic construct
  source 1..50: mol_type = other DNA
caaacattaatacaaaatccacctaccttacttcctacratacaacctac

SEQ ID NO: 22933 - DNA, 50 bp, synthetic construct
  source 1..50: mol_type = other DNA
cccraaaaacraatccaaatataaaaaacaactcrccaactaaatcaaac

SEQ ID NO: 22934 - DNA, 50 bp, synthetic construct
  source 1..50: mol_type = other DNA
acctaaaaaactacracccraaaaacraatccaaatataaaaaacaactc

SEQ ID NO: 22935 - DNA, 50 bp, synthetic construct
  source 1..50: mol_type = other DNA
attcaatattctttaactcacraacaaaattctaaaccraaccaaattac

SEQ ID NO: 22936 - DNA, 50 bp, synthetic construct
  source 1..50: mol_type = other DNA
acaaataaataaattcaatattctttaactcacraacaaaattctaaacc

SEQ ID NO: 22937 - DNA, 50 bp, synthetic construct
  source 1..50: mol_type = other DNA
cratacctaaaaactaaaaacrtaacttaactcractcaaaactttaccc

SEQ ID NO: 22938 - DNA, 50 bp, synthetic construct
  source 1..50: mol_type = other DNA
tacttaacatctcatctacataccaaactatttaataaacrtccacaaac

SEQ ID NO: 22939 - DNA, 50 bp, synthetic construct
  source 1..50: mol_type = other DNA
ttccactttccaaaaaattaaaatattatctcctaaaaaaccraataatc

SEQ ID NO: 22940 - DNA, 50 bp, synthetic construct
  source 1..50: mol_type = other DNA
ctctaatcctaaactaaaacaataaacaacctaaatccccccacacacac

SEQ ID NO: 22941 - DNA, 50 bp, synthetic construct
  source 1..50: mol_type = other DNA
tcaaaaaaaaaacttcrataaaactataaaacaataacccctatccctcc

SEQ ID NO: 22942 - DNA, 50 bp, synthetic construct
  source 1..50: mol_type = other DNA
ctaccaacaactataactaaacttcctactccccataacaatctcaaacc

SEQ ID NO: 22943 - DNA, 50 bp, synthetic construct
  source 1..50: mol_type = other DNA
aaactcccaaaaatctcaaatcaaaaacacraacaacctctaaaactctc

SEQ ID NO: 22944 - DNA, 50 bp, synthetic construct
  source 1..50: mol_type = other DNA
atttaaatctaacrtcctctcaactaaactaatacaaaccaatacccrac

SEQ ID NO: 22945 - DNA, 50 bp, synthetic construct
  source 1..50: mol_type = other DNA
taaatttaaatctaacrtcctctcaactaaactaatacaaaccaataccc

SEQ ID NO: 22946 - DNA, 50 bp, synthetic construct
  source 1..50: mol_type = other DNA
ctccctcacactttaacaaaaactaaaaaacttctaaatttaaatctaac

SEQ ID NO: 22947 - DNA, 50 bp, synthetic construct
  source 1..50: mol_type = other DNA
ataaactatctcattcacctaaacctctcaactttctattccctactcac

SEQ ID NO: 22948 - DNA, 50 bp, synthetic construct
  source 1..50: mol_type = other DNA
actactactataaaaatctttttaaactttatcattttctcacatctacc

SEQ ID NO: 22949 - DNA, 50 bp, synthetic construct
  source 1..50: mol_type = other DNA
aaaataaaatttcatcrtattaaccaaaataatctccatctcrtaacctc

SEQ ID NO: 22950 - DNA, 50 bp, synthetic construct
  source 1..50: mol_type = other DNA
cattttaaaaatccctaattatctccacaaatacaacctcaaaaaaacac

SEQ ID NO: 22951 - DNA, 50 bp, synthetic construct
  source 1..50: mol_type = other DNA
caacaccattaaaatattctaatttcataattcctcaacataaaacratc

SEQ ID NO: 22952 - DNA, 50 bp, synthetic construct
  source 1..50: mol_type = other DNA
tctccaacaccattaaaatattctaatttcataattcctcaacataaaac

SEQ ID NO: 22953 - DNA, 50 bp, synthetic construct
  source 1..50: mol_type = other DNA
aaatcctaaaacaaaaaccaacactaaaaaaccccaaaatttaaataacc

SEQ ID NO: 22954 - DNA, 50 bp, synthetic construct
  source 1..50: mol_type = other DNA
cactaaaaaaccccaaaatttaaataaccraaaacaaaaaccccaaacac

SEQ ID NO: 22955 - DNA, 50 bp, synthetic construct
  source 1..50: mol_type = other DNA
aaataatttacrttttcaaaataacractccctatattactaacraaacc

SEQ ID NO: 22956 - DNA, 50 bp, synthetic construct
  source 1..50: mol_type = other DNA
taaaataatacactctccctttaaaactaaaataataacttactacratc

SEQ ID NO: 22957 - DNA, 50 bp, synthetic construct
  source 1..50: mol_type = other DNA
tacaaacaacaaacrctcaataataatatcrataacaataaaaaacccac

SEQ ID NO: 22958 - DNA, 50 bp, synthetic construct
  source 1..50: mol_type = other DNA
taactccctaaaaactattttacaaacaacaaacrctcaataataatatc

SEQ ID NO: 22959 - DNA, 50 bp, synthetic construct
  source 1..50: mol_type = other DNA
aacaaacaaactccaaaaacrcactaaaacrcacaaatatttctaaaaac

SEQ ID NO: 22960 - DNA, 50 bp, synthetic construct
  source 1..50: mol_type = other DNA
aaaattaaaaaatctaaacraaaaacaactaaaaccctcatcacttcrcc

SEQ ID NO: 22961 - DNA, 50 bp, synthetic construct
  source 1..50: mol_type = other DNA
taaccctaaaacccaacccraaaaaacactcaaaattaaaaaatctaaac

SEQ ID NO: 22962 - DNA, 50 bp, synthetic construct
  source 1..50: mol_type = other DNA
aacaaaataaaaacttctaaacraacctacttaatattctaattaaactc

SEQ ID NO: 22963 - DNA, 50 bp, synthetic construct
  source 1..50: mol_type = other DNA
aaaaacttctaaacraacctacttaatattctaattaaactcrtccaacc

SEQ ID NO: 22964 - DNA, 50 bp, synthetic construct
  source 1..50: mol_type = other DNA
tattctaattaaactcrtccaaccrctaaaaatctaaaacraaacaactc

SEQ ID NO: 22965 - DNA, 50 bp, synthetic construct
  source 1..50: mol_type = other DNA
atttaacaaaacttaaccctaaaaaaacaacaattactaaaataaacrac

SEQ ID NO: 22966 - DNA, 50 bp, synthetic construct
  source 1..50: mol_type = other DNA
caaaactaaatcctattaaacttatttcccctacaacctaaaaaaaaccc

SEQ ID NO: 22967 - DNA, 50 bp, synthetic construct
  source 1..50: mol_type = other DNA
tccaacactaaacaacatatcccatttaaaaaacaaaacaaaacccaaac

SEQ ID NO: 22968 - DNA, 50 bp, synthetic construct
  source 1..50: mol_type = other DNA
aaaacraaatttcrccatcttaaccaaattaatcttaaactccraacctc

SEQ ID NO: 22969 - DNA, 50 bp, synthetic construct
  source 1..50: mol_type = other DNA
aaaaccraaaaaaacaaactattattttttcctttccctttattcattac

SEQ ID NO: 22970 - DNA, 50 bp, synthetic construct
  source 1..50: mol_type = other DNA
aataaaacrctaaaaaactcrcraaatctctaccttacttaaaaaaactc

SEQ ID NO: 22971 - DNA, 50 bp, synthetic construct
  source 1..50: mol_type = other DNA
aaaacttcaaacaaataattccctcttaaaaactacctactaacaacaac

SEQ ID NO: 22972 - DNA, 50 bp, synthetic construct
  source 1..50: mol_type = other DNA
tccttttttcacttaaacrttcattactcacattccaaatcctttaaatc

SEQ ID NO: 22973 - DNA, 50 bp, synthetic construct
  source 1..50: mol_type = other DNA
tatttccaaaacctatattaatatttaaaatttccttttttcacttaaac

SEQ ID NO: 22974 - DNA, 50 bp, synthetic construct
  source 1..50: mol_type = other DNA
ctataaatattctaaaattctctacctccaaatcaacttcttcctttctc

SEQ ID NO: 22975 - DNA, 50 bp, synthetic construct
  source 1..50: mol_type = other DNA
ctctacctccaaatcaacttcttcctttctcrccccaattaaataaaaac

SEQ ID NO: 22976 - DNA, 50 bp, synthetic construct
  source 1..50: mol_type = other DNA
aactaaactctcaaaattcaaaaacacccctaaactaaaatcttaaaaac

SEQ ID NO: 22977 - DNA, 50 bp, synthetic construct
  source 1..50: mol_type = other DNA
tccaacccaaaaatatccttaaaccctaaaaatctaactctaaccacctc

SEQ ID NO: 22978 - DNA, 50 bp, synthetic construct
  source 1..50: mol_type = other DNA
aaaaaacataaatttcaaaaactactaacatcaataaaacccaattatac

SEQ ID NO: 22979 - DNA, 50 bp, synthetic construct
  source 1..50: mol_type = other DNA
ctaaacctcaattttctcatcaataaaataaacacctacaaaaatcaatc

SEQ ID NO: 22980 - DNA, 50 bp, synthetic construct
  source 1..50: mol_type = other DNA
aaactaaaaataaaacccaaatataactaatctaattctattccaaaacc

SEQ ID NO: 22981 - DNA, 50 bp, synthetic construct
  source 1..50: mol_type = other DNA
atacaataaacractttccttaattcaataataataataacatatcttac

SEQ ID NO: 22982 - DNA, 50 bp, synthetic construct
  source 1..50: mol_type = other DNA
aaaaaccccaaattttaactactaaatccaaaaaccaaaatacaataaac

SEQ ID NO: 22983 - DNA, 50 bp, synthetic construct
  source 1..50: mol_type = other DNA
aatctaatatttcccaatcctaaaacrataaaaccraatactaatatctc

SEQ ID NO: 22984 - DNA, 50 bp, synthetic construct
  source 1..50: mol_type = other DNA
cttctactaccaacaaatctaatatttcccaatcctaaaacrataaaacc

SEQ ID NO: 22985 - DNA, 50 bp, synthetic construct
  source 1..50: mol_type = other DNA
ataatccaacttctactaccaacaaatctaatatttcccaatcctaaaac

SEQ ID NO: 22986 - DNA, 50 bp, synthetic construct
  source 1..50: mol_type = other DNA
aatccaaacraaaccraaactaaaaaccttaccaaaactaattctatatc

SEQ ID NO: 22987 - DNA, 50 bp, synthetic construct
  source 1..50: mol_type = other DNA
tatttctataaatatatcccttatctatttctacrctttcttccaccatc

SEQ ID NO: 22988 - DNA, 50 bp, synthetic construct
  source 1..50: mol_type = other DNA
tttctcaatctatatatatttctataaatatatcccttatctatttctac

SEQ ID NO: 22989 - DNA, 50 bp, synthetic construct
  source 1..50: mol_type = other DNA
aacaaaaaacacacccacaaaaacatatataaactaaaaaaaccraatac

SEQ ID NO: 22990 - DNA, 50 bp, synthetic construct
  source 1..50: mol_type = other DNA
atataccataaaaaccctaccttataaaatcaacacctataccaaatctc

SEQ ID NO: 22991 - DNA, 50 bp, synthetic construct
  source 1..50: mol_type = other DNA
caaacaaaaaactacctttctccccaaaatccaatcacatatataaatac

SEQ ID NO: 22992 - DNA, 50 bp, synthetic construct
  source 1..50: mol_type = other DNA
ttctccccaaaatccaatcacatatataaatacraaaaaactataaatcc

SEQ ID NO: 22993 - DNA, 50 bp, synthetic construct
  source 1..50: mol_type = other DNA
tacaacccratcaaactataataaatccraatctttttctaacaacratc

SEQ ID NO: 22994 - DNA, 50 bp, synthetic construct
  source 1..50: mol_type = other DNA
aaaataactcccaaactaacctctaaataacaccatacacaatacaaccc

SEQ ID NO: 22995 - DNA, 50 bp, synthetic construct
  source 1..50: mol_type = other DNA
ccacctaaaaatcaatttaaaaaccatcccttctaaatacrtcttacccc

SEQ ID NO: 22996 - DNA, 50 bp, synthetic construct
  source 1..50: mol_type = other DNA
actaacacttcttccaaactacccaaaaaaacctacataaaaatctcatc

SEQ ID NO: 22997 - DNA, 50 bp, synthetic construct
  source 1..50: mol_type = other DNA
aataaatatctcactaatatactaataactctttaattaactatttctcc

SEQ ID NO: 22998 - DNA, 50 bp, synthetic construct
  source 1..50: mol_type = other DNA
aaaaacaaatccccctaaattatattctatatcratataattccttttcc

SEQ ID NO: 22999 - DNA, 50 bp, synthetic construct
  source 1..50: mol_type = other DNA
caccttaaaactaataaaaaaacaaatccccctaaattatattctatatc

SEQ ID NO: 23000 - DNA, 50 bp, synthetic construct
  source 1..50: mol_type = other DNA
aatcaaaaactaatttctcaaaaaatacttattccctccatccaaaaccc

SEQ ID NO: 23001 - DNA, 50 bp, synthetic construct
  source 1..50: mol_type = other DNA
tttctcaaaaaatacttattccctccatccaaaacccrcaactaaaacac

SEQ ID NO: 23002 - DNA, 50 bp, synthetic construct
  source 1..50: mol_type = other DNA
cctaattctcaccttttctaactccaatcccaaaccaaatacctttctcc

SEQ ID NO: 23003 - DNA, 50 bp, synthetic construct
  source 1..50: mol_type = other DNA
aaaaaaaaactacattaactaaaactcctaaacttcccctccctatatac

SEQ ID NO: 23004 - DNA, 50 bp, synthetic construct
  source 1..50: mol_type = other DNA
ctactctaatttctatcctcctaataaaaaataacracaatatttcaaac

SEQ ID NO: 23005 - DNA, 50 bp, synthetic construct
  source 1..50: mol_type = other DNA
aaaaataaattccccctactctaatttctatcctcctaataaaaaataac

SEQ ID NO: 23006 - DNA, 50 bp, synthetic construct
  source 1..50: mol_type = other DNA
caataacaatttctaatttcactaaatcactctcatcttaatacactccc

SEQ ID NO: 23007 - DNA, 50 bp, synthetic construct
  source 1..50: mol_type = other DNA
caaaaaaccraaaatctcrttacaaaaaaatcctaaacctcaaaaaaatc

SEQ ID NO: 23008 - DNA, 50 bp, synthetic construct
  source 1..50: mol_type = other DNA
cctaatttccaaaaaaaactcctaaaccaaataaaatttaaccttaaatc

SEQ ID NO: 23009 - DNA, 50 bp, synthetic construct
  source 1..50: mol_type = other DNA
tcccrccccaaacaaatttaattcttaaaaactaaacaaatttcttcccc

SEQ ID NO: 23010 - DNA, 50 bp, synthetic construct
  source 1..50: mol_type = other DNA
attcttaattattcaattaccaaaaatccctaatcccattttcctctaac

SEQ ID NO: 23011 - DNA, 50 bp, synthetic construct
  source 1..50: mol_type = other DNA
cacttcttataattaccattatctcattccaccaaaaaacatctcaaacc

SEQ ID NO: 23012 - DNA, 50 bp, synthetic construct
  source 1..50: mol_type = other DNA
rcttcctccttttaataaaacttcaataaacaaacrtatttaaaataacc

SEQ ID NO: 23013 - DNA, 50 bp, synthetic construct
  source 1..50: mol_type = other DNA
ccctaatatataaccttaaaaatatattctaactacacatcataattcac

SEQ ID NO: 23014 - DNA, 50 bp, synthetic construct
  source 1..50: mol_type = other DNA
accttaaattctcaaaaatcaataactactaacttaaaaaaaactacctc

SEQ ID NO: 23015 - DNA, 50 bp, synthetic construct
  source 1..50: mol_type = other DNA
cttaaaaaacaaactaccccttaacaaaaacaataacaacttaacacccc

SEQ ID NO: 23016 - DNA, 50 bp, synthetic construct
  source 1..50: mol_type = other DNA
aaaatacctaaaataataattccaaaaatttaaaattccttaaactaatc

SEQ ID NO: 23017 - DNA, 50 bp, synthetic construct
  source 1..50: mol_type = other DNA
aattcttaaaaccactattttaaacatttctattatcattcctaaaatac

SEQ ID NO: 23018 - DNA, 50 bp, synthetic construct
  source 1..50: mol_type = other DNA
ccactattttaaacatttctattatcattcctaaaatacraaaactaaac

SEQ ID NO: 23019 - DNA, 50 bp, synthetic construct
  source 1..50: mol_type = other DNA
aactcrcaaaactaaactaataaaattacaatactaaaaacactaaaccc

SEQ ID NO: 23020 - DNA, 50 bp, synthetic construct
  source 1..50: mol_type = other DNA
ttttattacccttaaaattcraaacacaactaaacaccaaaaccccctcc

SEQ ID NO: 23021 - DNA, 50 bp, synthetic construct
  source 1..50: mol_type = other DNA
aaactactaaactaaacaacraaaaaaaccttaatatccaactatactcc

SEQ ID NO: 23022 - DNA, 50 bp, synthetic construct
  source 1..50: mol_type = other DNA
aaactatcaatacctacctccactccttctatctaaatactcttaaaatc

SEQ ID NO: 23023 - DNA, 50 bp, synthetic construct
  source 1..50: mol_type = other DNA
actatcaatacctacctccactccttctatctaaatactcttaaaatcrc

SEQ ID NO: 23024 - DNA, 50 bp, synthetic construct
  source 1..50: mol_type = other DNA
ctacctccactccttctatctaaatactcttaaaatcrcraaatattacc

SEQ ID NO: 23025 - DNA, 50 bp, synthetic construct
  source 1..50: mol_type = other DNA
ctcttaaaatcrcraaatattaccrcaaaacccttttatacctaaatacc

SEQ ID NO: 23026 - DNA, 50 bp, synthetic construct
  source 1..50: mol_type = other DNA
tacaaataataacccctcactccccataaacacrttaaataaaaacatac

SEQ ID NO: 23027 - DNA, 50 bp, synthetic construct
  source 1..50: mol_type = other DNA
aaaataccacccrttaatacaaataataacccctcactccccataaacac

SEQ ID NO: 23028 - DNA, 50 bp, synthetic construct
  source 1..50: mol_type = other DNA
tcccaaatttaaaaaaaacaaccttttactataatacaaaaataccaccc

SEQ ID NO: 23029 - DNA, 50 bp, synthetic construct
  source 1..50: mol_type = other DNA
aaaaaaaactcccacaatacaacracraactaaaaaactcctcaaatacc

SEQ ID NO: 23030 - DNA, 50 bp, synthetic construct
  source 1..50: mol_type = other DNA
aataaaaaataacattatactaacaatcctcacaacccttactcactctc

SEQ ID NO: 23031 - DNA, 50 bp, synthetic construct
  source 1..50: mol_type = other DNA
tcctaaattcacrccattctcctatctccraaataacaaaaactacaaac

SEQ ID NO: 23032 - DNA, 50 bp, synthetic construct
  source 1..50: mol_type = other DNA
aaaaaacctatctctacaaaaattcaaaaataaaccaaacataataacac

SEQ ID NO: 23033 - DNA, 50 bp, synthetic construct
  source 1..50: mol_type = other DNA
cctcttatctacctataacctaaaaacctcctcccaacttaaattatccc

SEQ ID NO: 23034 - DNA, 50 bp, synthetic construct
  source 1..50: mol_type = other DNA
ccctaaactaaactactcttactaactacaaccrtaaacctctactcacc

SEQ ID NO: 23035 - DNA, 50 bp, synthetic construct
  source 1..50: mol_type = other DNA
aaattcaaaattctcctatcttaacctcctaaatacctaaaattacaaac

SEQ ID NO: 23036 - DNA, 50 bp, synthetic construct
  source 1..50: mol_type = other DNA
taaataactactattattatcctcactttaaaaattaaaaaatttaaccc

SEQ ID NO: 23037 - DNA, 50 bp, synthetic construct
  source 1..50: mol_type = other DNA
cctaaactcatttctctaacaatccttctactaaataaatataaaattac

SEQ ID NO: 23038 - DNA, 50 bp, synthetic construct
  source 1..50: mol_type = other DNA
cacctacctaataaaaaaactatcaaaaaaataaacccaaaacrtccccc

SEQ ID NO: 23039 - DNA, 50 bp, synthetic construct
  source 1..50: mol_type = other DNA
tttatttatccataaaacaaaatacacataaaactatttaaccraataac

SEQ ID NO: 23040 - DNA, 50 bp, synthetic construct
  source 1..50: mol_type = other DNA
cctaatatttatttatccataaaacaaaatacacataaaactatttaacc

SEQ ID NO: 23041 - DNA, 50 bp, synthetic construct
  source 1..50: mol_type = other DNA
aaatattcctttacattcaacatttctactaaaatctaaaataaaaatac

SEQ ID NO: 23042 - DNA, 50 bp, synthetic construct
  source 1..50: mol_type = other DNA
ctatataacataaaatccctacrcraacaccraaaaaatccttaaaaaac

SEQ ID NO: 23043 - DNA, 50 bp, synthetic construct
  source 1..50: mol_type = other DNA
taaataaaataaattaccrttcttaaaacccrtctcctaaaaattctccc

SEQ ID NO: 23044 - DNA, 50 bp, synthetic construct
  source 1..50: mol_type = other DNA
aataaattaccrttcttaaaacccrtctcctaaaaattctcccratatcc

SEQ ID NO: 23045 - DNA, 50 bp, synthetic construct
  source 1..50: mol_type = other DNA
aacacractaaaaaataaaccraatatacatttcatttactctaaaaatc

SEQ ID NO: 23046 - DNA, 50 bp, synthetic construct
  source 1..50: mol_type = other DNA
raaattaaacraaaactttaaaatactaaaatcctcacacaattcrcrcc

SEQ ID NO: 23047 - DNA, 50 bp, synthetic construct
  source 1..50: mol_type = other DNA
tacrtaaaaattacctaaaaaactccaaaaaacaaaacctccaaaaaaac

SEQ ID NO: 23048 - DNA, 50 bp, synthetic construct
  source 1..50: mol_type = other DNA
ttcrcccttttaaaaactctattctttaaaacctctcaaacaatttccac

SEQ ID NO: 23049 - DNA, 50 bp, synthetic construct
  source 1..50: mol_type = other DNA
acaaaaattatcaaatttaccaaatttctaatttttacaatctcataacc

SEQ ID NO: 23050 - DNA, 50 bp, synthetic construct
  source 1..50: mol_type = other DNA
caccttacatatttacrtcaattaaaactaaacctatttaaatacctatc

SEQ ID NO: 23051 - DNA, 50 bp, synthetic construct
  source 1..50: mol_type = other DNA
acctaccttacttttttattacataaataaaaaacaccttacatatttac

SEQ ID NO: 23052 - DNA, 50 bp, synthetic construct
  source 1..50: mol_type = other DNA
acttaaaacactattaaaatacaaattcctaaccaaacrcrataactcac

SEQ ID NO: 23053 - DNA, 50 bp, synthetic construct
  source 1..50: mol_type = other DNA
catcacaatcacttaaaacactattaaaatacaaattcctaaccaaacrc

SEQ ID NO: 23054 - DNA, 50 bp, synthetic construct
  source 1..50: mol_type = other DNA
tacatcacaatcacttaaaacactattaaaatacaaattcctaaccaaac

SEQ ID NO: 23055 - DNA, 50 bp, synthetic construct
  source 1..50: mol_type = other DNA
acacttaacttataaacataatattcaccataactcaattacacctattc

SEQ ID NO: 23056 - DNA, 50 bp, synthetic construct
  source 1..50: mol_type = other DNA
crcccraaaaacctaattattttctccaaaacttcaaacctaaaaacttc

SEQ ID NO: 23057 - DNA, 50 bp, synthetic construct
  source 1..50: mol_type = other DNA
ttttcraaatcttcaaacttaaaattctaaaaaaaacaactaaactctcc

SEQ ID NO: 23058 - DNA, 50 bp, synthetic construct
  source 1..50: mol_type = other DNA
tcccaaacraccttacatttcaaatcccttaaactaatattcraaatctc

SEQ ID NO: 23059 - DNA, 50 bp, synthetic construct
  source 1..50: mol_type = other DNA
crcctctaaccaaatccraacaactaataaaaaaaattccaaaaatccac

SEQ ID NO: 23060 - DNA, 50 bp, synthetic construct
  source 1..50: mol_type = other DNA
aaccaaatccraacaactaataaaaaaaattccaaaaatccacrccattc

SEQ ID NO: 23061 - DNA, 50 bp, synthetic construct
  source 1..50: mol_type = other DNA
ccctttcctacraaaacctaaacttaaaaaacacctaaaaaaatataaac

SEQ ID NO: 23062 - DNA, 50 bp, synthetic construct
  source 1..50: mol_type = other DNA
aaaaaaatataaacrccttaatatatacccatctaaatccccaaaaaaac

SEQ ID NO: 23063 - DNA, 50 bp, synthetic construct
  source 1..50: mol_type = other DNA
aaaatataaacrccttaatatatacccatctaaatccccaaaaaaacrac

SEQ ID NO: 23064 - DNA, 50 bp, synthetic construct
  source 1..50: mol_type = other DNA
cttaatatatacccatctaaatccccaaaaaaacracraaaactacracc

SEQ ID NO: 23065 - DNA, 50 bp, synthetic construct
  source 1..50: mol_type = other DNA
aaataaaaaaacraactccraaatctattcccaaactaaaaaccaccccc

SEQ ID NO: 23066 - DNA, 50 bp, synthetic construct
  source 1..50: mol_type = other DNA
raaactccraaataaacaactctcaaacaaataaataacrcraaaacacc

SEQ ID NO: 23067 - DNA, 50 bp, synthetic construct
  source 1..50: mol_type = other DNA
ctatttcracctcaacctcttctaaaaaaaccaattaaaaaatcracrac

SEQ ID NO: 23068 - DNA, 50 bp, synthetic construct
  source 1..50: mol_type = other DNA
ctactatttcracctcaacctcttctaaaaaaaccaattaaaaaatcrac

SEQ ID NO: 23069 - DNA, 50 bp, synthetic construct
  source 1..50: mol_type = other DNA
aaattattattctctaatattaaaaaaacaaaaacracacctcctcttcc

SEQ ID NO: 23070 - DNA, 50 bp, synthetic construct
  source 1..50: mol_type = other DNA
ccaccactctttaaactaaaccaaaatacttcraaaacctacraaaaaac

SEQ ID NO: 23071 - DNA, 50 bp, synthetic construct
  source 1..50: mol_type = other DNA
aaccrcaacraataaacaatatctacacctaaatcraaaaaactaaatac

SEQ ID NO: 23072 - DNA, 50 bp, synthetic construct
  source 1..50: mol_type = other DNA
actaattttaaaattttcacaaatcatccttactccaaatatactctaac

SEQ ID NO: 23073 - DNA, 50 bp, synthetic construct
  source 1..50: mol_type = other DNA
tttaataattctttaaaaactaataaaactcaaattttcacccacaaaac

SEQ ID NO: 23074 - DNA, 50 bp, synthetic construct
  source 1..50: mol_type = other DNA
caatttataactttaacctcatatttcttttaaataaaccataatccccc

SEQ ID NO: 23075 - DNA, 50 bp, synthetic construct
  source 1..50: mol_type = other DNA
aaaataaacaaaattactaactcraaaccratacactattaaatattacc

SEQ ID NO: 23076 - DNA, 50 bp, synthetic construct
  source 1..50: mol_type = other DNA
taaatacatacaaaactaacataataaaattctatcctcaaaaatacttc

SEQ ID NO: 23077 - DNA, 50 bp, synthetic construct
  source 1..50: mol_type = other DNA
caccaaatatcatactttccctaaatttaaataattttctccctatatcc

SEQ ID NO: 23078 - DNA, 50 bp, synthetic construct
  source 1..50: mol_type = other DNA
taattcrctcttcacccctaaaaaatcactacataaatcactacaacctc

SEQ ID NO: 23079 - DNA, 50 bp, synthetic construct
  source 1..50: mol_type = other DNA
cccctaaaaaatcactacataaatcactacaacctcracttcctaaactc

SEQ ID NO: 23080 - DNA, 50 bp, synthetic construct
  source 1..50: mol_type = other DNA
ctaactacaatacatcatttattcaaaaaatacrtcaacraactaaacac

SEQ ID NO: 23081 - DNA, 50 bp, synthetic construct
  source 1..50: mol_type = other DNA
actaaaaattcctaactacaatacatcatttattcaaaaaatacrtcaac

SEQ ID NO: 23082 - DNA, 50 bp, synthetic construct
  source 1..50: mol_type = other DNA
aatatcactaaaaattcctaactacaatacatcatttattcaaaaaatac

SEQ ID NO: 23083 - DNA, 50 bp, synthetic construct
  source 1..50: mol_type = other DNA
ctaaatttcaaaaataaaataactaattataatcttcccccacrataccc

SEQ ID NO: 23084 - DNA, 50 bp, synthetic construct
  source 1..50: mol_type = other DNA
aataatacattataaccaaaaatctctaataatattttacttcraacatc

SEQ ID NO: 23085 - DNA, 50 bp, synthetic construct
  source 1..50: mol_type = other DNA
cccraatccccactttatatcttcctatattctaaaatcttaaaaccttc

SEQ ID NO: 23086 - DNA, 50 bp, synthetic construct
  source 1..50: mol_type = other DNA
ccactttatatcttcctatattctaaaatcttaaaaccttcrataattcc

SEQ ID NO: 23087 - DNA, 50 bp, synthetic construct
  source 1..50: mol_type = other DNA
aaaaattacaattccctaaaaaaatcctccattttactataaataaacrc

SEQ ID NO: 23088 - DNA, 50 bp, synthetic construct
  source 1..50: mol_type = other DNA
ttatttaaacrtcaacacctatttccaatattaaacctaaaaatacaaac

SEQ ID NO: 23089 - DNA, 50 bp, synthetic construct
  source 1..50: mol_type = other DNA
ttttttccccrtctacacctctaaatccaatattaaaaataaatactaac

SEQ ID NO: 23090 - DNA, 50 bp, synthetic construct
  source 1..50: mol_type = other DNA
aaactaactcaacctacccttctacaaaaaaatccraaaaccactattac

SEQ ID NO: 23091 - DNA, 50 bp, synthetic construct
  source 1..50: mol_type = other DNA
aacrtttaaatattttctccctaaaaccaaaatttaacaaaacaaaaaac

SEQ ID NO: 23092 - DNA, 50 bp, synthetic construct
  source 1..50: mol_type = other DNA
atattttctccctaaaaccaaaatttaacaaaacaaaaaacrataaaacc

SEQ ID NO: 23093 - DNA, 50 bp, synthetic construct
  source 1..50: mol_type = other DNA
rataaaaccrtaatacttattcattttaccacctcattctttatataaac

SEQ ID NO: 23094 - DNA, 50 bp, synthetic construct
  source 1..50: mol_type = other DNA
atctaaaacttatctcaataaatctaaaacttcatcrccctctaatcrcc

SEQ ID NO: 23095 - DNA, 50 bp, synthetic construct
  source 1..50: mol_type = other DNA
ctaccctaaacctataacattctaaactatttctatatttatttataacc

SEQ ID NO: 23096 - DNA, 50 bp, synthetic construct
  source 1..50: mol_type = other DNA
tatcactacctatactataaaaaatatcaaaactataaaaacaacaaccc

SEQ ID NO: 23097 - DNA, 50 bp, synthetic construct
  source 1..50: mol_type = other DNA
acctatactataaaaaatatcaaaactataaaaacaacaacccraattac

SEQ ID NO: 23098 - DNA, 50 bp, synthetic construct
  source 1..50: mol_type = other DNA
tcaaaactataaaaacaacaacccraattacrtaatataatttacatctc

SEQ ID NO: 23099 - DNA, 50 bp, synthetic construct
  source 1..50: mol_type = other DNA
tttacrtatcactataacaacccaacccaaaaacacracataatctaaac

SEQ ID NO: 23100 - DNA, 50 bp, synthetic construct
  source 1..50: mol_type = other DNA
ttaaaccatatcrtacctttaaattaaattaccataataacacrcaaaac

SEQ ID NO: 23101 - DNA, 50 bp, synthetic construct
  source 1..50: mol_type = other DNA
crcrtacttcatacaccataaaatataattccraatctactaactaaaac

SEQ ID NO: 23102 - DNA, 50 bp, synthetic construct
  source 1..50: mol_type = other DNA
acaccataaaatataattccraatctactaactaaaacrtcacttcttcc

SEQ ID NO: 23103 - DNA, 50 bp, synthetic construct
  source 1..50: mol_type = other DNA
aatataattccraatctactaactaaaacrtcacttcttccrcaaaaaac

SEQ ID NO: 23104 - DNA, 50 bp, synthetic construct
  source 1..50: mol_type = other DNA
aatataaaaacraaccaactcrattctaaaaaaccttctataacctaacc

SEQ ID NO: 23105 - DNA, 50 bp, synthetic construct
  source 1..50: mol_type = other DNA
aactaaaactccaaatatcatcaaactaaaaaaataaacaaaattataac

SEQ ID NO: 23106 - DNA, 50 bp, synthetic construct
  source 1..50: mol_type = other DNA
aaaattttcccrcaacaaatcttctaacttaacaaattccrtacaatacc

SEQ ID NO: 23107 - DNA, 50 bp, synthetic construct
  source 1..50: mol_type = other DNA
acrcttcccaacaccctaaaatttacraaaaaaatcctaaaaattttccc

SEQ ID NO: 23108 - DNA, 50 bp, synthetic construct
  source 1..50: mol_type = other DNA
acctaccaaactaaaaaacttactacraaaaaactcctaaaacttctttc

SEQ ID NO: 23109 - DNA, 50 bp, synthetic construct
  source 1..50: mol_type = other DNA
cccaccccactctcccaaaattaatacctaaaataactcaaataaaatcc

SEQ ID NO: 23110 - DNA, 50 bp, synthetic construct
  source 1..50: mol_type = other DNA
caaataaaatacaaataccatctatccaaacctaactcacrttacaaatc

SEQ ID NO: 23111 - DNA, 50 bp, synthetic construct
  source 1..50: mol_type = other DNA
aaaacaatataaaattttcctatttcaacaacaaaaaaaacctaaacacc

SEQ ID NO: 23112 - DNA, 50 bp, synthetic construct
  source 1..50: mol_type = other DNA
caaaacctatcatattttaatattccctcccaaccatcatcactatcaac

SEQ ID NO: 23113 - DNA, 50 bp, synthetic construct
  source 1..50: mol_type = other DNA
tatcctactctatttaaataaaaatctatcaactatataacatcccatcc

SEQ ID NO: 23114 - DNA, 50 bp, synthetic construct
  source 1..50: mol_type = other DNA
acaaaacaaaacaaataaaattaataaccattaaattaataacaattacc

SEQ ID NO: 23115 - DNA, 50 bp, synthetic construct
  source 1..50: mol_type = other DNA
tcttaaatcttccccaaaatcacttaaccaaaatctaaattctctaaatc

SEQ ID NO: 23116 - DNA, 50 bp, synthetic construct
  source 1..50: mol_type = other DNA
caaacaatctcacaaaacaccaacatcaaacaaaatcactcaataactac

SEQ ID NO: 23117 - DNA, 50 bp, synthetic construct
  source 1..50: mol_type = other DNA
tttttaaccaaaaccatttacataaaaaaaatactacrattaactaaccc

SEQ ID NO: 23118 - DNA, 50 bp, synthetic construct
  source 1..50: mol_type = other DNA
tttttctcattattttttaaccaaaaccatttacataaaaaaaatactac

SEQ ID NO: 23119 - DNA, 50 bp, synthetic construct
  source 1..50: mol_type = other DNA
taacccttaaacttatcactaaaaaacaaaaatttctctaacataaatac

SEQ ID NO: 23120 - DNA, 50 bp, synthetic construct
  source 1..50: mol_type = other DNA
atcaacaactacaatacaattaccaacacaaataaacaaaataaatcccc

SEQ ID NO: 23121 - DNA, 50 bp, synthetic construct
  source 1..50: mol_type = other DNA
aacraaataaacraaattaattttcaaacactttcattccaaatacratc

SEQ ID NO: 23122 - DNA, 50 bp, synthetic construct
  source 1..50: mol_type = other DNA
atacaaaactacaccrccaatttcttaattttaaaaaaaacccaaattac

SEQ ID NO: 23123 - DNA, 50 bp, synthetic construct
  source 1..50: mol_type = other DNA
aaaacctccctaattaaacccraaaaccaaaataaaaaatctaaaataac

SEQ ID NO: 23124 - DNA, 50 bp, synthetic construct
  source 1..50: mol_type = other DNA
aaactaactaaaaattacctaatcttacratcaactcccccaaacaaaac

SEQ ID NO: 23125 - DNA, 50 bp, synthetic construct
  source 1..50: mol_type = other DNA
taaaaccctctcctaaaaatcrctccattataccacctctaaaaaaatcc

SEQ ID NO: 23126 - DNA, 50 bp, synthetic construct
  source 1..50: mol_type = other DNA
aaacctaaatctaactttacrtaaacaacraaaaactaatcaataaaatc

SEQ ID NO: 23127 - DNA, 50 bp, synthetic construct
  source 1..50: mol_type = other DNA
aaaccaacaaattaacccccaaaacctaaatctaactttacrtaaacaac

SEQ ID NO: 23128 - DNA, 50 bp, synthetic construct
  source 1..50: mol_type = other DNA
ctcacrcaaaaccaaacccaaattctaaaaaccaacctactaaccctaac

SEQ ID NO: 23129 - DNA, 50 bp, synthetic construct
  source 1..50: mol_type = other DNA
taacttcattcraaaaacrattactaatactaatacctatatatttaacc

SEQ ID NO: 23130 - DNA, 50 bp, synthetic construct
  source 1..50: mol_type = other DNA
rattactaatactaatacctatatatttaaccraaacaataaaactcaac

SEQ ID NO: 23131 - DNA, 50 bp, synthetic construct
  source 1..50: mol_type = other DNA
tactaatacctatatatttaaccraaacaataaaactcaacrtaaatttc

SEQ ID NO: 23132 - DNA, 50 bp, synthetic construct
  source 1..50: mol_type = other DNA
tataaaaaattttcrcaataaactactcctcrtcrtccaataactacctc

SEQ ID NO: 23133 - DNA, 50 bp, synthetic construct
  source 1..50: mol_type = other DNA
aataactctcrataactcatataaaaaattttcrcaataaactactcctc

SEQ ID NO: 23134 - DNA, 50 bp, synthetic construct
  source 1..50: mol_type = other DNA
ctacraaaactctctatataaatcatcraaaactacctacctaaataaac

SEQ ID NO: 23135 - DNA, 50 bp, synthetic construct
  source 1..50: mol_type = other DNA
craactataaactacrcttattccrttaaaacaaaaacccttatttctac

SEQ ID NO: 23136 - DNA, 50 bp, synthetic construct
  source 1..50: mol_type = other DNA
aaaatacaataacccraacttaacacactacaacctctacctcttcaaac

SEQ ID NO: 23137 - DNA, 50 bp, synthetic construct
  source 1..50: mol_type = other DNA
aaaacaaaatttcaccatactaatcaaactaatatcraactcctaacctc

SEQ ID NO: 23138 - DNA, 50 bp, synthetic construct
  source 1..50: mol_type = other DNA
aatttaaaaaaatcctaaaatttaaaaaatcctaattccaaactaaccrc

SEQ ID NO: 23139 - DNA, 50 bp, synthetic construct
  source 1..50: mol_type = other DNA
aaaatttaaaaaaatcctaaaatttaaaaaatcctaattccaaactaacc

SEQ ID NO: 23140 - DNA, 50 bp, synthetic construct
  source 1..50: mol_type = other DNA
aattccctcaaactccaatttaactaaacctccccctccaaaaaaaatac

SEQ ID NO: 23141 - DNA, 50 bp, synthetic construct
  source 1..50: mol_type = other DNA
aaactaacaaaataaaaatcacrctattaccctataaataactcaaaaac

SEQ ID NO: 23142 - DNA, 50 bp, synthetic construct
  source 1..50: mol_type = other DNA
aaatcacaaaccttaccaaaaacrctaaaaaaaaatccaaattaaaaaac

SEQ ID NO: 23143 - DNA, 50 bp, synthetic construct
  source 1..50: mol_type = other DNA
attaaacaaactactctcaaactcttaacctcaaatcatacacctacctc

SEQ ID NO: 23144 - DNA, 50 bp, synthetic construct
  source 1..50: mol_type = other DNA
rcccttctctcaaccaacataaaaaaacaacraaattcattctactatcc

SEQ ID NO: 23145 - DNA, 50 bp, synthetic construct
  source 1..50: mol_type = other DNA
aaccaacataaaaaaacaacraaattcattctactatccrattactacac

SEQ ID NO: 23146 - DNA, 50 bp, synthetic construct
  source 1..50: mol_type = other DNA
caactttaatttttttccacaaatccaataaaatccraacactaaacccc

SEQ ID NO: 23147 - DNA, 50 bp, synthetic construct
  source 1..50: mol_type = other DNA
tctttattttaaaacaataaataacctcctaataactaaaacrtactttc

SEQ ID NO: 23148 - DNA, 50 bp, synthetic construct
  source 1..50: mol_type = other DNA
atcccraaaaactaaacaatcaaaataataaaacccaaatcttaaaaaac

SEQ ID NO: 23149 - DNA, 50 bp, synthetic construct
  source 1..50: mol_type = other DNA
cctacctcaaaactctactacccattcaactttaatcatactaaaaaaac

SEQ ID NO: 23150 - DNA, 50 bp, synthetic construct
  source 1..50: mol_type = other DNA
acaaccaatataaaaatataataaaaaccctaaaccaaaaccctaccaac

SEQ ID NO: 23151 - DNA, 50 bp, synthetic construct
  source 1..50: mol_type = other DNA
accaatataaaaatataataaaaaccctaaaccaaaaccctaccaacrcc

SEQ ID NO: 23152 - DNA, 50 bp, synthetic construct
  source 1..50: mol_type = other DNA
aaaaacataaaaataaaaccaaaattacttatctcaaatacaatttcctc

SEQ ID NO: 23153 - DNA, 50 bp, synthetic construct
  source 1..50: mol_type = other DNA
atttaccctcctactttccattctctctctctaaacatacacaaaacacc

SEQ ID NO: 23154 - DNA, 50 bp, synthetic construct
  source 1..50: mol_type = other DNA
aaaaaactaaaacrcctaaaaaataaacaaaatcccraaactacaaaacc

SEQ ID NO: 23155 - DNA, 50 bp, synthetic construct
  source 1..50: mol_type = other DNA
aaaataaaaaccactcraatctacraattaaaactactccaacractaac

SEQ ID NO: 23156 - DNA, 50 bp, synthetic construct
  source 1..50: mol_type = other DNA
aaaaatcraaatctcraataaaaactcacacctacttaaaaaacracaac

SEQ ID NO: 23157 - DNA, 50 bp, synthetic construct
  source 1..50: mol_type = other DNA
ctaacraaaaatcraaatctcraataaaaactcacacctacttaaaaaac

SEQ ID NO: 23158 - DNA, 50 bp, synthetic construct
  source 1..50: mol_type = other DNA
aaacaattctcctaccttaacttcccraataactaaaaccacaaacatac

SEQ ID NO: 23159 - DNA, 50 bp, synthetic construct
  source 1..50: mol_type = other DNA
acttttttaacccctttcacaacacataaaaataaccccaattctcacac

SEQ ID NO: 23160 - DNA, 50 bp, synthetic construct
  source 1..50: mol_type = other DNA
acccctttcacaacacataaaaataaccccaattctcacacrtttctttc

SEQ ID NO: 23161 - DNA, 50 bp, synthetic construct
  source 1..50: mol_type = other DNA
taatcaaacrctccctaataaaaaataactatcctacttctattatcaac

SEQ ID NO: 23162 - DNA, 50 bp, synthetic construct
  source 1..50: mol_type = other DNA
aaaaaaaataatctcractcctaatactatactccaaactataatcaaac

SEQ ID NO: 23163 - DNA, 50 bp, synthetic construct
  source 1..50: mol_type = other DNA
tctccaccaaaaaacrcttaattacaacctaaaacacaacatcaaaaatc

SEQ ID NO: 23164 - DNA, 50 bp, synthetic construct
  source 1..50: mol_type = other DNA
aattacaacctaaaacacaacatcaaaaatcraaatcatccctccccaac

SEQ ID NO: 23165 - DNA, 50 bp, synthetic construct
  source 1..50: mol_type = other DNA
aatacaataacacaatctcractcaataccacctctttctaaattcaaac

SEQ ID NO: 23166 - DNA, 50 bp, synthetic construct
  source 1..50: mol_type = other DNA
aaaaccraaactaactaaaaaaccracacctacaaaactaaaaaaacaac

SEQ ID NO: 23167 - DNA, 50 bp, synthetic construct
  source 1..50: mol_type = other DNA
accacrcttcrctttaaaaaaatacaaataacttatatcttaaaactaac

SEQ ID NO: 23168 - DNA, 50 bp, synthetic construct
  source 1..50: mol_type = other DNA
aaactaacrcaaattattacraaatcattacraaaaaacaaacctacaac

SEQ ID NO: 23169 - DNA, 50 bp, synthetic construct
  source 1..50: mol_type = other DNA
crccttattaactacaatatccattcccataacaaaaatcaaaaaattac

SEQ ID NO: 23170 - DNA, 50 bp, synthetic construct
  source 1..50: mol_type = other DNA
accccttaactcctatcataaaaataaatattacaattaacaaaacracc

SEQ ID NO: 23171 - DNA, 50 bp, synthetic construct
  source 1..50: mol_type = other DNA
ccttcctcttaaatatttcaaaaaactccacaaatattcraaaaaccatc

SEQ ID NO: 23172 - DNA, 50 bp, synthetic construct
  source 1..50: mol_type = other DNA
ttttctcccttccttcctcttaaatatttcaaaaaactccacaaatattc

SEQ ID NO: 23173 - DNA, 50 bp, synthetic construct
  source 1..50: mol_type = other DNA
tctactcacraaactctttaaactccacattaacttcccttaaatcccac

SEQ ID NO: 23174 - DNA, 50 bp, synthetic construct
  source 1..50: mol_type = other DNA
catataattataataccttaatttacttaattaatcccttatctactcac

SEQ ID NO: 23175 - DNA, 50 bp, synthetic construct
  source 1..50: mol_type = other DNA
aaaccrtatatacctactatatacaaaacacttttttaaatataacttcc

SEQ ID NO: 23176 - DNA, 50 bp, synthetic construct
  source 1..50: mol_type = other DNA
aataaaataaaacattaaaccaaaattcaaacttttatccrccaaattcc

SEQ ID NO: 23177 - DNA, 50 bp, synthetic construct
  source 1..50: mol_type = other DNA
aaaaccaactatctccaaaattcctttaatacctaaaattcrcccccttc

SEQ ID NO: 23178 - DNA, 50 bp, synthetic construct
  source 1..50: mol_type = other DNA
atactaattaaccraaaaaaaccaaccraaaaaaacttccraaaatatcc

SEQ ID NO: 23179 - DNA, 50 bp, synthetic construct
  source 1..50: mol_type = other DNA
caaccaaaaaataaaatcttactaaccaaatcttccraaaccctcatccc

SEQ ID NO: 23180 - DNA, 50 bp, synthetic construct
  source 1..50: mol_type = other DNA
aaaattccraaaaatctaaccaataaaattctactccctaactatacacc

SEQ ID NO: 23181 - DNA, 50 bp, synthetic construct
  source 1..50: mol_type = other DNA
aataaaattctactccctaactatacaccraattccctacccctatctac

SEQ ID NO: 23182 - DNA, 50 bp, synthetic construct
  source 1..50: mol_type = other DNA
aatttaaaaatctctaaacaaactactttaaaactaaaaaaccccctacc

SEQ ID NO: 23183 - DNA, 50 bp, synthetic construct
  source 1..50: mol_type = other DNA
ctaaaccttatcttcattatactaaaaacaaatatctatactaaaataac

SEQ ID NO: 23184 - DNA, 50 bp, synthetic construct
  source 1..50: mol_type = other DNA
tcttacaacttaccttaccatccccataacaaattaaaaacrcaaacaac

SEQ ID NO: 23185 - DNA, 50 bp, synthetic construct
  source 1..50: mol_type = other DNA
taaaaaatatcttacaacttaccttaccatccccataacaaattaaaaac

SEQ ID NO: 23186 - DNA, 50 bp, synthetic construct
  source 1..50: mol_type = other DNA
aataccactccatttatttaaccatcctcccacctcratttatctattcc

SEQ ID NO: 23187 - DNA, 50 bp, synthetic construct
  source 1..50: mol_type = other DNA
aaatactaatatcaatactaaaaacacactataactaacccctcttcatc

SEQ ID NO: 23188 - DNA, 50 bp, synthetic construct
  source 1..50: mol_type = other DNA
ctaaaactctaaaacttaaactaaaatccttaataacccccttaccccrc

SEQ ID NO: 23189 - DNA, 50 bp, synthetic construct
  source 1..50: mol_type = other DNA
acctaaaactctaaaacttaaactaaaatccttaataacccccttacccc

SEQ ID NO: 23190 - DNA, 50 bp, synthetic construct
  source 1..50: mol_type = other DNA
ccaccctccctaaatacttacctttaactcccaataccraaacttaaaac

SEQ ID NO: 23191 - DNA, 50 bp, synthetic construct
  source 1..50: mol_type = other DNA
aatcacttaaactaaaaatacccaaaaacrttattctcttctcaacctcc

SEQ ID NO: 23192 - DNA, 50 bp, synthetic construct
  source 1..50: mol_type = other DNA
aataaaaaacrtccrtaaaaaaactccactctaaaaattctaactaaaac

SEQ ID NO: 23193 - DNA, 50 bp, synthetic construct
  source 1..50: mol_type = other DNA
aatttccrctaaaatcttataaaaaaccccttaaaccrccaaactaaaac

SEQ ID NO: 23194 - DNA, 50 bp, synthetic construct
  source 1..50: mol_type = other DNA
aaactaaataaaatctaaccaaccrttcratcctcaatttaaaaaacacc

SEQ ID NO: 23195 - DNA, 50 bp, synthetic construct
  source 1..50: mol_type = other DNA
aaaattaactcraacraaaacattataaactaaataaaatctaaccaacc

SEQ ID NO: 23196 - DNA, 50 bp, synthetic construct
  source 1..50: mol_type = other DNA
tccacccrccaattcctcctaatctataaaaaatttcraaatataaaatc

SEQ ID NO: 23197 - DNA, 50 bp, synthetic construct
  source 1..50: mol_type = other DNA
aaaaacctaaaactctaacaacracrttcaaaaaatctacaaatatctac

SEQ ID NO: 23198 - DNA, 50 bp, synthetic construct
  source 1..50: mol_type = other DNA
aaaatcrcctataatcacaaaacccrataaataaacacaaaaacracttc

SEQ ID NO: 23199 - DNA, 50 bp, synthetic construct
  source 1..50: mol_type = other DNA
raaaacttcccttctcrtacaacttacaaaaacattatccaaaactctac

SEQ ID NO: 23200 - DNA, 50 bp, synthetic construct
  source 1..50: mol_type = other DNA
aaacaacaaatcccataaaaaaacractcraaaataaaccaacctcaacc

SEQ ID NO: 23201 - DNA, 50 bp, synthetic construct
  source 1..50: mol_type = other DNA
caaaacaaaaaatacttaccccataattctacrctccraataaacctttc

SEQ ID NO: 23202 - DNA, 50 bp, synthetic construct
  source 1..50: mol_type = other DNA
aaatacaaaaatacaaaacaaaaaatacttaccccataattctacrctcc

SEQ ID NO: 23203 - DNA, 50 bp, synthetic construct
  source 1..50: mol_type = other DNA
tctaacaaccaatattctctataaaataaaaataacrttatcacaatcac

SEQ ID NO: 23204 - DNA, 50 bp, synthetic construct
  source 1..50: mol_type = other DNA
aacataacaaaacactatctccaaaaaaactacaaaaaaattaaccaaac

SEQ ID NO: 23205 - DNA, 50 bp, synthetic construct
  source 1..50: mol_type = other DNA
aacactatctccaaaaaaactacaaaaaaattaaccaaacrtaactatac

SEQ ID NO: 23206 - DNA, 50 bp, synthetic construct
  source 1..50: mol_type = other DNA
aaaaataatcaaatactaaaaaaaatctattactacaattacctcattac

SEQ ID NO: 23207 - DNA, 50 bp, synthetic construct
  source 1..50: mol_type = other DNA
tttcccttctactaccccttaaattttaaatcaaaaataccaactctatc

SEQ ID NO: 23208 - DNA, 50 bp, synthetic construct
  source 1..50: mol_type = other DNA
cctaataaaattaaaaaaattcrccaatctaaccaatataataaaacccc

SEQ ID NO: 23209 - DNA, 50 bp, synthetic construct
  source 1..50: mol_type = other DNA
caataatttcctaccaaaaaaaactaactcttaccactttaaatctcaac

SEQ ID NO: 23210 - DNA, 50 bp, synthetic construct
  source 1..50: mol_type = other DNA
ctacctatttccatttctccaaacctattatttaaaccttcrataaccac

SEQ ID NO: 23211 - DNA, 50 bp, synthetic construct
  source 1..50: mol_type = other DNA
attcccraactacctatttccatttctccaaacctattatttaaaccttc

SEQ ID NO: 23212 - DNA, 50 bp, synthetic construct
  source 1..50: mol_type = other DNA
caataactaatttcrtcctctactttataaaaaaaaccttatcaattccc

SEQ ID NO: 23213 - DNA, 50 bp, synthetic construct
  source 1..50: mol_type = other DNA
aaaacaaacaattcraaaactaacaaaacccttcctacaaaacaaaaaac

SEQ ID NO: 23214 - DNA, 50 bp, synthetic construct
  source 1..50: mol_type = other DNA
aactccaataaaacaccacatctctaatctctaccaaaaattcctatctc

SEQ ID NO: 23215 - DNA, 50 bp, synthetic construct
  source 1..50: mol_type = other DNA
taatctctaccaaaaattcctatctcractccttactatttcaaaaccac

SEQ ID NO: 23216 - DNA, 50 bp, synthetic construct
  source 1..50: mol_type = other DNA
raaacraaaccttaacccttaacaacaattataacraaaaaaattaaacc

SEQ ID NO: 23217 - DNA, 50 bp, synthetic construct
  source 1..50: mol_type = other DNA
ctcttaacttttccctttaaccttaacacttttaaaattatctctaaaac

SEQ ID NO: 23218 - DNA, 50 bp, synthetic construct
  source 1..50: mol_type = other DNA
atcatttaaaatcaacaaaaaccacratattataaatactaacaaacccc

SEQ ID NO: 23219 - DNA, 50 bp, synthetic construct
  source 1..50: mol_type = other DNA
aataacaaaaaatccaaatcttaactacrcccttactataaaaactttcc

SEQ ID NO: 23220 - DNA, 50 bp, synthetic construct
  source 1..50: mol_type = other DNA
aaccacaacttctaaatcataaacattaatctcactaccactctaatcac

SEQ ID NO: 23221 - DNA, 50 bp, synthetic construct
  source 1..50: mol_type = other DNA
aaccctaaaaaatataaccaaaaaaaatcttcrataaaaaactaatctac

SEQ ID NO: 23222 - DNA, 50 bp, synthetic construct
  source 1..50: mol_type = other DNA
taacaatcttctatactctcttatcttatactccccaaaaaccataacac

SEQ ID NO: 23223 - DNA, 50 bp, synthetic construct
  source 1..50: mol_type = other DNA
cttatcttatactccccaaaaaccataacacraccctaaaataatattcc

(The sequence listing continues in the following parts.)

1. A composition comprising 1,000 or more probe oligonucleotides, each of the 1,000 or more probe oligonucleotides comprising a distinct sequence capable of hybridizing to a CpG site provided in Table A.

2. The composition of claim 1, comprising 10,000 or more probe oligonucleotides comprising a distinct sequence capable of hybridizing to a CpG site provided in Table A.

3. The composition of claim 2, comprising 30,000 or more probe oligonucleotides comprising a distinct sequence capable of hybridizing to a CpG site provided in Table A.

4. The composition of claim 1, wherein the oligonucleotides are deoxyribonucleic acid (DNA) oligonucleotides.

5. A device comprising the composition of one of claims 1-4, wherein the oligonucleotides are displayed on a surface of a substrate.

6. The device of claim 5, wherein the oligonucleotides are tethered to the surface of the substrate.

7. The device of claim 6, wherein the substrate comprises one or more array locations and the oligonucleotides are displayed on a surface within the array location.

8. The device of claim 7, wherein the substrate is a microtiter plate and the array locations are microtiter wells.

9. The device of claim 7, wherein each assay location comprises a plurality of discrete sites for attachment of oligonucleotides to the substrate.

10. The device of claim 9, wherein each discrete site is a bead well within the surface of the substrate.

11. The device of claim 10, wherein the oligonucleotides are tethered to beads and the beads reside within the bead wells on the surface of the substrate.

12. The device of claim 11, wherein each of the probe oligonucleotides are tethered to a separate bead.

13. The device of claim 9, wherein each of said array locations comprises at least 1000 discrete sites per cm².

14. The device of claim 9, wherein each of said array locations comprises at least 1,000,000 discrete sites per cm².

15. A composition comprising 1,000 or more probe oligonucleotides, each of the 1,000 or more probe oligonucleotides comprising a sequence selected from SEQ ID NO:1-SEQ ID NO: 53,840.

16. The composition of claim 15, comprising 10,000 or more probe oligonucleotides, each of the 10,000 or more probe oligonucleotides comprising a sequence selected from SEQ ID NO:1-SEQ ID NO: 53,840.

17. The composition of claim 16, comprising 30,000 or more probe oligonucleotides, each of the 30,000 or more probe oligonucleotides comprising a sequence selected from SEQ ID NO:1-SEQ ID NO: 53,840.

18. A device comprising the composition of any one of claims 15-17, wherein the oligonucleotides are displayed on a surface of a substrate.

19. The device of claim 18, wherein the oligonucleotides are tethered to the surface of the substrate.

20. The device of claim 19, wherein the substrate comprises one or more array locations and the oligonucleotides are displayed on a surface within the array location.

21. The device of claim 20, wherein the substrate is a microtiter plate and the array locations are microtiter wells.

22. The device of claim 21, wherein each array location comprises a plurality of discrete sites for attachment of oligonucleotides to the substrate.

23. The device of claim 22, wherein each discrete site is a bead well within the surface of the substrate.

24. The device of claim 23, wherein the oligonucleotides are tethered to beads and the beads reside within the bead wells on the surface of the substrate.

25. The device of claim 24, wherein each of the probe oligonucleotides are tethered to a separate bead.

26. The device of claim 22, wherein each of said array locations comprises at least 1000 discrete sites per cm².

27. The device of claim 26, wherein each of said array locations comprises at least 1,000,000 discrete sites per cm².

28. A method of detecting the presence of nucleic acid sequences in a sample, comprising:
(a) contacting the composition of any one of claims 1-4, the device of any one of claims 5-14, the composition of any one of claims 15-17, or the device of any one of claims 18-27 with a nucleic acid sample; and
(b) detecting the binding of one or more nucleic acids comprising the nucleic acid sequences to one or more of the probe oligonucleotides of the composition of any one of claims 1-4, the device of any one of claims 5-14, the composition of any one of claims 15-17, or the device of any one of claims 18-27.

29. A method of detecting the methylation status of methylation sites in a nucleic acid in a sample, the method comprising:
(a) treating the sample to differentially modify the nucleic acid at methylated and unmethylated methylation sites to produce a differentially-modified nucleic acid;
(b) amplifying the differentially-modified nucleic acid;
(c) fragmenting the differentially-modified nucleic acid into differentially-modified oligonucleotides;
(d) contacting the device of any one of claims 5-14 or the device of any one of claims 18-27 with the differentially-modified oligonucleotides, and allowing the differentially-modified oligonucleotides to hybridize to the probe oligonucleotides, thereby forming probe/differentially-modified oligonucleotide complexes;
(e) labeling the probe/differentially-modified oligonucleotide complexes in a manner that is specific to whether the differentially-modified oligonucleotide of each complex corresponds to a methylated or unmethylated methylation site;
(f) detecting the labeled probe/differentially-modified oligonucleotide complexes; and
(g) analyzing (1) the type of labeling and (2) the location of the probe/differentially-modified oligonucleotide complexes on the surface.

30. The method of claim 29, wherein amplifying the differentially-modified nucleic acid comprises PCR amplification.

31. The method of claim 29, where treating the sample to differentially modify the nucleic acid at methylated and unmethylated methylation sites comprises exposing the sample to bisulfite that converts unmethylated cytosine to uracil but methylated cytosines are protected from conversion.

32. The method of claim 31, wherein amplifying the differentially-modified nucleic acid converts the uracil generated by bisulfite conversion into thymine.

34. The method of claim 29, wherein fragmenting the differentially-modified nucleic acid comprises site-specific fragmentation of the differentially-modified nucleic acid.

35. The method of claim 34, wherein the site-specific fragmentation is by restriction endonuclease.

36. The method of claim 29, wherein fragmenting the differentially-modified nucleic acid comprises random fragmentation of the differentially-modified nucleic acid.

37. The method of claim 36, wherein the random fragmentation comprises chemical, enzymatic, and/or mechanical fragmentation.

38. The method of claim 29, further comprising a step of isolating the differentially-modified nucleic acid and/or differentially-modified oligonucleotides from reagents for amplification and/or fragmentation.

39. The method of claim 29, wherein labeling the probe/differentially-modified oligonucleotide complexes in a manner that is specific to whether the differentially-modified oligonucleotide of each complex comprises performing a single nucleotide extension reaction with labeled nucleotides.

40. The method of claim 39, wherein the labeled nucleotides comprise happens.

41. The method of claim 40, further comprising contacting probe/differentially-modified oligonucleotide complexes following the single nucleotide extension with antibodies capable of binding to the haptens, wherein the antibodies comprise detectable labels.

42. The method of claim 39, wherein the labeled nucleotides comprise detectable labels.

43. The method of claim 42, wherein the detectable labels comprise fluorescent labels.

44. The method of one of claims 28-43, wherein the nucleic acid sample comprising genomic DNA.

45. The method of claim 44, wherein the genomic DNA is human genomic DNA.

46. The method of claim 45, wherein the human genomic DNA is obtained from airway epithelial cells.

47. The method of claim 46, where the cell are obtained from a subject having or suspected of having asthma or allergies.
